United States Patent Application Publication US 2015/0376612 A1 - sequence listing, part 56

SEQ ID NO: 132028 - DNA, 1046 bp, Homo sapiens
ggtccctgagagccggccttggccagccctcccccgggccccaggactgctgccttgaagtgaagcctgtcccagagggcctggaatgcaggggtgcgaggcagaaggtcagtgaagggttttggaggagtcaccctgaaggctgaggctctgctgaggggatttaatttttttgttgttctgagatttgtagatttgccggtgccctcaccagctccagcaagttcattaatctgaactgaagctgaaatgtgacttatatccctaactgcttgtcactttttttctctttccaaattcatttgacatgaaagtgcgaaataaacagaagctgctgtgcttaagcagatgaatcggaggcttttccatctgactacaaatggtcctgtcacgaggctgcctctcactgggctgccttattttattttattttagtttgtgtctgtgcggtaaatcttaagtaatctgtgcagttttgacgagagttaggccaggattttgaagggctctgaaacgcttctccaaagtggcgtctcattaaagaggaattcagcctggggacgggaggggtcctcactgcgatgctgcgctccccacgcgtgtctccttaatgagcaggtgtgcctgcacagcctcctgggacgccagccaccctgccccacctcctgcccgtcttctggtttgggcactgtcttcgtcggctggggccgtgtcacacagtagcacagactggggcttcagcatcagacgctgacttctcacagtcctgggccggacgtttgagaccaggttgctgggcagacttggtgtctggcaagggccttcttccgggtttacagacagctgtcttcccacgcatcttcacatggcccagggagaggcagggagagcgtggtgagtgcgtgtgcactctggggtctcttatgaggatgctcgtcccatcatgagggccccacctcaggaccatttcacctcatcacctctgaaggccctgcgtcctcacgccatcccgctggggtcagggcttcagcatcgggtttcgaggg

SEQ ID NO: 132029 - DNA, 1050 bp, Homo sapiens
tataagcatctcgggggctatttctgcaaatttatgaagataatttttattctctcgataaggttaaatttacacctgctatttccatattaattcacattgctaagtggatctaattttcttccgttcttctatctggtgagcatggcctttcctaatgcaatttcccccacactaaatcactgtgatcgggagtcatgatcgagctaaattaacttaaattaatttacttaataagagccccggatcatcgggaatgaggttcagatttatggattctccgctcctgcttcccgtcctgtggtcgtcgtcagcccgacgtcgagggtccacctctcccaggggtgcggctcggggccaagtgatgattttcctcagggcggacccagcagggcctctccttctggattctgaaggccaagaaggcgtctggtttgggtccggctggtctggttcctgtagctgggcctgcccaggagggccctgatggtgttgttgcacagaaacaagtgcccatgccctggggctgaggaggccgggaggaggaggaggtggcagccggcccagcgcccagggcctcctgtcggcgccatgtggctgagagcagcgggtcagctgataggctccctccaagttccctgtccttccaaagtgaagcctggccagctgccctgcagggagcggccgtgactctctgagtgccctggtgtaggggctgcaccacaggcatgggtgggcaggaggtggagcaggcatcgcctttgatggatcaagggccccagcaccagaagcctgaattcagcccacccctggaggccctggctgtggttggtggccatgggctccaggcctcagtgtcttctccgtgtgtgaaggccaggctgagtccgccccaggatgcacatgtggctgagggggtgtgtgaggggccctccttgctttcctgaccgcctcaccccagtcctgttccactccttgccaggcgtctgggacccttcgggacacgaaccctgggcttgtggatagggtgtgggagtggagtggggaggg

SEQ ID NO: 132030 - DNA, 1005 bp, Homo sapiens
tgtccgggggccgggtgaactcaggtttctggggatggcacagggcctcctgccctctctttaggccgtgtcctgcttgcctgtggggcattcacggccgtactggaaggtgccatccccagtcggtgctgctgcccggcccctcctgcctcgtgctcagggcaccggggccagagacctgggctggcacagagttggcaccgcctcagaaactgcaagaggactggaaagacacagaaacgggtcacagacaccaggaaaagtaggtttgcaggcgtgcaagctgccgttagtcagagaaggacataggcagtgtggagatggtgaggtgccagggcagctgttgataaaaagcagatcaggcagtgtacaaagaaggtggaatcttcaggaattagggatggggggcctgactggccggaatgccctcagcccacagcccacagccatccgtcaccctgggcagcgctgcagtggccccgggggctgcacctggactagccccttccctgctcgctctccttgcatgcagggtctgggctgccccaggcctgttctgtgggtctggcccatcctggccgctcgctgctgtcacttctcccgggaacatggtgtggtgcaaggtgtctgtcaggcaagtcaacatcatcccttcgtgggccccacgccgtcctgtctgctgctgtgggggtggctgtggctgattccagcaaattccgtgccagtcttggcctcctgctcagctctccccgctccccagctgggatgaagcctgcggaggcttggggaaggggcttctagaaccagggtattttctcgggctggcagcccagcagtgacagttttgctgtctttgcgctgggcccgtctgcaccagggcccactctcgtgcctgctatttctggaggccctggtgctcccatctctgtagcccactgtgcataaggcccaggggctggtggatgctggcctggggcacggtcagaggccttctgggtctccacc

SEQ ID NO: 132031 - DNA, 1033 bp, Homo sapiens
tcgtgatggggacgttctgcctgagctggccagaatcaggcaggagccctacccgaatctttccctccaaacagtggaggggcctgggaggcccgttcgtggggagagcctgagcctcccgtggtgcccactatgattccacttttccgcacaactgcagggtccccacagcctgccagtgccgtctgccggaagctgatgtcacgcatgactggcccggtttgtgtgctcatcagtactaatcactgcagcccctcgctgcgccccaggggccctgccgatgacctgcctggctggcatgatggagggccgaggcgttgcagcggggggagtgcgtatgcgccacaggctggctccatcctgccctgctcggtgtctagatgagaaaagcagctgggaactgcccatgtgtggtcggggaagagaaaagcagaggctgggcttccggatcggggagcgaggcgggagccccatggcaggcctgggccccagggactgaccctcatgtttctcggaacccagcagtaaggactggtgaatccagacggtgggtgcaaggcatggcacgctccctgagctcccagcattcacgggaggggtgtgtgtctgcaggatggtgggggcactggccgggcacaggccttgtcctgcaggagcagacacccaggaccacagcagatgcggcggccgggcctagccgcacatgggcctgacagggaggggactgaggagggcagagagaagaaacagacaaagaaccaaggaggctttcctgtcctgcctcggagagtggccttggagcgtggccatgcagcccctcactgcaccaggtgtcagtagaaacgaggctgttggtcctgcagatgggtgcccgcaggtgaacgtccaggcggtgagcccagctcctgggctgggctgcatttgaactgcatggcctggctctgcgtgaaactcgagggcctgagggggcgcgagagcagggtacaggtttgtggggtgagcaacccggccccgtcctggctgctaggggcga

SEQ ID NO: 132032 - DNA, 1085 bp, Homo sapiens
gaaattccgtcacaatcaacattaagctttattcattgtgatggctaagagccgggccatttctcctctttttcttaactggcaaaattaatcagggaaaagattttaaacatttacccgtgcgaaagaggtcagccctgccactatattgctcagcagataagggggctaataaaaagaaaattgaattactaatgatcaccaagaacagagtatataaaacctggccatcgccagttcaggaaaagggagaatcaattttcttgggacaaggtgcgttcattttttattttggcgcatattatcagcaatttaatttgagaggcataaacaggaggaaacagttagggaataatgagcctggaggtgtaaagtgccacaggatatatgctgtacacaatttatttggcacaacagataatcgctttaattgaattcaaaagtgcattgttcagcagcactgtggccgctcacgcctggggactgagactgtttggaaggtttcagcctgactcttcggtgcctctcctcccctccctgcctctcccggccctccgaagtcctctgggcctggagtcagacctcggctgggggcggggcaggggattcctgggggtctcttcctctgctgtcagtgtgccccttgccttccgtttcttccttcccttttctcctggggatgggtctgttggcagctgggggatgaggatgtgagacactggccgggtgccgaggctcatgcctggaatcccaacactttgggaggctgaggcgggtgattacttgaacccaggaggtcaagaccagcctgggcaacgtggcaaaaccccatctctacaaaaaatgcgagaattagccgggcatggtggcacacgcctgtagtcccagctactcgggaggctggggtgagaggattgcttaggtctgggaggttgaggctctagtgagccatgatcgcaccactgcactgcaacctgggtgacagaatgagaccctgtctcaaaaaaaaaaaaaaaaaaaaaggagatagaagacagccccagaagggtggcctgggcgagtaatgtttgctggaggctgcagta

SEQ ID NO: 132033 - DNA, 1520 bp, Homo sapiens
gtgctccccttgcccccccagtggtacaggagctgcagcaggccatctccaagctggaggcccggctgaacgtgctggagaagagctcgcctggccaccgggccacggccccacagacccaggtgaatgctctccccacgcctgacactgcaggggaccacgtggccctgctggcttccacgtcgccctgtgggctggccccagcagcagtgatgagctggcagccaggatactggagtcctcaggtccccaggaaggtttacagttagccctgggcaggtggaggcagtttttgtctttcctggggccctgcatgtacacagctgcggtacacaggggctgcccttcctccagtcaaaggagggaggagggccaggaggtggccaggcagctctgggccctggttggggcgtctcagccgtgcctcctgtcccttcccctgtggcagcacgtatctcccatgcgccaagtggagcccccagccaagaagccagccacaccagcagaggatgacgaggatgatgacattgacctgtttggcagtgacaatgaggaggaggacaaggaggcggcacagctgcgggaggagcggctacggcagtacgcggagaagaaggccaagaagcctgcactggtggccaagtcctccatcctgctggatgtcaagcctgtgagtgggcggggtggggcttcagggggccaggcactgccctggtgcccgcctagccggctcagcctgtgaccctccccctgccctctgggttctggggagactttaaagccgagtttagaagtcttgggataaacacaaacttggaggcaggaaggtgtgaatttggattgttttctgtgggccctttaaggaaacagaattgtggacacacagtggttgagggtagggtgcatgcaggtacttcctgggtgttctgagggtggctgaccccagcttttcctcccctttccccacagtgggatgatgagacggacatggcccagctggaggcctgtgtgcgctctatccagctggacgggctggtctggggggcttccaagctggtgcccgtgggctacggtatccggaagctacagattcagtgtgtggtggaggacgacaaggtggggacagacttgctggaggaggagatcaccaagtttgaggagcacgtgagtgagccggccggggagaggaggggagaggagactggggaccctggcccataccctgcactccaccccacggcagtggggagcgagtcccagagtgaaccccacctcagaggaggctcctggctccgagtgggctgtaggggaacagccctgaccgtcaccctccgcctctcctcaggtgcagagtgtcgatatcgcagctttcaacaagatctgaagcctgagtgtgtgtacgtgcgcgcgtgcgtgaggccctgccacgattaaagactgagaccggccctctggctccgtcctggtcatttcctgctcgtacctggcctgtctccctccctgtctcagccccatctctg

SEQ ID NO: 132034 - DNA, 2045 bp, Homo sapiens
ggacgattggacttggaggggaatacagagggcatggaagtggcgaggctggcctgttggcgagggtgtcctggtggtggggcgggctgagtcagggaaggactctgaaggtcccaagcagctgctgaggcccccaaggaagtggttccaaccttggacccctaggggtctggatttgctggttaacaagataacctgagggcaggaccccataggggaatgctacctcctgcccttccacctgccctggtgttcacggtggcctggtccctccttgccgagagagtgtcctgggtcagggacgcagaggacgctcacagactccagccctttgttaccgagaggacacttggcaaggtccagcgatggtccggagtccacacacagactggcggcagggcaggagggggacagttctgttgtgcttggttggacagtaagagggtcttggccagtccagggtggggggcggcaaactccataaagaaccagagggtctgggccccggccacagagtcatctgcccagctcctctgctgctggccagtgggagtggcacgaggtggggctttgtgccagtaaaaccacaggctggatttgcctgcgggccatggtccctgtctagggcagcaattctcaaccttcttgctctcaggaccccaaagagctttcattgtatctattgatttttaccacattagcaattaaaactgagaaatgggccgggcacggtggctcacgcctgtaatcccagcactttgggaggccgaggcgggtggatcacctgagatcaggagttcaagaccagcctggccaacatggtgaaaccttgtctactaaaaatacaaaaaattagccaggcacagtggtgtgcactggtagtcccagttactcgggaggctgaggcaggaaaatcgcttgaacccaggaggcggacgttgcggtgagccgagatcgcgccgctgattccagcctgggcgacaagagtgagactccatctcacacaaaaaaaaaataacaaaaaaactcagaaatgctaagtgtacttatttgttgaagaaacttgttacatattactaacatcttttttttttatgagaaatacttttcccataaccaaaaaattcagtgagcagaatggccttgcttgaggtttttgcaaatctctcgggtgtctggcttagtgggaggcagctgggccctcatacctgcctccgcacttcagctgtttgacataaacccagcttcgtgtgagtgaaagggaagggcctggggaccctcagaggttctcggaccacactttgagaactcctcgtctggaagacaggcctggggatgccatgtggggtgagggcttacgggcttggtgtcgctttgtggagaaccgctggtgtctgaagcgggtgtcagccccactgcaccttggtgcttctgggctgtcctgatgccgaggcccacttcccagccatgctgactttgcctctttcccctcccagcagaaaaatggctacaaacttcctagcacatgagaagatctggttcgacaagttcaaatatgacgacgcagaaaggagattctacgagcagatgaacgggcctgtggcaggtgcctcccgccaggtgagagctgcacgtggggcggctgggcggctctgctgcccgacaggagtggccggggcacacaaagcggattcagccaggccaggaaggcagaggcaccctggcccagtggctctgctgtgggtgctgggagtggggtctcggggcaggcggccttggccgggcccccgggccgggtctgctcagggccctcctgccggcgcctgtgcacttggtgtggggccaggcctggcactccttcccccgcagacatgggcgcctttgcctgtcgtcacagcctcaggcatctcccgcttttctggcccgccaagctctcgttctgtgcagtactttcttgctgtctctatgtgagggttcatggggttttttggtttgttttttaattaaattcttttttaataataaaaaaaagactggttctttct

SEQ ID NO: 132035 - DNA, 1060 bp, Homo sapiens
cagggcctgcctaggctccaactgacagtaatcccaagagctcccctttcaggggatgacggagtgacgtcacctgtgtggactcagctgccacctgggattgtggtggcggcgggtctgtctggcgctcagcttccatctccaccagtgtcacctccacaccacctcgccaagcagcttctggaaaggcccccggccgccccgggctgacctgctgctgtgtctgacccggttagtctttctggctgcctctaaccttgctgcttttccttcatgctgtcctaggaggccaaagcaaagtaagtactcgcctgtcctcatgccccattccccttcatttgaccggggaacccccagccctcgctgcacctgagggaacccagcaccacctgcgcatggcccagtctgcccagagggcctcagtttcccatctggaaagtggaggaattgggttttctggatggggcagcagcaggtgggcaccctgtgtggccgtgagcagggtcctgtcctgggctggcgggtcagcagctgacatgcggctccctgcagggaacaggtggcagtgccaggtctcggtaggagccttgaagtggcttcccctccctgagcggcggcttctgcccggagcccccaagaacatagtctgaggccactttggccaataaagtctggtagggcatcaacactgggggccagctcagtggcactgctgatgggacctgcacggctccatgggagcagagagactggtgggggtaccaccgcacgatgtcacaatgccctgtctcctgggctcttgctcccaccccacccccaacccacaacccctgcctctgcccatcagcctggccttggtaagtgctgccccagcctggggaaggaatgagcaggggagcctagggagcgtcttcatgggccctgtggcctcccatgggccccggttcctcgttggtgccattagaacttgttgctgggactgcgggattcgggccacatgcccgcaaagaactccatgttccacttagaggctgcagagtgcagtgccaggggtgccttc

SEQ ID NO: 132036 - DNA, 1049 bp, Homo sapiens
gcccgggcggccctccctttcatcagtcttcccgcgtccgccgattcctcctccttggtcgccgcgtccttggctggcgtgtgagtaccgcggcccccgccggaaggagtcgggcgcgacagagacgcccgaggggccgggagggcgggcggcccgggctgcgccagaagctcgcgccgttagggactgaggcacaagtgcgccagcgcgggcttaggggccgtgggccaagtgcggcacttggggcgagcgcagagaggcggggcgacggaggccacgtggccggcttggagggcgtccgcgggacgggggcgccgggagcactgtctcacggcgcatcccggtcgtggaagcccctcggccaggctgctggggcctaaggcctgtgtttgctgccgtctccgtgggagaccagacatctgccccagctgtttctctggcctgcagaccttcgtacaccacgtctttgtcaagcaccagttactgcacgcatcagctgagcacggaggggataggcacggacgcaacacttttggaacttagacgctagtgagcacggaaaggaataagcctgtactgtgactgggtcaaaatttctgtctcttgatttggatagggtggtcgggcagtctctgaagggggcggggatgctgttgctaagaagtagtactttcagaggctttaagtggaaggaagaaggcaaagggggcggagtgggttggggacctgatgagacgtcaggattggtttccagaatgaaggaccgcctggcagcagaagaactgtgtagctaaacttggggttgtccctgcccgacagggcggggtgcttcttaagttgacactgcctgcggctcacctcccagggaggcaggccaggccatctcacctgagcagcctccttctacagctccgcccaccccgtcatctggaccccatgagccttaagcagctggctcgcaggcagttggttacttccggagcccgtgtgtgcccagccccgttctgggggtgggggatgcagctgaggggctgggcaggtgtggaagg

SEQ ID NO: 132037 - DNA, 1031 bp, Homo sapiens
gggctgggtggtagctcaggacccctgcggcgctgtaggctgagagctcccaggggaacagggctgcgacgagggagtgcctcggtccagctgggtctttctggttgccagtggactatgccccactctgagggcctcactctgtgccagttgccacagaagagtggggctccaaaggatgagagcgtgatgacctcagcctcccactgtttgacattacaggtgcaactgacatgggtgaaccccagggatccatgcggattctagtgacagggggctctgggctggtaggcaaagccatccagaaggtggtagcagatggagctggacttcctggagaggactgggtgtttgtctcctctaaagacgccgatctcacgtgagtgagcccatccccagatcagcccttcctctccatcctaccccccaccctagaactaagagttccaggctgggcatgttgctgagtctaacagtagctgtgtttctgggtccttcctgccaggtggctggcctggcctgggtgtgcttggctgtgttcctggaaaaacaaacaccctcccatctcttcctggaagcctgcaccctcatatcagccaggccctggggccaccctcccttttgactgtccctcctgccatagtcccacccagttcctgcacttggcacccaaccctggggtgctggttccctccagagcctcctgacagcctggcttcctacagggatacagcacagacccgcgccctgtttgagaaggtccaacccacacacgtcatccatcttgctgcaatggtggggggcctgttccggaatatcaaatacaatttggacttctgggtaagtgagggtggccccagcaagcactggaaaccaggatcccaggttctgggaacttcctggcgggcttcccactctcacaggcccacattcccaccccaggaagtccctgaggatcagggcttggcacagcctggtgggggcagcccctgagggacccccagtcactcacacttggtgctgtggacaga

SEQ ID NO: 132038 - DNA, 1890 bp, Homo sapiens
aattcagaccttcttctgcttcagagagagctcatagagggggaagccaatccttgcaatatctgtggcaaaaccttcacgtttaattcggacctagttaggcatcggatttcgcatgctggggagaaaccttacacgtgcgatcagtgtgggaaaggctttggccagagctcacaccttatggagcatcagagaattcacactggagagagactctacgtctgtaatgtgtgtgggaaagacttcattcactattcaggtctcattgagcatcagcgcgttcattcaggagaaaagcccttcaaatgtgcgcagtgtgggaaggcgttttgtcacagttcagacctgattaggcaccagagagttcacaccagagagagaccttttgaatgcaaagagtgtgggaaaggcttcagtcagagctccttacttattcgccatcagaggattcacacgggagaaaggccctatgagtgcaatgaatgtgggaaatccttcataaggagctcgagcctcattcgccattatcagatccacacagaagtgaaacagtatgaatgcaaagaatgtgggaaggcattccgtcatcgctcagaccttattgaacaccagagaattcacaccggagagagaccctttgaatgcaatgagtgtgggaaagcctttattcggagttcaaagctcattcagcatcagaggatccatactggggagaggccttacgtatgcaatgagtgtgggaagcgcttcagccagacgtcaaacttcacccagcatcagagaattcacactggagagaaactctatgaatgtaacgagtgtgggaaagctttctttctgagttcataccttattcgacaccagaaaatccacactggagagagagtgtatgaatgtaaggaatgtgggaaagcgtttctccagaaagcccatctcactgagcaccagaagatccactctggggacaggcccttcgaatgtaaagactgtgggaaagccttcatccagagctccaagctgcttctgcaccagattattcacactggagaaaagccctatgtgtgcagttattgtgggaaaggctttattcagaggtcaaacttccttcaacaccagaaaattcatactgaagagaagctctatgaatgtagtcagtatgggagagattttaactcaactacaaacgttaaaaataatcaaagggttcaccaagagggactctccttgagtaaggcccccatacatttgggtgagaggtctgtagataagggggaacacacaggtaacttataaaataattactttcccgcccagtgagtgatgtttggaaatgcgtggaattaggattcatgtggtttctaagatttggacatgtcagaattttgtgagtcatggatggggctgcttttgcagtgggtgccacctgccactgtgcagccctactcggctcagcccttctcctcagctgtgagcactgtcctcaggagagtcacagggcttgacacctgactctgagctggaacagtaggggcagggagaagacaggtctcaagaaaaggtttttaagaagtttcatccccagttaagcagagtccatccttgacttaaatcccttattacagcacaactgtgtatctaatcttacgatttaggagaatgttacctaggacattttgatgtgttaagttgaagaaaggtaactcgtgtatgaaccccgagccatttccctgttgtcctgaggaggaactccaggcctcccatcgtgtgccctaaggcctcctgcgtcctggagccctgcctcccactgcctgacttcctgccacacggttaatgctgcagcaacaccgactgcttcatcttccctgtgctccacgtggcttcctacctctc

SEQ ID NO: 132039 - DNA, 1039 bp, Homo sapiens
tgggcaccccaccagcctgggttcattgttcagataattacctctcatcctgcccggtggcccttggccagctgagggcttctaaccatcaccaaacagctagcagacggcggaaggtgctgttaaaccatagcgactgaggcatgaggtccagacgctaaaggcttgtgactttctcccctgcccagggcaacaaccccgtcccagggcagaactggagcctggcacttggccctgacagctgccctggaatgggggcagctcagccgtctgtagggtggaggggattgaggggcccttgccgtgccccaacctggcccaccctcatccagggttctctgccctgcacctgcctcggtttcccccttatggccagccgttccacacctcttctgtttggtcccttcttcctgcccatcttcccagatgtggcgccaactccctaggatggactagcttgtttcacagtggtcgtgggtgatccagacacctcccgggtgtggaggggaggctggacaatggtgtggggacagcaggggcctctcctctccgtcctgacccgcccctgcaggtggtggccgtggtgatggacatgttcactgatgtggacctgctcagcgaagtgctggaggccgcggcccgtcgggtcccagtctacatcctgctggatgagatgaacgcgcagcacttcctggacatggccgacaagtgccgtgtcaacctgcagcacgtggatgtgagttcccgggagtgggagattggggaggacccgtgggagagatctgactcccctccctccccagttcctgcgcgtacggactgtggcgggccccacctactactgccgcactgggaagtccttcaagggccacgtcaaggagaagttcctgctggtggactgtgccgtggtgatgagtgggagctacaggtgcgcccgcggggctccctcacccccttctctggggcctcctcctgtaaccccagcaccccctttccacaccagggccctcctcgccaggagcccttgtcctgtagaccc

SEQ ID NO: 132040 - DNA, 1435 bp, Homo sapiens
cggccgcagggcacgggcgggtcggggcgcgggccgggggcgcgggctggggctggcggcgggcgcggggcgcaggaatgcgggcgcgccgcgggtggggctgccccgcccccaggtgctgcccgggcaggcaggaggcaggagcgacgggcggggcgggggcgggcgcgtgaatcaggccgggcgggccgcggcagggagtggctgccggaccgaccggaccgcgaggccgctgggcggcggtcggctcctgctgcccctgtgccgagaccccgcgcacctggccaggtagggcccccctcccccggcccgagcggggcggggcgaggcggggggcgggcgccccttggcgcggtcccacttgggctacccttgcgcccacacctgggccggggccgcgcgacccagagaggggcggtgggagtggagcgcggccgcgtgcgcggggccggggtggcggggctgctcggacagggggcgccgctgtgcggatatggacgcgagcgcccccgcacgacgccggcccgaaaagagccgagggggaaggggcccgggatccgggtcgagcctgcccggccgtcccgactcgctcccgccctcgcggcctagctggagtctgggtgctgggcacggcctggacccttccctggggacatccgcccgggccgccgtggactggggtggccagggtgcggcctggatccccgcgtggcgagcagggcgagtgatgggagtgctgcccctcgcgcccacgttcctgggctggggtgggcggatagggcacccagcggccgcagccgcgagctcgtagggtgcactgaccccgttgggggctggggtgcccactccgcaagttatcactgagcgacttccggtctgtgagccccgtcctccgcaccccacctttccgccgcctagagcctccgcgccctcctgcgcccatcggaacttggcacaggttcaccccactttgtgtaggaactccagatccttccatggggtcctccttccagatactcaggaaccccacttcctgccagggtggagaggatggggtccttgaaggccagctgagggccctgacttcgagtcagaggtcaggggtcagcaagcagaagagtggattcgtgctgagtcattgcccatgggtgggttccgcgccctccctcccttgggcagacgtttggtaggcaaatgtgtgggcatgcaggccactggggtgctccatcttgggctcgggagtggctgcagccccgtccatagcccaggagacacgtacccatgaaaggagacgacgtgaggaatgaagcagttggaggtctgggcatcaccctgtgaggacgaggcatgtctgctgggagggctcctggccacgggggcttccactgtctggatggtccctgcccccattacacacagcctggagcctggacac

SEQ ID NO: 132041 - DNA, 1238 bp, Homo sapiens
cagggcctttgcggccctgccttcttccagacctgtctatgacatccaggtacctggcctccaggcctctgcatgcctgccaccctgtccgtgcctgccaccgcccccatccgctcccgcagggcctccccacgctctgccgtggccctgcctcttcaccccccctcccccttcagccgggctctgtgggcctcagggctgggagcccacccgtccacctgggtggtttggggcagggctggcaccggcctgaccaacactctccccatcacagtcaccggactttgctgaggagttgaggtccctggaaccatctcccagccctggtgagttggggccgggctggggtgagctcccaggagcccagctgccctcagctcactgcccacctgtccctgccctccaggcccgcaggaggaggatggagaagtggctctggtgcttctgggcaggccctcacccggcgctgtgggccctgaagatgtggcactgtgcagcagccgccgccccgtaaggcctgggcgccgtggcctgggccctgtgccctcctagaggagcaggcacctcccccagacttggggtgggggccctgccagctccagcaccacccttgccccaagtcttttaacctgggtgttagcattttaaagagaccccacaggagttctggcctgtgactaactaactgccccaccccagccgagacctcggcgagactgtaactagtgatgtttgtacaaccaaagactctattttgtggtttaaggagaataaagttgactacattttacctcccgtctgcctgtccatcccccacccactagcacagacccttcctgccctccgaggcgaggctgagctccgagggctgcaccctcaccgtccctcccacgtctcccgctgcgcctcactgcgcacgggtcggccgggcaggctgcccatccccagcagggcctcccccaagtgcctgcagacccatgtccgccggccggggcccgggactgccggagtcctggactggcacacgccaccgctgcccccacgcacgcagcacagatgcagcaccgcgccccggggcacacgttttattgggactggggccagcactagaggcctgtgcctggcagctgcacgcgcactgggagcagcacctgcagctgctcagctggcggccactggaccttggtgacgaaaaagaggcggaagtgctccagccgctgctcctggaactgcgtggg

SEQ ID NO: 132042 - DNA, 1773 bp, Homo sapiens
cagggctcatatgctgcgtctgctgctcagctctcctgacctttgcgtgggaactgctgctcctgggtgttggggtgggggtgtgggtcagtaacccagcgaccttaggtgtgtgttgggctgtgcagatgggccggaggtatccaggagcggggccatgtgtggcctggccgtgggggcatctgcttgcctcccgtggccagtgtgtgtcctggccctagggcttcccacaccgggtttcagaggacctggtaggggaggggtcggtgcccacgaggaaccttgtggctaaaggtctcgggtgatgtcagcgcctggggcctttcccctcgccctgtgcctcagtctccccatcctggagggagcgtgtggagcccccagcacgtggctgtctgtggcggcactgggtcctgaatacgcacgtggtccctggcccgcaggtgaatggtgtggctctgcagggcgccgagcaccacgaggccgtggaggcgctccggggggccggcactgccgtgcagatgcgagtgtggcgggagcgcatggtggagcctgagaacgcggtcaccatcacgccgctgcggcccgaggatgattacagcccccgagagcggcggggaggggggctgcgcctgcccctgctcccgcctgagagccccgggcccctccgtcagcgccacgtggcctgcctggcacgcagcgagagggggctgggcttcagcattgctggtgggaaaggctccacaccctacagggctggtgatgcggtgaggctggggcccagggccggggagggctgctctagagctgacagccgcactccagcctcaccggcagccctgcctcctccaccctcccctgcagggcatcttcgtctcccgcattgccgagggcggtgctgctcaccgcgcgggcacactgcaggttggcgaccgcgtcctctctgtgagtggggatggggccccgccccacccacccatcccccctgccccgccccgcgccctctgtccccttctgcccttgggcctccctgattcgggcacgctctcacagattaatggagtggacgtgactgaggccaggcatgaccacgccgtctccctgctgaccgctgcctcccccaccatcgccctgctgttggagcgggaggctgggggccctcttcctcccagccctctgccacattcctcaccccccaccgctgctgttgccaccaccagcataaccactgccacccccggggtgcctgggttgccgagcctggcccccagcctgctggctgccgcgttggaagggccatacccagtggaggtgagacacaagcccccacccaggcacccacccagcttcagctgtgggcactggccttcccaggacctgctctcttatggccttgcggcccactccaggtgggaagccggcctgctcgccctttcccctgcagctccttgaggctggggctctgccccacagccagactcctcagtatggtccccttgacacagtctcctggctggccacatggccacagtcagcgaggatattgtcctcacgctgcgtgcctgcctgggcagcagaacactggtggcgcagaaatccccgtgggcattagggcagcccccgcccgccatccccaaggaccgggacggactcttgggagccctcccacaccctttccctgtcctgaccgaggcctgtccttgtcccgccctaaatccccaggagatccgtctgccaagagctgggggccctctggggcttagtattgtcggaggc

SEQ ID NO: 132043 - DNA, 1004 bp, Homo sapiens
ccacgtggggggcatcccaggtggccagcctgtgagtcgggagctccgtcgaagcctgaccccacttcccgccgcaggagaagcggctgagtgccgagtctggcctgagtgaagactctcgcccatctgccagcacagtctctgaggctgagcccgagggcccgtcggctgaggcacagggtgggagccagcaggaagccacgactgctggcggggaggaagacgccgaagaggactaccaggaggtgtggattggcaggaaggaggcaggaggctgggcctgctgggtgggggctgcctcccctgcggggcctcagctgggatcggttttggtgcaggcagtgcctgggccctgctgatgcttcggggagctgccctgtacagagtggctacgggtggtgcagggccgtgctgctgggggtgccctggagagctgcctccctaggtggggttaaggtctcccctgacggctgggctcacagagcccacccccaccctggactctcttctgacccccgtgggctccctggtgtgaggccttggcgcaccccttcgtttccacctggggcgctgcgtgtctccaggatgagcccctggccttcagcttttctcagggctgagacacgcgcccctcactgggcagttagtgctgagtctttgtgtggcggggaggctttcggagcccgtctgtggccacactgtttagtagggtcttcctgtggaagcacagccacagagctggggccaccctcacccttttgtccgcacagcccacggtgcatttcgcagaggacgcactgctgcccggggatgacagggagatcgaggaggggcagcctgaggccccctggaccctgccaggcgggaggcagcggctcatccgcaaggacacacctcactacaaaaagcacttcaagatctccaagctgccccagcccgaggccgttgtggctctgctgcagggcatgcagcctgatggggagggccctgtggctcccgggggc

SEQ ID NO: 132044 - DNA, 1105 bp, Homo sapiens
gtcctctgtggccacctgcaggcctcgcgcgtagcactgtgcctgtggtactgtgttattgtggggagcgtttactgagttcttgctgcagaaccaggccaggcttgttgtcaggatgcagtagcagaggccagtgtgggcccctggagggtggcagaagtggttcaggggctgggtgggccctgaggtaagacacagggtaggggattggggctttgtctggtcgccagcaggtgtcttctcagagtggaggctggtgtgaagagtagagggaggcagccacagtgggcgtgtgtaccgtgtgtttctttcctttttttgcaaatggggtgtcgtggttagaccccaggacccggtgtgacctggagcagacagaggcctagggactcttgacttgtgacactcacgtgtccaggagctcttctctgctctgcagtggtctctgccacagagtccgtgtcctccctgcccacagccttttttccggctgctgaacttgcgcaagctgggcctgagcgacaacgagatccagcggttgcctcccgaggtggccaacttcatgcagctggtggagctggacgtgtcccggaacggtggggagcctgggcaggggctgggtggggtctggggagtgtccgctggggctgcagacggcctgcaggccatggcatctgtccactgtgaccctctgtgacagatatccctgagatcccggagagcatcaagttctgcaaggctctggagatcgcggacttcagcgggaaccccctctccaggtgggtggcagcctgtggtggggtcggtaggggctatgggtcccacagccctggactggtcatccgagggcctctgcttcctcccatccaggctccctgatggcttcactcagctgcgcagcctggctcacctggccctgaatgatgtgtctctgcaggcactgcccggggacgtgggcaagtgagtgccttctcaggtggaactagggtggggtgggggaccaggattggccctgcccctgctgccactgctttccttcctcttgccccagcgcctggtctctctttcagcctcgccaacctggtgaccctggagctccgggagaacc

SEQ ID NO: 132045 - DNA, 1050 bp, Homo sapiens
agtagcgcccgacacatggtgatgcagaagctgctccgcaagcaggaggtaggcagaggggcagggtggtggcgggggagagggtaggggggcggggccgcagtgctcagctgtcttcccctcggccctgccccacagtctacagtgatggttctgcgcaacatggtggaccccaaggacatcgatgatgacctggaaggggaggtgacagaggagtgtggcaagttcggggccgtgaaccgcgtcatcatctaccaagagaaacaaggcgaggaggaggatgcagaaatcattgtcaagatctttgtggagttttccatagcctctgagactcataaggccatccaggccctcaatggccgctggtttgctggccgcaaggtggtggctgaagtgtacgaccaggagcgttttgataacagtgacctctctgcgtgacagtggtccctctccccggacttgcacttgttccttgtttcctctgggttttatagtgatacagtggtgtccccggggccaggcgcgctctgcccagcccagcctacagtgcggataaaggtgcggatgctgctggccctgaacgtccgtgtgtctgccgtcggtcctgtcaccgatcctgggcgtgtgtccttagggggtctagggcgaggaggcagggttgggggggtctctggacctgcttcctgttggcaggaggggcctgccgtgggcgagacctgggcagggggttggcgccccgggccccgtcccgcgggtggcggcggctgggtgggcggggctgcctggggcgccaggctctcgcgcgcgggctcgcagccgtccccgcagggtggtgctgagagaaggctgggcaccgggacaccgcgacccgctggacagcgcgcgctgccagtgcttttgtgccgcagagccggccgtccaaggcgggcgggcgggcatggtcgcttcccgggaggaggctgtgcgttaagattcgtggccaaatgccgcggggccaggggccgggctgaagaccggagggcggagggcgccgcctctcgtggattgtag

SEQ ID NO: 132046 - DNA, 4487 bp, Homo sapiens
gtgaaggagaacttgagcttgctgctgatggattcccctgctcccttaccagggcacagactccatcaagatggagaacgggcagagcacagccgccaagctggggctgcctcccctgacgcccgagcagcaggaggcccttcagaaggtgagcatggacctcccagggcactgcaggtgtgggacagtcaactgggggcaggggcaggggcggggtgcggggcaggcctgtctcccatgggctgggcccccagtgctcctcactgccgcctctctcaggccaagaagtacgccatggagcagagcatcaagagtgtgctggtgaagcagaccatcgcgcaccagcagcagcagctcaccaacctgcaggtgagccccggccggagcctctaccgccctccccaccacagccaccatctcctcctcttcacgctcttcctcctcctgggcctgcggccgtccccgcaagctgttacagtgctccgattctcaaagactcatgctcgggacccccggggtcctctctgaggcacgagtggcccagcctttcccacctgttgctcgctggagcccctaaagcgccgcagcccctttcttggctgcttggctgcagctctacccttttccccttcctggtcttcacactgtggcctctggtctctcccgtgctccctgccccagctgtgcacagccgatggtggcagcatgcagggcgtgggcctccctgcccccgtggcctggataagactgctcaggccctcacccctgcagtgagtccagaccacctgggctcagccccaggactgaggggacagtctggaggcacctcccttggggccctgctccaggcctgtggccggaggctgcgataccttcgtgggaagaggccggtgtgaggccgacaggttcctgggcctcgagcctcacgcccccccgcccagccctcagacattcacgctaccaggagatgtcctggccattcactgtgctccactgccctcctccctccctcccttcctccctcccttcctttctgccccagccggcccagctgcaaggctgcagggcggggcacatggggcgctgcggcccccctgggcaggtgctggcggccggcagtgtgggaaggcaggcggcctccctggcagggcggggactccgggccttgccgctgtctgcgtgaggtgttgacgagagcgggagactgctcggctccaacagactgaactctgtctttactgtctttcagatggcagcagtgacaatgggctttggagatcctctctcacctttgcaatcggtcaatagaaatgctcacttcttccggggctcatgtccttagtcagggctagaggggggcagtgcagcccacgtgctggggaccttgctcccctggccggccctgcccgccagctctggacgagcgcagcagagcgccaggcgtggtggggccagtggtgtgggcacccacccgggaccgcccctggggaggcctccatctgctctgagggcccaccttaaaactaatcggccaggtaactgcggagggcagccggccagggcgggtagctgccagcaccaggcccgtctgcgcccacgccacctgcacgcacggggtgtgcccacggcctccagccccgtcagtctccaggctgcctggctcttgggttggggtcaggcccctgaggagagaggggtcctaactcatggccccatcagaccctggagggaggatggttggatggggtgggggtggggggacccaagcgagcaagggaagggcaagcagggccttgtgcctggctgtcagcaaggggcagaggccacgcagccagggcggaggaggcaggggccatggctatggccttggctgtggtgggcagaggagtgtgggaaggaggtgtccctcccttcccccagaggcaggctcaggaggaggccaggtcccatctcggggatcctgaggggaagatgtggacccttctctgggagcctctgttcagaggggtcatccctgtgtgtggctcccatggggcaacacacgccttgttctctctgggaagcatctgaatgggagcccgggctgggggtctggtcagggagagagctcttggcctgcctgggggtggggccccacactgaaaaggagacatggccctgtcttgggggaaccatgacctgagggacaggcctggtctcgtgtctggggagcctgctgagtgagggggatgtgattccacctttgggggggtcttgctctgagtggggagcctgaggtctgtcagggggcccagtgtgaggagaacacagtctcgttttcagggaatgcctggtttgaaggaagatatctcaccttgggaagtcccttgatgtggagagatgcttccaggcccctctccacgggatggggaggttcggcctgcattaggccagctgatgtctaaagagggaaactggtctctggccacaaggccttttgtggagaggggcagggcctggctccagctgtctgctttgcctgccctggcccacaggctccctgtggcccactgcgtgtggctctggaagtcccctgtctggcatgcctcctgtgaggtgacaggggcgagaacccgtccctgagggtgtggggaggtccctcagcgcaatagccaagctcacagccaaggccctggaccggccaggcctgtcaccagctctaaggagcctgggggcttctcgtagggtctctgctacctcatggtgcccccgggggccaggccagtggtctcgcctgggcccgctctctcggctgggggcacaggctccaggcagctcctttgtgaggagttgcagggcactgggaaggcacagcatgagcccccacctgagttggcccagcatgagcagctgctcctcgttctctcttcagggagcccccatctggctcctgagctcctcccctggggtctcttctgggcagtggctgccctgtcttctgacctcctctcttctggccaccaaaccagtgggtccctccagcttggatggttcctccttccctcttctgtcgtggtccttggctgggacagtgggaggatctcccagcccagcctgggatacccagcccccagactggaggggtggtctgggtgggagggcgcacagccctgcctcctgaccatctgtcggctttgctgccgcagtctgcctgggaccttggcgggctggggtgcgtcctgtcctgccgctgggcctggccttccttctttgggtggcggggtcctgcgacccccacactatgactgcagggatggagcccgcacctccctgtcatgtggggagccctccccacagcagggctgggtgggtgggccaggaggggagtgggctgcccagcttcctgccgcccctgacgagccagcggttctctcccctctgtcctgctgcagatggcggctcagcggcagcgggcgctggccatcatgtgccgcgtctacgtgggctctatctactatgagctgggggaggacaccatccgccaggcctttgccccctttggccccatcaagagcatcgacatgtcctgggactccgtcaccatgaagcacaaggtcagcaggcttggtccgccccggccacttcgggctcgcccccacccctgggctcgcgcagcctgacaggtgtgtccctgtgtctagggctttgccttcgtggagtatgaggtccccgaagctgcacagctggccttggagcagatgaactcggtgatgctggggggcaggaacatcaaggtgaggcagggagccaaggcctcgatcccgcaggcgtgcagggctgcccctccacggaagccttttgtggccgggcctgggttgaccggtctttccatctcaccgcctcttccccaggtgggcagacccagcaacatagggcaggcccagcccatcatagaccagttggctgaggaggcacgggccttcaaccgcatctacgtggcctctgtgcaccaggacctctcagacgatgacatcaagagcgtgtttgaggcctttggcaagatcaagtcctgcacactggcccgggaccccacaactggcaagcacaagggctacggcttcattggtgagctggggtggctgaggcgggatgggggccacctgaggctggggctggccctgctcactgctgctcctgcccacagagtacgagaaggcccagtcgtcccaagatgctgtgtcttccatgaacctctttgacctgggtggccagtacttgcgggtgggcaaggctgtcacaccgcccatgcccctactcacaccagccacgcctggaggcctcccacctgccgctgctgtggcagctgctgcagccactgccaagatcacagctcaggtgagggcccacacagctgtcggcttgagggtgggcgggctggcccctgattccttggagactgattcaaggtggtcttgagtagccagaccagggactgagcacggtgacct

SEQ ID NO: 132047 - DNA, 1045 bp, Homo sapiens
cggggcctggagctcgcgcgttcttaggcatgagcgtcttgcaggaagggtgggccaagcttcccagaactcgcagtgcttgaggagccagaaggacagatttcatttcagacctctgtgttttcatttaaataaaacagtgaagcaatgcgcaagtcaaagcacaggtctggttgggactcagccctccccatcttttttcggccccaggctccagagtgggtgcaggtgggtcttggtctgttcgatggcccagccttgggagcaggtcctctcagaggtggagctgggcctgtggctgggtagttgggttctttgtgcttctccatggtagcgcccgcctccagagcattccagtggggcctcagcaaggtggcctggcagcctcttggggctgggccctcctcttggtcccccaggcacactcagggggtgggactgggacatggtatgcagcttggatcctgggagatgtgggggctggtgctccctggcccttggctggcgcccagccggccattggttggtgggagaagggccttttgtttaccaagacaaagaggagattgaaaaatgtctgggggctgagggggttggcattgattaccatggtgacagcctgctctcaagtcccagcctctggctcttgggccctctttcccactaaggaggaatgggcttggggccagctgtgagggtggtgaggacaggcctagtgtgagccggactggggcacctggtgctgagggtggtgaggacaggcctagtgtgagccggactggggcacctggtgctgagggtggtgaagacaggcctagtgtgagccggactggggcacctggtgctgagggtgattaggacaggcctggtgtgagccggactggggcacctggtgccacccacagccagcctttgaccttcagggactggttggggctctggttgcctggggaggggtctccagggcttcctgccctttgagcctgggccagcatcccagcacttggcaggcaggagggggttcttggggcttgggccagcctgt

SEQ ID NO: 132048 - DNA, 2068 bp, Homo sapiens
tgcttcagctctcatgggaggttgaatggagcagctgaacttggctgacagtggcctggtggggaaggaagccagaagatgcagaagggcctcccctcccatgggcatgccttctgcctggtggctgcagaatgaggccggctgcctctttgcagcaagggtaggtcttctggatgcatcttttcactttgacgcatggctccgttctcttcactgacagccagaccagctctcatttggggtcatcacccttggggttccagttcctttcttctgtaggccccagcctgcaatgtcacctcatagagaggcccccggctgccatggcctggcatagctcatagccactcctttcttatcctgtgctttcttcgtagtgctggtaaaccacagaagtcatctttgattttggcattctttgctggcagctgacaccaggctcctgagagagacgtctttctctcttgtctcgtgtctgcggcctctgcagcgctcactgtggagcctgggcacgcagtaagcagtgttcattgtgtgaagggaactgacagatagaaggcagtgtcctgcagccagctctgccctgggtatctgacactggatgttgttaatactgatgagtgctggaacctgtggcttgctttgctgctttccatgtgcagggactgcaggttgtggggttgggggcgtgttgggatttcactgaatcttcacagtagccctaggagacaggccgtccccattcccagctgaggagcctgaagccttgagaccttgggaccttcagtcattcgctccacattattttttttttctttttgtgtgtgagacggagttttgctttatcgcccaggctagagtgcagtggggtgatcccggctcactgcaacctctgcctcctgggttcaggcaattcatggtagcacctcagcctcccaagtagctgggattacaggtgcttgccaccatgcccggctaatttttgtatttttagtagagatggggtttcaccatgttggccaggctggtctccaactcctgacctcaagcaatccacctgcctcggcctcccaaagtgctgggattacaggcgtgagccactgcgtctggccacattactttttaaaaaaatcttttttttcatagagacagcgtcttgctgtgttgtccaggctggtcttaagtgctacatcggtctcccaaagtgctggagttacaggtgtgagccaccacgcccagcccctacattgcttttcttgttttctgatggaaatactcttctttgctctgggctgaggaaaggcagtcccagagttggcaccccagagcccctctgctgtgccgcccctcagaggggcttcccatccctccaagcactgctgcctggtgctgggggcatcctgaccataaagacgccattttaattgcctaaagatggcagtacgtgactagctgcgattgtaaacaccggtttcctccaagttctcccagcgtctggttagcacagaaccctaagctccatgcagctgggaacttccatctgccaggaatggcatggggtgtcctgtgtagaatgcaccagtgggccggcttttcccaagaaaatgtttttccgagccacatcccactgtcaacactgttgtggcttacttgttggttagtgcagtgatttgggggagcaggaagttacaaaagtgcccctcagttcaccctgttcacgggtatctggagactggtcgtgaagtgatctcttgctgtgggcaatgagaggcagccttggctgggcacagtggtccacgcctgtagtaccagcactttggaggctgagataggtggattgtttgagaccagcttgggcaacacggagacccccatctctaccaaaaatacaaaaattagccaggtgtggcggcgcatgcctggagtcccaggaggcggaggttgcagtaagccgtagttgcaccaccgcactctagcctgggcaacagagccagaccctgtctcaaaaaaaaaaaagaggcagcctctgctctggctgtgcatgcagtgggaggggccccttgtttcc

SEQ ID NO: 132049 - DNA, 1090 bp, Homo sapiens
ccggcggccggctcgcggcctcagcttccggcctgcggaccccagcttccggcggggcggggcgggggcctgggcgcggcgtgtggcccttgcgggcgagcctggcggggttgcgttcctgtccgctaggtccggcaagcgggggtcgtcgtcctccctttgccgacgggggtgtgcgccgtggtcacgacggaagcggggttctgggggtgacgcgtgggccttcgggttgatgggatcagaaggggacgggacctgtagaaaggggcctgcagctcagagcatggggcggccttggctcactacgcctgcagctgtgaattcgttctccggtgctggagagggatctggttatctccattctcttgtctccacgtggaaaggaaggacgtgcgctctcatcctacgtgttttgagaaatcgcattgtccccagctctgcgggaggatctggggacgcagtggggaaccagacaggcagttggaggtctagtgcgcaccagaagccagttcccacccagggtgccatttgctgggcgccctagggagctgcgtgggcatccagaggagtgagtcgccccctgctctgctcagtgcccacttccccgggcagggcaggcgttattaacgtagagggagaacacccatgcacacaacacatgcacgatgaagtctggtctttccttctcaccacttagcttataggacctaatccccttttggacctttctcagccgcagtttacccctgtattacttgtcacccttcccccagcccacacccagcgggatgggataaggtctgtttgagaagacagcttgggcaaatggctgaaggctggactggcaggaccagggagtgtccttagactgccattgccaggcccccagcgggcgggctggtcccatgtcccactgaggcagaaaccagttactagggggagagaggcatttacacaagatacccagcttgcgagggcagcccagtgtgtgattcacaggactggctaactccactctttctactatgtcctttctcttgaagccacaggagtaagtgacctttgaggggcactccagagagaaaggatg

SEQ ID NO: 132050 - DNA, 1119 bp, Homo sapiens
gtgagggtcagccctggacagacctctgcccagggaactgctccatggggtctgggagagcagccatcccctgctggcaccatagacccacacaaggagcctgcacagcaagccagcggtgacacacctgcaggtgtcaggcatggcactgggcacaacagggacctggcaggagaaacagaccacagagaggtctggagttgaggctgttgtcagcaaagcccctggtcccacacagctctgccctagagccacctctttgaccctttacccaccctgagaccagaacttgcagcccctctgcagatctcctctggccactgcagcccctccaatgggctttttctctcatgcattccctggcctggaggcgtcagggaccccacatcctccctgctcctcagactcacagcccctccatgttacctcccgcacctcctccctggggcagctgctccctgggcctctgaggatgtcagctcctggctccctgcctctctcccactccactcctggctcagtcttagagatttctatgccctcatggattctacccctgccttcctggcctcttgattcttggcttgcctctcctccaattccaaacttagtgaaatggccttaagcattttaaactgtatgtatacattagcgcattcatgcctttctaaacgcatttcaaatgtcaaccaggaaggcacaccactgtattagttttatactgccgctgtaaaatttaccacaaacttagtgacttaacacaaatttattgcaattctgtaggctggaagtctgactatgggtctcactggactagaatcaaggctggcaggctgccttccttcctggaggttctaggggagactctgtctcctgctccttcaggctgctggcagaatccacatcctttcggtggcagggccaaggtccccactttcttgctgactgtaaactaaggccacttccagcttgtagaggctgcctacattccttggctcttggccccctcctccatcttcagagctagcaggttcagtctgtgtcacgaaccatttctctggttccctgcagacaggaaaggttgtccctaaggactcatgagattaggttgggcccagc

SEQ ID NO: 132051 - DNA, 1047 bp, Homo sapiens
gagcaggtgggcgcgggggttggggcacggggtgacaccgccctcccagagcgggaggggcctggaggctgcgcggggcgtgggggcgctgggagagcgcggcggctggaaacctctccgcggcccctcgcggcccgcgaatcagccacccctggacccctttggcctggcgctcgccctgggactccctgagggccagtctcctcccaggaccacctccccatgcctctggactcagccgctagcttcctggggatccccctcgaccccctgaaacctgctccaaatccccttagcccagcccttggataggagcccttggctcctgggggcagctaccctccaagccccaccttcccgcagagtggctcagggcctgcagcccacgcttgggcccactggaaaggtgtggacagggaccaaatcctcacccacaaccctgacacacaccagggcacacataaccctttattcacccccaggtaaaccaagggaacatgccagggcttcagagcaccttcctagccatggacacggaggagggggtagaggtggtgtggaacgagctccacttcggagacaggaaggccttcgcggcgcacgaggtgagaccgctgccccctcctcatcctgcttgggtgaccacctgctgaccacccagcgaccaccctccctccccaggagaagatccagaccgtgttcgagcagctggtgctggtggaccacccgaacatcgtgaagttgcacaagtactggctggatacctctgaggcctgcgcgagggtgagcacgggcaaggccccgggcaggcagagaccacagctaggtggggcgggcatggggacgaacccgcagctggtggaaatcctgagctcgcaccgtgcaggtcatcttcatcacagagtacgtgtcatcaggcagcctcaagcaattcctcaaaaagaccaagaagaaccacaaggccatgaacgcccgggtatggggagcgggctggggcagccacggggacaggacggggttggggcagcctcggggactgggatggtg

SEQ ID NO: 132052 - DNA, 1045 bp, Homo sapiens
tgggttcaagtgattctcatgcctcagcctcctgaatagctgggactacagctgtgtgccaccatgcctggctaatttttgtacttttagtagagacagggtttctccatgttgcccaggctggtctcaaaacgcctagactcaagcgatctgcccgcctcggcctgccaaagtgctggggttacaggcatgagccactgtgcctggccagcttttttacttcaggtgattttttacttcaggtaatatgtttttcacttctaccatttccacctgctgagaacgtctgtcttttcactcattcttggggtgtccactcttgcctcggggagcatcgggctggaattgctgctgtgaaatcttttcctggtccctccagcatctgagtcctggggttctgccagcaactgtctgtcttttcccctgagaccggatccaatttccagtccttggcatgttgggtaatttggggttgtatcctggatgttttaaataatcagatgcgaggctctgagccctgcgagaacgcgcttgagaatgttggcattttcactttggcgggcactcatcccggctgggtcaggccacaagccgtatcccagcggctgtgtgcagtggatccgtgttggctcaattctcaaggctgttgctgtgcggcctgttccccacacgtgctgctcagctcaggcaagcaccgagcttgtgttgtttcatgctcagcgtggaggcccctcctccaggtcgctgctctgtggggttcccatacactcaggctcctaggaggagtccatttagaaagccagggtttttctcagagtcttagttccttgtgctgtcatccatttcacacgacttgggccctgctcggggcaacacagcaagagaaaagacagggaaaataagagagggaccttgcacacacacgctctggaccacagagccctgtgcccagctcctctgtcaatacaggtggaatctcgtgcaggatcgcaggggtctgtgatgccaccaaagagcaggccgggacagggttaggagagaaagg

SEQ ID NO: 132053 - DNA, 1045 bp, Homo sapiens
aggggaggtgacagctgcagacctgttcaactccagggtcatcgatcagaagaccctgcacacacttcgtgtggggaggactgggggacaggcactcagcacgctggagtgtgtgaagccctatctggaaggcagcggctgcattgcgggggtcacggtgccctccaccagggaggtcatgagcctccatgaggccagcaggaaggagctcatccctgcagcatttgcgacttggctgctggaggcgcaggccgccaccgggttcctcctggacccctgcacccgccagaagctctctgtggatgaggctgtggatgtgggcctggtgaacgaggagctgcgggagaggctcctgaaggctgaaagagctgccacgggctacagggatccggccacaggagacacgatcccgctgttccaggccatgcagaagcagctcatcgagaaggcggaggcactgaggctgctggaggtgcaggtggccacggggggtgtcatcgacccacagcaccaccaccggctcccactggaaacagcctacagacggggctgtctgcacaaggacatctatgcgctcatttccgaccagaagcacatgaggaaacggtttgtggacccgaacacgcaagagaaggtctcgtaccgagagctgcaggagaggtgccgcccacaagaggacacgggctggctgctgttcccagtgaacaaggctgcacgggactccgagcacatcgatgacgagacgagaagggccctggaggcagagcaagtggaaatcacagtgggaaggttcagaggccagaaaccaacactgtgggcactactgaattccgaatacgtgacagaggagaagaagctccagctggtgaggatgtatagaacacacaccagacgggcactgcagacggtagcgcagctcatcttagagttgatcgagaagcaggaaaccagcaacaaacacctgtggttccaaggaattagacgacagatcacagcttctgaactcctcagctcagccataatcacggaggaaatgctccaggac

SEQ ID NO: 132054 - DNA, 1038 bp, Homo sapiens
agggggtgtggtggaccctgtccacggggtgcacctgccccaggcggcagcctgcagactcggccttctggacacacagacgagccaggtgctgactgcagttgacaaggacaacaagttcttctttgaccccagtgcgcgggaccaggtgacctaccagcagctcagggagcgctgcgtgtgcgactccgagaccggattgttgctgttgccactgccctcagacacagtgcttgaggtggacgaccacaccgcggtggctctgagggccatgaaggtgcccgtcagcacagggaggtttaaggggtgtagcgtgtcactctgggacctgctgctctccgaatacgttggcgctgacaagcggcgggagctggtggcactctgtcggtctgggagggctgcggccctgcggcaggtggtcagcgcagtcaccaccctggtcgaggctgcagagaggcagcccctgcaggccaccttcagagggctccggaagcaggtgtcagccagggacctgttcagggcgcagctgatcagcaggaagacgctggacgagctgagccaggggacaacgactgtgaaggaggtggcggagatggacagcgtgaagcggtccctggagggaggcaacttcattgccggggtccttatccagggcacccaggagaggatgagcatcccagaggccctgaggaggcacatcctgcggcctggcacagccctggtgctgctggaggcacaggcagctaccggcttcatcatcgaccccgtggagaaccggaagctgaccgtggaggaggcgttcaaagcaggaatgttcgggaaagaaacctacgtgaagctgctgtcggccgagcgcgccgtcaccggctacaccgacccctataccgggcagcagatctccctcttccaggccatgcagaaggacctcatcgtccgggagcacggcatccgcctgctggaggcccagatcgccacgggcggcatcatcgaccccgtgcacagccaccgcgtgcccgtggacgtggcctaccgctgcgg

SEQ ID NO: 132055 - DNA, 1191 bp, Homo sapiens
ctggagtcccgagaggcctcccggcgccgcctgggtgcctgcgcccacatggtccctctgagctggcacttcccttggcacccccgcggcagagtgctcctgggcagactcagctcctcggggacactctagctgcacgtctgtgggtggagcccagcccgggacagcatgggattgccccatgaccgcatcttccctcgtgcccaccaggccatgcggggtccctgattgagcctttctgtcccctgcaggacagaggtggacctcagcaggctctgcataaccagccgtgtgtgatgagtggccacaccttgcctcctcttcccgtcccaggcaccaacagcacagagcaggccagtgtacccagagccatggcagccacgctgggagccggcacgccccccaggccccaggccaggagcatagctggggtgtatgtggaggcctcgggccaggcccagagtgtctacgccgccatggagcagggcctcctgcctgctgggctcgggcaggctctgctagaggcccaggcagccactgggggcctggtggacctcgcccggggccagctgctccctgtgtccaaggccctgcagcagggtctggtggggctggagctgaaggagaagctgctggccgctgagcgtgccactacgggctatcctgacccctacggcggtgagaagctggccctctttcaggccatcgggaaggaggttgtggacagggccctggggcagagctggctggaggtccaactggccactgggggcctggtggaccccgcccagggagtgctcgtggcccctgagccagcctgccaccagggcctcctggaccgggagacatggcacaagctgtcagagcttgagcctggcacaggtgacctgcgcttcctcgaccccaacacgctggagcggctgacataccaccagctgctggaaaggtgtgtgcgtgcccccggctcggggctagccttgctgcccctcaagatcaccttccgctccatgggcggggcggtgagtgcagctgagctgctggaggtgggcatcctggacgagcaggctgtgcagggtctgcgggagggcaggctggccgcagtggacgtgagtgcacgtgccgaggtgcggcgctacctggagggtaccggcagcgtggccggggttgtcctgctgcccgaaggccacaaga

SEQ ID NO: 132056 - DNA, 1011 bp, Homo sapiens
cgccgctcggtccgcagtgtctccgcgcgcccgctccgcccgcatttcaagccccacaggccccgcccccgtctagggcggcgcccaggtcggggccccgacgcggggcggggcggggcgggcaggtgccggaaaccccgcgcggcccgggcctggcgcttgcaccccgggcaaggggcggcggctgggcagccgggaccctcccctcgtccccagcagggagtcaccgcgaaggaacgcagggcgggcgcggaggcgtcctgtgcccttcagaacagctttttttttttgggaaaggagtttggagtgaaacgcggaccggccagagcggcggtttctatccccacaagccactaatgcggtgcgggctggtgtccctgcctccagccccgaccccaccttgtctgctcagcttcctggggacgctgcttcacgtcgtgtgtctgctgggtccaggggtcttcaaggctctccttggcaggcccccctgcccccatgacgttgtaagagctgggatgtcctgcctggagcagtgccaggcctcaccccccggtctggctcctccacctgggcacagagaatgttccctgtcaccctgggagtacctggtcccctctctgaagcccatcctggcacccaccttccaaggctggggcatgccagagacactgggcatggaggctcacagcctcgggggctggcctgggggcagcctcagcctggcacgggaaccttccatggatcttctggagggccctccccttggctgccccgatatcccaggtgggcagggccacggaagtacagggcccaaagcccctcctcctctgtccccaaggcccctcctcctctgtcccgtagtcctggaggtcctgagggctcaggtgctccccacccccacaagtgcccccttctcccaagctccagcccccacctctgcctgagtcattcttgaccagaaaatcatccagagccagccagccacctccaatgcacaccatgagggtaatt

SEQ ID NO: 132057 - DNA, 1040 bp, Homo sapiens
cgaggccacggcgctgcagctgcgggagggcctgacctccatcgaggaggtcaccaagaacttgcagaagttcctggaaggcaccagctgcatcgctggtgtcttcgtggacgccaccaaggaacggctctcggtgtaccaggccatgaagaagggcatcatccgccccggcacagcctttgagctcctggaggcgcaggcggccaccggttacgtcatcgaccccatcaagggactgaagctgacggtggaggaggctgtgcgtatgggcattgtgggccccgagttcaaggacaagctgctgtcggccgagcgcgccgtcactgggtacaaggacccctactctgggaagctcatctccctcttccaggccatgaagaagggcctgatcctgaaggaccatggcatccgcctgctggaggcccagatcgccacgggcggcatcatcgaccctgaggagagccaccggctgcccgtggaggtggcctacaagcgcggcctcttcgatgaggagatgaacgagatcctgaccgacccctcggacgacaccaagggcttctttgaccctaacacggaggagaacctcacctacctgcagctgatggagcgttgtatcactgacccccagacgggcctgtgtctcttgccgctgaaggagaagaagcgggagcggaagacgtcctccaagtcctccgtgcgcaagcgccgagtggtcatcgtggaccccgagacgggcaaggagatgtcagtgtacgaggcctaccgcaagggcctgattgaccaccagacgtacctggagctgtccgagcaggagtgcgagtgggaggagatcaccatctcctcctcggacggcgtggtcaagtccatgatcatcgaccgccgctccgggcgccagtacgacatcgatgatgccatcgccaagaacctcatcgaccgctcggcactggaccagtaccgcgccggcacgctctccatcaccgagttcgccgacatgctctcgggcaacgccggtggtttccgctcccgttcctcctcggtgg

SEQ ID NO: 132058 - DNA, 1048 bp, Homo sapiens
caaggtcaccgtggagaaggtcatcaagattctcattaccatcgtggaggaggtggagaccctgcggcaggagaggctgtccttcagcggcctccgtgcccctgtgccagccagcgagctcctggcttccggggtcctcagcagagcccagtttgagcagctcaaggacggcaagacgacggtcaaggacctttcggagctgggctccgtgcggacgctgctgcagggcagtggctgcctcgccggcatctacctggaggacaccaaggagaaggtgtccatctacgaggccatgcgccggggcctgctgagagccacaacggctgcgctcctgctggaggcgcaggcggccactggcttcctggtggaccccgtgcggaaccagcgcctgtatgtccacgaggccgtgaaggcgggcgtggtgggccccgagcttcacgagcagctgctgtctgccgagaaggccgtcaccggctacagagacccctactcgggcagcaccatctccctcttccaggccatgcagaagggcctggttctccggcagcacggcatccgcctgctggaggcccagatcgccacgggcggcatcatcgaccccgtgcacagccaccgcgtgcctgtggacgtggcctaccagcgcggctacttcagtgaggagatgaaccgcgtcctggcggaccccagcgacgacaccaagggcttctttgaccccaacacgcatgagaacctcacgtacaggcagctgctggagcggtgcgtggaggaccccgagacgggcttgcgccttctgccactgaaaggggcggagaaggctgaggtggtggagaccacgcaggtgtacactgaggaggagacaagaagggcatttgaagagacacagatcgacattcccggcggcggcagccacggcggctccaccatgtccctgtgggaggtgatgcagtcggacctgatccccgaggagcagcgggcccagctgatggctgacttccaggccggccgggtgaccaaggaacgcatgatcatcatcatcatcgagatcatt

SEQ ID NO: 132059 - DNA, 3694 bp, Homo sapiens
gagcaggagtcggcgcggcagctgcagctggcccaggaggccgcccagaagcggctgcaggcggaagagaaggcacacgccttcgcggtgcagcagaaggagcaggagctacagcagacgctgcagcaggagcagagcgtgctggaccagctgcgcggcgaggcggaggcggcccggcgggcggctgaggaggcggaggaggcccgggtgcaggcggagcgtgaggcggcgcagtcccggcggcaggtggaagaggccgagcggctgaagcagtcggcagaggagcaggcacaggcccgggctcaggcacaggcggctgcagagaagctgcgcaaggaggccgagcaagaggcggcgcggcgggcacaggcggagcaggcggccctgcggcagaagcaggcagctgacgcggagatggagaagcataagaaattcgccgagcagacgctgcggcagaaggcgcaggtggagcaggagctgacaacactgcggctgcagctggaggagaccgaccaccagaagaacctgctggacgaggagctgcagcggctgaaggcggaggccacggaggccgcacgccagcgcagccaggtggaggaggagctcttctcggtgcgcgtgcagatggaggagctgagcaagctcaaggcacgcatcgaggctgagaaccgcgcactcatcttgcgtgacaaggacaatacgcagcgcttcctgcaggaggaggctgagaagatgaagcaggtggcggaggaggccgcgcggctgagtgtggcggcccaagaggctgcgcgactgcggcagctggcagaggaggacctggcacagcagcgggccttggcagagaagatgctcaaggagaagatgcaggcggtgcaggaggccacgcgactcaaggctgaggcggaactgctgcagcagcagaaggagcttgcgcaggagcaggcgcggcggctgcaggaggacaaggagcagatggcgcagcagctggcggaggagacgcagggcttccagcggacgctggaggccgagcggcagcggcagctggagatgagcgctgaggctgagcgcctcaagctgcgtgtggccgagatgagccgagcccaggcccgcgctgaggaggacgcccagcgcttccggaagcaggcggaggagatcggtgagaagctgcaccgcacggagctcgccacccaggagaaggtgaccctggtgcagacactggagatccagcgacagcagagtgaccatgatgccgagcgcctgcgggaggccatcgctgagctggagcgtgagaaggagaagctccaacaggaggccaaactgctgcagctcaagtctgaggaggtaccgccccctctacgtgcgacgggcgggtgggcccggggatctgctttggtgggtgatgggtgctcctgggctggcggtccctgatcacaccctcttcttctgcagatgcagacggtgcagcaggagcagctgctgcaggagacgcaggccctgcagcaaagcttcctctctgaaaaggacagcctgctacagcgggagcgcttcatcgagcaggagaaggccaagctggagcagctcttccaggacgaggtggccaaggcacagcagctgcgtgaggagcagcagcggcagcagcagcagatggagcaggaacggcagcggctggtggccagcatggaggaggcgcggcggcggcagcatgaggccgaggagggcgtgcggcgcaagcaggaggagctgcagcagctggagcagcagcggcggcagcaggaggagctgctggctgaggagaaccagaggctgcgtgagcagctgcagctcctggaggagcagcaccgggccgcgctggcgcactcagaggaggtcactgcctcgcaggtggctgccacaaagaccctgcccaatggccgggatgcacttgatggccccgcggcagaggcagagccggagcacagcttcgatggcctgcggcggaaggtgtcagctcagaggctgcaggaggccggcatcctgagtgcggaggagctgcagcggttggcgcagggccacaccacggtggacgagctcgcacggcgggaagacgtgcgccactacctgcagggccgcagcagtatcgcagggctgttgctgaaggccaccaatgagaagctgagtgtttacgccgccctgcagaggcagctgctgagtcccggcacggccctcatcctgctggaggcgcaggcggcctcaggcttcctgctggaccctgtgcggaaccggcggctgaccgtcaacgaggctgtgaaggagggtgtggtgggccccgagctgcaccacaagctgctgtcggccgagcgcgccgtcactggctacaaggacccctacactggccagcagatctctctcttccaagccatgcagaagggcctcatcgtccgggagcacggcatccgcctgctggaggcccagatcgccacgggcggcgttatcgaccccgtgcacagccaccgcgtgcccgtggacgtggcctaccggcgcggctacttcgacgaggagatgaaccgcgtcctggcggaccccagcgacgacaccaagggcttctttgaccccaacacgcacgagaacctcacgtacctgcagctactggagcgctgcgtggaggaccccgagacgggcctgtgccttctgccactcacggataaggctgccaagggcggggagctggtctacactgactccgaggcccgggacgtctttgagaaggccaccgtgtctgcgccgttcggcaagttccagggcaagacggtgaccatttgggagatcatcaactcggaatacttcacggcagagcagcggcgggacctgctgcggcagttccgcacgggccggatcacagtggagaagatcatcaagatcatcatcacggtggtggaggagcaggagcagaagggccggctttgctttgagggcctgcgcagcctggtgccagccgccgagctgctggagagcagggtcatcgaccgcgagctctaccagcagctgcagcgaggtgagcgctctgtgcgagacgtagccgaggtggacactgtgcggcgggctctccggggtgccaacgtcatcgcgggtgtatggctggaggaggcggggcagaagctgagtatctacaatgccctgaagaaagacctgctgccatccgacatggccgtggccctgttggaagcccaggccggcaccgggcacatcatcgaccccgccaccagcgcccggctgaccgtggacgaggcagtgcgtgctggcctggtgggccccgagtttcatgagaagctgctatcagccgagaaggctgtgacagggtacagggacccctacacagggcagagcgtctccctgttccaggccctgaagaagggcctcattccccgggagcagggcctgcgcctgttggacgcccagctgtccacgggcggcatcgtggaccccagcaagagccaccgcgtgcccctggatgtcgcctgcgcccgaggctgcctggatgaggagaccagcagggccctgtcggcaccaagggccgacgccaaggcctacagtgaccccagcacaggggagccggccacctacggcgagctccagcagcggtgccggcccgaccagctgaccgggctgagcctgctgccgctctcagaaaaggctgctcgggcccggcaggaggagc

SEQ ID NO: 132060 - DNA, 1192 bp, Homo sapiens
cccaacctccttctccccaaggctgttcttctcctgaagcaagcctctgaccacagggtcagctgacccccagggttgggtctgggcttggcaggcagcaccctgggtcgctgtggcttgggttccattcccttgggctattgctcgagccccatgtcatggccctgagccccgctttcccgccaggctcaagaccatcagcctggtgatccgcggcacgcagggggccgaggaggtgctcagggcccacgaggagcagctcaaggaggcccaggccgtgccggccaccctcccggagctcgaggccaccaaggcctctctgaaggtatcgtttcgaggcttgggcttcatggcggggtgggggtacagcgggcccagctgaagccgcacatgtccctcctgtccccaacagaagctgcgggcccaggccgaggcacagcagcccacgttcgacgccctgcgggatgagctgcggggggcacaggaggtgggggagcgactgcagcagcggcacggggagcgggacgtggaggtggagcgctggcgggagcgggtcgcccagttgcttgagcgctggcaggctgtgctggcccagaccgacgtgcggcagcgcgagctcgagcaactgggccgccagctgcgttactaccgcgagagtgcagaccccttgggcgcctggctgcaggacgccaggcggcggcaggagcagatccaggccatgccgctggccgacagccaggctgtgcgggagcagctgcggcaggagcaggtgggcttgggtcggtggggacggggcggctgggcgtgccctgcggccacggctctgaccacaccatcacccaggccctgctggaggagatcgagcgccacggcgagaaggtcgaggagtgccagaggtttgcgaaacagtacatcaacgccatcaaggtgaggcccagccgcctgcaccaggccccaagtccgggaccgttgccaggatgatggcgggctttccctgagcctgggccatgccagggaaagcccatgtgagggtttaggggctgggcaggggccatcggagggcagagctggtggctgaccgcagtgcattgccacaggactatgaactccagctggtgacgtacaaggcgcagcttgagccggtggcctccccggccaagaagcccaaggtccagtcgggatcagagagtgt

SEQ ID NO: 132061 - DNA, 1050 bp, Homo sapiens
ccaggtggcccaggtgactctgcagagtgtgcagaggcgccccgagctggaggactccactctgcgctacctgcaggacctgctggcctgggtggaggagaaccagcaccgtgtggatggcgctgagtggggtgtggacctgcccagcgtggaggcgcagctgggcagccaccgaggcctgcaccagtccatcgaagaattccgggccaagatcgagcgggcacggagtgacgaggtgggtggcgctgagcgatgggcagtgcgggggtgggccgggcccagccactgcagacctcaccgtctcatctgttgcagggccagctctcccccgccacccggggtgcctaccgtgactgcctgggtcggctggacctgcagtacgccaagctgctggtgagtgggggcagggccagccgggggaggtgggtagcccgcggcctgctgacacgcaccctcctgcccacagaactcctccaaggcccgcctcaggtccctggagagcttgcacagctttgtggcagccgccactaaggagctaatgtggctgaatgagaaggaggaggaggaggtgggcttcgactggagcgaccgcaacaccaacatgaccgccaagaaggagagctactcggtgagcggtggcccagctgccctgaaccccacagccccctccccagctgtgccctggccgtcccctatggtcagagaccagtgggggccctgggtcgagtttgctgggagcgtggcagagccgggtgtggccggccgtccctgagaccctttgctctggtgccaggcgctgatgcgggagctggagctgaaggagaagaagatcaaggagctccaaaatgctggggaccggctgctgcgggaggaccacccggcccggcccacggtggaggtggggctccctgggtaggggcggggctgcggggggggccgtgccgggtccccaggcggggcggggcggggcctgaccgggacctgctgtcccgcagtccttccaggcggccctgcagacgcagtggagctggatgctacagctgtgctgct

SEQ ID NO: 132062 - DNA, 1050 bp, Homo sapiens
ctgaaaggttcttccggagccgacctggccctgcctttgggaccagggctgtcccaggtctggtgggctggggtctgaaggcccagcgccccaccccctgccccctgcctatagggcctgagtgtggcccctgtctacagggagcggtgcaagcaggccagctcaaggtgccccctggctaccacccgctggatgtggagaaggagtggggcaagctgcacgtggccatcctggagcgggagaagcagctccgcagcgagtttgagaggtgggtggggccctgtggtggcaggggaaccacccgagggtgtgtcactgcctgggaaggaaacccccctccccgccccgcccccggcgggggaacccaagctcccactcgccttaggacagtgggccacagccagggagaccggagcgggaggcgagctgcagtctgtggccagggctgtgccggacccggccaacgcggccccttccctgtgctgctgctgcaggctggagtgtcttcagcgcatcgtgaccaagctgcagatggaggcggggctgtgtgaggagcagctgaaccaggccgacgccctgctgcagtcggtgagggggtgtggggcaggcagtgggcgggagggaggccggaggagcctgccccgccctgcagccctaaagccaggagggggctgtccccctgggctcctggggcaggggcaggggcaggggcggggcatgtggtggggaatccaggcctgagctcctccctcctcgtgtgcagctaactctcactgcctgctttgggcagagttggtttctggccacggggcagaacccacgctgggctgccttgcccccgccaggccccctccccgacagcggcttactgttaggggaggggttgggggagggcccaacccactgctgattgcccaggaggacagggcccacgtggcattacaggaggagttacccagggtgggtgatggaggatgaggcccaggaccccacagacatggtcatgggggtctcggttcttggactgggctaagtactctggacttggtc

SEQ ID NO: 132063 - DNA, 1049 bp, Homo sapiens
gtgtaaagccaggctgccagaggccccacctgccagcctgcaaccatcgatggagctcgacccccagccttttccaggcctgggggttctgggccaggtttagtggtacacttgtgggttcctcttatgcccactgcccttccactctgctccatcccagctccgggaggtgcagggtgcagcctagccctccccagctaggggagtgggcacctgctgtgtggtggcagtgagggttgggggttctgagctgcgtggtggcagctgccaccggctggagtggctggacttgtggccccgaggcatggccagtcccagcagcttcccaacagggaagggccctggagcccggtgctgccctggctggtttggtggccccatgcactccccctgggtgctgagctacccctgcccctgtgcatgtggctgtgggcacagagcaggcctggtggctgtggctgagctgtggcctcctctctgctgtgagcagatctcagatatccaggtgagtgggcagtcggaggacatgacggccaaggagaagctgctgctgtggtcgcagcgaatggtggaggggtaccagggcctgcgatgcgacaacttcacctccagctggagagacggccgcctcttcaatgccatcatccaccggcacaagtacatggccccgggggcagggggctgtgggctgggggcacccccacagcgcctccactaggcaacttcagacacgttggggcagggaggagggcaggaggaacagggatgagtgccagctggccgcctcggggtggtggagttcagggcccagccccaccctggtgtccttcagaagcaccaccacttgatctcaagactggagggcccgcgggctgctggtcctcacagccaggtgcatgtgccctctgtggacgcctccggaggggcctggtggggagggtggctgcagggaaccccagctgcctggcaccctcagctctgcgcagtcctctgtgctgtgcccctgggcttctgggtgtgggggtggcagggtgctctcagctctgccc

SEQ ID NO: 132064 - DNA, 1050 bp, Homo sapiens
ctgtggctgccaccgccaggcaggaggaccccccctttagtgccactgccctccacacgaggcttcctggctattgtctcctcccaccccttccttccttccctcagcctgggtcgctggacttcccgagccctgatgggcctggcctggcccctgggccggtggcctccctttccctgcgggggagggtgaacctgggatgaggggctgctgccccctggggaagacccttggctcggttgctgcggcgctttggggcatgctgagggtggggcccgggagctgcagctgcactgtgggtgctgactgtgcctccccacagccccgggagaaggggaggatgcgtttccacaagctgcagaatgtccagattgccctggactacctccggcaccgccaggtaaggctgcccggcaggccctgggccccacccagacccctcaccaagccagccccgccctgtgggccgtgaccgagagcccctcgctcacaggtgaagctggtgaacatcaggaatgatgacatcgctgacggcaaccccaagctgacccttggcctcatctggacaatcattctgcacttccaggtagaacggctgcccccaggacccccaccccctgcaggagtttccagggtagcctgggctccttggctggcgggttgatccgctttctggctagggcgtggcctgggaggtgactggcgccgtaggtatggtggcacctgggtgccttcctgccagccgcaaccctggactggatctgtggcctgagggtacaggcctctctctgaggccacctatccgtgccctctggccctggctgggcagggcccagagcctccctgtggaggaatgcaggccccggtgcctgccctggggaggcttctgcgcagcacaggctgactcacccgctgcttgtcctggctgcacaggaaaccacaaatctgagagctgagcaggcagagcctggtgctggcacggcagctgagtcacacaggctggcaggacgacaggcagctaggggtgggtgggcagaacctggcctgagc

SEQ ID NO: 132065 - DNA, 1050 bp, Homo sapiens
gggccgacaggcgcccgcgaggctgacgggggcctccgagcgtcagatgtcgggcctggaagggcgaggaactctgcgctctggggaaggttcgctgccctgtcagcagcacacgcggcttcccttccaacaccccagcgggcccgggccctggctctgccacacccctgcttgggtctcagtctgtagaggccgggggggactgcaggacgggacttgtgtgccctgggctcagggtgcgcccaggaccctcccatttcctcgggggaagagtccggggtggggtggctgcacctggtggcgcctgggcccctggcacctgggtctctgctgtgtggctgggctgcgggtgagggcgcctgggtctcagtgtgtgatctgagggaggctttggggctccccaggcaggacctggccagccaggctgctgtgtctgcacggtggtcacctgagggcccccggggcttctcccaggccccaggtaagctggtcttgtctcccccagatgagcgggatcgtgtgcagaagaaaaccttcaccaagtgggtcaacaagcacctcatcaaggttggtggcgcatgctggtgcgtgtcacaggggctgaggctgtgggaggcgctgagggagggtggcccctgccgcccaaggctgtccccatgctgcctgtgtgctcacctttcatctctgaaacctgttattttctgtcctctttcttccctacgcctgctcctgcctctctcttcctcctcttccttctggtctttcctggtctctccttgcagcactggcgggcagaggtaggtgcctccgtggggcagggtgtgttccgtgggctcccgggagactcagcccccgcctccttccctctgggaccagcacccactctgtagatcagccactcagggcctattggtggctctgggggactggccacctcagccgctgctgtccccacaggcccagaggcacatcagtgacctgtatgaagacctccgcgatggccacaacctcatctccctgctggaggtcctctcgggggacagcctggta

SEQ ID NO: 132066 - DNA, 1053 bp, Homo sapiens
cctgggctttggcctgggtttccaggacacgggggagggaggaggtgctgaaggcggggctccaggccttctgtggacttgctgcagtcctgggccagtgggattcccttcccagtcttggggtttccatcctaggaccgtctccactagctgcgggacctcagccatagggtccacacctgtaaaacgggggcgatactcctcagagggccacggcagtgcctgtcgtgagggaccctgggctggcggccgagggtcagcagccctggacagcacaggtgtcaggcaggtgtgcagaggcacctgagctgggggtgttctgggtgcgtcccaggtgggagagccagctgagctgcagctgtagagggtgggtgtagcctggctgggtggggcgggtgtgtctgttggttttagggtcagaataggattggatggggcggggcaggctgggctgggagggaggggaggtgatgaggagggaagagctcagagcaaagaggcacccagaggcaggaagtagggaaggggagcttgagccaggcttgggaggtggaggcccctgaccgagcccccagcccacctggtcccagccctgccccgccccagcccttctcctcacccggtcccagccttgcccgagtccgtgtctggagtccccaccgtgccccttcccttccctgagcccctgccccattcctgaccctggcccggcccagggcggcatctttggaggcctgttagtggcagggagaaggctggaacaggggcctggctggggtgggctccacgtgggtcctggaccttggccccggctcccagtttccagctgtcgtggactccctgtgcccacctccctggctgttccgggatctcacactgtgcctcagcagagtggcagccccgttcctgcaggcaggagccacctggtcacggccgggcccccagagcccatacccagcaggcgcggggcttggcctcagggtagctgctggcccagggcttctgaagaggcgacagtgtttccagaggctttggacccagggaggggcggca

SEQ ID NO: 132067 - DNA, 1049 bp, Homo sapiens
caggaggtgtgtgctgcgaggcgggggggggtggcgcatgccgcaggggggcgtgtgcggagctggcagggtgggccaggaacattctgctccgggctcctccctgcggcttcccttcccgcctgcaggcccctggctggtgggagggaggggactcccgccgagccccgccccatctctgctggaggaagctaccgccctttcctgcccggagccggcttgggggaggcggggctggttgggtggcggcccagcgggggtcagtcctggcacccctgcaggcctgtgtaggagagaacctaggtccacgtgcttttaagaggccttgggatcattttgggacagtgtgggtatcgtgggttagtttggtggggcccttggagatctgggggggattaggttagggaatcaggccaggaagatgcggtcggcctgccgggagtgcaggaggtcagtgtgggggggtgcgctgagggactggccaagagggtagggccttctttgggcacagggctgggcaggcttggacccagctggtgttgttcccaaagccacaaccctggtgggtggagggtccgcaggtgctggtggtccgaggggcgtggccactgtggtccctacatcttcctggagcctcacctcctgaggctggccttttcctgcctggggctggcttcagagggagggagagccatgccgcagcgagctggccctgccagagggctgtgggaaccgtggctatgccttcggagtttccccgccaccacacctctgtgtacgcaggcgtgcgcgtgcgcgtgcgtgtgtgcgcgcgtgtgtgtgtgtgtgtgtgtgtgtgtgtttggagcctgcaccgtggcgccatggcgacggccccataaacccgcccccacaagctgcttgttggccgcctgccggctgctggccagcgcctcccacctcgggatcccccctctctcccactcccccccaccgccctatttataatcagttcccgggtttgccgggcttggtgggaaggggtgtgtcggcttggggcgagcagcgat

SEQ ID NO: 132068 - DNA, 1093 bp, Homo sapiens
ggctgaccccattagccataggggtggttggatcagagcagctgcgaagggtccctggtggtcgtggggggtgggtgagggatggagctgcagtgtcatctggcggcagtggagatgctggcgagtgggcagactggggggcgcagccaggaggacctgtggggctgcctgtggggcatcctgaggctgggtgggagaggcagagaccagggtgcaggtcggacctgtcatctttggagccagtgtacaaggtgcctgacccagggctgcgcagaggcgagacgcccggggaaggggcacactgctggggccggggaggtgggaggtggccgaccagggtctgggggcttgatctcagcagcctgccagcccaggccctggagttgggccggctgaggaagttactgggagatctggatgggtgggtatctcctgcagggcgcgggtaacggcttcaaggccctcgcacgtgtgtcccacaggctgttctaagcatggctcgttgcagtggactcggggggctgtggggtgggccgggggctgcggagctggggagtgggccgtccgagcgctcctggatccggcctggtgacctggcagtctggctggggttagcggggtcgcgtgccccagaaccacaggctgggggggaggggtgcgcggtgcggccgggagcatgcgcccggggcggccctgtccggcgcattgatcagctgaagccccgcccctggccggcaagccctgccccggacctccgggctcctcccccggctgcggcgctggcctgggcagtgcggtgcggggctggactctgcctggtggtggcacagccgccctcagccccggcgcagacatggacccctcgcgagccatccagaacgagatcagctccctcaaaggtgcggtcctggggccgggcccgagccggggggcgcggaccacacagtgacctctggctgggtgcagtccacgcagggtggcgggcagggtctgccatccctggggtgacactgtgggtcgctgagccagagccgcaggagaccccagactcgtccccctccgggctccacctggttcggggtcctactgggct

SEQ ID NO: 132069 - DNA, 1165 bp, Homo sapiens
aaatctgacaggctttctgtcctttcccttcctccaagtggcagaacgagtgttgcagcaggagcaccggttgcagggctcagagctgagccttgtcccccactacgacatcctggagcccgaggagctggctgagaacaccagtggaggggaccacccgtccacccaggggcctagggctaccaagcatgctctcctgaggaccggagggttggtgacggctctgcagggtgcagggactgtgacaatgggctctggcgaggaaccagggcagtcaggggcctctctgaggacaggtcccatggtgcagggtagagggattatgacaacaggctctggccaggaaccagggcagtcagggacctctctgaggacaggtcccatggggtctctgggacaggcagagcaagtcagctcgatgcccatggggtctctggaacatgaggggctggtaagcctgaggcctgtggggttgcaggaacaggaggggcccatgagcctggggcctgtggggtctgcaggcccagtggagacctctaaggggttgctggggcaggagggcctggtggaaattgccatggactcaccagagcaagaggggctggtgggtcccatggagatcaccatggggtctctggagaaggcagggcctgtgagcccaggatgtgtgaagctggcagggcaggagggcctggtggagatggtgctattgatggagccaggggcgatgcgcttcctgcagctctaccatgaggaccttcttgcgggcctgggagacgtcgctctcttgccacttgaaggaccggatatgactggctttcgggtgagtgacccctcaggactcctcaccttcagccccctcctcctactggggactcaaagtacctttcctgtgctctaaacctgcaaactccatctctgcaatggccctgcagctctgtggagcccaggcttcctgccaggcggctgaggagtttctgcggagcctgctgggcagcattagctgccatgtgttgtgcctggagcacccgggcagcgccaggtttctcctgggcccagaagggcagcaccttctccaggggctggaggctcagttccagtgtgtctttgggacagagcgcctggccacagccacgttggacacaggccttgaagaggtagagat

SEQ ID NO: 132070 - DNA, 1563 bp, Homo sapiens
tatgtctcctatgctgtcttcttcatctctctcatcgtcctcagctgttgtggggacttccggcgaaagcacccctggaaccttgttgcactggtaacccccaaacctgagcctctgtgcctgggtccggccatgcagtcccacacgcccactcttccgggcctggtcaccgtggttctccttgtgctcatgaggcaggggccggcaggggtggcatgggggcacacacccaaggtcagcctgtgtctcccaactgcagtcggtcctgaccgccagcctgtcgtacatggtggggatgatcgccagcttctacaacaccgaggcagtcatcatggccgtgggcatcaccacagccgtctgcttcaccgtcgtcatcttctccatgcaggtgaggggcctcccgtggctgggctgtggccgcaggggctgagcagctttcccaggcccagccccatggcccgttcctctcccacctgcagacccgctacgacttcacctcatgcatgggcgtgctcctggtgagcatggtggtgctcttcatcttcgccattctctgcatcttcatccggaaccgcatcctggagatcgtgtacgcctcactgggcgctctgctcttcacctgcgtgagtgaggggtgaccttggccgggggcgggatgctgggcaggcaggcttgtccctcaacaccactgtgctgtcacctccagttcctcgcagtggacacccagctgctactggggaacaagcagctgtccctgagcccagaagagtatgtgtttgctgcgctgaacctgtacacagacatcatcaacatcttcctgtacatcctcaccatcattggccgcgccaaggagtagccgagctccagctcgctgtgcccgctcaggtggcacggctggcctggaccctgcccctggcacggcagtgccagctgtacttcccctctctcttgtccccaggcacagcctagggaaaaggatgcctctctccaaccctcctgtatgtacactgcagatacttccatttggacccgctgtggccacagcatggcccctttagtcctcccgcccccgccaaggggcaccaaggccacgtttccgtgccacctcctgtctactcattgttgcatgagccctgtctgccagcccaccccagggactgggggcagcaccaggtcccggggagagggattgagccaagaggtgagggtgcacgtcttccctcctgtcccagctccccagcctggcgtagagcacccctcccctcccccccacccccctggagtgctgccctctggggacatgcggagtgggggtcttatccctgtgctgagccctgagggcagagaggatggcatgtttcaggggagggggaagccttcctctcaatttgttgtcagtgaaattccaataaatgggatttgctctctgccttcccctggtcactcttctccctgccactttcaacatgaagttgggaggggctccaggccctccctgctgatggagacacaggaccagaaatgaatagtggagattaatacagtgccaagcctctgcccaca

SEQ ID NO: 132071 - DNA, 1049 bp, Homo sapiens
caggcacagtgggctgctgtcggccctggggctggccctggctgacgtggtgcatgaggcacaggaaccctgctccctgctctacgcgcctgagaccttcgtgcagctggaccagaggctgagccgcctggaggagcagtgtgtggatgctctgcaggcccagggcttccccaggtgggctcccagggtgccctggacagagggcttacgttgtcctcaccacgcccttggtgggtgttcctcctgatgacttcccaggtggtcccggggtgtgcgagaagcagaacaggtgtccttgccgggcgctgggtggggtggggtcagggcagggggtttggtgtgagtgcccccaaccacctgctgcaggtcccagatcagcactgagagcttcctgcacctgcgctaccagggcacggactgtgctctgatggtgtctgcccaccagcacccagccacagcccgctcgccccgtgcgggggacttcggggcagcctttgtggagcggtacgtggcttcctgactccggatccctggcaaggggccctcctgtctggccgcctcactctgaccactccttgggtccccgcggggagtgcaggtacatgagggagtttggctttgtcatacctgagcggccggtggtcgtggacgatgtgcgagtgcggggcaccggccgcagtggtcttcgcctcgaggatgcccccaaagcccagaccgggcctccccgggtggacaaggttggtggtcctgcctgtgccagcctgacagcacccatggggcaccgggatggggaccaagccctgtgagaggcatcggggagggtgctgggcccgggcgctgtactcacccgcaccctctgcagatgacccagtgctactttgaggggggctaccaggagacccctgtgtacctgctggcagagctgggctatgggcacaagctccatgggccctgcctcatcatcgacagtaacaggtgggctgaagtccggccagggtggaggatgtggacgggtccactgcggggcccctggtgcagggttctctggc

SEQ ID NO: 132072 - DNA, 1144 bp, Homo sapiens
tgtggccgtggaggggcttaacgggcagctgcccaaccttgacctgctcaatctcttccagaccttctgccagaaagggggcctgttgtgcacgcttcagggcaaggtggggctgcctgcctgcctgagggctgaagggcacagggtctgtgggaggggctgtctcatcctgtcctgcacctctaaagctgcagcccgaggactggacatcattggatggaccgctgcagggcctgcagacactgctgctcatggttctgcggcaggcctccggccgcccccacggctcccatggcctcttcctgcgctaccgtgtggaggccctaaccctgcgtggcatcaatagcttccgccagtacaagtatgacctggtggcagtgggcaagtaagtagtctctggtcccccctttccatgcccaggatggggtctagctggagcggagtgggggatggcctggtggctctggccagccgtgaacctgccccacacctgacagggctttggagggcatgttccgcaagctcaaccacctcctggagcgcctgcaccagtccttcttcctctacttgctccccggcctctcccgcttcgtctccatcggcctctacatgcccgctgtcggcttcttgctcctggtccttggtctcaagatatcctctgccccttgccatctacctgtgaccagcctccagtctcctcaactctaggctggggagagtcttccatcctgatggggggtggggtacgggggtgagccctgggtccccctctgggcagatcccgttacacctcttgttggggtccttgattgggctacgctctggaactgtggatgcagctgcatgaggctggaatgggccttgaggagcccgggggtgcccctggccccagtgtaccccttcccccatcacaggtgatggcacccccttctgttgttggaatgggcttctggggtctgactggtgtttagtgttgcaacttagcctcagctggtgggatggtggtggtctttggggatcccctggccccagggtccatctccaagagcctgtgtgccctgcagggtgtggggctggcctcgctcgtggcacctctgctgatctcacaggccatgggactggccctctatgtcctgccagtgct

SEQ ID NO: 132073 - DNA, 2379 bp, Homo sapiens
cggcggagagggatggggtgggtagtgggacagggtgtgcgtctggtgccctgcaggaggaggccattgctgggtggagaggtgggcgctgagagtcagatccccaggtagggctgggtggtgtcctggcaggcgctgagcggagatcttgcaggcagtggccttgtcgtcgaagtctggcctttcccgaggccggaaagtgatgctgtcagcgctgggcatgctggcggcagggggtgcggggctggccatggctctgcattcggctgtgagtgccagtgacctggagctgcacccccccagctatccgtggtctcaccgtggcctcctctcttccttggaccacaccaggtgtgcagctggctggctggctggcagcgggaggttctgggtggagctggtaaggtggaatcttcagctttcctaaccctttccctccctccagcatccggaggggtttccaggtatataagcaggtgtgcgcctcctgccacagcatggacttcgtggcctaccgccacctggtgggcgtgtgctacacggaggatgaagctaaggagctggctgcggaggtgtggggtctggggatgcctgggacccagggctcagggctcccactgttgagatggcagggttgtgatgaggctctcggtggcaggtggaggttcaagacggccccaatgaagatggggagatgttcatgcggccagggaagctgttcgactatttcccaaaaccataccccaacagtgaggctgctcgagctgccaacaacggagcattgccccctgacctcagctacatcgtgcgagctaggtacacgggctgcccatggggtggtgctggagagatgggggaagggctgacttgtgcttggaactaaggagccatggatctggtcctaggcatggtggtgaggactacgtcttctccctgctcacgggctactgcgagccacccaccggggtgtcactgcgggaaggtctctacttcaacccctactttcctggccaggccattgccatggcccctcccatctacacagatgtcttagagtttgacgatggtaagaggcctccagtctggcagtgggcatgtggaatacttctccactacccccagggatgctttccctgtgttcctgggtccaggaggtcctgcccacttcttgtctggggcgtcttctgtgcatgtctcaggaggcttttgggctccttcagttttgcgtatgtccggtggagggtactgcccctttgatgccttgggtaggggcagtgtctgcttcacagagggggggcatgatcccaggttggacatgagcctgagaatagccctcactgcttgtcgttggccaggcaccccagctaccatgtcccagatagccaaggatgtgtgcaccttcctgcgctgggcatctgagccagagcacgaccatcgaaaacgcatggggctcaaggtaaaagggttgggaggccatggtgggtatcagagaagggctgggagctgggcagggctcctccccactcccttctctgagccttccttgtctgcagatgttgatgatgatggctctgctggtgcccctggtctacaccataaagcggcacaagtggtcagtcctgaagagtcggaagctggcatatcggccgcccaagtgaccctgtccagtgtctgcttgccatcctgccagaacaggccctcaagcccaagagccatcccaggcctgttcaggcctcagctaagcctctcttcatctggaagaagaggcaagggggcaggagaccaggctctagctctgggccctccttcagcccccatcatgggaataaattaattttctcaatgtacatatttgagttattatatggaaagagtgcacgtttgcaaggaactctgataccaagacccttgccttcacaaggctcccaggatgtcccatgcagtgtggccagcaatgccctgcactgactggtagctgggagtccagacagtgggtgtgggacagaaagcggagaactgcatgttagaggaagtcagcatttggtggggtggggtgtgtctgagcacagagctgaaaagggcctagccaggcaggatgtggcccagggacctgttggaatgaacagccaagtgttaaggtgttgaaccacttggcccccattctgatggcagcagggaaccttggctgcattttaacaggggaaaggcctggtctagggcaggggctatttattgctgggctgggctgaggaaggggatggctcccagccaggtgaaggagtcaagtagacagacaggatgtgtgtcatggagtggcccctcctagcagtccacagggtagctaggtggtgggtcctggccagaagctggcagtagctg

SEQ ID NO: 132074 - DNA, 1102 bp, Homo sapiens
aaacttgacggagagaggtacaggtggggggagggggttggggggttcggggatagcagatagtccccagtggtgacagctgtcctttccttaccctgcagaagagctggcagggagcctggcccgggctattgcaggtggagacgagaagggggcagcccaagtggcagccgtcctggcccagcatcgtgtggccctgagtgttcagcttcaggaggcctgcttcccacctggccccatcaggtgaggcctggggctgcttcttcaccttgtcctcgtgaccatcccaggtcccccatccatccctgaacccacattctggcacaggctgcaggtcacacttgaagacgctgcctctgccgcatccgccgcgtcctctgcacacgttgccctgcaggtccacccccactgcactgttgcagctctccaggagcaggtgggcacagggtctggggagccctgccaggggcagaggagcctaggtgacatcacctgccctgatgctctggccacaggtgttctcagagctcggtttcccgccagccgtgcaacgctgggtcatcggacggtgcctgtgtgtgcctgagcgcagccttgcctcttacggggttcggcaggatggggaccctgctttcctctacttgctgtcagctcctcgagaagccccaggtcagtcctcgatgggggtggggtgtgggaggtggggtgcagccccacagtcctgagctccaccccctcagccacaggacctagccctcagcacccccagaagatggacggggaacttggacgcttgtttcccccatcattggggctacccccaggcccccagccagctgcctccagcctgcccagtccactccaggtgggcacgggactgggcagggagggccaggacagccatgggcattggaaagagcagggaagcaacaactgtctctcttcccccagcccagctggtcctgtccttcctgcaccttcatcaatgccccagaccgccctggctgtgagatgtgtagcacccagaggccctgcacttgggacccccttgctgcagcttccacctagcagccaccagaggtaccagaggtggcacaggcag

SEQ ID NO: 132075 - DNA, 1067 bp, Homo sapiens
gtggactgggcaggctggaggcagctggctgggggcctgggggtagccccaatgatgggggaaacaagcgtccaagttccccgtccatcttctgggggtgctgagggctaggtcctgtggctgagggggtggagctcaggactgtggggctgcaccccacctcccacaccccacccccatcgaggactgacctggggcttctcgaggagctgacagcaagtagaggaaagcagggtccccatcctgccgaaccccgtaagaggcaaggctgcgctcaggcacacacaggcaccgtccgatgacccagcgttgcacggctggcgggaaaccgagctctgagaacacctgtggccagagcatcagggcaggtgatgtcacctaggctcctctgcccctggcagggctccccagaccctgtgcccacctgctcctggagagctgcaacagtgcagtgggggtggacctgcagggcaacgtgtgcagaggacgcggcggatgcggcagaggcagcgtcttcaagtgtgacctgcagcctgtgccagaatgtgggttcagggatggatgggggacctgggatggtcacgaggacaaggtgaagaagcagccccaggcctcacctgatggggccaggtgggaagcaggcctcctgaagctgaacactcagggccacacgatgctgggccaggacggctgccacttgggctgcccccttctcgtctccacctgcaatagcccgggccaggctccctgccagctcttctgcagggtaaggaaaggacagctgtcaccactggggactatctgctatccccgaaccccccaaccccctccccccacctgtacctctctccgtcaagtttccagggctcctaggaagatctgcctcaggtggagggcccttgagtgtggaggcttccgggggactgggcagggagacagggcatgcttctgggcccaaggctggtggtgagttgctcttgctgcctagaggtaagatatgggtgtgctgtgctgtggcctctgtccaggcctctaggcccttggttttccaggacctttgccttctc

SEQ ID NO: 132076 - DNA, 1051 bp, Homo sapiens
gccgggcccggccccgcgcctctgaatggcccgctccagtctccgagatcgagagctcgaatagccatcgggtgccgtacccgccactcagttctgccttctacgtctactggttatggagcctgtctgtcactcttctcgtcgtactaacccgcttacccccggcgttcattggccgtggcctctctagctccgccccctaggggggtcgaccccgtaaccagtgaggcgcgggccaacctagtgcgacgtgtgggcgtggcgggggctggggtctgcgggcgaaggtggcagcccattggaggtcccgggagcgaagtccagctgccgttaggcgctgggatagtcgcacgctggatgcatctacgtccgccgagcccctggggcgaagaggccgcgtccgccttcagttgtggccggtgcttcgccccctgacccttcgcccccaaagaccagctctaacgtgagcgcctcggccgccctgccccagcctcgtacacgccgccagcctcgcccagccggtgtccggagaccctcgggccgtgtccatttgtgggcaaagccagcggggcaggcttggccagagtgcaccactcggcgccgtcccaggcccgacgctctgggcgcgcccggaaccccaggttcgcggcccgtgtttccgaccggcggagggggctcagcggcccgatcccacggaagcgcgctcggaggggtgggacccggccggaccggagatggcgccgccagcgggcggggcggcggcggcggcctcggacttgggctccgccgcagtgctcttggctgtgcacgccgcggtgaggccgctgggcgccgggccagacgccgaggcacagctgcggaggctgcagctgagcgcggaccctgagcggcctgggcgcttccggctggagctgctgggcgcgggacctggggcggtgagtgggggcggagggcgcgcggtcagtcctcttggcccgggcagggcacggagcccaaagttaggcccctccgcttgccacctgggtgcccttaagcagttatgtttctttgc

SEQ ID NO: 132077 - DNA, 1046 bp, Homo sapiens
ttccccaaagacatgaagctattggagaactcgagctttgaagccatcaactcacagctgactgtggagactggagatgcccacatcattggcaggtgaggcaggctgggggggctggcatctcggaggtcacactgccgcgcccttcagtggaacctgggggaagcatgcttcatggttctctctgcatcctataggattgagagctactcatgtaagatggcaggagacgacaaacacatgttcaagcagttctgccaggagggccagccccacgtgctggaggcactttctccaccccagacttcaggactgagccccagcaggtgagccatggtggggcctacctggggctgggggttgaggggaggtgatgggcccagctgatggttctgtctgtgcagactcagcaaaagccaaggcggtgaggaggagggccccctcagtgacaagtgcagccgcaagaccctcttctacctgattgccacgctcaatgagtccttcaggcctgactatgacttcagcacagcccgcagccatgagttcagccgggagcccagccttagctgggtgagggtcaggtggagggaagggacccacagccaccccactgtccttccccactttgggtagccctgggctcctgtcaccctgactgtgacctgccctaggtggtgaatgcagtcaactgcagtctgttctcagctgtgcgggaggacttcaaggatctgaaaccacagctgtggaacgcggtggacgaggagatctgcctggctgaatgtgacatctacaggtgggccggcatccctgcagatggcctccaggcctccaggtttgtggggcacttggcgcctcacaccacctgtcaccctatactccccagctataacccagacttggactcagatcccttcggggaggatggtagcctctggtccttcaactacttcttctacaacaagcggctcaagcgaatcgtcttctttagctgccgttccatcaggtgggcaccccccgcctcctcccccacctccctgttgggccga

SEQ ID NO: 132078 - DNA, 1123 bp, Homo sapiens
gctggctggagcagcctggggccagaggaagccgtatcaaccgggtgaggcctagtggtgggggcggtggcaggcctgcgtccactgcgggagggtgcaggtccagccaggacaggcagtgtgccaaggacaggagtgccctcagggcactgcagccaggaggcgaggagcctcagggaagactcccagtggtggaggcacggctggcctggccacgccgtccagcagggcaggcatccagtaattcctcccggccaaggaacccctccagtaggaaaggtggcaacaaaagaaacagacactaattggagatgtagatggttcagggagaagaaaataacagagaaagaaaatctctgattaatatcctcaggaaaataagtgggcatcatgcattcacgggacaagaggtgtcaccatggagaagccacattgagagaataaaactgaccttctgtgaattaaagatgccataatagaaatgggaaaaataatagaagaattggaagagaaagttgtggaaatttccagaaaatagaggaaaaaggcaaaaatatggaaagtaggagagaaagagaagaatgaactagcaggctgaaccctgaagccagcattccaatcagaggcaccctagaaagaatggacagagatgggaggtcaagagatgacgcaaaggcatgccctagtggccgggtgcggtggctcatgcctgtaatcccagcactttggaaagccgaagcgggctgatcacttgaggtcaggagttcaagaccagtctggccaacatggcaaaaccccgtctctactaaaaatacaaaaaaattagccgggtgtggtggcgcatgtctgtaatccctgatactgtggatgagacaggaggattgcttgaacctcggaggcggaggctgcagtgagccaagattgcaccactgtactccagcccgggtgacagagtgagactctgtctcaaaacaaacaaatcaaaactagctgggcatggtagcttacgcctgtaatcccagtactttgggaggccaaaatgggaggatcacttgagcccaggaattcgaaaccaggctgggcagcatggtgagaccccatcgttagaaaaaatatttttaaa

SEQ ID NO: 132079 - DNA, 1234 bp, Homo sapiens
catgtgcgtgtgtgtgcctgtgcttgcgtgtgtgcacgccttgtgtgtgcgcatgctgcatggggtgccgccatggtctggagcagagtaaacatggcagtggctgtgctgcccacacaggcctggaggttactgggtgtctgagtttcagccttaggatcattgtctggggcccttaacttgcctctcagctccgtggagccagcgctggacgagcaggcccgggcggatgtgatccatggctgcctgcacagcatcatggccctgctgcctgagcccaaggaggaggacggaggctgccagaaggtatccctgtgtttcccttgcctgtgtccacatccgtgagagtggtgggaggccactgtaggctgcggggtcactggtggggctggacggcctggctctccttccagtccctgtatctggagacactgcacgcccttgaggatctgctgacgagcctcctgcagcggaacatgaccccccaaggcctgcagatcatgattgaggtgtgcaggggggaactgtcatggggatggggatgggggcacagagggcactccacctggctgctggccctctctccacatgtgggcaccacagggacagtttggtgctctctgcacttgggggtggtttatgaacaggcaggtgcaccccctcccatctgggctggcaagcagttggggaggccctgacccaggtgggacctctggagcctgtcctctcccgccactgcatggcgcggggatggaggggcccacgggtacccatggctcctgactgggggccgctaccagggtggtgctagggtggggccgacccccatgctcggagtgtgttcttctaggaccaaggtggcctccaccctgtccctccacagtcctggctggccctggatccacctgggctgggttgtgtctgtgaccagactggaggacagagtggcagggccagaggagctacggtggcctaaggctggcaccactctgggtccccggcttggccccctgtagcccaggaaggatggcctggcagggacactgagctggcccacgatgcacaaggctcctgcccccagggctgccctctgagcagtacctgtgtgacgcccctcttcctcagcacctgagcccatggatcaagtccccaagaggtcacgagcgggcgcgggccctgggcctgagcgccctcctgctgcgctacttcctggagcacctgcgtgtcagcgtga

SEQ ID NO: 132080 - DNA, 1234 bp, Homo sapiens; identical to SEQ ID NO: 132079

SEQ ID NO: 132081 - DNA, 1234 bp, Homo sapiens; identical to SEQ ID NO: 132079

SEQ ID NO: 132082 - DNA, 1234 bp, Homo sapiens; identical to SEQ ID NO: 132079

SEQ ID NO: 132083 - DNA, 1234 bp, Homo sapiens; identical to SEQ ID NO: 132079

SEQ ID NO: 132084 - DNA, 1234 bp, Homo sapiens; identical to SEQ ID NO: 132079

SEQ ID NO: 132085 - DNA, 1028 bp, Homo sapiens
gacaccagcagcactcctggccacactccagccctcctctgggtacaggtggcataggtggcatccacccacccccagcattctaatagcccaggcatctcctcctccaggccctggtgcccttccacaacctgggccttctcatcggcctcttctccccacggtgtgcggacctgtggcctgccacccgccaggaggccgtggactgtgtctactccctgctgtacctccagctcggctatgagggtgagccctcgtcaggagtgtgggggccagtggtcgtgcaggggtgcttggagggatgaggtgcggagtccaggctgtgggatcgccagggagggcctgggcccgactgctcattcctgccgcctctcaggcttctcccgggactaccgcgatgacgtggcggagcggctcctcagcctcaaggacggcctcgtgcaccctgaccccgccattctcttccacacctgccacagtgtaggccaggtaccagctgggagctctgcggccggaaggcaggctggcactgtctggggctaacagggacttccgaggtggcacctggcctcccctagcctctggaagtgccacccatggccagtgggcatgagcagggcctgggtgtttgcattagttgccggcgctgccctgcgctggccccatcacccacacccgcctacgctggggcagtgcagtccatatgagaggaaggtgctatttgtcttgagacctggcagaggccaaggagagaatggggtgccatgaggcacagccgccctctgtctgccactgataccctggcctgctcatgaagatgcaggtttctggaacagaatcttcagcggctgccctgtgtggtgttgtccccagaggctacccaagagccacgtggggggctagggtcatcgcctgcagggtgcagcgggctctagccctcttgccaaggggcctgcccttggttccagctggtcaaggtgctttgtctactgccatctgaagggaggatgaccctgggcaccgcgtcc

SEQ ID NO: 132086 - DNA, 1028 bp, Homo sapiens; identical to SEQ ID NO: 132085

SEQ ID NO: 132087 - DNA, 1028 bp, Homo sapiens; identical to SEQ ID NO: 132085

SEQ ID NO: 132088 - DNA, 1028 bp, Homo sapiens; identical to SEQ ID NO: 132085

SEQ ID NO: 132089 - DNA, 1028 bp, Homo sapiens; identical to SEQ ID NO: 132085

SEQ ID NO: 132090 - DNA, 1028 bp, Homo sapiens; identical to SEQ ID NO: 132085

SEQ ID NO: 132091 - DNA, 1005 bp, Homo sapiens
acgctggcgcatgtgtccttctggcgagccgccaggctctccagcagcgagtccaagagcatgaggtcgttggccacgttgctgttcagcagctgcaggcagaggtgctgtgacttccctctccccgctgaccccagggctcaacccaccagcccaggcccagaacaccagaggctgtccccacgccggtgtggcagacagaggtggagcacctactccctgggtctccgatcagtggcgacccctccctgttgtgccactggggcctgctctgacgcccgctgtgctctgctgcacggccttgggcaagattttggcatctttggccacgaaggccaagaccacaccaccaagggcacctggggtcccaggggccagccctgtccagctacaaatgtacccagctggacttggggagagtacaggctgcagggagcctcggtcctcctctcaccaggcacagagggggtgtccctgggtgggactgagtgagttctggcatgggggaggaggtagctagcatccacataacctccctcacagaccacggtcgagggggccttttaggggtaagaaaagggcatcccgtgcctgtcctgagcaggagccccaccttggtgcccagcatccgtccctggaagggcctacctcggccaggaaggcggtggtggtcaccctctggttctcatacgcactgctgtgtgtgcatgccagcgtcttcagcaccagggggagtcggggccctgcgtgctcagccatggccctgggaaagggggccgctgagggtgcaggggctgttgctgtgctgaaccctacccaggcaccttccaccctgcacagccctggtccgctccaccgccagctgccaggttctgggagttctatgtttcagagatgcctcccagcttgcctcgccaggcctctgcaggggtgcctccctacccctgccccagagagtgaacaggcaggagcccagggcaccattggcctgacacgcatgggccc

SEQ ID NO: 132092 - DNA, 1050 bp, Homo sapiens
cgtgcctgcctacggacgcttcatccaggaacgcttcgagcgctgccttgacctgtacctgtgcccacggcagcgcaagatgagggtgtgtgggggtggcacaccaggggggtggcacagggggcaaggctgacctggcgctctcctgccccaggtgaatgtagaccctgaggacctcatccccaagctgcctcggccgagggacctgcagcccttccccacgtgccaggccctggtaagtggagactagggggctggggttgcaccctcccagtctgactcctcactgccgccgcctcctcaggtctacaggggccacagtgaccttgtccggtgcctcagtgtctctcctgggggccagtggctggtttcaggtgggtccgagctgggggcagccttgagctggggggcaggtgggatggccaggtgttgagagctgtctctgccgcatccaggctctgacgacggctccctgcggctctgggaggtggccactgcccgctgtgtgaggactgttcccgtggggggcgtggtgaagagtgtggcctggaaccccagccccgctgtctgcctggtggctgcagccgtgtaagtggaggccctgggggctggggagccaggggtggcactgtgcttaggggccgtgtctgggcctggctcacagggaggactcggtgctgctgctgaacccagctctgggggaccggctggtggcgggcagcacagatcagctgttgagcgccttcgtcccgcctgaggagccccccttgcagccggcccgctggctggaggcctcagaggaggagcgccaagtgggcctgcggctgcgcatctgccacgggaaggtacgtggggcgccttgggggtgaggctgcagcgggaggggcctggctcagccactcagccagccttgctctcctgcagccagtgacgcaggtgacctggcacgggcgtggggactacctggccgtggtgctggccacccaaggccacacccaggtgctgattcaccagctgagccgtcgccgcagccagagtccgttccgccgc

SEQ ID NO: 132093 - DNA, 1507 bp, Homo sapiens
tgtacgtccaggaacgtggctgttctgcctggggaggggccgagggcagacggtggggggtcccccacagagaggtcttggcttctgcctctctgtggaatgggtcagttggggtcttccccgagtccccgtcttatagctgcccacttctgcctaaggcccctgccaggggagggagcccgtgggtgatgaggtcatccctgtctgtggctgcccagagccctggccaaggaatccagtgaggggggagctctggggttggcaccacttcagtggaaaatgtgaaggtgcagctccggcgcctccgagggcgggggtgggggcagcgtggccgccatgccacgtcagaccccagggctggggaacaggcgtaggtcagggccagtgacctcagggcacttgaggctgggcctgcactccccctgcaaccccctcacctgctcccctgggcggcccgaagcgggggtgggccttgtaggatcagatgccgacatggtggcccccggctgcaggacatccggaacacggtgggcaacgtgcccttggagtggtacgatgacttcccccacgtgggctacgacctggatggcaggcgcatctacaagcccctgcggacccgggatgagctggaccagttcctggacaagatggacgatcctgactactggtgagggctggtggggtggggccagcagccggggtgggcccgaggggtggggcagggctggcggggtctgactggcggtctccaggcgcaccgtgcaggacccgatgacagggcgggacctgagactgacggatgagcaggtggccctggtgcggcggctgcagagtggccagtttggggatgtgggcttcaacccctatgaggtaggtggcaggggctggcccctgggcggcgggggtcctggaggcaccagcagggcctcagccactctggcccacacgcccacatcttctcccccagccggctgtcgacttcttcagcggggacgtcatgatccacccggtgaccaaccgcccggccgacaagcgcagcttcatcccctccctggtggagaaggagaaggtggggcacacagcccctggggcttggcctgggctgaccgccccgcactgcccgtcctgacccggctgtctatgcaggtctctcgcatggtgcacgccatcaagatgggctggatccagcctcgccggccccgagaccccacccccagcttctatgacctgtgggcccaggaggaccccaacgccgtgctcgggcgccacaagatgcacgtacctgctcccaagctggccctgccaggccacgccgagtcgtacaacccaccccctgaatacctgctcagcgaggaggaggtgggcctgcatcctgggggccgggaccctgtccccatgcttccctgtgaccctccccacccctgtgtcttggtctccacagcgcttggcgtgggaacagcaggagccaggcgagaggaagctgagctttttgccacgcaagttcccg

SEQ ID NO: 132094 - DNA, 1472 bp, Homo sapiens
gccctcctcaccctcagggcccccgggtgcccgacaggcccgagtcgggggcacccttgccctgctgctgcctctgtccctgccgctgcctccctgtccctgccttacagcgtccctgccttgtgcctcgccctccccatcttctgccacgcagctcctcccccaccctctctcccggcgtggctcccttgtccccaccccacagcttcccgatatgaggctctgtgggtgagctaagcccatcctcaccgcctcagcccagggaggggtggccctgagcctggaaagtgggggcttcccagggagccggggtacttggcccaaggaggatgggaccaccaagggtgggaatggaggctcaggctgggggctgggggtggattctgaacctttcatgaggacagttggcctccatatttggaagatactgttttgtttttaattatacaaaattttcagactttatattatcatatcaaaaacacaagatgccatcacacagtggccggaagaaaagccagcgcagaaagttccagtgggcccgggcaggtgctggggccagcgcagagtcccgctgccggcgcctgtctgtacgtccgtctgtccctcggccccgctcgcagccagggctggcctgggggcatgcttgcggtgggccttgcccagctcaggtccaaggtgggggctgtctgcagtcaccccgggcgtccacctcccccagcagcgtctgcctcctggctgctgccggccacctcctaactgcgaatcgctgtctttctgtcgcggtccttgctctgcagaggggagggaggagtgtcaggccccggcagagcccagcgccagtctgcgcctctctggcctccctgctgggtgccatctcaggtggccagcgccaaggcacctccttcccggctctccccagcttccctcaagcgttttggggaggggagcatactgctgcacagccgaaattgtaaaattaaatttcccagatgttcaggccccaggagctcgcgcgtgctgtctggagaggaaatggggattgggaaaagccgtgccgtattttctccctgctcaccctgcttttccggtgccaccaagcacagcaggagctgtaaatcacagctggccagcgtctcctgcaggggccctcacccccagcccccacatctcctgccagcctctgccttcgtgtcccatggcccacgtctcgggcagccctacaggacctggtgtcttggtgtgcggcctaggtgggggacggacagcaggtgcccaagatggcttaagccagtgctgggccgcaggggctaagaacccggggtccttcctctcttgccttgcagcctcttactttctgaactcagctgttttcactccgcctttcaacttactgaaaagggaagcttgcagcggcctggtccagctccccagcctccccgccctgggtgggcccctttggccatccctag

SEQ ID NO: 132095 - DNA, 2066 bp, Homo sapiens
ggtgcaaggacccctgggtcagtagtggcttctctccagtggtggaggtgccgggagaaggccgagctgtgtgcccagcctctagaagggcagatgcgtggttggcgggagccgggccggagctgagggcgtctgggctggtggctcctcctgcctggggccccaccttgggctgggggttcgctcagctggtttggactttgaggaggaggagactaagcaggacctggctttctcccctctggccccggcgccagggcccagcacccctgctggaaccttcagtagggtgagatgcagcaggtgagcctcccgccctggccttgccctgagcacttcaacagataaaaccctgaggaagaggaggcggcctcacgtcgcacaggaaggccgtgtggcgctccgagacaggcgggcgttttgtgcaggggagcggcgcgaacgctgaacactacccgcattgtaatcggagaggggctggggaagagagagacggagcgagggcggctgaccccacgctcccgggggacaggtgggagaggcggaacgaggagagagtgaaggattccagaggtgggccggcttcctctctcgcagacagacacgggaggaggcgggcagcgggccagccccatacctgcagttccaatctgtggtcctgacagctgcagccactttggggagggggagggaagggggctcatcgagagcggaaaaatcccagccgacacatcagccggttgcggcctgtgtccggtgcagtctgggctgggggcctgtccttggggctgggcggcccccaggagagccctgatgctgggtctgtgtgtgcccccggccggccggccggggctctccgtgcggggcctgacccggaggggtcacatgtgtttcctggcagcccgcaggtgctgcgctgggcggggcgggtggtgggcgcaggcgaccgtgatgaatcatgtgtcccgccagcagctcgttccccaggccggggacaggagctgacagctgaggcccagcagagcgtttccagcccagctcggctcgcaggggcggctgctggcccaaggtgcaggctggggccccttccgtcccagctgcctctgtggggcacaggcggagggagccctgggtctctgtggaggtgaggccagcactctgggaagggagccaggggctgtggtgggcagggagcacctgccactcgtctgcccggcggctgtgagctacgagtggattcgggtgggctgccgcaggcctgggggtcagcccacgccacccccggtctggtttgaatttctggagcagtggagggtgacggagtgttcctcccccgcccctcccctcttgctggctggcgggccgggccctcggccgctgctaccggtgcagctcagggagcggctgggctggctgcccaggcctgaggctggccaagctgcagccgcggtcggagtcaggcccgcagcggagggcttggctgtgagtgctgcaccccaaccagcagggccctggggatcctttcagctccgaggcctccaggtcgttgttccctgttcactttcttctagcctcgttagacaccccaaactctgaccccagtccacgggggctctgacatctctttcccctgcactccctcttgaccctgcccagacctccccatgctggcccgcaccttcccacctgctcctgtctggcctcctgcattcccgctctgagctggctctgccctgtccttggtgccggccgccgacgccccgcacctgcccgctcaggccagcagcccctgatgtccctgccctggagactttcactatcttccatcccatttgtccccaacgttgaccggccactgaggttgggggttcatgtggaggtttgcaacccccactaggcccaggtctggaaatgggaggcctggaggtgaggggtaggtgggctatggaccctccctacagaactacacccagtgcccagtggagggagggctggcgtgggcgccgtgggccttagggtgctatgcagagtgcccggcctggccatgctcctgggtccaccctgct

SEQ ID NO: 132096 - DNA, 1044 bp, Homo sapiens
cagatgcctcccgtccagagaagtgcgcatctgcctgggcctctgttcccttggagcaaagtggggtggccctaggggagtgatttggggccacaggtgggcaggaaagaggcttgggaggtgggagacagcctgcagctctcccatgagacagtggggtgaggagagcagggcccgtcaggcagccccgtgtccttggaggtggccgtggcaccaggaccatggtcctcctcggcactgggcagagctggctgagagagggccgacctcactgccggggcccttcagggctgtggagagggcccctggtagcagggcagggagggcgccgctggggcgtgtgctcctgcgagcggcgatctcagctggagcgcgtgggtggcagtggctgtgatgctgagaaggtctcgggccaagctcctgctggtgggaggtgcctccctgccaccccctgcccacctacctccccttctcctcaggccacttccctgcccttcctgggtctggatccagggcctggacctggatgacactggggcttcagggaccccctgctggacgctgacttttgaagacctgagcagcccctcacaggagagctgtactccagctcttggtgtcttattcccctcccccaggtgcgcaggcagcagcgagcaggcggagggaggcgggcggagcccctggaggaggcgctgggcctggctggggtcctgccgccggcagtggggggcccccaggagccggctgagctgcggctgccccgcccccgcatggccacctcacccctctcccaccgcgcctggagcttcacagacgtgatctcatccagccgctgggacccccggggaggtgggccggggtggaggggcggggcaagggggctctcggcctttgccgaagcagcccctccgctttgatttgagcggttgggagaaactgaggccgggtggctgctcaggcagaggatgcagccacccaccctccccctgcctgtggccgtgtttgtcaggaaagcgtagcaggctgagggatctgggtggc

SEQ ID NO: 132097 - DNA, 1041 bp, Homo sapiens
tgtggcggtcgtggcacgcagtggtcttggggcctgtccttgagacccatgatggtcttgagacccgtggtggtcgtggcctgtggtggtcttgaggcccatgggggtcatggcccatggcggtcgtggcccgtgacggtcatggcccttggtggtcatggcccgtggtggtcttggggcctctggtggcagcacacatggccagtgcctcatgcagggttggcctccatgcctgggaacgaccctgccactcttgggctcctgccccgagttaccttccttttccctgagtaaaaagggatgtttttcggctgtattttctctgggcttttcagttcctgctgatgtactttctttaaaacaaaatgtgggtttcctaggtacctgttgatgagtcgttgctgtcacacgagccatcggcacagagctcttggatagcagcctgtctctgtgctgggcaccctgcggctagcgtgggcagggccctagggagccttggccgtgctgaggtgctgggtgtggggtctgtggtgcagcgctgggttgtcttggtgtccttggcaccccgacagcgatgttctggctctggtctctgggcaagttaggactgcttccctcctgctgtccacgtctccagcagaaccctcttgtgggcagccctgggagcagagttctcttcccaccgaaccgggacaccgcagctctgtcgccatcctctcccaggaggtgagggcagagcccgtgtctcatgcctggttggtggcagtggggcacggcctggctggcctgatgctggggaggggaggctctggtgtggtcacaatagggggctcatgcgcttggacaccgtttctgtctggctgagcccactgtgggtttctccctttggtcctcatggtgacattctagccctggggctgggcagaggccacgcagggttcagggactacagcagcctttccttggccccagcggccccgcatcctgctggcacctcgtccttgcgctccccctcggcggctccctgcccacccgtcggtc

SEQ ID NO: 132098 - DNA, 1091 bp, Homo sapiens
catttctcttccagcccccagccccttttctagtgacctcttggctctggggccttggatgccagggtgaggtgtggagagggctcaggcaggctgtctgagggacccagtggagtccagcccagcctgaccccacagggcctccggagtgtcagtgggtggtagagagcagtgttagttttgcgatgagagctgagctccaagaggaggaggttgtccttgaaaagccccttccctgtgaggtgctaggaattaaaatgtcgatggcaaaggcaagaggctgtcttgtcagtggaggtagaagatgaggaaggctcaggttgggtggatgcttttggtggaagtttgtgactggaggggtgtggtcctggaggccacatggagctgctggtgggtggctggaggggcgagaggcagctctccctgcagtgttcagtgccccatgcctggaggggcagttgtcaccaacccagtgtttccttgcagccccccctcctctgcacctctcctctcagccacagcaccggcagcgattctggcgtctccgacagcgaggagagtgtgttctcaggcctggaagattccggcagtgacagcagtgaggatgatgacgaaggcgacgaggagggagaggacggagcccttgatgacgagggccacagtgggattaaaaagaccactgaggagcaggtgcaggtgggtgagcgaggagccccctcgagggctgtcccccatgtgcaggtggccttgggctttctgagactgccactgtactgccttctccaccgtccctcagaaccccaaggccggcgtccctccttcactgcacctggggcacgcttgggctctaggacgctggtttccatccccagttgcgtgccgttcccaggaactctgaaaatccacatgcctaggcccttccccgtcagacgatgctcgggcaaccctcctggcaacaggttgggtttccttgaggtggggattttactgcttggaatccagtggcaggacccagctgaggagggagctgagcagcatggcagggctcaagcaggcggcatgggggccccaacggaacccagctgggcctg

SEQ ID NO: 132099 - DNA, 1433 bp, Homo sapiens
gaaggccgggacgttgctgggccccgccgcgccggggcccacgggcagatccatctcgagcaaggagggaataggcggagggagcggccgcaaagaggggccgagggccgggctaacgccgtcgccgcgccagccttccgggccgcgccgccgcccgctgcgcacacacagccccggggcccagcatggccgccgccatcttgcaacgggcgcgctcccgccgccgccgctgccgccctcccgcgtcacccccggcgcgagcacgcaggccccgaccccgccctggtccccggcccagccgcgcgcctgcgcgtgttggtcccacccccttccctccacccgccaatcggggccgggctgggcggggcgcgtcctcctgcgcacgcggcccggtcgctgtcggaagcggctgtgcgggtggcggccggcgcgcggtggggcatggcgggttcgcggggtgcggggcgcacggcggcgccgagcgtgcggccggagaagcggcggtctgagcccgaactggagcctgagcccgagccggaggtgactgtggcgatgcggggcggcggggcgcgtccctagagggcccggcgggcacgtggccgcgctggggcgggtgggcccggcttctgtcacctgggcgcccgcgcccagtgaatcggtcttgggcgtgggtgcagctcctctatcggggggtctcaggcagagcggactgcggggtaaaggacggcgtccgggaagcaaagaaacgggggagcggggagtggggacggggcgccccttgcagcagcctctccagccgttccatttgtgcatcctgccaataaaagggctcggcttgcgctcccagtaaatgcttaacctacgtatacgctagttaattgcgtttttatgctcatgggatagacatgagaataagaaaacctgaatagaacccagtgtctgctgcatttgctgtattagaactcactgttgctctctgctagctcagccctgtcttggttgtggggatcatcaaattgggtggtggaggggatggacagccagcccctcacagccccctcggccgcggccgcgctgggttgttgaaactgccccattgctttgtgaagcgaattcaactcatcctggctcccatgggctgaatggcccgcaggccactctaggcgccaggttctgcgacttccacccttggactaaacggtcctcaggagccagttgtttgcgcccaggccacggatgccatttccactagttattgtgattgtgtagccgactgaataccaagacacatcatgactctgtgtgagagaggcattgtgtgaacactcggtatgcaatagctaatacatgcaggtcgtaccttaagtgagacttgtaaactattaggaaaacagtaaaatctagaattctgcattcaactgcttcctttttct

SEQ ID NO: 132100 - DNA, 1077 bp, Homo sapiens
tggagcacgtccacggctcgggcccctactcggtgagtgccggagacagggcacccgcccaggcatgcaggcggcagtggggtgggttgcccctgccggcactgcatggacctcctgcctttgattgcaggccccctccccagcctacagcagctccagcctctacgcccctgatgctgtggccagctctggacccatcatctccgacatcaccgagctggctcctgccagccccatggcctcccccggcgggagcatagacgagaggtgggggccgcatcaccccagccatcctgtcccccaatgaggcgagcccctgtgggcccagggcagagttggggatgaggtggggctggccgagacgccagctcacctggcccccctcgtgtgcaggcccctatccagcagccccctggtgcgtgtcaaggaggagccccccagcccgcctcagagcccccgggtagaggaggcgagtcccgggcgcccatcttccgtggacaccctcttgtccccgaccgccctcattgactccatcctgcgggagagtgaacctgcccccgcctccgtcacagccctcacggacgccaggggccacacggacaccgagggccggcctccctcccccccgcccacctccacccctgaaaagtgcctcagcgtagcctgcctggacaagtgagtgccgcccacccctggccccacccacagcgcctggacgcacagccctgggcttcagccccgactgtcccagtggactgagcagggcagctggcgaggcaggaccctacccccaacctcggagctcggggctggggagggagacaggtgccagccagatcaccccacagtcccaaacgccacagaagccacgggcatgtccggacaggctgccgggccctgctctcagccacccctcctgctgccgccaccctcgccacaggccacgggccctggcaggtcgtgctgcccagacacatggcaggagatggtgagcagggccggcctccacacccccagcccctgcctgcaatgggggctcttgtttttgtatcttgcagtttggctcgcactccacag

SEQ ID NO: 132101 - DNA, 1054 bp, Homo sapiens
ctgggacccagcctggctgtccgtcccatagcccaggtgtgccctgtggcctagggctttcttggtcacagccaccagaccgtgggtctcatccccacagcagcaccagggcagggactgagccacccacacactgagcagagccccacctgttttcccagtgcaacgggaaacctcaccaaccctgaacactgaaatccctgatccttgtgctggagctgaatacgccccttgtctcctgggtccactgccaccaaggcccccaggccctcatggcaaagggatgcccagcataggcccagccgcacccctgcagggcacagagcctccactgccttccaggccgtcctcgaatgcgctgccccctccagcctgtgcaggcgtacacgggggtgcagcctggggggtacagtcaaggggagcccttctcccacaggagggcattggggtgtggggcctggggcactggttcaggtaccgccttatcccgggccaggaatgagctcagtgaccacttggatgctatggactccaacctggataacctgcagaccatgctgagcagccacggcttcagcgtggacaccagtgccctgctggacgtgagtggagccccgccgccccgcctccccgccccgcctccccgcgcctccccgcctccccgcctccccgcgccgcctccccgcctccccgcgccgcctccccgcctccccgcgccgcctccccgcctccccgcgccgcctccccgcctccccgcttccccgccccgcccccgggtgctgttctgacttccctccctcctccgcagctgttcagcccctcggtgaccgtgcccgacatgagcctgcctgaccttgacagcagcctggccagtgtgcgtaggcgggcggggggtgagggggaacgagaccagcgggagtgctcacaataccgtctccaccccacagatccaagagctcctgtctccccaggagccccccaggcctcccgaggcagagaacagcagcccggattcaggtgagccaagtcccaccggccccacctctgcccccaa

SEQ ID NO: 132102 - DNA, 1064 bp, Homo sapiens
catgcccgtgaacgcccagaggcggaacattcgcagagggacgctcaccaggtactgagatgggagggagagaggatgccagggagtggggtgtcagccgtccctgctgtgggcatacccctgcccagggatgaggcaagatgccccccagagcactgacctcgtggaagaaggccgaggccaggaacacccctgtcctggccatccacttgctgctgccccgtcgaagcatgggcttgtagaagtgtctgcagaggagggggcatggaaagcggttcaggttcacagccatgttccacatcacacacacacacaccccacctacctgatgcaccacttgtgcacagggatgttccagttctgccagaagtaggtgacagactcggagttcctgggggccaagagaccacagggggatcagagcacaccatggcccatcccagcccccagggacaccccagggacactcaccaccagtcccggtagaactcccggtctccaaactgcatgagctcagccacggcattcaggcaggagtggaagagccagtagaagaagatgagccagatgaggtgattggggacctggcagggaggtgggggtgggcaccaagttctagaaccttcccccacatgccactgtcccctcctgtcctgtgcatgcgccacctgtccgcactcaccgccagcttcaggaggcgctcgatgatgcgtgagtagtccatgtcctgcagaaacaagcccttcagctagccatgctcctggtcactccccagccaccccagctgcaagagcacctgagccactcaccttgaagggcttcatggagttctggatggtggggaccatccactgcaaaggagggcaccacgtcagctcccagccatgcccagctacacccaaccctgccctaccccacttacctgctggatcagccccacctggagctgggtgaagaacagctgggggggaaacagagagcagccagctgaggccctggctagccagaaggccccctagcctccagtggctgcccccagcccccaacctcaccatctcaaggat

SEQ ID NO: 132103 - DNA, 1926 bp, Homo sapiens
tgaggtgggtgctgagtctcagagcttggcatggagaccagacagggctgggtctgcaagcctgaggctgccgccctgagctcgggctgggacgtgcccagaggtgttgggaggatctggggtgagtaccctgtggccaggactaaaggggctgcaccctcctgtccatccctcgcagatcttgagcaatgcccggttatttctggagaacctcatcaagtgagtgcctttgccaggtcccacccctgccccacccatggcctgtccaggccccgccccacagccccacctgccacccactcagacccccatccctccacccccaggtatggcatcctggtggaccccatccaggtggtttctctgttcctgaaggatccctatagctggcccgccccatgcctggttattggtgagctgggctctgaggagggcctcgggtggggatcaggctgacgtggccctaaacctgccccttggtgcttctgtccacagcggccaatgtctttgctgtggctgcattccaggttgagaagcgcctggcggtggtaagcagtgcccctcacctccgtgtgtgctcaccctgctgtgtgcgctcctgggaggagctgctccccaggcctggcagccctctcccaggcaatgggagccctggttgagtgctctgctccccactccagggtgccctgacggagcaggcgggactgctgctgcacgtggccaacctggccaccattctgtgtttcccagcggctgtggtcttactggttgagtctatcactccaggtgcgcccccatcccaccctgcccatctgtctcgggccagccacgggcatggcctccggctgtggcgctgtggaggcctgagtccacctctcctgcagtgggctccctgctggcgctgatggcgcacaccatcctcttcctcaagctcttctcctaccgcgacgtcaactcatggtgccgcagggccagggccaaggctggtgaggggctgccaggggctggggctgcctgctggggggctgggcagcagcagggccccaccagccccctcccactctgctgtgctcgtagcctctgcagggaagaaggccagcagtgctgctgccccgcacaccgtgagctacccggacaatctgacctaccgcggtgaggacctctgtgggcctgaggtgcgggggacaggctgggcctgttctggtaccaaccccccattcccattccagatctctactacttcctcttcgcccccaccttgtgctacgagctcaactttccccgctctccccgcatccggaagcgctttctgctgcgacggatccttgagatggtgaggttgggggctgggggcagccactggaggctagggggccttctggctagccagggcctcagctggctgctctctgtttcccccccagctgttcttcacccagctccaggtggggctgatccagcaggtaagtggggtagggcagggttgggtgtagctgggcatggctgggagctgacgtggtgccctcctttgcagtggatggtccccaccatccagaactccatgaagcccttcaaggtgagtggctcaggtgctcttgcagctggggtggctggggagtgaccaggagcatggctagctgaagggcttgtttctgcaggacatggactactcacgcatcatcgagcgcctcctgaagctggcggtgagtgcggacaggtggcgcatgcacaggacaggaggggacagtggcatgtgggggaaggttctagaacttggtgcccacccccacctccctgccaggtccccaatcacctcatctggctcatcttcttctactggctcttccactcctgcctgaatgccgtggctgagctcatgcagtttggagaccgggagttctaccgggactggtggtgagtgtccct

SEQ ID NO: 132104 - DNA, 1024 bp, Homo sapiens
gctcacggtgtgcggggcagcagcactgctggccttcttccctgcagaggctacgagcacagcagagtgggagggggctggtggggccctgctgctgcccagccccccagcaggcagccccagcccctggcagcccctcaccagccttggccctggccctgcggcaccatgagttgacgtcgcggtaggagaagagcttgaggaagaggatggtgtgcgccatcagcgccagcagggagcccactgcaggagaggtggactcaggcctccacagcgccacagccggaggccatgcccgtggctggcccgagacagatgggcagggtgggatgggggcgcacctggagtgatagactcaaccagtaagaccacagccgctgggaaacacagaatggtggccaggttggccacgtgcagcagcagtcccgcctgctccgtcagggcaccctggagtggggagcagagcactcaaccagggctcccattgcctgggagagggctgccaggcctggggagcagctcctcccaggagcgcacacagcagggtgagcacacacggaggtgaggggcactgcttaccaccgccaggcgcttctcaacctggaatgcagccacagcaaagacattggccgctgtggacagaagcaccaaggggcaggtttagggccacgtcagcctgatccccacccgaggccctcctcagagcccagctcaccaataaccaggcatggggcgggccagctatagggatccttcaggaacagagaaaccacctggatggggtccaccaggatgccatacctgggggtggagggatgggggtctgagtgggtggcaggtggggctgtggggcggggcctggacaggccatgggtggggcaggggtgggacctggcaaaggcactcacttgatgaggttctccagaaataaccgggcattgctcaagatctgcgagggatggacaggagggtgcagcccctttagtcctggccacagggtactcaccccagatcctcccaacac

SEQ ID NO: 132105 - DNA, 1015 bp, Homo sapiens
cacagccagagtacatggcagtggccagaggcctctggagagtgaggcctggagtgtccaagctccatgtaggtccagtccgggcagggccagctgggcttgcttctgaccctgacatgctcgtcccgctgcctggaggtgcaggctctgggggtccggagagctttgcccactgtaggtcttgaggccacagtgtggctctgcctggcttctcctcctggttgtaaataaggagtggggcctgagggcagacgaggacactggggtgggggcctggatcctgcgggggtggcgctgccctgctggtgcccactcagggggtgcttgtgttgtgctctgtcaggtgccatcgcctgcaggattctttattcagctctgacagtggcttcagcaactaccgtggcatcctgaactggtgtgtggtgatgctggtgagtgggacatggtgtcgggagcgggtctaggtccaggtggggctctgtcccaggctggcctttgcctgagaacaggctctgtcacccagggtgtccaggctggagcccctgtgggctggggtgtgtggagcaggctgcacctccatgtggctgccagcactggactgttggggaggggagtggcagtggctgcccctgctgtggtcacttgggtgcccatgcaccacatacttgctgcttcccattggatcccaggagagccctgcagatgtggtgtgggcgtggggaggccgaacagtgcctggctggagcctgtgtgttgtgagctgggcctgaggggtgcagggcctccagggagggcagggtggagggggtcttgccctgggctggtgggagagtggactgcatgctctgtggacacaaggcctctctggcaggggatgtgagaagagcttcctgtgctacgccacatggcctctgtgggtatggagccctgcaggcctggccaccactctgcagtcctcctggccccttccctcagctgtgggtcctaggagccccccaggaaggtgattagatgg

SEQ ID NO: 132106 - DNA, 1074 bp, Homo sapiens
ccaaaatcagcccacttctgccttgataacctctaggccctcagctgctctctaaaacaaagccctgagggcccctgggccagggtaaaggccataaaggggggatggagggtggcaaggggattgctcaaggccagcttggtggaggaagccaatgcccaggctggccaagtccttcccatcggccatggttctctccctccacccctctctgtcagtcatccagctgagcagggcacacgcctgcaggtgtgtccaccacccccataccccactccccacctggaggatggaagtcccaacacagaacccaactctctgtccctacaacagacgctggctctggcaacatcggcagggctccaggccagcctaaccactggagcaatgaatgggccacgcagccactctcagaagggtctgcaaggacaagaacgcctctaacactgccccttgtccggggcagctgctgattcccctgtcctcggacaggcctgggctcctctggccccctccctggcaggccagccctcctctgggagcctttcctacccgcaaggcaccgctcatagcaccaagaaggaacctatcaccacaaactgcccagatcttatctgactccttccatataaggggacactgtccagggccgggcccccaccagcccgcccctcgaaaagctcctcaggagcccctgaggatgcacagacccaagaggatctggatgcgggacacctgccggctcccctctgcctggccaaggccagctccagagcccctacccagtgaccttgtcaggtgactctccccaagcctcagtttccccacagggcccatagggcacaccgatccccgcttagcccagggcccatgttctcggactcggagctcgcgcttcggccaaccccggaaagtcgcggggcccttgggtcagaggttagggggtcaggcgctccgctacctcagctcccagtggccgctgcccacgccggcgtctccgtccttgttgggggccggggctggcgcgtcccccgcggctcccacgtcggggcccgcagcggcgtcccgcacctc

SEQ ID NO: 132107 - DNA, 1958 bp, Homo sapiens
ggctccttccgtctccctgcaccaaggtgttgggtgggaaggactcgtgtgggaacattagtgcagctctgcctccgctgtcggcccaggttttcacagctccagaggctgaccctcatccactggaagtctcaggtacaccccgtgttgaaggtgagagctccaggctgtcctgcacatcagctgtgacactctgggactgttcagtactctaggaagtgggtcaggcaccttgggggcccaacgctgctccgtggggatgtctgcttgcctgcctggttctcttttcctgctgtttcctccagcagggaggtatcagaggcggggacacccaagtaggcctggcatgggcagaaaggaggtcacagctaaggcggtagagtggggttggcaccagccacttgtctgtttcccttgtggatcttagcctgtcgtctcccaaccccagctgcccctctgtctccccgcagctggtaggtgagtgctgtcctcggctcactttcctcaagctctccggctgccacggtgtgactgctgacgctctggtcatgctagccaaagcctgctgccagctccatagcctggacctacagcactccatggtgagccctgtgtcccaaggggccctgaaaaaacccaggccggggtgacgggtgctcttgtattggggccccaggtggagtccacagctgtggtgagcttcttggaggaggcagggtcccgaatgcgcaagttgtggctgacctacagctcccagacgacagccatcctgggcgcactgctggtaagttggcattggtgggagcagaggcagatgctgagctggggactgccaggccactgaccctgtgacctaccccctccccccatctctgcagggcagctgctgcccccagctccaggtcctggaggtgagcaccggcatcaaccgtaatagcattccccttcagctgcctgtcgaggctctgcagaaaggctgccctcagctccaggtacctggcgccctgcctctcccacctgtcacaccctcccccatctacagcctggaccttgcccccaggtgctgcggctgttgaacctgatgtggctgcccaagcctccgggacgaggggtggctcccggaccaggcttccctagcctagaggagctctgcctggcgagctcaacctgcaactttgtgagcaacgaggtcctgggccgcctactccacggctctcccaacctgcgcttactggatcttcgtggctgtgcgcgcatcacgccggctggccttcaggatctgccatgtcggggtcagcagtcctgggtggtggccgggcgggtgaggtgtgggggcccttgtcaccttgtagcttatgctcactcctttcactgcagagctggagcagcttcatctgggcctgtatggcacgtcagaccggctgactctagccaaggagggcagcccctttttgacccagaagtggtgccatacactgcgagaactggacttgagtggccaggggttcagtgagaaggacctggagcaggccctggctgccttcttaagcacccctgggggctcacacccagccctgtgctctcttaacctcaggggcacccgggtcacaccaagcactgtcaggtcagcatcccctaccccagtccctggagccagtgtggctgtcactgtgtctgcctggggcctggaagttgtgtcctgcctggcctgagacctccaggggtcagaggggcatgcatactgtccaagcccctgcgtggggtgggcctgaggacaccaggggaactgggcttggccttggtggctatgggtggcagagccaggtgtcgaacaccagcaggcacagctccctagcctggcccagcccttctgaggcaacagctcaacttcctgtggtctgccctccccacagctctgtgatcagcagctgcccgggcctgctctacctcaacctgga

SEQ ID NO: 132108 - DNA, 1034 bp, Homo sapiens
cgctcggggaagccccagggagcggaacgggcgaggcttatagaccgacaaccccccggttcctctcaacgcccgcccgcccgccgaccagcttccggggcgggacttccggtcgtgggccatgccgggggcgggcccggaaccgccacgggtgagtcgggtcgtggctgctgccgggtcctgcgcgctccggactgaggtggcgtccctgggccggacggcggtgtcccggcgtggcgggaagccggcactggagcgggagcgcactgggcgcgggaccgggaggcgcagggaccggacggctcccgagtcgcccacctgacggtaccgagagggcggcgcccctccgagcagagccgtcccggccactcccctgggatctgacttggctcttgcggtcgcgggcaccgtgaagccctggggtgtgcgtggctcctcctggtaggcgccctttcccggcgtccggcttggggtggtggtggcgttgactccagccccgcctctccctggagaggagggctccactcgctccttcggcctcctcccctggggccgcagcgactcgggccggcttcctgcttccctgcctgccggcggtcccgctgggtacgttttagccaatcctccccatctgcgctcctgcccggggctcccccagttcccctggtctcaccctgttctgactccggctctgcatcctatctgtttctctgtttctttcaagctagaagaagtcttcacttcccaggagagccaaagcgtgtctggccctaggtgggaaaagaactggctgtgacctttgccctgacctggaagggcccagccttgggctgaatggcagcacccacgcccgcccgtccggtgctgacccacctgctggtggctctcttcggcatgggctcctgggctgcggtcaatgggatctgggtggagctacctgtggtggtcaaagagcttccagagggtgagtgggagggaggtgcaggtgtgcccaagactcctgggctgcggtcagtgggatctgggtggagcta

SEQ ID NO: 132109 - DNA, 1025 bp, Homo sapiens
tggccatgggtgtgctgtgcaggtacacaaggacccccagcccctgtgcgggtggaactcagggctgggagccaggtcctggcgcagtcagccctgacattctgctcgctcactgcaggtccttggcagggctgggcggcctctctctgctgggcgtgttctgtgggggctacctgatggcgctggcagtcctgagcccctgcccgcccctggtgggcacctcggcgggggtggtcctcgtggtgagcacagggggacatgaagtggggtgggggggcgttgccctggagcaggcacatctcacgctcagctggtgctgtgtccccctcaggtgctgtcgtgggtgctgtgtcttggcgtgttctcctacgtgaaggtggcagccagctccctgctgcatggcgggggccggccggcattgctggcagccggcgtggccatccaggtgggctctctgctcggcgctgttgctatgttccccccgaccagcatctatcacgtgttccacagcagaaaggactgtgcagacccctgtgactcctgagcctgggcaggtggggaccccgctccccaacacctgtctttccctcaatgctgccaccatgcctgagtgcctgcagcccaggaggcccgcacaccggtacactcgtggacacctacacactccataggagatcctggctttccagggtgggcaagggcaaggagcaggcttggagccagggaccagtgggggctgtagggtaagcccctgagcctgggacctacatgtggtttgcgtaataaaacatttgtatttaatgagttggcattaattctttgagcacatctctctgtgtggatgcttccctgaactagagccatggcctggcctgtttaacaggctgcctctccccaggccctgggcaggtccttacccaccacaggctggtctcacggattgtacagtcatgccctctgagcccagactaccccacattgcttcttggaactgccctgggctctctgggcccacacgagctacc

SEQ ID NO: 132110 - DNA, 1037 bp, Homo sapiens
ccaggtggatgagttgttccttgaggacttccaggccctcccccacgagctcttccaggagtttgactaccagccaattgctgccgccagcctggcacaggtgcacagagccaagctgcacgatggcaccagcgtggctgtgaaggtatatgggggctgccttgttcagcagtgggctggggcggggcacagtggggccccaagttctcaccacaccctcgcccagtgcaggtgcagtacatcgacctgcgggaccgctttgatggggacatccacaccctggagctcctgctgcggctcgttgaggtcatgcaccccagctttggcttcagctgggtcctccaggtacagccccaccccttccccggccagcaggagcaaacacgtaggcagagctggtaggagcagctggtaggcagagctggtcttcaaccgccatctggcccccaggacctgaaggggaccctggcccaggagctggacttcgagaatgagggccgcaacgcagagcgctgtgcgcgggagctggcgcacttcccctacgtcgtggtgccccgcgtgcactgggacaagtccagcaaggtgggctgggccaggcccttggggtgggcacagcgctgggcctgctgagcccagcctcttgctctccccagcgcgtgctcactgccgacttctgcgccggctgcaaggtcaacgatgtggaggccatcaggagccaggggctggcagtgcatgacgtgagtgcgggggggcgggggcgggtcagggcgggctggtgctgtgtccactgcaatgcctctcctctccccagatagcagaaaagctcatcaaggcctttgctgagcagatattttacaccggcttcatccactcggacccacatcctggcaacggtaggaatttaccccaggggtgggggtctcggggtgggcgcagcgcgacctaagaggctgtatccctagttctggtgcggaaaggcccggacgggaaagcggagctggtgctgctggaccacgggctctaccagttcctggagg

SEQ ID NO: 132111 - DNA, 1478 bp, Homo sapiens
tgcccagctgggttttctgggtatgtgggcagggccctggggagctgaggctctgggggtggccggggctgaccctgggcctctgctccccagtgtctgaccgcgaccgcaacctcatggtgtacatgtacctgcccgaaggtgagtgcttcctccaccccctctgcctgggccggggctgggctagcagtgacccctaggcctttctggtctagccaaggagagtttcgggggcatgcgcctgctgcgtcgggcagacttccacgtgggtgcccacgtgaacacgttctggaggaccccgtgccggggggccactgaagggctcagcaaaaagtcggtcgtgtgggagaataagcacatcacgtggtttggtgagtgtgggggagcaggtgtgtctgggtggggggccctagggttggcctggctcacaccaaaaccctcaccctacccctgccagccaccctggacggcggcatcgggctgctgctgcccatgcaggagaagacctaccggcggctgctgatgctgcagaacgcgctgaccaccatgctgccacaccacgccggcctcaacccccgcgccttccggtgagccccggccccgcccgcgtgcagcaccccctccaccccagcctgccctgacacctgtgcctgtacgccccaggatgctgcacgtggaccgccgcaccctccagaatgccgtgcgcaacgtgctggatggggagctgctcaaccgctacctgtacctgagcaccatggagcgcagcgagctagccaagaagatcggcaccacaccagacatagtgagtgcgcgccccgccccccgcgcgccccgcccctccgtgtgcatccccacccacccacccacccacccttccatcccctgcagatcctggacgacttgctggagacggaccgcgtcaccgcccacttctagccccgtggatgccgtcaccaccagcacacggaactacctcccaccccctttttgtacaaaacacaaggaaaaacattttttgcttgagaggagtgtgtggtcattacacggcctcctggcccagctgctgtcacagccccccagtgcgagtgcccacggggctcggggtgtctacacctctagccccgccacctccgtcagcccaaggtgaaaagggccccgccggccctgggcggctgcaccctaggtctccaggtactggtagagctcctccgctgggggcacgaggctcaggtggaccagagcacgagccaggagggcggtcagccgcatggccaaggtctccagcctgcgtgggtcaggtcacaggtcacaggtgggtggggagcaggcccccgccacccacctgccccgcggccactcacctgagcgccacttcaaacttgagcatctcccagacgaccttggcgtggcgcaggaggctggtgccgtagacaccccgatacgtggcgcccgccaggcggctccagccccggacagcc

SEQ ID NO: 132112 - DNA, 1070 bp, Homo sapiens
caagtttgaagtggcgctcaggtgagtggccgcggggcaggtgggtggcgggggcctgctccccacccacctgtgacctgtgacctgacccacgcaggctggagaccttggccatgcggctgaccgccctcctggctcgtgctctggtccacctgagcctcgtgcccccagcggaggagctctaccagtacctggagacctagggtgcagccgcccagggccggcggggcccttttcaccttgggctgacggaggtggcggggctagaggtgtagacaccccgagccccgtgggcactcgcactggggggctgtgacagcagctgggccaggaggccgtgtaatgaccacacactcctctcaagcaaaaaatgtttttccttgtgttttgtacaaaaagggggtgggaggtagttccgtgtgctggtggtgacggcatccacggggctagaagtgggcggtgacgcggtccgtctccagcaagtcgtccaggatctgcaggggatggaagggtgggtgggtgggtgggtggggatgcacacggaggggcggggcgcgcggggggcggggcgcgcactcactatgtctggtgtggtgccgatcttcttggctagctcgctgcgctccatggtgctcaggtacaggtagcggttgagcagctccccatccagcacgttgcgcacggcattctggagggtgcggcggtccacgtgcagcatcctggggcgtacaggcacaggtgtcagggcaggctggggtggagggggtgctgcacgcgggcggggccggggctcaccggaaggcgcgggggttgaggccggcgtggtgtggcagcatggtggtcagcgcgttctgcagcatcagcagccgccggtaggtcttctcctgcatgggcagcagcagcccgatgccgccgtccagggtggctggcaggggtagggtgagggttttggtgtgagccaggccaaccctagggccccccacccagacacacctgctcccccacactcaccaaaccacgtgatgtgcttattctcccacacgaccgactttttgctgagcccttcagtg

SEQ ID NO: 132113 - DNA, 1022 bp, Homo sapiens
gcccatcccatgttctccatggccctgcccgttcccccatggctcccctcatcctgccaggtgcatgtggaccaagagctgcttatctacgaggccttcccccacgactctcagctcggccagggcaatctcaaagtccgctttaagaaggtgccagtggctggactgctggggcgtggggtgggtgtggtacaaggtgtgggtttcagaccggcagcccctggaggacctgcatggttcccccccaggtccctcacaacatcaacttccgtgagaagaagccaaagccatccaagaagaaagcagaaggtggcggcgcagaggagggggctggggcccggggccgcgtggcgcgtttccgctacttcgaggatatttatggctactcaggggtaggccagcgcctttgcaggggtctgtggtagaagggagacgcggcctcatccgcagcatcctcatccacagcatcctcacggtgcctgcccccaggtcttcatctgcggcccctcccctcactggctcttggtgaccggccgaggggctctgcggctacaccccatggccatcgacggcccggtcgactctttcgctccattccacaatgtcaactgtccccgcggcttcctgtacttcaacagacaggtggggtccggccggttcccagcagcactggctgatgctgccccagctgggggctgagggggaggggacaggagaagggaccattggctccaccctgaggaccaggaaggagtgtccagagggcgatggggttgaggtcgaggaggtggaacctgtgacttggttgctccaaaggtctggaaaggggtggttgggagctggggctgcagcccctggggtccccaccactgctctgccggctcgccgggcaagccctcgcagggcctggcctccacacttctcaggagagctgacgtgagtgctagctctgccccttggctgctctgtgactttgggagggcacacaggctttctcatcctggttccctatttaagccacc

SEQ ID NO: 132114 - DNA, 1047 bp, Homo sapiens
ctctgtgtgcagctgcgggtaagtcggtgccgcaggatgaggtggacgagattgaagtgtacggcagcgaggcccagtcgggaacacagctggccacctactcctttgaggtgagattgaggcagcagggcccccgtcccagccagcgcccccagcgggcccctgactcttgctgtgccgcaggtgtgtgacagcatcctgaacattggaccctgtgccaatgccgccgtgggcgagcctgccttcctctctgaagaggtgcccagggttggggtcggggctgggggcaggggctggagtgtgagggggggtggggggcatagtcctcacccccgagtcctgtgcagtttcagaacagccccgagccggacctggagattgtggtttgctccggccacgggaagaacggggctttgtcggtgctgcaggtgtgtgggcaggtagggggcgggcgcctcctggtgggacctgggtgggctcacacccccatcacacccccaccccatcatcattctagaagagcatccggccccaggtggtgacaacctttgagcttcccggctgctatgacatgtggacagtcatcgccccggtgcgtaaggaggaggtaggtgcgagcctgctgcagggaggccctgggatgggaccggcgctgccttctcataggccgggggtgcccaggtcgcacctgcgtgcctgccttcactggactgtggcttccagcctgcccccctttggccctgacaggaggacaatcccaagggggagggcacagagcaggaacccagcaccacccctgaagcagacgacgacggccgcagacacggattcctgattctgagccgggaagactccaccatggtgaggggcagggcctgggacctgggacctggggctggggtcccctgcggggggcgcctccctcacagctgtcgcccgcagatcctgcagacggggcaggagatcatggagctggacaccagtggcttcgccactcagggccccacggtctttgctgggaacatcggggacaaccgctacattgtc

SEQ ID NO: 132115 - DNA, 1253 bp, Homo sapiens
agtgaaaagggaggagataagagaggcagcctgggggagcccgaggcgtcaggatagcgcagggcttcctcttctctaacaggcacgcagatcagtagctacagataccccttggctctggcttcctgccctgtgacatttggacccaggggccggggctgggctgctgtaggtgtgcaaccaggcaggtttgggggtgtgcagacacagagtgcactctaaccctgagtgcttgccgcacagggcctggctgctagggagccgtgaggtaggggcttcctggggaggggcctgtgccagggctgggccgtgggcatgagagcgtgaatgggggtcgctgtggggggctgtgcacagctgtctccagaagcccttctccctgctgcagagagggtttgggcagagctcccaggaggcaggggccaggcttggtggtcttttctcgttccccggatgaggtgagctgccagatgtggcccctcactgccctgtctttctctcccctccaggctctgaccaagaatgacaggagcacaggtgagtgtggtggggcggcctggggctgtgcgggtgccaggcatggctgggccctgaccctgagccctggtgtctcccctagaggggaaggcccaccgggagaagctcgagcttgctgcctccttctccttctttggcaacgtcatgtccatggccagcgtgcagctggcaggagccaagcgggatgccctgctcctaagcttcaaggatgccaaggtgagtggtaggcttggtggggtaggcctggccaaggcgtgggagtgggtgccagggcctgggtacagccgttggttgccgggggcgacactgtcaggaccggcagtcggcagccacggctgtgccctctgaccgcagctgtctgtggtggagtacgacccgggcacccatgacctgaagaccctgtcactgcactactttgaggagcctgagcttcgggtagggccgcgctcccgcccccgcccaggccccgcccagccaccctccctccccctgcagctgggttctgtggccccaagtgtttccctcggggtctcctatgctgggcctggctgatgccccctctgcccccaggacgggtttgtgcagaatgtacacacgccgcgagtgcgggtggaccccgacgggcgctgtgcagccatgcttgtctacggcacgcggctggtggtcctgcccttccgcagggagagcctggctgaggagcacgaggggctcgtggg

SEQ ID NO: 132116 - DNA, 1688 bp, Homo sapiens
cccctgaacccgggagctacgagcggagtcgcttctccctgcagccgtcctgggtctggcgcggacgcaccccccggccgaccccgagccgctgcagccggcgcccctgcggcttccaacccgcgctgctccgcccgcagcggaggccccgcacttcgcgcgctaggggtttgggttccggacgcccagcccggagccgagccgccagccgcccgcatcccgggccactagggcccgctgtcgcccctgcagccacgctcacgcggcggcgctgcgcaggcgcagaagcccggaaccttcccgcccagcttctgggcccggccggactgagttcgctgctgtcccggttcctctcgagtcggctccaactgccaggtgggcggccgggcgggcggccgaggcggcagcgcgaggccggggaggggcgcggtgcggggccgggctcctgcgtgggcgaccccgctcacccttcctctcccggccttgcgcagcccgggttggcgccatgtacgccgtgtacaaacaggcgcatccgcccaccggtctggagttctccatgtactgcaacttcttcaacaacagcgagcgcaacctggtagtggccgggacctcgcagctctacgtgtaccgcctcaaccgcgacgccgaggtaggtcgggccctgggagccctccccgctgtccgcgacgtgggtgctctcaccgcccccggttgcagatggaagagccaagccccagacaagttgagtgatttgcttaacgttcctcagcctgaggagccaggacatgaccctgaatctcttgtgctcagatcctttctcacagctgctaccctgttctgcctcccttcctaccccaccgggaagggcgcgctgccctagccgtcttgtttgctcttccgttttttcagcaagttgttcggaaggagcgaacgcccactgtgcgctgggtagcagagataccatgtgaaccacacctgcagacacttggggaaggggaacatctaaataaacacacctgcccctgcagcaagtgctgctgcgggaataaaggagtgaaggaaggagactgtgtatttccagtcgcatgatcagaagagcctgtctgaggcagagcgggagtttgtcgggggaaggacattggtagcacaaggaacaaggccaggtctaggatggggacagactgttgacaggagtcttggtacagtggggcacacgcctcaagggtttgggaaatacagtggtgttttggttgccggagggttgaaagctggtccaggaaagcaacttgcaagaggcagtttctccattgctcttgaagggaggagtacctcttacccaggcccagggatggtgagaggagggtgttccaggcagaagaaacagcctgtgcacaggcccaaagcagttgagggtggagagacatgcacagtgtggccgtggtatagactggatgtggtggtggggatggagggaggtaggccgtggtcaggactattctccacaaagcagggaggagccacaagagggttgtgaataggggctgacccagcaggcagatgggtcagaagctcaggccaaaggaggccaaccctcctgggcacctaccccggcatacatatgtatttgctggccagggctcctgtcctctgaaggcttgacgagggctggagtttctgctcctaacaca

SEQ ID NO: 132117 - DNA, 2052 bp, Homo sapiens
ccacgctgctcatctgcctctgcgcggtctttggcctcctgctgctgacctgcactggctgcaggggggtcacccactacatcctgcagaccttcctgagcctggcagtgggtgcactcactggggacgctgtcctgcatctgacgcccaaggtctgcccccacaaacccgcgaccctggccctccgttccccaccatggactcccaggccatgccctcccagggaccttacccaccccacctcctgacccctctccctgggtcttggtgggaggcaccctgggacctcccccccagcccagcgcccctactccccaggtgctggggctgcatacacacagcgaagagggcctcagcccacagcccacctggcgcctcctggctatgctggccgggctctacgccttcttcctgtttgagaacctcttcaatctcctgctgcccagggacccggaggtcaggcttcttgggaaggtacccggcgggtgggtgtgctgggggcctggtggacactgagcacctaccctcacaggacctggaggacgggccctgcggccacagcagccatagccacgggggccacagccacggtgtgtccctgcagctggcacccagcgagctccggcagcccaagcccccccacgagggctcccgcgcagacctggtgagtgggcgccagatgccccatcccgcgcggagcccctcccaccgaccccttcccacgcccacactcccagccccaccccaggcctgcggctccgcctcccgcggtgatctggggccccgccccgccccaccgcgttcctcctccacttccgggcgggacttactcaaggctcctcccaggtggcggaggagagcccggagctgctgaaccctgagcccaggagactgagcccaggtgagcccagggggcgaccccggaagggctgggggatctggggtttgtgtggagcgcgggtggggcccaaggcttggcggtaggcgacaggccacgcgaacccacgggcctctgcgcccgcagagttgaggctactgccctatatgatcactctgggcgacgccgtgcacaacttcgccgacgggctggccgtgggcgccgccttcgcgtcctcctggaagaccgggctggccacctcgctggccgtgttctgccacgagttgccacacgagctgggtgagcgcaggcggggcctggaaggagatgggcggggccgcacggggctgggcggggagacctggaacaggtgggcggggcctggaagatgggcggggccgcacctggctgggtggggagaccggaaacaggtggggcggggcctggaaggtgatgggcgggatctgacggctgggcggggagaccgggaacaggtgggcggggcctggtggtaagagggcgggaccgaaaggaggtgggcggggcatgtagctaggagggcggagctgttaatgtggactcgcccgcaggggacttcgccgccttgctgcacgcggggctgtccgtgcgccaagcactgctgctgaacctggcctccgcgctcacggccttcgctggtctctacgtggcactcgcggttggagtcagcgaggagagcgaggcctggatcctggcagtggccaccggcctgttcctctacgtagcactctgcgacatggtcaggatggcgaggggaggggctgctctgggccgggagctgagcagaggagctgagcaggggcgctgacccggtgcccacttgctcctcagctcccggcgatgttgaaagtacgggacccgcggccctggctcctcttcctgctgcacaacgtgggcctgctgggcggctggaccgtcctgctgctgctgtccctgtacgaggatgacatcaccttctgataccctgccctagtcccccacctttgacttaagatcccacacctcacaaacctacagcccagaaaccagaagcccctatagaggccccagtcccaactccagtaaagacactcttgtccttggagcatggctgtgctctccttgctgggtgggaagggccctcagctgagaaagga

SEQ ID NO: 132118 - DNA, 1046 bp, Homo sapiens
agaagcacttgaacccgggaggcggaggttgccgtgagccaagatcacgccattgcactccagcctgggcagcaagagcaaaactccaactcgaaaaaaaaaagaccaccgaggctgcctgtccaggggaaggggcccagccctcgacccccacaggcagtggctccaggctgttggggaggatctgccactggaatggttaacccaggcatctccagcagccaatcacagagctctgcaggaatacctgggagaggtcctcatgcagcccgggcgggtcctagcccagccccagtctggccctggacaaccccagcaaagccgccctcagccagcccagaagcactgggccttggccacagcaacacccactgagcacgctgggagctgagtatggcgtccctggtctcgctggagctggggctgcttctggctgtgctggtggtgacggcgacggcgtccccgcctgctggtctgctgagcctgctcacctctggccagggcgctctggatcaagaggctctgggcggcctgttaaatacgctggcggaccgtgtgcactgcgccaacgggccgtgtggaaaggtaacagccccacccgacgggtcccccagccctggcctcttcccgccagctccgccctgccagccggcagcaaagggccctgggcaaactccaggaggcggaggaggctagtggcagtacctgggcaccctgaccctccccacaggccagagcccaccctcctgctcatgagggcagacaggcctttccagggacacagtccctcttctccccaggaccccagggccaactccccctgccggccctctgccatcaaattggcagtggctccaggggagtcccctggggatgggggaccactgttggggacccctctgcgtgcacccctgtagttggggaagcaggacaggggcctggggagacggaagggcgccaggggttgagagaggatggtggacgttgttggacttgaaagggaaacaggccctcggggaagcccctggccaggcctgcctctcccc

SEQ ID NO: 132119 - DNA, 1009 bp, Homo sapiens
aggggttgggggccggggtctccacctggagccgagctacaagccccactacgtgctcagggcctcacccccaaaagctactagcagcccctcctccttgctcggcctgcctttgcctgtcgcctggtcctctctggaagctgctctgcctctggaccagccgagggggtaggatgagctgggtggggctggtcccatgcttgggcagcagctgacctctccctaggtacactgcagcctgctcccggctcctggtccaatacaaagctgccttcaggcaggtccagggctcagaaatcagctctattgacgaattctgccgcaagttccgcgtgagtgcctggtccttccacccccatggggcgagactgtcgggcatgggtatggggtgccagagggctctggccacctggggcttgctgtcctgagagccccagcacccatgtcacccccaacagctggactgcccgctggccatggagcggatcaaggaggaccggcccatcaccatcaaggacgacaagggcaacctcaaccgctgcatcgcagacgtggtctcggtgcgccccagcccccagggcacgtggttaggagagccgaggctgcctgctgcagctgggcacgagcgtagggtcctgggcctccagagctgagcagcactctgacttgctgggcagaagggaacccctttaactaggaatgaggggtgggcagcatgcggggacgcccccaggccacctggactcctgtcggggggatgagcacagggtgcgttctggcggggtcctggcctcgggagagagtgtgggtgtgggcccacccttcagttcccacacagctgtctgggcagccaggacctcgttcacccaggaggcctgctgggtttgggaacagagtacagtgaggaggcccaagtgacagctgtggctgaggaggggttggggcccgtgagccgtggggcctcccgcacccgtggacacgcgagcctcatgtgcacacctgcccccag

SEQ ID NO: 132120 - DNA, 1050 bp, Homo sapiens
ccagggccaggccgccttttccaggaaggcccccgagtgctggtgtgagaccccttccccacacctcagttcctggcatctgtaccttcccacccagctccctgaattcctgagcttagtgttctcttgatccactcaggcccacgatgtacagatttgcaagcagatccattatgtccttcttatgggtggggagactgacgtgtaggcatggactttgagatcgggcactgtcagaggtaaagaagggagccacccttcctcctgtctgaccgctggctgtgcagatgatcccaccccttcctggagagtcatggggcctctccggagctctgcccactgcccctcgctacagccctggggccctcagcgaaagcgagtttgttccctggagcctgccgcgggcaccaggacgccgccggcccccgcagcgctgaggtctgccctcttcccctccgcaggctgcgccgtccagggtcccctgggcctgggcctgtgggacaagatagccgcgcagctccgggaactgcagctgtgcagcagacgcctctgcgctgaggacagggacgccctgcgccagctgcagcccagtcggccgggccccggcgagtgcacgctggaccacggctccaagctcttctttcggcgcctctgaccctggcgctgcctttccccaccctcaccgaagcccctaataaatgaagctgctggccgggcgcggtggctcacgcctgtaatcccaacactttgggaggcccaggcgggcggatcacgaggtcaggagatcgagaccatcctggctaacatggtgaaaccccgtctctactaaaaataccaaaaattagccgggcgtggtggtggaagcctgtagtcccagctactccggaggctgaggcaggagaatggcgtgaacccgggaggcggagcttgcagtgagccgagatcgcaccactgcactccagcctgggcgacagaccgagactccgtctcaaaaaaaaaaaaaaataaaataaatgaagctgctgcctccctccccgtggctgcctggca

SEQ ID NO: 132121 - DNA, 1050 bp, Homo sapiens
cctccacgatgccctcaactgtggccacttcgaggtggctgagctgctgcttgaacggggggcgtccgtcaccctccgcactcgaaaggtgagcctggtggggcagagggcaagggcgaggttatgggggctgctgtgcccctgctcaactgatgccacacagggcctcagcccgctggagacgctgcagcagtgggtgaagctgtaccgcagggacctggacctggagacgcggcagaaggccagggccatggagatgctgctccaggcggctgcctcgggccaaggcaagcagggcgtcccttgtccctggggttgctgtgcctacgctgagagtccccgggccctgatttcgggagatgctccatcacaggtggagcgggaggtgccgggcccctgcctcaacacgcattctctctcccacagatccccacagctcccaggccttccacaccccaagcagccttctgtttgaccccgagacctctcctcctttgagcccctgcccagaacccccctctaatagcactagactcccagaggcctctcaggcccatgtcagggtctccccagggcaggcggcaccagccatggccaggcctcggaggagcaggcatgggccagccagcagcagcagcagctcagaaggcgaggacagcgcaggccccgcacggccgtcccagaagaggcctcggtgctcggccacagcacaacgggtggcagcctggacgcctggccccgccagcaacagggaagcagccacagccagcaccagccgggcagcctaccaggcagccatccggggtgtgggcagtgctcagagccggctggggcctggcccaccgcggggccacagcaaagcccttgccccccaggcagcgctcatcccggaggaggagtgcctggccggggactggctggagctggacatgcccctgacccgcagccgccggccccgcccccggggcactggagacaaccgcaggcccagtagtacctctgggtcggacagtgaggagagcaggccccgtgcccgagccaagcaggtcc

SEQ ID NO: 132122 - DNA, 1049 bp, Homo sapiens
ttctggagccctccctttgcaaggctcttgtgtgaggggtgcatgccccgctcaacctttcccctggagatcgtcagctctttatccactctgtgctccatctgccgcaggacacttgcacccacctcgggaggagggagggggtaggagaggcgctgcacaggccccaaatggggcccaaagctggaaaccccatgtggggaggaagtggctgagtgtttgggggggtatcttccagggacactggcccagggagagctgaatgagatgaggacccgcctctatctcaacctgggcctcacctttgagagcctgcagcagacagccctgtgcaacgattacttcaggaagagcatcttccttgcggagtaaggccctgccccgccccaggagggagtggagtcccttgttcctggaggaagtagttaggggagtatttttcccagagtcctcctgagagagcagtctggctgggcctcatccccccacctctcacacctgtgccacacactgggagaaggccaggcatggttagggccctgagaccacagcatggcagggctggggcccgtgtggcatcagcagctgtcatggacactcctgggtgctcagtggtcgtcacccctctgcaggcagaaccacctttacgaggacctattccgcgcccgctacaacctgggcaccatccactggcgcgcgggccagcactcccaggctatgcgctgcttggagggtgcccgggagtgtgcgcacaccatgaggaagcggttcatggagagcgagtgctgcgtggttattgcacaggtacccgctgtgcgtggctccgagctcaggctctcgtagattcgggccttggggattctgcaaaacctttgctgtcctttgctctccaggtcctccaagacctgggagactttttggctgccaagcgagccctgaagaaggcctacaggctgggctcccagaagcctgtgcagagggcagccatctgtcagaacctccagcatggtgagcctgggggtgcgaatggggccctgggaggtgtgtgc

SEQ ID NO: 132123 - DNA, 1049 bp, Homo sapiens
cggggccgcggcgcagcgcgggaagtccggatcccgcggcgatccgagcatgagcctggagcgcgagcttcgccgtaagttcctcggggaccccttcctccgggggcgcggaggctggggagggcttgggactcggccccggccccggaccccgccgcggaggcccagccctcctcttcctcccacagagctgagcaaggcgaaagccaaggcgcagagggccgggcagcggcgcgaagaggccgcgctgtgccaccagctgggggagctcctggccggccatggtgagcgccgggaccaggaggcgggaggcagggccggggcccgggcccgggccgggatcgggggccggggggcgacgggctcttccggcagacgccgccccagggccgccctcgcacccgcgacgcctgccaggccgtgctgtgcccccgcctaggccgctacgccgaggctctggagcagcactggcaggagctgcagcttcgggagcgcgctgacgaccctctgggctgtgccgtggcccaccgcaagatcggagagcgcctggccgagatggaggactacccggctgccttgcaggtgcgggcgccctcactggcctcgtccagcccggtcggcctctggagcccttttctgaggagggaggcctggtcttcgccgtcaggagcctcgggctggaggggacacctgacctgacgcagccttgccttcaccgccccgggccagtcctccggtggggaccccacagcctttcctgggactggggcaggagtaggtttcctggcaccagaaaccattactgaacgttattttagctgtgtttgtgttgggggaggtcaggccccatcccaaaagctctccctgaccctggctgctggaggcaggactgcaacccccccgccaactcccagctgcccctccccacgtgacagcgttggctgcatacagcgtgaagccactgtcaccacagagagcccttggcatgcagaggaggggcacgtgtctggccttggcctgctctgtgggggttagggggagcaggctct

SEQ ID NO: 132124 - DNA, 1231 bp, Homo sapiens
ggatgggatggaccagagccaccgcaaggagatgcagctgtacaacagcatcttcagcctgctcagcttcgagaagattggctacacaggtgaggcgccccgccgcctgctgcatgccacacaggtgtgggttggggggctggcagccaggagtctgggggcagcaggctctgggcactgggcactgacagcgccggacagccgggctctggacaagctcccggtggacaggtggacacctcggtcgagaagacaggccggagactgagtggaaggaggggccgaggcagaccccaggtgcacacctgtgtggctctcacagcagccccgcccacctgtcctcgccaccctggcttcaccatccctgcaaggtggcatctcactgtggggctccagagcctcaagacagtcagggtctaaccagaaagtgggcaggtctcagggggcctgggagctaggggcctgcccctcggaccctggggcaagaagagcaccctgccgagtgaggtcctacctgcaggcagtcactgccccggccatgggcctctcaaggctggcacgaagccattcagggagagggctccacaacaagctgagggtgcccgactcaaactgtagaaccgggagtggacacccacagacgcccaggctggatgcgtgcgcaggcacactggatctcgtggctctctgggccgctgccaccgcctttgaacgtgtcggggagcaggagccaggccagagcctggcccagaggacagcgagaagcacctgttgatgctggggccactggaggaagctccatccctctactctcagcccacaccaggcggccagctcagagcaccaggcgtggcgcaagcagggtggtcgtgggcagccagtcccgccctgctgcctggactgtgcccagcgggatgtgggcccgagcaggccagagaggccgagggcctggggtctctgcggcagccacagcccgtggtgagtagcagccttagctgtcctggagataccggggcctcgtggagtctaggcaggctggggcactgtggctgtggccgtggccaggtgagaagccccattcgcgcaggaaagactggccacctgggaacccacgcctccacggagggacttgccggccacaggctgtgggctgcccaagaggactgtgcaggcagggctgcctgctgattggcagctccggatcaggcccggtgcctgcagacctggtgct

SEQ ID NO: 132125 - DNA, 1002 bp, Homo sapiens
cagcttggctcctgcctcccagctctgaggaggtctctgcaggtagccaacctccctggacgagggggcagctgcctcctctcacctgggctcaccctgagccaagtcctctcaacccaggataaatggcctttctgaaggcccagagagcatgcctgccccagtgtgggagctgcatccgctccccacctgacagtgatggccaagagcccagtgttcctggagggctcccaaactctggacctgtaggggggtcagggcagtcgctggtccctaagggaaaagcgtgaccctcggccccaggtggctgaacccgtcactgccagggcgagctgtcacctctgtgagctgatgaggccttgcttttaggacctctaatctctgcaagaacccaagctggctctgcctgtttctcctgagcagctcgcagtgttcaccacactccagcacgactcgggacaggcacgtgcgcccctctgcaccagctggagtccctcaggacacctggctggagctgatgggcatgggcgggtgtgtgcgagcatgagcccgcaggtctgtgagcttcgtctccctttccttcttcgcagtgtactaatggtcacttgatgtgcgctggctgttttatccacctactagcagatgcccggctgaaggaggagcaggccacgtgccccaattgtcgttgtgagatcagtaagagcctctgctgccggaacctggccgtggagaaagccgtgagcgagctgccttcagagtgtggcttctgcctgcgccagtttccccgctccctcctggagaggcaccagaaagaggaatgccaggacaggtaactgagggtcaggggcttagccttacaggcggggcccaggactgctgggagcccaccctggtgcagcagggccctgtgcagggtggtctggctgtctctgctgtctgggccttggggaccacctgtgtagcccagtgacggccctgtgggagggtgcctgcacaggatgg

SEQ ID NO: 132126 - DNA, 1544 bp, Homo sapiens
gttcctgccggctccctgctctgcggcccgagggcagtgtggcctgttggcacctctgcccatggggcacctcctctgggaagagacagcctcagcggtgcccgggacgttgcagccgcagcctcatccctgacttctctccctccattttggcccttcagacgaggcccagtgtgatgctgcgtaagacagacctggccctgacccttcctgctgctgtcagatgaggccctgggccttggtgctggcacctggaggaagggactgcgcattgttcccacccctcatggggcattcttaaggcaaaaacgggctcactcgggtgtaagtgccgggcaggggcctctcacagatgtggtccagccgctccctctaactcggccctgcacagtgccctgccattcccatgctctcctgcctgaggtgtcctctccctgcccctgcccacctcttgggcccggcagaggcagcgcccccactttgagactttgttctctccttgctacaaggatcccctcctgccccatctgaccagggtgtgtccactctgttctgtgggtgggttggtgtgtgccgtggccctcccgcctgtagcgcccatgtctctatgccacatgttgacagtccattgataacagcccaggaagcagagatggctcctctctgcccgagccccacacccccaaccaggccaacagtgtgcagtcctgggggggtggagtcaccatccacatgtccaaggagcttcgggcccctcttccccagtctcctgggcagcagtacaggactgcagctgactcgttctttgaggtgaggaaagtggcagaaaacatctttgtaaatacgtctgcttaggtatctaaaacacaggagcaaggaagatgttctggaatctctggctagttggaatttttgttttctgtggtggttatcatttgagttacttttagatctaagcagccttgttctgaatgtgggcccgactctggggattgattggccaccgtttgaggtctgacagcagtagcaggtgagggacttcaaatccagcctgggtggagggttcgagtcctggcttcatgcttaacagctgtgcggccttggacaacgtgccagtccctctcagacccatgtttgattcgggaggttaggggccgagcacgcggggtgcatggggtgtgccctgaagcaccactggccctggtgaggccttgcctgcatgcagatggcagaggaagggggacctccaactggctgagcagcgcttttggggtttgtgccacagggaagccctttggctgcattttggctctgacgacctctgtcaagggcctgtgggtccctgacccctgggtgagcgagggcactgctcccatgggcctgggcactgtgccatcctccagtggcaaacaggaggtccccagggtctgagagaaccatgcagtccaggtgtgaaaggggtcctacaaggtcagctgaccatagagaccttgggaccaccaggaaatcgtgggggccctcagccaggggatggggtcagggct

SEQ ID NO: 132127 - DNA, 1036 bp, Homo sapiens
gcctcccgagttcaagcaattctccctacctcagcctcccgagtagctgggattacaggcgcctgccaccatgcccggctgtttttgtattttttagtagagacggggtttcgccatgttggccaggctggtctcgaactcctgacgttgggtgatccgcctgcctcggccttctgaagtgctgagattacaggcatgagccactgcgcttggccagaactttttcttggatctcgagggagactccaacaagccaagccaatggtgtgaggccacgggggaacagggaagtctccttgtctccccattggtgggtgggctggagctgtagctggacctggtggtgatgggccacatggtactggtccctggtgcactgcatcccccatctagactggcccggcacagagtgatggctctgcttctgaccggagctcctggtgaccaggcctctgagcctagctggttcaaaccggcctgcactgtgcagagtggagttctgctctgggcggccagaggcagggagctgaacaggtgtaatggagaccgaaggcgctggggctgccctggctggtggccctccctggcctgggggctctgttcagtgacttccctgggaacagagcagctgagcgaggagtgctgtgggcacaggcctccctgaatgctgcgaagaacacctccggcgggtggctctcggctgtgagtggtgcccctggaaggtcaacacagacctggagacctgggctctggcctgctctgctccctggagaatctgggcacagatggtgtgggcccccacatgctgccttctgcgtgtccctggttgggcccatgctggccatcaccccagcttgggttcagtctaccatattctactagctttccttggtgaccacgttgattggctgtctcgagccagccagtgtcaggaatgcagcaggttccaccctctgttcctgctagaacgcttttcctgaccccagcagaacacatggctcagggtgggcaccagccaagctgggggctgacttag

SEQ ID NO: 132128 - DNA, 1080 bp, Homo sapiens
gcagcgggaaactggaggagcggctctactcggtgctgtgctgcaccgtgtgcctggacctgcccaaggcctccgtgtaccaggtagggccgccggccgaccccgacccggcccagcccggggctgcagcccccgccgcggggccccaggatccgcgtctcctcggaggccaggcctgcggggcccggcggccgggaaccctctctggcccttacagccacttcctcgcccagcggggctccagcggctgctccgaagctcctcgttgtctttctctcagggctttattttccgctcgggaccccccttttctgttttctgatccacggtacttcccgatctgaatcgcttgtcttccgcttacctctcccttcttttttctagacttccccacggtcccctgaacactctcccaacccacagcctcaaactgatccttagcccgcaactgctccccgcaacccacccggtcccaagctccctgggctcagagtcctgtgctcgagagctccttccccattcttccggcagccacacccccgagtttgtccctccactcctgaacatcctatggacgcctccttttctaccctcctgggtggaagaatcctttctcttggtccatttccagttcatcctgaagaacagtaaggagaggggattgctgtttgtcgggatgaaccatttgcaacaagccccacagtttgggtaccttctccagtcccagccaaaccccacatccaactggacttgccatgccccacgctaggctcctgcccacctcacccaggccaggccaggcttcctaggcagccagtgctccaggagccggcccacccctcctcccccatcttcacatccgcatggcagtgggactcagcccttaagcagcctagggctgttagggtacctggcccaggtgggtttgacatgccctttcccaggtagcagcagggacaaactggttgacacccagaggcagagtacagtgtccccaccttccctgtgtctttccctctctttcaactccccagtccctgtgagaaatgaagcaggttctctgtcagctttctttacact

SEQ ID NO: 132129 - DNA, 1033 bp, Homo sapiens
ctgtgtggtcactgaggttccatgattggatggaggtggcactgaggatgacattcaggagcacatcatggcaccactgcagaaacaggaacacagatgaggggcttgtccacagatgcctttggttcagacacattgactgagaggaccctgtccaggacggctgtccagaggacggtgcacaaggcatgccctgcgcagtgctgcagtgtggggtggggctaaggccagagggatgtgtgggatgaaggaagaagtggttggaaaagaggcaatcagggtgaccctggccacctgctgggcagtcgtccccctgtccctgtgaggctggcaggcagcctggttgggagtcgctgccattctgccccttacctagtctcccctggctctgagctgccatctccttagctatgggagctgtagcagcaaagggcatgtgcagatgaaaacgtgtgtgaaagtggggtgggctggggctgaagcccctgcttttccacaggtgtctggcaggaaaagggtggggaaggagagtgggatccaggcaaggcagagagagcacactaagactagaaggttgcctcctcacccacggcccccaccacccaccgcctgccttggggccataaagcaatgaggggccctcatagctgggcaaaccctggaccccagcaaaggggagtgggcaggcagtgaagcctgggaggaggaggcaccaagctgggctgcctgccctgcttcccagccccctcggttccctttccttcctggctagagcccagccaccctctctcctccaggtggacacccagactgggaaggggaaactggagcctctcctgctcttcagggaactctgaaaaagggtcaggatggctgcaaaggcaggctgtcacctcctcctggctggcgtctggagggaagacccagtctaggcggaatcgacgatggcgcccccggtagcaggtggtgacggtgccccctgggccaggctccacactcacaaggctagaagatgtccctggcctcagccgac

SEQ ID NO: 132130 - DNA, 1076 bp, Homo sapiens
gaggggcgagcgagcccgacatgggggaaggccgggcctcgggtgctctggagactccgcagggctcaggcaccggccgtggtacctgcggtgcctggagcgcgcggtggagacgccgcgcgcagcgtcagcgtgaccagggcatgcgagcgggagctgcgctggttcatggcggtggcggcggtggcccggttgctcctccccagtttcagcatctggaaggcggggcgaagggctggtcaggtgcagggtccccgcccccaagtggaagcacggggcggggtctcggagagcggtgcagccctacctggtgcaatgtctccaggttgggcacgtcccagtgggtgaggccagccacctggatcccgccctggccttctgggccctgcctcacggccaggcgctcgggaggccctggagcaaggaggtccctggtgagaaaggggaaggtcttggttccagaattctctggaaatccggaagggccctgggccaggggtggggagaaggcctccctggtggagtagcccacctgacagcctcattgtagatctccaccatgctgagtgtcacccggtgctgccggccggcccccatctcccggaacagcgactgcagcgccctaggaactatgccggggtcctcaggagggccctgaggatggggtggggtgcacaccgggctcacatccaagtcatgcagggcccctggggcctctcccactggggcgtgagctctgtcccacctccatgctgtaggtcttcccggtgcctgtctggccataggtgaagatgcagacgctgtagcctcggaggcaggacagcaccgcaggttccagctctctgaagacctgcgggaggcgggagaatgtgttttgagtcctccccacgttgcctgtttatgccctatttggtggggtggggagtgccacgaaggcaggtgtgagcagagcctagtctcctgggaggatggctctaagggaccatgggggagggtgtgtcctacagagaccctctgtctccctagagaaggtggtgcttgcaagaatttgccaggcaaagaagggaaaagacaca

SEQ ID NO: 132131 - DNA, 3018 bp, Homo sapiens
cctgaaacctgaccagggaagacgggataaagtagccatgggtcatcgcagcccctttgaagccgggcctggccacccaaaggcaactcaggggtggagactgaggcctcaggagaagcccccactagaatgctctctgcccctcccttccagattaaccaaaacctgctaattgtggaagccctcggcatgctcccctcccccacagcctcttcctcccttccctcccctcccccttccatccgaatgataaaggccccagcccgcctgccccagcccggcctcaggtcccggccctgccttctacactgccccaccgccctgcaccctccacccggccaggcccctgcccacgctgtctaccgtcccgcatggggccctgcagcggctcccgcctggggcccccagaggcagagtcgccctcccagccccctaagaggaggaagaagaggtacctgcgacatgacaagcccccctacacctacttggccatgatcgccttggtgattcaggccgctccctcccgcagactgaagctggcccaggtgagcgggccccggcccccactctctctttccccagactcgttccccacccacttccaggttcaagccctgacccccaccccttcctagcccacccaggtatgccagtgggaccagtcctgagagctgagggcctcaaggcacgacccttctccgggagccccttgccctctctgccgcgcttccgcgcagaaatgtccttcttcggggacagcaggggccggcaccgcgcgcccctgagcccggtagtgggggaggggtagggcgctaccccctccccgtctgggctcacggcgccggccggccgcctggcggtttcagatcatccgtcaggtccaggccgtgttccccttcttcagggaagactacgagggctggaaagactccattcgccacaacctttcctccaaccgatgcttccgcaaggtggggcaggccagggtcggagcccgggggcggagcgcgcgcggaagtcctgagcatccaaggttgggcagccccacccatgtctgacccccacacccaggtgcccaaggaccctgcaaagccccaggccaagggcaacttctgggcggtcgacgtgagcctgatcccagctgaggcgctccggctgcagaacaccgccctgtgccggcgctggcagaacggaggtgcgcgtggagccttcgccaaggacctgggcccctacgtgctgcacggccggccataccggccgcccagtcccccgccaccacccagtgagggcttcagcatcaagtccctgctaggagggtccggggagggggcaccctggccggggctagctccacagagcagcccagttcctgcaggcacagggaacagtggggaggaggcggtgcccaccccaccccttccctcttctgagaggcctctgtggcccctctgcccccttcctggccccacgagagtggagggggagactgtgcaggggggagccatcgggccctcaaccctctccccagagcctagggcctggcctctccacttactgcagggcaccgcagttcctgggggacggtccagcgggggacacagggcctccctctgggggcagctgcccacctcctacttgcctatctacactcccaatgtggtaatgcccttggcaccaccacccacctcctgtccccagtgtccgtcaaccagccctgcctactggggggtggcccctgaaacccgagggcccccagggctgctctgcgatctagacgccctcttccaaggggtgccacccaacaaaagcatctacgacgtttgggtcagccaccctcgggacctggcggcccctggcccaggctggctgctctcctggtgcagcctgtgaggctcttaagacaggggccactcctccctcccgctcccacccccaccttgttgacagggagccaaggcgaggcggctgtctgcgaccacagcagcctcgaaacaccaggcagcagccttgctgggagtccacggtgtttattgggccaccccacgcatggccgtggcccagctgggcacaaccctcaccctggtctgtcatgcctgtttttcctacactcagcggcaaagctgcaggagcagggctgagcctggaatagcccttcctagtcccctcttctcagcccactacccatccatcagtcaccagccgtcacctcccctcccgtgctccaggctgggggagggagagcccagtggtggatccagcctgaagtcctgccctctctcatctgtctggaaaggaggtagcacctttttcgggaaacgggttagggagtaaagactgcaccctacatggtcctggtggtgggggggataacagtaaaggaatttgcaacgttttaatgccatgcctgatttttgggtcaggagtggtgacttgggtaaccacttggcgggggggcctgggattccctgctgtgtgccgtgataacagcaaatggtgataaggagaaagccaagacctgtggcctgatgcagggctgggggcggggggtgatcacttcagcaggcacaacacacttcactggctgcggaggtggaggggtgactctgggagctcaggggcaatggatccaaagaggctagggagcttgtgccctgggagacggggtacagggactttactaccgcctctgccagcagagacctggcctgagaccccatgggcagggccgcgacccaggactagaggggcaggccctctgcgggcgcgagagccgagcccgagccgttgtcgggactggggcatggaggactgccaggggacggcgtaggggtgcagggggtcccggtgagcggagtgtcggtgctgagggaagaaggcgtcccggaggagcgcgggaccctgcggcgccgggctggccccagctccacttgacccactcggtcggcgaacttgagggagcagactgtctccccgagatcctccggccgcgtggagatctgcgggcaagaggcgcgggtg

SEQ ID NO: 132132 - DNA, 1007 bp, Homo sapiens
acccgcggaagccagcggacccacttgtgcggcggtcggcgcggggcgcgaggtgaggcgcggactcccgggtcctgcggcgggagcggagcgagggagaggggccccggccagggagagcagtggcgggcccgggaaggaggggcactgggtcgacaccgagagaggaggccgggccggggaaggatgaggcagaggagagggaggaggccgggaagggcgggaggaggaggagaccgaagggagagaggaggctggcgacggaggaggccggggaggggccctcgggagacgcggctgccggcacgcgggcgcccagggcacaggtcccgccgggccgccttgggcgttgctggctgaggcccagggcagcaggtgccaacggtcaggaaaggcagggagccgaaggctgccggtgggcgcttcgcgttttgttccaaggcgaaggtgtgtggattctccgcagcccgtcggtcaggtagacagctccggaattgtcttcattttcagatgaggaaatcgaggccgcagagaagggacttacccaaacttaagctttgtgtgggccttggagctaggctgaaggagaaagtggagtctcactggggcaagttccttcaactttcagggattcaaatgacctcacttgtagtgcggggcgtccggaccacccctcaggaattgggatcagggcaagaattactaactaagcaagcaccccgcctgggagggagcgtccaggactggtgtgggcccctgtctgtaccagagcggaggcccggggcacggtgggattaatttccatgggtgcagagaggggagccgtgtacggagtcattctaggcttaggggagacagagcaaagttagccttccccaaacctctgtgccttccttttcttcctggattcctacctgggggtggaggtggaggcgggggtaccgctgcctttctcaaagtgtgtctagtccagcagtgagccctcctgggcgtcttggcgccccagt

SEQ ID NO: 132133 - DNA, 1050 bp, Homo sapiens
ctctgtggacaaagggtgggcctcacacagggcaggacctgagacagctggaagcctggtctcacctgaggcccagggcaggggctcccccgggccaccctgcctcaagccggccttgatatgcttccttgttccccacttctcaggtgtgagcagctgctggaagaggaggtgctcctgaagacactgcggccggcccgcctgtgcccttggtgccctggctgcctagagagcctcacccctgggccctggggccaggactccaggactctgactacctgccctcccccagcctcagcggctgcacctcctcgttagtactgatgcactgacctcggcacacagctgggaggggttgggggctgggtcatggctgctcccaggccccacccaggctcctgagcctagaaggtgaaaagaggactctcaggggctcacaggggctctcactgctggttggccctgccctcccttccccctcagcagggtgcccggaagctggaaccttgttatctgggtaattagtttcagaccctgcactgaggccggccaggtctcggggctgcctcccataggttgtgcaccctgaccccgagagggaggcgaggcgctgcttgtcgacagctagaggctggcctggggagcaggtttggggtgccctcccacactgccctccctgccccggcccatgccccccagggctgcctgggcctggttattgtgtggggcctcctgacccagccaagggcacgaagctctgggaaggggatgcccccgagggtgccagtccagctagctgccccacccctcaggcccagcctggcccccaagctccccactctggtgccccgagcagccctgtgggcaagcagccgccgccatggccgagcacctggagctgctggcagagatgcccatggtgggcaggatgagcacacaggagcggctgaagcatgcccagaagcggcgcgcccagcaggtgaagatgtgggcccaggctgagaaggaggcccagggcaagaagggtcctggggagcgtccccggaagga

SEQ ID NO: 132134 - DNA, 1574 bp, Homo sapiens
gcatgctgcggccacctgcggccacctgcacctggtggagctgctcatcgccaggtagggcctgttgggcgtccttggcagggagaggcttcctctcagatggccgctcaggaggctcctcttgggcagtatctgtggctctcggcctcctgtgttcccgccttcacctttgctgaccctgcctgtgtcctggcatggagagcagggcctggggctccaggggaatgggcatgtgcccagggcagcgcggtccctgcctccccagcattcgtcctcctgccgagagggcaggcctcgggcccccccccagagtgtgcacagagaaatgtcttggtcagtgaggagggcagaactgctaaggagggaagcagagtgaggaggccaggtggcttgggaggagagggtacctgagcacaggtagggcctttacctttaacacagagggacgtagagcggggggaactctgagcagggagggtccatgagcctcctcccttcccctttgctccaggcatctgtagtgggagagaggtcagggctgcggtcattctcgagtgcccctgtgaggccgggtggggtgtgcatggcggtcgcgtcacacacaggcgctgcggggcaggcggggatgtggggtgtccacaggtaggcctgctcctccactgcacacagacacccccttctgtgttctgggctccccttcaccgcccttcttccctggggccatgctccccacagctcagcagcccctcagcgtggctgcctggtcctgcacccccgccaccctgtgctccctgctccccagcaggcaggcccatccaatgcatgtttatgggggcaccgctgcccctggaggtgccaggaacctggatccctggatggatagagactgcaggaggcctgtctggcttaatgacaggatctaggacagccgatgggccccaaggctgcctctcccagcagcaggtggacagggtgcctcctgaggggcagccctgggctgaggggccctggcggggacttctccaagtgaggagcctggcaagcggggaagggccttgtgcccagcaccccgtccgtcttccctgcagtggcgccaatctcctggcggtcaacaccgacgggaacatgccctatgacctgtgtgatgatgagcagacgctggactgcctggagactgccatggccgaccgtggtaggtgcggcggtgcggctgtgggagggctgccggtcgcgctccctctgagcctgccgcctcgcaggcatcacccaggacagcatcgaggccgcccgggccgtgccagaactgcgcatgctggacgacatccggagccggctgcaggccggggcagacctccatgcccccctggaccacggggccacgctggtgagggctggggggtgaggggcacacggggctgggggcctcgctacttggaggtgggggatggggccgaattcaggccgggcgcttgcctgcagctgcacgtcgcagccgccaacgggttcagcgaggcggctgccctgctgctggaacaccgagccagcctgagcgctaaggaccaagacggctggga

SEQ ID NO: 132135 - DNA, 1081 bp, Homo sapiens
agagccccgctgctgggggccccatctgaatcgggctgcgaccaagagtccacagtctacgccagggcggagccgccagggctcggtgccggactacgggcagcggctcaaggccaatctgaaaggcaccctgcaggtgaggagtgggcaggcagtgagtccacgctaggtccacagctgcttccggtccgggtcgccctcttgtcattttttccacacagacaggcacgggcccctgtgccaaccagggcacgagtcttcagggagcttctcggggccttcgcccttgactccctttctagtccagccttgtgctaattagcctgctctacaattgagcgtggggactcaggtaggttttagagtctacagtagctcaggggcctgagttcctcctgctgttctgttgttcccctcccaggccggaccagccctgggccgcagaccgtggcctctaggaagagcctcatctaaggcatccaccccaaagcccccaggtacagggcctgtcccctcctttgcagaaaaagtcagtgatgagcctccacagctccctgagccccagccaaggccaggccggctccagcatctgcaggcatccctgagccagcggctgggctccctagatcctggctggttacagcgatgtcacagtgaggtcccagattttctgggggcccccaaagcctgcaggcctgatctaggctcagaggaatcacaacttctgatccctggtgagtcggctgtccttggtcctggtgctggctcccagggcccagaggcttcagccttccaagaagtcagcatccgtgtggggagcccccagcccagcagcagtggaggcgagaagcggagatggaacgaggagccctgggagagccccgcacaggtccagcaggagagcagccaagctggacccccatcggagggggctggggctgtagcagttgaggaagaccctccaggggaacctgtacaggcacagccacctcagccctgcagcagcccatcgaaccccaggtaccacggactcagcccctccagtcaagctagggctgggaaggctgagggcacagccccc

SEQ ID NO: 132136 - DNA, 1087 bp, Homo sapiens
caggttcccctggagggtcttcctcaactgctacagccccagccccctccgatgggggtccagcttggctgctctcctgctggacctgtgcggggctctcccagggctcctcgttccatctccgcttctcgcctccactgctgctgggctgggggctccccacacggatgctgacttcttggaaggctgaagcctctgggccctgggagccagcaccaggaccaaggacagccgactcaccagggatcagaagttgtgattcctctgagcctagatcaggcctgcaggctttgggggcccccagaaaatctgggacctcactgtgacatcgctgtaaccagccaggatctagggagcccagccgctggctcagggatgcctgcagatgctggagccggcctggccttggctggggctcagggagctgtggaggctcatcactgactttttctgcaaaggaggggacaggccctgtacctgggggctttggggtggatgccttagatgaggctcttcctagaggccacggtctgcggcccagggctggtccggcctgggaggggaacaacagaacagcaggaggaactcaggcccctgagctactgtagactctaaaacctacctgagtccccacgctcaattgtagagcaggctaattagcacaaggctggactagaaagggagtcaagggcgaaggccccgagaagctccctgaagactcgtgccctggttggcacaggggcccgtgcctgtctgtgtggaaaaaatgacaagagggcgacccggaccggaagcagctgtggacctagcgtggactcactgcctgcccactcctcacctgcagggtgcctttcagattggccttgagccgctgcccgtagtccggcaccgagccctggcggctccgccctggcgtagactgtggactcttggtcgcagcccgattcagatggggcccccagcagcggggctctggcgcctgcaggagacaacaggggcacaggccagaaaaggctgttgtggcggcagaagcgctcccagccacccctcccgcacctggagcgaggcccggcccttcttcactttg

SEQ ID NO: 132137 - DNA, 1664 bp, Homo sapiens
cctcccttctgtagggaccctccctggctctgcctgtctgtgacccctgtgtcccctgtagcaccctgcagagccccctggagagcctggagttggccttctgtgctctgctgcctgaggacctacgcttcctggcacggagcccacatgctgcccacctcaagaagttggacctgagtggtaacgacctgtctggcagccagctggcacccttccagggtctgttgcaggcatcagcagccacactgttgcatctggagctgactgagtgtcagctcgcagacacccagctgttggccacactacccatcctgactcagtgcgccagtctccggtaccttggcctctatggcaacccactgtccatggcgggcctcaaggagctgctgcgggactcagtggcacaggctgagctgcgtactgtggtgcaccccttccctgtggactgctatgagggcttgccctggccgccgcctgcctctgtcctgctggaggcctccatcaatgaggagaagtttgcccgcgtagaagctgagttgcaccagctgcttctagcctcaggccgtgcccatgtgctctggaccacggacatctacgggcgactggctgcggactacttcagcctatgatgaagtagctctgggtgagacacaggccgccctgcagtctctttaggtaggcagggcctttgctgggacccctggtggaggccttcacaaaagcactggttactggtttcctgctgggtctaccttgcttctgggcacacctcaagcctcccctgctttctgcagtgccccacgcggttttccctgcacttgctccataattggctgatcatctgtgggccccggggctggatgtcaggcctccattgccctgctcagtttggctgcatttggctgccgtctggggtcctggtcctttgtgcaaatgctttgggattccagttgtgagctgagagagatgatggcctctctgggcctttcctctccctttactgagagctcagtgcttctggggttgaagttggacagaggcctgcttcagggaagctgggagtccccaggcactcacgcctcttacgtgttccctaccctgccacccagccaccccactgggctgggctcgggctggagggggtcatcaaggtacacatgtgcctggaagttgaatttgtggctgtttttttttctgtccacgttggtcacccttatccttatctctgctgtcacccccaacatggccacccggcaacaactgccatccagcctgtcgccccgcccttcgcggggcagccccgtcggcactgccggccagtccttgctcttcccacctttcggaggcccaagatcctactgtggccggccagggccagcgagggaccccccccatgcagagctggaggttggggtgatgtcttttcggaagagcttcaagggaggtgttggggcctccccggccaccttccattgctaccccaggattcccgagtgcaacgttcccggctcgcgccccacacacggctcagcgcacactgcgcggcttccacctttactgacggagcatgcgcgaggccgcaccggccaatctccggcgcccacgtcatccgcgcgcccgcggccctagcagtggatctcgtaggcgaccggcgggggcacgcg

SEQ ID NO: 132138 - DNA, 1027 bp, Homo sapiens
cctccactcccccaggcccctggccccggcgctccccacgtcttctgcctggtctgagggtgcagccagggcacagcagcggcggggagggcgcctctggccccccacctcacggccagttcccgcgggcaccgcctcgccctccgctggccgcgggtcagctccgagaaagtgccttctgtgtcctggagccgagcgacgctgcctccttggggccgggctgcctccctgtggctcctgcgcgccctggcctgggccttgcccagccgccccggtctctccttccctttctcctgtcctcgtcctggcctgcagctcttcccagccccgagagagcttcccgacctgtccccgcctcctctccctccctcggcccgtggtccccagctggtgactgctcaggagtttgggggctccaggacagtgggcccggggcctggcaggctctcggtgggtggggtgggggcccccaaaccaaagtcctctggggtagggagcagggctgggcaggcattctgggggcagggtgggggaggggcgagagtatttttttcttcgtgtaactgtaaatccagaatctatcctgcatcgcagcccaccgtgtatagagatataaatagagggaaagatataagaactaaatttgctaatgacatagttttaacctaaatgctatttatctctgagccgtccccgtcctccgtgcagagcaagttgaggtcattccttcttttcttctccgatcttttttcttggcttctgaccaaaaaccaagctctaccccatccccatcccagacctgcaggagacgagcgagcgggaaggcgccgggcccgggactgtccgttctcggggccagagctgctgggggaccgagtttgtacattttccattttggaattttgagttccaattgttgtaaaacttaatttctccccagtttttatatatatattttttagagttccgtttttatttattaaaaacaaaagccccagccctgccgaggcctgggcggcgtcctcag

SEQ ID NO: 132139 - DNA, 1066 bp, Homo sapiens
gctgcctgctgagcactgcaacagacaggcattgtcacagtccccatcctacagaggagtaaactgaggcacagagagactgcattatgatcaccttcatcagctgagaggcggtggccccagtgtatcccagtcacagagtgttggagggtgtcccagtcccaagcaggctcaggctggggtgtttgtcccaccaggggcctggggacaggagatcagggcctgtcttcccgcagggacagcaagcaggaggcccagccctgccgtctgccccaggccccccagcctagtgactacatgtcccagctgctgagctgaggccctgggtttctgccgccttcctgcaaagctcattccctccttgccttcttgaggctctgaagcctgggtccagtgtgcgtgggcaccatccattctagaaaaacaagggtacctcatagcctgcccagaggggcccttggttccacatggtcccacgctggaggctggggccacatcctctgccaagacctgtggtcccaaggaccatgacagattttctaggacctaaacgtctatgaaaaaaaaaattcattttggttcctctaaaaaagagtctccttagcagtcacatgtcaactattctgtgataattagagatggactcaagacacgtgtgcacttttttttaacctggtccaaggaccccatgccctcagctgtccaccagaaactgctccttcaaagaagacaaaggtgttccgattgggggtcaggatccagaggcccccctcaccctggcaggcggtaggcgctgggcgctggggcaggtctcatgtccagaagcacagggtcctgtccatctgtccgaggtccatggctcccctggccccagacagcttctcttggcgtgttctctcatctgctgcttcccgacctggagcaggaaggtgccgcgccttccagacccagcctgggaatcctctcccctctagcaccttcccctgggctctgtgtctggagactccccaggctgaggtccctgagtccctcatcaggtgctgactcaggcacactgcccctcccc

SEQ ID NO: 132140 - DNA, 2571 bp, Homo sapiens
cccaagtataaagtaaaatccataagtaggccgggcgcagtggctcacacctgtaatcccagcactttgggaggccgaggtgggtggatcatttgaggtcaagagttcaagaccagcctggccaacatggtgaaaccccatctctaccaaaagtacaaaaattagtcagatgtggtggtgcatgcctgtaattccaactactcaggagactgaggtgggaatctcttgaacccgggaggtggaggctgcggtgggtggaggttgcagtgagctgagatcgcaccactcactccagcctgggtgacacagaccctatctcaaaaagaagaaaaaactaagtccatactgatataaatgagtaattcaataggtaggaatagacaaatctgtgcagaataatgacaaataatttacgtacatatccaccctccaggagctggagcctaactccacccctcaggtgtgggccgggcacagtgactcctcctacagagtgtggcacggagcaggaggaggagacggtacctcacaggagcctgccagccgtgacctcagctaggtcatcgaggccagtggcaacactgcggagttacgctgtgcagagcgggaggcagacccagatcagcctgaggggagccccctcctctctgactgcagcacctggcttggggccagctgccttcgcccacttgtttctgttggttttctgaccggcaggcagggggcccaggccatggctgccccagccttgctgccagccagagggcagaagctgcctgctctcctcctgctccccaggcgccttccctgtgttctcctcctgctcccctggcgccttccctgcacctccactcacgccagcacaggcacggcagcttcccagcccacacagtgctcagaagggcccccggcacctctctgccactcacacagccacgtccccccagaaacgctcagcccccagctgcacagggtgagcccccaacaggcccaggggcctgctcaccagccaagtgcgggagctgagtgggcgctggctcctggcgttttgttctgtcgtgctgatggttgtctttgctccccagtgacacagcacataaaagagctcctggaaagaaacactaagaagaagtccaaattgagaaagaaacccaagccttatgttgaagagccggatggtagggcctctccccgcagcccctgggcgcggcgtctgcacagctctgctctccagcctcggccgcctggccttctcttctctaaccgcttctgggcgggggggatggggccactaacctcaggcctgtggcctcctgagcgagctggagggcccaggtgactgactggacccctggagcggtcaagcctgtccacacgtgtctttgtggtgtccagagccatttccaacttgcttgctgggttcttgatggggtgggggcatgataacttgccggctgagggctcctggaggtgcccccaggtgagtgtttgggcctgacccccacagggaagtttgcaggtggaggggtgtgtggtgccctgcagacaagcacccctcagtcctgtcttcccgcccagggctgcccctgggccacaagagccaagcctggtgttcagaatctgcaaggagtcgtcccctgctttgatggtgggcccctagcacagccccagaagcagggggagggcttccccaccctccccaccagcacccttcccacccacactctcacacagcttccacctctctaccttcccccaggccctggctcaggaaagccctgtgaacccagggctgtgctctcccttttgagagctacgctgtcagaccaagtcagctccgcgctcacacccatgcacacacaggcttccagggccgtcctcccgacccctgcagtgtggtcctgccagttagtgcctcacgcccactcatctgtctagagctccgccaccacctctctgctccacttcctttgagaccacttggcttaggcacctcttcctccaggaagccatccctgactgcatgctgcccatgcaggcccagaacagtgccagcgagctttctgtggatgaggtttgcttagggccaactctgggaccagcaggaggctacaggggcacgaagggccctcgtggggaatgccaggatggcatctgctgggctagggacttgtcctcaccctggcacctccgaggctgccaccagcaggtctgtgccaggggtccctggcccagtcccgagtcacccagcctggcctcacccaggaccctgggagaagagggccagctgcaatgtaggggtgagattcctggccacagacgtcctcagaccactccatctggggcagcgtagaaggagctttgcgctcctacctgagctggcgtccggtggcctgagagctggaccgacaccgctggccataaaagcctcctggctgcagccaggcggagcagggagcagactcccctgtgcctggagtggagcccagtgggacattgcggcccagggtgtgtcaggtggggagcagggtcaacatcaggaggccctggccacacctggtggcctgggag

SEQ ID NO: 132141 - DNA, 1140 bp, Homo sapiens
aggaccagagcagggtgccaggcagactgggctggcctgtgaagcccagtccctggtcttgggcccttcaagaagcaggtggaattctaggggctgtgttcctcttggcatcatagttcacctcctcttcctcttccagaggggcctgggaatgtcgtgcctgagctggaggctatggagctgagcccccactgctcagcacagcatgcagcccacagtgggtacccccgagagtaggcaagtgagggccagaagacagccagacaaaggcctgaggtttcttgggcccatcttgggccagctgcctagccaatgtgtggctgggctgtttctgctgtatgtaagtagaggctgtggcttcctaggggagtgtgtgctccaggctgctgcccttcacacttaggctcgtgtgcctttgtccttgtgccttacacctgtggggtcctggcctgcatggaaaaaggaatcaggcttcagcctgggcggccgtggcttcagagctctgccaaagaaggcccatgaaggccaacagcaccgtctgggttggagtgacagcggggctggggctctgtgcagtcccactggcaggtagcctgcatcttggctgtggtactgtggccaccctcacagccagaacctcatctccagccccaggatccactcctaggttcgtctgtcagggtccctgattggccctgagcccagaagagaggcctctacatacacagtggccattccttcccaaatgagcctcacaccccctccagccagcctcctgtgcctaggaggtgtccctttcacatgcaggtgctggctgctgctcagaaagacaggcccagccaggcacagtggctcacacctggaatcccagcactctgggccaaggcaagaggatcccttgagcctgggagtttgagaccagcctgggcaacaaagtgagaccctgtctttatgaaaaattttaaaaaggaaattagccaagcatggtggtgtatgcttgtggtcccaactacttgggaggctgaggcaggaggattgcttgagcccaggaggttaagtctgcagtgagtcatgatcgtaccactgcactcctgcactccagcctgggcaacagagcaagacccccagcctgggcaacag

SEQ ID NO: 132142 - DNA, 1096 bp, Homo sapiens
gtgagtgctccgtgaaccgggccgccgggacaggggctgccgcagtgtgcagtgagtgctccgtgaaccgggccgccgggacaggggatgccgcagtgtgcagtgagtgctccgtgaaccgggccgccgggacaggggctgccgcagtgtgcagtgagtgctccgtgaaccgggccgccgggacgggggatgctgcggttttgctgttcgtgcagccgtgtcggtgcagatgtgcgggttagaggcagccttgccacacaggcgagtcttcactggtcttcagaaggagattggggtgtgattgatcagagagaaatgatgtgttctagttcattctcaggcccggtgagttgtggatttcatgcttcctctttcctctttattcatataaaattatttcttgagacgatgattattttatatatttaatgattcattgttttgtccaagcccaaaagtgtatcctatactgtacgctttacacttagtgcaaagggcgctcgtcatggctgtcggcacggccaagtcactggggctaacatggcaggcacaggtgcaggtgggtgtggcttacagggccgacctcgtatggctcctggctgatttagcacgagcgtaaggaagcttctcttcgggaggcctgcgtgctggtgaggtctgggctctttctgatgggtggagggtcctgcttgtttgcagcacgaggctgctccgtcagctctccaggtcttagctgggacgcccaaggctgctgctgatgccaagcatggtcatgggcctttgcagttggtgtgctgttgtcaccccaacaagtgagggatgcgggcgcagagctcctcactcactgccagtccttctctgggaggctttttgtctgctctgtgtgcttacttgcccagtggcctctctcattcctgattctgggcggtgcatttgacagaggcctgcctgggtgctgcggcctctgacatttgcccagacgttgcttcatgccctgctctgtggtcagtttcagagacactccctggatggtgaatctgtgttttccgtttcttgggtcggcgttctgcacacctgcaaggtaaagcaaggcttc

SEQ ID NO: 132143 - DNA, 1388 bp, Homo sapiens
tgttacccagactggttttgaactcttgggctcaagtgatcctcccgcttctgcctcccaaagtgctgggattacaggcatgaaccactgtgcctggcccctgatcagcgtcaaatttcaggtggtagcgatgctacactggtctccgtgcagaagacttgagttaaacattgacttaatcgctgcctgtgtgattgagcacagataagtcagttaagcactcgagctcttatctgcagataagatgcttgtcctgcttatttgttcaaggttgttgtgaagctgaagaatggctgagtctcagtgggttctgtaaattactgttatttgtgtataataggagttttaaaaattaatatcaacactaagaggctgatgaaccagcctcttgcaggctggtctaggcgcacacagagcacagttgatggtggtgtagacagatgtgaggcgtgggagcactgctgtctccccagctcctggcagccagggtgctggacacagggtccagaaccccttgtctggccaacagtgtttgagtctattttcctttcttgccatgctcctttcatctttcctgccttttctcttgattattactttaaactactagaggccccaacactatcctgacagagtggctgatgcttccttcatgggttgagtttactgttagccttgagatactcctagtggttttctgttacggtcccttcaagcattccctgggatcacagaggtggccagcatgttcctcctgccactcagagctgtgctgaagcctctgcagtgtaagtttccccggaatctgactgcctgctgcatgtgtggctgataaaggggagcagcttctgaaactctaggtgctgtttctatttaattgcggctgtgttgaccttttattttctattcagaattcaggcgtgctgtggaaattcccacatgtgggagggggtagtgctgtgacgtccctgagaccctcgtttacagcatgtgccggaatcacagacggcgtccaggaacagtgtggggctttctgcccaaggccactggggcccaggatgagcctcacttgggcggagcctgtctccattgctctggcagggctctcacacctggtcttgtgtttgccaggcccacccacactcatctcgcccctgtctttactgttgcctgtatgtgccagccacttgccagtcagatacccccgacagggaggagacagaccaggcctctggtgggggacacgggagtgagttgtgctaacatcctgtggacagcagaggtggccgtgtgcctggggtcgtagggagaaccctagggtggctggccgggaggggcgtggagttcaggtaggctttctggagaaggggtgtcttgtctggaaagga

SEQ ID NO: 132144 - DNA, 1037 bp, Homo sapiens
tttacttctgaattctgcctttcacatcttttcctattggagcatctgccttctgcatgatggtttataggagcttctaccacattatggacattatgcctgatggaaggttttctctagtaactcatttatatttttctttaacagattctgaggttgggaccaagaaggaactatctattttaaaccaaaaattttccgaagaagtaaaaaccccagaatttgtatcaagaagactcttaagggataatgcacaggccgctgagtttcgggaagcatggggccgtgagggcaaactcaaagagcgcgtgggaaattctgccgggcagagtttgaacaaacccaatattcacaagagagttttaacagaagctaccgtgggcagggaaagatctttgggagaaagaacccaagagtgtagtgcatttgatagaaacttgaatctggaccaaaatgttgttagacttcaaagaaataaaacaggagagagggtctttaaatgtgatatatgcagcaaaaccttcaaatataattcagacctaagtagacaccagagaagtcacactggggagaagccgtacgaatgtggccggtgtgggcgagcctttactcacagctcaaatcttgttctgcaccatcacattcacactggaaataaaccatttaaatgtgatgaatgtgggaaaacttttggactcaattctcacctccgtcttcatcggagaattcacactggagaaaaaccctttggctgtggtgagtgtgggaaggctttcagtcgaagctcaactcttattcaacatcggatcattcacacaggagagaaaccctacaagtgtaatgaatgtggaagaggctttagccagagcccccagttaactcagcatcagagaattcacactggagagaagccgcatgaatgcagtcactgtgggaaggccttcagtcgaagctccagccttattcagcatgagagaattcacactggagagaagccccataaatgcaatcagtgtgggaaggccttcagtcagagc

SEQ ID NO: 132145 - DNA, 3321 bp, Homo sapiens
aagccgagcactcctgcaccctccttccgagcccacgcacaccaggacaccttcagccgcgtctcctggtgcgcctgcgcgggggccctggaggaggagaagtaggcggggccggcggccgctggtgactacaagccccggcgtgcaccgcgctaggctggccgtggcgcgcccggaaggtgtcgcggccctgggccccgccccggaagataaggccgctcgctgacgccgtgtttcctctttcggccgcgctggtgaacaggtaggtcatccttgcggccttgcggcatgggcagtatccgccgccatcctcttccgtgaggcgcgctgagacccggaccggccctcctgagaggatgccggtgcgggcgcccgcggagagggtagggagtggtgggcgcggcggcctcgggggcggggtcccggaaagccgggctggcgggggtacccgggccgcccggccgcgctaatcgtgagtcgcccccaggacccgtcgccatgggccgtgtgatccgtggacagaggaagggcgccgggtctgtgttccgcgcgcacgtgaagcaccgtaaaggcgctgcgcgcctgcgcgccgtggatttcgctgagcggcacggctacatcaagggcatcgtcaaggtgcggaacgctggccggggcgggaggggaagggacgcccggccggaacgccgcactcacgccgcctctgcccacaggacatcatccacgacccgggccgcggcgcgcccctcgccaaggtggtcttccgggatccgtatcggtttaagaagcggacggagctgttcattgccgccgagggcattcacacgggccagtttgtgtattgcggcaagaagggttagcatcgcggcggggaaggaaggtcggggtggggaggggtctgggtgttgcctgaggagttaacgtcctaagccgatatgggaacctcgcaggcagaagcttcaggtggggacatccgcgtggccagaccagtggccaccggtgggtgccgagagagttgtaccgggaggctggatgttgaatgctgtgctcgcaacttcgcgggttgcctagagcgagggggttcgcattgtttcttactgtgctgacggcctgatgctgcttccccttgcagcccagctcaacattggcaatgtgctccctgtgggcaccatgcctgagggtacaatcgtgtgctgcctggaggagaagcctggagaccgtggcaagctggcccgggcatcagggaactatgccaccgttatctcccacaaccctgagaccaagaagacccgtgtgaagctgccctccggctccaagaaggttatctcctcagccaacagagctgtggttggtgagtatcaggcagcagttgaatgctgagggctgtgggtgaacatgctgtgagtgccggtggacagccagtggctagacttggtccctggaattcgattacctgttgttctaaaacttgggttctgtaagtttgagctcatcctgtagtctcagttgtcatcactgtacaacaggcacaacagtacctgctttactgctgttgaggcgttaaatgagattgggacgaagtcaccagggtcttggattctaccgtgggcttcctgattgctgcacttgcatgcagttggttaacagcctttttagagaaggcagggagagattgtggctttctcaaagacgcctactgagtgagtgaaaaaggatttgagtctaggttaactcactgtgctgtttgggaacatcttggaatccttgtgatgaactcagcctcgcacaggggaggctctgaggttgtgttcctggaataagtaaagctgagatggggcaggctgaatcaagtgtcttacgtcaggttgagtggccggcctgacgtctcacacatggtgaggggggtgcttccctgcgcttggagctcagccagcattctaggtgatggaggtgagggccttggcttgcctgcccattgtggattgaagaaactggatgtcagctcacagggtgcaaggggctccctagggtggaggcgagtgggctttttgctgggtagttggatgcagtattgggaaggtgcatgacaggagattgaggggaggtgggggtgctctgaccgactgggggttccctgaggtatctgatcccctacaggtgtggtggctggaggtggccgaattgacaaacccatcttgaaggctggccgggcgtaccacaaatataaggcaaagaggaactgctggccacgagtacggggtgtggccatgaatgtaagtaacccagaaatgcagggttgggtattgaagttacagtggccacactgttgggtaggcaagtcccatccacaggtgtccctgcaggagggggatctacggtgggaggagcagcaggtggtggtttgtagtcacgggactgttgatcctgctccagcactcctgaaggaggtgggctcaccctccttcaccgtttctccgcaagaaacggaggctgggaggggcagtgggggcctgagctggaaagagtcagcctgactggggttgtctagcggcacatgctgtggagaggggcttcgcggaattgggcccctgacgggtgggaccccgaggccgggggcgggggtggtggggaagaggtttctaaagccatctttctctgcctgcagcctgtggagcatccttttggaggtggcaaccaccagcacatcggcaagccctccaccatccgcagagatgcccctgctggccgcaaagtgggtctcattgctgcccgccggactggacgtctccggggaaccaagactgtgcaggagaaagagaactagtgctgagggcctcaataaagtttgtgtttatgccacctggctgtgcccacccccatggtttcaaagggaggggtccctgctgggaggatttctgtgggatccccctggttggtactgggagggagttagactactgaagtagaccaccagtgagtggtagaagcttgaagggaaagtccacaactagaaacggggtgcaggtaccctgggcaagacccttgcttccccacagaggggaccaagaatgtggcatccaggacctgacacttatgtgggtgactcagtcccatggcctgcagtgcttggatgtgaacactcatttcacgtatcaggaaacagaataggacacaatcgttgagcctggtgttctggaccataccctcactctgtcagctccctgctaactttctcagcacctgaggcagtcctttgcccagggtcttttagcgacaccctttccctccatactggctacagccctgctgatgtcagtgtgt

SEQ ID NO: 132146 - DNA, 1084 bp, Homo sapiens
caggcaccgcccactccgggctctgggccctcctctccctcgcggctccgccccctgcccgcctctgactgtaccccgcccccaggcgccagccccgcctatctgggcttctggtcccgcccaggttcttgtccctcgggccccagcctcgcccctcctcggctctgactccaccccttctccggagcctgggaggcggggctgagaaccacagagatggccgggcctccgagcggcccagggcggccggaagtttgcggggcggggcggacgcgggtggccaaggcccgtttccggcggcgtcgcgcgtttgcgagcctcgggtggtcctcagggagggtgagtcggcgcggcgggcgcggactcgggttgccctcggtccgagtgatccctggtcgcttccttagccctcccgccttcggcattggggtccccgcgtcccccgggcctccaggcgggaaagcgcgggggctttgcggggccttgagcgcctggtgtgggaggtggtcgagcccagccaccctcccccgcggcggcgcgaggtgggcttcgtttggccgagtctcgcagctccccgcagaccccgctcgtggcggccacggtgtccggggcctgagtaaggcgagctccagctgcggccttttcttcaggcctgggtctactcccggggccctgactcctcctgcgaaatcacctccttctagagccttttctctttctatttattgccccggaaggcctaggataagtgacagtggaggaaggaacggtgccttgggtggggtaggctgtttgtcttctctaaattctggttgctattccgggcattcctactgtcaggagccaggtggggggatcagcctacctgtgccggtgacctggggcttccacccacaaaccactttctgggccagaagctgccatacgaagactctttttcccattccgacctcccgggggaatgcctgggcaggtagagggtctggggtcattggcttaattgaggtgaacgatttatatcagattacatccctgtgcctggttccatcctggcgacaggtgagctggagactggaatttatgt

SEQ ID NO: 132147 - DNA, 1011 bp, Homo sapiens
tgccttcccttgctgccgggaatttacccacactggttcatccaaccccatttcttcttgcttcaggccctttcacatgctattcctgctgcctggagtgctctctccacctccattaccttggccgaggtccctggggaagtgacccattacactgaacgttctagtctaagtggctttcatagttccctgtacttgagcgctgtcgtggttgcagtgtgcttatttgtgtggttatttaactctttcctccgccagactgcttcgtgaaggcagggtcctcgtgtccactactgtatccccattactcagtgcctggcacgtggcatccacttcttacggctttgtggagtgagtcacacatgccacacacacatacactctaaagaggaacaagagttcagtgggcctccttcactcaagtgccatggctgcttcagcccagccccatgtccctgctagagaaatctggggctggaggtaaaggagcagagagcacagtacccccttgattagcctggaagttgggcttctggcaccttgacctctaatcctttcataattgccaacaggtctctcggccagaacacgtggatgcccacccaccactgagcctcatggtaggaagcttgactgcctccttcccctcgcatgtcctgtgaaggcccacctcctgctctgcccactggccctgggcccagaccctaccttggcccttgctgggcttaggaaggcccccttgcccccaaccccaaggtagtgagcaaacccctgcccaaaccagggcctaattgaggctcttgaggggggagggttgtatgaccaccatggactgggttccttcctcctccccgagactgcccctccccagaatattagaggcagaggagtcctggtgagcgtctcgcccaaccccatggggcagctgcctgagacatgtcatgaggcagcgccagaagggggctggcacccagggattcctggggtgctggtgtgtgtcctttcaggagg

SEQ ID NO: 132148 - DNA, 1036 bp, Homo sapiens
agtccagaaggaacgcagatgtctggaaggcctcctgggggcctccagaaacttgcagccccagggaagaagtcagtgtggtcttagaggtggccacgcacagcccagggagaagcaggggaggtggccaggtgcaagttggcagcagcagccaggaggcagctgagggggctgggtcctgctcagagaagcccaccccagggagtagccatgaacggcctaggtgcccagtgctcttctgagctcacgtagtaagtcccttggcagctcttccagccttgtttcctcatcacaatccatgctctccattcagaactcagaccctgtactgtttcctcgccagctcggatgctggagcccctgaccccgcagcccaatccgtggtagcttcccacccttctggtcttgctttgtctcctttgcctctgcatggactgtgccccacaccagtgcctgtaggatggacctctctgctcacagaacccagccctgccccagcaatgaacattcattgctatcgaatgagtgaacaaggtaaaaagtatgaaaccacttttgagaactgtcaaaggctctgccttctcttgcacgtttccacctggggcctcacagtgctcagtgcaactatcctgggagccttgagccctggcccccgcatttgtagtcttatcatttctctgagcacagggcctaaggaacgtctttgttcctgtttatttcagattctacgattaggactgaaaatgagcaggcctgtgaggacatggacatcctaaaatcagaatcctatgggacagtggtcagaatctccccacaggactttcctcagaatcctggctttggagacgtttctgattctgaggtctggttagacagtcatctgggcagtcccgggctgaaagtgacaggctttaccttccaaaataactgtttgaatgaggagactgtggttcccaagaccttcaccaaggacgcaccccagggatgtaaggagctgggaagcagcggcctggattgtcagcctcttgaaagtcag

SEQ ID NO: 132149 - DNA, 1267 bp, Homo sapiens
gggcagactcaccttctctcttgtgcctccagctccagctcccctgagttctcaggatgtgaggggtctatggttcgtccccccgctccagcctggagatgacatcaggtttggaagcttgaagtcctgctccagagaaaggaagcaagacctgaaaagtcatcccaggtagagggcaggatggacctgtggtctgagtctttgtgctggttgtgtccttccctgccacctggtctctaaccgtggagaaagacacaggcctctgcctaagctgaggaaaggtcaaaactagcttttcaggaggacggggagcatagataggacagtgttggggcctgaacacatcatggtagaggactcatagtagtgggtgttgatccccagcagaagggctaaagggggaatgagtctccagcaccatgtctggtttgtctggcccaccagcccggcatggcccttgtccatcggcgttgctgcttttgttcctgctgggccccagcttggtcctcgccatctccttccatctgtccattaattctcacaactgcttccatgaggagatccacaaggacctactagtgactggcacatacgagatctctgaccagtctgggggcactggtggcctgtgcagccacctcaagatcacagattctgctggccatattttctactccaaaaagaatacaaccaaggggaaatttgcctttaccactgaagattatgacatgtttgaagtgtgttttgagagcaaggaaacagggcagatacctgaccaacttgtgatcctagacatgaagcatggagtggaggtgaaaaattacagagagattgcaaaagttgagaagctcaaaccattagaggtgaagctgcgacacctagaagacctttcagaatctattgttaatgattttgcctacatgaagaagagagaagaggagatggtgataccagtgagtcaacaaacacttgggtcctacacttcagcatcttttcaatgttctgcctcactggactagccacctggcaggtcttctacctgtgatgcttcttcaaggctaagaagttgattgagtaatgaataaggcatattctcctcccaccttttaccacagccagcagaacatcgctgggatgggcctggcctaaggcatcctaccagcagcaccatcaaggcatgtaggagctttcttgccagaaatgatctcttttggtgtgcgaggacatggggtaccacctacacccaacaagtcaatgagggacttct

SEQ ID NO: 132150 - DNA, 1033 bp, Homo sapiens
atgaagcttcactcacccgatgctcacctcctgccatgcagcctggttcctaacaggccaaggaccagtaatggtctatggcccgggggttggggacccctgacctagagtgtgaagtcatttgcgtacattttaaatgaatatgaagataatgccattgagcgttcacagatgtgtgtgtaagtgtgtgtaaaaggagaaaaaataggaaatacataatttcatgatgataaaagtctaggaggtgaggtaaaagtctgtgactggagactggggataaaagaagacttcaactgaatcagtaccactgtatttcttttatataaaaacacagaaaacaacaatgtcatttctggatggtggggaagagatgatttttatagaaggcatccttttctgcattaaaggaaatagtctcaaaataaagaagtgcatgagcattaatgcctttggcagatatgtgttgacaagcactccttccagaccccatggaataggtcaggtgccaccataagcgattcagaaaccaaggcagcccaacctgttaggccttcagtgtctagctccatactctccaatatagtagacacatacagttacttgactttaaattaaaattaattaaaatcaatttttcagttcctccattgcactggccacatttcaaatgctgaacagctacatgtgattagtggctattgtactgctggcacacatacagaactttctgttattgctgtaaatgctattggaatgtgtgctattattatgttattgctgtaaattctgttggaaagagctaatctttagctgaaaacctgtccttttgacaactagcacattttggtcacattgctctttttctaatatgtccctctgcacagaggagaacaaaggtaatggctagcagattttttttttaatctctggaaaacatatgtccactataatcctaaactacaattacatctgaagtaaccctttcttgttaaagagaattaggtaaactatgtttagaaagagatttggcaat

SEQ ID NO: 132151 - DNA, 1056 bp, Homo sapiens
ttaaaaacatcatgctaaacagcagacccagggttagaacacaggcagtctgtttctggattctatgtagttctatcctatattgcttggttttccagggttagaacacaggcagtctgtttctggattctatatagttctatcctgtattgcttggttttccagggttagaacacaggcagtctgtttctggattctatgtagttctatcctgtattgcttggttttccagggttagaacacaggcagtctgtttctggattctatgtagttctatcctatattgcttggttttcacagtcacctcattgcttaggagcgttttcatcactcttgactgtttaagagctctttagtcaatttcctttcaccataacctcttgattcctgtgttgtgccaacagaatcagcaaagtacaaaggaaagctgtcagtgcaattcacagcctgctaagttctcacgacctggacccacgctgtgtcaaaccagaggtgaaggtcaaaatcgccgccctttacctacctttagttggcatcattttggatgctttgccacagctctgtgactttacaggtaatggcccttctgttttctttcttggattgttgggggcccctgccaaatgccccatccgaatgagatctctgtcattcgttccagtgctgatatgttcatatgagcaattcttcacaaaaatggtctccaaacctctttaacactggccccaatcagttaaaaaaacaaaaaaagtcacatagccccatatgtgttttttgtttagaaattatttacttgtttcttcattcattcatttattcattcattgatctgctagtatggaatgaactttataaaccatacaccacaaaggatgaaataataacaagattactgcctttggagatcgtgctctaacaccttgaaataaaggtgttccttcccttttcttttatgaatatgtaagcaaaaaagcggtctcaaatgaacccaactaattgctccatgcaaaaaaaaaatcatggcatatgtcaatattagaaaattctatcatagca

SEQ ID NO: 132152 - DNA, 1052 bp, Homo sapiens
cctttcacttattatttgctgagttgtccatgactgatgtccatttctactgggtgatccacccccaaccctttctaaaaggctaactgatcttttcttgcttctgtacgctctctttccctctcctccctctcttttcttaatttcagggactccttccacagatctagtttcaggaaatgtgaaacccagttgtcacagggcagctaagaaaagccatcttcattcgtggagactgtggccctgcaaccctggagaaggacttgctggtacttaaaaaatgggacatttgccacccaggactgactgtacactccctgatcagccagcactctggaagctttgggatcccaggaaccatggaattattcccaaatggactctgaccagatttttgccatactggggggtggcgggatggaggatgggtactcaggcatgactgcgtatttattaaagtgtgtttttccacaatgtaccaaacaaggcataagcagcttctcctgctgactggccaatcactgcccatctgagagatgatttcctctggcccatatttgaatttattggagtaactcaaattgcctgaggaaaaatggaaaaattatccaccagtcgattcaaactgaatttcactctttataggaaggcagggcaaacttgtaggagtacgaaacattttcaataaatctacaaagggaagccttactacaattccaaaaatcatcatggttggaaatttgggaggagattatttgtgaacttgttacccttttggtaatggtggactaattgctgtatagttatttttgttttattattactgttacattaatttaacatgcatttatagaagaatacattcaaagcactgatgtaggagatacacggtacttggagcagtcagccagaaatcacagatactgctttcacttaaatggaaacaattctccgataatgctttgctttttttcttatgtcactcttgtgtactatctatttttctcctctctgggaccaagtttctttttataaagcaataatatctctgt

SEQ ID NO: 132153 - DNA, 1052 bp, Homo sapiens
tcttatttcccccaaactccttctccccacagacttctagtggtaaaacccctaaactttgtaatcatcttcactcccctatctcatacaccctacctttaattcagtagcaaatcctgtttcaccttcaaatatatgtagaatctgcatcgtcctccctctttccactgccaccatcctctctcacctcaattactgcactagcctgatacctggactctctgcttcccttgcaatccattctcaacagccatcttttaaaaacaaaagtcacattgtggcactgcgtagactctctgttggctccttgtttctatgggaggaaaagtttttacagtgaactccatggctgtccttgcccggtcccttgttattctgtagcctctcctgtgctcgcccccacctctgctcttccacaggtgtcccttttgcctcccttagggcctttgcactggctccttcctggggctggagtgctctgtcctcacctcagtgaggtccttgctcagatgtcaccatgtcagtgctgtgattattcagagttataacctgtcttctcctggcactccaggtctctcttaatccgcttggcctcttcttttttttttccatatcaaaaattaaccagtattattatggaatttacctattatatttattgtttattttcagcatatcccagtagaatacgggcttttccagggcaggaacctttagctggtttgctggttggtggtacatcaagctcctagaacggaactggaaacgcagaagacacttaaataggtatttgctgttaaatgagctgctgataaggatttactatgctgttcagaacccattatgtgaggaaatatatatttcagttcactgttaggaaaacgtttatttccttgatgaacagggactcccaacttacctgattccctcttctgctttggctaccaggatgccaggaactaagtgtcatgctcagttgtgaaagtgattggcttcaacttgctggtgaagtaatacaacccttcccttcctttcccttttccccagccttt

SEQ ID NO: 132154 - DNA, 1050 bp, Homo sapiens
ccctgatttctgacagaatatgtatacatacgtgtgtgtgtgtgtgtgtgtgtgtgtgtgtgtgtatttatttgagacagagtcttgctctgtggcccaggccaaagtgaagtgcagtggcatgatcttggctcactgcaacttccacctccctggttcaagcgattctcatgcctcagcctcctgagtagctgggattgctgggatgcgccgccatgccctgctaatttttgtatttttttagtagagatgggtttcagcatgttggccaggctggtctcgaactcgtggcctcaagtgatctgcctgcctccgcttcccaaagtgaggcatacaaaaagccgtagaatttcatatttttgagctggccagatttgtcaatggctctaataagtgttgcatttttatttaaggaggcatgtggtgatgttagccctgtgatataggagaataagcagcaaaggttgggctggtttccctgctcccctggctgccgtttctccattagaactggaattggggatttcacaaggacctcttggaaaacttcacagttagttttaaaaaaaaatgcatttgtcacccagaggatcaatatttttctaaaatttctaaaataaaggatcagtttgtttctgaaatttggttacctgaagccattgacaaattagttgtttcttattcaggttacttttaattgagttgtgcatgcaaacccacatgtatccctctctgcctctgaggagaatggggcctttcttggagaacacaaaagtaggaattctgattttattttgtgatcttagtcactttacaattataaaaattttggagctaatgagaaacctgaaaaattctgaagtcttcaaggagtgtgatcctggtgctgtctctcaggcatttctcccagagaacgggacggcagagcaatgactgttccccagcccacaggtaggagctggtgggcagcaccagcagcagtagacctagaagtcttagacttagatgtgatttgaaatatggcttttattatgggagcagcacacataa

SEQ ID NO: 132155 - DNA, 1027 bp, Homo sapiens
gttggccaggctggtctcgaactcctgacctcaagtgatccacccgccttggcctccaaagtgctgggattacaggtgtgagccaccacaccctgccagtacagagcctttgaagacattagaaaatgtgtgcctttctggatggacacagtccctggcttggtgagtggaccgtgcatgggacttcagctcttatgtgccaccttagctgggtgcacttgtttagtgtgcagaatacaccttccatgcgtggtggcctaggatatatctgcacttctcaatcgaaggcaatgttgcctcccagggaatatttggcaatatccgaagaaatttatgattgttatagctgaatcagagagggtaggtgctactgtcatctagtgtgtaaaggccagagatgctgctaaacactctgcagtgtccaggacaacccctgacaacaaagaattatccagccccaaacaccagttgtgctgagaaacgctggtgtctgtgaccctttcaggctcatgggaaaaggcggtcagagagggtgatagctggaggtgggtggacctgagaacaggctccttacatactttgctgcagtctcatttgcttgtggcagttttcaccttgcctctcctacctctctaccatagaactcttactcatcatgttataggttttcatttgtttattcttatgtagccattttcactattccctctcccacccccactcccccaagcagtaaattctgtaatgcaaggcaatcttgtgtccttatttctgtttctgggcacactgtaaaacatctgtattttaatagtatctgtcaggaaattctattttggcaaccaagtacgggctaatctaaagtagcccatacttgagtgctatgttgataaggctctaatgcatagttagccccttgactgtcaggcttggaaaaaagacaggaagtattccttgtctttggaaatgagcctactctggctttgggaaggaaagagtacaaatggttctcaccagatagggttgcagc

SEQ ID NO: 132156 - DNA, 1120 bp, Homo sapiens
ctcaacaatgtcaaaattgtgttcccagatcggttgttgtttgaaacatttggggctgatgcggaggaggagaattaattagcagctccctctgttggtgttctttttcagccttctcacattgcagcacgagagtcccttagacatgctggctgctcatttgataatctgtgttttgctcagtacaaaaggttgctggctaagttttgtgagcccctctaacgtcaggctggcagtatcttgggttcaattaacaagaaagtctacagtaacattttgtcaatggggaaggacttgaattcacagaactgtctcggaaagccctgggtaagtttgaagagcaaagttgccttttctgttttcagaaatattttaccccgcaacgatgtgtaaatctaaagcctgtgcaagaatgaaaacgagcttgagtattaagatttggcacagtgtgtgcaagcaatgagactgggttaaaaacaggaagtgtcttaatttaaagatggtgatggggagacggattaaaataaactgctggccatgttgaatctgagataggcaagccttggttgtgggcacattcccttctgaattactctatgcagatatattttaggcctctttctattaaattgtctttcacatggtttcaaagatagggctagtgataagaattctcttcctgcatggtgggtaccattatataaacggtatgagcatgcttttcttgtgtctctgtataactgcttggtctggcactccacaaaatagtaaaacacatttctgcagtggactagcccatgctgtgaaagaggaaggtggtggtggacaaaaagtggtaagttttaggctgaaggatgttgatgttaaactttatttctgattatggcagtctttcatcatgtaatttaagaagcctgagatcatctgacttttttttatgttttttttctttaggactgcaggaagtgttgataaacatctgtttaagttgtctataccatgaaatccataatcttccttcataactatgatagcatatggttttctatagttaggaaaactatttctcatgtatttcatggtttggccaaatccttttattacattagtactaaaaaat

SEQ ID NO: 132157 - DNA, 1074 bp, Homo sapiens
tggttaagtcagcatgggtttctcaagaacaagcctttcttgaattaacctcatttcctgtataaatcagatacttattggagagagaatttgggtaatgttgttgttagaggatatcagaataaaaaaactacatgtttcattaagttcttaggattttttatggataagttggaaaagcatgggcttgattgtaataagatagatgaatgtgttgcaggttgattaactgttgactttgtgcaattcactgccttgccagtgctattctaacttttccatcagggaactattaaggaagaggaaagtttatactttattttggagggtttagagggttgagggtacaggaattgaaggttggattgtgggcaggatgtagggagactttagaggcacagccaggagcgaaatgtctttgaagactcatgttttcacataaagatgcattcactttgtatttttaacatgcccatgtttgttttaaaatactttaaattatcaccagataaaatgtttgagtagccctttcccaatgtcatgatattctagtttgagaagagtggtctttgatcaagaaaggtggatcaaatttgtgtctatcccattgttgggagggaagctaaccaactggatgtcagacatcaggatagaaaaaaaaaaaggctgcaaaaagttgaaggcaatcaacatgaacaaatacacaattaagctctactgaatgcagcttcctagagtcgggggaaagttgcatgtttatagaatgggagacctggatcagtagcagctcttgttaaaaagattgaaggtttcagccaaccatttgatatgggtggccttctctggcagctttaatggcacagtactcagaattaaggagataatcatcccgttgttttctgacttcgttaggctacctccgagggcttgttttcaaacaagttctacattttaagagggtaagccagggaaataaatggactagaaactatgccctaccaggaatagttgaaaggctatcggggtggaaaggagagcaaagttaattctcaacttcaggggggcaggattgga

SEQ ID NO: 132158 - DNA, 1178 bp, Homo sapiens
catttcattgttttattaacacattagagaggcacccatgaaaatgtgtgcttctcatctttgtggagtaagtactgctattcattcttacaagcagggaagcagatccatcaattctcaaatcactctcacagccagattctgcatttttcaggtgatttctaattacatgaaagagattagatcaagtactcttttttggttatttaagaggaaagatggaaccaagcctgtgttctgtagctctattgtgtaaaatcacttcgagcaaatgaatgaaatattttgtcagactttttttttttttttacttactgacccttaatagaaaataattttatgtgtagccctccccagagtctctgttgccaggaagctaatgttgctatccctaatacggcaactttgtctatttttctgttctttgtgcattgtgtttggtcttaaactgtgaatattccattaactgagaactctgaacagccattgtgtaactggagtgatagtctgtgtcagttcaatgcattgtacttgagaataaacatgctgttttatttgtggtgggacttctctcattgccactagtaatatgttgttaactgaaaatataaggctattaataagcctcataagtactttgcattgttgaaacaatccttcagtgtaggatcacatgattttgtagatatgtatgtgtgtgtctatattttcaaataggcagtagacccattcgtttcttatccttgggtgtgaggtcagaagtgtcagtgaaattgagtccagaattgtagttatgcgtgctttcctagggagaggtttctcttctttttaatcagaatctcaaaattgctctatggttcagaaatgtttagggaccactgacgcagcaaattcagttcagcccggatagtttatttgatctgtggtgactgtgtcactagaaagtgatataaaatacctagactagcacagggcacacataggttctacacaaatatttgttggaaacccaataaaaatcactggtgctttttttctttcttccctgtaacacattatggcctgtgaacctctagaagacaggatctttgtcttacttagtctttggcagctgtgttaacttctcgcgtctgtctcctagtgtcatagaatgtgcactttctttctttttttttttt

SEQ ID NO: 132159 - DNA, 1040 bp, Homo sapiens
agtcaactgtcagttatcttcagctttcaggctcgctgcacatggacaggtgaggaccaagggaagaagagcaagcttgggtatttggttgagctgttaagttcagggttagaaaatgaccagcacaaaccttttggcttgagagccaaagttcttggcaggaagtctctgcttgtttccgtttgccttcctcccagtttctcctcaatgccttgcagtcagcatcctgtatctgccattttgaaaactgcccttaggggtcatgagtgacccccttccttattgttaaacccagtgacattttgtccttatctgcagcatttgatgtgttactcaactctctttgggcttgtgtgcctctccacccttgtggttattctcctgcctctgtaaccactcagtgtcttcttccatgtcccttgacccttcactgtgtcttctactgattccccttagaactttcatttacccctggagcttcaaccatcatcttcaggtaaaactctagcaacaagtcatctttgcccgctgtgcatcatccttgctgccattgagagtttggtcttaaaatggtacttgcaattagaacacgttcactttgtcacaaaatctgacagacattggacatacttagaattcatatctggcttcctgagacagctgtcagattgtctaccaatggtctacccattgatgatggaacaagctccttgtatcagcctcaaataaaaatgatggaattaataaaagacgcttaccttaaggcacaaaggcctatgaatttcaaaaagcattgacagaaccgatccaaaaaatatgtagtttgtaaaaactctaatacaatccacactgaagtaaaaagcttaacttagaataatccaaatagtctttgtcagctggacagctaatcttggtgaacatggaagagtagacaataatgttaaggcattgtgtgagggttaaattgtttgcgaggtcggcattgctggggcttcggattcaaactgggccttgaaagagggggtaagaaaagtctatgg

SEQ ID NO: 132160 - DNA, 1371 bp, Homo sapiens
atgtatgattgagaaaagacttttataggatgaaatatgagcaagctgttttactctgaagaataaaagtgaattgtattactctgcagattaagtcaataaataccccattttcataaacacaatatgcacagactagataatactagggaaacttgatacatcaaaaggagtattaagactgaaaaaaatggagatactcaatttattgcaggctttattcaataaacctagaaaatagagagtttaaatcaaaatctgttactctgtttctagagataatcaatgttaaaattgtactatattattttccaagtttttagaatatgtgcatgtgttgttgtgttagctttctctatttttgcaacttgagtaacatttattacatgcttgtgctgtgccaagctaaataccaagcattttatatatattaatttattctcataacccttggtacttttattatcctcatttacacacaggacaattgaagctcagagaaattagccaggcacagtggctcactcctgtaatgccagcactttaggaggccaaggcaggcagatcacttgaggtcagaagtttgagaccagcctggccaacatggcgaaaccccgtctctaataaaaatacaaaaattagctgggcgtggtggcacatgcctgtaatcccagctactagagaggctgaggcaggagaattgcttgaacctgggaggcagaggttgcattgtgctgagattgcaccattgcactctagcctgggtgacagagctagacttggtctcaagaaaaaaaaaaagaaagaaagaaagaaatgacttgcccatgttcacatagctggtaaacccacactggttcagaacttaaaccagtgagataccaaagcccatatcagtgggcttttttacatacttcttttccttaataaaatgcttatttcttttttctacagcatcattttaaatgacagcatagtattcagttatatggaaatgtaatggtttctctatcccatctccttttattagacatttatattgtttcttgttatttacttttagaaataacattgcagtgaacatctgtcatgcacatctatgattatttccttaggataaattgccagaagtggcattgctgaacaatgatagaatgtagcactcaggtgttgatgtattctgttaatttactctgttgatgtactgttttctcgaaaggccacaccagtttataatctcagtagcagtatattgaagtacctggtaactttcagctctcagcaacattggtagttagcaatttgaaaaaaaaaagtgtttgtttttaaaaaacattctaggtattcctttttaagtccatattatctctt

SEQ ID NO: 132161 - DNA, 1024 bp, Homo sapiens
actaaaaatacaaaaaattagctgggtgtggtggcgtgcacccttagtcccggctactcaaagggctgagacaggagaatcatttgaaccccaggaggtggaggttgcaatgagctgagatcgctccactgtactccagcctgggtgacaagagtgagacgctgtcccaaaaaataaataaataaaataaaataatgaatagactcaatagacattgatcctgctaacatattttgccttttaatctattggtacttcttttattccctttaaagttaattctaaataaaggagaagtatcttaatttggttaatatcatagtttggaactatggcaaaattattttttctcaggctactttctagtaagtattttatatttattcactaaagaaaatttttaaaatttcaaattacgtagaattgtaccactctcacatagaaatgtttttatctttcttatacatatatttatgtggtttgatttttatttggaatgcttgttttacttgaggtgtcaggactttccactcatttatgaagcctttacaattataatgataaatactgttacattaatgtacaataatttataaaactgactttctcatgtttaaaatttagatcgtgtctaattctttgctactttaagtatcattgcagtgaaatcttcaggccataataagttacttccttgcgataagttcacaggaataactagattaaaggtatgaatacattttaatttggttgaacacttacgtttatcaaaaactctttacaaaagtaacacaattatcctaataaattagaatattagaagtatataagatgaaaaaacattctcactgaacttcagtcctgctctccaaagtgaaccatgatgagaccttaagcaaatgttatatataatgagaaaagatagtcctgaagaattgagtgatatggaagtgataatggtgtactatatgggtgaaaaaataaagtactggtttagatacatgatttaagaaatagaatcctg

SEQ ID NO: 132162 - DNA, 1030 bp, Homo sapiens
gtaaagccagtgtcgaagtaatggcaatggtaagtatgcttagcgttctaaatttttttaatgcatgtttattactaagtaatttatctccttttcttctactttatagctccatattaaatatggtggcaccttttaataaaaaagaggaaagcctatttggaaacatataaaaatagcacaggataggtcatttttcagattctggtcagatcaccatttggaaagatcttattctttaaagcaaaagttttgaaccaaggatctgttgaagatggggagtgactctcattcatctccatcttcctttgaaatttcatacagattttttggtgtgtgtttgtgtgtgtctgtattttctaatgagaagatccataactttcataagcatcaaagccactgcctttaaatatctttttgattacttttactgtagttattgttttaagatctgctttttgccatttaaaaacatctttcaaatactagttaactcttaaatgtttttttgcagaataagatcctttttgcagtactttttgttgttgtttaatacctacccaaaattttggtccaagctctaggggcctcctcccgaagaatttggtttaaaagcaaaagatttttaacataaataaaccagaatttgctttttttctttttgatttttttttttttttttttttggtagtgatagggtctctctgtgttgcccaagctggtctcgaactcctgggccaatcctcctgcataggccttccaaagtgtgaggattaccggtgtgagccaatgtgcctagcattgatttgtgggggttttttgttttttttgggttttttttagagacagagtctcgctctgttgcccaggctggagtgcagtgggatgatcttggctcactgcaggctccgcctcctgggttcaaacaattctcctgcctcagcctcctgagtagctgggattacaggtgcctgctactgtgcccggctaatttttgtatttttggtagagacggggtttcaccatgttg

SEQ ID NO: 132163 - DNA, 1050 bp, Homo sapiens
cctctccaatgtttaaaaaaatactcaatgtaagagatgcgggttataaatacacttctgtgcatgtaaataacatttagagaacctagatgaagatgagataaagagggcttcatggcagctagtgagggccaattactggtctcctatgagaaaaggataagctatttgggtttagtaggagtttcagatgtggagtaaattatatgtttcttcaatttccaaaaattgctgcttgggcttcatagagcatgaggggaaatttcatgtgacgatggagtcagggcagtggcaaaagaagcactttccatagtgttagtaataaaacaagcaaaagaggagcctctgggaaagggcaaaccatgcccttggcacaaaatacatccgacgactgatcatctcaagttgacatccccatgtaacatttaaatgggataaggggtgattcacaaccttttatactctgacttccccttggagtccctcacggaggctgggtaaaagaaactgcttttaaaacgagctattcattaatgctgtaatttgtaaaatgtattatgccacacttcagacatacaaaatgtgtgaaagttatataacaagcacctttgtacacactacttagcttaagaaataaaccttattaatataggccagatatacatgagcacctactacgtgctgttttaggtactggggatacagcagtgaaccaaagaggcaaaaatttctgccctcaaggattgtacattctagggacagttaaagtctcctgtgtacacggttgccagaagaaaaaatactaagcacgtgttcatcgtttatctaaaattcggtttaatggtgctccactttcgtgcgcggccctacctgtgtaccccttgcagattgcacccctgcccttcctcaccgccagcccatcaaaatcaatcttccctcgtagtgttacctctttttcaccagatcctccatcctacttctcttgattggtacagtactgttttcattaattcaaaacattttaggccagatggggtggcgcagacgtgt

SEQ ID NO: 132164 - DNA, 1030 bp, Homo sapiens
ttccttggcttctctgttggatatttttggagtgagccttaactgagttactcatttccacatgctttaggaaaagtatgctcatgttttacaggctaagcctggttctgcttttgagctgcagttcattatgaatccggaaaacacaggtttttgaaatgcggcccatttgtacatatagcattagtcatctcagctggtagttctatacgatgagttatctcaccacttaaaaataagtacgctgctattttgagatttaaaaatatatatagtgaccagatttcttaccctagttaaagcaagccatggctgaaactcagattaaacaatattctataaaaatgagagaaggccactctaatcaacagatagaaaaacagaactatagacataagggagagctgtgctaagggacaaattgttggatttgtaggatttgttcgtatcctgaaagttaaatctttgtactcttaccttgtttatggccagatttgcctgatccctgatttccctcccaactggatcagaggttgtggaattggaatttcaccatacaaacctttacttaaaggaggtagtactagagtaaccatttatgggaacagtttgctactaatagttactagtactgagtttattttagttcctttttcatgattttattccattggaaaagttttctctcagggatcttttctactttggacatgatctctgttaggcagaatcaaaagatagctgtgtggctttctgaatttagtctcacaatatttggtttagttgataaatcccatccatcagctttgcaaataattttgtgaaaacattgattcagcttgtcctgcccaattttcccatccctgcccagtttactgagtgccttttccatttgcatccactgtccattaggccaaggcgtttgaagtgtttctgtacagcaggtacatttaagactctccaggaagaaagggggaagaatattccaaactgaaaacatcaaagagagagatggggtatttccagtaac

SEQ ID NO: 132165 - DNA, 1071 bp, Homo sapiens
gtcattgttgcaggagtgaatggttgtacatatatatatgctaagatttgagtttttgagtttaaggtttagttcaattcaataatttccttttttgttgctaaatccatctttgggtatttgttttcagctctgtttttccaatagggagttgctcaatattcattaaagctggcttcttgtataaacactataaaacaaaataaggacagggattcatacaaatactagctttccactaccaccccacctccccctggccaaaaaactgtaatgttttgttagaaaagcctgttttatccctaagttagccagtgctccttttctgcttttcacagaattactctctgaactggcacatttcttttttacgcttagaacagcatgttacttttgaagaaagtttggaaaataacagtccaagctcattctcttctgtgcatgcatgattgatttgggctgtatttcagcaacaacttttaaaatgagacagtggacattagagagcagcatagttggggttgcacttaggagcccatggcattttggctgttttgagacagatttggggtaaagagttgctgcatcttgtagttggcactgaacactggagaagagggccactgtataaaccgcaaggcccctgttaccatcacatgcctccctagcacaatgtgccctttattaagacaggccgttccactactgagaatagtaaccctttccgctgtcttcccctcactcttacgtgcagcctggcttctggcctcttaacccatgcccagagtagaattggcaatacccaggagggacactgcactggggattgttaggtcatgccagttaggatgcagctggaaaggtgctgctgagtgggacgtgcagaggggaagactgcaggctctgtctgcctgagctcatctggtctgacacctgccgtgattcatttttcttcatgccatgttaagaaattttgtatcaagtctagtcgacagttactcatagcctggaagcaactttggaaatcagagttccactgacccccctcattttaagggtatgaatcacatc

SEQ ID NO: 132166 - DNA, 1034 bp, Homo sapiens
aataaaaatcatctataattccacaacctaaagataacaactgaaacaatatcatggaagaaatgtccttaacactaatatttaacgaacaacttctgtcttcagagcatcaagatgtttttcaaagtttattatcttattctgttggccaggcacagtggctcacagctgtaatcccagcactttgggaggccgaggcaggcagattacctgaggtcaggagtttgagaccagcctggccaacatagtgaaaccccatctctactaaaaatacaaaaagtagctgggcgtggtggcacacgcctgtaatcccagctcctcgggaggacgaggcaggagaatcccttgaaccagggaggtggaggttgcagtgagccaagatggcgccactgcactctagcaagtttattatgttatactatatattcagttatttattccttcagtaaacgttgtcagacatctcctttcttcccagcatgttgataattggtgtgtggttgggagaggaagcaatgaaaaaaaaaatgtatattttttttgggggggtgggggcggagatgaagttttgctcttgttgcccaggctggagtgcaatgtgtgtgatcttggctcactgcaaccttcacctcccaggttcaagcgattctcctgcctcagcctcccaagtagctgggattacaggtgcccgccactatgcttgggtaattttttatatttttagtggagatggggtttcaccatgttggccaggttggtctcgagctcctgaccttcaagtgatccaccctcctcggtctcccaaagtgctgggattacaggcatgagccagcgtgctctccaaaaaaaattttttttaattaagttttttgctctctgggtgcttatagtctggtacaaaagacaaaaaagtgttttcgtcttgttaaagttgggaaataaatcagggactcataagtgcctaatttatgttgatgtatgtaaacatacactagaaaacaggatattaaaaaaataatgacaccgggtagttt

SEQ ID NO: 132167 - DNA, 1060 bp, Homo sapiens
ccagcacccagactgtggagacgcggacagtagctgtaggagaaggccgtgtcaaggacatcaactcctccaccaagacgcggtccattggtgttggaacgttgctttctggccattctgggtttgacaggccatcagctgtgaagaccaaagagtcaggtgtggggcagataaatattaacgacaactatctggttggtctcaaaatgaggactatagcttgtgggccaccacagttgactgtggggctgacagccagcagaaggagcgtgggggttggggatgaccctgtaggggaatctctggagaacccccagcctcaagctccacttggaatgatgactggcctggatcactacattgagcgtatccagaagctgctggcagaacagcagacactgctggctgagaactacagtgaactggcagaagctttcggggaacctcactcacagatgggctccctcaactctcagctcatcagcaccctgtcgtctatcaactctgtcatgaaatctgcaagcactgaagagctgaggaaccctgacttccagaaaaccagtctgggtaaaatcacaggtaggtggtaccctgaggacctgggaatgaggaaggatgggggaaaatgtctttccagaagctaaggattattttttaactgctggaaccatttttggaggagaaatggagaaagttttagagtggtaatctgtagaatgaaaactaagaatcaaaatccataagcacctctgctgatgcttattatctggtagcctcactggcctctggctgaggactaacgctggaagaaaagtaaactggtgttggctggcctagaggttgtcttctggggctgctagtttggtaagatgctttattctttgtctttcagttatttacttgctcattatttatagaactgcctttaaaaaatcctaccctgtttgtacccactattaccagtatattagcaattgaaatactggcataaaatgttttcagttaaaacgtttatgagaggagagactccattaattcattctttaattcagcaaataat

SEQ ID NO: 132168 - DNA, 1035 bp, Homo sapiens
cagcataattcagtgtaggctagttaatttcttcctaatttctatgaaaattgtttgcaaggccagtatgattacatcatattaatagcttaataaatggagccaagcctgagtgtttattctcatcacagaaactatgaaagcatggtattatccagtttttcagatgaggaaacggaagcagaataacttccctcgggtcataaagcttttaggtagcagagcctgcatttgaaactcagtggtctggctccagagcctctgcttctgcatggtgctgtctggtctcctttatagacattagaatctacacgtcatttaaaatcaggagaaatgtcccagtttggtgtttgaagcttctcttagggctgttggtttttgagagcagattctaactgcatatatatactttgactataaaaggacaggttacttgtgctttcaactaggtctcagaaagtctataaatagaagaactaacgaccacttggtgttttggcagaggttctgtctgaacaccctccagcacgagtggttccgcgtgtccagtcagaagtcagccattccagccatggtgggggactacatagctgcttttgaggccatttccccagatgtcctccgctatgtcatcaacttggcagacggcaacggcaacacagccctccattacagcgtgtcccactccaacttcgagattgtgaagctgctgttagatgccggtatgttggctgcccttccaccctctcttctctaacagtacttgggttgtgactcatctcagagaacctggttgagccactcctgaattctctgaccatgctaaaatcctttttattgcttttccacatgacatggcaagaattttcttgagtcattcataagaggcttgaagtttaaacaaaactgggtgacacagattctagatctgtttttgaaaggaggttttgaggatcttcttgctgcagttcagctgcattcaaaagtgagaggtgtatgcctggtaagaagcatgtctcacgttccctcctgagc

SEQ ID NO: 132169 - DNA, 1039 bp, Homo sapiens
acgtaagctgtctccattgggcctcctggccaggggtctgggggactctggacgggagctctgggagtgccttttggccaggagcgaccaaatcctcctctattctcctctgggatttgtgtcgccatctaggtgcctcccttcacagccaagcttggctacacttactgtgtgtgtgcaaactaacacgctcataaactagtacccaaagcagaataaataggccctaccccaaaaattcatgaaatgaaaaagtgatttaacgggcatgtccaagagcccctctactaaagggaaatcaatggatttgcactgcagaatcaaattcagtgtaggtgacttctgacaggtgcacttggaaatctggattatcattagaggctggggttacacggtgactaaaaccagttcctactatagtgaaccttttccacccaaagtgaacacactgacccatcaaagtgagtagcttgtgacacaacatatgccagagcctgcagagtagcttgacttcttgaagcgttttcccatttctgcttagtctgtcccatcaacaccactctgctctcttctcccagttcccaggctgtccacatttccagataactccttgaccgggaaactcaaccaaagggggtacttttgcgtgtctctaggccaaaggacaggagtggtgataggtagaaggtaggaactggcatgtaggcagtgagatggtgtaaaggtcacagaggtcgggttggcttggttccgtttttgaaagtttatctctgtggatcacaggtttggatcagagcttctttagctcaaaacaccaaaaagttaggaaaatatcctttgtaggtcagattcttctgggcccaagccagtagggagaaaaaccagcggagtttttcactggtatgagggactgactagcttcacactcagccatctccacaggagcacatggaagctgcagctgtagcagattcccttcttcccctctgtgggagggagagcttctgaccgacttctttcttccagaagagtttgttag

SEQ ID NO: 132170 - DNA, 1400 bp, Homo sapiens
tgcctgtggtgggccaagatcctatgtcacagggtacacatctgcctgaggtcacttattaacccccagtttttttcctttcctggtctctagggcacccctaggcttggaaggaagacgtctcctggccccacccaccgaggttcatttgattgattgtatgcaaatagccctttatttacatgccactattaagctgctaattgttcctgttggggtgacagatactgaatgtatacgtattgtgcctgagctcaccagcaaacagaagcatcaagcccaggggtaaaggctgaagctttcacagtgcagagactgctagcctgggcacacacacctcctttctggccgtcttctgtgtagggcacactttaacccagtctctgttgctgttgagtctctgctccgttttgtacagtcacagggaattctgatctgaaggggcaccttctgttcactcccacaaagtggtgtctggttctcactgagacgttttaagatttttccacaaatatttatatgtactaaatgtggaaccattagaaagttcttccaaaatctcattccagcatagttttggatttttcttttgtcttattttaaaataaggaagtcgagatgactttgatcattggtaacttgggcctgggccagacaaagtataaaacttacaaaagaatattctcatttggtcttaactaggtagatgtaatatatgactttttataaaaagggtatctatatgaacttgacacagtattttcagcttttgtattccatactaaagccatgaagaactacacgtaacatcatcatttgtattaattgcacaactccaatgctaaaggttggattgtgttagaggaatcggctctgtatttgcctctagagaaacacagtgttctctttgtatttatggattcctttttaccgtgtcacatttactttggtcctctatgtatttaaatgtttgaagtgccttagactcttgccatattttcaaaataaaattccattaagctcttttccttgtccctgtttcatctctgatagctgtccgccccgagccgattgacttacggcagtggcagcacacgctgatggattgagctgagcagggagggtgagtgcgccagttggctccgacagggagacagcatcttccgagggcgcttgtccacttgcacagcttggctcctgactcagattgcaagtcgggaggctgaagtttgaggcctccttagacaaagcgctcttccgatgggtagccggagatgcttcttctcaggtgcagaagcactagtccttgactctgagtacaactgctgggtgactaggtgatacgtgtagtgacaagaaaggagagatgaagccggacactttttttttttttttttttt

SEQ ID NO: 132171 - DNA, 1017 bp, Homo sapiens
tttttttttttttttttagatggagtctcgctcggttgcccaggctgcagtgtagtggcgcgatcttggctcactgcaacctccgcttcccgggttcaagcaattctcctgcctcagcctcccaagtagctgggactacaggcgcacaccaccatgcccggctaatttttgtatttttagtagagacgggggtttcaccatattggtcaggccggtctcgagctcctgacctcaggtgatccacccgcctcggcctcccaaagtgctgggattacaggcgtgggccaccgctcccggcggggcccgagtttcttgaatgaagtccccccagcatggccgttgccatgcgggtcctgggttgtggagagatgcggcggtacttgccgacagcggcggcgcttggggtcctgggctcccggccacgctacatcgccggtctgggagcgccggagacgcgtctgatcccgcccgccgggcagagttgcgggcttcgctcggctcggggttccccacgatctctcaccctgtgtttcggcggagttgcgggggttccctctgctcccgggtccctgagatccctgatcccgctctcagggcagggaattccggggttcgcccctctgggcttccccgcgatcccagagcccgcgttccaacagaattgggagggtttattgcgctagaggagtcttcaggatcttcgctcccgccctccgaggtgaggctagaggggagggttcgactccaagggaatcccagggatctctagccccgctcttctagcagagaattaaggaattctctccgctttggggtcccaaaaatctccgaccgcgccttgggagcagagggtttcggggttcgatttcctcgagcgtccccagaatctctgactctccctccttgctgagttgcacttaaattagaaaggatcttggagggcggcagcgctggctgctaggttagcgggaaagggaggctcggccggctgctgcttacgcgggtaacctgtcggaa

SEQ ID NO: 132172 - DNA, 2068 bp, Homo sapiens
cctttcttggctctcttaactcccaaatgtttcctgtattgctgacttcttcctttgttttaagtgctgctctaacctgtgcctcttgggtaataaggggctccaaagtctgtaaaataactgaggtttatagggaacggatgcaggggactgtatactaacaccttatgcagtacactgtaaattctgtctgatgatctggactctgagcctaggagtgcccttagttgtaccgtgaagcaaaggaagtggagtaggggtgcctgtgggtcccctggggctctcagtgctctctcacggagtcttgacttgtcacggtcccttttgcggttgtcaaaagcagctatgcaaatgtatatgtgcatttctgtttcagcctgaaggtgtcttcactttccaaatcacaaaaaaatccaattcggtgtttttgagtctcctatgaaaattcacataaatattgattactgttgttgaaccaaattacacttcaaaccaagtttatgccagtctctaaaacgtctgcaggcagacttcatagttgctaatctggtctcattgtacaataccactgaacatgctttccagaaaaaaatgtgtaagaaactcttaaagtagactataaatagctggcaagttgtgaaaagaaaataatcaattcagtattacagtaatagcagattttctgatgtttattggcagtaaggttcttagatactgcttcagccatccattgccattcagcatatagtaacagatgactttcaatgttgatttcagaacttataaaaattgccgttaactacccgttaactctagtcctgaggttttaggttttatctaaaatatggggtagggcacggtggctcacgcctgtaatcccagcactttgggaggccgaggtgggtggatcacttgaggtcaggagttcaagaccagcctggccaacatggtgaagccccatctctactaaaaatacaaaaattagccgggcgtggtggcgcatgcctgtagtcctagctacttgggaggctggggcaggagaatggcttgaaccctggaggcggaggttgcagggagccgagatcgtgccattgtactccagcctgggcgacagagcgagactctgtctcaaaaaaaattaaatacataaaaagtaaaataaaatacacaaaatacaaattagttcagtgaagcagattggatttatcaaatggcaataaatgtttgctgaattgaattgaattcatctctgctggagagtttgctgtctgagcaagatttcctccctcactcttcttactctgttttttcattttacttctttattcgttcaacaaatgttcattctatggctgcactgagccagatcctattctaggtgcaggatatatagcagtgcatatatctctcacatggaccttatatctcttgggggctgccagggaagacagttgataaacaagtacatcaataaataagatatttgcagtaagtggtaagtgctgtaaagaaaaacaaagtgatatgatggatgtgaccaaggggacacgggctgttttaaatagggtggtcaaagaagggaggcctctctaaggaagttaagtcagagctagtcccaaatgacagtgagccattctcatcaagatctggggaaagagcatttgaggaggaaggagcagcaaggtgagactgtgctgaggcaggcagctgtgagcctgagtgctttgagcacagggtgacaccagtggggttgtgtcatgggctcatagcagaagggcgcacagctgcctgtgtataccacggaaagggttgggagtttagcatgaatgcagtggacagccattaactattaaagcagtgaatggtgtgatctaatttactttcttttttttttttttttttttttagtatttattgatcattcttgggtgtttctcggagagggggatttggcagggtcataggacaatagtggagggaaggtcagcagataaacatgtgaacaaaggtctctggttttcctaggcagagggccctgccgccttccgtcttctgcagtgtttgtgtc

SEQ ID NO: 132173 - DNA, 1083 bp, Homo sapiens
aaaaaaaaaaaaaagacagtggtgggtgttttataaccacacaaatactcaggactctgagactgggacgttacctttagcagaacaggtaaagcaccatcaatgcacatttagaaatcgtcaggacattgcatatcagatgaagaagcaggaggcatcagcactggcctgcgggtgggacaagggaatgtcataatatttcagaccccttgacgtcaccacctttaagaagcaatatggggaagctgaactaggtgtgtcacactgtgatccattgcaaaagggactcatttaccccgttgtggggatagtattttaaagtgtttagtttcagaagttttccttcttgaaaacactctcaaaacttgtgtttacttgaaaataaacagtgtcagatttttcattaggggcaaaccagaaagcaacgagagagtctcaaggacgttattgggctgatacactgataccaaatgcagtggatgggcaaggaagtaacaagcggaagcaatgtatgtacacggtgcataattcctctttagtgagtttgagatgtgtgtgagactgtcccatggcttcccaccccaggagctgctaccttgtagagtccagtcatccacttgatgagggtggtgttcattttccttatcaccctctccctcaatttttatctgagagatggaattatgagttacaggaggaaggagtaagaggcacatcaaagcctttttgtgtggctttgaataagcggccttattggtttggggttgttagctttgggtgtgctattttcatcatgaagcacctggggtttgtttttttctaaaagatgtagataaactagagagaatccaggggaagggcaacaaaaatgatgtatgacttggagagaaggagaataacagtctataaatatttgaaaggtaatataaaagagggagagagattatttacagcagtggagaggagtttgacagggaacaaaagcatgcatctaggagcagggggaaattgggtaggactgaaaaaaaacaaagcataataagggtgattaagcaaagaaatgtaattctcacattagtttgt

SEQ ID NO: 132174 - DNA, 1035 bp, Homo sapiens
ggggcggaacagaaagtactaagtgaatttcaaggatattctactaaggccacagcttttgcctcttcctcccctttccctatggtgacatgcaatggagaccatgccagatcttaaaggtggatggcatagaaataaaaatgtggctcaaggcattggcatgttcatctacacttgcattgtgaatacaaaggtgtactcatctgcacctttccatttgccagttctcctagctgttctccgtaggaattaccttccctttggaattgtgtaccttttaaaattcagaactttttgaatttccgtctccgggtcattgctcctagttgttgtctctagtgaattcttctctaaagtatccctagattacttttactgtaaactgtaatgatttgactctggccatatttctcccaaggtctcctatctcggttacttgtaaggctactcctcccctctcttgttctctttgatcttttataattggcttaaagctctctatatttaatctgcagtgactttgtttctcctccctattttggctttttcaatccccgagaatttaataatctgtttctcattattttctattttttcttaaggtgtcgcattctctgtcgcacagttaatagtcttttctcctcttctccccatttggtttatattagctattaatgcaagtctgcattgtgtctctattttggcttgtaataaagtcctgtgtattctgtggagttggtgggcgtcctagttacagacttggctgaacctgaagacccctgcgcgtgtatatggtaatgttgtaaaaatacggccctggagataaacagttgagcacccagtttgtattgaacgaataagtttcttaagtttttgagagctttctcttagaagttgaccttttgggggcaaattactgtgactattcaacatgtaagaaagaatagcttgccgggcgcggtggctcacgcctgtaatcgcaatactttgggaggctgaggcaggtggatcacctgaggtcaggagtttgggacc

SEQ ID NO: 132175 - DNA, 1076 bp, Homo sapiens
agctaatccaagtggcttattttcctatactgctgatagggctatatctcttgatgtcgcagccctggagattgtgatggtgacatattgtttctgggtcactagttttgtctaaaacagtaggttggaacagagtagcaaaggttaattaagtttgtccatcaaggtgggaacagatatggatgcctctgatgtttctggttctgaaatcaaagttcctaaatgtgcggttgtgggcatcatttctcattttcagacaatcaaaaaaaaagtttatttgctccagaagtagagacaatgcgaagagttgttaaaagctaaaggcagcaaagtaggtctttatactaagcagataccttcatttaaaattagaaagtttccttggtttagtagagagaaatctcagaagcgtctgaggtgatttactttgaatcttgctgtctgtacttaattccttgggaccagaaccaagttatttgatctctctgagcagtttcttcctatatcaatgattattaaattatgaagactcatgagataacaagtctctatattatttctcaatagatgctcattttcttcctctgaaatttggttaatcttatcgtcagtaaccagtattttctcaggaaaattaacattaagaatatcatcagtacaacccccatccgtacaaacacacaccccagtcttaagaagcattgtagatgccttcagagactggacatgtgagagagtggagcgtgctgatcattattaaccaaatttaaaaaatacaacctttttaatttcctttctctccagccattttactgaaactctgtttcttagttgcttttatgtaaatggtacttgcatttatgcctggtatacatgggttcagttgggaagtccgggtctgtattttagatttgtgaactagacaaatgtaggtttccaacccaggaactggaaaatcctgcatagatttctcaagatgaagaaggcgctgagctagtcccagccagacactggtccaaaccaaccaccccactctcttttgtgaaccccctgatatgcaccaagaccctttcagg

SEQ ID NO: 132176 - DNA, 1059 bp, Homo sapiens
ttaatttcccattttgtttaagccaaaagtagcagggttgtgattttctttttaaagttagaagagagcaggaagtaatttagtttgaaattgcattctgccatgcctttttctgggttaattgcatttttttttttttttttttttttttttttttttttttttttagatggagtcgcactctgtcgcccaggctggagtgcagtggtgcaatttcagctcactgcaacctctgcctcctgggttcaagcgattctcctgcctcagcctcccaagtagctgggattataggcgcctgccaccacacccagctaattgtttgtatttagtagagacggagattcaccatgttggtcaggctggtcttgaactcctgacctcaggtgatccactcaccacagccttccaaaatgttgggactgcaggcgtgagccaccgcgcccatccatgaattgcagttttaacatcctgtttatattgctacacatgcacttagaaacacatagaactgtccttttcttcttatgagcaagttgtcacgtggatgggttgtttgtggattctttgaggtggatgtagctgaagtgactgatgacctcagtaagttcatgtactagtctgttctcacactgctgtaaagatactacccaagactgggtaatttataaataaaaaaagaggtctaattaactcacaggtccgcatggctggggaggcgtcaggaaacttgcagtcatgtcagaaggcgaagaagaagcaggcaccttctcttcttcacaaggcagcaggagagaggagaaagagaacaggggaaactgccaaacacttttaaagcatcagatctcaagagaactccctccatatcatgagaacagattggggcaaccgcccccatgatccaatcaccaccgcctaccacgttccttctttgacacgtggagattacggtgtgagatgagatttgagtgaggacacagagccaaaccatatcagttcacattctagtaacctcaaatggagtctgaccctttgtatctttttcttcttttactggaattc

SEQ ID NO: 132177 - DNA, 1115 bp, Homo sapiens
aactacacagaggttttcattttggctaaagattgcagcctagagaagacacaggtagagagagagagagagagagagagagagagaagctctggaaaccacagtttaggaatgcctaaatgctctgacatagccaggttgaacatacttactagaaaacattgcctgtctgttttcaatgctgatgttatcttcatgggattcaggtgtggcagtgagttccatccctgcctgctcagtagagggacccagctctcttgtgggtacatcacaaatcatcaagttggccagtttctgttactcatttagagaccatttgtatttgaacatcccagagaactgacgtctgtctgttgggccctccttggatgtgacactagccagttgggttagagcttccagcatcctcactcatgagatttcctcatttgaatctgacctgaatccacagggccctagcgatttttttcagggatggcgtggagtacttctggagtttattttccctgcttgcctcttcagaggcacggcccaggccaagtacaacttgaataaccttcaggaaaggtgtgctgtccttctttcggccggccgctgtctttgaaaattgcctccagagttagtgagcaggaacagttaagatttacaaacaatgatgaagcttgtcatgcatctttcaccattcatcatccaggtgccgtgcctgggcggtgaagtgttcttcataaaaaccagctcagtgtgaaatacacctcgctgcaatgtttactgctttgaagctcgtcagcggccctttatagtaaatccagattgcgatgtgacattacagtatatcattgcccggcgcggtggcgtttacactaggaatgagtgcagtgcacaccagatgaggtgtccaaattgagttatgtcagaatttggctgttatatggggatagcttttgttttctgaacactgaaagttagctttatatgtatttatatttatatataggcatatacttcccatcttgcccgtatacacggggtatacaatagatgctgaggtcaggttccaaatgcgcttcctggtgtaaagaatggtgaccagattttatgtgccttccaaattgttg

SEQ ID NO: 132178 - DNA, 1024 bp, Homo sapiens
cattcagtcactaacactactgaagggttttatgtctctaaatgtctcttcttgatgagatttggtgggtcggtgtgtgtaaaatgaacggagtatgttgtgtgttttcaggtcttactgcctcaattctggtctttgctgatcacttaccttcctaactctccaacacagagaccccagcccacgtcaggccctcatctgcagatcgcatccctagagccagcggtggctctcagagatagagaacgcagtggtcactcacaccccactcacgggaacacttttccagattgttgctcttcttttcctcatttaactccctagaatttcatttcatttcatttctacctctgaatttcagaaaatttctaatccatgccatctttgccttttaacaaatgctctgcataaccttaaacagtttaactctgatgtactgctaaagtgagagactttgccagttttcctggcagatacagcagaatttgggcctccacacgcagggacatgaatgagagagcagtgcgttatttcttgatgttataatgagccaatgcaatggtaacttcagagtgaactggctaacattcatgaactatctaatgtctatatagaccatccatatatgaaaaataaacttttacttttggaagcactttgacatagatcattttgttcagtcctaacaacaatcttactaagtaatgagaggtttttttccttctgacacaaactgggtgtcctacaattcaattcaattctgacactaactttctgaagttggcccagatgccacaggttaagggctcagtcccacaaaactgcccccattttaggctccagctgaaaatggggtgcccaggttatccacatttctacccagctggctacaaattaggggttcctacaatcccccttttggtccagtaaatctctataatgactcacagaactcagaaagtgctttacttactctaagcagttttttttaaataaaggatacaactcaggagcagccaaatgg

SEQ ID NO: 132179 - DNA, 1067 bp, Homo sapiens
ttgatataaaattgcaatgatgatctctcaaatttttaaaaacactatacctgtggttctggaggtacatctcaagtttattgcttttctttttgtttattttcttgtgttcatagtcagattttccagaggttcgttggttttattggtgatttcgtagcaacatcatgagtttatttgtgcatgtgtaaattttggttgatataatttatagttgtttctaaagagacttttgaacttctttatttatttctatttttttttcaatcctcacaaaaaacactggggtgttatttaagccatctgtcgcaaagaattactcccttaaggaatgtggcaaataaatcgcagagcaggaattcaaaaccagatctgactttaaacctctgcacacccctccccccaaccctatatgatgctgcttagtgaagtatacaggatatctgtgtcttagtttgggtttcacataaaagcagaaccgaagacaataaggatttgcgttttgatagcatatcaggttgttattccaaggagtaagagtgaaggatcaggaggaggaagaaaagccaacataaaattgtgaaggcaacaggtgttagattcagggctttctgcagagttcctagagagccttccagaatcattcatctgaggataaaacagagtatttaccttcccatcggcccttatctctcaatgaggtgttgaaccccctcacttctgagttgcacctgtgtacttgaaaaacagtaacaggagccctggggcaggaagtgactcatagtctcatctccatgcaggttgctgtcacagggaggtgaggtgatgctttcacagaggcattggctggagaatgagagttggcaccaggggcaacgaggacactctctcaacaggcatgtcactggaactcacacttgacagtacatttacccaaatattttctgtgcaagtaatacacagttgtctaacacttacatcctgaatttggggtgctgataattatttttatttccttaaattctgaaggtcatggggatggtggggatatgtatgtggtccatagc

SEQ ID NO: 132180 - DNA, 1002 bp, Homo sapiens
acacaataagcacattcaataaacacatatacaattttcagcagctcactcccctcttgctcctccctcctttgagagaaaatgatttgataaataacatggtaaaataaaactgattttgtgtcttagtcctcctgattgtttgcattttaaaaggagatggatatttaattctgaagaaacggatctttaatggtggaatttcagatattttggtccttgcttggcaggcacattttgagaacagaatccgttgccctcatttataagtagcaacctcttttgggtaaatggtaccaagcctgattcttgctttttgaagtgctttaagttgtgtttgattccaaatactatatttgtgcacccattatgatatcaaatgcttataataaaaggttatgttgtcataaaatattactattctatggtgtttcaaacataggcactatcgtgtattttagttctgttagttacttgctttggaaagcacatgaccacctacaaagttaacaagataatttggtaaatctagttgcctaaaattaatgtcccccaaacaaccgacttaatctggggaattgtccagacctctgtcagataaagcagctgtataaaaacacattgacaataattatgaaatctactacaagttttatccacaaattagatcctttgcaaaatagcattttcaaaaagtgaaaataaagtgcttcatcttaacagtatagctagctagactctaatgtttttgtctttctttctttctttcttttttttgacatggagtcttgctctgttgcccaggctggagtccaatggctcaatctcagctcactgcaacctctgcctcccaggttcaaacgattctcctgcttcagccttttgagtagctgggattacaggtgcctgccatcacgcctggctaatttttttgtatttttagtagagacagggtttcaccatggtggccaggccggtcttgaactcgtgacctcaggtgat

SEQ ID NO: 132181 - DNA, 1040 bp, Homo sapiens
cacttaaaagaaatggagattggcgaaatcataacaaaatgatagaatttaaattctggaagttggaggtcacggagctcaaccccttcactttatttttattttatttttttgagacagagtctgactctgttgctcaggctggaatgcagtggcgcgatctcggctcactgcagcctccgcctcccgaccaaccccttcactttagatgtggaaactgaggccccagagatgacttgcccaaggggacggtatagcccttcaagacaaatactgtctgaagtcaagttttattattgtactactaaccatttcctgtcgctggagtcatagatctcagccggagctggattctatgttagcttctttgatgaatggatttctcccaacagtgggcctggggtcagccatgctgtgtttctgttagatgttccaggagcccttgctgctgctgactgggaggtgctggagctcactggggtgaatcagttcatttttcattttctccaccttgacttcatggaaggtcacatgaggtggaattgggtaattacttatctactctgaaaacacacctgtatggatttgcacagaatgtgggcctcctgtgctgctgctttgtgctttgggaacacagtggggagcttgaggcctgtggggtggagcctgccttggttgcaacccagccccggcctgctcaggcccgcccctcctcccctctgttgaaagtgtgctttaatgaacagtttttctcatcgttatcttaaatgagatgaagggaaaagcaaagtttttatattaggaagattatttggcccattttttctcctctcctctccacagggacatgaactactgggaaaaacgagatttcttgaaaactctttgacatctgggtgtctggtagctttcaaattcccagaccctatgattccatttcagactctaccattagatgccctagagtctgtggaagtcagtatcctctccacagcctgttggaagcctctctgctggcccgggacagaccatccttcccc

SEQ ID NO: 132182 - DNA, 1013 bp, Homo sapiens
tgagttttagttagttgtggaggtagattaagaaataaaaaggactaacagtagtcattgttttccttagagtactcggctcccaaagaggctcttccaacaccttggacgtgagataaaacatgttctaaaatttatacttttaaaattacggtgtaatcaaaaggccaggcagcccgtaaacctgagaatttgtgcaattggactaacatttctgattcccaggaagcttgcgcctaacagtggaaagcatttttacatgtaaattggtcagttttgagatgagctgataatttctgaaattagcagattacttatgcttgaaggagctgaggtcgccatttgttatctgactgctctttgccctgagcttcgaagccagccaataatgcagtgagtgctggacttccactctttttttcaaattaaagatttaattacagtcttcactgaagatgaaccaagtgtgaaaatacctgatctacttggaatgtgggatcagggaggagtgtgtgggttggagtcagtgcctgggcatttaaatactttcaacagtaacattaagggtgaaattaattatattgtgaccaaatgttggcgtgttggttaggcagagtcagtgaaatttatattctttttttgttgatcattttttaaagccgaaagggtttttttccttaggagatattctcatagcctatagacttaaatctttaagacttcaaaggttttgaaagatacacatctttgaaatgtgtagagactttctttgtggactgctacatggttattttgcatacatgctttgtgtgtccctgtgaagaatgcggatttgttcattgttggatgcagaattttatatacgtggagtcaagcttacttatcttgtttacattttcagtcaattaataatgaaagtgatctatctaaaacgtatctgacggccaccccttatctatttttctaaggtagtagctttaataagcctcctttattatggagaaaaaaaaaag

SEQ ID NO: 132183 - DNA, 1049 bp, Homo sapiens
acttgagaaatggcttgggaactttctctcatatccacttaattgcaaagtgtcagaatatttttatttttggagatggagtcttgctctgtcactgaggctggagtgcaatggcgtgatctcagcttactgcaacctccacctcctggcttcaagtgattctcctgcctcagcctcccaagtagctgggattacaggcgcacaccaccacacccagctgatttttgtatttttagtagagacagggtttcaccatgttggacaggctggtctcaaactcctgacctcaggtgatccacccgcctggacctcctaactctccgggggttacaggcgtgagccaccacgcctggtccagaatatttttaaatgaaaaactttctaaaaaccatatagctaaagatgcacatcctaagtgtaaatattttgttaaacattgtgttttattagagattatataaatctaaagtgaaaggctaactgcagtttgtggattagataggaaaccaagctcattggcgctctggatgagaaggcagtgttgacattattgtgaccagctcctctggcagtggtgttgactccaaaactgtaatcctttttcttagccttaacgagatgcccatcaaggttgggatttccatcacaccttaccctttcagactggagcatctgtgattcttctgcaaggctgctttaaaattttctcatactgcaaaatatctggacagccaacctagtttgtagagtggcaaatgtcacagcctactttatgggtttgattacttttgtatctgagaaaacagctttcccagaatcaaatgataagtctatttcagagacgactcgtagagcatcttctttgcccagcctgccttcgttactgagatgatcacgtatatatttaagtctgttttcaaatgcacttgtggtgtgtgtggccaacccagtcatggcacctatatgtggatctgagcactcatttgcattgcacagagtccctgaggaactcattaaaagctgggggcctttggcctgggctgacaggg

SEQ ID NO: 132184 - DNA, 1077 bp, Homo sapiens
cttttcagtcccaagttggctaaatgaggagagggcatctcccggggcatctcccagtcagctgctaactggaaacaggcccagggctctgaacatgttgggagaacacatacctattcctttacaagcctctgcatcagcttggcaaaggtccgttgctttgcctccttaaactcacacagggattgggaaggttcagctgccagttctgaaatgtggggcccaggagaaggttggtgcaggggccagagcacgccagagtcagcctaatcagtacagtgctgcccttgacagcttgcacaggatccctgtgttaaacggggagagtaattctctcagtgaatggtttgagggtgaaatacctcactaaagtatgtgtgtggcatacaggtagtagtcagtaatgtttactgttcttctccatagcttctatacagagaaacttctgtcactggttgggggtggggacattaacgcacggactccaggaagctcttagtcggctctccagatctgtatagtaacaagatctcaaagcagtctgctgcctttggaaaacatttctctgtacatatatatgacaaccaggtgcatgtatacaattaataaatcaccttggatttgcatggaatttaaatgcatataacaatacaaatttagtaagatacttttatgaactgtaataagatgaaggcttcatatttcctagattcctagttttggttgctatatttatatatgcatatgcgtgcttttttgttatgaaatactacttaatgactccctttaaattaaaaaaaaatattttcctatattttaaagcttacaaacttatcctttgctttttatttaccttattaaagactaaacaaatctatcaatataaaaagtaaccacttgtcaggaaattgcctaaattgtttttcaaatttattcacttactgaattttcagatcatctctttccttcttggatattgaggtagctgtacaaaactatccatttgtctatctgtctacccatatgtcacactggaagaagggggccttctgaaagaatgtggtccagtggagtggt

SEQ ID NO: 132185 - DNA, 1066 bp, Homo sapiens
ccttgcccagctcttgggccaccactccctctctgctcttcctgagcttcactaccctctccttcccaaggcaggagtcccgaggtgagttgacaccttctgcaaaaatcatgcaaacaaaaaataggatgccaatattgcatgggacatactttctctagaaagccttctttgtttatttgatggtcccacttaactggacatcctgttattttatctggcaaccataggcctaggccttcctcacccagccccagtacccacgcagggcaccccttggcggtggggtcgcctgtgctcatctcctagttctttctctgcagagcccgagctgcctgggactggcgtcagggaggtgctggggtccatcctgtggatctgggacggtttggcaggaaaaacgagagtgtgttccacgtctaggaaccagagttctactgccatctgggaaagaacctctctccacctccaaatcactccttggtgttataaatctggaggatagccgtgctctcgacttacacaaccaacttttctttttccctgatggatgaactcccgggtttaaaagattacagtaatcacaggaggacagtgtgaatcgaatctgatagcaataactttcggagaaggtcaggctcaagtgaaatgttaccaagcaacaggcattttgtttgcaaaatacaatcaaagagcattgatgagaaattctttgctgcagccagtcagcactttctgctaacagctttacagagagaaaaggaataaatcttcataaatcaaagtccctggaggactcggagcccttttctggaaatgttgcacttcttcctgacgggaaggaggactaagcccagcaaaaaaccatgggcctgcctgccctgcctgcccgcctcctctttctttctcttcctttcttcctcgcctcttgcttttttcctttcttcccgcctttaaacctgttgcagccccttagccattagctgctcaggtccttggacctccttgtctagtcctgtgtggctctgatggcttgtgcacgggtgctcatggcagaggtggagga

SEQ ID NO: 132186 - DNA, 1033 bp, Homo sapiens
ctatacattagcaataaaaacataacttatttaacttcttgcacttcactggaaaatgccaaatagctctgttctgtggctttagtgctgaatgtttattgtaaaagagagtctaatgttaagaatagtcttgggaaggctgggtccgtggaagatttatttggggatgtaaagctgaaggtcagccttgcacctaaacccaacctggaatgttaaatgaaataatatacttgaatgcaattttgtaaaagtggattcctcaggatatgtgaaacctaaaggaagtggttctgttgcaaatggactataaacagggacattatattcttacactaaaaatccttgcattttaaagagagatgcacttaagaatagagtgaactgctcatatgcttatttaagcttggacagttttcagagacaaaccccattaagaattactcttttcacatggctgaatcgaaacatgtgtaatgtcaatgtaaaaccaatcacagctgtgaactgcatgaaatgtattgtgaaacgaacacaagattaagctttgtcaggttaatgtagcatgttaaggactctagaaaaaaataaactaaggagacgagcgtggtttatgtcatttctacttgtggaaagaggatctctaaaaatagaaacttgatgtaaaaatgacttttactaacgcatgggccaggaatcaaattatcagttaaatgagacattcctgagaaatatgaatggcaaagttttagggttgcattcagaaagataatttgttcaaaatggagttaattctctccatccattcacttattcaacagatacttactgagtgcctactatgtgtaagagaatgtgctttccatgtattgtccaagttacctacccgtgagtcctagataagcagatattttagtggagaatcccattgaaaacaaagtaaaaatggaaaactcccaacaatgtatagttgagtgtgggaagcaaggaaagtgcttagcccagtacctgacataggaagtatgcagtccatgaa

SEQ ID NO: 132187 - DNA, 1070 bp, Homo sapiens
gatggcctgcaggaatgccctccgctcgtggcttgaagacttttggtcaaacatgcccgcctggatcactttctgatccacgttcagcttgtattttgcggccgcgaggatcttttcctccacgctgttcacggtacagagcctcagtacccggacctcgttctgctgcccgatgcggtgagctcggtcttgggcctgcagatcctgtttggggggtcaatatgctatgaggactgagatgcctggcataggcatccaaaaccggaccccaccccagagggaaatatggaagggttctgtatttcaccttcactaaggtaagattttgcctacattttaaaaacacacaagctacgtttggaaaaattcagtgtcattcctagttgaagaaacctgggttgaaattaaccaagccaactgaaatacatctcaggttttgaaatccaggtatcatattgtttttatctgtctctaggttccccatcagatttagtccatatctaaaacattaaacaagacaccaatgtccaatgtcagaattatgacttacataacacctacaactaaccttaagttgcaagaaacgccttttctttggcgtgatgtgttgaagattattttaaaaatatcactgagttgtacattcaggtattatacatacatacatcttaccacacacacacatacacacacactgactgctcaggtagtcaatttcctcgaacctaaccttatcaaagactcggtcttcaatctgggaaatcaaaaggattgctagttgggtagtcaactggtaaacttttggggacagaaatttgtcactacctattagaagtgttaaaactgtctatgtctccgacttagaaatattacttcggaaatgtatcctaaacaaataatcatagatatgcacaaagatttagaaataaggatgtaccttctcagaataatttactctctctaatggctttttttttaaaaaaagaaacattcaacaatactgaattagttaaatgaattatagtatcctactatatgtatgtatcaacaaagtatcataaaaattatat

SEQ ID NO: 132188 - DNA, 1072 bp, Homo sapiens
atgtttagctctgcctggcccaacttcccacaatacaagtaagtcccctgtaccacctctggcatgtggtcatccacctccatgtggacactgcagtgtgagctccctgcttcagagcagttcttgacaccaaaggacagttctaaacacatcaccgtttcctacattaaaagggatgcagccatctgacccctagctatttgttctacttggaacctcagagaataaatctgctctcattctgagaaatatcctttaaaatgtatcaacaagcatatctacctcaggacattgtccttcaggtaggaacacttcactttgctctctgagtgatgcctagacattggccacattccagtctcctagtgtcccatttaaaacatggcgcccagaactccaatggggtattctgatcattaattacagggtggttagcttccttattctggacaccagaattctgttagcataactcaagggtgtgtttactttttccagcaaccttgacacagagttaactcattgaatatgtgacttcttgaaataacccccactccccaccccagaacacacatacactgctctgatttcacatgaatactgccaaggttagctttcagataagcataatttttttgaacctatgcctactgattgtattcttatccctgtgtagttccagccttactacttttcatcccatcatccttgcatgatgctgtacctctaaatttttatctatgcaaaaattatgtttactatgtttatgtatctaagttttttcatccaaagatttgatataagctattgcttagaaacttagacaaaggacaggtctctgtgacatacccctgaaaatcacttcaggttgacatgaatatattaaccagtaatccttaaggttggctacccatcagtgaactcatatagccatgctctcatgtcacccacatttatcctttctcagcattttcaagaaaggctaaaaccatgatacaccatggctagcctttccaatctatcaccctagaaaccctgccgaaaaagtgaaatgaggttagcttgccatggc

SEQ ID NO: 132189 - DNA, 1028 bp, Homo sapiens
agactacacagggagggaaggatggattttagaagaacctctgcctagtaagacacccaaataaattttttctgcaaaatagttttgagggctttactcacatgttactatcatgtgtattgtaaaagaggcatttatctcctgtgtccctcctgtgatgaacattaggccttatgagggtgttattggtatatgctacaaccctgaaaatgaaagagccacttacattatgggtagaagctgtagcttcttaaccttagtgcagtggttctcaaagtgtggaccgaaattggcaacattaattcaatgttaattgagttcatgtgtcaacattgactcattagaaatgcaaacttaggccctgttctagacctgctgaatcagaatccaggctggggcccagcattctgtgttttaacaagccttcctggggattctgatgcacacgggagcttgagaacgactgacttagtttaccactcacagaagctaacgattttcaaggtatatccgatggagggcctttcctctgacttgaaccctagacaagaaaaccaagagctataatccttttagaagacttgctgaggaattctagaaacatttttaaaaacttagaatgaggaaggaaagcaggcctccatctcaacaacaaggctaaatctaagttgatgcttagtaacacagtatctagagccagtgcctgggttcaactcctagctctgcccagggcaatctgggacaagtgactgtactttccttctctaccaggtttcctgatctgtaaaagaggaataatagggccaactgtgcaggattaagaattttaaaagctaagagatgtgaagtcttagagcagtgtttgaccaacaacaaaaacgatttgattatgtccatgattcttaagatcaatttgatgtaaatggaaattgaatgtaactgacaattgaactgtaaaattcacttatttccatgactcagaagaattagcctacatattcaccactttttagtggcccccgaactag

SEQ ID NO: 132190 - DNA, 1049 bp, Homo sapiens
ttgttgtgagtattacgttgcatgatattctcaactagtgataagatctgacaagcagtatgttgattcaaggacaactcaatctctgccttccaaattgaaatcccttgttacagtttgttatttatgatggccacttttagaatcaattgtggttctcatctcaaattaatttccagtcttcaactattttcttggttctttatttctgttcttcttatttattgtgtgccttcattttttgtacaatgagactgtacaaaagttcttgatttaactccattgtagcctttaagttgggctagtaagttaggattaatgaataaagatcaatgtattagattttgggacaagaatcttgaacggaccaatcttgatgcattttcagtggggcatcctctctcttaataggcaatataacatgtagtcccgacgagttcacctgctccagtggccgctgcatctccaggaactttgtatgcaatggccaggatgactgcagcgatggcagtgatgagctggactgtgccccgccaacctgtggcgcccatgagttccagtgcagcacctcctcctgcatccccatcagctgggtatgcgacgatgatgcagactgctccgaccaatctgatgagtccctggagcagtgtggccgtcagccagtcatacacaccaagtgtccagccagcgaaatccagtgcggctctggcgagtgcatccataagaagtggcgatgtgatggggaccctgactgcaaggatggcagtgatgaggtcaactgtcgtaagtagctttctagcatggcatgttcagttctcttccctgtatcaactgggacaatttgctggcttcattccatggtgtttcctccctttgtagcctctcgaacttgccgacctgaccaatttgaatgtgaggatggcagctgcatccatggcagcaggcagtgtaatggtatccgagactgtgtcgatggttccgatgaagtcaactgcaaaaatggtaagggtttcttcttgttggttaagcaatggattgctctgaccaga

SEQ ID NO: 132191 - DNA, 1029 bp, Homo sapiens
aataactactttaagggaagcagcatgacacagaacctgctggatgtcagtagctcttggcaactcagttttctttaaaagggaacttttgccctcctgtaccctaccttaaacatttcacatgttatttttttatttctgctgcctcagagaaatggcttctcaacttcagctcctggctttcctcccaagcctcagtgtcagagcttttatttctgtttcattcatgtccccttggccttcagcccctcttgccaagactattgcagtagcctccaaagtagcttttgtgctacaagctttctctactgttagtttgctaggatttttgcaatgaagtaccacagactatcttaaacaacagaaatttattgtctcaaaactctggaggccagaagtttgaaatcaaggtgccaggagggttggtgcctcttgagggctgtgagggaagggtctgttccaggcctcttcttggtctgttgatggtgctcttccccctttgtctcttcacatcatcgtccctctgtatatgctcgtgtccagctttcttgctttctttctttttctgttttttggagactgactcttgctctgtcacccaggctggagtgcagtggcacaatctcggctcactgcaacctccgcctcctgtgttcaagcaattctcctgcctcagcctcccgagtagctgggactacaggagtgagccaccacgtccagctaaactttgtatctttagtagagatggggtttcaccatgttggccagactggtctcgaactcctgacccaaagtaatctgcctgcctcggcctcctaaagtgccggaattacaggcgtgagctgtaataacagtcatattggattagagcccaccttaatgacctcattttaacttgattacctctgtaaatatcctatcctcaatatctccaaataagatcacattctgaggtactaggacttcattatatgaattttagggaggaacaccattcaactcataacacctactttccccctgtgacac

SEQ ID NO: 132192 - DNA, 1044 bp, Homo sapiens
gtgacaaatgttgacctttgaggtctaaacaaataatacccccgtcggaatggtaaccgagccagcagctgaagtctctttttcttcctctcggctggaagaacatcaagatacctttgcgtggatcaagcttgtgtacttgaccgtttttatattacttttgtaaatattcttgtccacattctacttcagctttggatgtggttaccgagtatctgtaacccttgaatttctagacagtattgccacctctggccaaatatgcactttccctagaaagccatattccagcagtgaaacttgtgctatagtgtataccacctgtacatacattgtataggccatctgtaaatatcccagagaacaatcactattcttaagcactttgaaaatatttctatgtaaattattgtaaactttttcaatggttgggacaatggcaataggacaaaacgggttactaagatgaaattgccaaaaaaatttataaactaattttgtacgtatgaatgatatctttgacctcaatggaggtttgcaaagactgagtgttcaaactactgtacattttttttcaagtgctaaaaaattaaaccaagcagcttaaccatggtttgtgcctgttcctctaggatgaactcctatcctgagtagtaccaagtgttctaactaaatgtgtgagctgtagttcttgatgttgtataactaagcctgtaattgggctggtttctcttacaccctagcacagttaaaaaatgaagtactgtttaacatttgctcccgaaatatttcttactgtgtaaaagaagctagcttagtctgtacctagaattcctcttggttagaggagtgagtttcttttttttccattaacttgtttcctgatcgagaaacacgtgctaagatttctatgaattctgcttctttatagttaagtctctgttttccatgttctgtcatttatataggtcaaggacaagtgccttctaaggcatggataagggctttcttcttatgaaagtctagactgtcttactgtgaaga

SEQ ID NO: 132193 - DNA, 1010 bp, Homo sapiens
gttattactcatttttcatctccaccaaaactttttatcagagtagcatatcttagaggctaagaatgcatgctttgcagataaaccacttgggttgaaattctgctttatcacttcctggttagtgacatcaagcacattaaccagtctctaaaaacccgtttttgtttgtttgttttctgtttgtttttttagtctacaagatgagaaaaacaattccccatagagttatgaaggttatataagatactatcataaggaatgtaacacaatacctggacatattagcactaagttttagttttctttattaccactgttgagtaataatttaaggcagaaacaactagattactgtcttagcacctcatgaatagaaccttaatttttaggggtgtggtcatgtgcccagctaaaagataacattttctggtgttcttcacagagaagtttttgtgccaatgagatctaagaggacaagaagtcctttcaggaagtcatgtgaaagaagagtgagtgctcttctctaggtttttctccatccttctcctttgagcttgaatgtgatggctgaaactccagcagccatatcatatcatgtggacaaggtttgtgccttaggggtgaaggaatggtgagcagagagtccaggtcccaacttcatggaattgctatactaatcttgcactacctccctctcaaattcttctatggcagtggttcttaaatcacctggagggcttattaaacagatttctgtgccacaccccacagtttctattttagtaggtctggtttggagcccaagagtttacatttctaacaatttcccaggtgatatggatcatcctggttcaaggaccatattttgaaagccagcattttatgtgttagagaaataaacttctcttttgtttaagctactgctattttgtgctattctgttattaaagatgaatttaatacattatttaaaatttgtaactcatatgttactcattttgccaccc

SEQ ID NO: 132194 - DNA, 1065 bp, Homo sapiens
ctgacctcgtgatccccccgcctcagcctcccaaagtgctgggattacagccgtgagccaccgcgcctggccgcattagtaaattttttaatgaatggccttaactaggagatacagtatgccctttggattgtgtgtcttttatgaatagtaactaaatggctgctctgccttccacagtgtgcagacagacactgattgctatgtatgtttgtaccgatgatgatgccctggatgataccacagataacagcctatgaaagaacagtgtttggaatatttttcatcagaatgttttatccagtttttaaacatgggctcatgcccgtggctgaatgtaagtggacagacagagctgcaaaaatgtgggaatgagaaattttggtctgtgctctttttcttagggagttaattgtaccttgggaggaaatgattagctcttagttgtgcttgatatgtgataactacttgagggaaaggtgagaggagtctggtaaggtcatgggaatcatctgactttgagctcttgatgactataattaaacataatgactaattcagatatcttaaaatgacttccagatgcttgacaacagactttccttttagatgaaaatcctcttgcatttaaaacttaggttcttattgatatatctaccagtaagcacatactgacttaatgttatcacattcagcagtaggcagtgatagagaaactgtgaatcttaaagatctgtaacagcagtaatatccttttgaagaaacagacaagacatgggttcatttgttcttaccagatcaactatttggccccattgtataactcgatatctaagtctagttctaaatatctgttggaatccgctcttttggtaataataccctgcccggcacctttctggaggttcccctccccctacattttagtcgcctttttgggtggagtcgaattatgatttgccttgaccagtggcatgtgactctggcctctgaaccacaacactcccttggccaccgtgattagttaatcaagtatacatgtcccgtggtaagttgaagagaatt

SEQ ID NO: 132195 - DNA, 1512 bp, Homo sapiens
gatgatctaggaatgcttatgaaatttaatttttttcctctcttcagcctcctccagagttgtgacctggaagttgcaaacaaagtcaaagctgcactgaaaagcttgattcctacattggaaaaaaccaaaagcaccagcaaaggaatagaaattctacttgaaaaactgagcacataggtggaaagagttaagagcaagatggaatgattttttctgttctctgttctgtttcccaatgcagaaaagaaggggtagggtccaccatactggtaattggggtactctgtatatgtgtttcttctttgtatacgaatctatttatataaattgtttttttaaatggtcttttttaaaaatctcagctgtctcctctgttacactgagtagtaagcatatcagtgtgaggcaattaatgtggaaggtttaccaatcatatatggtgggaccaaccagatatataaagtgtagttgaatgagttgattcaggggagaagacatcttcagtgagcatagtctgagaaggcttcctggagaaggtgggacttgagaggactttcatcctgtcaaaggaaggcaggatgtggaaaagaagagccagggggagtcgtgggcacagtaaagtggaatttaatgagtaccggggcagtggggggttcacagctgcctacctagctgttttatggattaggttccatgctagattttgtttgaaagccactcaggtaagttaagctcataggaggaaatgtgctaaatgaattaggggatcactgtggattgcggtgttaaagtcagggtcactgggaagttctccttgtctctgattttgggccttccaagtaaatagctccttgtgattagactttctcccttgagactgtccctaaaatgtcaaagcctatggagtttgaataagaaggaagaaggtggaaatttgttacgtgcagaagtttaactacagctaggatgtttgaattttaaaactgcagttgtttgagcaaacaaagcttagaaggattggtagctcagtcaggctcatgtagtcatgcctatgagtatctggctgctttctcaaagtagtctaacggggtactcactcaggtctgtcactgcagttacacctgctgaggaattggctgtgcctttcctttccagaccatggggtcccaggactactccagcctaccgactaccaggacccctcctgccacggtgtattgaatccttcccagactgcaaaagcgctgatggctgtaacttttgacatggattctcacatcacccaatataagggtgtgggtggagagctggaggaactgggatgggataaggaggtgaatggggaaaaggcaacagtagagcttgcatttgtttggctaatacattgtgatttgtgttctctgtataaagaagccattcagagaaagggggaaagaacccctgctctttgtttcatctttgaaactaagataatgtgtacataatttgaggagtacttttataaagctt

SEQ ID NO: 132196 - DNA, 1117 bp, Homo sapiens
caggctggagtgcagtggtgcgatctcagctcactgcaagctctgcctcctgggttcatgccattctcctgcctcagcctcctgagtagctggaacggcaggtgcccgccaccacgcccagctaattttttttatttttagtagagacctggtttcaccgtgttagccaggatggtctcgatctcctgacctcgtgatctgcccacctcgggctcccaaagtgctgggattacaggcatgagccactgtgcccagcctgtattttttttaatgaataacttacatccctgtgaaaactgtgacaatgttgacttttaaatcatgcctaattctacatgtaatttccttcattgttttaaaagattgtaaaaggattggaagagcatttgctactgaagtgtgtgtgctatttgttgatatctgacttaaaatgagaaaaaaacagtgatgagctatggcctcttttgtattattctctgaacttagttgagtttataatcaatccacaaatcattgaaattttccatacattctctgtgcagatgaaaaccttctgttaagagcattcatttaaaaaaagatttgtatgttgctttgaagcaattactgttgatttttcccctgctgtgttattaaggtttgggaaaacagataccaaccctagtttgaatttctcaagatactttacttgcaacatgctatgcaacttaatctatgttgtttgtaaatgttattttaagtgtttcttcaacatatacgtgatctggtacacataatactcacacaggagcattcatagcttcaggtatgtcagtgtctccaaatatataagtgttacagatcattttgttcatttctgcttaaaattagttaattttccagttgatgttaaacagtcagaattcgttagctgatacatgaactttttcattacaaatttttttaccaggcatttggagtgttaacacctactgacacattctttcattacactcaattaactggaaatttcagcaatgccatgaaattaatttataaaggttgttcatcaatcagaactcccattaggtggatttcaaacataggaaggatactataggtttattatggagcacta

SEQ ID NO: 132197 - DNA, 1019 bp, Homo sapiens
tgtaaagagaaatgccaagtttaagctagaacagtcatttatcaaccactgttgaacacgtgaacactgtgttatgttcatggcaccttgtgagtgagcatttctccatgaggaagaacttgatttcaaccaagcatgaggtgctactgtgaaacatttatttcctgaatagctttcaggtcaaagttaaatcattaaataatacaaagaagtgcagacataaccaagtgagtgttttattagaattcatagtttatcttgagtaattactgctaaacatagcttaggttttggatcagagttaaaagaaatggctcttttagaaatgcattagataaacctgcactggaattttttgtgttaaaagggagattgggtgaaagctacttttgttagcttttttgtttaaaaatatttgcagatttaagggcagtagagaagggggtagggagtatatatcttattatgtgatgttcactaagcttcagtatattttacaggttgttttgcaaaaacacttgtagagcatgttggtatgaagaacctgaagtcctgggctagtgtaaatcgaggtgccattattctttctaggtatgtataacatgtgcccttctctgagcagggcctggtcatgcaaaagacacacttccttcacgttgatttctcagttctaatatttgttctcagtagtctaatattactcccagtcactcatggtctagacaaacataccaaatattagaaagcaaatgtaactctttcagtcagtccttaggaatcttttttttttttttttttttttttgagatggagtctcactgtcacccaggctggagtgcagtgtcacgatctcagctcactgcagcctcaacctcctgggctcaagttttcctcccatctcagcctcctgtgtagctgagactacagacgcatgccaccacacccaactaatttttatttttttattttttgtagagatgggggtctccctgtgttggccaggctgatctcagactctt

SEQ ID NO: 132198 - DNA, 3636 bp, Homo sapiens
tctgtaaacctggccagttggacagaactctttccgaggcccagccagttctgaagaatatggggtgctcaaacatgcattgaatatttataaagtttgttacaagaaataggagtgttagaggtggggaaataaattgatgactcttctgttgcatcttctctattaagaataaaggaatttttaaaaattttcaagtgacttttctatctttgaaaacagcagatttacacaggagtttagttagggtggggatgacgttgcttttgtcccttaaattcgaacaactagaaaaggaggttactgttcttgggtatgttgattggaaatgtcatatagtgtaatttgtaactgcttagtcgaggctttctggatttggtttcccctcctcttctgtttttgtttttcattgcggtagctaaacagccttcatttgccatgaataagcaacctaactttaaaagcctttatccacttgttcgatttaacagagtttctttatctcctttcacatacatctcagcagggaaattctaatagaagtgttcttcattcatgccggtgctacatttaaatgcagctgcaagttaactgcctctactcagtgacctcagcaagtgatgtccctagtaatagtggcccaagaaatactggccataatgaatgaagataacacctttaaatattttttaagtccttgggcttggtcagttaatacaaatgagttgttcagtaatgctagtcacaaaagagaattgattctgtgttctaaatgtaaatctctgtgtgctttaatgacacaatttcagaactagctccacattttccatgaagtacgctgggaaaaatagtagttaagtatgtattcttcaccattgaaattctaggcatactttattttaagaatgtagatatcaattcatttttttgttgttgtttataattttataggacattgtgctcactttggcagcacatatactataattttataggaaattatcagttccttgcttagcatagtaaatggcaaatatggaagaaaggtcctgtggtactttgttttgagaatgcagatattgattctttttttttgtttataattttataggaaattatcagttcattgcctagcatagtaaatgacaaatatggaaggaaggtcctattgtacttactaagccccagagatcctgcacatacagtacgagaaatcattgaagttctgcaaaaaggagatggaaatgcacacaggtaaaaccaagtagaatggcttgacttctttattcctctgttaatgttgagtagtgcattcttccagaagtccacttacccatccataccctctctaaaactgctgaaaaggtgaattccattttcaagcctatatttttgacagattctaaagtttttatcttgacaaggaaataaaagtgtcgtgccaaaagaacacctgagcacctggcacatagtaggcattcaagtgcgtggtttggcttttattttgctttattttcaaagctaccgataccacatatttgagtaccctagagtatggtgtccatacagcagtgtaaatgtgttgttttctgggtatgttatttggtttttggatttttttttttttttttttggtattacacaagtcagactccctttattgagcccttgttctgtgccaggcactattcagatcgtgggacacaaacatttttaaaaacagaacacatactcgtatcacttattgtctacatgcttaacagaaagatagacaataataatagagtgcgatacagtctgtgataagctcttagaggtttttgtgataatatcaccacatttcctttgcgatttatcttaccttaataccccgttcaacatactcaacagtaagaaagatacagaggtccgcagacgggagctcctagaatccatttctccagctttgttaagctacctgcaagaacacgcccaagaagtggtgctagataagtctgcgtgtgtgttggtgtctgacattctgggatctgccactggagacgttcagcctaccatgaatgccatcgccagcttggcagcaacaggactgcatcctggtggcaaggacggagaggtaatgtgccattaaagcacaggcaggaaagctgcaaaggccacaaaaacttcgtttttggacgatgtggggtgtcagtaagaaagctggggagggagatacctgttgaataaacaaccaagaacctctcacagcagcaattacattcatctttaattttctctaaccatctgggtcaaagcctggtacttgggaatgttttacagatgtgaatttgcttatgaatgaaatcattgccaagtattgagtgcccaaggtgcttctgacacctgcgattggggaagagaagtgggccatggatcttagagaagccctggctcctgaccatattaacaaatgggaaagatgaatgtaccttgaaagtttctctataaggagactgagccggttgcctcccatacttgctaaggagtagcccaaataactgggaacgcttggtattgctcttgaagaggagtaaggttgagctgaaaagatgctttcttgattcgctcatcagataatccccttcggtggtcatgtgtacttaaacagcatgcagcattgggttttgatgtttgtgctatagtgttctgtcctgtaggtttatttgtgtctgagaatgacatatttcaatccaagacgtgattagcattaagatgagccttgtgctgctactgttcagagcagattaaatgaagcggagactgaagcgctgtgccgtggctgtgttatctggcataactgtctttcagtctggggatcagaatagatctgtggtccccccaagtatgatggttgtcctagataaagacctcttaagcctgtggaactttaaaagtggctgagtccttatctgtatgtggtggcataaatagtatgtattcattcaaatgtatttgtatgaatgaaaacaacttttaaaattaactgttcttgacccttcatagcttcacattgcagaacatcctgcaggacatctagttctgaagtggttaatagagcaagataaaaagatgaaagaaaatgggagagaaggtaggctatgaaatttgaccttttcttgtatctcatgtggaattccagtaattcctggcatccctgaactttataccagccatttaagctcaaatgaagtttgccaagtgtctagaaatggtgtctgtgaataagaaatgattcagtggttgctggtaatgctttttcccctagaaatatttgtgcctgagaactcttttaattttcttttttccaaaccccccccgccagccccccccaccgccccctcactctctctgttttccttcctgtgctgctgcaggcttctaacctggcttggtcaatgccttaaaatgccattctaatgaggatggtgagagggggtagggggccccaattgttgagtatcattacctcagtagaaaggcatgacatttatctctatgtttgaagaaagaataagcagaagaagattatcctcgtaagagagttttggactagtgcctgtttatttggcattgaaatacatgtgaccaaagagtaag

SEQ ID NO: 132199 - DNA, 2626 bp, Homo sapiens
cttcagtttgtctttttgactttacagttagcaacttcgttattgtttctaattgaaattgtattatctgtgatatttatcagatctggctctgaatgattgtgggctattatcaaaaatcaaattcctatcagagtttgaaacaattatatcaacatccaggatactcatgccacaagctctggaaacaggtttttgttttcttttgtttttgttcttaacataaagtaggtgttctttaaatgtttggaacagtattagcatcatggaaataattttatttcaaaagatgagtgttgtgaaagccacatgtgtatttctgtgatctcatgcagctatactttttttaaagtaatgatttttatatcattctcattcagtgtataattatactcttctagtttattttttcatatttatattctaattttgtgagatcactttaaagaaattgagcaatatagaaaagaaaattaaaaatcatttgtataacccagagatgactattacaatgccttgccttccaggattttctgtgtacatgtattatgtatatcgtgtgtgtgtgtgtatgtgtgtaaaattgtatgagtttatattttctttttcatgattggagtatcatatatgtgtttatatatgtaggttttttgaagttaatcttataacttgaacttttaagtataattttcaagtagctattcattaacagtaacctatgtaaataggtattagttttagactatttggtaatgaataatgtgctttaaaaaaaaatcaaccttacctctagaatataattaatgaggtcgtgataagagaggaagttcattaaaatggcttttattcatcttgttatgttagacaagttgtcaatgtaggtaatctttttttttttttttttttgagcggagtctcgctctacctttatgaagatattccatgtgtgaaataagagggaagatctatgcacttgtttttaacctttgctggcttccaattcttgcagggccaatactcccatttggttttactggcggcatttgattgtattgatgatactaagcttgtgaagcagataatcatatcagtaagtaatcctgatggtcttgaatttaagttacatcgataaaccagttgtggatgtgtaagcttgatttcaccatgcatgtgtaaagacttgcagctgtgccttctatcagtatttttgcttacttttaagttaattatgttttattttggaggtttgttttattcctgtgtaaatcttaaccttgtaacttgatattaatactgttttaaatatttaagactggtcaaattaagatttaacacttttattttggattaggataacatggtactttagaacatacgtgattctaaactatggaaaattagcaaagtgatatttagatatgatcagaaactagcatagtaattccttagttattccagaactcaaatacaagcagagagtatctgtgacctattaaattatctctctccctgtggagaaataattacctctgcacagttacccagttaatcaatgcatctgtgctggattgagctgatggagaagagaaatgtacaaaactcactcagttgtgatgcttcttagagcttttgtagggtcagattaaaagttattactaaaattaaaactctagcttccttttgacatttcagaaattccttctagtccagtgtagtggccataaagtggtaatacttgaatgtagtgtatttatcgctaacgttgccttcagaaaaaccaattgtcctcttaggggaagtactccaaagtaaaaattgcattctaaactatgtgttttcttcattctgcatcaatagtctctttttctgattctacaattgtcttttcttttgtttttagtgtatgagtggtgttgagtatatggtagaggttgcagcagggtggggataagaaaatactagtttgatagtagtgaccaaacttggaaacgtctggaaaaccacataatctgtatagacataggttattcatctgaaaattacacaagcctttctgtttgatatacataaatgggacccttggagaaatcttagtgatgacatgtggtactttcacatctgcaagaaagaagaatatgatgattcaaaaagagaatttacctgttgtcaggtggtggtgttgtggtctctctttgtagcctcctgggatcagtagagctgagtgtagtagaaaaagtataccagctagtggaggggaagattgttttcttagatgccagccgtaggtcccagtgtgtgtgaatttctcatgcccttgctgtcattttccaactttacccttgactgttttaagattgtgatgactttctttgggataggattgtgggaagaaacaagttggcaagactttcatgttacaaactgagtattttgacatgttccttgtgactttattacccttttgactccaatcaataatgattgtttttcattcttgtgacagagatgtgaggccatagaattggctgatgaataaagttgtttcacagaaatggaaacaggctgggatattgaaagtttgcttttgtttaatattttcacgacaactaaaatgtgcatagctgtt

SEQ ID NO: 132200 - DNA, 3039 bp, Homo sapiens
actgtggcaggggaaaatgggaagagataacaaacagctggccacacacatttgctcccataggtgttatgtacttgagggaaaaggtaaagatccttattaatcacagaagtttaacagaaattatcattatttccttggtcagcataattctgcctttaaaagatagttgtactatatctactttttttaatgcaaatttaattttattcaacaaatgcagatgagtactaactgtttgctagactctgcatttgaggacagtttagaccttggaagaaggatctgtctggtctcactgtgaaaggtggcttgcaaaccctaaccctaaccctaaccctaaccctaaccctatcacatacacatctaagcttgtaatagctctaagccaacttctttggtatattacagtttttttgttctggctgtataactattatttttactaatgaaaacatatgccactcaaatgaaaacttaataaatattatattaaaatgtttaactacaaaatacccttaatacataactgaaaattcagtgagacaatctttcctttttaaggacaggaaagtgattgtgaaaacaatgaagacttatgttgaaaaggtggctaatgtaagtataataaaactacatattctaattatttttgatagtaagatgaattcatgtctattatagaaaatttggaaaaattcagaaaattaccaagcagaaaattattgttttattatatttttctttgcatctacatgtattttcatattttatctacacaaaatggaaatcatgtcacatgcattcttttctccttttttaatttaacattgtattgtgatagttctctacttttattagatattctttgaaaacctgatatttactagcttttttggtgaatttgtccagtcatgttaattaaatatgggaattactgcctggatacagtatgtacatattttagtctctgggtaaatgatgccagattgcacttcagaaacttgatagtagttttccttatgaccaaaaccataaaagaaattaaaatgtatcttttttttaagaataaatttgcagtgtggttatggaaatttttagttgttaaattttatagctctttagaaatgcagtaacaattttcctaatgaaattcataggtacaaaagttttttctgggggatttgttgcttcaaaaatagtgtttatatgtttttagttattaaataatttttcatgctgttgctatggtgtactgtaactagaatatatgtagtgaatacaattttaatttttgagttatactttatatatttgatggataacaaatttctaatttattgatgaactaaaattatgtagtaatcaactactttatcctttgaaaacatccagtgagaactactagcatctggggaatacttcaacttgtttgaaatactaaatcaaacaagttaaaattaatgctgtgtgattgtgtacttgactattgtcttctgttgggctagaaattagaagaattcagaaggcagctaacgttcctataataaagtgaaatatggaattctcatattttttataattcataattcaatattcatatatatttcataattcataattataatatgaattataatgttatatattatataacattatattattatgttataaatataaatataattcataattataattcataattcaatattaagtaaatttttttgcgtgacattctaatttgaataccttacattaaaatgagtaaaaactagaatgttaatagaaaattcacaaaggtattaagagtataacattttaaaataataaaattatattgttttagttctacagtttgtttatgtcaggtaatttaacactaagtacatatctttttaaatctcgaagagttacttctaaaggggtgataagctaacgttacccatggatttgatccatggattatttggaattattaatttccaaatattgggggtttctggatatattctatattcttttgttccttttaaatttactgagacctgttttatggcctaacatatggtctaagtattttgaaaataatatattgtagagttgtttggtggggtattctatatttgtcaattagatcaaagtagttgacagtgttcataccatcagtgtttttactgacttattattttctagttctatcagttgctgagagaaacatgttaaaatttccaactatacttgtggatttgtctgtttctcacttacattcaattctgtaccaccttctgttgtattcacctagaaatattttatgcttggttatgcttatgtgtgtccgagttaagagaactgaaaccagtgattttgtactaggcacgttgttctatattttgtctccttcacttaattcatattatgggtcattttatttcaatatacatacatctgtctacctcacttttcttagtgactgtaatatttcatcgtgtgcctataccataatttatttaaccagtccccactgttgggcattttggtagtttctagagtttttaaaattacaattagtaccccagtgaatatattcatatgtaagtctttgtacttacatggaaacacgtctgcaagataaatccctagaactagaatcactggatcagctcatacctgcattttaaatttgtataggtgttgtcaattgctcttcaaagaagttgaaccactttacattctcatcaacataaaagcgtgcctgcttttccctaaacctttgataaattagtctattgtcagaggttttcaccatcacccataggataaatggcatttcattgttttaattattgtccttaattagttcataaagcattatttcatacatttaaagacatttgtacttctgttttagtgtgatctgactcttcatgttctttttttttttttttttttgagacagagtcttgctctgtcgcccaggctggagtgccgtggcgcgatctgggctcactgcaagctccgcctcccaggttcacg

SEQ ID NO: 132201 - DNA, 1867 bp, Homo sapiens
gggtttggattaagtaggtgttgttgcaattgctgacaatgtttggttcattcaagttttaattctgctaaaattattttgtgaaacagatggattgtgaagggtgttaacagaaataaaacaactattaaaaaaatacatccacatgtggatttctaatcattatgtccagtgctgggggaaaaaatgtagatgtccttatttaatagagcagagcatatttcaaatgttgattttatgtttgccgattaaatactagaagtttatactctggtcttggttgtagatggcactaaatcaattttaccatctaaatttttgtttaagttttagtatttctgaaaaatacagtctattttatgacaaattgtattcagtaaaaccatttcacttgtttagattactttaggactttgagattacctgtctttgtatgactgtagtgccagatctgttgtgtctttttgctttttttttctgttttcagggaagctgtgattaagcactcattggtgcataaagtattcttggacttttttacctatgcaccccccaaactcagatcagtaagttcttggtttttgtttttaaactaaaacatggaggaggagcggtgtagaaatttgaaaaactgctttgatgtacgttgtcttgtggaaattttagagttgcttccttatttagggaagataatttactcaactccctttgaacacgtttgctaattccatttaggttttattccagtaaacaatagaattgaccctagttttactaatcatattaaatttttatatcttaattataatccagagagtatccgctggctaacctaatctgaaaattaactaactcgtggaggaatattcaagcattcggatagttttaaattcaactgtgctaatacaaaaaaaaaattagcttggcattaaaaggttagaggaggatatgtttgtaaaactaagtggacgatgaaaacctggactttatatcatagaagaacagagtgaaggtaaattgcactgcccttcaagtcagtcatgggaatacaaatgagaattcatcatttagttccctgaactttgcttgcctcatcatacagtgagctcattgtccatttgtcctcattttccaatcacaagggataatgaaaataatgagactgacttaacaaataacgccagactatacattcattggagttttgaccctcttaaaattggcatgcaaaataatttcctgatggtagccacccacgtaagcttatggtttgatgaccatagcagcaccttctgttttggagatttttcttacttcctgaaaaatacagtatcccacggttctgaggcaggactatatgctcagaaatgacacaatgattatttgaatatattcagtggtagaaagtatctttttagtgttgaatgtttcagtaacagcaaaaaatcatttggaacttagcatgcgtgtaaagtaatgagacaaattgtcttttctggtattgggggcattttcaaaagagacttaaaaaaaaaaaaaccttcggggaaaatggaagcataattggaatatatgcatggctttccatctggatagctctgaagagattcctaagttcagatatgttagttgaaactgctcttgagagtcatcttgggaagggattgttagatacttgaggctgaaattgtttgttccttattgatgaaattaggcacctaccctctctttcgtggcatgaggctttgtatttatttaatgtacatttttaaattgggaatagactaaaatggagctctgcacttgttagttgccagaactcatttacatcctacatgccttagactttgaaaatatagggccaggc

SEQ ID NO: 132202 - DNA, 1185 bp, Homo sapiens
acaaagccattttggagcagaggaacatgctgacggaagagctctatgggaacacatttcagctttacaaggtgacatctccagaagtctttttctagtatttttacttttcgatatgctcttccttaacttccggtgccctatatatcttttgaatgtatttttactgtggctggttctttaagagaccatcttatgcccttgattttccctcatgctttattttgtttctggtatagtgagcaagtttctctttctccagagcattggctttaaatccccttcaattcaaactttgttcctctcctgagtgctctgtgtgtagcacttcaatacttctatttttacagtcatactgaaggacaagactcccaatagttagcaaagttgtgtgaccacccccaaccagctctggctgaagtgtattgggctctctgttgctagcttctcctgtgttttttcatgtgcatgcattgcccttcttcagattgtgtctggagatgaaggggaacagagagacctaaccttggatagagtacagggattgaatctgagaatagttagcagtgggactagctggttaaagaatctatttcaaaccttggaacataaatgcacacatgtgtctgaagggatatggattgattcccgggttgcctccattagccaggttcaattcttgggttgaatttgttgctgtactaattttgttaacagttcgttatatttaataggaatagccaactaattataaaacatatggtggcaagaatttgtgaagtgactacttgatctcataattgggcaagagctaggtgcttggcaagtaactgttagctggttaacttggttggcctggctctttaaatgcactgatagatacacagactgagaatcagctaatcaggttactccacaaggatatacagcagagctttcattatgtaaatatgggaaatcttaaatttgttaaaacttattttaaaatgactaattacttttctttttcctgaagtgaaaaaattgattaaatttagaggggtttgattgttttgttttgttgcagtcagcagatcaccgaactctggacaaagtgttagaggtacagccagaaaaattagaacttattatggatgaaatgaaacagattctaactccaatggcccaaaagtaagaaagttgttt

SEQ ID NO: 132203 - DNA, 1714 bp, Homo sapiens
atacaacagcactcagaacagtgaattttcgaagttgtttttcttgttttcatttggactaatttttgttttcattggaagttaattatacctaaagtccaatgatcttaatcttaaaaagtagaattttatttcacaattgaaaaagatatttaaaatattctagttacttttgtaattcttttagtgtccttttctcttaataggtatcctgttagaagaattaatgaagatttaaatttaaccaaatgtaaaatgtacaaactgctcagaaagcaaagtgaagtatatatgggggatggtatgttcccctttttagcttccagaatgagcattgatcctgattagtgattgccctttttacctaatttgtattggtgtatgacacttagaatgttaaatgtaattgaaaataatttctataataactagaatcagcagccaagaagcccaaatgggatgacttcaaaaagaagaagaaagaactgaagcaaagcagacaactcagtgataaaaccaactatgacattgttgttcgggcaaagcagatgtgggagattttaagaaggtaattctacctaaagatgcctttgttagtccctttgcaacagtggagaagtcagtgtaccttgtaaatagtgagatgtcctaaaataaatgacatagcacttgggttattgagggggtcctcatgacaccccattagagacatcagtacttggaagtctgcccgtcacagaagtgtgtagaatcattatgatggcatcggatatgcttatgaaaatgtatgaggttgaaataaatttgacattcttcctgagagatttctgagaaaatgaaggacaatttcttatcagctagattttgagatacttcagtatttgttatcttagatttgttttattattttttttacttctgaagttctggctgttaagatttggattgatacctaaaattataccttttgagatgagtttctgcctttgagaaaattacttttgtctggctgctctggaatagtaattttaatggcagaggtttgctgccttagaaaagaaaatcatgctgaacttggagaacatatactggtacagtttttaattttgtgtgtttaaaataacttctttatttcaactgtgtttccttcctctcctcatttgtagaaaagactgtgacaaagaaaaaagagtaaagttaatgagtgatttgcagaagttgattcaagggaaaattaaaactgtaagtagcatatactcattgttgcaatttttaacagttgaagttgcctcactctcaggagtagctgaccattcatgacagatgatcttatcattgtttccggtgtatttggccaaaagttttaaatatcttccataacactgaactacataaaaatttaaaagtgagggaccttactgctagggagttttgaaaagattatcagtcttttcagtcattttttaataattcttaaaataagccagtgtttccttaaagttatcttgagaagtttattagttcagtagtattttataaatgtgttgttctaaactccatataatttagtatgttctcaattgccaacttctttatatttgtgatgtgaacatattacttcattcttttcctccatgcttttgtaaacatcatgcgaagatctttaactaaaatataatcatttcagaattctaaagtagttttcattgttgct

SEQ ID NO: 132204 - DNA, 1108 bp, Homo sapiens
aaaattaacattttagatgtccttatgatatactttccaaatttcaagaatgttcaagaagtcatttcttaagacttcttttgttattgaactcttgaaaattctgtgtagaccatcattaaagcagaatacaaaggtatataaataatagctctgctatatgcttaaaactagagaaacataccaaactgacaccagtgtttatctttagtggtagaatcatgggtagcttttattttacatttctctactctctaggtggttttataatcaaggaaagaattttttatttttgttttgattgtttaaatccagttctactcaaaaggctatatgttgcatatttgagagtaagacatggtattgggattaaaaagtataattttctgtaatggatataatccaatagataaaagagatttgggcccagaatcattgaacttataattattattgtcactagattctggttcttcaaagacatttccaacaaggaaagttgctaaagaaggtggacctaaagtcacatctaggaactttgagaaaagtatcacaaaacttgggaaaaagggtgtaaagcagttcaagaataagcagcaaggggacaaatcaccaaagaacaaattccagccggcaaataaattcaacaagaagagaaaattccagccagatggtagaagcgatggtaagtactggttcgttcatgcctgaactagtgcctgaacgattgtgcacagggactctggaggtgcgttagaaacctcacattcttattccttggcaggtaacattttgggacaggtaggtggcttaaataaacaacaaagcatctttcatgctcacaattttcctctggtgcttagagtttcttatttcttagcccttttctgaattaccttagccatggagttaagttaaattataatggctttatacagtggaacctcaataaaacatttctttttataagctaaaatttattcgttcatcgaacgagtatttgagttttctatgcattgtaccaggagatagggcaaaacacacacacacacacgcacacacacaaaaataatcagtaaggatacaggccccaactaatcatagaatc

SEQ ID NO: 132205 - DNA, 1012 bp, Homo sapiens
tggtgtctcagtagcctataaagcgcctattagacagattcctttcaatgaaatattaactatttcaacatcttattttggagttcactgccaattgcttggctgcgtctaaaacaatcacagattaaacactggatgctaatctttgttttagctgtgttggattgcataggaatctttcagataatcctttattttcttatattaaatgcatgtagtggtacatgcagcctattgtttgttcctggctttttaggctccaagaaatcaagcgataattttgtcagttattcatcccctagtcttcccaggttacaaaatgcaaactctgatgcttattatacttagtgtcaatagtggtctatttttagccagtactattgtggaagtgaagtgatgcctccagagatatcaaacactggccagggtgtgtgttgttcttagtttttttattgataccttgttcattttcagttttaaaatttgagtcagtgattgcaaaattgctggatttaagtacttgtccattctatatctggctgatttgtattgtatttgtagactgaaggactaaatgtggcaatgactatgaaacagctcttatttgatgaagagaactgcagtgattgtttttggttttggttttggttttccagagttgctacgatggaagttaaagggaaaaagcaattcacaggaaagagtacaaagacagcacaagaaaaaaacagatttcataaaaatagtggtaagatatgcttcccatgtgggtgtttggctgttataattgggggatgggagggcatgtagtaaatttcaatctgtattcattggctaggattaggattaaaatagtaggaagaagtatgtgttattgtgtatgagttaacatgttgctcatgacatttagacacttaagaaattgcaagaatgattgaggaatgccttattcatgaaagactccttatctcagttgttgctgctgttgcctcattttattcacactagttca

SEQ ID NO: 132206 - DNA, 1066 bp, Homo sapiens
acgtgtgcggtgagtgtggcaggctcagcggtcgctcttgggaggggttcgcaccctgccgggcgctggaagtcgggaaggtctctcggggctgttgtccactgggcagtctcctctggcctctttctgggctaggagtttgggactgactggagcctggcaagaagggcgggactggccgggcgcggtggctcacgcctgtaatcccagcactttgggaggccgaggcgggcggatcacaaggtcaggagatcgagaccatcctggctaacacggtgaaaccccgtctctactaaaactacaaaaaattagccgggcatggtggcgggcgcctgtggtcccagctacttgggaggctgaggcaggagaatggcgtgaacccgggaggcggagcttgcagtgagccaagatcgtgccactacactccagcctgggagacagagcaagactccgtctcaaaaaaaaaaaaaaaaaaaaaaagaagggcgggactccgacctctctcccaccacgttgccctgcgtgccgggttagagtggactagcttcactccggaatcccagcccgtgctcggcctgatcagcctgtctgtgctacttcacaaaccccaactccagtgctaggcggtttgcctgaatgtacgcagattctaagtgctgggaggaaacgaactggatgctgagttggcagatagtggagtctgaagaagtgatctttaaacggagatttggaagctcagggagtacttcaagcagaggcgataatgggctaagttcctgagatgggagctaggaaggagtatagttagagtacaagataaagttagccggatagagtggaactaggttctgtagggccttgaaggtcatgatggggaatttttttttctgtacaataggaaaacatttccgttcctattaccatgtgtagaaaacattgaagacttgtaagcaagtgagaatcatgaataggccctggttctctttagaaaatgtattacatttggaagctcaagagattgtattggtaatagtttgcattagggtggtgacgtaagggacattta

SEQ ID NO: 132207 - DNA, 1001 bp, Homo sapiens
ggggtatcttgtgagtcgatttgaattgtaatcccgtttttttcacttgctagctgtgtggctctgggaaaattacagtttttatgagctttggcttcctgatcaataaaatagaaataattaagtgatacgtgcaaagcgcttagcatggaacgctctcaataaatgtttgccatttttagtgtctgctcgtgcctggaaactgctgttattccattttatacttcaggaaataagattgtggttaggatatatgccccattttccagatgaagaaactgacaccacaaacttgctcgtgtcaagcaacagaattttattctttaactgttctagaggcaagaattccaaaatcaagctgttggcagagccctgcaccttttgaaggctctaggggagaatgctttgcttcttcagcttctaacggttccaggcggtccgtggcctcttgttgcatgactccaatctcggcctgtcttctaatggccttctcctgtgcctgtgccacttctctgtgtgtttttaggacactgaacattgaatttagagtccacggggataatccaagatcatctcatctggaggtccttaatcacatctgcaaaggcccttttcccaaataaggtcactttcacatgtcctgggagttaggacatagacatatcttttggagactattcaacccactgcatctgtaaagttgaggaactggcacttgatccctggtgccagacttcagattttactgtcttccaacttactccgttttctggccactaaggagttagagttgaaactggtaatttagtagactgtatgcttcttgatgacaggggccatcattactttccaggcacttatctcactatgcagcacatagatacttgataagttcttgtcgtctaccttaactgttactagtttacatttcagctcatttaaatctcataagaacgttttaaataggtcttttctcattttacagagaaaggcaaaacata

SEQ ID NO: 132208 - DNA, 1273 bp, Homo sapiens
tctggctggaacttaaccacttcagtgtcatagaatcactttctctgttttaggtttgcttagaagacagtaacaagtcaagcaataagtaaaatgaaggcctgtgaagtttatcagcatccaagttcatacttcatgatctatgcattctaaactttacaagggtgtttcggtttatttaattttttttctaactctaaaatttgcatactaacttttttgaaaagtctattggtgattcttagactagctctttataattttctgcatgggcctgaagattaaatttcttttaattttgggtttctctttattactattatagcaaaacaaacagcattactttaattttagaagtatttttaaagaaatttaggctgtggaccgtgggcagccagggttggtgaaggatcccaagatggttgggcgaaaacttgctctaaaaaccactgactgtgtagcttttgtggagatcataccccagaactaaaaggccattgctaattccctgaaatcctggaatgagaccctcacctccaggttggctactttacctgagaatccaccagctattgactaggcttactacaaggcccatgtagccaaggcaggcttggtggatgactttgagaagaagcttaatgccctgaagtttctgtgccagaggataaatatactgcccagctggatgctgaagacaaagaagatgtgaaatcttgtgctgagtgggtgtctctctcaaaggccgggattgtagaatatgagaaacagaaggagaagatgaagaacttaattccatttgatcagatgaccattgaggacttgaaaaaaactttcccagaaaccaaattagacaagaaaaagtatccctaatgacctcaccaaccaatcaaggatttataaaattgagtccaggaggaagatctggcccttatattacacattctggacattaaaaataaaataattatacagttaaaaaaaaagaaatttgggtggagccaagatggcttaataggaacagctcccgcctacagctcccagcatgaaagacgcagaagatgggtgatttctgcatttccatctaaggtaccgggttcatgtcactaaggagtgccagacagtgggtgcaggacagtgggtgcagcgcaccgtgcacgagccaaagcagggtgaagcattgcctcactcgggaagtgcaaggggtcagggagttccctttcctagtcaaagaaaggggtgacagacggcacctggaaaattgggtcactcc

SEQ ID NO: 132209 - DNA, 1864 bp, Homo sapiens
gtgcaagtatgccgtaaacgttgctttttaggcagtttaggaagtcagaccatgcaaattactcatgtgttaacatgcaatactcaaagggttttaatttaactctcttcttttgaattcttcatgatgatttactgtaaatgcttctcagtttgcatgccttgatcattgctgctagtgattttatgtgccagtagacctgagtttagtttaccaattttacttaaatagtaaaagccacttacaaagtgactgcctaggatttttttttcctttcatttgaaataattgataatatgtttttttaaaaagaaaaatgtgttttgtctcttcttttatttggttctggtttgattctttttctcccctctttcctttgttttttttttttaaataaattatgatgttgggattggaagccctgagtaatgaaaatctttggtaagaattgtttatgtagctcaataacgaggacaacaaatattctttagaagaattttgattctggggaggaaagaaaatataaaaactcccattgactgttgataaccaagtaaatttttccttcagtaaattagtatttttgaagaaacgatcgccttgttttaacttgctaaacaacaattttaaatgacccaataaagaatctattgaactttattcgtttaaaaagcatcttttgtaccaaagcaaatttttttctctactcatttccatcatcaatttggacctatggtggtgaccaatgcattggttacagaaactttaagtgagtgccttgagaaaacttggaaatttgtgcctgaggtggtaaacttttaattaggttaattgtagtgcttaccaatcagtaacttcactatcactcagggctttcgtaccttctaggtaaaacttctttcattgtgtttttttaagatactgtatttttttttaagtgccatcatttaaatttcacttagtaagtggcagattacattattcagtcccacaagcacagaaacatagtaacactaggagatatttgaacatttattttacaatcgactgaatatattatgtaaatgaggtaagcaacttttgtagagattgtatgtgtgagataatgtaatgttcttttccagtttttggactacagttgaataaactttttaattatttaaaaacatctttaccgaataacatgtgatggttttttgtataatgtatttgattttgtaaatacgtatttcctgatgtgatttttgtgagaaatgctaaatcttttagtatatcatgtcctctcaaaattggcaggagctaaataatagtttgtgggcgatttgtattgtgtactgtacaataactggggaacttttataattataaaaatatatattaacttttagtgtgttgtttaaacaaatgactggaacatactaaagatattagtaggatttttctgaatatttcagacttgaactcaggctagctttcttgtgtttttcaaaacaaaatggtgtcttgtcttttaaaatcaataaatttgtttccttgttacaaatacattggaaatggcttgggttttttccccctcaaatcactgcctggaggctaataatacagtacctcatctggagggtagtatctgccattcattaacttagaaacaaaattaagttgttttccttttttgtgtcagatgaaattggcaatatttacacatgaacagcacaaaaagagaaaattataagcccagcagggtacaaatcttaccctcaaagaaaattaatgattgagtgcgatttaatttcagaagctgtcacatttccattgtaaatccagatttttggatgttcatagtgtgtttgtttcatgtcacttc

SEQ ID NO: 132210 - DNA, 1763 bp, Homo sapiens
aaaaacaatttatacatttgagcaaattgagcaatcacatttattgcatttatttccctttttcccttttttcactcattgaaagtgtgggttttctaaataatattagacactaacactcaacagatttattcacaaatgacacaagtacacattttaagacttctttgtatttcttgcaattataaccaatcactagtcatgaaatatacctacataaaccaagtcctacactttcagtgaggaagaatgtaaggaaggtatgttgactgttttcaagtttcagaaaagatattttcatatgataggattgagtatcatgggtatagtttgatcttgacatatagtttgaaaatcatactcaaaagatttgcattcatgaaaccagtgaacaatagggtggaatggatgaaccatctccttggaagacagggcccaattttcaattttttctttggctatcaagttgctagtcacttattcaggattttcatccaaactgtgtttggactgactgtataagtcttactgccttttcagaaatctgctttcctttgtgtgatttttcttgtactgtatagcacggtttatgcacctctctttagatggtgtactttaaaaacaaaagtaaaatttagaaaatggttttaacactgcatacctaaaattagtagtgtgcagcattgactgcctttgatttgtagtagacaagtaaaaatgaatacgttcttgtagaatgctgtaaaagttattcaggaatgaatacggttttagtgccgtaatcatgaatctttttatatgaatgcactgtctaaaagtgctaaatgcattttcaaatttttaaaaattcctcagatgatatatttgaaatgtctaaaataatgctgtgcttgaaacattagtgtaaaaggaaaaaaaaaatagtgtcactgtgatgttggtcctccctgtgtggacacaagtagaaagaaaaaacttggcaagtcacctttgtgtacaatttgaggcagtggttatatacaataaattgacctttattatatcccccagacacacacattcttggtgagaaaagaacaaccatccagaaattgagatgagaacttttgtgatctgtatgaatcacagcagatcatgggggaggaggattggcatgcagtgctgttgaaaattgggcttgttgttagatcagaacaacctccatgtatatggttagaacgaatcaattaatggaatcctagtatttctgcaagtttggtgatttttaaaaactggaatagaagcattaattcagtgcttagttctagtattagaaaacccctttgatgtaatgccttgtattaaccctttgagcattgtaagatatacaatgggggacaaaagcctttcagatcatttatttagacttagaccggtaaagtatactctatatccaaatgtctaattatgctgtttttttaaaggggggggtaggaagagaaagtgtttccacgccgaacacttgcattttatatacaactcttaatttttcttcaagagggcttgatatatttattcccaaatattcactgccatctaagtaagtgtactgtttacagaaaaaaaaaatcaacttttctagtatcacaccatagtctctagaaaaggaggacaaatacatgggcctggatagacctatgtcataactgatttctgcacattgaaggtacctagattgcctttaaaaggtataaagaaagggttaagtttcttttttttttgtc

SEQ ID NO: 132211 - DNA, 1042 bp, Homo sapiens
tccttcaaaactatttcctggtttctaaagtatgtggatttaaattgtaaacagaacctgaaggcagtgtaactggcacacctcactgttacttatccccaattctgtaggatttggataggtggctggatggaccattgccattgaagaatgtacatcagggatcatcgtacctcggctattacatggtgccttaaaacagaactgaagctaaggtttagtaaggtttattttgttcatgtgactaactcttcaatccatttgacaaagtgtgcctgtcattttcagattcctgaagtaaggacaggtgacatgttcttcaaaggaaatttagggaaaacaaaggaaaacaaaaagacaaaaatcagtttccctctttgagtgaccgtggatctattttttattcttagagctgaatattacttgattacaaatcagattgcttaagggtgtggaatagcaggctagttttaataccaacttgttaacataaaatcatatatgttttagaccattcttatttagttacaattttagaaagttaacaaagtaagcaggtacttatcgaagtgcatcttttcagtctaaatgtttgtctgtgtgtctaggtgctggtgagtccacatggacacatgagtgcccatggggcaggagtctgctataaagtcagaaggtgagatcctagagagttacacccagccccattttaatttgcatgaaaagccaaggttcttttaagcactcaaattatttaatgattaaaacacaagaaaggcacatctgttcatttaaatagttgtaaaaaactaatcagcaaaaataaatagataataaagccaaaaaaaaggaaagcacaaaatgattgacagattatcaaatgaggcctatattaaacccaagatgtttatctttccagtggtattggggtaaggggggtggggggttggaaagacgaggtgagccagtctgtaaagttagaaataccaaatggcttatcgggtaatacacagtgtatttaagctgttgttgcttaattgcctca

SEQ ID NO: 132212 - DNA, 1352 bp, Homo sapiens
cctttttttttaaaaaagttaacaaagtatcaatcacaagttgccaaaagtaaattaatctcactatgtttgaaagaattatagatgcatcagtacagcattgatatgaataaaatctgatgaaaagaaaacctctaagctttgtttcctgagaagagctaagctgttgctttcgtaatgtcctatattaaagtgtttctaaagcacctgttgattgctattttctaatttgtcttcgatgatagtcttggtattatttgtttgtgcagatgaaggcagtgaagtagaaagtgaaatggatgaagaactggatgactcttcagagcctcaagccaaaagagagaaaacagagctgagccaggcatttccagtgggctgcatgcagcctgttctcgagactggcgtgcaaccaagcctcctgaatccaattcacagcgagcacattgtcacaagtactcagactatcagacagtgcagcgctacaggaaatacctacactgcagtctaaagaatattaaagcgtatttttccagcttacattaaccctgttgatattgggcttaagttgaaaatttaataagcctgaaggtcgactgttgtcaaattctatctgtgctgaacattaactttttggagttgtgaaatggaatgggtgtatgtattttgccagatctttttttttaacgtaaacaaattatttgcttcttaataatgaattttttcccttagtttcaggtgtcaagaaggatttttacaacacttaatgtcaatgttttgttttcttataattaaaaagtaatttacattttttgtagcttaaaatattttattgttgattgttagtcttggtgtatgatttcatgtgtaagttttttaattagatgcacttctgtgaaatatcaaaagaaatgatttttttgatttacactggaggcatgcccatttggcagcagatgcatcaaatttgcttttgaaaggtgcttttcattggacagaaccataagacactattttgataacattttgagtatggagagagaatacagagcatttttattatagtgctagagggtttggaaggtcatctatttttctctgaggaaaaaatgagctgtacatttatcagttcagagtaaatgacagaattgcaagagattatgctaatatgtacataatttgtgtacataattattaaaccatgttaacaatgcaagcttccgttaaacattgaattttaactattatttgcataccaattcctctgtttaaagactactgattctgtatttgggaccactgcacagatgcattctgctgttaagtgggggctgttatagttagatactgaagca

SEQ ID NO: 132213 - DNA, 1048 bp, Homo sapiens
tatttgctggcttgaatcataaatggcttgatcagtgcataaaccgacttccagctccagtcctagtttgagtttacagtgtcaacctgacgtcaaagcccactttacccttccattcttagactgtgcttcctggaatcccacttagctagaggcatttatttcattttaaaatcaccatcttatgaccttattattaaatggaattttactgttttatcgatagtatttgaaaattgagttttaaagataatgtgacacggtagaagcactgttctaggtccctctgcaaacacgaacaaattcagtcctcacgttgtgaactgtctgttcatatattgggaagtctaaggctcaaagagtttaacttgtctgggagcacacaattttttttttttttttttgagacagggtcttgctctgtcacccaagctggagtgcagtggcacaatcacagctcactgcagccttgacctcatgggctcaggcgtgggatagtggtagagttgtgattcaaacccaggtcaggctggctccacttcttatgttgttccgcccatgctgtgctccactcctgtatttaaattctatatttcccatttaatatctttgcaccctgggaaagttatatataatatccttgcttgagtcttagttttctcctcaacaaaataagcataaggacattttttcatagggcttttgtgaagattaatttaggtaggtaagtagagtagataggcaggcagacaggcacatagtaggttcctgatctttgttagttccatctccttcccctttccataaatatgtaaatatctgataagtatttgattgccttctactctggattagatttttaaataccaattctgcattgactatccaagtaataatgtatataattagatcatcattttttggaccatacaaagataaagttgaaattgataaaacagataaaaaaagacatatgaaggcattgataatactgtactgctactggaagaatactctgcaaacaatttttgaatgttgagtcaaatga

SEQ ID NO: 132214 - DNA, 1937 bp, Homo sapiens
tctgaattaatttgcattcatagccttgccttgatagcccttgagatttctgttcccaatccatataactcacagcagcatatgcttctacctagtatcatttagtgtttgtttctgttttaatcttgaggggacctcttttggccaattttatctatttatctgtctgacttaccctaaatcttctcaaataaattggttttaaagttttatctgatggggaacaaaaagacaacttctgaaagcagtatgaaagctgaataggatgaaagaccctgcctactgtaggttcagacttctattttttgaagtcatcatgtattttagtcttttacacagactagttaatgtagaaaaaccaaatgatacttacatgtgtcatcacttttctgtgtaccagagtgagcaacgagaaatactcatcccttaaaactgataaagattgtgttaccctaacaattgacaagtagttttttattttctggattcatttaactgtgtgaagcttttattataattttctgttcttgcatctagtgtgtgtgctggcattcaatgaaaggatgctgaattgaacttttccttttctttctgtgttactgtctcaggagcaggcttcctgggtgtgccagtgtgatgacaacatggttcagagactagaaacagacttcaagatgactcttcagcagcagagcaccctggagcagtgggctgcgtggcttgacaatgtgatgatgcaagcactgaaaccctatgaaggaagacccagttttcctaaagccgccaggcagtttctgctaaaatggtctttctacaggtatcatctaggtttttcctaggctttcttcttcatattctgcaaatatgtgtgtgtatgtgtttgtatatgcttctgtgacaaaagaaaagaaagtaataaagactttagtttgtggaaactccctgttacaactaccttcaacccaactcagtgattacaacaccatggaaatgtaccaggaaacttagagaaataaactttctgctaggaaaagaaatctcttgctcaaagccctacatgtcctcagatgggaacgtctgagattccagtctagataatgtgttcagcagtaatcagaaaagggcaactgtcctccctcttgcaacatacattatttaggcttctttcttgaggcctaacactagtctcctttttgttctctgtttagtgatgttcagaatgtggtccctaaaccagtagcaccactatcaattggaaacatgttagaaatgcaaattcttagcacctcctccaaatctacctgtatcagaacctgtagaggtaaggcccagcaatttatgttttaaaaagtacttaagttgattctgatgcatacccagaaccatctatttaacttcttaattttatcaattataactgttttcaaacctggctgcacatcagaattaatgtaaaaaaaaaaaaaaagaaacaaatcctaggtgcctcccaagacctactaaatcaaaatcttggtggtcaagagatagtgattagtggctgggcacggtggcttacgcctgtaatcccagcactttgggaggctgaggtgggcggatcacgaggtcaggagatcgagaccatcctcgctaacacggtaaaaccccgtctctactaaaaatacaaaaacaaaattagcggggcatggttggggttgcctgtagtcccagctactctggaagctaagccaggagaatggcgtgaacccggaaggcggagcttgcagtgagccgagatcatgccactgcactccagcctaggcgacagagcgagactccgtctcagaaaaaaaaaaagagagagataatgattaggaatgaggataatcaggatttttttcacaaagctctcctggtgattctaatgatcatcagtaatctcgtagacagtaacatag

SEQ ID NO: 132215 - DNA, 1044 bp, Homo sapiens
aaagtctcttaagaagagttgaagaagtaaggcagcttctagtttcagaaagtaatttaaactcagtaacagaaaacattttaaagaattatttataataatatccgaaaaagtttttcagtgttctgttagcattattatatgtataaatacatatatatatatttgtgtatctgcattccaatgaagtatttctacaaatgagttcttccctggttataagcattaaccttgggaacatttttgcatattaatgatcagtgatatgtctactgtacgacttatcctctacctgccaactttaagaataccctttcttttcctctatttttgactatcatgtttttctgggtccaccatgatagccattactcctgaaacccatatgattcggcatctgccctccaaaaccttcttcctttcttcagagtaccatgacacagtagtgagcccttcatttccccctacattttacttttcacagctctgtacatattaatgagtaatctctttctcaaggtagcacttttcctctttaacacccttatttctttccttttcttttcctagttttgccagattttcccagagtcccttgcctcccattttacctttatccccatctccagttcatttggaagtcgtcccagcttctataacatgaacctcaataatctgacaatataagaatgatgctcttgtaataaggagacttctatttaaaacaatgaaattacatgtgtgtcaatattataatacacttaagagcttgaaagtgctaaaaagttcctttcaggatatccatatatcacttttcactacttcattctcctctaattaaattttcttttctttatgcatttaagataatttttctattgcagtataactggtttcctgtttcatttaattgatagtattacgatggcataattctctaattttttgtgtaaatggtggtttttgagatctacattatgggctaaatagctttcggtgggctgacctgataacttagctattgcatatagttgtgtttctgta

SEQ ID NO: 132216 - DNA, 1078 bp, Homo sapiens
ttctggtataccatctgagtaaagaatgtatggtcactcaattatttctctatatgcagccttcagtttaagagtaaataactctttttttcctctaaacaatctcatcttttaaaaagatcttgccaagagtgactttgtttttctcctggtattttagaatggtactttagatttggttttacagaattctattagtctaataattttttatttaaatatttttgtttctaatttttttatatatgaagatgctacagtatgagatgtatagtctgcctaaatgaaattaaaatatttaattcttttcattgcagacaagattattttatactttttcttggtgttaattaatatgaattagtatttaatggttgtggtgtgttcacttatttacaaactacttattttacattgtaaatttgaattcagaaatgttgttaattgttcccaataatcgcatgaaatttaaggttgtacatttctttaaaattccatttaaagtttatgaaaagctctagccgtctattttatgtacttctcacaatctagcaaataattatttcctgttgtttgctggttttagctaccaaaatacatttagctcaaagcaaaaccttgttttttactcacttttccttgactttgctgtattgtaaatataagttattacagaaataaggcctgtcaaaatgcatatcgttagtaaactgaacttaaaatgaatcctgatgggtaataatccatctgggaaaaaatgacaaatgttacatttagatgttaattgggcaatgcaatatttatttctttttatttgtcaatcaggatttccctttgggaaaaacaggaaccattcatctttagtctatcttgattaatacagattaaatgcaaaggttgaaagatgcaattatcttcgtttccaccattaaatgagtgtatattagttcataagtagagtaatcaagttttaaagataaaggttaaaagttcctatgttattttatgggcttttgaaatcattcctatggtattttatgggcttttgaagtcagcatacattttacaagacatttta

SEQ ID NO: 132217 - DNA, 1031 bp, Homo sapiens
atcctttatgtgcccagtattaatattgtctgtgaggtgtcacagttcacattaaaccctgatcctaggtttcagataaagtcctcatttattagactgttgaaagtttagacagtgaaaactggcatttaattcatttgaaatttttagagccattcttactgttcaacattttggaatgaaagttgatgtttgtatttgtatttatgtattgagaatctgagtttttttttttttttcggtcactgactttctcaaacatttattgaggtattactgttgaccaggcactgtgcttctgtgaatttgaagacttaacagtatgggctaatggagctagttcctgcactgaaaggtacctaatcctgtaaggcaaaaatacaaattcacaaatagcctccagacttctttttagggttagtttcaactactttcttgccacattattttttaaatcacaaatgttcatatgttatcaattgattaattttagatttatcaaaattgtgcttaccttctgataatattgcttatacaagttcaaaattgcctaaagattgggcaggattggatagcaagagagtgaaagagaatcatgaatgcaaataatacttaagattgcagaatcaccctttaattagagttaactggcaccattgtgggaatgtccgttacctacctatttatattcccttaagtagtcattgcagtctgactctggcaatgaaaaaaaaaaagatcatgttttagtgaaactgttttcaaacttgagtgtgcatcctctggagcattgattaaaacacatctctggatctcaccccaatgactttcgattcagtcagtgtgggcaagggccccttgcatttccaacaagtgcccaggggatactgaaaatgctggtccaagaccacactttaaaagcctgttttagtgattacggagactaactacaaagtgaaaatgttcttatactcagaataaactgcaaaatgcagagaccatttgaaaatgtaagatggagtttaaatcct

SEQ ID NO: 132218 - DNA, 1039 bp, Homo sapiens
tcaaagcaaatatttagtgctaacatgtattttctatggcccactagctcagctggttagatcatgactaatgaggtctaggtcatgaggtcatttgtcacaaagtccaattagctttgatctggtctgtgtggactcaaattgtatcctcaactctagccaataatgtcacaaatgtgcacttttggtcaagagggagaagatgcatcttcaaaaacctttcattactatcaaggataatttttgactaaaggttctgtagcatcatttttatacttaataaggaaatgtcattgtgttgccatgaagtatactcaaaattttagcaactagcgaccataagtattttttctcaaataggactagaaaatttttttcagcataagctattttggtctttctgtaattttgtagtgctgacatttgactattataatttttgtctctaatgttcattttagggtctttctatgacttctttttatttggcacacttccatgtacgttaggaaagaatattccatattattctgttctaccacactgaattaacagcaagttagtgtttgatccctgacttggatcacagtcggagtcccacttctgtgtgataataaatgctttttgctaatgatacttccagaagatagggactctgatctttatcatgaacttttgagcacccagtacatggccctacaacctgtgcatgcttagtaagctcgctaatgctcttgtcaccagcgtccccatgtcatgtagccataatgcatggggtctcactcaagaagtgatgacagctctcacagatatgtgtcgtcacttatgaatatgtgtaatcattataatttgatgatactaaaatgtttacccgattctccctgtgaatatggacaattactgccagcataacaggcttaacagtgtgggttagtgagtgagtgtacatttcaattaaacaactgagactgctttacagcactgtgtgttggaatagagtacctttttgctcaagggagaaggtaatttaattactttt

SEQ ID NO: 132219 - DNA, 2366 bp, Homo sapiens
taataccggataaacctttgagatagatctaatgctctgtattcttcctatcatacctacctcttaccaaggtcctaatacttgtttttcaggtacagcaggtacagactgtgcagcaggtacaacatgtctatcccgctcaggtgcagtatgtggaaggaagcgatactgtctataccaatggagcaatgtaagtttatatgtggaagtctttttaattcccccactcagagaaaaataatgtacttttgaacacctcccactattcccagattgtttccttgttttcaaagtaattttctactagaacagttattgaaattaagctgatgtttagagcttttgtctatatttattaagaatatgcactcattttcctttcacttaaccccataggatattttaaattatttaaagtcttatgccctttaatagttcttcctatgtagagaaaaaatgtatataccccttgttagtgatatctgtattttaatgatagcttctaaactctatgctttttgttttattatacgaggtcaatttttatgtgatgtatttgcatgtaaatgaatataaaactagtatattaggagtttgggatttttgaacattttcagaatgagatattccacataaaaatgtctgataataaatgttactttcctatctaaacctgccccctgcccgaaaccagcttatctcttttgcatcaacaataatataaatttgtaaatttattttatttgggcttcttggctactttgcaataagatgcagaatgttgttataaataaaggaactaagaattattgtaagtcgcaaggattgtttccaaattgggttttttgtttgcaacctgttggcttcctcggttaacttaaaatgaattcaggttctctcactgactcttctgcccacctcccatcagtgttggtatactccaggatgataacctctgctgtctttattcttactacatctactctttccttgagtgatttcatttatttccgtgatgtcaacctataagttccatggaggcaggactttttttgtttttattcactactgtaataactcaacaccagaagtgtgcatgacatgtgagttcagttgttgttatctattattattataactaaaaacagaattctggttaattttgtattcgttttataattgtgaccaatgtacttaaatattctgagctttttgttattgttaccatggaaggggaaggagaataatttcactcttattgggtttttgcaaggatacaaggaaatatatttaaagtacctaatacagagcctggtacaataatagatgatacaaaactggaagcttttcattgactctggcttctttcttttcttactatatttggtcactgaatctacccacatcactactgcctaacactacctccattacctataaaataaaatctaactttccacactggcattctccgcattcctacctccgccttattttctaccttctaggcataaccaattttgtgcatttttccccaaatattcccctttcatacttctatgtttttggacatgccgttttctctgctgaaatagcattctctgtcttctctcctttcctcccagtctccctaaacccagtctagtgtgatctttatagacagacatgtcactcccttctttgtgacatggaccctgactctccttctctgcagttagcttatccttcccttataaagggcaacattatcccctgacttttacttacagcattgtactgtgaatgcttgtttatgtttcccatagtaggaagaactctccctgaatgcgaacttggcattttgttttatttacatttgcttaggtgattggcacataataaagtcagtaaatttctgttaccgtattaaatctatacctctttacatattttagacacactgtgaatgtttttcactctacttatttgttgtataggtccagggccccctggagcatgattttggaatcttcaccataaacttaaactactgttggcatttataccaaatgaaaaagacgcctgccacttcgacctttatgctctcagggaaaataaatggctttgtagacactgctagaggtcacccagttgtcagttgtcatttcatctttgtctgtgacaagtagtaatgggcacctgcaggggaatgtgagaatgggagtttgtagctttcgtgtctgttgtggtagaatgtgacaagggaaaagggcagttgaaatgggtattgagagagttaattgtatagtacctatcacagttatttctcattttgtactggtcccagctaaggtggagagattagtctgttatgtatgaaatgaagt

SEQ ID NO: 132220 - DNA, 1006 bp, Homo sapiens
tgtgtacacctggaccacactttggaaaaaacattgtactgtgccatatggctcactcccaacaggcatatttttcatttcctcaagttagctttttcttctgggacattcaaggcaggtgataccttatattcctttacaccgagcaaagaaggtgagaacactcattttctttttgtcaacaaagtgttttatttcacgcagttttttgttgtgatatttgcctggagacccttgttatgttgtcctcccagacttatttagaagcatgtttttcttctttgtcgttatttttctttttttttcttaagtagaatagtgtcatgtttgaagctccccagtatattccagtggtgtccccgtggatataaattgtctataactgataagattcatgctataattcctattcctctgacatgcctataatgtttgaattgttaatgtgctgctattatcttgggtttgcaaactatagtaaaatgcctttaaaagtttccagcttttgttactgacccataatggatatagaaatcatgatattgatgtcaaaggtagttacttctgttgattcaacttttcattgtaactttgctttgttgattttgacataaagagaaagtttatagctaatttttaaaattttgaggcattcaatattatatataggttggtgcaaaagtaattgcggtttttgccattaatttaatttttgcaccaacctaatatactagaatgatgagtgtattagtccattttcatgctagtaataaagacatacatgagactgggtaatttatacaggaaaaagcatttaagggacttacagttcatgtggctggggaggcctcacaatcatggcagaaggcaagggggaacaagtcatgtcttacacgggtggcagcaggtaaagagagagagcttgtgcagggaaactcccatttttaaaaccatcagatctcataagaattactgactatcacgagaccagcacagaaaagacctg

SEQ ID NO: 132221 - DNA, 1034 bp, Homo sapiens
tttgatctacaaaaagtgttacatgtttcaatctattgcttatgttccttttatttcttttaagcatattctctcttttttagaattgtagatccagagcatacatatgcaggtttgctttatggctaaattacataatggtggggtttgggcttctagggtacccattacccaaatagtgaacattgtacccaataggtaatttttcaacacttatccccttcccaccctctctccttttagagtccccagtatctcttattgtcatctttatgttcatgtgtaccaattgtttagcgcccactttattggttatgtttttatctttttatatatattttttaaccattaaaaatgaatcttcacaatggtgatttaaaaggctctgttattattaatgccatcaccaattttaagactctgaaccttattgagaaagggatagcttttgtcatgtcatctgaagagcaagtaaagaacaattcagacattgttataactaactttaaaaagataacagttatctttttaaaggcaatgttgaacatttaactcactctggttttcatctctgtagaagaatggttttgagagagtgcctatcactaacaagagtgtgatggaaatagtgttcctatctctggaaggtgccttctgtaaacatgaaaaaaaagttttctttttattgaatttacatattatcaaatatttacaccaggtcttaatagggtatataatagtataaagactcaaaaaacttagcaaggtctgttattttaaaaaaatggcctttaacctcccccattctcccacaaaccactcctcataggcaactacattgacctctttaaacctgttattctgatatttacctccatttatttaaatatagtatacttattttactgcaccttgattttttagttttaagcattttaaacattaccttagcatgcccttcttttggtccctaacacaacacacacacaccctggcccacccacccgcccacccacccttcctgtcccttatgt

SEQ ID NO: 132222 - DNA, 1039 bp, Homo sapiens
ttgctgcaagtgaaaattcagaatttgttccctgtttattttggttgcatttactgttgtgttgaattttgctttttccctcttccaggaaaactagaaattagtctttttggtttatttatttcagtataaatagagtcagtttgtatattataagtggcatccagagatgatgtaataataaaattctgagcctgagacactcagaaactctgtataataataaaatactgagcatggaacaccaagatactctatgtaaagtattttggtagatagagaaaaacaagttggcaagatggttcagaattcctatagaatataaagtgctgtgaaccattttagttgatagcgccacacacacacacacacacacacacacacacacacacacacacacacagtttatctcacttgaaatcgtgttaaacaccctgaaacagagccttactcatgtgagaaagagacttggaaacgtctaagagaagctcttattttaagattgcattctccatgttatatgagtatttctttccttgtgtagtaagcactttgcgcgtctgtcaggccttgctacctctgagtgccttcctcctttcttctcctattaaccatagcctattagaaagagcttttgactgggaattgggagtcttgagttctaatactagatcttatactaatggatccatttggttgatttttctcagtttctctgtgaaatgggagcctgcactggatgatctgaatacttttaagctttaaagggctgtgattttgggaagcaggccaattatctgaaaaccgattactccttcaccaaaagaaaatttactgggtgatcaattcactgaatagatagtttttttaaaatcagtttgctgaaacataaatttgctgaatggccattttgttaaatttaccaaatactctgatttatcattttgtctaatgaccagttttctaaattgtcaactgcctgaactgtgtttgtattaactacatacaaagtttatcacaaatgatgctgcatagaata

SEQ ID NO: 132223 - DNA, 1055 bp, Homo sapiens
aatgagatcatgtcctttacagggacatgaatggagttggaagccgttatcctcagcaaactaacacaggaacagaaaaccaaacaccacatcttttcccttgtaagtgggagctgaatgatgagaacgcatggacacatggaggggaacaacattcactggggcctgttggagagggttggtggtaggaggcagggcatcaggaagaatagctaatggatgctgggcttaatatctaggtgatgggatgatctgtgcaccaaaccatcatgacacacatttacctatgtaacaaacctgcacatcctgcacatataccgctgaacttaaaagttgaagaaaataaaatgttagccattctaatggatgtgtagtggtttctttctgtggtattaatttgtaccttcttaatgattaatgatgttgagtatctttttttgtgcttatttgtcactttatatcttcttgagtgactgtccaaatcttttgctcacttttaatcaggttgtttattattgagttttgagagttctttacatttatggatgtaagacgtttattggatatatgtttgcagagcctagcctgctttttttcttcattcctgtacagtgtctttcaaagagcagaaaattttaattttgattaagtctaatttattaattttatcttttatggattgtgctattagcattataactaataaattttgccaaaataaatgccaaaaatatgtttatgtcttcttccagaagctttatgttttacacttaggtctataatccatttttataataaactttttactttggaataattttagattggcagagaagttgcagaggtagtacagaggttcccatatacccccattccttttctccttttgtgaacgttttaaataagcatgatatatttgttacaactaggcaaccagggggtatattactattggctatacttcagactttatttggatttcatcagtttttccactaatatctgtttctgttccaggattctacattttgtttagtttttgtgtctccttagct

SEQ ID NO: 132224 - DNA, 1333 bp, Homo sapiens
gctttttctttcttaacaaagaaagcaaatggagctgcaagacattcattgccttttctgtcatcaaaataataatgtatgtatttaactcctgcagttccttaaattgatttagtgctaagctgcctacattacatataataggaatgacaagtgaaagctgcagcacatatttgcgtggcaaaagggagcagtgattgacagcaaagtttctctctacaagaaatagcagtgttgtggagctcaaaaagggccagatacataattcttaaaattgtagagcagattcatgaaatgaattttaaaaagtgattgccacttggtgtacttgagtgtctttgtgtttttggctctgggtgaggggcacagatggacagaatctcacctgactgccaaatatcaataaattccttttaagtatgttagtatttgttatttaagaatgatacttacaaattttagatcaaattgtgtctctgtactcagtaactgagtcctttagctgtaacaattcactgtatttgaagaagccgagtaatacatctattcaaataaagattttgaaggccctaaattgagttatctttcatggaaaatacccattttcacatgtctgtaaaacttgaggcatcgtttctggaaaggtaatcacataggattggtagtttcttttggtcagacagtggttaaatgcgatcatctttcagaagtactcaaaaaatattctggctttcttttgttcccatgacacatacccagaagccatggttgcaaggacacttggtgattgctgctgcatgatgctctgtgatgagcctagagtgctgggcttcatattataccatggaaatgtttcttattttgttgacaactctgtgtctgtgggaggcggggaggggaagccctatgtgtgcttgtacactggcagcctctactggccattgcaaagagcagcattgtcctctgttctttccattccaggttgcatatgcttttacttgggtttagctctttcttctttggtcctcaccctctttgttgtcctcttttgaagactagttattctgttggatgtcttgatttataattaataaagagctactagtccagtattttcattaataaattaatatcataagtgaatggaattcttcaggaccttagaagaagttatgaatataacctttccttgagaaataattttcatgtaagagggaagatagatttatctttatgtaggttttaaaatactttctcagttgcaagccttaatgtatgatatagagattagtcttttacttatgactgacaaaaaaccctgatgccttgaaag

SEQ ID NO: 132225 - DNA, 1043 bp, Homo sapiens
atagcatgcaaattctttggttttactccagacctactgaatcagaaactatggaaggtggggctcagtattctatgcttggcttccatgctacattttcagaaacattatattctatattttattatttttcccaggtttaaaaatatttctcttatctttgcctatttcaacagcagtattttgcagtgacttgcctttatcaagtcttttcaatgcgtttgacttagtttttaaagatacaagaccttttatttttgcttttatggtttatgtgatatttaattaaattagctaattacaataacaataaaactcccctgttgaggttttggaacaaatattgttctgagtgaatatacagctcagcagttgggagcagaagtgttgaggggcatgctagagagactcctgcaggctgtgagttttcagtattctgtgggcatctgtcagtatggttaaagaggaaatgaacaatgtgggtttacatagcaagctgggtaagtgaagcttgatcaagagagcttctcatgtgtattattctatgtaggcttatatatttcttggatccatttatctttataacccctaattcagtacgcatgttttagacttttgttagtctgtaggtagtcttcttggctagaccccagagttagaaatatgtttttagtgattttcagatctctcagttcagtattgtggagaaataagagaacccagtagttcatatgaaaaatatgtgcctgttattatgacaccaaaggggaaactctgtagcagctaatacttgaagtagaaaacagatggaaatcttcttctctagcctaagactgcagcttttgccctggcttatagtgcctactttgatttgggaaatccaattatgtgtggagataattccacaggtgaagtgtttgcctaccattgagattcttaagggatatataagtcgatccagactctggcatgctgaatcgaaactgttgctcctcagcaacattctagatggagttttgattgagctattttttaatgagtgt

SEQ ID NO: 132226 - DNA, 1918 bp, Homo sapiens
gattttcagaattgtttgctctctcatcttcacagtttaaaagcacatattcttttaaagaatgctttttctgagatttcccctaatttatatttcttattattacaatactatgattattctttgaattatagttctttgaaaactaaaaattctctcatgtaaaatcaaaaacagtatcttttttggctaaatcagaaacatctaaaaatatcagtgcattcatgtgaagaaatacttctaaaataattcagttatgtaattaatataattaatacttatctataaacttaataattttaaatagtcacatggcttctacatatcaaaaaattcatttttaatgtgaactaattgttcttgcttttaatattttaggccacttggtcattctggcattttatggtagagaatacgttgagtttggctctggaaggaatatgaggtaatttgaacacatgttctttataaataatgaactgtgtgtacataatacagagtattttcagatgtcatatatggagtctcatgtctgaattttttcaatagtaattttcttttttcatattttgatgtttttcctttcttgatggttggcaatagttaatatggtgaagaactttattttctatcactactatatatgttttcaagaaaacagtattatttacatagttatgtgttttcagtttatatttttaaatgcttcagttaacctagctttcggtggtgctgtaaaaaccagaagagaattccttcctttccacctaccaacttcccatcccaaccaatcctgccccaggtaggattaaggtcatgctgcatttaaaagtcataactgccacacagagttttatagaggaacaataaagaaagagcactggaactccaataatgtaaaattttcaggcactactcagagtgctttgagagcacaaatatgagactcataggttagtcttttcctgtcctttgatacccatatgtgaccctgtgtgatgtatgggtttgtcattctaaaatggcagtcaaataagtgtatatgccacatatattttcatagtggtttcatagactaaacattaagcctatatcaaaggaagtttcaattaaaggtagaaaaataatagttgactttatgaaattaagccaatgatacagtagcaggcttatcagtagatattaagtatttggtagagtaattggttaatatactgctgatgtcataattcccctactctactactcaataatagttttgttatgtaggaagatgcagcagcttgtttgtgtgaacttctgcttccactacaaacagtactttaaagacaggccttccactgccattcagaaaggtgaaaaaagcaggagtcagggtggggtggataggtgggaagggtgtcagagggataggcatagtgtctgtgagtacttgtaagctgtcatcattggtctttgaggttatgtttgcatccaaattacttccttacctttccaaagagttgaaatgcaattgccagcccattgaggatgatcaaacattgctattttaatgtttcttaatttttaataaatgaagcttatattattaaaattggtattatttaaaaataatcatgtgatttacttttttttaagcatgtataatctggtaaatttttgaaaagtattaataatttatctttaaatactacactttaatttctaagttctaaaaattgtgttcatgttgtttcaatcaaagatgtgatgatgaaatagaatccatcagtcttcacagggaacaaggtactccttatttcaatttgatatatggtctttgttttagcagccatggaggatactctagtttctttgggaagataaacactcaatctgctagttaagagacaaagctcaagagaaataagctgaagct

SEQ ID NO: 132227 - DNA, 1112 bp, Homo sapiens
atggccctgggctgtgcagacttcttgcctcccaaggaggtacctggccagagggccaaagcaagctctctaaagtgagtggcccaagggcaatgggccctctcgcctgagtctcacggttgtgctggaagggacatctgacatgagtgtcaaatgagcagggcttatttactcttagttatggggtatgagaaaatgtgagtgaaaaaagatgaaagatcactgggtttcaggagaattatggagccactgagaaagtaggacagtatttgggagttggtagaatgggacctgaatgtagaatagccatgttttgctcaccgttatatcctccagcacctaattaccttctagcacattgccaagcatctagtactgattcaataaattttgaagggcagagtagatattttgaatagttgtgccagagatgaaaataaagtcattgtagaatatagaaagaaacaaggaaaataaggtcttgtgggtgaggccaatgtagcactttggattgtaggtagatagcatcgattagcatggtcatctgtaaactattagtatggggagactgtattatatatttaatttttgtatgtgtgataccaaacaactagtctttcttaaatgaataattgaataatatacaagaaggaacttttaagaaatgaattggattttaaagttaagatgagtgacagaaatttgtatcatcagtaaactggtatacctgaggaagttgtaatcataaaaaacaaagagatcctaagcaactgtggtttttgctcacaatgagatatgaaacagtgaaagatatgttcaaagaataggttttatttgtaacctatttggaaagaagaacacagatgactgtagactggcctaaaattttcacttgatatttgcaaggtgtatatagggaaaggtagtaggagaaaaggattagaagtaatggagtagggtgaattataaacatttataactgcagatatgtttgactcatgttgctcaaaattgttaagaagtattgtgtagtcgtttagttaataacatataaggcctcatgtcagaaaatatactgagagtaaagtaagaaaatgtaataatatggttaa

SEQ ID NO: 132228 - DNA, 4010 bp, Homo sapiens
caacccggagcctgggcaacagagggaaaccctgtctcaaaaaaacaaagcaaaacaaaacaaaacaaaacaaaacacaacttggttaaaaaaattacttttcaattagagtgtagtagatatattaagaaaaatggagtttaacttaatgtgttttgtgtatgtgtatgtagatatttagaaagtcattttaatttacattttgcttggtgttgtagaacaatcaatactgtttttgtgcactgatttttgcattatccatctcttggaggatcattaggaacatttagtatttccaccttagtgctattttcttgaggcaaagaaagattaggggaactgtctgatgaagttctttgaatgaccttcgtgtagttttgtgagcaatttttaatagtgtctcacattgtatgatgatttttagaggctactttcagttaataaaggccatgaatgctgaaattgaattaaattgtagttaaagacaaaaattgtaattcattccaattataggaggttaaaatattgtgctgttggatcaacatttgatctccttatttttagaagtctgccaagttttgaattgtaaaaccttttaaataatattgaatgagtagagctgtatagtagttgtgggtttatatttcagcaaagatttgagtgccatatgtcttggaagtaaggtgggattcttttatcttggaacttggaaagagatttattttaatattttgattgggttaggtttgcttgagcatttttgggggttgatagaaatgcaaatgactatggactggagatacagatcagagtaatttgtgagaggaggtaattgtagcgatcctgatgcaacactcacttccagtcctactgcccgtgataaactttgaagtaaagacttccttctttaatgatgtaagcctctctattaaaatgtgttttgttaattttcattgctgcctggaatttcccaaatgtacattatctgggagctttggaagttccagtttaccttctggattataaaccttagaaagaatgccaatagatggcaccccatgcccagaacaacaccttaatctgaaggaatggggtaaaaaatgaagtgcaggatcatataatttgaaaaactagagtatgaacagtgactagtacaatgtagagaaaaagaaatatcatttcagggactaaatatgaatcccagttcaccatattctgcatattctgcatatctagtaataatatcactgctatgactgatgacatttctaatatttgattcaaaaacattctagcagagacctaagataattggataaattagtctctaagcttttggttttttattttgtcttttagctttaattttgaatgaggaattaaaggatttatatcaatgtatatttagtgcagtactattttggttaatgtaggaatcccgaaatgacttagatttccattgagttttaaggagcataaagaaatgagagaaatgggttattagatacaaaattgcatattctcagctatgtggacatattttttaaggtttccaattgtagagggttacaaaaaggacataacgatatttgggaatcaagaaggataaaaaagtgttggaagagatactgaaaagtggagttgaatgaaattagtagagaatttggaaataaagataaaaataagatggaaaaattacattatgaatggtgaaataatttattgaatgaacaatttctttttaaaatctttactgtgatttttacctaatgggaggacccaaggaaaaagattgtacttagcctctttttgagcaccacatttgtttttttgtttgttggaaatttttataacaaggtgctgggatctttgactagtattgtatgaggtttgactatttctagacattgtatatagaaaagattaaattgaggtgttgcctcagagttttcttgtaattattttattattacaaggtaatatattaatatataaaaaacacaaaattagcatatccagttgggatatctgattagtttatctgatatctaaagcagcctacagttgtaaagtcagtatatagtaaaaaactgtgtaccataaatgtatatattcctaaaacattttatattttggaacatttaaaacttacactggagtagtataataaactcccatatgcccattatatggatttaacaaagtagtaccttctattgctctaaagctatataatttgaaatatttgcatattgaaataaccttgaatcattctttactttgtgttgctttgaaaatatttaaatcttatgctaacaacagattcaatgtatacttgaaaaaatgcttatgtttaaaacaaaatatttaaaaatgatcttgttttttctctcagcacagcatttctcttattatttattatttttgtttttatgggtacatgttaagggtatatatttaagggatatttcgatacatgcatacaaagcatagtagtcacgtaagagtaaatggggtgtctgtcaccttaagcatttaccatttccttgtgttacacacattctaattatacttttagttattttaaagtgtacaataaattactgttgactgtagttaccctacaagcacagcatttctaaatcaggaagtttgttcttggtttccggtcatatcttttgtttagtaattgaattcaagtctcctttacttgaatcctgacccattgttaagaaagggagaaagtccagggacagtagcccatatttgaagaaacctgtgttgaagactaactctcccaagggtgaaatggggttatcttttgtctgccattcttttaactttgtttgtgggtatatttgagtaaacagttgagtcattttgtaagttgatgagggaagagaaccaactatcttctgcttcttctggaatatttccttcaaagtttgctactcattttgtttctaatagaacataaaggaagagacatctaagagctaatgtactgatagtttatgatatcactcaaagcagtttaatattttgtggtttagtatcttcagggaatgaggaggttccttctcttagtttttttatttgactgaggccagactggtatgaaagaagtttattttacaattctaaaatctatagccaaaaaaaaatcgttattcatgtaataatggtcttactacatgaaactattctataatgagcagactagtattataacaaatagtgattaatggcattttaataaacaacacaaaatttatacctaaatctttttaaaagctgatgtttccttgtttgaacctaattaaatgattaagatatgaagaggtaaatacagtgcattaaataagcttgcattttttgtttgtataataactttaattgccaaacttcattatgatccaaagggttcagtggaattgtgtatgacttaatatattttgtggcggtctttaaaaatatttctgtacagagtcactagacaaactgagtagtaaagtgatacaaaataaccaaagtgatacactaattaaatgatcttattttagaactaaactgtttcttttctcaaagggttatatataattctaactgacattaggaaacatcttcattatgtaattctgcctattagatttttatacttttcaaaagtaaatagaagatacagtgtatgaagaaaacaccagtataaagtttaatgagccaaacaatatgtgaataaaacgtaaatgtaaccctgcaaaacagaagattatagaatgtacatgttattttcagaaatatttatagatttccttatgaatttaatgcaagatgagtttcaacatttacagtagtaactttttctgtgcttttagataccttgtacttaaaatcaaagtataattttatttggctttttattattttacattctgtttagtatcaatgaaagcacaggcagttttattctagtgtttcaaagttgtttagttttaaatttgaccagtact

SEQ ID NO: 132229 - DNA, 1054 bp, Homo sapiens
ttgctaaaataggttaggcatttttctttaaaaatatagtcctacagtttaccagttagtttttgccactaagatttttccttttttgaaacagggttttgctctgtcactcaggctggagtgcagtggcatagtcatagctcactgcagcctcaatctcctgggctcacgtggtcctcctgccacagcctcctgagtagctaggactacaggctgttgccatcattttaaaatttaaaacatttcaattttttttttttttgtagagacagggtcttgctacattgcccaggctagatttttgaaagtatactttatagcaagttgtattgcttcaaaatctttatatttgtagtttttatttcgtatcaaatgcagagtgttcttagtgaaaacaaatcagttaaaaatggaaacgtgtttagagtatcaataaataggtataaataggttttgttctttaaatagatggatagaataagtatactggtgaataacaggctttggagtcagatttcagataatctcattagttgtgtgactttggacaagttattaccttcacttaacctcagttttctcatttgaaaaataggatcaatcttccctgccttatggggttttgtgaggattaaaggagataatttatgtaacgtactttgctcagtatttgacacaatatgtgttcaatacgcgttggctttatttttagggaaggctgagaaaatacctattctaatctttttgctacctaagaatcctttgaccatcccttttttaatgagcccaaaaagttttgaaagactttgcttaccaatttatactcattaaataataattattctttttcctccactttaaaaaataaggcacagacaagctgccaatcacaggcttggattatcatttgataaccagtcttatcacactgaattaatagaatgctagcccaaagttatgttttagttttactctgcagccttataatgggctccttttactaggtttgcataactctcctggtcaaaggattttagattaagaactaatgatg

SEQ ID NO: 132230 - DNA, 1335 bp, Homo sapiens
tgggctgctcttctttcaccatcatcagcttcatggttttcttttttctttttaaaactgtattttctttgtgcggcaaacagtcttaacatccattcagcactcttccctccccctctttctccccccccccacacaccccttgcacacatattgaaacctggggcctgttcgttgggccctctttgctgtactgggaaagatgtttttcttttttaaagtctgtctcctctctcttctttggtgtgtgtgtgtgtgtgtgtgtgtgtgtgtgtgtgtgtgtgtgtgtgtgtgcttgtgatttaaaccggatgcagggcatctgtgatacttgggttagtagttattgacagtgctttatccttcatgtggaggtgggagggggagtagtgaggttccgtttcactttgatgatcctccttccccgcagtagagtgttaacaattttcattgtgattatgagactttgtgatgaacagggaagggacacaaggaagctttgtgagaactcagttcacagtgttatttgtgacagttatggtactttaagagtttttttttttttaatctcctcattttcctttgagagttgaaattcaagtcaagttcataaagaatgtatgaaggttctcaacttgaaacgtgtgtatatttcactttctttctggttaagatctaggcatgtgtgtacttaacatattctttttatttactttttgattttctttggacagtgacttgaacctgctcaggagagagaactttttcctttttaagtatttcttttaaaaattatttttctctgtagatttgaatacttattagtccttatatagtaggttcttggttaacgttaacccagttttacagatcccctaaatttgttcatttttttcagcttaacttttagttaatagatttatcagtagagttttgataatgaatgtgtgctaaaacaaatataatgtactattgtagttgcacatattgaagttttaaatttacagttttaaaatgcttattcaaatagtcttctttctaacagcaaacatatattgatttaactgacacagcagcttgtgaataatgtgacagtactaattattcttgagattgtcaacgagcagggtgggtaattataatgctattaaggctaatattttgtaaaataagagttgggattttaaaaaaactttttcaattcatttccttgtgattgctattttaaatgaagacgatattttgttctgaaagaagtctttctcagagcactcagatttgtttataattattcctcctctccccaaactgggttccatgcaaatctctaatact

SEQ ID NO: 132231 - DNA, 1037 bp, Homo sapiens
tattgtttaatactgtaattagttacaaaagaacccagaaaccttttaacccatagttattgcttgtaggattttttttagccattttttaaagctgcatagatgcatcttcacatatgttgcatgtatgtttcagaaataaattatttgctaagaagtcacagaaaagacccagtattggaccactctaacagttatcacctattatagtgcaaaacacactgtgtgatcaataaaaaaaggtacataaccaagctaaaattgggcagacatagttcctgaatgtaaaatgttcaacattatctattaatttagaatgttgtgttttaacttggattgtttttttctctccgatcagaatgattggaagagacatggaataacacatttgtatctgaactacttgaagaaaaatctgaagccctgatgatatatatagattgtgtatttcataagttactttaacacattcgtagtggtagatttctgtattatctattagagtgtttttgcctattcatatctactccatattcaaggactaataagttatttcattattatactttaaaaaagaaaggatgcatatgaaaagataaaatagtgctatgtgataggcttgcttctgaaaaatagtatgagagtttgaaaagtaatgtatgctgtggcaccttattgttgaatttgtggtgaatctttttatgagagaaatcacacctgttttaaattttttcatttgattatatcctattttcttcaattgagagagagatgtagagtcttgggttctcttatataaaatgaatggtttcatttgtaccaatatttattgagcacttatgtggaatactggataattttattactcgattgctaattccctttactagatctgaaattctgtggatatgtgataattatttaaaaatgataagagagtgataggggccaaggtaattcaaaactgaacataatttgccactattctctggagcaccctcaagcctccctatccccacctaaagtatgatttggtt

SEQ ID NO: 132232 - DNA, 1032 bp, Homo sapiens
gcctagctccctaattggcaaacctagggatttttcacccctgatggcgcgcccgttggctactcacacttacgggagagaatgagactgaattcacatggcatgggtgtatggccctctttgcgtctccagcctgcgataacattactagtttcgaaaataatggttattcatgagtcctgggtcattgactggatattagcttggactaaatcctcttcggcagatctccctggttgtttcatgtgcttgagtttgtgtattgtatatgattctgttattaaagctgccaagagtgtagaatttttggtaaaaataacctcaattacatgaagtttaagccaagaaaaagaggacatctggtccaagctcatcaattttcagaggaggcaacagattatttcattcattcactcatcattcatttgttcctttgctcactcattcaccattgtttcatgcctactatgtgttaaataaacaggggtagaattggctcttatcctcacagagctaaaggggatcaccagaatcatctgcctgagaatattgcctgaggcttgttaaaaatgcacattctggagctgctactgaatgcacaccacaaagttactgagttggaatttcagtgagatggagtcatctgcatctttaataaactctccaggtgattatttatatgaactaaaattgcaaactaaggctgaccacctttgatatagcggaggaagcaggcaatttaacagggccacactgtataataagggctcagcagaagaggagctcccaattcctgcctagggagttaggagagcagggtcagagttccctgaaggaaggggaatgaggatgcctgagcttgtcctgaaacgtaagtagaacttcaagaagcaaagaagcagaggaaaggtataacaggcagagaacacaacatgggcagagctgcctagagaaggaaagccacccaacaggctagctggagggttggaggtaatcccatctctgtctcctctgagtaatacttccatgacc

SEQ ID NO: 132233 - DNA, 1020 bp, Homo sapiens
aaatattagaatggttggatgaattttgcacttttattgacatgatatcatataaacaaagtattggttataaaggcaaggcactcaacatttcctctgcttccatctcattgtctaaaatgggaacatttgtttgaagtacctgcttacaggacaaaaatgtcagaaggctacttaagaagaaatttttatggtattctaatattaaggtaccatgtaggtagtgagtgtatgattccctgggcctttctctgatttcaaagtttgaatgtatagaattaggctgagtagatgcgaccccaaagactatattcttatgccctctaggagctttttcagcaacgttatctgtgtgttctttttttctcattgggtctgtcgtggattacagaaggttttccaaggcagcaggtcaagggtccccagagagcaagggctccacaaatatcccgagtgttggagaagaaatgaagggagccaaggggagtgaggacatttatcttctttctcctctgtcccttttcctttcccatcaaaatttgtattttcaaagactgtttagtgtagttggttgggggaattcataactaccattagtgattgagagctttaacctagacagggagtgtttgaatccctgggaagcacctaactgacccaagtaaacctcccactcctaggctgtgtggaagcgtatttttagcagggattcttcttatacttgctgttgtctttgtcatctgctttcccatgcccattccattcaccaggaagcagaatccctggattcagcaaaccttcctttattctaccctctgactttgcactccaaggctaagtgaaaccaaagaatcttctcagcaggaagaaagtgtgggttggccagggatgagccagtcccacagagagctgaggactgtaggtctctcttaagtactggggtgtatggaaataagaaagatatcacctcagtaaaagggctgtattttaattcttattaaagtaactaagatttcctta

SEQ ID NO: 132234 - DNA, 1043 bp, Homo sapiens
gtagaagtgatacttgaagagggttttgaagataaataccttattgggcaggccaagtgagtaaaggcattccaggcagaggggaagcaaagagcacaggtgagaacggaaatgacaccgtggcgtgtgtgtgcacagagggaagagtcaaagggatggctggagtacacaggttaaggtgtggagtagaggaggaagagaatggagaactcacaaggccagctcacgaagggttttgtgccatgctaactgtaacctatcgaatgaagaagtcagcccagtattttaggaaagtcaagtagagtgctgtgtagagactggaatgggagaggtaggaacattaagctctaactgttgggattatgttgggccacatgtacagaacaccacaacagtgacttattaaagagttcagttcactcaggtgcaactggttaataggggaatgatgtcaggataatgtgcaattgtgtttgttcacatacagtctttcctagacaaaagctggaatagcaagagaagagaacaaaaacgtcctcagcctagctgctgtccagacaggagccctttcagctctattttaataacatttgaaatgagcacagtcccagggggctccctcccagaggtgcacatccagccttgcgtggccttcagctcatggcagatcacacgccttcctgtgcactgggccctgctatcacttgttgtttcagtacctgtaagccagcctttccagtctattttgtgtgatttttaataaccacccaggagcctatagccacactgaactgcctgcctaaatttcctcttgatattttattactgctgtaattagaaggtatcaaagattttcagtggtctgacccaattttagatttctcaaagaccttatttttaatacacatttgtgcagaggacaagatttttcggggttcatttatcacgttacagcaaccgcaccaacaaccccagtgtgcagtttactcttctctcatgacaagatgtcttttttttttttgagatggagtctcactctgtca

SEQ ID NO: 132235 - DNA, 1728 bp, Homo sapiens
cacacgggaaagagccctacccgaaagaagttatctagttagaaagactaaaggtatatactatgttgtgcatgaagaactccagttcagggctgagcaagttcaccaaagcacactgagcaacacttgccattgctagatttcttaaaggtagtatgttgctgacacgctctcccactagcccatgataaagatgaacatttcagatgccctcaggaatcttcttcattcccccctcaccccaccactcatgattgctttccatctccgctagagaagtccttcttacctttgtgactttaagcaaattattttacctcgttgggcatttgtttttttcatccaaataagatggtgctccagtgccctttccaactaaaacattctataattgtatgaatttgtggactcaggatactccactggaaaacccagcaccaagatatgagacctatacacaagaccaacattaactacttctagaactagaaaatcagccacatgagtaaatgcttcactttcttttttaaatttaatttaagttaagtttaagttctgggatacatttgcaggatgtgccggtttgttacagaagtaaacatgtgccatggcggtttgctgtgcctatcaacccatcacctaagtattaagccccgcatgcattagctatttttcctgatgctctccctcccctgcacccactaacaggccccagtgtgtgctgttcccctccctgtgtccatgtgttctcattgttcagctcccacttataagtgagaacattcagtgtttggttttatgttcctgcattagtttgctgaggataatggcttccagctccatccatgtccctgcaaattacatgatctcattcctttttatgggtgcatagtatttcatggtgtatatgtaccacattttctttatccggtctatcttgatgggcatttggattgattccctgtttttgctattgtgaatagtgctgcaatgaacgtacacatgcatgtatctttatatgatttatattcatttgggtatataatggaattatatacccaaagtaatgggatttgggtacataatgggatttctgggtcaaatggtatttctggttctaggtctttgaggaatcaccacacggcttctacaattgtgtaactaatttacattccctccaataatataaaaaatgcctcactttctgttgagccttagtgtttatatctgaatagtcaaagaaggaaggagtcttaagattttctaagaactctatagacgttctaatacattgctgggaccacagtcttacacagctctcgaacacagggatacatgttaatgtcagggatgccttaaatgtacattcaatcgatcattccataaacatgtgttgatcacccggaaggcatcagactttcattgtattaagtactttgatattcctgacttctcaatttaaaattattcctaatccaccccgccctttgctgtctccatgtttttctccatagcattcatttcctctagcccagtagatacattgcttactaaatttcttcactgcctgtctccccttactaaaatatacgttccacaaagacagagatatgtgtcttttgttgctctatccctagtgcttagaacaatgccacacatttagtgctcaacaaagaccccttgaatgaataaatgtcaccatggactttagaaccttcagtgaaagtt

SEQ ID NO: 132236 - DNA, 1130 bp, Homo sapiens
catatcaaaaaccaactattaggatgcctataaaggaaaccatgttttaagtgccaaggaagtcatttggcctccaaaagccaaatcaaccatctttattttgtttccatattccaaacaaatccacctcatgttaagcccaagatgatgtcttcttagtccccttggattttcagtcaggaaagtgagtcatgacagtaacaagaaaggcttaagtgaaatagcatttctcttcttgcaacctctactttattacaatagcatgaagcaacaatggaagtcacactaactcatggtattattccaacttgttagtatgttcttgtcatatgctgtttctgaaacagcgagtcatatatagtcagaattctcaaagcaaaagcccacaagccattctagcctgagtcaagacatccacatattccaaagtgcttcctctctgacatagaataggctggtcaaaggattgcctctacttagtcttttaaaggcgcgatctagaaatcttcatggtcttttcctttcccacgtagcgacagtcaggagacttagctgctaagagattatctttctgcacgtgaagaactgtgttgattgctggtaaggagagtatggaggtgagcagaaacccagaggcaaagttcattggatgaaccttttgtgtttgtgtccttttctgagaaatagtctttggttgcttttctgtttagttagaaggagaaaaaatttctgttttactcatccttcccctcagagaacatcattaggctcattctcttgaatacatattctcccctcggagccagaagctgtgcaaatataatatccagctggacatttgcaccaagtgggcaaatgtatcatctacctgggcacaggaattggcaccaagttgagaaccaggtctgtggaaccatgttcagcagagtaattcttcagcagcaatgacctacatttgttcaatacttaccttctcgtagaactagataaggtgctggagatacgcaacagtagcaagtatctgagggtttttgccctttccatctataagagccaaacgcccttcactaattgtgtatttttaaaatatatgctgtttccttccattcatttctctagtcaaatgttga

SEQ ID NO: 132237 - DNA, 1386 bp, Homo sapiens
aaacataggtggttatgtctctttcctgtgaagagtaaagaaaaaaaaaactgttcctattcagggtgtttgtagccacagtgaaatttcatcttttttatacttgtatgggtactgaaaatcttaagaatagcaaagactctaaattaagggacattaatgaattataacttggatattacttgccatattttacagtaataagagagcatattgcaggcactgaatagagggtattgtggaatttattcattccacgcagctatcagcactgtcccagaatactggcttttatgctgtcttcctcaatattgtcatgggctgatctgccctgctcaggtgccccggccgtgactcaaaccattaacactgcctttacagcaggcattgattcatcagaagttgcagctgccttcttggagtcttattggagtcttagtttttctacctaaatttccaggctgctttttttttgccttgcttctagaactccctatttctagctgtgacctgggtttgctcctgagactccagtcccgttctctctagtgaacttagctgctcatgtcctgcttctactctcactacccatcagccctggatttcagagttgagtcttaccctggcgtttctactaacacctagtcctaccttaagaagtgaggggtctgtaagcttcactggaaccttttccttggggacgtagagaaagtccttttttctaccttctaggagtgagtggctgcagaaaggggaactcttcacgattaaaaagaaaatgtgataaagtctcatcaacgtgcataggaatttgctcctcaggctggttcacagggatgcctatgaagcatttctgagaagtggatgtacttcatgaaagatgcgatgcatcagctaccctacaagattttgcagttgggaaagtaatgatctaggattcatagttctggaggactaaggcagttcggagtcatagctatacaaaaagcaagaatggacaatattttgtgtcttttcttttgagacaggatcttgctttgccactcacgctagagtgcagtggcatgatcatagctcactgtaaccttgaacccctgggctcaagtcatcctcctgcctcagccttctgagtagctgagacttcaggtatgtgccaccacacctggctaatttatttttaaaattattttgtgtagagacaaggtcttgcccaggcttacgtcaaactcctggactcaagtgatcctcctgccttggtctcccaaagttctgagattacaagcatgaaccatggcagcggctcttttttcttaaattacgttactgaccacgttttgtacaatccctgtgatcatcgctttagccaatctatgctcaaatgtaaca

SEQ ID NO: 132238 - DNA, 1058 bp, Homo sapiens
acaaaaattacaagttgcatgcctttctgatttcaacatccttttgaacctcagctccccaactctgtccagcatagctagatagtgggacagattttggtaaaaggacatctaaatgaagtattaacattcccggagtgttctaaaaagttttgttgtgggttctggtttctaatatgttttagtctcttccaagagggtgaacactggctacattctcctgagatagaataattccagggcgctatgcatcctggaaaactgtgctcatatcttgattaggagactgccccgggacgctagttctgaggctaataagcaagagcccagtgagttactaagaaaggtctcactcttaacgtacgcaatagcctcttcttgagtaaaaaagaaaattaattttatgcaacaagagccattgtccttaggtcacctcatgtaattctgttacaagcctacggagttaatgttatcactccattttacagaggaaggttctgaagtcttgagaggttatcttaccaaaggccacatagcagtaggggcagagctgagatatgaacctgtatctatttgaccccgaagtctccatccttttcctcttgccatgtcgccacactatggtacacaaaaggaaaaagttgataaagagaaaatatatcccaaaaagtgggttggagaaaaaggaaaacaggagtgcatgttacggagtgataacagtgcttctacactgaatgttaataaaaataataatagaaatggcagcatgtgtttaacattgattatatatcaggtattggtgaaatgctttcttatctcatgttatccctaacaacagccttataaattaggtgccattattatccacatcttacaaagaaaactaaggtaaagaaatgttaaacaactttctcacagttgtctaatatttcatcagtaaggatacaaaaattcaactccacgtagtctgggtcttatattttatgatccatattgtggataggctattataagtggttactaatgttgtagtgtaattcatagggtagagacaattt

SEQ ID NO: 132239 - DNA, 1048 bp, Homo sapiens
cttaaatatcaatgttgcactgtgaatgttcttttcccagttatgatataatgcccatgatgaggttccatttgtccccagaacctttcgattgttacaaaccagacacttgataatttccataaaaatttaatatggttcaaatgttgccacagaaataacatatttctctctacattgtcttgtggcttcttgaaaaatttttttcattttcattttttaagccgaactctcatgaaatttgctacctcatttcaaggacctttttaagaatcagctgcttcctcatgacccaaatgttaaaaagcaacatattcctttaaaccaataagaaacgtgtatgtactgtccatttcagtaacccttgttttatacagatttcttcatcaaaaataagcagcgcaacaagccaggaagttgtatttatgagctagttaataggccgattttgtacaccagaataataaggaaaaacacagtaacttgaatctctttattatagtttaggaaaacatgacagaaagagtctgatattaattctacaaaaattttagtagttccagataatctggataaatgaggactgtaggccacttcagaatgccagatgaccggcacgcactcagtgagtgattgactcattgagaccaaagtgtcatagccttttctcccctcctactgccccagctaaacccagggtcggggaaactttgaagattgttgtaggaaatgcaagtgcaaatctatttagatacttggaacctttggaaactcagtttgggttacactgatttccctgaagttaagaggactctcaaattaaccagggacaaccctaaataattttccaatgaggctgttattactctgggtagaacctttgaaatgttataaaatcagatattaccttttagcaaaccaaaaggaaacacagtaactcctgagttcagtgccctgttaaggacaagcgggtgatttgactgcaacatgagtaaaattgcaaagcaagaatatatagagacatgttctctgttcccattgtggagtt

SEQ ID NO: 132240 - DNA, 1068 bp, Homo sapiens
tacaaataatgcatttgtttgcccagattgtctaggaaagaaattacattttggacttcctgttccatgaattatcaagagtcttctgtcaaaaaataatcaacacgattcatcttctcataatataaggactgtaatattacattgcttttgagtttttccaccattaaaaaatcttgtttatgactattttaatccctttactagcatcagtgaaacagagagggtcttgtttactgtcctctttaggaaatctctgagctaaagtagaaggatctgtgccagatatttgctggttatatgtgtgtaccagctctgaaaaccacccttaataattgttttcaaattatcttatgtgccagacttttgcatttaggcagagacgaaagctaacactaaattactgacttcctggttgtgtgtgaatgcagtgaacgttactcacttggaacatgaaatgactgtacaattctaaataaaatattttatcataggtagcatttgtccaccaagttgcaagatttgcccctgaaacaggaaataacagaattgatctaaagcccctcacctagcttccttccctgaaagtatactgtgaaaatgccactttttgaattttgctcagtttctggacagaggtgctggattgcctagctttcctgtcattaggagtgactgaaagcaaccatctggggcttctgacaagcttggtcatggaactcagaaacaagggacccaagttattttggtagcttcatacacagcaagctgagttcttcacagtggctgtatttggttgggaaaagaagatctccagaagaatcaaagagctatcctgggcttttggaatcttgagcccagctgaaggtgctgattactataaacaacaatcacttcatggtccatattcctgagatctctgctttcatgaaattgatcttgattacttcgtatcagttctgatcaagtcaccaagtggctatgtatctgatatgtgcaagaccaaaagaaggtctactttgagtggaaacattgggccttagtaaatcctttccgcagacctcttct

SEQ ID NO: 132241 - DNA, 1110 bp, Homo sapiens
aaatgcagaaacacaataaagtaccctatccagaggtcagctaggttccagaaaagtgccagaggtttgtattccaaaaagtcaaatcgcccaaggttactttgacagatacagcagtaatggctcttactaaacagggttctgaaggtgttagtaatacttttaggatgactttggacagtgttattcaatttttaaaacaccatgccctcttccaataagcacaaagcaaatctcagtcctttccctattcctgtgcccccctgggagtgtacttgttttgtacattactcttccaactgcccactccctctcctgttgagaatcttcttggctgctagtttagaatgggcttgtctccatcagccaagaagatttcatagggctagactcaccaaggtttgtgttacaaaaatgaaaggtatgtttctatattcacaatataagattatattgtttaatgtcctttttcaaactacattgcaaccccagaaattctaatcttttcccattccagctgcaaatccctgatttaggaggcttctctcccctcttcgcatgcctcttcctccaaatcccacacatcctccatgtgccttatcacgtttctagtcctatcacctttctttttctttttaatgttaacatttctggtgctttttgattcctgaatattcaccttttcttagctgatgacattaaaggacattttctcctacactaagacaatgaaattgcctgagcgaactgcatacttttacaactgagttcatttctttttcagctttgcaggcacagtgaaatgtgtaaatagggactttaattctccctcagctgcaattcatagtctttaacacttcctaggtggaaaaaaaaatatgaatgctgttcttttaaacttgtaatagtttcattgtatattccccatgtactctcagccctctgcattagggagcgattggtttttctgcgggcacaaatggtgctgattgacttttagaaaatagcagagtcctcatatgtctgtcattgggatagttttctgctcccagtcagttccccaattgcattaaaagcactaagcaatagagatttcaaatggggacagag

SEQ ID NO: 132242 - DNA, 1049 bp, Homo sapiens
ttcaataaatcttttcttttcttaccgagcagctctcattagtctttttaataatagcactagtggatatcaacctcagttctccaaaataaattaaatgtgtccattagggttgtaattatagcatcagatatgagtttattctgctacaaagagatggcaaggctgatagagccaagagctttcctctcggtccttacattttaaacattgcttggtgtataaaatgtggatctaatatctgggtggaggaggggtggcctagcaaggtcttttgtcatctgaactgacaatatttctcccggcttgggagttgtaagcattcggtatcgagtggtgtgaattctgcagatcctaagtgaaaactggtcatcaactagcagtatgcagttcagagcctgctgaacaaactgcataaacctcagagtaggagaacatgacagaaggctgcgttatctgaaattttagctaatttttttttaactagcaggagccatctgtcatgattattctgattcaagggctaaattgaacggaaggcattgctgggcgattaaacaagttctctcaaaatattttcatacctttctgtcttgtcagaagcttttttttttttccaccaaagatgtcatccgattgtggattttttttttttttttttttttttttttttttttttttttttttttttgcagggggaggatttctgtctcccatgccatagagaaaccttgtcactgtgttggcactaaggaatggggtgagatgcaagtaaatgggtgtgtcctatttgaagcttattcttcacttctggctcttgcagccttatggtgatgttactcttgggcctgattgagatgttctgaattcatccagatgttctaaattaattcattagaggtttcttcagagggtgtcagaggggagcatttcaagagtccttttcctactcatacttagaaaggggaaggagttactgagccggaaaaaaaaaataggcaatgggacagaagactgcatttggtggcaagaatctgccatcgctttct

SEQ ID NO: 132243 - DNA, 1041 bp, Homo sapiens
atgactatgactagattgcaagctgtttgagggtaggaagtagggcttactcgtggtaaatttagtgcctggcacagtgcatgacataaaattaacacacgggaaatgttggtttaactgagctgaaaacacagctcctggctacaaaaatctcacaggcaaaggaggggagacaatataaatagaaaaattggcatatagctttgtgaaagtacagaggagagagtgaccatcagaataatcagggaagactccactgaggagctggcattttgctgattttggaagtgtaggaactggccagattgagacaggaggagcacatgcctggcagaggaagctgcaggtacatagctcagctatgggcttgggcatctgataattcagtgtgtcactagaatgcaggtgagcggcagggaggaagctgcaaaggtaactggagggctgatggggaagattctagtttgccttgctggaagttagattttgtcctgtaagcagcagggggccactagaagcttttaggcagaggactaagaaaataaccttttctttttctttaaacgagctttgggtgtagatattttctaccctctggtagataaatgtattttacctaccagagtgaatataacatatattttttaagtaagaataataaataaaataacactgatgaatccaacatccaatttcagagacagatgattcttgatctgttagaatctctgtgtctctttcctctccctcctctccttagaagacattactactttaattttcattttgtattaagaattttcttgcttttccttaaagttttaccacacatataggcatccttaaaaatacattgtttggttttgcctgcttttgaagtgtatataataggatcctactaaatatatttcttctgtgatttcctttcatcactcagcattgttttcaagagttatccatgttgatgtgtgaatctacgtatggatcattgattttttacagctttggaatatttgtcaagtaattataccaaattttatt

SEQ ID NO: 132244 - DNA, 1118 bp, Homo sapiens
attgctgctgtaacaaattatcacacatttagtggcttcaaataacacaaatttattgtcttaacatatctggagatcaggagtcggaaatgaattttactggacttactggatgaaagtcagaaggttccttctggaggctctgaaggaagaatctgtttccttgactttttcagcttctagaggccgcctgcattccttggcttgtgacctcttactcatgtcactccaacctcttgcttccattgtcacatctcctactactcaatgatcttcctatctttgtcttataaagacccttgtggttgaattgggctcacccaaataatctgggataatgataatctgtccatatcagaaatccttaatttaatcacagctgccacgtactttttaccatgtaatgcaacatatccacagagtctgggcataggaagtggacgttattagaggggccactgtttatagtatcacagtgggactagtgagaaccacccaggcaggccagaataagatgtatatgggagaatgctagtattaatacatttgtcccaccaaaggatagagaccagtttgggaacaatgaagatgtatccagatggcataaccacattgtacagatgatcattacttgctgtcctgtatttggtttattgaaagctggtatctgcaaaatgcatcattgaaagtattccttggcatgtcatattcataaatggcagatatgatgactgactgcttacttagatgcctgaagctacttagaaattaaaaattttaagagaaggcttaatttgaaatcttccttgggaatttttttccttttaaagaaaatgaacagtaagtaaacacgtttacaaacacagctttacgtgggagagaccaaaaaggaatactttcattaacattttccattaatacaacttgtcttgtgttattgtttgatattgtgtggtataatgaacctgaattttaattggttgcctaaatttatttgtctctggaaattctatgagaataattaaaatacacccattaagataaacatttggtgctttttccttaggtaaactttagtctttgacaggcatatacaatttatagccttaaaaaataat

SEQ ID NO: 132245 - DNA, 1987 bp, Homo sapiens
tcagggccactaaacaaatataattttagggcctactctgagctaagcaggatgtattgctgggactgtggaaatgaacctcagggatcttatagcatccctctgagctgtgtaaaaactaggccaagcccactctcagccactctcaggccttttatggtcaacaaatatttcaggtactgggaacatttgttagataagtttagatagaatctaagaaactgtggaattaaggcctttcttcaggccagggggagcttaggtgcagagggagtgtggatatgcaaccctggtgtacacagagaagcacactgacagaagactggcttttgggctcaagggcccaagctatctggagtgataagagactggagtaaccccccccccccaacgcccacccacccccgcccgacctgccatgggtatttggaggtaagcaatagtcttacgaatgtctgtgattgctacccaagtcctgatccttccaaagcaagagagcacatatgtacttcttgatttatgtgctccagatacactttcttttgtaattacatttgtgtgtgtgatctttcctttatgtatttcttatgtgtgtatgtgtgcccatgtgtgcctacaaaaattggtatatttcatcagtttctttttcagagtatctgaaattctaccatcagatgtggattattttggtgtctttaggcttttttcttaaattgttgatgaatccccattgaaattccagctatccctgagatggttagtaccatatttcttttttagctgacattttagcaaagattgatacatctcttccctgtggcagaaaatggagaggaagacattcagaaagagggatgtatctggtaccagggtaaggaaggggaccttgaaccaggaagagggagagggataaagagagctttggacttcatttccctcttcagcctgaggtgtgggggcagagaaagatggggtaaaagctcagatctctactgtccaatcagaaggaaggcagccagggctttttgctacttttcctaatcctgatgtcccccctattttaggggcttctgaggctgggcagcaccaagcaggctcaagcacggctgaaccaagcactgtgaccctgttgggtgtttggatgtgcagtgggtatcctgggcttctctcctattagtcttttcttctagaaagatgagttgaattcttggtctccaggcttattccttgtaaacaagaatttccgtgtcagtctcagtaatgcttagatcaccaatatatcatcacttcattttggccaacagcaaaatacctcaatgacattgtgccttggctgtaatctttgcttcttccctagacagcttgcatccaggactttatgaaacatctgtcaccttgtagcattgctgagtacagcagcaccgtaggagtttttgatagaaccgttccttcatccttacatttagcttttaccattacggaaatctaataataaactcttagctgtacatattggtctttagaagaaagagcagggtagttttagaacaagccagcttggattttaaatctaagctgtatccatttcctgttaaataaacttaggcaagtctttaagacccctaaacctcagtgttttcatctagtgcatggagatgacagtgctctgttcataagattggtctgagtacttaatgcatataaagggctaggtgtttggtcgtcaaggaacatacctgcattccctgtccttcctgcacccctcaccagcaaaccatcctaggtcctcaagtgttcctcaactcagtgatgtgctcggggcacgacttcaattaaataatggcatgtttttatcatctggcctgcagctaaattatattcttgactagtttacccatttactctattttttaaaaatttcatatgtatggttgtttgcgatttagaaatactctagtttttttttttttttttttttttttgagac

SEQ ID NO: 132246 - DNA, 1008 bp, Homo sapiens
cagcctggccaacatggcaaaaccccgtctctacttaaaatacaaaaattagctgggcgtggtggcgggcacctgtaatcccagctactctggaaaccgaggcaggagaattacttgaacccagaaggttgaggttgcagtgagctgagattgtgccgttgcactccagcctggatgataagagcaaaacactgtctcaaaaaaaaaaaaaaaaaaaaaaaagaaaaagaaaaaaaagaaaccagagatatgtgaagatctaagatgtgaacaaatagaaggcaaagatcaagagagatggtggctagggtccaccggtccccacatttcctggcagctcataaaagaacatagtggttttcacaaaaatgtatggaagaatgtttttacacactagtccaacagaaacatgaatcacagtgtcctcaagaaattgcttgaatatctaaaaagcaccaaggaaaagtttatgtgcccagtgtcctttacaaaattattggaaggaagttagaaatgatcattgactgttttttttgtgtgtgtgggtctatttttttcccctgatacaggtaaaaaaagacatataaccatcaccgaaaagaatctggtttgctagatgttctatattggttcttcaaaatgtacattgactacttttaaccacactcttccaatacctaatagaaattcatcggtttgtttattcaccaggcatttattgatgttgctcatgccaggcattttggtgcctgctgtagagacatctgagctatggaaaacactgccccatacttgcattgtttgcagcctaatgagtaggtatgaagaggtaatgggatggtggtttagcccctatacttaagaaatttctctgaatagcacatagaaaagttagaaggggttttgttgtatgttttacatttttttctttcttcccatgatgtttgttttacgggaaggctttctgcaaacggaagaaagatctcagtgcctctaatacctccccct

SEQ ID NO: 132247 - DNA, 1902 bp, Homo sapiens
aacacaggatctttcttttctagtcagggaaaactggtctcattagcttgtccccatttatattctttccctccattgcagtgattcccaaggggcatggatcagaatcactggggaaactttctttttccaagtgtgtatacctgccttccaggggattgggcatcactgacaaagctgttcctaagggactatcatatctcagagtttaggtggaacgcagttgagaaccattgctcctttgatttggaaactactctgtgtcaccctccgcagcttttcccttcttgaaacccactaaccccagtcaagatcccagtgatagccaagaacctgtgaagccccttaccttttcttctgtttaacagggttaatttaattccaaagatgataaacaatgacttgaaaagtacaccccaagtgttcctttagtttatgggaaacaaccagcaagagaagtaattcatcttgctttcttccttagtgacttctctttcagctgtgggttctggggacagatatgtgcatccctgccccgaggctgccagagccagtcctgtgtaaccaaggagagaggataaagaagcagagcctagaagttatttctaaacctcaccctaattgctcattttatattcagttctcctcctgtgaggatgtgacaaaggcctagcaagcagtcaagttgatttcagttttcctacctcctttcctttcttcctgccttccttttcagatgactttataattgtgattcctttatcggaagagttttgtctctctttcaatccaagattcgaaaatgcacgtgtttatgaggattatcacagcactgagatgtagttgtgttttattagaagtaggttccccagtaaggggctgggccttgggacaaggcctgcccccttggctggtagggaagttgccatattaaaaagacattagtttcaatcagcgtggtcaattcatctcacagtcctgctgcccatattccaattacatactgaactgactgacctttgcaatcacacagcttctgctgaattcttttcatcagagacttagtgcccgtccttcaatattgttgaaaaactaccactttggaagcatgtatttttaggaggggtatatcccctgcacattcttggatttctctaccaacactctgataccaggctatgcatcctgggttctatctttgtctgtgactcttctcctcctgaaaatccccacaaacttaactgtgtgtctaaaccctcgccacctttcacagcctctctctgatcatctctactctgggaagacttctaagactacttctgctcaaagagagatgtctcccttctccagttgcttatgtttgcctggtttctatccctcatgtgacatttgtatactgccttgtattacgcgcgctcatgtgtgtgtgtgtgtgcacgcaagcttccacagattgccaacttcttggacagtgtatcttttgtctactttgtatcttttgcattcagcacccaaattacatcttgtgttggttgaagaaggacatgctgcttgctattcctgctgcagagtatagactagtcaatgaacagttaaaccactctgactaattatagttatttgtctagaactaaaccagcatctctcttcacctaagaaaatgcctagccaacgtacagagtcatatacaaagccagtctgtagtaagaactgacctttgcagatatctgggtggcagtgtggtgggaagaagtctagaaaaatgtagtggtttctgaaagagaaaggtttgcagagaataaaggccaaactgcccttctcagaagcactcaggaccagatgacaggcacatgatggccgattgaatggttgttcctggacattgaaagcattttgcaatgt

SEQ ID NO: 132248 - DNA, 1020 bp, Homo sapiens
tcaaatgttagagatatgttgtgcccgataaactgaaaaaactattgctttgtgaattcccctggtgaagcccagctggtcacatgctggaaaaatttcaggaagcttggcaagtgtttttgcagcttgtttctgacagaatacctggatacttcttagagctagctcaaggaaagtctctaagccccaaggtatcccaggaggaacggtggcagtaacctcattctgttaagtgcaatgttatattaattgaaaatgaggttctaccagtgttcaactgttgaataggaaagctgactaatgtacaatggatgcttatatttgtaaagcacaaaataaagagaatttacccaagccttgaagttaccacatatcaagcagatatgaagctacagattgccgtattctgtgatgatttgctgtgtataggatacaatcttgtctctacctgatggtggcattaacttattaaactaaacattagttagctaagtttgattaggataggttttgcaaaggaccatgagaaatctcttattcagttgcatcaaaaccacatataaaatgttataaatcatttaaaaatgaatatgaattattgattcaggtttgttctttgatagcccacattatgtggtttgaaccatcctccaaagttggtttttatctctaatgtagtgtcatatagtgtgtatacacatatacatatacatatacatatacatgtacagatattatagcatactatagtatatacactttgtatgatgtagtaaaatgctgaggtgacagtttcagagactttctgagctctttgagggacttatccaagaactgcagatgctcagttcctgttagtcttgaacaagtcctgcatctgaactgtgtctttttcaatccctaagaccgactactttctctagcgcatagaagtctctgtgctgctctatttttggaactgtgtgcaggtggaagttgatttgtggtgagtgttactgtggctgtgatcaggagatacac

SEQ ID NO: 132249 - DNA, 1072 bp, Homo sapiens
ggacttaaactaaaaaggaaaatttgttcttgagtaccaggaacttagaatctaaaacagataatgcagatagctcaaaccatgtgtagcactgggtaaggactggccacttaaaaaaatttttaagtatatttttaaaaaagatttgatcactggagttcaatatgtaaatgcgtacaaacctatataatttgttttcaaatatgttgaagttttatctgtgtatagtaaattacattcttttagagagagaatgcaatgggatttgcagctgtgtacctccgtgaaatcaccaccataaacaagacaacagagagagcatttttatcacctccaaagttgcctcatgtctcttttttatccagtcttctttcagcccctggccccagacagccgctgatctgggttttgtcactgtagattagtttgcattttctagaataaatggtatcatatagtgtatactttcttgtgtctggtttctttcactaccgtaatcaccttgggatattcatccatgttgttgcatgtatcagtagctcatttctttaccttgtggaatactgtttcactgggtggatgcatactgtattttgtttatccacttccctgtgggaccgtttccagtttttgactattgtgaataagaagtccatgaacacttgtttacaagtctcactgtggacagatgtttgcatttctctggggcaaattactaggaatgagatggctgggtcatagggtaggcttatgtttaactttttagggaatcaggacagggcatttttgctaaatccagccaccaagcagtgcatacatatttgcattttagaaagtttaatattttttgcataaatggatagaaccaggttggggactggataaggatttttccattaaaaacgcatgctgaaaatgtgcttttataaaatatgctcttaaaaagggggaaaacctaaaatatgaatggagtgaattataatcatcaaggtatcaaaccaagcgcaggacctgagatgtaagctgtagcatttcctagccatgcagtgtgcatcagctgcttaatctctct

SEQ ID NO: 132250 - DNA, 1402 bp, Homo sapiens
accatgatttaaatactgttagtatatttcttacccctgaattcttatgaatattttcttttgagttgataataagacctctgtggcctatcctctgtccttaaaatttttaataattatgtgagactcatgattaattctatcatgtgatctaaaacatgggccaggccaggcacagtggctcacacctgtaatcccagcattttgggaggctgagacgggcggatcacaaggtcaggagacgcagaccctcctggcaaacatggtgaaaccccgtctctactaaaaatacaaaaattagccaggcatggtggtgggtgcctgtaatcccagctactcgggaggctgaggcaggagaatcgcttgcaccagggagtcggaggttgcggtgagccaagatcacgccaccccactccagcctggccacagagggagactcagtctcaaaaaacaaacaagcaaacaaataaaccaaccaagggtcaaagcgttgtatatatggtctgatatctagaggctttatttttccgtccatccatttgctcatcctttatttcagcacatgtttatttgagtacgttcttttcttttcttttttttttgagacggagtctcactgttgcctaggttggagtgcagtgccgccatcttggctcactgcaacgtctgcctcctggattcaagtgattctcctgcctcagcctcccgagtagcgaggattacaggtgtgcaccaccacgcttggctaattttttgtatttttagtagagatgggggtctcgccattttgaccaggctggtctcgaactcctgacctcaaggtgatctgcccgcttcggcctcccaaagtgctgggattacaggcatgagccaccgtgcctagccttgagtatgttctattactcctcactgtgcttaagtgctagggatcgagtgatgaacacgacaggcatgattactgccctgtggagattactgaactgtaggggagatggataccaatctaagaatcacagatctaaattggtcatatctgtgataaacaggaggaagcaatctaatcggtgaagttgggaaagattgtgacaattgagctgttatacagaagaagaagaattaagtaaatcttgcctgtaatcttaaaagtcctggcctctgtctttgccctgtgaatcggtacagttttatcagcaatcaggaagagcagacctcctcccatgcactccctatgttatgcgaggcaacctatctatcatacactctgagcttcccaccagtaaatcattgtgaaaaacaggagaaatgaagagactgagtttcctgggcttcatttagttctgccctaattagatttaagcagtggccacatggagcagccccatctgtgtctgctaccttggct

SEQ ID NO: 132251 - DNA, 1039 bp, Homo sapiens
atgagtcctccaaacggctttcctgaagttcctcctggtatatcacccacagttcttctcacacctctgttctatgaacaactagtaatcactatggtgggaattaatttgggagtcaaagttcaaggaaaaaattctcaggtaatgcgccgtttgctgggcacctatttagtaggtgagtctcagggcttaaggctgcaggtcttcacagtagcctctctgtttttcctctagcactcttggagtctcagggagaaaactgttttctggtttgagtcttatatcctcccattttggctactgatagaaaccgttaccaatttgggctgagttctctacttctttcacaacaggagtcttgctttcaattcaagttgtcaatcatttttcaaaaacccactctttatttatacatctgtttatttatatcctatcttgttctacagaaattaaggggagcagagaatagtaaaactacaagtataaagtagaaaataaagattagagaggattgaaattagagtagggcaaggcctgagagaaaaaaaaaagagatttgatttctgtgttcttagccagaaaaaataaaacaaacaacaaaaacaaaatgtaaaacgcagtgcatcccagaatttttgttgctggtgaggagttaaaaaagtcttcaaacggtaaaggaaaatcctcacttggggcttttttcagatggtaattccctgtgaaaagcactgaggtcttaaagatgaccttgaatctttcagcctagcaaggaatcaggcaaactgaaacctacagagtaaactccaggcggctcaaggccaagtcatctggtataggagcatgtaggaaagaaggattcattgtgacagagggatgtgggcaggcagcaggaggttccacctgagtgagccttgagtaaatggatagattttgactgcaagagtgaagacgggagcattccagtcccaggagatgaaggagcaatggtcagtgtcgtgggcttgcatttgagtggggcagggatacaatcgtttgggtc

SEQ ID NO: 132252 - DNA, 1198 bp, Homo sapiens
tttattctccctcctcaagtttgtaagagacggatgattcctattgttgtggcaagctgctcagctttacccaacggttcatagtgagagaagacatggggagggcagttagttcctcagttggggaaattagactgccttggaggtcactgggggcaaaggtgatcagagttatgcggagcccagtctgtcatcttcatgatgtttctacagacagggatacttgaatgcacagtgttgaatgcatttaaaggctggatccacacatttaagaaatcaggattaaggaagctgtacagatgtaaactttgaagaaaacaatgaaaaaaagaatagtggagagctgaatacgtgtggccaaactatgtcacttaccaaagggccagtcatcatcttttataacatgctagcacagtggtttgcagaatgtattctcatgcctgctttcaggataaaaacgttaaagagacatgcctgggaaattccttttccttttaatcaggataaagtggcctgttgaggcctgggaaagtgtattggatttcacctttgatctcccatacgtcagtctctttacaagtggtcatttctctgaaaggtacaagctgggactatttggcattgagttccagaatggcctttatcatcttgatgacaatttttccaatttctttaacagtttattcagttgtaaaactacagtgactcatgtaattagaggtttccctctgtgtcaacagagaggatttttggaaccaacaagttggacaagtttcctaccacacttcaaaagaagtagttaatcatgggataatatttttaggatgtcgaaactggaatatggctggctgctaatcatccccaaataaaactcttgattaattacaaataaattaatccaagagtgacaaaatttacttgggcctcattgaagttttaccaggttgcttcctccaagccaggtgaacaggaagaggggaaagatgttcttctccctcattaaagttccacttaaataaataaaaacaaaaacactctgaactcacaaagacagatgggctatcttgtaaaacattttatccaatgaagtgattttttttttcctttcctggattttgtatctcccctgaatgtgggcagctgaaaagtgtgtataaaatattcccaggaaaacaccaaagtgaaatttctccacagc

SEQ ID NO: 132253 - DNA, 1107 bp, Homo sapiens
tggccaaaatgcctgccttgcagatgtcctgtgtaatgaacaccttcttgatggtactcactccacataactatccttcactttcaaagtttagcatgcattagaatcacgaggtgggacaggattagaatgttgagaaagaaatctttctccttccctgggtctggagtgggtcctgatgttttgtatttcaaacaagtttccaagcagtgctgatgctgctggaccaggagaccacctttgagaaccactgttgatgaccttcacttcaactcttacctaaagaacaatgacccagttgacccagttgacagcaccacttgaagactgtggtagaacgatctactgaacacctcattccatcacctcttttcatctttttatagtgttttctccttttctccatcttttataactcactatccacttagttccactgaagaaactctgtctttatcgtccacattaatagttctccaaagtgctgggagttcccgttcagattttttccattccttctatatccttattgattgaatatttttcttcacttgcttgcattaaagattttaggaaaagacctaaaatctggttttgttgttcagattgtccttatttgtgatatactatcagcggggatgtcttccttttctatcgtaaatgtagcacgctgtaatagtttgttattgaaagagactttgggagttaatttaaaaacctaacagccattttcaaacaatgaattaataatttttgacagaaaacctttgtaactaggggactatatattcaatgtagcaggttttttgttttttgttttttttaccttgtgaagtaaaatgttttgtaattcagacatattatttaaaatgctttgaagtttgcaaaaccctttgaagaccaaggctgtgatttacatgtccccatttatatttttattaaaatcaccacccctccataaataaaggtattaatgggtaaatatttggccagttaagtaccaggactgtgtagggggctttcctgcagatgggcagaggatgtaatttcattaaacaggaggtctcagttaccctctgtttggaatccactgaagtaggacttctc

SEQ ID NO: 132254 - DNA, 1065 bp, Homo sapiens
tcaggaacagggatggacggaggcacccttgatttaaatgcacctggaatttagagtaatctgaggccagattctgcttagtcagactcgacatctgtagctacatttctcagaatagcccaggaaagagaaaatagaggctcttgccaactctattgatgtcaagaatgacaactccatatgctgagaagcaaggagccccagttgcactgttcattcttggttcaggatgcagaagtaatggaaaggagaaagatgaaaaaggcattgccttctttcattctccccttacccactggacaaggaaaagaggaaaatacaattttaaaaatcaagtaccataatcatgattttttaaaagctctagatatcaacgttagccagatccttgttaaatcccaggaaggctcatttgtagctgctgtgggaagacttgggagaccattatttggaccaatatcttccttttaacaaatggaatcttctgagccttgaaaacccaatgtggtaaagcatctcaaggggcaaaatgtggaaaactgacagtttctcaagtgttttgctcaagaacacacacatacacacacagagagagaccataaaatgaaacataacaaaaaaaaatccactctggattcaaaatgttctagtttgaccaacagcaatgtgctattactttttttttgttgagaaacagcacagttttataggagaaataattaggtcaagtttcaggaagaatgacaattagatctttaagctctgaatgtcaaggaggcagctttgtgactggtgtgacttgtgacctgctccgcactgatcagatctgtgtttgcctccttctctgtagactgccatttctgtacctgcagaacccgtaggccctgactgaagaattcactccagagcacatcctcctgtgactctcgccaaagtgtttgtaaccaaccgttaaattcagatggttcctctgagcttgggaaaatacgttttattgctctgtgccttttgagagcttggaaaggtggaggtcttgtggagttgtggaaacatctgtagagtacg

SEQ ID NO: 132255 - DNA, 1062 bp, Homo sapiens
tatgcgctaccagggctaccaaatgggctcacatgagttgaccaggttggccaggaaccttgggttccaggaggaaggatgcattcggaattcaacatgccttaaaagtaggggtaaggttctgattcaacatgtgtagaaagttgcaaggaaccttcacacctgccttaaaaatgagagtaaaaaacaaaatcatagatttttttattttttgagctagtaggagagccagtctctctctttctctctctctctctctctctctctctctctctctctcacacacacacacacacacacacacaaataaagctgagtaagtgacaagccctttcaggagagaacaagctgaggcctgctttcatccctggcaaagtgctggcaagaggaggaatctatcattgtcagagtgagaagaaagtagcccaacttaactaatttggaatggccacatgttggctgtttagaataataaggatctccaaccacaaagcaatccctgcaccagtctccaggttattcccatggatgttcaagtgcagaaggatggtaggcagaaggccaagaataggctagaaaagccaatagtacttctctctaaggtatttgtggtttttccacaaagcaaggcaatggcctgttacaggctgagaacagggcaggagagctgagagaaatcccatcatggcactctggcagttttctgtagtcactgtctgaaggatgaaagcagagcagcagtgcagagatctccagaggtgccaaaaaccaggagtgtagtggagaacaaagagaatattttaatgacttaaaaagcagcctcctgtgctttaaagctgagagaaatattccctagtttggaaaactgacagcttagcataaagcatagagaaaaaatgtctgaaatctcgtctgtgctcagatctcaagacttgccaaaaggtcaaggcctgatcccaccctcaaaatatttaagccagtggtgatttgaatctgattaaagctgcagtaacactcagacctagatcaactatagattagatgactcagggtccccttcgt

SEQ ID NO: 132256 - DNA, 1055 bp, Homo sapiens
gtaagtgccttaacctagatcatacagcaaatatgtgatatggttgacactagtccctcaagcctcttaatcctaaacccagtattcattctatctctgccttggatattttgtatgattaaagctaagccttatatgtagcagcaactggggtacagaagcaaaacgagtttagaaccccttctttccttttctttccacctctctcccaatcccaccagtattttcaatatgggaaactgacagtcggtcctcaaggaacaccttatacaacatcatgaagattttcattatgaaatgcctttctctcctaaattagtcgctaaggcacaggggtaatgtatcattttaatatgactgtgcatttgttgagctcctttgcgtcaaagaacgcacagtcctttacagacattaactttcacaacctatgtacttagtgtgatttggcaaggaagtaattcagtcttcatattgtggtaatgaaattgtgtccaggaaagatgctgggacagcctgaaatcttgggtaaatgaagtgaggacaaggaggatgaggagtcctgccaccttccccattttttatgctcccttttgccatgtgacttaaagaagctcagatctcctaggcagaggaagctgtctcaggacaccctgaacactgataaaccaggaggagcacggtaacatgtgcattgacagttctcatttctcacttgtggcattcttgcataattcttcagggagtatgtgcagtacaagcttgcagaaagaatatcatactgctttttttctttagaaacatttcaggacgtcatgttgttggctatcatgaagcttttgataattcagatattttgctgaactttcatttgtacccgagactctaaaaaagtatcaacatctcatttttacactaaactgtgttaatatatatcctttgtagttcagtctttataagtgtccaattaaaccattttatggctatttatatgaggttccaagtctagaatggaaagtcctcctttttattctcttcttatgttgtgatgtaatgtt

SEQ ID NO: 132257 - DNA, 1028 bp, Homo sapiens
tacttttataatttttcttcacctatctttattccttgtagaatttatttttatgtactgtataatacaaggtatgaatctagattttttcctcagtaaataggttttctcagcataattaaatacggtctatcattttcctattgagacaatatgatacctttagcataaactatattttaatgttgccttattctattacttgattctttcctctgtttcagtggtctacttgtcaactattgagcttctacatttcagagttgaaaaaaaaagtctttgaaatatatttgacatctggaacaggaccttttctgtttcgctaaacaggaaattttgtgatctgttcttctttacttatgatttcacttttttcagtaggtgtattattgaatattgggaactcacacacgtacactgaatgagatgagatcccattataccttcactttttaattagttggtagtgtgtagaggttatttttctatgatgattttgtgtctgaccaacctactgaactctcatctgccttaatttttctcaatttattttctaagatgttctaggtaatcctttctaatatttgtctcattcgttttcttgtttgtcttatttaggaccttttatacattattgagttctagtagtgagttaatagcaaatatgcagtacttctgattttagtgaatatgcttttaatacaacaccatttttttttttttaaatcatgaacttgcatggctcttaccaagggctttaaaagctctattgagacaatcacctggttggttttcttattctgttaatgcgctaaattacatgaatagatttttcagatgtttaataatcattcattcctagggtaagccactcttggtggtaggatgtggtttcaatcttgttatgctttcctgaactgacaggccaagcatatcatcccctttgcagtatggtttgttacatacccataaaaagtctcttccatattgagttatccatcatattacatgttttataaaaggtaaat

SEQ ID NO: 132258 - DNA, 1096 bp, Homo sapiens
aggctggagtgcagaggcttgagctcagctcacggcaacctccacctccctggctcaagccatcctcccacctcaacctcccaagtagctaggactacaggcatgtgcttccatgcatggctaatttttatattttcttgatagagacagggttttgccatgttgcccaagctcgtctcaaactcctgggttcaagccattccctcgccttgacctcccaaaatgctgagattgcaggtgtgagcccctgtgcccagccaaaaaatttaacattatgaaaagaaagtcacattatatttttaggaaaaataagacaggctatgaagtggcatcacagaaacattcattttttagtacatatttaaattcacatttttaaagaaagactggaggatgtgtactacagataaatatccaacatatggttggtggctattttgaggtggagagataatggtcaatgttcttttttatctacttatttgtattttaaatatagtttacaatttacagttcattagaatatactaattatagtacattttccttttgtaagaaagaaaaattaatgtggtactcagaacaaaactttaggtatgggagcataggaatcggtcataggagataacactacaggtatgcgttgatgaatgcatagtataataggatcacagtttcccttcctctgagaaacatagttttagtaagacaacctaagatggcattctttttcttttgcaattatgttactccgtggtaaatttataatcatttaaaatttaatatttttttcacatggagattatagttcttatgggatagtagatggaactcattaatcaagtcttcctacactctacagatttaaaatgtattgtttaatcaacttgttgggctataatttacattaaatagagtgtaaatattttacattttaaatataaagttccatgaaatttgaccaatgtgtacccttgtgaaaccaccaccacagtcaatatatggaacatttccatcacctcacaaagtactaattttttcttcgtgaggtgttcctttgcagtcaatccttctgttggctctgggcctaaggagc

SEQ ID NO: 132259 - DNA, 1014 bp, Homo sapiens
tgttctggaagtgaaacctagttcattcttctgattggaataagttgtggaaagggtgcacttttggtgcaagatggcatgagatacagtgactcattaacaggaaagagttatctttccatcatgacccaactttgataagaaaagccaaaaagaagcttgagatctacaactatgtcaagccggcagtgcttataagattaaactttttttgaaaccagctaattggaaacagtttaaaaacaaacagctttctgaatcttaatcaggaatatagtaggtataattattggtggttacatgtattaccctagaaaaataatttctaaattataagattgtttagctaacgtgttctacccaggagacttgaatctagactgagttttgggatattttgtttagaacaactagtagcaataatagacactgacaaatgataacagctttatatggtttatacagaataataaatatcccactatgctcatgaaagaacaaaattaagtaagaacagctgcatttggacatttaattttggaccccagagagaaaagacttttcatagtttgagacacactgtagggaagctgtgctataccccagagagtaacatcttccattgaagtcaagtttacaaagcactgtcccatgcataatctcactggactctcacagtaatccgttgcagtagaaaagatggttgcaatttttatttccattttaaggcgaggaaacagctcaagtgattttatgtaaggtcatacaccagtaagtactgggttgtgaaccaggacccagggttgttggtttccttggccagtacttttttctgttccaccgcagccttccgtgaagatgctgtgatttatgtttccttcatttcatactctgctgttttccaggggcccccagcccagttccttcctccattcacaccagggctggctattatattacataactccagcagtgccatttattttgtgttccctgatattgtacaacgagagg

SEQ ID NO: 132260 - DNA, 2406 bp, Homo sapiens
gccatcagtgagtaataggggttgccaaaaaggaaaaataaagtccattgtgttccaaaggaatgatgctgccaagtgtcttgacaggctcctgctgcacttgtcaaacagctgtgcctgggagtgaaattatgaagttggattctcacttagccaagattagaataggcttaattgaaggtgtctccaatgggggataatttcaaattcttaagtacagaatccatgcatttctaaaaaacatcctactgaccatctctaaatcactttgttttgtttctgccttcattttcactcagataggtatgatatgaaatttaaaagaggaaaggaaataaaattgtcttcataaggaaaaattctaaggttattaacataattatttcacttatagatattttagatctttaaatatttggcttacattttaatactgaattgttcatctaattataggtgtgcatgttctcttggtctccaaatgtgactttcaggtgcaaaacagcaaggcctctaacaactatctctatttcactcatttgactatttattaagcaactatttcatgccagtctctcttctaagcactggggatccagcagggaacagatcagacccctgactcccatccttctggagcttacactctggagggggaagataataaataatgcagatacctgggggaggaaagttccaggcagagagaatagcaagtgcaaaggcctcaaggcaggagtgttggccaagtgtgttctagaaacatcaaggagtccaaggtggatggagtggagtgaagaggaagaagagaagagactgtgatggagaaatgggggctagattgtttaggaccttggaggccactgaaaggatgcttttgagtagaggagtgatagggtctgacttatgttttaatagaatccctaaatgctatgtggagaatagattgaaggggaacaaggagtggaagttggaagaccaaacctcttagaattgagggcactgccgtagccttctgtctggtctttctacttaatatccagtggtagaagttgggatagctggttggattctggctatctaaacataggtagacctgaattgcatatgaggtatagagacagaagtgtcagaggtaactttaaggtttggttcatgcacctggaaggaggggggttatctttaactgagatagggatgatcatgggagatttagggagggaagcagatcggttgattttggacttgttaagtttgaggagccttttagacattcaaatagtgaatctggagatcagatgagaagtctagactgatgccatttttgggaccacctatttctaggtaacatctaaaattatgagactgacttacctaatttaaagtgaaatgagtagagtcatgacaacattggtgcctaccctgtattccatcgttgagggacaggttggtggaaggtgagaagagtagaagaaggagtgaatttctgtttaccaaacactgtgtatgtccttagtcttgcgttgctgtgttacccttactccaccttggatgtatcaaggagaattgcaaggggccattgaaagcaacaaggtggaattgaagaggttgttccaagttagcctgccatcaatatacttgtgtttatgcttccagaccagaatatagtcaaacagaaaacaagagggacctcttccaagagaatacattgatttccaccctcatggtcttatgctcttaaaattggtaggcattaaaaacagtatccatacatctgagttcctacagaactcagcagtgtgtaagcagacactctgagaaacggtattgtgttagttctaccatgagggtgacatggggatgacagagtccaggaacagactggaagacttcttggtcattgtgtgttgagaggattcaaacagcaattggtagtttttttctgtctttccaacagtgagattataaggttatatcttttaataagttaatctctcagtgaatttggtggtatctcgtgttccctgaatgtatcttctcagttgccgggcttctccttagagtgcctgctctggtaatgtctccatggtattgatgagaaacaatatgaaatggctactggctggaaggtcttatgggttgtactcaggttcacattctaaatgttcaaggctcctgtgctgttcttgaccaacgaagcctaatgagtctgtaaaaataattttaattttaagattacacaattatatttcttcttactgtagaaacagctaaatgaaaaaccttttgtgtactatgtgttgaatttgtttactgtgattatgatagctagggaacaaaactttgtgttttagcttttggaaaattttatgatgttcatgtctatggcaataaaacttcattggc

SEQ ID NO: 132261 - DNA, 1299 bp, Homo sapiens
ttttcataaatgatctgattaagggaatgtatgtcgaacctttggagatttgtttgtatatagattctaaaatgtgtttttctcagttctttcagactgcaccagtgtggaaaatttgtttggcaatatattagaaacaccctttgtgacctttggaatatttcttgattaccttttctttgagtggtcgtgttgtcattttagggtccagatagaatttgaatgtgtagagtgaaagaccaaacacatttatttttccaaaaagaagcggtcgtctgattctctttgatctttcagaaatgttttcttcaagttctgagtagaatgatttgggaaagagatgtttatttttttttccaggtagatttattagtttctactgtaattgctgagtcagggcttctaagccatcaataagacaatgcttgttgtaaccctggacagtggatctgtggttggctagcccagagcctgagtagggaaggcttgattttacgtctgctttaactctgggaagccatgtgtccttcatccagaggggagaccaatctgtctaataggtgtcatcgctcatataggaggttggcatagataggggtttggtgagaaagtggaatgaaacctgtgtgtttttatttcacggcacagtatttattttccttttcttgggccacaggttctgagcttgagtagggagaatggttaatctgttagaaggagaattttgaataattttttaaatgattagtttaaaaagttgttgagaaattggaacatgatataaccagtttctgggcaggcaggagcaatatgcttgggtaaatatataccctaatgctctacaattagggtgagcatatactttatttttcaaattaggacacttttgagagtgaaagtgagtttgtctcactggaatgtcagtctaaatcaggattgtcctggaaaaaattagggtatataattaccttacccaaatagtatgtgtactgatgtgttcactcattgtgtgttgattcattcgtttgatcactgagtgcaagccatgtaccataccttacccgggggatacagaaataaatgagacattccctttgggagctcacaatctattggggtgacagttgtgtaaacagtaaaacaagggctgtgatatacagctatgcaaacttttaatgggaaaactaggggaagaagctctcaagtatgcctgtagagtttgggcaggcttgttagaggaggtaactgcatcctgaaagaagacagtaattcttacagagaaagtaaaggaggccattt

SEQ ID NO: 132262 - DNA, 1575 bp, Homo sapiens
aacgttgttggagagactaaattggtgtaaccactttggagatcaatgtggtaatacctagtaaggttgaagatgagtctatccaataaaactgtgtctaggtgcctaccctagagaagcttttgtatatggtggcaaggagacatgagaaaaggtgtttattgcttttgtttttcaaaaaagtataaataacgtaactgtccatagataagtcaataaaccgtggcttattcctaatgaaatactataaaggagtttaaaattaaaatacgcatatatatattacatatatatctattaacatggatacatttcaaaaaacactgttgagtgaaaaaaatatgtgcaaaagggtatatatagtattaatacaatttatgtatatttaaacacaaaccgggcaatattatatagttctggtagataaataattatgtgatatttatttagatttatgtagataaataaaatcatgggggcagggtaactagtaattttaggatagtggttacatctcaaaaggaaagaaataaaagagatgggatgtgagggttttactttctctttttttccagagagagaactgaaacagatattaccacctaatggtggtaatataggtgtcataggtgtctgttatagtatttggtatactttactgcctatttgaaatatttcataactataaggatatattttatctaaaaataaatgaaagccaattactatcacactccaatttctttccacccatatcatttttttagatgagaacaaagcctagagaaattgatctttccacgactgttatttagctgttccatacttagaacttctgaggctgtagttcttaaccctggctgacactggaatcatccgaagtacccgtacctgggtcccatcttcaaaatttgtgatgtaattggcctgggatgcagcttccaaggtgattctaatgagcagtcaaggttgagaacagtattataaaagttttccagttctaacattagtgctagataaataaaagcctaccctgttacttctgttaagatgcagggatgtagtgtttagtagagtacatctctacttattctcaatggcctgacagtaatctctacattattatcaatgtcctgacaatgattagggtagtttaatgttctcttgtaataaaattcagagacgagataagatattagaatgattggtagtggcagaaggctttcaactgagtgtccatttcacattcagagtctctttcttcacaattattagtcgaagtttgggaggagtcttgtgctgaaccatgtatacattgttgccacctccttgcctccttgatttggcagtggaactgacaaatttgtcaccctgttcccatttttaaaggtaagatagagtgttctctcttccaaacacaatgcagactttcagcttttaatagaaaatgatcttcaaaacacttttgctactatggacatttctgaagagttggtaaattactaaaatattgaattttctcttttatcaaatctgcctgatgtgattaaataaataaaattaacattaatatcc

SEQ ID NO: 132263 - DNA, 1090 bp, Homo sapiens
gctactcagtgacggcttgcttacagtaagtggctgccactggtatcctccctcatgccaaatttcatgtcatgcatgagagaacgcattctcagaatctctgaccataactccctggacttatcagaaccctgggattcacatcattcaggattctgggtggcagaactgggggagggctgtgaatttattatttggttaacttactggaagaagagaatgggttcttttccttttaccccgacaactccacccttgtgtagatctctttcttattgcttctgtggaaagcccaaccagctgctctctttccaggcctggcctcgattgcagagacattcccacccagtggcaaagggcttgagaagtaaaggcctctgtagacagacaggcagacctcagctagtcagaaaccgggatatgccaatattacattttaaaatacccgactccattcactgctatctattaactatagtactttctaggtgctgaatctctttattttgaccttctgagcttagaccaactgcaaccttggtaaatctcagaattatcaaaatatttgagcattatcagctataactgttgaattctattaagtttttctgagatggtaaggtcacaggtcagaacaagtcatggagtctctgaatttgtccctttcccaaacccctgtttcatgttcctaaaaggacaacatgaagtataaacccaaacaatagatgtacactaatcatccctaacaatatccatagtgaatggttccaacagagtgcaccctgagaacgtttgtactgtagatctttttaccatcaagttgaagactgtgcaatggttgggtaacggtgcccagtaagtgtgttctgaatgagcttgggcatgctctgtctgttggtgcttctcatgagaaaggctgtctgcctatctggggcagagtgagtagagggacccagggttctgttgctaggatcagaaacactgatgacttgccttcacgtacgactgaaagcagttgtgctagcaggttggggagtgctggtaagggaattgggggaacgtgggcctccgcttaaattttgtttatttt

SEQ ID NO: 132264 - DNA, 1041 bp, Homo sapiens
aatgtggtatttgtaccctatgtattttatgacttaattattctaagttgaaagaatttatatatttttttgtataccacattcgtcactggattcctggaacttttttaaaaaatcggtgaattggaaagtatctgtttgtatattttccttggcatgtccaagcaatattttttagctgaagttcacaggttatgttttaagtaggtataatacatgaaacctgtttactttgctgataacaaggacttaaatgcagcttattgtaatatgaagaaattcatgttattgctttatcttttgcattcttatagttacctttattctttgggggcaaactattattttaattgctttttctcctagagtgaggtctctgctgcaaaaggtttttacagtctgacctacttaactagactttcctaaagaggtctaaatatattgaaacatgagagtaaaaactgagatagaaatgtggaaattaagttttttttaaacaaatgggagtgtttcggttatttttctatatagaaatgcgtgtgtgcgtgcgtgcgtgtgtgtgtgtgtgtgtgttttaactgggtactcggactaggattcatgtcttctttagctaaaggcccaagaacataaatcatttgaagaaaagattttccagtattttccagtgttaaattttagatacagaacttttcaataacatgtatattgcttcagaaaaatcttactgggcatggtggcacatgcctgtagttccagctactccggaggctgtggtgggaggatcttttgatcccaggaggttgaggctgcagtgagctgtgtttgtgccactgcactctaggtgacagatcaagaccttgtttcaaaaacaaacatatatatgtgtgtgtgtgtgtgtgtgtgtgtgtgtgtgtgtgtgtgtatctatacacacacatatacatattatatatatagtaatacacttgcctttaattagaatgtgaacatctgaaatactttgttgaaatttacttatgccccacattgttccaagaa

SEQ ID NO: 132265 - DNA, 1424 bp, Homo sapiens
gcagccattgacactatgtaaatggacaaatattgtctgtgtttcagtacaactttatttattggcaccaagatttgaatttcatgtaattttcatgtgccacaaaatttgatttttcttttgatttttcaaagccgttttaaaatgtaaagaacattcttagcccatagggccatacaaaagtctcgcaggctatagttttgctgaccaagttctacctggttaccagaattagctaagtaaaatataagtctgaacatttcattcgaatgcttaaacccatcaaaggtttgccaacagggactacaagaataaggcttaccttacttaaaatggcttattgattccctcatgatcacaggtccagcatcatagcttgccagttcatagcttgcactgcactcttcagaatgctgacctccttgcagtatcctgtccacactgagatacttctttttgaggccttgacctcccttcctggagtgtctcccatttacctttatttttctctttctttatctctcttcctttcttcttcttctttttttttttttaaatattgtattagaattgttggtttatttgcttcactaagaggtttccctagtgagacacggaacaaccatgtctcgttctattctgtgttcttatcatttcacttcctgcccagggccctgctaaagtaggctcttcataaatatttgctgaatgcatgtatacatgcatgcatgcatgaatgaatggacaaatgaataagtggaatggaatagttaaatgagccaattttgatattttgctaataaccctgaccaagctgttggtgagttcacaggttgaaaccagtacaggcagttcttaacataggaatgtgttgagttccaaaagtttgtttggaaattggttgttcagaacttggaacatgttttcccatataaagatgttataaactaaactatgcttaactattcagcttagtccacaaaaatattatttgaggcatcatgtcactgaaataaaattagaaaataactgaggtgtcaccttttcattttattaaaatattttaagcccacatttcatctcaagaaactctaaaagacattttctggcactgtgtaatgttataaatgaaacaaaactgaatgctggtaaaggcttagtgtgggtaaagcagggagataaagagattgtgaaaattttatgggaaactgagtgtttttaagagcatcaattctttactatttttgttctacttcagaaattatcgttttctttgccatgctcaatgtttatcacaagaactccttttgagatcattggaaagattatggcccttttttgagaatcaaatgtaaagatatatagacacattttagagacctcctccaaaaaaaatcttcaccattcacttccaacctccttta

SEQ ID NO: 132266 - DNA, 1046 bp, Homo sapiens
atgttggccaggttggtctgaaactcttgacctgaggtgatttgcccacctcggcctcccaactgactccttctttttttttgagatggagctttgctttgtcacccaggcaagagtgcagtggtatgatcttggcacgctgcaacctccgccttccgggttcaagcaattcttctgcctcagcctcccgagtagctgggattacaggtgcctgccaccacgcccggctaattttttgtattttactagagacacggtttgagttgcccaggctggtctcaaactcctgagctcaggcagtctgcccgcctcggcctcccaaagtgctaggattacaggtgtgagccactgtgcccggcctgattccttcttgatacttgactctcttggtatcaactcccttccatcttggtgtgttcaacctccctggttctctgcatttttcttggactgtcatacgttagttccttggtgggctcctcttactctgcttgttaataagtattggtttccctaggatgcagccttttcttcctccccttgcttttttactggttcctttcatattctgtatcttctcagcttctgcctgcagatgtatgcatggagtctcttactctcagacctaatgagttcctgaaagtgtatcagatggttatatgtacaaaaaccaaagccaaatattttctagaaggcattgggatgtgtgtgtgaaagaatcgttataaaatcgctaactgtactcctctttttacatattatcttcaatcagaagatattttcaaaattgtgcacctgttttctttagtgcttttccttcatagtagatcattctttcatcagcttaaattcattggctatctgacattttagtaatctcttttttaagtaatttcaacttttatattagattcagaggacacatgcaggtttgttacctgggtatattgtgtgatgctgaggatggatcatgttaacgcaggtacctagcatatacccaacagtttttcaacccttgccccatttctctttccccactgtagtag

SEQ ID NO: 132267 - DNA, 1108 bp, Homo sapiens
gtctggtgttgtgtgctggcaattagtaacacagtgtctctttccttacagaaaaaggtgcgtgcaggatgggtgagatggtggcaaggcttgatagatctctttctgcactgagtgtgaatgaatttgggaccttttcagtgatgctgtcttaggagcctgctggaaaacccactgttgacagccatccagtgagaattatattgtttgcattttattaaagtggagccaagtggaccttgaacttacataaacaaatggagtccatggaaatgcatataaagattagggcacaagttcatgtattcggcacaatctggaatagtccagcaaacaggttattactggttacttaccatgtggtcaggatggagctagatgctggtggagtgtggatggtgcagatgctcaaggaatttagccttgttgagggcgcctgtttaatccgtaggaaatcacagcctaaccttgcaagacaggatttacttaagtggagaagagtgtggtacagattccaaatttatcaatatagtggaaactctgcgcagaggatggcccatggagctaaagctgtcagggaagcttcctagataagggagggtaggggtgtgtggaatttaccttggaagaaggaaaatggcagacattccaagttgggggacaagagaaagcccagaagtgggcaggcccatgacttgcttattggtgagaccataaggagactggctctagcaggtgaagctgcatcgaagcgtacagccagtggggcctgcaggtaccctgcttccttggacgagcaggataagcattgtatttctttccttattttgaagctctgtcatttcccagaaagccttgcttatttttaaactgaagacttaagttttctgcattgtagaattcccacataagaaaagagtcccagggcagctcactaaaatttgctcttaaaaaaaaaattgctgcttagcagtcataaatagcttgctggatatgaatttaagcaggccacatttgaaattctattctattctaattcagagcatgttgcacagccctgttttcggattggcaattcaaatgctttcccagataatgcagagggatg

SEQ ID NO: 132268 - DNA, 1023 bp, Homo sapiens
cttctactcattgcctctaacactatgccctatttagatggagtagcatccgttcctcacatgttctatctctcttgcctctaggcttctgtatctgctgtttcctctgcatggaaaactcttttcctttggcctcatccttgtttccatagttgccttttagacctcagctaaaagttagtttttcaggaatttctgatatcaaaatcaaggtgagaggcgccacctgtgtgccatgtgtgtcttccccaccatccctgcccctgttgtagcacacactgctgtattgttttgcctgcttatgtgtctgtaaccctcagccctgggactgcaagggaccacatttgccttgtttcctattttgtcctaagtatccagcacagtgcctggctcatacaaagatctcagaaaatcttttcttaatgaatgaatgggtttcgtgattgatccattgttaagatgtgagccactacaagtgtggctgtgaaatgaagctgaagacatcactgtggatcattagaggaagcacctagaactcagccattggggaaaaagagatgaaagtcagtccttgaagaaagcagatcaatgacccttgttatttgttcttatatttaatttttaaaaatcgaggtataatttacatatatcattcacccactcgatgcatatgatccagtgacttttggtaaatttaccaaattgtgcaaccatgaccataatccagttttagaatcccagtaagattcctctgcacatttacagttaatcctctttcccactcccagccccaggcaaccactaatctactttctgtctctatggatttgccttttctgggcatttcatacaattggaataacacagtttatggtctttgtgtctggcttctttcacttagaaaaatgttttcaaggtcaatccatgctgtagcatgtatcagtatttcattccttttttattgtcaaataacattctattgaatgagtatattacattttacttctccattcatcagttggt

SEQ ID NO: 132269 - DNA, 1032 bp, Homo sapiens
tctttttttttttttgagacagagtctcgctctgtcacccaggctgcagtgcagtggcgcaatctcagcttactgcaagctccgcctttctcactgcaagctcacgccattctcctgcctcaacctcttgagtagctcggactacaggcacccgccaccacgcccggctaatttttttgtatttttagtagaggcggggtttcaccatgttagccaggatggtctcgatttcctgacctcatgatctgcccacctcggcctcccaaagtgctgggattacaggtgtgagccaccgtgcctggcctcaacccacattttcttcttgcatgaaattaatttagaactaaggaataaaaactaccctggcatctatttaaatggaagaaaaagtcaaagttttttttttaaacaatcttctctgagtatatgtagtcaatttatgtggacctaattttctcaaacattaggaaggccgcaactggaccatcagcccaagcatcatggagtccagcatcaaaatgagagttatatttgaattaataatttcattagaatcagcttttttagttttaaattcttaaatgtctttccctatattgcttgaaccatttttgaaaacgatattgaaaactactgagtgtgcctttcttttaaaggcaggcaaacaccaaccaagtattgtcatactgttgaagaagacaaacattgaaagctggaacatgactttgtagtaccacaatgttatgaggaaactttgaagtggttaaattatatggacgtgttttcagaatctacagctttcagtaggtattggaaatggaagctgatgatgggaacattcattgcatgggaattgaatcatagaaagatgattctgtggaatagacccaggcgatagcattatagtgaagctccagggttttttgatggacatttggaaaatgaaagcagagcattgggaaattcaggaatcttttcttagtagagttgtaataagaccaaacagatttttttccttcaccataaatgata

SEQ ID NO: 132270 - DNA, 1041 bp, Homo sapiens
caaacacttgcctgcaaaattagtgatctgtgcacgcacttgacattagataatgacactgtgacttgaaacatttggcaaactccagtaccatggggttaagcaaagtcttggctgggtctatttatgtttattgtaggtggtgagtgttaagtgattcacaaaagaaagggtcaggtaaacacagggggatagggtaggccgattctaagcatctcattcttgcctgtccattttctaggtcctaagatgaatcagcatatggccttctggaagaactgagttatgagaaatctgatgcagagagaatttgttaaataagcaggtagtgggaggaactttggtagagagaatagtattttgtttggggttgcaataggagaagagaaagaggaaggtgtactttgctaccgtgtttagtgaagaagctgtggtacataatggcctatagctgtacagcacttagagcttacaaagtgatggaacactcatcatctcactgaccctggtggagaagagggagggaggaagggagtccagaggtgttactggcagcatgaatggtcaaaaccagataaatctggatgctcccttgaggtctgtggctaaacttcaactcaagagccaaagtagcttctccttccctttctggttctgtgcacaggcagctgatcgggtcccagcatgctttgcagagctgtacataggatggagcccagactcttaaataagtggcatgaagtcttcctggatttgccatacagatggatcccaaaataactattttgcatagaagatggagatatggtggcctgaaaggcaagatttttaggttcttgtctcaaactggggacaagttgtggcctctttctttcattggaggcacacggtgcttttctccaccatttctgctcctttgtaatgtgtttccatatgttatctttgcccctttctcttctggtataaccccctggtaaccaaaggcaagtattagattttccattccatacactggtagttctttattcagacattctttga

SEQ ID NO: 132271 - DNA, 1105 bp, Homo sapiens
tagcagaccacattaaagcatttatgttcctcgttaggttgcaggaatgagttttcttaatgccatcactgaattccaatggaggaaataaattactcatgcattttctaatggttaaaaaattttccagtgtcttggctgtctagttctcatcatgcagaggttccattaccaaagagtaattgtataattttgactagcaggtctatactacttagaaaatcaactaaataaaacatttgagtcacaggtcctaggccaaaattttaaagagcgaagtatatgagagtcaaccttttgcagttgtaggggaaaatgcaagacttagaagaaaaaaactggtctcatcttattaacttaccaactttgtatatataggcaagctccttaacgtctctgaggctcattttccttatctgtagaaatgaagacagccgtaataatgcctgcttaactatctcgtgtgattattgtgcaagtcaaatgagattgcaaatgtgaaggcttaccagaaaaatagtaggaagatctatataaatagtatattattatagtttaaaaatattgtagtaatgataacgatactcatagtgataatcgtgatctaaatcttggcatagaattatgtataccagaacattacattggttggtatattgacagtgtttgaaaagtgcaagtcactaaaagaatgattttgctgttcaacattgatgtcagtaaatgaaaatagcttgaaatacttcctttgttccaaaaacagttaaaagcagctttcaaagatagaaataaaaaaaaaaaaacagaaaaagatgaaaaacaggtaagtgggggaataggagaagggaaagtgggatgtaacaaagggtgaagttaggactcaaaatgcgtctcgtaagccctgttccatttgctagaggtgtgccagagatttggttctggattttcctgtagccaatgcggtgagaaaacaatcagctgtgtagaatcttagtgtccataaggttaaatagtgaagcacagaactcttcctaatgatgagacacaagatagtgattttcccagggagtcctcataaagaggacagtgtatgatgaacgacatc

SEQ ID NO: 132272 - DNA, 1027 bp, Homo sapiens
aagtaacttgcctaaggtcacacagataaggagtagccagctaaggagacttggcttttctcttgagaccttgctatctccaaactttgaagcaatgctatagagttctacttcagaaggaagcaggaagccatatcattttcttatctttacctctgcttagctccaccttaccattccctcccccttaggcatagtcgggttgtttctgtgaggcggagtttgagccaaagcatagcacaccctaactttctcttgggaggagctcgtctttctgtttgagtttcagatgttgtctctgttggtagtttcttcatttattcaacatatatttattataatgacaacatgcgaaatactgagtatgaagttgttaaaaagatgtatatggacctatctttacggagttttatagtttagttgggaagaatgcaggctatatctaaataagaacaaaataattaaccaagcaagaggtcagtttacttctgttccttcttattgtcaagatattggaaagcagaattaatttgagtatccaatacgttatctgttgagaagagtcacttttgtgaatgtgactgtctcagaggcaggaattagtaatttaaaccagcgtatgtttgaagttgattaaaggaaaatattcagattcctgaataacgatttaaatgtgctggaacattacctattacccacatattacatggcaatattttaaaaatctggccagtgttaaaatgataacgtttcaggtaggtggcgctaataagtgttcttgcactcatagaatgttgagttagaaaatgttgtgggttgctttgaccttctccttcctcatttcccctgaagaaattaaaactcagaaaaattgcatatgcagtcttccccttacttctcaaattcatgactcgtaggatgaatagactctggtttattcaaggtctcaagagttcaagttgtcaacatttcaccctctcatacattagcaatgtcaatgacttggaaattaatatggtttgaactt

SEQ ID NO: 132273 - DNA, 1096 bp, Homo sapiens
tcttttttttttttttttttttgccaccttagacttctctttatgaatttctactttacccttttgtctttcaaaaaatttgctttatttgtattccctgacaacaaggccctgatcacttgataactgtgtgattctcctggccccttcccttttgttcttataagtatggggagaaattctcctggtttgaggatgagaaatggatacagtggggctcatcaaagttttctaagttagacatgtactgatcccaacaaattatgtgatcccaaacaatttcaacacaaagtacattccgatgccaccatttctttgcctgtgtccctcgggtccctggacagaacttggaaatgggaagtgaagaacatttcattctatgacccttagcagcattgttttttaattgaatcagaattgcttctcccttgcttttccttcctcaagggagttcagagctccttggcttcacctgactttatgcagtggtttcatcccatgataatatgttgggtttctgtcttaatagaacctttggtcttacagaagtcccggataggtctgctgtatatctttatcccaagactttatacattccagagttcctgaaagctcttgcagttactggcttttccaggattcaagtcactcttgcagtcaataggagatactcacatggaattactacagcacacagagaattttgagtattctttggcccagagaatactgatcggccccatattttgcctttgtgctaggatggagctccatatcagagagatcaatacaatctgaaagtcactgcctcttccataagtcctgctttaaaaccttcggtagcttttcttaattttcctttcaaggctatcattgtgtgggcgtaacttacttacttttttttttttttttttggtaacataacgtgacccagaaccatctttaggagtgtggcaaattctgtcctgtctttctaggacggggtaaaataacctgcctcaggatggaacacccaaccgagggaggaagagaaaactaggggtgcttgcttaggttgccagttgctgcagcaagacctgaggctccagtgcctcct

SEQ ID NO: 132274 - DNA, 1394 bp, Homo sapiens
aataaataccggaggaaataatagaagatatgaaagaccagcaaaacttgtgagatttacctactttgctagtcagttgaaattctgtgttcaggccaaccttgcatcaatacagggcactttattattattattgtttttaattgacacatagtaactacatatttatgggatatagtggtatttatatacctgtatataatgtgtaatgatcaaatcaggataattagcgtatccatcacctcaaacattgaaaattatatcagttttcaaaacaatcctttctccgtgccattggagtctaagggagttgcttgtttgtttccattgttctttactcactcatttaagaaaaacgtatttagcatccactgcacatccttacatttatatagctcttcgcatttttcaaattgcctttctaatattgtctacgttgtttcctgtacatacaccatgaagtaagtaggtctagtgttatggttcctgttttataacatgtagaacctgaaaattgcttataattgaaatttggcaaagtgatgagttcgcacccgaatttgggtcttccgattcctaggcaactgtgacttttaccttttgtaaaacacttgatcccgtgtggaatgctgagggctgtggaccacaacagtctcttctctgaaagacataataataatcattgtgggtttgaggccacatacctacaaaaacaatagaatccctctaaaccaacatgatctggactgattgttgctcagatcattaagaaaacatggttcaagtgggacgtcataaatctgtgatacatacatacctagacacgttacagcaacttagagcatctagatgtgtatttatttaccagtcttttgatgtagaaccaagatcttttatttgattaaggatcttcttggggtctacatcaatcattttttcttggataactcttctataatttaaaagtattctttaacgtagaatgagaacttaaaaatatttgtaaaccactcttgagtgtagaatcattttagatttaaaaattccttgtggtcaggcatggtggcttacacctgtaatctcagcattttgggaggctgaggcgggtggatcacctaaggccaggagttcgagaccagcctggccagcatggttgaaaccctatctctactaaaaatacaaaaattagctgggtgtggtggcggacacctctaatcccagctactcaggaggttgaggcaggagaatcacttgaacccaggaggtagaggttgcagtgagccaagattgcaccattgcattccagcctgggtggcaagagcaaaactccgtctcaaaaaaaagaaaaaaaattccttgagatctttaacagatatctacctcacatctgattc

SEQ ID NO: 132275 - DNA, 1158 bp, Homo sapiens
ttaagaaccttaatcagacacctggtcagctgaagggtatggggatttggcctgaagtgtgtagatcagaggtcactatcgttccttctatagaaccacctaattctctttcctttctccctctgtgtttccatctcccttgcttaaatttccccacttcttggaagtctagggcttacacaaagacaaagtctgctggtgaaaataactcagcagttaagagcataagtaggtcctttaaatcctgaaaacacattttctccgttttacaccttagttcacatggcaaagaaggagatttacttttttttacaaaatggcatctaattccagaaaggctcaaaagccagcaattgggatacattttcttagctcacatgtcacagtgacaagagggtgctgcccaccccaccccatctgtgaatagagcaagtttgaacaggtcctgcctccttcgctaggttaagcattatcttgtgttatttgggttactcttgcataacaccattgcaagcaaaaactgaaagcacacccatttaactttggtctcagtttgccctgaggacgaagggataggattatggggtgggcggtggggggagttagtgagttgtcaacagcttggtaaataaaataagaatatagtcaacttaaactcctcccatcttagttcccccacccctaacttccttgtattttcttccctatgaaatgaggagtttgaattagatgagcactctccagtgtttttcatggggaggatctgttttcaatcccccatatgtaaaggggaaggtggaagggatctgactgctagtagtggactgggggctcttggttctgcaatcaattaactcctcttagaaaatataaataaataaataaataaataaataaatgaaatgagcaactggagaccctgacctttggatctcatgaaatctgaagtttctccatattaccagtttctaggtttctgagtcttgcagaatactaaaaatgttcatcttgcaacaaagagataagatccaagtggtgaggtcttcattaattagagaagtatctggaatgtttggggaggagttatgcagggaggcagcagcaggcaggagatggcaaacccacaagggtccattggcgtttctggagtaaaatggt

SEQ ID NO: 132276 - DNA, 1781 bp, Homo sapiens
tgtaaaccagaaaggatactcctgattggttgcactggaaacattctagccttgcctttttccaaactattctctgaaggcaccctggggtgccacagtgaattcatggagaggctgtgggatttttttttttttttttttttttgaggcaaacactgaaacaatcaacatctgtcagctaccatgtgaactacgggcttaaggtagttcatagttttaacactagatcactacattcctttcggtgaagtcatatctgtgaaaagctgggctttcaggggatgctgtgataaatagccagtgtggtataaaaatcaatgtgaagcaggaaatggggtggcagaatcccatctaattccaaagttagaaaagctgcatagtgcccagcagcacataggtctcattgaaaattttggctatataagaatgaaataaaaataccaccttctcatcaatttatatctttttcttttcaaatagttactaagttgttaggacgtaaatatttattgagttgtttggatctacctatttaactcatggaactgttaggtattcctctctgcctagaagtataatgaaaaaaatacctgagacgccagagtgacatggactgagaacatttgagaacctccgatttagcctcttgggcccccatcccgctgccctctccagcttgcttgtttgctgccctgcatccttcccaaatccatgccactcagcactctgtcaagtgtttctgtgagccactgagtgaatttgcaaaaatagcgggtgtcagtgagcagtgcagtttctctcaaatgaggatttttaccttatatcttgttgggggcctcaagaaatggctagtgacacctcccatccaggaggtagccggagagttttccgtctccttttcctttttctcccccttgcactgcactatggctcccagatccgagagcactcttcagtcacatagttcagacacatggttaaggagactgtttggactagaccgggtctctttctagccattcattgctgttttattttcctctccatgaaaatatgttctaagcactagacaaccaccttacacaggaacttttagaacacagccctttgtatcatggggaccccctgcatctgctggagagccctctttggagacagtattacagggtacactagttgcgatgtgctataattggctcttaaaaactcaaagaagtccatatctgttcatagcaagagtatgtttttttgagattcaagataagagagtgaaaaggacctattttcatgggtttgtgaggcagtgccgcttgctttaaagactctctgaaatgggaattgcgtttagtgaaattgcgggtttatggccattgacaaagatgaaaggcagagaagtgagtgagttacgtaatgtggctccatccattcgctcaggggcattctaagggctgcctttctttgctgagtagagtaaccctcttgagttctctctctgggccattgtcacttcatttttgttactggccttctcagttttagccttcagaattactctgagcagtaagaaaaaggcctggttttattctaccatagagatattcttccctacctctgtttcttcctaatctccatgtttccattcatactttcaccatcccttctgttctctttttatcttaatctgtaccctcccctgtctccctttcttccctcctcttccatccctatttctcttctctttgcttccattatggcagagtatcaagtcccacgtctcactc

SEQ ID NO: 132277 - DNA, 1106 bp, Homo sapiens
taaggttggtgtctcttgtaaagacctggtttaagaaagataatgtattgtgagaacctgggaagtcaaaaacttaatgtactttaaataatacatcaagtttcatgtttattttttactgtttgtgtttggctatttcaattggttttaatctagagcttaggttagagcttgcttggtcagttggttagctagctgtgtgtttttctccactgccacatcatagattttaaaatacactgatttaaaatgttactttcctatacttaggaaaagtatttcctttacttaggtttatctctgggaaaacaacagacaatgaaaaaagtctgctaacaccagtgtgtgtaccgtgttgaatgcagccatgttagaactgggataatagtggagattggggtcccgcaattttgaagagatgcagttaatatattacctaaagaaggttggggcaaaatccgtggttatttttttttcacttctgctttttaatcatttatattttcttgcacttccaatgtggcttcctgcagaattagagcaaatgaagttaatattccataaaagtttccaaaaataaccaaacagccagagaccaaagacattattccagttgaggtagccagagttttcattttgtcttgccaacaagtcaggtgaaacacaatgtttacttttgtttactctctgagctacacagggtccagtttgtatgatttattgatgctttgtataaatcaaattgatgatgcatttccaagtattactcaatcggaggcgtgatttgttccaattataaaagggggtttcagtcttataacattacatctttaaaagaatctattccattagtacccttccccacttcaaatgctacaggacatgaagcagaaatggaactttcattagtcacctatagcattttctttcttctcttccctcccctcccctcccctccccttccgtccccttctcttcccttcccttcccttccctcccctccccttccctcccgtccccttccctcccctcccgtccccttccctcccctccccttccctcccctcccgtccccttccctcccctccccttccctcccctcccct

SEQ ID NO: 132278 - DNA, 1040 bp, Homo sapiens
ctttgatggaaggctcatgagaagtatacatttgatattatttatattatttaaaaattgagttctgctcagttgaaaactcaaataacagtggctttaatatcatagattgtggttcccaaacagtgtgttaaaggtcactggagtgccacagtgaactttgggagtcacagggtattttaaatttagaaggaaacagggatatgtgatatcctttggacaccaggcaaactactagcttgaggaggttgacagttttaacagtaagttgcactatgttccttttggtgacatcatatctttgagaagctccattttcagtaattgtgatttagaagcagcaagtacttttgacacccatgtccacagcagcattatttatgatagccaaaaggaagaaacaacccaatgtggtatatacatacaatggcatattatttagcctgaaaaagaaaggaagttctgacacatgccacaacatggatgatctttgaggaaattatgctaaatgaaatgcaccagtcacaaaaggacacgtattgtatgattccttttgtatgaagttcctggaatggtcaaattcatatagtcagaaagagtggtggttgctgggagttggggagaagggggcatgaggagttagtgtttgatgggtacagagcttcagttggtgaggatggaaaagttttggagatgggtaatggtgatggttgcacaataatgtgaatgtacttaatgccaccgaactgtatacttacaaatgattaagacgatcgcttttatgctgtatatattttaccacaattttaaaagagcaaatactaagtgaaaatcaacgtggaacgggtgatggtgtccaatcttactccaaaatttgagaaacactagagtgcacaatttaacacacatcccattagtatttgtggttgtttaagaatgaaataaaaatactatttttcttttaatttatttgtattattttttcaaacgactaataagctgttagtacatacatgttattgagttgtttacacctaact

SEQ ID NO: 132279 - DNA, 1048 bp, Homo sapiens
ctcgggaggctgaggtgggaggatcgactgagcctggaaggttgaggctgcagtgagccgagatggtaccactgtactctaggctgggtgacagagtgagaccctgtctcaataaaaataataaaatatgtaaaatatctctgcaggtagaaaaaggtggtgtgtgaatgcaaaagagttatactggattgactaagatgattttttttctcacagtattctttgatattttgtcataataagtgtaattgatagcgaagaaatgacaacaaagctttcatgtatagaatactttttacagatttactgaataatgtgtactttctgttcactgtcttttaaaatataatttcagtctagattttacagactcatgggaaatgatctaaactatttttcttgccattaaaatgtgcatttgggagtatttttccatagacatagatacaggagaactcaataatgttcctcttccttctttccaactcttgttttccttaggcattaccacaggagtcttggttcgagaacacagcaacctctcaactctagagaaattctactttgcttttcctggagaaattctaatgcggatgctgaaactcatcattttgccattaattatatccagcatgattacaggtaccttgagaaaacagatgttctctatattagtccattttcatactgctgtaaagaacttcctgagactaggtaatttataaaggaaagaggtttaattgactcacagttcatcctggctcagaaggtctcaggaaactcacaatcatggcggaaggcaaaggggaagcaagacaacctccttcacaaggtggcaggaaggagaaaggctgggcgaagcaggaagagcccgttataaaaccataagatctcgtgagaactcactcactatcacgagaacagcatgggagaaactgccactatgattcaattacctccacctggtctctcccttgacacctggggattatggggattacaattcaagatgagatttgggtgggaacacaaagcctaaccatgtcat

SEQ ID NO: 132280 - DNA, 1128 bp, Homo sapiens
tgtatataaacattattttttccagttaagcctaagcttcctgacagaaaaggcagaaaggaaaactatcatgagttacatgattctcaagtgttaaaaaaaaaaaaaatctcaggcaggacatgatgactcacacctgtaatcccagcactttgggaggccaaggttgtggatcacctgaggtcaggagttcgagacaagcctggccaacatggtggaacctcatctctactaacaatacaaaaattagctgggtgtggtggtgtgcacctgtaatcccagctactcgggaagctgaggaaggagaatcgcttgaacccaggagatggaggttgtaatgagccgagatcacaccattgcactccagcctgggtgacagagtaagactctgtctcaaaacaaacaaacaaacaaacaacaacaacaacaaacgatctcagttctttgagataaatttttcctagataactgaattccaaaggaggtttatcacaagggatgttgaatgatataatacaaatcttggtaaagttcttagtgcaaatgtgggacagggactccttatgattatttcctgaccaactccaggaagatctgaaggcaggacactcctggaggtgaaggctgtgggaagctgcctgcaggggaacttgcacctgactgggcttccctctcttaaatctgtttggaattttgaagtgttgcttttgcccattgcatgttattgcccattgtctgtagatgagaacgcctctcagctctttatttcacaacctgaggattaaatcgcgggtcctggaaacctgtcttttaaaattaatgtaatttgatttctgtctccccttcaggtgttgctgcactggattccaacgtatccggaaaaattggtctgcgcgctgtcgtgtattatttctgtaccactctcattgctgttattctaggtaatacttatttctgaatccttactactttatgtaatggtgattttttcattcgaaaagtagttggtggccagatgcggtggctcaggcctgtaatctcagaaatctgggaggctgatgtgggcagatcccttgaggtcaggggtttgagaccagcctggccaacatgaaaacccgtttctaccaa

SEQ ID NO: 132281 - DNA, 1031 bp, Homo sapiens
aaagtgttcacactggtaagtattctgtacttcctgcattattaattcctgtgtttttttaagcagactccaaatgtagctagcagttaaaatgaccctgaaaagtgccttcaatctaaaattcataataaaaatataaaccattccagaataagaaatctttataagaaatattcaaatatggacttgttgaaagaagagaaagcattttaacttcggggagcaagggtaaagtttgttacatgcataggtgtttttattattgtttttatattttctatagttttgttgactctgcctgggagatcaccagtttattatgtttggtcattgtatcttctcatttctggacctgtgctttctaacaagattataatcgtgcatcaatatgttttcttggttttgatccacagaacaaaacaaaggaatacaaaattgttggcatgtattcagatggcataaacgtcctgggcttgattgtcttttgccttgtctttggacttgtcattggaaaaatgggagaaaagggacaaattctggtggatttcttcaatgctttgagtgatgcaaccatgaaaatcgttcagatcatcatgtggtgagcagacactgtttaatgtcattttgcttcccctgacaattctgtctcctcaaaattagaaagaagaggttttatgtttgtcaactgatgaagctagagaagttggacatttaatattgaaccaccagagtattttgtgggggcttttgttgctgttctttgtttttgttttagaggcagagtctcactctgtcaccccagggtggagtgcagtggtgcaatctcggctcactgcagcctcaacttcctgtgctcaagcgatcctcccgtctcagctacctgagtagctgggactataggcatgtaccaccatgcccagctatttttttgtattttttgtagagacagggttttgccatgttgcccaggctgatctcaaactcctaggctcaagcaatctacccacttcatcctcccaaaatgctggaat

SEQ ID NO: 132282 - DNA, 1072 bp, Homo sapiens
ctcccacaaggtgttcatcttcaaattcaaatctaaaccagccaaaggctctgtggcccacataaagctggtctgaagctgggtcttgcccaaagccaccagttttgactcctgtttagtagtataaaataatggtattgatttacagtgaggtttgtggaactcaatttcattactttataatcgtctcatattgattaacttaataatataaggcagtatctgattatgtaccaagatactgttgcttctgtatgtttcaggaggttagaaacagtggggtattggtgttggaggcccagaacttattttcagcatttaaaaaataggcagaccaggtagagaagagatttgggagagtgaggcaactggggagagtataatgaagcatatgtatatagagaagaggaaatgtcctttggggtatcttctgaagtgtcctaaatattcaggcgagtattttcaacttgtgctgtagacaataagaagccgttagagttttggagccagaaagcaaagtattaatctgatgatcttgtgcaggatggtttgggagtaggtagaggctggcggtggggagactctgacaaagcctttgaagaagtctgaaaattagggcaatagaacctcaactgagtaggagagtcacaggaaagagaagggctgattagacatcagggctgggaagacatcatgagacaacttattttaggggtgcttaaaaacctgtgggtgtatgggggaggtacctggcccttttaaggaagaagtggttaagtccggtggcctgggcttgttacaaagtgaaggtgaactacttagtcagcagaatgaggtattgatggagagaataattgccctgcagaaataaggacacagtgtccttcattttgtggattcatattcttcatgatgtgtgaggcaagatgaactcaacgactaagagaacaaaataggagctcaaatgaaatcctttagggacttttctttttgtggtctctttttggccagggagatagaatagggaacacttagaattactaggggtcaaggtgggtgttgagaagaatgg

SEQ ID NO: 132283 - DNA, 1843 bp, Homo sapiens
tcccggcggccaggacccgccgttttcggtatagggaacaccagataacaatatataacgctacctaacaaacgtttctccacccacagcgccattagcggttaggtttgcagtgccgaagagctgcaagaaaacggggcttgaaacaggaatacaattgcagatccacccactacacgcaaagggcccgggacgcgcctccacagccccgccccaaccggaagtgacgcaccgcgccgactatttcttccgccgtccgccggtggcgaggcccaggctgtcgccgggtgtgcagcggcgtcgcggccagtagagggattctgggtaacggcccggacccccggctgggcttctggctcggcgcagcaggttccattcacgccaagtctgttggcagtggcagttgtagggccaagggcggttgtaggacccggagcagccggacatggaacaaccgtggccgcctccgggaccctggagcctccctcgggccgagggtgaggctgaggaagagagtgacttcgacgtgttccccagttctccccgctgcccgcagctgccaggcggcggcgcccaggtgagaaggggcctgcgttctgcggagggatggagtggtgctgtcgccaaacccctggaatgccgcgtctcccagaccctcttctacgcctttttctacgcccacctcactgccaggggccggggacctgggacctgacgcctgatgccatcccaccccttttatggcatcttcggagggcagacggggtggccatatattaccaacctccacctccacgcacatgttttctttcgccttggctgattcctgttcactcttggaataccttcctccatctccccttcctgacagcactcagatttggggcggctcatgctgtaacattgaccctttgtcctcttgtgagaggttttccccaagcactttattctgttaaaggctctagcatacttgtgcacagttgctaggaacagtgaatgattgtagttcagcatcacactgagtcctgacaaagatttcacatgcgattttcaccgatgttgacaactgagtaaattctttaaatctcgcttttgacgctggcgtacacctctcccattcgcgtgaccatctttgccttactgttttgttttttagttttgcttcacgtcattctccagtgaaaatatatacgcatatacttgtgttttccttcagacttctcttaggttcctggtattgtgttttcaatccagcattcctgccttcctgcgactgaaacgtatccaaatgtgatatactattaaggatttttcagggacctatcttaggggatacttacatactcgcatcaccttgtcctgtttttttctccgaatccgtgtgtgttttggaagtatatttcagaatcacagactaaacactaatatattcaatggatcataagtgtctgccgccttcttgcaaaatggggttcccaagagtgtaacagatttaatagtagttttcctctcaacttattttgctagatgttaatgagaatgagttaaattgcttaccagtaagcgtgacattatcaatcttatgtccagctaacagggttagttggcttcacacagagaaaaatgctgtttcataaccactgtctgtactttggccagctaagtcactggggaactacaagacattttttaggaggacagaatgagagttgatgggtccatcattagtcacccactaattttggatcactagtgtcatctttatatacaaaatgtattataagcacatgatgtgctagggaggaaagaagaatgaacagcagatgccattgtcaattttgaa

SEQ ID NO: 132284 - DNA, 1079 bp, Homo sapiens
ttaagcatagctagtctacagttattcttgatcctattctaagataactattcttgatcctattctaagataacaaaaagtaaaaataaatattttattttaaaatattatattttatattaaaatattttatattaaaatataatatatatattaaatatatattatatttatatataaaatatattttaaaatatattttaaaatatactttatatattttatatatatattttatttttatatataaaatatattttatatatattttataatatatgaatatatattataaaatatacttagggacatggtttatagtaccttggctccaaacctgctgaatgagtaaataaaacatctgaatagcaagtgtccacatttgtcccagtacaaacgtgagtttgcctgaagactcagctaagaggtagggtccttggttactacttgcctcagaattgtttaccaccaccagtcagtaaacaaataagcatgatattgtatgacaaacaccacaacagaaatatgcataacttgggtcgggagacactgggtcagaaaaagtttagggcatgccagaatctggatgaagataggagtttctgtaggagttacctcgaagaaagaggattgccaaattgaagtgagggacaagggtgggaaagggaagaataagcaaacaagtagaagagcaatgggaactgagtctaaagaggtaatgggaaataacatcacgaagggctttgccacagagtatgtactttatcccaaagctaagaatgaaaaaaaagatcagattcattttttggaaagatcactccagtctagtggagtggagaacggcttgggataagagtctgcatttgtataattcacatgtgaaattataagggcttgaatagtgatgcagatatgggaacagattggagagaaattattctgaagttgatgtacatttgacgaagaactcataaagaatgtgccttcagcttttgttttatagagccaaggaatatagggtattgaatgtctatcacagtactttacatgtagtaattaagtaaataaaagtaattact

SEQ ID NO: 132285 - DNA, 1212 bp, Homo sapiens
aaacgattacttctagataaaaggaggtttttttgtagtgaagaatttggagaacaaaattataaaggcctggttgtcagcatgttgagtattgaggtgatgaactagatttaagctttgttctcattattctgcttgttcaggattatgaagactattaattaaacgtttgttaagcactagctttatgcaagacactgtgatagttgccaggctttttgttgctgttagttgtcaggggataggcctaaattaacaaagaagtttagaagttagttgatgaaacaaggactaagatataaaaacatgactgcagacctagaacacaggatatactatataccaaaatattgtacagaaatcctttgaattaagaaaaattgaactgtgctgcacaaacatccattgctttcttcatttcttacaaatattgtttttatccagatgtatagccatggaattgaattggcttgccaaaagcagaaagagtttgtgaagagctctgtggcgtgcaaatggaatcttgctgaagctcaacagaaacttggtagcttagcactgcataattctgagtccttggatcaggagcatgccaaagcacaaacagcagtatcagaactgaggcaacgggaagaagagtggcgacagaaagaagaagctctagtacaaagagagaagatgtgtctgtggagcacggatgccattagcaaggatgtttttaataaggtatgagcttttactgggccataatgaaagaagaaaaactgaagtgtttgtacaaaccagttgtgcgtatttggtagcaaagcagcagaatcccataaacagtgttcaattttgacagtttatgaaaggtgcttgaaaagtttatgaaagtcaaaaagtctcaaagctcttgctgtagagctgcagactccaggcagttaagtgaccagactgaaatacatatttatataaatgtactgctgaacaaatattacatatattaaaaaacattcacaagaatttgatataaggatgggaaaatatatcagttatgaaatattttcctccacatatattttgtaccccctacactgattatcactactttagagttcctttaatgcaactaccttctttttataaatgaagaaactaagtggaaaaataagtagagtgacttgataacttagtggtgggttaaatgtgagaaattcctgactctgggat

SEQ ID NO: 132286 - DNA, 1014 bp, Homo sapiens
tgcccagctattttttgtatttttagtagagacggggtttcactatgttggccaggctggtcttgaactcctgacctcgtgatccacccgcctcggcctcccaaagtgctgggattacaggcgtgagccaccacacccggcctcatacatcattttaaacaaaattaataagactcccatacaagaaaattttaatttttaaaaatagtttaccagatgaatttaatcatgtaatatcagtatgatactataccacatatattgtctataggaagaattgctagatattcagtatctgagaaagaagattcaattagaatttaaaatctgatttaaatttctaaaattttttcttagagttttattaatcaagataaaagaaaagacacagaagatgaagataaatcagaatcatttatgcaaaaatatgagcaaaaaatcagacattttggtaagtctactacttggatttccttctttgtaatgtttggtatcatatgtacatgtgcaaaaaatggatttataaaaagagagccaaaaagaaaagtggcaaactccaattttgtagcttctggcacagctgtatagatcttgttttagaattttttttttttttggttataaataaaattaattgacagagcaaaccaaatggtaaagagaagcaaaagtattattatatagtgtactacctttaagacaactttatgtattccatagcctctttccatttcctaagtagtctttgcttttttctttttcctctttgcttccttggaatctgattatcttatgttttaaagattattcattttttttcaggttttggatatgatgctttataattcaggcagatccttgaactgttactcagataaatatagtaatagaaatgtatatataaagaactgaaaaataggttttttctattggggaaaaagggtaagaggggggttgatacaagtgaaggcttcccagaggagccagcatctgagcttgatttcaaggaacaga

SEQ ID NO: 132287 - DNA, 1643 bp, Homo sapiens
gagtctacactgtcgaatctatgcataatcacaaacctatgccaccacgacccctgaatttatgaaactattgtgcaaataatgagatagttgaggaaaaaaactgacttaacatccacaggtgattaataagcaatcattttgctgttacgtgttgtgaacttccaatatactatcttgtaataaatatcagagccttgctgttttcacacccagccagaccaatagccattcccagagtcacaatgtgcctgtttcttactgaaaatgcatgttgtctttaacttcaaaggagatatattacttgccacagcacactggatccccaggaatgttacaaaggtagtaggctctcaaaatgttcatgtgttttatttcccactctggaatagatatatcttaacaagagacctggaatacctgcaatttctgctttaccaagttccatcagtggagagtggaccaacttgtagtcatggggaatgatgagataataatccctgtggactgaattatggcacagagttgatagaggtgtgacacaagacagtgaaaatttgtggctatgcctgcttgatggaagatttctgttgtatgcttattgtgatgaaagaagaaagcttaccaaaatgatgactatattggtatactcctttattttgtttttttgttgttgtttaacttttgttttaaattcaggggtacatgtgcaggatgtgcaggtttgttacataggtaagcgtgtgtcttggggatttgttgtacagattattacatcacccaggtattaagcctagtattcattagttatttttcctgatcctcccaccctccgcccttcggtaaactccagtgtgtgttgttcccctttatgtgtgcatgtattctcatcatttagctcccgcttataggtgagaatatgcggtatttggttttctgttcctttgttagtttgcttaggataatggcttctggtatactcttctaaacacatctgcaataggagatgtaattaaagcttccagttggaggctttctggacttggattgcattctggactcttggttgacacgggcctggtgtgtgtgggggctgtatagggctataggggctttacacccatgtttctctgtggtcttatttgtacttatattcttcagagtttttcctaacttttcccttatacaatttgttgactgcctttcttgtgctgcttttacccttacaattaggtggaatttaccacctagtggtaaatggtacaatatatcatggactattataaagcattgaaatctgactttttcctctacatttgtatttagtttattaatttagttaattcacgttttataaatataaaatattaatttaaaaacaaaggcttttatctcttaaatttcacaaccgttatattcacagttatatgcatgtttgacatcactggctttatggtcatcagagctgctttttgagtcatctaattttcagagcacatcatcttcactttcagccaaagttagctgtgattcagctttttttaatctgtgtaggatgttgtcactggaaattttaccaagagctataaaagtttgctcaaatactatgatagaagttttttcgtttgttctgactatgaata

SEQ ID NO: 132288 - DNA, 1041 bp, Homo sapiens
tgttaattcgtctcaggtattaaataggtagttaaaaaatattaacatttggcagggagtggtggctcacacctgcaatcccagcactttgggaggccgaggcaggtggatcatgaggttaggagttcgagaccagcctgatcaacatggtgaaaccttgtctctactaaaaatacaaaaattaactgggcgtggtgacacacgcctgtaatcccagcttccaggaggctgaggcaggagaattacttgaacccaggaggtggaggttgcagtgagctgagatcgtgttgctgtactccagcctgggcaacagagtgagactccatctcaacaaaaagaaaaaaaaaattaacatttaatgatacccttccccatggccccaagtgtcaggaaccctttcatgttatccttcctgcaaaataaaccagaatggataaggcttttggtatttcagtaagtcacaatgctgccatgaagaagtaaacaagaggagcaatgctttatcgtggatggtagatagagttgaaaatattacctctccagaagtgtaagaaagctaaggcaaaactgcttcataggatttactttgtgggttcaagtataagaaataaggattgtgctttctttaaatctgagtcccaggaatcattaggcttttttaagagatatggtcttgctctgtcacccaggctgaagtgcagtggtgaggtcatagctcactgcagcctccaccatctgggctcaaggtgtgctctcacctcagcctcccaaatagtggggattacaccacgcctagcaatattcttatactttaagaagtagttttaagtaacttccataatcattctgtttctcagaacttcaaatgacctaatcattatgtccaaagcgttggggaaataactttataaagcttagaatactctatgagaaaatgctacagtctttatccttttttttaatccttttaagagatgaggtctcgctgtattgcccaagctggagcacagtggttccatcataccttctgcagcctctagc

SEQ ID NO: 132289 - DNA, 2429 bp, Homo sapiens
gacaaccattttcaaatatgcttaactaatttttaaaagactttgtttataacagacatcatgagtaaatggcttacataactaactctcaatttgcccaagactgcgggcattcatggatgtaggactttttaatattgaactggccactctggcctgattaattatctgaaataaaacttcctgtgaattttaggagctatttccagtctactgagtattgctttaaagagtactgtccctcacttgctcttttaccataatctgttgctctggtaatatgaattgtctttaaagagaatcatttaaaaataccattgagagattaatgaattaagaatggttggtatttcttcccttatgggaagaaagaaaatatttgacacttatggttcaattcttttttttacaggtatgttgagtcgatgggatgatagccagagatttttgtctgaccatccataccttgtatgtgaagaaactgctaaatatcttattttatggtgttttcacctggaagctgagaaggtattattatgtgaaccttgagtttctgggaaccttagtggaaatctgatttcatactttattgatgttttgttttgttttctacattaagtcctttaaaagaaagcaggaaggtcattagatggaattaccattttttgcttccagatctacttgagtttaatgtgggattttgttgttgttgttgtttcagttagcatacagaaacttttccactatgctttctctgccactccacctccatctctcttgttttcatattactataatccttttcaaactaatttgaaagtcgtattttaaaaatccagacggtaatcatggtattaaatcaagttcagagcatggtcttcctttagttattctggtccacatacaaataataaaaaaaaaactaagatatactctttatatgtttgtaaagtatttgacttataacttaagagagtaaaatcaaaagtattttaaaaattcaaaatttgaatcagtatgccaattaaatatatttatatatttgtttcttatatcatttaaatctttttcagaaaggggctttaatggaacaaatagcacatcaagctgttgtaatgcagtttattatggaaatggccaaaaactgtaatgtggatccaagagggtgttttcgtttatttttccagaaagccaaagtaagtagttatttgatattgataaatgggaagatttggtcccagctgagacctctttgttctgttcatatcaatagaaggcatccaagcaggatgccacaggctaaattctgtagattttcttgtgaaaagaaaatttatattgctaatttcttgctaatttaaacttaaaagagctatataagaggctgtactacagcatgtatatgaaattgagacccatttaaatgaatgtgtgtattcaggaaacttacgttccatcattaattcattcagtaaatactgagtgcctaatgcaaagcacagctgtttcagatgctcaggatgcattattgagcaaaatagatacaggattcttcatgtgtagaactcagcagtttaatgagaaatcagacttttataaagaaaaaataggaagcaacctaaaaattcagcaattaagggaatagttaaaaatacccatggtacatagaatatcatgcaccctttaaaattatatttatggaacttttgtaatgagctgaagaaatgcttacgctatgaattcacaggaagcagtacatactagatgatgttggctatgttgaagaaaaatagatgtctagaaagattaagtacctttcacactcacaagatttgcagtaatttaaaagctgcccaagaagtagggcaataagaatttgcgttcactgctagtggaagtataaattggaacaaccactttaaaaaatttcctagtaaagttgaacaagtgcctgccttaacacccagaaattctcctaggtgtatgcatcctagagagtagattctcaaggtggggtccaggaacccggaggggcttcaagaccttttcaggaggttctctgtcgaaactattttcataataataccaagatgttatttttaattttcattttcattcctcagtagtgtacaatagagattaatgcggaagtacaaatatgagaatctagccatcttctgtaaagtcagacattagatttagaaaaattaaaggaaaaagcagctctcttctcactaaatttttttgttttggaaaactttttttttaaataaaaatgttattaatggtagtgtaatgagtttgtcattgttatttttagttaatgttttaaaaattcctcagttttcatttctaacagtaaatactgacagatacaactcacataaacagaagctctttagggtcctcaataattttgaagactgtaa

SEQ ID NO: 132290 - DNA, 2945 bp, Homo sapiens
taatagtgccccctcattaattgttggagaattaaaaggttttaagaatatcccttgattgtttggtagtaggaagaagatagaatgaattggacagattaaatgactattttggatcctgttaaggatctagataagtcaaggaaaatacagagaaagccttcttttcttttagttgtgtgcatatgcatagggaggggttgttttttattagcttattttgctgaagcagaaggaaatggagcaaaccaattattaatgttcctataaatcaggtagttttcacaaatgtgacagggatcgtggtggtttctatatttagactattcaccttgtcattacttcctccacttcaaacctgttatatgctttctggaatttactatgtctagaaatcttgaagaacacagtctttgtttttttttttgttttttctaggcagaggaagaaggttattttgaagcattcaaaaatgaacttgaagctttcaagtcaagagtaagactttattctcaatcacaaagttttcaacctatgacagttcagaatcatgttccccattctggtgttggatctataggtttattagaatccttaccacaggtaagttggaaaagtaaatatttgttttataagcctattaattcacataatttttgttattttgccccactcttttttttttttaatatgtgctactattttaaatattcctgcctcagaagataactgttgaatcttacttcatgccatgttttggtgctgaatctcacctcttaagtatttagagataccagatttcctctccttttaatgtagtagtgattagttatacctaaccattcttaagaacaaatcttagctattgatcatctcaatcataaactcttcaagatggctccctcaggagcttccttaaaacatctcatcctgagttaaaactatgccattttgaattttttaggatgattagcttcaaagtggacatgcacatggaaccagtgtgatctgttgcttaagtttatttagtattttcttgttaaatgttgggtctaccagatataacatttttagaacacattaatgtagctgataatattgtatctggtaatactggccaactgtttgagcctctttgaagtcttcagtggtttgatcaagataaaaccatgtcggctgggcgcagtggctcgcgcctgtaatcccagcactttggaaggccgagacaggcagatcacgaggtcaggagatcgagaccatcctggctaacaaggtgaaaccccgtctcttctaaaaaaaaaaaatacaaaaaaattagccgggcgtggtggcaggcacctgcagtcccagctactcgggaggctgaggcaggagaatggcgtgaacccgggaggcagagcttgcagtgagccgagatcgagccactgcactccagcctgggcgacagagcaagactccgtctcaaaaaaaaaaaaaaaaaaaaaaaaatcatgtcatataggcagcatgaaaaaatttacatcaaaaaggagacatgatcagaccactggtctgcctgatgctagttaggattacaagtttaagttattattagataattcctacccatttgattttactagtagcactttaatagagcccagtcatctctcatttccaggctccaagattttaagaccagctttagccagtttaatctgttgtctacattgtgagaaggaaagtcttattcaaaagacaatgtgaggagagtcctatatttagttttaaacctcataaagtgctaaaaattgggattttcagtggcttgaccttatctcactgtaatttcaccattccaattacatgtatgtcctttaaggaaagtgattgatcatatttaccccagtcaaaaatattattatcaggagtctctgagcctactctggctgaaaaaaaaaaaaaaaagtctcaaggatggaaataattaatgtttgatttttaaataattagtaatgttcccccttagttagacatgtaaagaatattccctctacaaattcctacagattatctcttaattttatttaaattcagtgatgatttttctcttcagttcctaagaaatagcccatagggaagtagtttttccaggggaattctgtgaccaagtcactgtgaaatccaatatataaacctcctgcaattaaaatgtcacataatgcatgggaaggagaaaagagactttggaaggatgtaactgattctaaatataagagggaaagatacacattatagtatcttaagcctatattatcaagaagttgcctctggtttgagagaagtaagtccttgttgttattagatagcaactatatattagatagcaactgatatcaggtgctaggcatcccttatagtcatggggggactagaattatacaattctgacacttctgtattgctgatattatcagggttattcagatttaattaagctgggctaatctcctcatggtgggagaccaattccttatggtaagtaatttgagcatcctgatgtggtccttctgaaggatacaagggctggagaaaatttcagttagatgcttgctacatgtgcggaaaggattatcgactagttgagggaagtaaaatgagaggccacctgaaagaccaaatcatcagtttagaggtttggaagaaaaatcttaccataataataacatcccatttttatatcagtttatatgttgtaaagcactttcacacatattatttaattttctcaaacaccctgtgattcattttcattcatttttatagatgagtaaactgaaattcatagaacttaagaaatttgcctgaggtcaacacaataagtgatgaatctaatattctacttttggatttctattatgcttcactgcttattcacctataccacagactgtgaatcatatgtg

SEQ ID NO: 132291 - DNA, 1648 bp, Homo sapiens
ccttattcatggtgctttaataatggttttatttttgcatttattgagtaagattttatgttttctattcccagtttttgaaattgacaagcataacatttatgagtttatgcttgtttaacaaatcctgttgttttattctcagtttaaaaaataagggtgtaaatacatctcaaaagtgtacagatttctcactgagtttgttttaacctttgggaaaccacaatagaccctgaagatatccataatttttacccagtaaattttttctttatttagatgatttgcagttttagtatttactgttgtaattagatggtaatcttaaaaatgcattgctaacttcaaaccatatttaaattatcagtagctatgtatatataatcacatggaggttgtagccttgccttgtatgattaaacagagaagaaaggtggtatttgttaacatttctgttttttacatgtatcattcttttatcacatctcataggtgatagcatcctatttttttctttattttcttgggattcagcccaagtctgtctccaaagtccatcttctttcctactgctctactacactgcagagaaataggacggtgaaactgaatatatatgtatgtactgtcataaaactggttataatgcgttctttttctccccccaatctaccttttctttttccccagaatccagattatcttcagtattctatcagtacagctctctgcagcttaaactcggtggtacataaagaagatgatgaacccaaaatgatggacactgtataatttggttaagactgctgaggccaagtgctattttgttacaagaaaggaagaacttggctattttcttgacacttttatgggtgctgcactttatttttgttcggtttttgatgggagggaaagagtactgaaatgttttgtaaattttttttaatgtgctgctaggttttttgttttgttttgttctgaagagaagagtggtaccatatgttgcaggaagtcaaactggactttttgtggctactaaatttgcttttaatcttattgttctcaattttggaatcaagtatgaaaatctgcacaaatgcaatgtttacaagaactggttgattctgggaggcatctgctacagtctctttttatatggatatgtacatgtcctattctacaaaaatgattaaagataaaaacatacttgtatcccactgctactttagctgtcaaatttggtgtttcatcacattaaaagcaataaatcagtagttggtaatgtactttactaaataagttggggggtacaatttttaaaagtcttaactcttaaatacttgactttcggcaccatcagttaaatccttgactataatacaaatttgatatatacattacatttaccctcaaattattctcaaaactatattccttagaatttgattttaccctgctgactttaagagttataataatatcaaatgtgatgagctaatatagattttctttttaaataagaataacttcaagctcactctttcttaacatagtctgggatctctcagggagtaagttttaaaagaatactaatggcttgtaagaacaaacaggaataataatctgatttttaaatttgtagttattt

SEQ ID NO: 132292 - DNA, 1035 bp, Homo sapiens
tgatataaatatatactctataataaaatgtttgactaatttatatagtagtgtttgtcagcctgtactttttttttttttaaacccatgacctagtcgtagacatttttttctttttgttctgttctgaagcaagctcttatttttccctttctaccaaattgagagaatgggcagacacaggagccatattcctagtttcacagaaatgttacttgaattattattttcccttctttcccaggatttgcctgtaagcattcaaattgttttgaatttcattttgccttctctaagttagaggtatttaatgactgaagactggcaggagagaaagtatcaacaaactgagtaaactattcttgaggggcactgaaaagatgttctttgaaacttgatttatatatttttacttgcaaaagaatatactgtgttttgagtatgaaagtgtgattgggtctgttgtgggaaccactgactgatgccataatttgcacttaaaggctataaattacatagttagccgtactttagtactagaaacagtaaattgacatccttgaactaattcctaccttttttttgtttctgaagaaataaagagtatattaagcaaagggataatttatatttcaggttggacaatttaccctaaacaaattaaaccatggaaagtgcaaacacatgaatgaaacatttttttacatcaaagtatcatcaaagattcttgtttcatttgataaaattaatatttgaataaaaaaatttttaaatcaaatagctgtccatttattctctgttaactcagtgtcattttttcagtggtagtgaagataatactgccttaaaattattactcttaggtagatgggtaacattctcttccaattataccattagtgagctctttcaaattttgcctaatgagctcacaatctcttataacttctctttaggaaaatcaggtcctcctcttctttcagactggcatatcatattattacccttttaaaaatgaatgaacagccgggcgca

SEQ ID NO: 132293 - DNA, 1085 bp, Homo sapiens
caggttcaagcgattcttatgcctcagcctccccagtagctaggactacaggcacgtgccaccatgtcctgctaatttttgtatttttagtagagacggggtttcgccatgttggccaggctggtcttgaactcctgacctcaagtgatccaccctccttggcctcccaaagtgctgggattacagacttgagccaccacacccggccgaattcagtcttttcattctcagctcccacacgtagaactcagcgagacttgactaaaaactgaaagtttatttgcaagaatgttagtaatagtcagcattgttatttagaaatgctgacagttgtattgttggttgttttaaaaaaaaccttttagctgtgggacattatagagtaactggtctatgtttacaaacaacatgatgcccttactctttggaggaccaattgttgaagctggttccattttattacacagaaattaaaatgacaaatgttcacccacgatttaggatcgaataggtgcctgcaattgtgccctcagtaattaacccacttgtgacactggcttgatttttaaatcggctcttcaagaggcttacaacagttaagaagcttgttcccttgaaagcagtaccaggtgccagtgaatttagaagcaggagggtttctaatatcccaagaatgctgtatttgcataatttccttccttagcagatgtttcttaccgagaaaacagtgggtgttatttaagttaactgtggcaaattttatgaggtatcaagggaagaatgcttttgtccttagtgaaagccctgaaaacctcggaagaagggccacacaggtataaggaatcctcttttcacaaagtcataaaccagagttcttaggttgtccttatgcagtctttacaccagtgtgtatgtgtggaggcgaatgtgtggaggtgtatatgtggaggtgtgtgtatgtggaggcgtatgtgtggaggtgtgtgtatgtggaggtgtgtatatgtgtaggtgtgtatatgtggaggtgtgtatatgtgtaggtgtgtatatgtgtaggtgtgtatatgtgtaggtgtgtatat

SEQ ID NO: 132294 - DNA, 1044 bp, Homo sapiens
tatctgatactagtctcttctaatcctgtttagggcattgatgacctgactggggagcctctcattcagcgtgaggatgataaaccagagacggttatcaagagactaaaggcttatgaagaccaaacaaagccagtcctggaatattaccagtgagtttttgcttttcagaacttctcttgcgtagtggtgcactaagtctagttttgattttccttcctctacagctgaaatgctaaaatgccaaaagacccagttcacatgggcttaagtaataaaggaaatacattagcttgtgtaacagaagtccagaaggtaggttgggcttcagtcacacctgggtttgatcagtgtagccgttctcttggttttgccttcctgtgtgtgtattggctttgtccttaggcttcctgcatggtagcagacatttgtaggaacagccagggcttcctcttctatgaagggctgaggggtaacctttcctccagtgaatagaagcccagagcaccactcggatggagccaacttgaactacagtcagggaatgcctggcactaactgttacaggcttgggttactgcctactgcagaaccagtcattggggtgggaaggattccactgattacactgactagtccacttctagagttggcagtgcgacagtctcatccatactctgctatgtgcagatgttccgcaatttacaatgaaattacatcctaataaatccattgtaatttgaaaataccaagcaccataacttagcctgccttaaacatgctcagaacacttagattagcctacagttgggcgaaatcatctaacacaaagcctgttttgtaataaagtgttgaatatctcacataatttactgaatattgtactgaaattgaaaagcaggatggttgtacaggtgctcgaggtacaatttctattgaatgcatgttgctttcgcaccatcataaagctgaaaaatcctgcattgaataattgtaagctggggattgtcggtaggggaggcagggctggaatgaatgctgggg

SEQ ID NO: 132295 - DNA, 1017 bp, Homo sapiens
ttagagtaaaaggttttctaagcagcctctaagtaagttcatatatattcaaaaagattcagctataaacttggaatttcaactgcaagtcctaaataaaccaaggtgttatgaatctctatcagcgcaactcctaacacactccttggcagagcaggaaatcaacaaatgtttttgaatgagtaacaaacccctgctgctcctggggcaacctttcgcaccaagctcagtggacttgatcagtcaactctaccaagtaacctgagaatataccctcaggagttttggtcagaggatttccaagttcactcaacttatgtctgttagggcaagaggactcagggacagtctgctatgtgacagttccacaacaactactcaccacagttttgggagggttgaattcaatgttatagactcggccactggcgggatgaatccagcgagcagtaaggcgttgtttaatgacctcaaagggcacattcaggttaatcactgtgtcgatctgataagctctatctagggcttctgcctgtggaagtgtccttggaaaacctttataaagtaaaaaagaaaaagaagaagaaaaaagaaaggaagtatggggtgggggtggggcgggtggagaaagaagaaagaaaaagaaagaattaatgttggacaatctgaacaaaaggaatgaggctcaccaggcaggccgatcacagctgcggtgcaactgtgatggttacctgtcaacttgactggggcatgagtgcccagatatttggcaaatattatgctgggtatatctgtcaggctgcttttgttatgaaattatcatgtaaataggcagactgataaagtacattgcccttcttaatatgggtgggccttatctaatcaattttaaggcctgagtagaacaaaaggctgaccctcacccaaataacaaagaattcctcctgcctgctacctctaactgggacacaggacttttcccgcctttaaactcaaactgaactcatgatcttcacc

SEQ ID NO: 132296 - DNA, 1050 bp, Homo sapiens
attattttgtaacctttgtttttgtttttgtttttgagacggagtctcactctgttgcccaggctgaagtgcaatggcacgatctcggctcactgcaacctctgcctcctgggttcaagcgattcccccgtctcccacctgggttcaagctacccccaagtagctgggattacaggcacccgccatcatgtccggctaatttttttatttctgtagagactgggtttcaccatgttggccgggctagtcttgaactcctgtcctcaggtgatctacccgcctgggcctcccaaagtgctggggttacaggtatgaaccactgttcccggccataacctttgtttttatcagaaaagttgatgatgcacattttcagatgagtatgccattcagacttcccctttaggcaactcgttccgaggtgcctggaatgggataaaacaaatgcacttactgatttttttccccgctttgctgtagaaattggcgtgttagccaaggctttcattgaccaagggaaactcatcccagatgatgtcatgactcggctggcccttcatgagctgaaaaatctcacccagtatagctggctgttggatggtaagtggagtctcatgagcatttcacctgcccaaaataatcagtgctggcaggagaatgagcatttcatgggcttcagacagacgtcaaggatggtggtttggggagaggggtgcttgggactatcctgaaaccagtcatcttctctgggaccagttctatatccaaatggaaagagggaagtgaagtgcatgatttctaagctcccttcagatgtaactttagttcctttcccctttctttgagaatattttgtgatatgggaggatcaccacagaagaagcaagacccaagagtaatttacaataagctgtaaactttccctagccaggagtatggccgaatccttgagggtaggttgatttttagttttgttaatatagagaggacacaaaagagatttgtttcagttgagtcctcagctctcactaaaactgggataaacttggg

SEQ ID NO: 132297 - DNA, 1018 bp, Homo sapiens
aagaacatactctggggaaaggacagtctcttcaataaatgatgctgagaaaattggatatccatatgcaaaagagtgaaactagatctctatctcttgccatttacaaaaatcaaagaaaaatggattaaaggctgggagtggtggctcacacttgtgaggccaaggtgggccaatcgcttgaggttagaagtttgagaccagcctgggtaacatggcaaaaacccatgtctatacaaaatacaaaaattagctgagcatggtggtgcacacctgtagttccagctaatggggaggctgaggttggaggattactagaactcgggaagttgaggctgcagtgagtcatgagcatgccactccactccactttataacacactgttgtctacataaggctagctacatcccttaatcttaaactcccaccgctttcagacactatcataccccgccccccttccccccgcgaacccccgtgcattctgggactcatggtttggtgagtgttgtccaggaatggctacaaacccacattactatgatatcggacttctacttgtgtagtcatttgttagttaactgtacattttggaaggtttttgagtagagaagtgaaataatccaacgtttgggaagattttcttgtgcaggattggaggaggacgggaaagagggaaaaagcattgcgcgcgtgtgtgtgtgtgaagttattacaactatctatcttgaagcatgcgaggtaggagggcctgaattgccatgaaacgcaatgacgataaacgaagggacccgtgagaaaggggcaaagaggtgtctcaataaaataagcaacggcctgctgtgggaggattcgggtctcagtataggctgccactgtcagctttgcaatattcctcgagcctttatccatgagtaggacaggatggctctaccttgcagggttacagcatggagctgcgggactgcgccggcagtgcgctgagcggcatccctgcgatagggtgagtgcaccaac

SEQ ID NO: 132298 - DNA, 1184 bp, Homo sapiens
cacagtagtaattttaaaaatgtgtaatttaagaataacatactttctgagatgttatttaagatttttcatctgttctcattaaatgagattagtttgtaattctgatgttttttagtgatgttcttaactatactacaatagccatctttacacattcttttttgtgctttgggtaataataataataattgttatttttttgagatggagtctcgctctgtcgtccaggccggagtgcagtggcgcgatctcggctcactgcaagctctgcctcccaggttcacgccattctcctgcctcagcctcccaggtagctgggactacaggcacttgccaccatgcccagctaatttttttgtatttttggtagagacggggtttcaccgtgttagccaggatggtctcaatctcctgaccttgtaatccgcctgcctcggcctcccaaaatgctgggattacaggcgtgagccactgttcccggccaataattatttttttctttgaatgttggggaaaaaaaacttacagtgacttcatcagcgaccttttctgtttattatttgaaaaaaattcttcttgtcttctttttaggtccttttgtgtccttttcatttatttgttttggtttgtcattttttacatagctttctatcttaattccaaatatattggtaactaatggagaatcgtttaccataaagctcttaatctttttaattaattatatgttttttattttttattttattgagtcctatcttatttccttttacaaataagtaaagtggtcgatttatgttgtatgttctcagttaattagcttgatttttttttaatctttttttttttttcttttttgagacagggtctggctctgtcatccaggccacagtgcagtggctccatcatggctcacttcagcctcaacctcttgggctcaagggatcctcctgcctcagctctacctcaaccctgcccccctgagtagctgggactggggctactggtgtgcgccaccatgcctggctaatttttgtattttttgtagggtcagggtttggtcatgttgcccatgctggtcttgaacacctgggctcaagtaatttgcctgcctcagcctcccaaagtgctgggattacaggcgtgagccaccacacccagctttattttttattttcttt

SEQ ID NO: 132299 - DNA, 1943 bp, Homo sapiens
tacacttgtgcccaccaaatttgtacaaataaaaaaatgcataagatataaaagtagtgcataagagatcgtaaaatgaacacctttgtgacccccccatccacaaaaagaaatataactttgctaacatctgtacatcttttagctatttacagctccttgccatgcctctactggtagccactatcctcaccattatagcattgactttgattctctttatagttttataacctaattatgtattcataaacagtgtagtaaaattgtgcttgtttttggagcttttccctgaacgttttgagatacctgaaatcttgtagccccaggagcagtcttgaagaagaggagtcagcagggtgtgtgggaggtgaatgggcaaggaattctacacaggttggcctagtaaagtttggggactttgatcttaccattattaggtggacttgagatcttttcttgtaccaggtgatggagtcatatcttcactgttgccagggctccggaactagctctgagtctgcttctttgaagtgctgcttctgaagcaccggtttgccgtgatcagggatggtcctgcctggagttctctttatgcccattctctttctacttttgttctgctgggcgtttctggttttgtttgtgtgtaagagtccgtgtggattgcaaaaaacaaaatctagaaagtaaagtcatggtttcttccttttttcttttctaatttgtaaaaatctgtggggtttaatcttaggctttatttgtaggtgcttgttcctctatcccatttagacacttagaaagtttgaacaaatcaagggctttccttttttctgcagagcacgttagattttctataaacctaagtagaaagtggcattgtggtagagattgtgcctgatttgtaaagaatgttaaaaagatcgtagaaataatttctaattcaattccgtcgttcagatactttcaaactcctgtgatgctacttacatcacaacctattacacatacacatatgtgtaaaacagactgaagtttcacgaacagcatccttagtatatacagttattccaacgtagtttattctgttctaattttttttaatgttgattagagatccattaaattaactataagatccttcaagagatcagtgcctatagttgaaggtaccatgattttctagaggaagaggttagctccaaggaattaaactgaacagaggcaaactagtgtcgtggtgtggctaagagtgtggaacctttaggttgtgtgtagtagcttatgcctgtaatcccagcgtttgtgagcctgaagcaggaggatcacttgaggccaggagtttgaaactaacctgggcaacatagtgagatcctatttcttaaaagagagagagagagcatggactttggagaaggacagacttgggctcagatcctggttttgccactttctggtcatatgatcagggcagtctgtttggcattcttgggtctcagtgtcatttgactagggcaatctagttggcattcttggatcctagccttttgtaaaatggcatcttaatccatttcgttttgctataacaatgtcacaggcacagactgggtaatttataaaagaaaagaaatttatcacagttctggaagccaagaaatccaatatcaaggtgctagtatctggcaagggccttcttgccacagcttcccatagcagaaagtggaagagcaagagagggagagcgagagtgactgagagagctggactcatttttttttttccccccagagatgggcatcttgctgtgttgtccagtctggccttcaactcgtggtcacaggtgatcctcccacctcagcctcctgagtggctgggactacagatacacaccatggcacccctggctggactcatttttatagcagcccactcttgtgatataa

SEQ ID NO: 132300 - DNA, 2004 bp, Homo sapiens
atgtttacatgaaactttccaaagtccatttacttatattatcacattaaattatttcagccaactctgtgaggtagtttatgggctgaattctatttattttaaattttgtttgttaaaataagtttacacaagtatatgcaaaagatgtgaacatcccttcacctctttcctcttccattcccctctccaggggtagccactgtcacagcatttgcttacatggacatttgcataattcagaccatcagcaacatcatgctcttcatattgttcttcagccagcatttttttttttttttttttttgctagtacaaatgtctcagagaactttcccttccagcacatgcaggtcttccttaatatttctgtgggttgtagtatagtattccagtgtattgatgcatgataatttatttaactgctccccattgataaacatttaggttgtttctagcttttattttttctattagaaacttgtgtctacattgtatggaaaactgtggcaaacatccgttggctgactccattaactctctacctttccgcacacattccacaaataaatctctgaccttttccctatcttggctctcttaaggcaagcttgggttcatatgtggtcctataccacatgagatattctgatctatagctgcattcagccatatcttatggagaacaggtttcgggaatgagatactcacatgtcttttgccagctatgagtcccttaatttcctttagcttgtttgctttgaaattgctggaggttttttcagtaactttcattggtgatccagaagacggataattctattctttttttgtgtctgtgtgagacggagtcttgttccgtcaactaggctggagtgcagtggtgcgatcttggcacatggcgacttctgcctcccgggttcaaacgattctcctgccttagcctccccagtagctgggattacagttgcctgctgccatacctggctcattttttttttttttttagtagagacagggtgatctgtcgggtgatccatccacctcagccttccaaagtgttgggattacaggcatgagccacagtgcgtggcccaagtctattcttttctagtcatactggcaatgtagattgaggagtaagacatttacatgattctgctcccactacatgtccttttaattttccgcatcagagtagtaaaagccttcattctgatgatctggccagtttctcatttggctaatttgtataaataaacatacggatttgaagcatttagtgaatatatagtctttttatggttttttgatctaaaggatggttttgtggcccttacaactatttcagataactgacccagagtccatttgagaagtgttcattactttgatcagaatatggtcctgattgtgattgtttggattctagtgtttaatgtagtaaaacctacatttattttatgaaagtcccaagaactttttcccatttgagtgactgaacatgcctccttcctctaatgttaaatatatttttggtaaattgtgccagagggcattgcaaaagattttgtgcagcagaaataccttgttcaaccatttatgtccccctatgtcatttacagttttttacattgatatgtaaatctagtaagaagctttttggagagccaggcatggtggttcatgcctgtaatcccagcactttgggaagatgagatgggagtaagaagctttttggatagccaggcacaaggtggttcatgtctgtaatcccagcactttgggaagctgagcctaggagtttcagactagcctgggcaatatagtgagaccctttctcaaaaaaaaaaaatgattagctgagtgtggtagcatgtgcctagggtctcagcactttgggaggctgaggtgggaggatcacttgagcccaagagttcaagactatcctggacaacatagtgagaccctttctctaaaataaagaaaaaaaagaaagaaaga

SEQ ID NO: 132301 - DNA, 1035 bp, Homo sapiens
cagtgagcctagatcgcgccactgcactccagcctggtgacagagcgagattccactcaaaaaaaaaaaaaaaaaaaaaaaaagtagggttctccatttgttttctacaacagtccagtctctccatgctttttgcatgatgcctctgatgcacacgatgactttaaggtaggtgttggtctccatgtcatgaatgaggaaagtgcggctcagagaagcccagtggcctgtgaaatcacagtgttcctcaggcagagccagcccactcgctcagttatatgccagcatcctttctgtttaccacactgcatcatctacctggttgctaagccttacttgttttttttgactcttgtattctgctgaaggcttaattaaacttttcttttctgaaataatttcataggttgatgttcttaaggcaacagcactccctttgttgaaacaatttgggattgatggtgaatcatttgaactgaaggtaagaatgtttgaactgttgaccatatgttcctgtggaaaacattttcccactgactcattggaagagctgtgtgactcagtgtatgtgtgtcacatttgaagtcaccagttatcagaagactcacagggctcatgaaataaacactacagactttgaactgaaagggaccctttagtaataacaatagtagctgacagtgatgttgcacttcttttgcggtgggggccgttctaagcagtttacaaatactaactccttttctcctcacaacagctccgcccatgtgcctcagctagcaagcagtggagaatagatttgggccatattggctctctgatctaaatgatctggatataatttatgttcaggggctcccaacctggatgtccctgagaattttcagtatttccaaaatctagtagaagtagtttaagcatctgtattttgttgaattatatcaatccaatgtggtaaaccgtttagcatctctgccttttacattcatgttttaaacaggggaaatgacttcatttttatttaataatgttttg

SEQ ID NO: 132302 - DNA, 1034 bp, Homo sapiens
ctcagatccctgtctgttaaccaaacatttcagccactgctctgcagagctgcccatttcacaaacacctcaaaggaatgttggtttgaatggagatcgccctcttctccagttttggagcctgggaaaaaagagctgcctttggaaaaagcttgagttggttttgtggtttttttccttgcaaggctggttgactactggactaagcttggaggttgtatttcccatgggagggctcagactgggagaaagaggcccactctcttgtgtgcatttgtggttttaactgaattacttccaaagtgcatcttttccctcttgcgttctacaagatgacctaccagccagggcccagagggagctggtgttggttcctgccagcagctgtgactacacagtagttaccttttacttaatgccacccactctttctcacccctgccttatgtggggcgtaagagaaaggaacattctgttttagttttgcagtgctgtcctaggagctcatgatttggtacatgagaattaagtgaaaaagctggcagtaaagggggataagttggaattcgtgggataatctagtttcttttccttgactgtaggaaaggtactttgagaatcaagctctctctccacctactgtaacatacacacacacacccctcttagctttctctgacatggaacattggggaaggggaagagtgggagtcccatatggactgtagctatggacttgtacattggtattggttcttaatatggttttcataaatgggctttaggaggttcataaacctgaaaaattttctgcaagattgtgagtatatatgtttctcaggagagggtccatagctttcatcagattctcagagagttctctgattcttgaaagaataagaacctctgcttgggatttgaatcttggataagtaataaagaaaagcaatagctgacatttgttgggctcctactacacactaggcattaagagctttacatgcattttatttcatttgtgcctccaaactctg

SEQ ID NO: 132303 - DNA, 1520 bp, Homo sapiens
accattattagggctactaaatgatatctgacagccagagaatttcagagtgtctgtatctgaaaatggatttatttcctaccctacatgccttaaaaaggaggcaggggcagttgtagccatatgaaccacactgctggccacctatcctgttcagtctagccttggatagtaacgtgccttggtcagactggatttctaattttgacctgtgcaaaatatgtagaaattcaaggtcatccttctttgactatgtacaatatgttttaaagttattccagaaagaatgatcagaaagcgtgtttgtatgcttatgtatgcgtctagtggaggcaaaacagttaaaatggctgagaaaatgaaaaacaaaagaagaaaggcaacctaagcagttgtacctcaggagaaagtgtttgaagagaagtctgttctgcttgttaatttggaagaaagggaaggaaaagggggtggaaggcataattttatacataagtagtaagaataaagggatctaaccttaacaagtcttcagttttaaggaactcaggaagagataaaggagagaagttaatagagtatggcaagcagtttcctgaatgtatttgaataagtgtaaaagtaaggccatgaaaaggccgtttcatgtcagatagactgtgttgttctgtgacagattcaataaatatgagcgtcatccacttaacccttggaattaactctacatcttctagaactgattaagatttttttttttttgcatatactcaataaagatgatgtcctcctgctgctgctttaatgataaagggaaagtttcatttttttttttttttactagattcacttaagaagatttgaatctgatagtctcattctgatagtctcaactattacagttgctctaattaactgttagtttaaccctctacagttagttgatacaatgattactcttataagacctgtattctgttttattgttgcttgaactttggattttgatattatgagtgtatgtttctggttttttttttcctcctctcttttgttggctttccattttctggtttgtacaattattaatttgtgtttacagggtggatgcgtagactcgaccaaccaaagcctggcgctactactcatgacccttggacagcaggatgtttccaaagtcctgctaggccctctctctccctacacgtaagttattctttttcaacctcgttattctgtccagtgtaattttctcattgcccaaaatgacaaagggtgttgtgctgcacagagcctgcactatgaacacctgcttgtgtttatcctcaaatcagccagcagttgtcactcttaacctggtgtttatttttacatacaaggatttttgcatttctttccttccttaatcccaggtaactgaaattgcatgatctctattgggcagttattttgttcgtgctttagattttgtttccaggttagaggtaaactcctggtttggtgtagcttggattttattactagtt

SEQ ID NO: 132304 - DNA, 2445 bp, Homo sapiens
ggaagactgataagcaggaaactggtaaggaccacattatctcctgatagcttgtgtaaaagtatttcgtaggacaggatacctaaaattgagtaatcctaaatggcgtggtaacatcagtagtaaacaatgctaaaatagacttggtagttaagtacttggagaggagatgagggctggaagaatggcaccctaggtacagagactcgcttcctgtagagagctcactggaggcggctgccagctgtgtggccactgtggccccaccggctttgtagctgggctcgtagctgccgtttcccagcccttgcttcaggcctggggaagtcctgcttgcacacacggtatgaggtatggggtgttgtcttgaatgtgtgtggtcctggggcatggggtttggcagaacattctgtgaaaatggaatacatatatgttttttttcgtgacactttttttcttttgcttttggagatttttcaatttggctccaggacctgtatgatgttttcaagctttgcagagatgctcaagatatgactggacatttttgaaagttcctgtgtcctcttcaacacatcttctcaccaaacattaattgtagtgtcttttcttccagaaaacttgcataaaatgacttcctctcctgtgaaaacagtgtcctgctctgaatggagctttaaaggagtagcacaaattgtaagatgatgtatcttgaggctggggcttagagatattctgctgcctcccagagctttgtgcagacgggtctgccagggtgggaaagggaagcctccgttctttttggtaagctagcataaagacaggtaagggagtctattttcaagaaagctggatctgtttcatactctttctgcccctaatcactatggacagctccagcagcacaaagagatgaagggcaaaggcaggatgcagcaggcaaagttaacattgtatttgtgagtacagttgaggataaaaaagggatgaaatccacggtgaggaccatcatggtgggggaatagtttattctaatggattcaagagctttggagaccaaactaacacatttatttttatgtgtagttaaagtcatagaaacctgttttgtgaaacctcagatttctaaagaaaaccagaagcaagaccttccttggtttaaaaaaaaaaaagcatttcttcaagcagtttggacctgtttttcgtgtgtataaaacagctttttaaatgtctatgtaaagagcattgggattgctgttggtggttttctgtgctacttgagaaagtaagtctgtatgtgtgaaactctttttttttttttgagacagagtttcgctctgtcgcccaggctagagggcagaggcgcaatctccgcccactgcaagctccgcctcccgggttcaacgccattctcctacctcagcctcccgagtagctgggactacaggcacccgccaccgtgcctggctaattttttgtatttttagtagagacggggtttcaccatgttagccaggatggtctcgatctcctgacctcgtggtccacccgccttggcctcccaaagtgctgggattgcaggcctgagccaccaagtccggccaatgtgaaactcttttagaaaggcccaagagattttttttcagtagaataaaatactgttggataatcactggtatatgaagattctatttctgttaaatttgttgagttttaggtggcttacagttagtgacagtagttgcaccctccattcaacaagcttaattttacagtttagggagggaggatttatacttttggattaacagcaagaaaaatagcaaaaattaagatgcatcttaattagcactttcagaaattatttgtggaatgagactgcagttaccagagctctctgcattctgccagtgcacaagtcttggagtccagcctatctggacttaaggctctaccacgcgctaccaggagaccgtggaaatggtatttagcatcttggagccttggtgtcatttgtagataaggtgcgtggtcctgaagtcctggacttgtggagatggaacgaagcttagattaagtcagatgcttagtgctcctggcaacgtgcctgaggagctgtcagtgctgggtgctgtggttcctgcctggacaccccttcaccctgctgcagtccagtcccttggtcaggtcacttttttttttttttaactgctccttgaggagcaggactaccccagaggcagtgtggctagagtagcccggtcaggtcactttgaaccccaggaggcctagtaaacttgctttgggtgattttagggtttaagtcatctgtaagtggtctgcccagctacctataaatctatatccattaattttaaattatggattaaaaaattttaatttctagttattatttttatgactgacttcccctagtcacattac

SEQ ID NO: 132305 - DNA, 1114 bp, Homo sapiens
aggctgaggtggaggattgcttgagcccaggagcttgaggccagtttgggcaacatagtgagaccccatctcttataaaaaaaagagtcatcaccatatttctgtccattttctgctaggtctgaactaaataacttatgtgtcacgtacgaacttctaacctttccccccccagtttaatttatcttgctgtattgcgtgtatctctgcaaactatctaaatcttctttggaaactggctggctgaaaggaagtactatttaatcagattcgatgagaaggtcttaacttcagccctctaggtctgggagattaaaaccttggattctaggtggtagaggataatttttttttgaatgaatttctttttatttatttatttatttttttcctttttaggatagaatttttgcggcatttgaagagctttttccagattatgtttaaaattgaaaccaagccatgtggtgaagaactcaagggtggggataaagtgctgatgacctgtgttggcattggtttctccaaccttagcaagaccctcaagtgataaccatcacaagataaggccccaatgcctacagacaaagcagaagctgccacggacaccaatgggaccaagtccaaatggattaatccaggacagaatagccacttgcttaattttctgtgaagaaatatcaatatacaaataaaagacatccctgtagcatatggtttccagctgtttctccagtggcattgccattgcccaggaggggcccagtcaccatgagagctcccttgccttacctggaggaagaatgtgccttcaggccacagtcgtgctgctagaacagtctcgtagctgcagttcagctgtgcttcctcagcctactatcataggcttcctcagccctctgtcatatggctgttttgcaaacctgtggagtctgttactgttctttctgcaaggactcacctccttgagccttggtttttgttgtagggattaaatgagataatatgagtggcagctcttcatgagtcctgcagtgctaagcaaatgtcagaaattggtgtattagactatttatctttgatcttctgaatggattgctgtcatggacacgga

SEQ ID NO: 132306 - DNA, 1936 bp, Homo sapiens
agcaagcagcatgaacttcgtgtttatattggtttcccctgtctcacagtggacatggaggggcccaggtagatgctatgcatgttacaagtttgcatcatagccaaagaacttgttatgtttggggactccacctatttcatggcaagcctgttgtttcacgtgcagagattacttcatcccttaagactgcctcctgcaaacacagttttgagaaagaacccaggcaagagcctgcccagcaagaatatgcaggaataccaggatccatggcagatttcccctgccagctaatagagtctgcatttgatatgtgcataggcttgaagtttgtagaaggggaaagatgtacttctttctacttgaattccaaatggtgtcctcccccgggggtgaactttgcctcatcactccctctcggtaccttttgctttttaagtgaaaaggggctagagaaaggctgtgctttgatgtctaggggtgtgggaggatgtggaggtagagagttaaccttgaggaaggccaggacattctggactatgacattctactgagagctttacatactgtattggtaatatgctcttggtatataacaaatgctcacaaacttagtagcttaaaacaatacctctttatcatttcacagttctgaaggtcagatatccaggcagggcttggttggattctctgcttagagtctcataaggctgatatcagggtgtgtgtcacctgggctgggctcagctctcatctgaaggctctgggaaagaatgtgcttccagctcattcaggttgtcgacagaattcagggttgtaggactgaagtcacctgttttcttcccatttttcttgctggctgtgagctgtggacaactcttagcatatagacaggcactgtccgtatttctgttcacttggtctcccctaccttcaagctggcaatggtgcatggaatcctggtactttggattcaccttccgtttgataccagctggagaaaacattgcttaaaaatgactcatagcacaatagtcctacctggattatctccctatcttaaggtcaactgacaacagcaatactagatttgtgtttaaataaccaggggctgggaatcgtggattaccatctaagaattttgcctgccacacatactgcagtcttacctagtgccgctgacgttcgaactcagatctgcccatatagagctcaaatccagaactaaggggcacattgcttttggaatatcacatacctgccgttccttgtacaagctctggaaatggtgctgttggtcaatgtagggtggcacatagaggccaggcagattactataagcagtagaggggatatgtgctactgtctgctgcaaacctggaagtgtctggtgtggttccagccctgcatttggcaaagctgcttctggagttggaacatcttgcaggaatggtgatggtattgccaaaaagaggacaaatttaatatttatttaaacagctcactcccagccccttctcaaattcccaagagaagcaatgtaccattccttcgggaagaagtcatcctttgctgtttgctgggacatcttagagactattcaaatcctgcattctcttccttttttctagcttagctcctggtcggtccacttacttgctggggtagcttgaagcgagagattccagcgttttggggcttggttttctatcttggtctgtctgttcctttctgctgatagagatagaccattctgagttaacggcagcagttgttcaatgggagtgtgagttttttaggcagataaacctgtgaacttgctgggggtcatggcagtatcattctttgccttcttgtcatctacaaggccctgcttctgtctttcaacatcctttaactacattccatgcagactccagccagcctccatcatgat

SEQ ID NO: 132307 - DNA, 1042 bp, Homo sapiens
tgagagatattttggggcaagtactctcactgattctgactttttttcagattctccccctaggattaataatctagattattctggatttttataactttttgggtcttttaaagatccctccctgcttctttttttcccacaactaccgccataagcctggttgagaaggggctatctgagtgagcacagccataggcgcaggcctacagagtgggcccttcattgactttcccgatttgcctcagcaagtgtgcacctttaacctgaccctgcctttggtgacacttgaaccaagcccaacaccaaaatgtggtcagcactcaaaaaacaagaaccaggaaaatttaagggattttctcactggacagtctggggatttccattccaacatttgtattctctttaattatatgttattcaaatggacttcaattcatctaccacaaagaactctagccaggggatttctgcttttgtagctgtaggaaagaaattagattagaaaagattaaagcgatccttgcccaaggtcacacagctagttagaagagagctcatctcctggttccaaatcctatgttcttttgataaaaacgtaatgcttcgtattatttaaaatataaggtttggccaaataagttgaagattagcttttccctcttgagtcagaggaaaataataaatctatttctgcagtattcttctattggcctgagctagcatttctgaaagtatgttgttccactgaatactatttttaaaatcagccaggcacagtggctcattcctgtaatcctagcactttgggaagccaaggtgggaggatcagttgagtccaggagtctgagaccagcctggtcaacataaggtgacccctgttgctaaaaaaaaaaaaaaaaaaaattagccaggtgtggggccatgtgcctgtagtctcagctactcaggaggctaaggaggtggaggctgcagtgagccataatcatgtcctgcactccagcctgggccacagagttagacctcatcttttaaagaaaat

SEQ ID NO: 132308 - DNA, 1038 bp, Homo sapiens
gaccagatggatgcccagatgaggtaacaatttttttttaatccagggtagtcatgcattttcttttactttttactcaaggacttcagttcacttcctgaaatttaatgtgcggagcttccagataaacagcataatcagatgactgtggaacaaggcatggttatgacatgtgccctgtattgaaaattaatgtcttccaccaattaaaagatggcccttagtgttcatttaattttggtttattttctcctttacagatctatatgatcatgacagaatgctggaacaataatgtaaatcaacgcccctcctttagggatctagctcttcgagtggatcaaataagggataacatggctggatgaaagaaatgaccttcattctgagaccaaagtagatttacagaacaaagttttatatttcacattgctgtggactattattacatatatcattattatataaatcatgatgctagccagcaaagatgtgaaaatatctgctcaaaactttcaaagtttagtaagtttttcttcatgaggccaccagtaaaagacattaatgagaattccttagcaaggattttgtaagaagtttcttaaacattgtcagttaacatcactcttgtctggcaaaagaaaaaaaatagactttttcaactcagctttttgagacctgaaaaaattattatgtaaattttgcaatgttaaagatgcacagaatatgtatgtatagtttttaccacagtggatgtataataccttggcatcttgtgtgatgttttacacacatgagggctggtgttcattaatactgttttctaatttttccatagttaatctataattaattacttcactatacaaacaaattaagatgttcagataattgaataagtacctttgtgtccttgttcatttatatcgctggccagcattataagcaggtgtatacttttagcttgtagttccatgtactgtaaatatttttcacataaagggaacaaatgtctagttttatttgtataggaaattt

SEQ ID NO: 132309 - DNA, 1005 bp, Homo sapiens
attttccatttcaaggatccctgccttaggaacctttgacttataaagattctgacaagactctctctttgaacctccaatgagcaacatttctgctccctttcacacagtggtgtcctagagccagctcataccagctcacaagaaccaatcgctacattttcagggattgtgtaagctggttgttaaacatagtcacttaatgtattaaaacttttataaacttgcaataaataaattacagcaaataaataatattaaattgtgtttaaaacaaaggtaataaacagaactcatctgtttctaaatatttactattatccatactctggttatttatagctattgtatctatgtgatagaaatgcagatataatacacagacaaaacaaaatacagctacagtccagtttcagtgacatcccattggtagcctgaagttggtcttggtgggaatatttacacaatggaaatctgttgttgccaaatcaaggcttgacttcttattttgttgattgtctggaccaggggttgaaaaatgatggcctgaggctggccacctgttttccaaaataaagttttattgggacacatccatgctcattcatttatgtattgtctgtggctgccttcccattaccatgacagagccatccttgaaacagaaacatgagtccacaagcctataatatttactgtctggccctttaagacagtttgccaacctatggtctagattttaaaacttgatgaagaaaatgctaataatgcagattaagcttaaaagtgtgctttgtctgtaactattacattgtaagtagcataaaagttggtgaaatattcttctaatattgaaaaactattatccagttcagcaaataagttgtttacatcattctcaaataaatgaagttccaacatttgtcttgaaggaaacaattgtttcacttttgtcctactcattagtgtaaatgaaaacaccaaccatcatccattatactctct

SEQ ID NO: 132310 - DNA, 1092 bp, Homo sapiens
gcggctgggaggtggaggttgtagccagccgagatcacgccactgcactccagcctgggcaacattgagcactgaatgagcgagactccgtctgcaatcccagcacctcgggaggccgaggcgggcagatcacccgaggccaggagctcgagaccagcccagtcaacacggcaaaaccccgtctccaccaaaaatacaaaaaccagtcaggagtggtggcgcgtgcctggaatccctggcactcggcaggccgagacaggagaatcaccggagccagaggcagggaggttgcagcgagccgagatcatggcggtacagtccaggctccgcaagagagggagaccgtagaaagagggagggggagggggagggagagggagagctcaatcttcttaaaacgcaaatgcaaagagcacaaagaaatatgttcttaagacgcacaaggcatcttcttaatcatccctcctcagatgcaaaggttctgttgcctaattgtacagaggtaagaagatggatggtatccacccttcccctcacaaaaaaagagagttgtttttttcttcaagaattcagttcttcaagatttatggtgggaagaaaaatcaggaaacagccatatacttatagagcagggaaggattttggaaattatctagttcaatcagttggtgttaggtgagtaaaatgatggccagactcgttaagtatgcctgaggtcaggcagctagttaggagcaagaactagaatccacactgtgttcctagatcagaaattttactttttttttttactttgtcataagcccaaggtagctcaaagtggagcatacaagaatgcatgtagtgtattattataagtctccttgctttttttacattttaggtcaaaatggggtttatattttcaaaatctatgaatgaaagcatgaaaaatcaaaaggagttcatgcttatgaatgctcgacttcaggtatgttttaaaataattaagctattatgttgttacaatgcttaaagtttctaccacatgtactccagccgtacattctctttgactcccaacaataaaatgttctttgggctgcatcctta

SEQ ID NO: 132311 - DNA, 1071 bp, Homo sapiens
tttgcgtaccggtcgcctggtcccggcaccagcgccgcccagtgagtgaacaccggccgcaggcgggtggggagaagggtcagcccggccatgtcagtcagcgcgatctcctgggctccgggcttgccaggcagcgctgggcgcccgctcctcgtgagcgccggctcttggctctcgcactgcccctggtgctgataggtattgccaacttcgttccattagagcgcgttcttgtcgcctggcgtggactccggatctctccgtagctttaaaatagagttgagaaaaacaggcacagtgctctcaacagaaatcagcacactattgcggggaatacctaaattacagtaactggcctcagggagcaagggcggtgttaattacagaaaacctccggaagctgtgggctctgggctggaatttgcaaggggatgtggcttaatttcaatgggatgcaaatattgaaaatgactgtggtgagacgatcagtcatacattcaggcaatgtgtcatctgatcgggaaataagtcagcgtggtaatcccgatgacagaattcatgcaattaattttttatgtccccccaagtaaaatcaaatctaggtactcacgggtgaccggaagaaaggttgtctggaacttgcaggcaccacttctcctccccagaaatacaccttcccatagtaatctatagctcacctgaggcagggctgaagcattaaagaccccttccaagatctcagaaggaatcaaagggaaaatgaagacagagggattgaaatcagcattctctgcaaaacatcactctgagacacagtgatgtttaaaattgtataagtagcaagacatttttttttacccctggtgaaaagtgttagaatttttaaaagacttaacttatacaagtgagtgaaatcaaagttatccctattgcaaggtcaattttgcttattttctgatacatattttgtgagcaagaggagatagctgaaagtgttctggacaccctacggaatattcccagactttgggaaatgactttgccaggaatggggaagttgggaaaggaaag

SEQ ID NO: 132312 - DNA, 1037 bp, Homo sapiens
ctcacttagtaaatcaggctctcttaggagtgatatattttaaaaagagacaactagccttgtggaagggacagtcgtttagtagtctaagctggttgtttcaatgttcaaaagaattgtggaaattgtatgtgtacagtgataattcataagactgaatctctattaaaatctctaactgtacattatatgggtcttctaatgaacttttatgtactacttatacctactgtcctctattctaagtaggtattcggaattccactgtttagactcatatctcttcagaattatttcctaccccaaatttgagaaatacagtatagtgttgtttatgaacaaaagagcctctagatagttacttagcttttttatattggagccccaatattatattttggagccccccaaatggtgttaaaaaaaggctcagtatgtgtaggctagattggggtggtagaggtagaacttgactgggggcagttggtacatttctgctaaggttattgtaaaaggactagtttcagctttgaggatgaaactgttgcataaggtaggttatgatttatgattgacgtaggtgtagtgtgagatgaattacattttgtactgtactgagggcccagaattattcctttaatatactaactgtgactatgaaagtctatatatgtgaacatcagaatggtatctttgaatttagccattctaaattagatgtatagacattctcgtttttcaggtcaccgactttaaacatttaaattagcttcagaagtatttttgaacatcaactgtaaaagacagatgtgtataaaagggatgaagagacatgttatatgttagtgtgttagatgttagtgtgttaatataaatcttgtgagatatcactgttgtaggtagctaataaaaagctgaaatgggcaaataattactaggcttataaaataaattatatgtcgtttagtaatcctgagcaaaaacttagttcccattggtatgtgctaatcatggaaaaaaacaatgatatgtcaaaa

SEQ ID NO: 132313 - DNA, 1035 bp, Homo sapiens
cttgtctattaaaaaagcttattcactaactcatttctcttcccctagtctctttcacctacataatgaagtttatcatttgcattgataacaatttttttttttttccaaaacgaagtccaagctctctggcctggcatttagaacctactttctccatatcttgaacacatcgaacccacaattcctatttaatgcctctattcctttgttatttgctctattcagtatgactcccctgctatctttttttatgtaagaaatttatctgagttggttttcaagctcaggtcagacatctgttgtactctataaaccttctgccctcaactctcctatatccgcccctgtacccaataaataactgatctggcatgtgcattcccatagtatgttttaaaaatttacactactaattcatcaataccttcttacttaaaaaaaaatccaacaatgagagatctataaagataaaaagtaaaaaaatgtgaactttgcttttttagattctaatctcatttcactctccagttgtcctgtatctcttgagtaaataaatacctaggaatagaattgctgggtcatatcacatgtctagtaatttcagattggatgttagatactgtattacattatccattgtctgatttttgtccttttcctttaaagagtattgaaggttgttttgggtggcaggtaagctgcttggagatcttactgatcttttgaggctttttgtatgtcttttaggatggatttaactgttaagctagcttagcccttctgaagtccactgaatgtcctaggtctttaagaaggtctctccattctggctagtcagaaccgaaatgtctcccagtcctatatgaactgggtagccaaaaaccctagtagtcattctttgcctgtatttgtggagtgtcactatgtatttggatagtattcagtaagactcgggaaacccctgcaggtttctagagcttttctctgtgtggctcccacatcactggtgctctgcttcacaaatagctgctt

SEQ ID NO: 132314 - DNA, 1066 bp, Homo sapiens
agggctaatatccagcatctacaaaggactcaaacaaatttacaagaaaaaaacaaccccatcaaaaagtgggcaaaggatatgaacagacacttctcaaaagaagacatatgtctttttaagtttccactgaaaggagtctacctctgtgttgttttctgtcttaagctttctagccctatttgaattttaacttctgtatatatattactttggaaaataaaatttaactttaaaaccagatatattaatacatcgaagacatctcagtaaatcatcacagactgtgtgttcagcagtttaaatgtgactcctataaactaattactttcatgtcctttttacaggctgtcacatcagtcagacatgttagttgaacacgaacctgtatggttaaacattagctagtttagtcatttagacttagaaggaattaagtaagtactccagttcatagtagtagcaggatagaatggtaataaatcaccacaaaactttataagaaaaatagtctgtaacaaaaaaataagcaaaaataagtaagaaagaaaactaaaaaaatgagcatcaaaatatatttcccaaagccaggaactttgaaagctattggacttgtttgcctctttgtgcatattttaatagtatcgacaaattataggaatgtacttgactggaaagggagagatgacatcagcaggctaattgttgccacaagtgatagctgatggtgagagacagataactgttaaattccagcacaggcactgaagaagatactggtctaccatgccatgtggagataaagaatacaaaacaacctgtagtcctttgaagggtcgtgtgtgacagttcagttaagttggcattgacccagcactctactgcagctatttgatgccagggatttaaaattttaggtatttagctacttattactaagtaacttgtgaaacatctcctaattgcacccttgaatttcaccttaattctgattcacacccaaagaataggaatgaaggataaggtgtggagtaagtaaagatgaagccacacgatttggatcact

SEQ ID NO: 132315 - DNA, 1212 bp, Homo sapiens
ttaaaagggagatgaggtatctccatcttgtttaaaagagagagcatgtatttttctggaagaatacataagaaactggggatgagaactgagtagctatgggacaggtttgggggaaaagctttttattgtgtactcttttttaatattgaactatgtaaatgtattgaattatatgaatgtcatgctacttttaaaaaaatccctctgactcacagttctaagtaaaggtttatttcaccatttctcttgttagagtactgtacagaatgatactgaaacattaaaactatgcaagtggctgggtattgtcttgccttgtttggtccatccccttcatatcttattctcatagaaaagaacacaattattatttgcttaaatgtaatcagtgttacagaagattgagttcaaagttactcatcgccttggtcacaaggttattcatcacttcacattttatttatttcagcatgggaatcgttttcaagaaagtaacttgatacataaggaattctgagtgtctgtaggtaccaagaaaaggtggaattgtacaggcttggctttctacctccacctggtgggaaaccttgtatggtgcatggaaatagaatagaaaaagagccaaaaagaaaaaaaaacaattctgccatcttgtccaagtttaacctgtcaggtgctaggttttaatctatgaatttaggtggttggaaatctgtaaggtttctctcaaaactccagtgaaataactgcatttcagaacaaagttatcagcacctgaaacacataactgctggaaatttgaaatttgctatagattttaaatcgagtgagaagacatgaaacttagatttttataaccaattattttccctcctgtcaccacaaatataagtcagataaggctaggatattggttatgctgttgcttataggggtaagagtactatctcatcttttatttttgatttgaagaaaaaatattaatgttaagcatctaacttttgttattaattgaggatagagaatgtttagaaggtaaaaacataattttaatgagagtttcccctcccctcccttcccctcccctcccatccccttccctacctctctccccactcctccgacagggtctcaccttgtcacccaggctgaagtgcagtggcacaatcacagctaattgcagcggcatgatcacagctcactgcagcc

SEQ ID NO: 132316 - DNA, 1066 bp, Homo sapiens
tttttcatcagtaggttcattcctgggcttcacagacgtacacatcagagacatggaatactgtgccacacttgatgggtttgctgttgtatttaatgatggtaaagttggatttattacaccagtgtcaagtagatttactgcagaggtatgacttatttactttgaagggttttttgttattgtgtacttattttattctttgttatcaaattcttctctattttcatcattcatgtaagattttaagggttgttaattttttaatcaaaccaaacatataaatagtataagtagacaaaattctcttggacatgttaaagaaaaataatgattcctgttctcctccctgctctcctcatgcctaattttccacttttggaggcaactacttgttattcctttactggttattttgatttttaatctccactactctgaatatttcctttaatttttagttcttaggctgtgtttattgacttcttactgttgaaagtgaccatttacttccctcttccctgcttccaccatacttatattcttctcatgttcccattatagttattgtgattttgattaggttactattaattgtttatatttttatcaatatgtaagccccattagtaccgaaaccatgtggtactgacgcagaagtttttgctccttagtttagctaaaagcaggttcttgtcacacagccaggaaagattaggcatgcagacatactgaaaggtgaggagagcagaatttattaaaagcaagctctcagcaaataaagatgatgtcctgctaacaggctcccacttcacagattgattaccaaaccccagcacacacgcgcgtgcacacacacacgctgaagagccccagggtcctacccgctgaacaaggcgtgaacttaaccccattctcctagtgcgcttgtgggcattattcagaaagaatcactcaggaaacggcaaacgggcagttatttatccctctggatcaccagtttcatctgggacaaggagtcccatctttcagccttcaggcactttttgggcttgaaagtgggttt

SEQ ID NO: 132317 - DNA, 1001 bp, Homo sapiens
ctaaagaataaaccaaacagaatgtactacttttcactgactgagaagttaaatactatgtgctaggtgatgagaataattacagtgagcaagttagatgctgtttccgctgtcaaaatgtttacattctaacaagaaagtcatctttatttgaatttggagatgaatttccatattttagtgttttttaaataaattaactagcactggactgagctgagtatttatcagaccaattcatgagaagtttgaggttttaagggagactatttggtagtattttaagggagactattgtggtagtcctggtgggatattttcctctgcagatgaaaccaaataaagcattatgaaattgtatgtttattgaaggagaattatattgactacggtaaatttggagaaacactttttaagccttaactatttttctttattatagcagcttcatggagtttggccacaagatgttgttgacggaacgtgtgtagcagtaaataacaagtatcgactaatggcatttggctgtgtgaggtataattgatgtaggcttttgcatttttaagagttgttgcaaaaaatactggtttttttttttgtaaacataagatgttcctaacatacttataaactgcatcatgctatcataatttatcagtcaaccttaatatgaaatgtaaaagtattttattagattgaaacaaacaaaagtaaagggcagattttggaggttgagcatgttaatttgtaaaagttagcgttttcttcagtggtggaaaattgagttacaagttaaacagaataaatcagttaaagtttaggttctttattgtttaaaagaggatttggaagatttttttaaatcttaatttttaagacatcagcattcatgacgccttcaaattagtgagtgtgctttagttaacaagcaaatttaaagtgcacatataaaaccagtttcttgccttagtttattaaatagagattttagaaaaaaattg

SEQ ID NO: 132318 - DNA, 1817 bp, Homo sapiens
aatgtgaaaatagcctgaatttcagatccattattccacttgaagactaaggatccccagaaaagaagagagcatttctccctccccttccccatcccaaataataatttaaaagcacccttgagttttatgtcaagccagcatttggactaaaatggaaaaatgacaagggtagggtgctactttgtctgatttcaatagttaatgagtctactcacctttgagaacactggctttctagctgaaatctcatagtcactaagagcactattctttctaattataacagtgcatgagattattgtgtagtctttgtcctctgtgaagaaaatcaacatcgagatacatgtacatttcctataataaaactaaatcgatgtgttatttttgcctgcgtaatattgagttgtttttatttgttttcctcctttgcccttttgttcctctttccctcatttagagtaaccaagagcaggtgttgcttcagggtgaggatcgcttgtacttgaactgtggagaggcttcacaaacccagaatcccaggagttcttcaacacactctgagcataagcccagtcgagaaaagagcccatttgcagatggaggtttagagtctcagggattaagcactttacttggacatcggcattggcatgttgtacaggtaaatctttagttactgattactagagacttattctttgataggatatcacctggaacagattattaaatatttcatctgttaacttcaggcaactgagaatccttttaaccattttgtcatgtccctcttctgcttttctgtgttcttgtcctctagtcttctccctcctttctttccacttggcgtagagtgtatccccacctgtttcaagtctattaataatgtcaagaactagaagtttatgttttgccttctcattgagaactatttattttactttcagcctctttttttgtataaatttagctctacggatttgcacaggcaaaacaaagtgtaataatctcatggaaagtggcaacatcagctagtactctgtacagctgaccttacagtcttaaggggccacgttgaggttaatcatgtgactttggacccaaattgcagacttgtgatcagtagagagctttattgttaatacttttattagctaatcttattccaaattatttattcattctgatatcacttttaaattaacagtgtctcacagtaattctgataaactgacatttaacatggaaattaattctcaattttgataccaagtaaaattattttggggaaaccagtaagttgaagtttcttaaaagaaacttgcatacataatttcagtcttccgactgttttctttccctttttgatagcaaaatattttaggtacatcaaagcccactcttagtttcttttagtcagtttctgtttccataattctttgccttactttgactctctatatgtttaccctactagcctacttcagctcccatgttattttcagttgactttgagtgaagataatgagagacaaaaaaatggtcatgtgaaaggttgaaggattatctcctacattgacatctggtatacactaaaagaaaatgaacttaacttacattaataaattcatagaatcaaacaatgtacataccattttataattagtaacaatttttaaataaaactgcactagctacttccttgactaaaattttccactgctcccttctctcctatagccatttctctgctattttcatttccccatactttgaactattcattctacactgacctagcatcaatgccagtt

SEQ ID NO: 132319 - DNA, 1084 bp, Homo sapiens
ttaaaaataaggaaaatcagatataaaaaagtgatattgaataatatgtaagatttgattctgataaaatacttgatatttgataaaggatcttgtgttgaaatagttggtttatttttaattctttttaagatcggtaactataattccttagcctgaggatttattcttacattccagcttgagtttatctgatgtgatcagaatagatttccacagaatttgagatcattccatgcctattctgtgtgtgatgtatatgggatagtgagtgtgcgtgtgtgtatgtgtatgtgtgtgtacatatacgcatgcagttggaagagaaggaaatcagtacttattaggtgcctattgtgtgttaggcattttaaggcactttcatatatgttatcttactcatctgcacagcaacccagtgaaggcactactgttactgatcttttgatgtaaacacacacacacacacaaactaggattcagttactcatctgataagtgattaagccagaatttacactaagccctaatgggtgttagaatgatgatgctatatagcacccagttatttttaatggtatacttgccttcttaaagaaatatttatttttataaataggatatggatcattattaataaaggctctagagttatcattggagagagggggagtaagagcagaaataatttgatctttggctgggcgtgtggtggctcacgcctgtaatcccagcactttgggaggccgaagcaggcggatcacttgaggctgggagtccaagaccagcctggccaacatgacgaaaccccgtccctacaaaatatacaaaattagctaggtgtgttggagcatgcttgtaatcccagctacttgggaggcggctgagacatgagaattccttgaacccaggaggcggaggttgcagggagctgagatcgagccactgcactccagcatgggtgacagagtgagactgtctcaaaaaataataataatttgagctttgtctgggtaagaatttttataaatatattactttgttataatttctggtagcataaggtaaattttttaaaaaattt

SEQ ID NO: 132320 - DNA, 1056 bp, Homo sapiens
atcttatctgcatgctaaatacttccatatgtccaactatttcattggatgtttattctagaccccttaagcatcttggtctcccttctttttttttttttttttttgtccttttttctttttttttttgagatggagtctcactctatcgccaggctggagtgcagtggtgcaatcttggctcagtgcaacctctgcctcccaggctcaagcaattctcccgcctcagcctcccaactagctgggactgcaggtgcacgccaccacgcccagctaatttttgtatatttagtagagacagggtttcaccatgttggccaggatggtctcaatctcttgacctcatgatctgcccacctcggcctcccaaagtgctgggattaagggcgtgagccatcgtgctcggccttggtctcccttctataggtaaaattggttttctcctttaaaatatagttcccatttcctctgcaaaccttatttaatggtaaccagttagtcctaattgataagggaatatactgttttacagaagtttagataaaaggtgtgaaaaaaagtgacaatttaaaaatcattttgcagtcctgaggaactaatcagtcttatcactaaaaatgggaaaaccagatatggtatgcttcttgaggtgatataacatgaagttcacaagaattattgccaaaaatcttgaacccaaatcaaatcaagtatagagagtcatcttccctaccacaagggagcagaatacaagacattctgttggacagctacaagtcactaacatgggggaagaaggagtgaatcttctagattaaataagactttgaagccataaaaaccaaatgcagtggttaaaagtcatttgtgaggcaaatgtgataatcactaccctgcagaaccaagtcagtaagctcatttgtatcttcattcaaatcagctatgaaaagacactgttgaaacaattagggatatttaaatactaatggagagagaaagtagggaataattgtaaattttattggatgtgatactagcattgtagctatgttagca

SEQ ID NO: 132321 - DNA, 1078 bp, Homo sapiens
ggttcaagtgattctcctgcctcagcctcccaagtagctgggattacaggcacctgccaccacgcccggcttatttttgtgtttttagtagagacggggtttcaccattttggccaggttggtcttgaactcctgacctcgtgatccacccacctcagcctcccaccaaatgctgggattacaggtgtgagccactgcgcccagcctggcccagcctcacctttaagcttctgatgctggtacagtcgtctctgatttagtgattgctcacatttttacttggaattcttaagaatttttttttattttttcaaattaaatgagccaaaaagaaaaagggaaactctttggttttcccttccctaatttctcttcctgtcttctatcagtgataataacttcaacttctctagcacctcagctaacctggaaatcatctttggttcatctctttttctacctttcatgtctaggatagcagtaagttctgttttttaaccaaaatgttccttcctctttacagatagaaatgacttgatatctgaggttccttttaaaacagggctgctcaaagtttaatgtgcataatggtttaagttgcgtgatagggctcaattggaaatcattatactaggctctctgaggtttgattgaaatttttcattataaaaaggcagactatttcctcatttctgaagtcaacacccatgaaatctgcctctcctcagtaacctatcctgattaactctgattttttaaataactgtcttattcaagaaccataagtagtggcttctttcctgctgctcttttacctggctttctgaatcctccttgaaggtctgttaccatccagctttgttctcataatgtccctagtctagccagactgttctcactttcccaatagttccatgtcttcgttttccattagattaccaacccttactctcccacacgtgtatgtcttcctcatctgtcaggttcactgcatccttttaaactttctgttgttatgacagctagatcactgaagtgatctctcatttttataaacttctaaagttgtcttagcttt

SEQ ID NO: 132322 - DNA, 1038 bp, Homo sapiens
gcaggacagctcatcatgatgcagagggacaggtcaggcccacagatccgggagaaggacagtaaccctaataaccaaaggaaacttgtgagtaaagtactagtcatttcttttcaaacattaagaaggtatgggatgaggatgaaggaatgaaacaatttaagagaagagtattttatgatttggaaaggagaaattaagtccataaaatcagtcttaagcctctgggtgtaagactgactgactggaggataaggtcccaaaatgatcatgaaatgttccatactccatatgttaactgcttaggcatcattcattgcaaattctaatggaaaaaatagggatagactggtgaagttcatggggtgttttgttttcagatttaagtgtatatactttaaaaggccaggatacttttattaactctaattctaattagatccctttgcttttcccaaaaaaatattatactatcatttgaaagacttagtaaactagtacctaggaacttaagaacctgcagatttaataggaaaacaacttgattcttgtctctccttctccagctgccattctgtcctcctgttgtactagcccagtctgttgaaaatgtctggacaacgtgtcgagcaaataaacagaaacgtcaccttctggaggccctctggctgagctgtggtggtgcagggatgaaagtttggctccctctcttccctagggatcaccgcaagccccattccttcttgtcccagcggatcatgctgcctttccacatcaacatttacccgctagctgttctgtttgaagatgctttagtccttggtgctgtcaatgacactttgctctatgattctttatatactcggaacaatgctagagaacagctggaggtgctcttccctttctgtgttgtggagagaacctctcagatctacctccaccacattctacgtcaacttctggtcagaaaccttggggagcaagccttgctcttggcccagtcctgtgccacattaccttacttccctcatgtgctgg

SEQ ID NO: 132323 - DNA, 1084 bp, Homo sapiens
cttcttttcctctgggtagaaccccagtagtgagattgctggatcaaatggtagttctacttttggttattgagggaatctccaccctgttttccatagcagctgtactagtttacattcccaccggcagtgtagaagtgttccctgatggccacatccatgccaacatctactgttttttgattatggtcattcttgcaggagtaaggtggcattgcgttgtggttttgatttgaaaatgcaacaaacttttaaattacctctgatgatagaggaccaaaaggaagatagataaatctgtaggtaatccaaaagccttcttaaagtcgtaattttacctttccttctaattatactttttgatataaatttagtgctaatgcatttgacactcttgtgacctattgattagagaagttattacacagtcggggagccaaatgaattgtatgctggagactgaaactgctatcacccatagatgggatattgtcttctgagagatgactatgaattcacactaacattataaaatcatgagaatttcctctggtttgtgaggcctgtgtattccttcctatgttcttctgttgttgtctcatttttttccttacctaatcctttgttttatattgttcatattctctttttttttttttccccaggacaacatgaacatatgtttatattcttactaccgtgcttgggcacatagtgagagcttattgaacgtttgttattgtcatgttttactgggtttttttgttttttgagatggagtttcgctcttgttgcccaggctggagtgcaatggcttgatctcggctcatcgcaatctccgcctcccaggttcaagtgattcttctgcctcagcctcccaagtagctgggattacaggcatgcaccaccacgcctggctcattttgtatttttagtagagacggggtttctccgtattggtcaggctagtctcaaactcccgacctcaggtgatccgcctgcctctgcctcccaaagtgctgggattacaggcatgagccaccatgcccagcctgttttactgttttttaacaagtgcttacta

SEQ ID NO: 132324 - DNA, 2882 bp, Homo sapiens
tatttgctacacattttcatggaggcagggtgcctagactggtgcatcgttataggcctgattcttagagaatcctcaataatcaatcagattttggttattacacagtcttcagaggtagatggagagatgttacagaacataaagacagggctccatgcagtggaccgatgggcctctacagactggtaagtgctgctttccttaggcttggtgtccttccatgtcttttggtgaatcctgtcctttcacattaaggcctagttatggttcatgtgttacattttatttatttattatatattatttattatatgttcatttttaagctactttctttagtaatcattctatacccagctatttaaatggataattccatcgagtaaggttacactgttggtcagtgtataatttatagtgtgaatgtatatcactgacttaagattgatgcagtgcaaatgagcttagaattagactggaacttcagatttgcatccctgtgaaattgaaagcaatggtctacaaatatctacttgaaaagattcaaacttaaggtccatgtgaatttaacattccatggcagttacaagcaaatccaaattagagttgtggttgcagttaagagccttggactctagccctgtctttattaccagttaatgtgtgtatttggagctagttacttcccttacttggatctggttttccttaattggcaaatgcatttaggttaaatgttgtctgaaggtcctttttcaagtctaagctcctgttggcctttcaattgtaaaatataatttttagttgtaatactggttctaaaacatcagcctttgcccctaatgcttagaaacttaagcctcaggcttatgcaatgtgcagccccctctgctgggcaggacagccaagaagcctttcctccctaccttctttgcctcctctctcccctcctaatctatcgtcgtctttaccatatcaatgttcagtagaagttcacccgtaatgttctaccaaaccttttgaattatggcagatgagctaatgttttttttctctacatagtcctggatataagccatttttaaacatcattaagccacaactgcagaagctcagtgagataacagaagagcaggtccagccagatgccttccaaccaataactatgggtaagactccagaacagactagcccccgggcagaggagagcaggggctcctccagccatggaagcatcccccagggtgaagttggaagcagcaatatggtcagccggaaagaggaggacacagcccaagcagaggaggaagaaccttttcaggatgggacttacgactgttctgtgtcctaacagtgaggttccatcacaaaggggcagtattaattagcagcagcgtgcagctcagtacgttgtaacatagttggatgatttaacaggagaactcagttcagagactcttcggtaagtattagtagattttaactaattctttcttgtctaagaaatctttttgactccataaaaatgtgatataaagcatctttcataaaaaaattttaagctgcagtgaaaagtaaatattgtacagatgtacatgagaatattttggttttactcaaaggttggtagctcttaaaccacaggaattgttttgccccaggtgagcttactttttcactacttacatcttctcacatttcccggttctgcattatgtccagattgctttttaaaaaataaatgctaaggtgcttgctatagtctgtcaggtacttgagctacctgtttgctcccttggatacagctggactctttaatcagtcctcctgaatagattgctaccctggggcacaatatgtgccagtgtgatggaaacattctccttggctttactagccagtcaaatcccagtccagaattgatggaagctatttacctgtgagttaatgtgcttgttttagcaagcttgattcccattagaccaatgtgggcagaggtctgagggggttcttctcaattttgctgttagataccactaaactattttgtattaaagaacagtatctttttgtgaatactcttgtgtaaatatattcaaaggcactgttcatattttagggcttgtattataatttgcaaggttttaatgctggattctgcatgtctacacatacaaagacagggcttgctcctctgcaaaactgaggaagacaggtttattggcttggtcatgaagtaacagaaatggtcacactgatcatgaaatgcagcaagttttgtgcaaattaacatagtctcttatttattgcttttgtaaattgaataaagatggacttctatgtaaatagactgctgaatcctgtattaccacggctactaaaaattagtgtgtaaagaatgcattcttcattgtaaacttaaagtattttatgtacttctagaaatgacttaaatttgttttcatacattatgaaaacaactgcatactccttaattgctttaaacacccatccactgtatgtaattctaattaccttataacagtattaagacagcttgtttgtactgtgcaatttgaacaaggaatgcaatgttattttttacaaaaaacaaacttgtttatttttataataacgatgtatttgatgtggaccaaattcgtaccactatctaaaatagcctcttttctcatagtgcagttgtagtttagaaacaaaacttggtcctctctccttgctttttaaagtaaatggctagatttagttgtcttagccaggtttcctttgaagagaaactcaaaaccattttgaaactgcttagttcagaatacatcgaagtatttaaaattactgagttgggtaatttactatcatttact

SEQ ID NO: 132325 - DNA, 3240 bp, Homo sapiens
acatgcccagtggatactccatgtgacatggtttctccctatgttacgtggatgtttgtaacgtaagtcaatgaattttaatgatcatatgttcaaagagctttctgggttaacgcttttcagggccaagcactataagggtttagctgtggcgcagtgatgcatggcctgttgacacttgaaaatgccagtcttttggcacttcagcacatgtgggtactgccactacacacacgtcattttatatgaccttaaggacaaagccaacaatccacttcaatagctgcccctttaggatcaagaaagatgtacactgtcagagcattgttaatgagacaaaagttgtttccaatttaagccccaaaaccatttgttgtattagtggatggtgggtaaaatatcattcactgaggtaatgattccccttgagaatataactctgtgtaggtcactggaaagtgattgccatagggctgggagagaagcattgcactcttgaggctgtagcctgtgtcaagctgtttcttcaggcagcctctcaaatgtgctttgtctctctgtgctgaggcctggaccctgtgctgagctggtgactcactgtcctgacaagtggacacacagatgcactgctgtgctgctttcctgaggtggttttctatgcctgttttcctctgaaacatgtctgttacccctctccatcttaccaagttgaaaaggggaatatttggccacatacccctctggttttcgtaggttcttttggttcagaatattgtttgtgccagtacatgaccttaacttccttcctcagagcactgagctgccatctgggctattctggggtagaaggaaggctgggagtggtgggaattttataaatatttattctcttttctttgtttcataggagtcttgtgttatacaaggttagtccttcatggtataatcttactgatgcactgggcctatctttttgttttccagccagttgaatagattagtttttctcagtaacttactatccagcagactggctttcctgagacttgaggttgtggcttatactggaatgagaccactgtacgtgtaggtggttcagatcctgcgtaatggcagcatgaggacttaaaaggtggttttcattttgaagatggctatgtagcttgtaaggtgtatcacagcagtacctctcatggctttttggttccagcagtgagggcattggtgagatcaatggtaaactgtgcaagctttctttttatcattaggaaatgtgaaacgttggacaaattttgagttttaacaaggacaaaaagttgaaagaaaaggcacagttaacaaaaaagggtggctagatttatcttgggtgatggaggaaatgagagaggaatgctcttgaaaggtggtctgtggatctgtctgaatagaaagagcacagtaagtatgcattgccggagaaaacgtccttgaagctgcttgtctcatgtgtatgatgtgctttttaaatcatgcccctcgttgcctgcctaatctgtgactccctaaaaactaactgggcccatgtagatggggctgcaaccagagctgaataacatgttaggctcacacatgcatcagcactgcacactggaatcattgctcttcctggactttgtagaaatcagtctcaagtgcttcaagagtctggctcctgctacttttatctgtcaggtagcacataaggtttgcagggtttatattttgtatagaatcacagttgtggagaaaaagtaataatttctcaatgaattttaaaaatgggcctattttctatccccgtggttcatctgatataattagtgttccctgtgaattccccccctctatgggaaggatgcctttactctttatcagtaataaattatgactgttttcatattgccttagggttatttccctgtgtaaaccattgtcttttgttttggttttctttagcattatgaagctttggtattgtacaaggtcagtagtaagatgctcactagtctcagggcttgtgtaatattctgggaggtcatttaaatgccagaaatggtcaagcaattatacacagtatttatgactctgttaagcataccgtttgtctgtcacattagtagattctgagattaaaaaaaatttttaaagagtgatcatttaaataatttctaaaagggtcttttcaagctctaacaaagtcactaacaaatgcattattttctacagaattagatgttagtagtacagtactgcatattcagggaaaaagtgtgaggaattgatttcaaaatagttcgttcttgtgtttgacctaagaatgattgtcgcatgaagtgtttgtttttacagtttagcatatataaacaaacatgataggattccttaagatgttaccacccagggggccacaagccagcctgctgtctcaggaagctgtagaaggagtgtttgtcaatttcttgtcactggtttgctgacttactgaggattaattgttgccttacaatgttactgaaataaactgtttaatatactggttggtatctttttaactgaaaaacagatctgtgttcttctgtatccccatattttcaagggttattccatgtccacagagccttttaattgctgttaaaagacctagatggctcatgtgagcaaagaactcaacatggaaatgtttacttcagttagaatcctttatcttagaatgaaatggtacttctgaatttcacagaaattattaggtaaatgttgagcttcacctatgtaggagttttaaatcatccccattagcaaaaaaatagcaaagggtaaagggcgttcttttatttgggagtaagggtaggagggagggaagaagttgcctttcagccagagtgactcattgcttattctaatctccacagaaggaaagggcaccaccactcaccaaaatagagcatgaactttgagttcagagatctctgtgcaagttatttaaactttgagtgaattctctcagaacagttcaatgcaaggtgaagcagctgaacaacttctaacctaatactcctcttcttcttttagggccaataaagtcaagatgcagttatggctatttacatttgtttttagccaagatgcagttacgactctttttaaattttttaaaattatactttaagttctggggtacatgtgtggaatgtacaggtttgttacatatgtatacatgtgcca

SEQ ID NO: 132326 - DNA, 1100 bp, Homo sapiens
tcaagtctcaggaaagccagtctgctggatagtaagttactgagaaaaactaatctattcaactggctggaaaacaaaaagataggcccagtgcatcagtaagattataccatgaaggactaaccttgtataacacaagactcctatgaaacaaagaaaagagaataaatatttataaaattcccaccactcccagccttccttctaccccagaatagcccagatggcagctcagtgctctgaggaaggaagttaaggtcatgtactggcacaaacaatattctgaaccaaaagaacctacgaaaaccagaggggtatgtggccaaatattccccttttcaacttggtaagatggagaggggtaacagacatgtttcagaggaaaacaggcatagaaaaccacctcaggaaagcagcacagcagtgcatctgtgtgtccacttgtcaggacagtgagtcaccagctcagcacagggtccaggcctcagcacagagagacaaagcacatttgagaggctgcctgaagaaacagcttgacacaggctacagcctcaagagtgcaatgcttctctcccagccctatggcaatcactttccagtgacctacacagagttatattctcaaggggaatcattacctcagtgaatgatattttacccaccatccactaatacaacaaatggttttggggcttaaattggaaacaacttttgtctcattaacaatgctctgacagtgtacatctttcttgatcctaaaggggcagctattgaagtggattgttggctttgtccttaaggtcatataaaatgacgtgtgtgtagtggcagtacccacatgtgctgaagtgccaaaagactggcattttcaagtgtcaacaggccatgcatcactgcgccacagctaaacccttatagtgcttggccctgaaaagcgttaacccagaaagctctttgaacatatgatcattaaaattcattgacttacgttacaaacatccacgtaacatagggagaaaccatgtcacatggagtatccactgggcatgtacttagagctcatccacaagattaaaatacaaagagatcgtaggtgcaca

SEQ ID NO: 132327 - DNA, 1053 bp, Homo sapiens
tgtatttttgataggtttgctgttgtaaggattgaaggagacagtggacttttgttatctatagattaggttctaatctaatctgaagtcaactagttatgaactgaatgcccccacacccccgtttatttgttaaattatagtcatgaatgggagctatggatgtccataaaagatgactcagataggggacatttaaattctgttccactgataatatgaaagggggcaaaatgaaccctggagatgttcattgtggaaatggaaaatgtccccaaagcatggaaatcttggaaaccagaagaaagaggattaaagtgtcttatcatctaaattatattttattgggaaagcttttggagagaagactgcctcttggaatactttagaaagctcacttatttttcattataatgtgaaatagccctgccgcactttgatgccatgagttatcactcttttaattattttcttacttatgtgtagcagtgttaatgatagtggcttattaatagagtaagactgttttctttgggtaatggagaattgaaccacaatgcatatttcagacagctttcccttcagtccttggggatttattaaatacatctgctagaaagcaattaaagtcttgtcaagcaatcacggttttttgtttgtttgtttgtttgtttgtttttgagacagagtctcgctctgtcactcaggctggagtgcagtggtgtaatctcggctccctgcaaccaccgcctcctgggttcaagcaattctcgtgcctcggccttcctgaaatattgcatcctgtgtcactctaggttctgagatgggtgcaaaataaaatgaagagaagcatgaaaagggactctgaaatgtccattgtgtgctgataactgagctgtttctgagtcttctcctcctgaccccacttgtatcagcagtccccatttcccctgtcattcaatcagtatacgtataaccatgaaggtccagcagagaataacttaaggacacctattaactgattgcttgctgggcatggtggctcacgcctgt

SEQ ID NO: 132328 - DNA, 1129 bp, Homo sapiens
ggcgtttattagtgctgtctgggtagcattcccattgctcacaaagctctgtgtgcataaggacttcaagcagcatggtagggtatttttgattttgatatacatgggagaataccttaaaatacttaaggctttcagggactctttcttttttggttttattgggtaggctttctaaattgttagtttttaaaagttttcataccacacaaattatcttatgccttatactccatccctttctcatgtttgtgaacacatactaatatattacttgtgtattttgctttattcttatttgtattttatcctgagtgaaagatcctactccaagataacatacacccttaagggcaagagtcacatctaacctaatttctgttagggtaccaaggcacaccagtactataaaaatttatatctcactggaggatttcatagatgtgtgctttttttctctttttccctaggtgcccaaggaaaatttattgctttttaccttttggggatgtttattccttatctttatgcattgtacctcatctgggcagtatttgagatgtttacccctatcctcgggagaagtggttctgaaatcccacctgatgttgtgctggcatccattttggctggctgtacaatgattctctcgtcctattttgtaagagaaaataagtttttttctttttcttcattttttatatgaatatgaatttagccatactagattctgtgaaatagtgttacgtgtactttattgagaaaatctgaagcagaagaaatggtgaatgaatggccatgcatcttgtaaatttggtatcgtaagaaactgtagtatagagtttgttgttgctgtttaaaagttttttgcctccctatccttccaaattctctgatttacctcttttcaaatagcctgtcagatacctgagtgtgaatttgtagagcgtttaccaagtattaattgttagagattgcctggtggtgaatgatcctaatagtatattttgaaattactaattagaggcacatgttaatagatacatgggtggttttattagtgcttttagagctagtgaaggaagactaaatctgatgaggcttttttcattatcattccactaccttg

SEQ ID NO: 132329 - DNA, 1018 bp, Homo sapiens
gagatcgagccattgcactccagcctgggccacaggctctgtttcaaaaatgagcaaacaaaaaaagagggagtctcgctatgttgcccaggctggtctcgaactcctgagctcgggtgatcttcccaccatggcctcccaaagttttgggattacaggtgtgagccaccgtgcctggccctctttgccttttcttttgcacagccttgtacttaccagggatgttgtttggcaccgctgatggtcaccaggctgccttctgtgataggtgactttccgaacctgatgtgcatggccattatgcataggaaaagaagcagaagatgtctttggatactgcctttgaagagcgattattttgttttcatattccttacctcatcaaagtagtctctctgtgtttaagcaaaatcaagactgataatttaagattgtttaacaaatatttgttttctttccttctctttaaggccagtcatggtttcattactcagcacccctgggctagcttgattcgtgcattcattaacctagaggcagcaggtgtaggagggaaagaacttgtattccaaacaggtatgtgagattgtgcgttgtatattttaatgcaattctagtttttgtaaaagtagaaagtttttgattataaataatatcttcaataaacagtctcttgaatgagcattctttttaaagcatgaggtggtgttagcttgtctttgttaaaaattttgaaccaaataatgcagcatctaacacttgtatagtgcttattatatgccaagtgttgttcaaaccatttcatatatattaagtcattgaatcctccaaacaacatgtaagataagtactgttacttccattttagagatgaaactgagtccagagagattataacttgcctaaggtttcacagttgtttaatggcagagtgtgatttgaacctagacagtccgggtccagaaactttgttcttaacctctaattggattgttatataggtagtgaacttttagcc

SEQ ID NO: 132330 - DNA, 1036 bp, Homo sapiens
gggctggaaaagccctgcgggagacggcatatccaccacccgctgctgggtcggccctgcagctgtgtgcacccgagaactgccaaagaagctgggtcttggcgcggcgggacgggccaatcagaagaagtttggccctctgcagtttccgtccgctcactaggaggcgctgcggcagcgacggcggcgtcggcggcggccggggctgtcgcgggttggggcggttgggctggcagctgaggctcgtggccatggagtggggttctgagtcggctgctgtgaggcggcaccgcgtcggagtagagcgtcgagagggagcggcggccgcgccaccgccggagagggaggcccgagcgcaggagcctctggtggatgggtgcagcggcggcgggaggacgcggaagaggagccccgggggtagcggcggcgcgagcaggggcgcggggaccgggctgtctgaggtgcgcgccgcgctggggctcgcgctctacctgatcgcgctgcggacgctggtgcagctctcgctgcagcagctcgtgctacgcggggccgctggacaccgcggggagttcgacgcgctccaagccaggtaccggccgctccctcctggcacggcccgcgcgtccgtttgcggctcctgcgcaggctccggggcaccgcacctgtgtgcacccgcccctgccggaccgctgggactcgctgacccctcccaggctgcacgtggggtggggtgaccttgcttgtccttcttctggggtctgaattgccgggacttggggcttgcctgtccccggttaagctcgtggtgcagattggggttgccaggtagattgaacctgctttccactgtctgcccttcgtgcagatggttggttgtgagtcgtctccccatattctggaacagcttcccctttttaccttgcttagcccttctgctttccagatggaaatttgtgtacctagactgttgtataaattcgctttgggggcggggagttttggaaggcgctagtgcactgttctaactttctgaggg

SEQ ID NO: 132331 - DNA, 1049 bp, Homo sapiens
tattggacagcactagtacatatacaacacagcataatggttgagagcactgactctggagccaaattactgtgtttgattcttagctccacaacttactagttgtgtgaccatgggcaagcgagttaacctctctgtgccccagtttcccattctgtaacatgaaaataataaaaacactcccagaattgttgtgagcattaaatgaagccctgacacatttgttctggatacaatatcctcttgttttatatttggtagtatcaatgtgcctttagacacaattacaacgatctctgtggtaaagatgcaatgtatatggtgtctataaatagcattcaatgattcgttagttagggcttgagacttttactgtcatggaaaatctaggtatagctaagcttttgagattttgggaactccttaaccctatttttctctactcttgcccccaacaatcagcctatatacttgtgaaatttaacaattacttcactgggcagaaattatatgggaacacttagaaatttcagtccacagggaaagtataaatatgttaactattttaacttaatcccttcctagaaacacatacactgttgccaagcccatattctccctttcttgttctcacaggttcccaatgctccacctgcttatgagaaactctctgcagaacagtcaccaccaccttattcaccttaagagccagcgagacacctgagacatgctgaaattatttctctcacacttttgcttgaatttaatacagacatctaatgttctcctttggaatggtgtaggaaaaatgcaagccatctctaataataagtcagtgttaaaattttagtaggtccgctagcagtactaatcatgtgaggaaatgatgagaaatattaaattgggaaaactccatcaataaatgttgcaatgcatgatactatctgtgccagaggtaatgttagtaaatccatggtgttattttctgagagacagaattcaagtgggtattctggggccatccaatttctctttacttgaaatttggc

SEQ ID NO: 132332 - DNA, 2842 bp, Homo sapiens
ttgcataaagcatatgttaagactccagagcaaccccaaatagtactgattccgtctacagtgggcacaccaataaaaataaattcatcaccagctgtgtctcagataaaggatgtgaaaattggactaaacataggtcaagcaattgtaaatacttcaggcactgtgccagctataccatcaattaacatattacaaaatgtaaccccaaaaggagaagacaaaagtagcaagggctatattttgccattgtcaacaagtggtaattcagttccagtaagctcaaattttgtgagtcagaatattacccctgttaatgaatcagtggtttcttcagcaagagcagtaaatgtgctttcagttaccggagcaaatttatctttgggttcctttccagtgacctcagcctctgcttcagctggggcacaacctcctgttttagtcagtggaaatgatacctcttcaagaattatgcctattttgtcaaatagactttgctcatcaagtctcggaaacactgtggctatatcaactgtgaaaacaggacaccttgcatcatctgttctgatttcaactacacaaccagtagtgtctcctaaatgtttaacatcagctttgcaaattcctgttacggttgccttacctacacctgcgactacatcccctaaaataataaacacagttccacattcggcagcagtaccaggagccacacgttctgtatctatttctaaaagacaatctcggacttcactccagttccattcaccagggatttcaactacagtgccaacaaatgtaaacacaaataaacctcaaactgaattgtcgtccctttcaacaagtccaggtaaaataactaatacgtccaattttgcttctctgccaaatcagcaagctttagtaaaaacccccagttacagttctgctccaggtggcactaccattcacacggcttcggcaccatccaatgtaactagtctagtcgggagtcagttcagtgaaccttgtattcagcaaaaaatagtcatcaataccagtacacctttggcacctggtactcagattatgattaacggaacccggtttattgttccaccacaaggtcttggagctggcagccatgttctccttatatctactaatccaaaatatggagcccccttagttcttaacagtggccaaggcattcaatctacaccaatagataactctgcccagaagatcacactagcatcaaataattccttaagtggccaacctctacaacatcctctaagaagccctacaaaatttataaactcttttgggaatgcaagttctatacccacagtacatacatcaccacaactcataaacacaactgctaaggttcctgttccacctcctgtaccaacagtatcactgacttcagtaattaagtctccagctactcttttggctaagacatctttggtttctgccatttgccccagtaatcctccactgccaagtagcacttcagtgtttcatttggacccacctgtcaaaaaattgttggttagcccagaaggagccattttgaataccataaatactccagcatctaaggtttcttcactctctccatctctctctcagattgttgtatctgccagtcgaagtcctgcgtctgtcttccctgcttttcagtcgtcgggcttagagaagcctgacagagctgcatcttgaatttagactaaaagagccagtttttaaataatggggcattgttttgactcccataaaaattttcaatgtttattatactgttgaaagcatactatacattgtgtgtgtgtgtgtgtgtgtgtgtgtgtgtgtgtgtgtgttttaatgtatcttttcattagcttgcaacaaggctttgttttcttggggagggaaagatctgttccatttcacttactgttctgaggagggtttcaaggttctgtgtttaaagtcaggatttacctgtctgtagaacataaagtgaacaaagtttgaatagtttagagtaagctagccttttgcacatttacattgacatgtttcttcttgaatttggactgttgcagcatatctatgatatggtattcagtgtcattagtgaaatcttatttttgtttctgtaaaaaaaaaaatacatatatatatttatgcattgtgaaaaatgcagtccatgatgtaaaattgtacatattccagaatccctaacaacctgtactaaatatatgtacaaagaactatgctgtcttatttatgttttgtttacataatgtatagttttttaagtattttagtaattttggaccagtgaactgttagcaacaatgcagaagaatctgcatgtaataaactgagttgctgtatttctttgtttgaataccatttttaacgtgtgttcttgttccattgaaagaatacaggatgtaattgaagacagtcctttacaagaaagaattaagggtgggaaatttgaattagagctagcacttgtacatggctttccagcttacaaatactactttcacttaaatcttgtgtttcagaaaatgccttttttttttttttttttgactcacctgttgcccaggctcgagtgtagtggtgcagtctcagctcactgcaacctccacctcctgagctcaagccatcctcccacctcagccccccaagtattaggttggtgtgtaagtaattgtggtttttttgccactaatgccactaatggcaaaaaaaaaaaaaaaagccactaacggcaaaaaaccacaattactttctcactaacctaatagctgggactacgggcatgggccaccatgcctaattttttaatttt

SEQ ID NO: 132333 - DNA, 2846 bp, Homo sapiens
ttagtttcctttcaactttaataatttcatccgagatgaaacatgatcattgttctttgtttttcccttgtccgtgtatatgaataaagttgatcaatcagaaaagctattagtagcttttagttaatgacctaatttaaagttcaataaatatttgcttgatttttatgtagatttttatattagacccaagataaggcagattatcatctcatttcttttatataacttttcttctctttacattaatttcattgtataccatgcaactctgagaacactactaagtagaaagggacagtgtcattattttaatttgattggggttataagcaccatgttttgaccaaagcagatgatacataaaacaggcagtgtgagtttcccttttactctaagtaattaaagcaccttacctcaaatagcaatcccagaacagttaattttcaacttttttaaacctctgcatgcttttgagcaacataaaaacttgactcacattctccatggcagggtataggggtgccctttgttgtggtcattatattcatatgtatctgctagacaaagcattttatcagtcttttctataatttgtgttgtgaaaataataaacttttgggtttgttttcgaaatatagaatgatttaataagcattttcaaattatgaatgaagtactataccaccactaccccagactgaaaatacataaagaaagagaagaaggccacaaaacatataatgttaaaagataacagacatttcaaaacagattagtgggtaagttgtatgaaagaagtctgttctctgatcataatatttaagcttccttccttatatacagtcttctagttcagtagtatatttctccatgtgggattaaatttctaagattagtaataaacataaaaggtaaaaactttctaatcttttaaaaacttttctacaaaaattaatattgtaattcaacagaggcagaaatacagttgacaaatatcttgaaataacaacatcccagctacccagtctccccatcctgtgcctcatctacctaggcctaagtaaggtcttctgtgccacaatactgctagtccttctgcatcccccgccacactaccacttgctaatccaggcagcagtcatactgcccagagtaactctacagctgccatttttctcctgtaactcccggtgaggaattcagcatgcctggtgttccctagcctttgaacagttttccagttaattctgccacaaagagtatagtctccctactatcatatctttcctctttcttctctctttaacttaggaaagatttacttccactctgaccatttgacttcttgaagccaaatagttgagaagtggaagaatgttggttacaagtctacctaatttctattttaagttcactttttctagatgaaagttacttcctgttcaattttataatgtatcatttaatagttttgtgttcatggcttaaaataagcacttttataacatttctttgagaaaaataaacttgtaaggtgtagctcatttttaacttgcgtcctttgtgtactttagaacacatttaacaagaaagaggcctatctagattaatatatgaaataaaaattacttttcttgaattttttttcttaattctttgattcatcataccattaagaaacaagaattagtcatgagcctcggttccatattcattacgtgcacatgcacatatataatctcatatcttcctactcttctagtaagcaattcctcttctaagatataaaaacctcagaggtagaaatttacctgttaatgtgcataaacattctgctggtttaaagcacagaatattttttgtaaaactgtactgttcgtcacacaggtttatatgtgactaaaattttcatgacaaatttgaaggtcatatatatatatatatatatatataatctccttatatatattgggaaatttatgcacatgtttgtaatagtttttgctctagatagtggtaatttttccaccttagtgttctacttatatgcaaatggactcaacagttgctgtaggacaaaatctgtttatgcatgttaaatgtgacccataacgtatataattatgtatcttttgttagaaagaaaacatgtggattgtgtgatgtgtgaattatatctcaaagccattacaaaaaaaaaacccaacatgattatgtaacagtaggtgatggtaataataagtatatactgtggcttagcagctataaatttattgttcctatgttattcaaataattttatatatacaggtgaggtgtatcttctagaggtttctatagcctgtgtcagattgaattcatgtgatgtactttttaagaggtagtgatgtggttctaagagcttggacttcagaatcaggcagatacgggtttaagttataggaccttaagcaagtcatttaatctctatgagccttattttcatcatttgtaaagtgaacataacaatgcacacatctcagaaggctttttgtaaatgctagagctctctctagatatatatatatgtgaaatacctaggttaaaacttagcaaattgagaggacatcagtaattattaactcttagtatagcattagggtattgaaaacagtaactgcttggttgcttttctgggctagaaacattgtaaaataaaataattgtaaaatttcctaggaagtttgttaaaaagactgcttttagacatgataacaaacctaccttttctcccttttccccagtctttgggaaagttacagtaactttactgaaatgacccatgtcatacttacttaatgaat

SEQ ID NO: 132334 - DNA, 1108 bp, Homo sapiens
gagagaatatgaaaaaataaaagtaagtaggatactgtccctgcttttcaaatatttcccgtcttaatttcacttacttggaactttttatgcccctcttatgccaaataaacatgccattactttgtggtttagattgtgctgtgaattgtttgagaacccatctttctgatagcatatatggatctgttaaaatatcatcagtttgttggcttaatatcaatttattgaaaacagtcaaattcagatactcaaccagtggttaatttctagtccacggttcattctttgtaaatgaaaatggtagcacattgtctcttaaatgtatattgttagattttcttccccggtgatagtgaactaccttaccaggaatgtgacctgtcacccagtttttcccccgctacaaagctggaagacagagaaacttgaaatgttatcattattgttattgttgtagtttgccttcatgctttctatttaaatgctaatttagaaatataatggaaatgttggatatactattcaatgtattcagtgtgggatgcctttaaagtacaaacgcgttccttttctcctagtcttaagtaaaaattggtaagagtatcaagagaaaataatagcatatataatagttcatgttagagcttctgtcagtgttaaagtactttttaacttttttcatatttatatgtattatactgtcaaaatagcactttttcagggactgtgtaccaacatgattaacatgatgttttacccccaaaactgtgaatatgcaggaatatgttagtatggtggtagtttctgtaggtaagcagtaagaaaaataggtgaatacttattgaatatagtattaccttttcatgtaatagtacttagactaaggagaatgtcaaataattagtttattaaaatacttagttacagtttattatatactgtttttatacatgtgagtttagattatacctttggatatagttagtgattttaaatgagacatcttttagtgcccagctaactcagtcagtagagcacgagacccttaaataagacttctttttgtagggatccatttagcttttctaaaaggtatttgtgtttt

SEQ ID NO: 132335 - DNA, 1051 bp, Homo sapiens
caacagcaataactaaggtttgttaaattgtatagttagcaaaccaaggcaaaggtataacagttctccaagagtgtgtttattcacctactgggagactgcctgatgaagcatttcttaaaggtgatttgacaacctgtgaaatctagggtgagtttccagatctttgtcattctgggctgaaagttaatgatgttaagaaagtacccgaattataaagcaaactgaaaggtggggatgtgggatgaaaccaccaatgttgaaatttcagcttcttttatactaagcctgaagttcatacatcatagcaagtaaatatattttaaaatataaactgcagagcttttcttgctttttactattacagagaaaaataattgtgaattcagtgtgtgttaaaacaacttctgttaccacattttgggtgttttatattatgtgttatcaagctgtgtttttgtgttttattttagcttatttgcactaatcttgatgaactcagggaattaatcacaaaaatcgagaatgaactcaaagatctggaaaacagtagaaaaaaatcggtaggtgttgatccaaaagttctatctattattgtcagcattaaaatttattcctgctttttcctaaagcctttttgaaatcttgttttcctggattacatgaaaatttaccatgaaagatagaaacattgtttcttttatttctcctgtgtggtctagttttcatttttaatagacagaaatcgtgccaggggctgttaaattaattttgtttgcctggtttgtatcaggtatagttttagatatttcccagtatactggctggttgttttctgactggtagttttttgggtaatgtttgccttgcaaatattcttaataattatatgcttttaatggaagtttattgcttagtaacataaaattttaattcagtgtaacataaaaacagatgtaaattgtttaatactgccccggataattttgacacatacttaacaatatgactttttaaagaacctttatctgctgaaagtttttttttaact

SEQ ID NO: 132336 - DNA, 1020 bp, Homo sapiens
ttggtaattaaaagatctcaaaatgttttagggcatgtttagttgtaggagtatatgttttcatttagttctaggggtatatgtcttcatggttcctgtaaatttctacaaactgcatgcaaaatataccctattccttgtgtagtgagacaactgagatgcaagtaaaaattcctctgtggtttgccatatgtgcaaataagaaatctatgatttgatattaacaagtacaccaagttcggtgaaagaggtatagccatccacctgcaagctctggggcaaatttgacaccgtcatcataatagtagattatactatgaaaagtttagtcctcactgaatacttaataaaaatccacggtagggacaacattgttccaagtcttcatagttacaatagaagttgaagacgctctctagttctagacccacttacctggttggccagtccactgcttgaccatcagcatttctttcataagtaaatttggcaaattggaatgtgtagtttctaataaataccagctacactgtcccactacatcattgtattatttctactctcaaattgtttaatctgggttatttaaatacatattttccctacttggtcaattctatgaatttgaaattatatagatattcctaatatgtaattgttaataaaaattatctgtgatcattttttcttaatctcttaggttgaactgtcttgccatttttgtggataaaaagcatatcagcaatttcatatggtttaacctaatagaagaaatttaaggggctctgtcttatttttgtcactcagtagccacaaggaattatcttgttgtgacccacttttgcttttattgtttttgtttgctcttctaacagaagaaagtgccctttaggaaaacagtcccctgacactgaaattaatgaatgtatcgaacttggggctgataaaagctaatggtgaattagtaatttataagtacagtttttttttaattatcacatggtataaacattacaataa

SEQ ID NO: 132337 - DNA, 1445 bp, Homo sapiens
agattctgtaaattatttgttttgttcaaggtgttttaaatatcacatttctagcattaaacataaaaatatagaaatatttagtcagaagatcttcatattattcattctgaaatatcttgcttctgaaaataatgaacctgtttttggatagataatagatcccttttgtaaaacctgaccagtttgccaaaggaccagtcttctttaaattgacagaaagcatgcttagatagagataaatgaaagggttaaattgtgaagttttttttttttaagtcctaatgagtttttaaaaatgttttgacctcagctgctttttagtttgacaatgtttttgttgactttttttaaagctagaacttgaacttgcccccctatttgcttcagaaagaatccatgtttatatacacacctaatatctgcacccaggtttagaaaataatcatcctactcctatttagagtatacactgtgagcattcaaatggtggattggatttgtatgtgtggcagggtggggtgggggtgtgtgtgtgtgtgtgtgtgtgtgtgtgtgtgtgtgtgtgtacagtcagccctctgtatctgtaggttctgcatctgtgcattcaaccttggattgaaaatattttcttaaatgtgtccgtactaaacatgtactgattttttttcttgtcattattccctaaacaatatgatataacaacaatttatatcacaactatattgtattaggtattataagtaatgtagagatgacctaaagtatatgggaggatgtgttatatgcagatactataccactttatatcaaggtcttaagcatccttggattttggtatccgcagggttcagaggtgagtcctggaaccagtaccccacggataccgagggacgactgtatattgtaaagggtctaaccaaatgtgtgccactttttcctaagagttatgtcagtggttctcaaactttagatagtataaaaataatgtgatacctttatttaaaatgaagattgttggtttcatcctccaaaagaccttgattcagtgggtaccagtaatctgcatagtggttaaacacaagggttctgcaaccaggctacctacttgggtttgaatgccagctctaccactgattaactctgtggggtaaggtatttaacttctccatgattccagtttctcatttgtacagtggggtaataatagtaccttccttgtagagttgtgaggattgaatgatacagcttactgttttagccatttttattgttttcaaataagcaggtcagtcgcttctggtgaaaaacactgaattatgaataggaaaatcaattaaaaatggcataaaaacatctattattgacccttagcactctttccatttacttaaaaccttgaaataaatcttggatttggtcttaatgaaagtggcacatga

SEQ ID NO: 132338 - DNA, 1324 bp, Homo sapiens
tgaaaataaagggacaatagctatgaaaatattgataatatataatgtgagtttaatagttagatatatctaaaaatgtggacacattcattttcagtaaaaattctattttggagagtgtttttatggaagttactaactggtaaaaatttaacatttttaaatcaacagttaaagaaaatagacatgtttttctcttagtactgtagaatagaatatttttaatgatattcttaggatgaattacaaacatttctacaaaatccttttatatattatataaccttggttgcagagtagttaataaaaaaataacaattttactgtttacttagaggcctttataccacttcttgtaacatattttaatgctttagtattacatcatcacgcgtccactgctgtcacacctgtgtttactatttctccgacttttgtttttctcagtcctcaaagcatcagccctgggaatgtagatgttagagcaaatctggcccattgttaatatttcctctatacccatcttagtgaatagacttttccatatattaagtagcacaggctgcatagccagtgttttttaaaattgcagtggtattcattagtgaggcatgaaatcattttagcagattgcatgaccagtgtttcttttttaagctaacaaaattaaactagaaaagaaatcagcacaattacatatagtaagtgtgctacacatagcagtgtgaatatgtacactcacatatattgtttcgtgaaactttggtttcaattgtatgtgtgtacacaaggatatgcattgtaaaatgtgttgctgaccatgggtcatggtcaaaatattttgccagattgagctgtttaaaatggtcttggccgggcccagtggctcacacctgtaatcccagcacttagggaggccgaggcaggcggatcacctgaggtcaggagttcgagaccagcctgacctatatgaaaccccatctctactaaaaatacaaaaaaaattagccgggtgtggtggcatgtgcctgtaatcccatctacccgggaggctgagagaggagaatcacttgaatctgggaggcagaggttgcagtgagccaacatcacgccattgcactccaggctgggcaatgagggaaactctgtctctaaataaataaataaataaataaataaataaataaataagtctcttcctggttctcaaggtgtcctagagggagagaaaacagagagggaagaagagagagagagaggatagagaggagtaatagtctcatgaaaacagtggttcttatgcctagtttacaatatgaatacc

SEQ ID NO: 132339 - DNA, 1025 bp, Homo sapiens
aaattaggggactttttataaaatctgaaaaaacacaaaaaagattacagacgcattaacagttacaaaaagcttatggtgttttaagatactttcaaccagttctgtttggaaagttttcccccctcaaatagtcattattgtcttttcttttctttttttttttttttgagacagagtctcactcttgttgcccaggctggagtgcattggcgcattctctgctcactgcaacctccacctcctgggttcaagcaattctcctgcctcagcctcccaagtagctgggactacaggcatgtgccaccatgtccggctaatttttgtatttttagtagagatgagatttcaccatgttggccaggctggtctcgaactcctgacctcaggtgatcggcccacctcggcctcccaaagtgctgggattacaggcgtgaggcagcacgcccggccagtagttattattttcacccaaatcactttatggtagcacctctaaactgactaaaatgaataagacaagtggtcttattctcttataggtgaaaaaactaagttaaaaagtggtcagtgacctcaagtgaataatagttaagtacagataaagacaacacaataaaaggtcaagtagagaaaaaatcaatgtgctgtgctagtctgggaaggttttacaagggatgaaggactttgaagaataatgggaattggataggtggaaaatgttgaataacacgagcaaaagcatagaggtataattaagtgaggtgtcactggaagaagcacaattaaagaaaacttttgtggaaaagttgaggttttagaagctgttcgaatgatagaagggtgtcatttttgggtgatctttctaagcatgtggtactatgttaaataattgaatcaagattccattgcaaggaattgagcttgaaataagatatatcagatgtgtaaaaagtaatgagctgctttataggaaatgactgagaaggtaatgtaatctacagtgtttgattatttccaggccc

SEQ ID NO: 132340 - DNA, 1489 bp, Homo sapiens
aaatgttagtctctaaaatattaaataatattttaaaattagaactacttcccaactcaattatatagtatattattaatataattgtaacccagaaccctttattgtttattacacttctgttcatatgctcaaaggcaataaagtggtttataaaatagacactgctgtagatcagagagaaaattgggaggaggagttttgtatccagttctagaaaaatgaatagaaacacttggaaggcaaatttataaattgtattcagcaagtactctaagccttagttgaggagagaagacttacatgcatgaaatagaagaaaagaatacacttgtttgtatacttattttattctcagagcaaattttaggaagtcagatcttaagtgacaaaaatgtttggatctggtagatgcagttttgtctgcttacctagttaatactgggtaaacattggccaattcccttttttcatcagttactgaattccttattgatataacaatgttacataaactgttataataacagctaaacatttgttttatgtaattttcagtccacttgtctatctgaggctttaccctgttcttctttattaggtgtgagacgttgtggcctttcatagtcagttcggggcataccttaatccagtctttactttctcactctttttaaaagtgagctccatcatcataggtttggaaaatactcctcttaaagattcacattgtcctttagtagaggttcacaattcattttgcaaaactgataatagatttgttttgaaattcagaaatcttcagatttcagaagggcattatggtgtatataatgtttaagtcatccccagtggggcttaggttaagtaatatccccagtgggaattactcctgtaatcaaacatataatctctactgaaaaatgtatgaattagactaaataaaacaaagactagaaaaccttaagttgaagtcaggttttcttaccatataaattatatttgagactttgagttttcaaaatcttctgaacttctaaattgttaagttattctgggcctgtttattaaagactctggaaagtcttgaagaaaagaaaactgcttaattttgtttaacgtagtgttttttttttgaatttattttaacacagctttttttcgagtaatgattaccgataacctgtgtattctgtagaatacgctttgggatgagctgtgtcattcatgactgatgtatgaaccttcacttagggtggactaagttctacatgtggttaatctggtctgttttatgttgtgtaatacaggctttaatttttggtagtatctccaaatttagtaagccttcttattgtgttggcaggtgatttttttttctttttttttttttttttattatactttaagttttagggtacatgtgcacattgtgcaggttagttacatatgtatacatgtgccatgctggtgcgctgcacccacgaac

SEQ ID NO: 132341 - DNA, 1971 bp, Homo sapiens
ctgcactacagcctgggggacagagcgagactctgtctcaaataaataaataaataaaactaggacagttgattgcctttttggctaaagataaatatacttaaaatttatcattttatggtaccctctgaataataatagtataatttgttaaatttctttaggcttcgggagcaggaaagaaaagaagcagaagaagctagtcaaaaggaaatagaagaatgggaaagaaaacttctagctcaagcagctccaacttgtatggagaccatgtgggaaattccagctattgggcatttcctttgtttagctcagcaaattctaaatttgccagaaatagtcttttacgaattggaacgttgtcttctgatgcctcagtgtaatgcttttctatcgaaaataatgacttctctattaagtcctccccatcgcagacctaccttacatcgaagacctactttgccttataggacctgggaagcagcgctgaggcagaaagtacaacagtggtacactgctgtagggcaaactgaaaatcctgataactgtgctgaaaaactggggttgtgtcctcagttttttaaagttcttggagaagttaatccattggaagaaaaaccttttcacgaactacctttttaccaaaaagtgtggctacttaagggtctttgtgactttgtgtatgaaacacaaaaggaagttcaagatgctgtacttggacagcctatccatgaatgcagggaagttattcttggttatgattatttggagaatgcttatgtacattttccacagttctgtggtgcagatgtacggatttataaacagagaccctttcaggccccagaatttccaattccacccattaaaatacaaagagtacctcggattaaattggagaaattgaagtgtgactatgttagtacaagtaatggagaacatagatgtagcagagatagcctgccctcttccttcaagaaagagcaggaaaataattttgatccagcttgctgtcctgctaaaatgatcttggataatcatgacatctctgttgaaatgggagtaaaatccaactatgaaattagaattcgcaggccttgtgaaattaaaaaaactgattgttgtaaagaaaatttagagaaaccaaggagtccaggggaagttactggctttggagagcctcttagtccaggtgaaataaggtttatagaaaatcaggaaaaatacggtgaagcttccagaataaagattgaacccagtccattaaaagaaaatactctaaaatcttgccaaatacatgtaaatggaagtcacagtgatcatccagaaattaactgccacaaagttgtaagggatattctattagagcagtcactacagagccacaagaaactcaaactaactaaaatgagggcaaaaaagaagaaaaagaaaaaaaagaaattgaaagatgttttgaatgaaaacttacagagaaagcgtgaaggtcttcattctcttgcattcaagtcttacaaacctgagatccagaataagttattgatcatcaaaaaaaaagcaaaacacaagaagcacaaatctggtaagctaacacaaatggatgggagttatatttaagtataattcaaattgttttttccattatgcatcatggatgctttgattgagagagtaaaatgcacatgtatgcatgcgtgtatatttgagggtcaaattttattttatattcaatgtgttaaaaagccagagcagatgacattttatatacttacaacaaaaaaagtactgatgcagtatgtttgaatttaattttcagttgaacatgtttggacattatgtttttacctttctctggaccaatttctttcccatcgcttatgaaatgtgtgtttttttttttttttttcaggctaagggcagtacagtgtagtaggaaaagcactgatttcaggaagtaacattcccaggact

SEQ ID NO: 132342 - DNA, 1040 bp, Homo sapiens
caggcatgaccaccacacttggcaaatttttacatttttcgtaaagacgaggtctcactatatttcccaggctggtctcgaactcctgggctcaagccatcctcccaccttggccttccaaattgttgggattacaggcatgagccaccatgcccagccagtgtgtattttgttagtactctttatttcatgtacttttacaaacttgctggtattttactgatctggaaatcactggaattgaaacagatttttaaactccagtgattatttttgtaaaataaatactatgactttataattaagtgatttattttcatattctctataacacaaagtagcagtgacttaattaaatatgtattcatcatttgtggccacccagcatttttaaatagctttcttacattttggtaatttcctatagtacaagttttaacttcccaggatagatgccagaaaatttatattctcaaaccccctcacaggtaaggtagaggtatatgagcaggtatatacttcttacttgatattgcatgaacaacatcaggtagcaatcttgagtgagagggtttattttttgataaaggtggtagtaggagtttctggttgttccaggttcttggtatcaaaggtgccaactagtgctgaccgtgtagtttttcttggagaaccttctaagtgtggttgggcttgttttctggctttttgtcatctaagtttggctctctgactcttgacagagcttctataagctccctactaatccttaaataaattccttttctgcttcagctagccagaggagattctgttgttgtcagataaataagaaggttgactgatggacttgatatgaatggttaatttttctaaaatataatattatgtgttattcatcttagaaaatataaataaatatcttgcttccctttttcatgccatcaatttgtgtacattttattatttcttaaaactccttttttttttttttttttactaaattgcaatgtctttgagagtgaggtccatgttttctc

SEQ ID NO: 132343 - DNA, 1049 bp, Homo sapiens
ctcggctcaccacaacctctgcctcctcctggttcaagtgattctcctgcctcagcctgccgagtagctggaattacaggcatgcgccaccgcgcccggctaattttgtatttttagtagaggcagggcttctccgtgttggtcaggctggtctcaaactcctgacctcagatgattcgcctgcctcggcctcccaaattgctgagattgcaggcatgagccactgcacccggctgtttataattttttcaaagtgtttatgtatcattttacattttctttttccaaatgtttctgtattattgtacattttctcgtaccaataatagatagtatgaaatacattgcaaacaataaactttgttttctattaaagagatagtgctttagtcaatattttaaatgcttcagtctcagatttttttttttaatgcagggaagagactgtcactctgattttatgacataaggagtatgagaaattgtgtagggaggataaaaagttagaacaaagctaagtaagtaaggtttaaatacttttatgtatttagcaaaagggattcttaagttgctggctaagggggtttattgcttatccagaagatttgaccttgtgaattgacttattcttctccaaggcacttgagagaaaagacaacgatagcagttacatctagaggctattatggattggaggatgagaagggaactgcatgtacctcaacaaggcgtcggtcaacaccgcgaagtttggcaggcttgacaagtggagtttttgaatctataatggttcaagttttgagacaggaagaacagctgagagcaaaagaagaaaaaaggtaaatgttaagaaaaaaattcataatttcagctgcataatttttatgtgcccatatcagatttctgggcccattttagtagtgttctaaaatgcattgttacaaaagtatgaattcataatgaaatatcgcaataaaatttgtttaaaatgtaattttaaaatttaaaaccacttatcttgaagctatacaaaaataatttctacagaa

SEQ ID NO: 132344 - DNA, 1048 bp, Homo sapiens
aaggaagacgaaaaagaaattcagggggaataaggtaatgactgggaaaatagaaggtaaaaatcaagtagaaagtaagtttaatggtctttaataagtgcttttttgtgggtatgaagactacttcttttcctgaaaacctttttgtgtgtgaggtagcttatagctgcagataagagcagtggtctccagactttcatgatctggcttctcaagcagcaaacattttgaatatataccttcgattatgcatatttatttataaatcatatatggatactttactattatgttttatatattataaaacataagctaagctagatacttaaaatgagagagtaaataagcatatttaaaaaattttttaacattattgatggtataaaaagtttttggtgagggcattgtgatacttcattagttttgagaatcttggtttcgtacttggctgtagagctatttgaaaggcttgttttaagttaggtttattttgatacttggttttaatggctgttgtagcacagagcttgtaaagatacataaatgtagacagaagcttagatgaatgatgcttatctatcaaatatgcaaatttttttgtcagaattccccagtaaaattttctgtctttcctaatttaattagttgttcttggaaagtatttctaaggtgtgctgtgctgttaatctccatttgcccctgtaaatgcattttctacccttgtgcactgtgctctgtgccccagaaggctgatttataaggatcaaactggtatgccttgacctctgacttctgattgggttcagccaataggagggactgacaggaggacagagaggacagacatatttattcctacagcttcctttttgctgggttgcaagttgtcagaaactgtgctccatcgttatggccttctcctacagtcaccgctctctgggttccagtaactattcactctcctacccatattgggcttagagtggtaaaatagttctctgctgtggctagcactggagtgcttcactatcccttcctattttct

SEQ ID NO: 132345 - DNA, 1083 bp, Homo sapiens
atggggtttcgccatgttggccaggctggtctcaagctcctgacctcaggtgatccgcccgcctcggcctcccaaagtgctgggattacaggccctagccaccgcgcccggcctataataaacatttcttagtcttaaaaaagagcagactaagaaactacataaaggtaaatttctaaatgcttagaatcatcattctcagtcgttaatgctcagaatacttatattcccatgtgatctaatagtatccatatttagaaattaaacttacaacattgtagtttataaaaataatgtatttctgacattcttaggccagtagaggtaaaattcttgctattttagtagcaaaaagtagtatgacctcaaatagttaattaaagttggagtccctcgcttttttgtatttgatgtatgcaaacacatcaggtttgcgagaccacacttgtggatactaggacatcagttcttctagcctaaaatctgagtcattactaactgcttccaatgggcacaactttgagaaaagcataggtcacaactgtttgaaatgcaactaaggtatatagatgtttcaaaacaatattctatagagtgttcatgggagtgtgattttcagcatatagatgactcatagcttatttgtaaatatctcaaagtggtatatggtattttagaaatgaaaccaatgaatcacttagatattatttgaattttccgttgacttctggaatatatttgtaagacactaaaggaacttattttcaaagtgtaaagagactttaaagccgttccctatactgctgagctttctagtgagcaataaatgaggtatattaggtaaagaggataccacattctcattagagagcagcccaatagcattagtaccctggacacagcatataacttgaatctcagtttccttatctgtataatgagggtgttagggtagaataattgtgcaagtatttaagtatcttctagaattaggcattcatgtccctgagatcaaaagataagttccctgcccttaagtggtttgtagttgagtagggaaacagttacttaaaaatagaataa

SEQ ID NO: 132346 - DNA, 1037 bp, Homo sapiens
cagatgtaaaatggaatgggtcccgtaggaagaattgcacgtgtaggcagaggaacagtttttgtgggatggaagttggacctgcaacttttagacagttttagcatgacatttaaaacagcgtttaggatgaaatatctctagaaaaataattttggcttatgtaaaaaggtgtcttaaaccattaaaaaataattttatcatttactacccatgtcggtcatcgaagatttatggagtgttactaaatggttaatggttacttttgcatactactgatcttttctctccgtttcatctgaggacacccaatttttgcaataatagggaatgcatcaacacacattttttaaagtttatacatttatgtttattctaccagaaatcataggcaagtcagatgatactgtgctcttggtatccgccacccatatatccaattatttaacacaagaggaggatactaaaatgaatgtattgttttataataattgtatagtctgtgtcagccaagttaatttctaaagtttaaatttttcgggagtggaaaaattcaatgtttttggtattggtagttgaagtggaatagtagtttgactgtttactattagagtgaatttaagttgagcaagtcacttaacctttttggcctcagtttcctcatctatcaagcggggataataatagtacttctctcatagagttgctttgaggatttaatgagttaataaatgtgaaatcaacagtgctgctcccatagttagccaagtataagtgttagccattttaatgtaagtagtagcagtcgttgaataatatgagtgtatacttcatatctgaaacggcattatacttgtgctcttacagaatagctcctagaaattgtgttaattttttggttcttgatttgtcactgtaatttaaaagtaacctttgtcattggcttcccatatgccattttcaagactaacggtgatttttttcaccaaaaacagttaacatagtgcctgtcttcgttaagtgagctctctttaagg

SEQ ID NO: 132347 - DNA, 2158 bp, Homo sapiens
attttacacattctagcccatgctgaaaccatgtaagaggtctgagggtcatcatcttccatattatttaagtctgattgtgtcttcaacaacagctgcatcacatttgatgcatcttgcataaatttttccttcccaacagcaagaccaatatggctaatgcactcgatagtttttcctctcagaagcttgagttccttctgaacagcaagctcaacaatgtgctttagtgagggcatgaatatatcataatatgggacaaatttttcttctattgtatctgcaactgatgcaatggttgtcacaagttgttccaaagccaacttagttccattccgaatcaactcttgaagtttaatcaccaagacggaatgtagatttttcaccatactatccacatatagaactagcaatgatttagggcagtcttcaataaaaataataagagcagaagctgcatgtgattgcacacgctgattaccttgattttccatggtacgtaacagagctgcaatcactgtttcatgaaatttcttttggaaattaggtgcaaaatctgtagccatctgtccaagtgtagtacaggctgcagccctcacccttggatgaggatcctgaagaaaaagcaaaacggagttaactgtttcatctagaattgattccatttgttgatggcatccttctccaatggcagataaggccattaatccagcatgtcgatacttccagtcagggctctgaagcatctgcatgatatgctccttggtcattggtaaaacaacttttccaccaagcccacaagccagtctgtctagtgcactctccgcagcaactgcattgctgtcaaaatcatcttcttccatttcatcagcatttacccagtcctcatcatcttgtagatcaaccatcattgctaatatatgaggaactgcctgtgcaataatatttgtatgttttttcaacatcggagtggcagtttcagacaaggtcactataacttcgagggccagctggcgctgcagattactaagcctagagtctccacataacttcaaactcaactgtagagtatcttctaaataaggacccaagtacttaggtacggtatctgcaatctcaacaagggattctagcactgaatcatcatcctggtagcatgagtcattcacagcctgtaagattccaggaagcaagtctgcaaagtctttgaaaagagcaatattattctcattagcaagtacaaatgcagctgcagctctagcggataatgtcctgattgctggatgttcttgatcttgaatacactggtccaacaaccgtttgatgatatccaaatcatgccgctcttgggtcccaaaaatcccaggaaagtgccagaaaacgtgaagtgcaacttcccatagaaccacatttttggagtagattgaatcaataagaaacttcagaccttccggccagtggttagtgccatcctcatctatcaaattcctggccagcactgcaaaaatatcacaaagttttttcctcatgctagcatgtgtttctaacttaacagccagaatcagttcaatcttgacatctctctgaacatcagcaggcagatttggataaacctcctcaaacccagaggacaaaagccgtcgtagcagtgcggcagccatttgtctcacctcataacctgctcttctatttctgacggcatctaagaggaaggtagtcttacacagacctgggatattttcatagatttcctctgcttgcctccgcaccatacagcttggattgatcaggttcttcagaagctggtaaaactcttgcttttctgacacggtcgccggcacccctgcagacgcggttgccgccattgcgctctgtcaaagctaccgcgaccgggaaggagggagggggtctgcggctcgaagcagtgacgtaggcgaggcgccggcggggatgggcggggtgcttctccctcctctgcccagaaactctagctgcgctctggcaggctgcgagctaggttttggagagaggtgagagccgtgtggaggccaatggcatcctccatttgtttttcaataagataaacgtgcacttgcaggcgagagaagaaaagcattgattagaatgggatcatgactttttttttttttggatacaa

SEQ ID NO: 132348 - DNA, 1174 bp, Homo sapiens
taatagagaaatgctttgtgatgataagaacatagcagagaatgaagtgtgtaaattctggggcagagaaaattctctggactaaacacactttagtgtacatgaacatccctccaaattttatcaggctggtgcctatatgtttcagcttaaaatatacttcctgataagcagaaagaaaattttaagtaatagataaataacgtgtacacatggacatacagtgtggaatgatagacattggagattccgaacgtgggaagaaagcatagggtaagaaattacttagtgagtaaaatgtatattattctagcagtgaatacactaaaaattcaggctttaccaccactcaatatatccatgtaacaaaattgtacttgtactccctaaatttatacaaataaaaattaacttctctctctctctctcttcctggaggaaaataactagtaggtttcttttgggttggataggacttatttgcttttcaacacccaaagaataactttgaaaatgttattttcaaaataaattgagtgttccctggaagttgctgtatttttttaattggttattttggagtagtctagaagacttccctacaattattgtttaagccttaaaataaaccctttagtatacaaatttgaaaaaattaaagctttcttgaaaatagatttatatatactctatcagagtgcaagcaggaaacagaagctacaccagttacttgaacatagagactttaaggaatggttggtaactaggtaactgaaaggattaaattaacaaacaaacaaacaaaaaaacaacaatgaaagtaacatggagatagcaactgcaggaagcagctaccactcctggggctggggatagcagagggaagtgcttggatttattagaagttagaaactttgagaaagggccccacaacttgtgctggctgtgagctgggataagcagccctgtgggcctgccactgaaacctttgaggacagggcactatttatagctcacttgtgtctatgaggtgggggcatgatgaagctgtttttgcgaaagttgcaaaaactgcaaattggaatcagctgctgctatggaacggcatgggtgaagaagcactcctggagtgatcttacagaaaccacaagctgacaagcctatagggaacaaa

SEQ ID NO: 132349 - DNA, 2918 bp, Homo sapiens
tggtagccccgcccctccgacccgccctctccgcgcctgcccattttcgttccctcgggtctgtaaccctctcccgggccgcttcctctttaaggcggagcccggcgtggatctcgcgagatccggcttggcgccgtgacctccatgtgggagctccagctctataagtaaacactctgcgcggcgcagacatggcctcttcctatctttgaggcggtgtctgcggcagcgcctcagagtggttccggtcgtctctcctcaagtcggctagtcgggcgcgcgcgctgagagtcgtcgccgcctgtcgggcccggcgtccggtcggtccggtgggcgcgctcgcccgcctgccgctgagggcccgagccgcagggaaagcggcgcgggccgggcggggcgcggcgcccagagctcagggggagacaaaggggaccggttcctctctaggcgccaagatgtggatacaggttcgcaccattgatggctccaagacgtgcaccattgaggacgtgtctcgcaaagccacgattgaggagctgcgcgagcgggtgtgggcgctgttcgacgtgcggcccgaatgccagcgcctcttctaccggggcaagcaggtgaggcgcgcccgccgcgcccctagcgaggctgggggccggaacagctgggctcctctggacgcaccggtccgagggctctgtgcgccgcgcgcgcagggctcacctggctccgctgcgggtgggcagcccccgcgaggcgcggggtgcggggcccagtcccgccgaatggtggggagtgggtccctgccagccccaactggaggtgcgccgcgcggggtcagaagtgagggcgtccggagcgcaaatatctcgccgtttgtatttggtaggacagcggccgtaggcactgggtgcccaggtccctcgcttcccgcgctcggcggggcctggggcccccagagggcggggagggcagagggctctggcggccatgccaccgcgcgggagacccggagagctggctaacccggctgagcgttcgcctggcttccgcggctcttccgcgtcttcggctctcaaacaggggaaactcgggcattgagctctcaagaataagaaccctaactctgcttcctgactgtggtaggattcgcgcaaactgaagattcgaagggtttccagaacttctggtccctctccctcgccgcctttcctaggtttggaatgtctcgagggaggttagagacctgggcatgaagaaactgtcggtttaaccgggggccgggtttacgaatgccctatataagccaagagttttattcccgaagtgaaaaggagtgtaagactgtttgcttttcttacttctcgccttctaatactcatgtcgttcacgctttaagcatagcactgcagcatagccagcggtgcatacttgaaggctgtctgtgggcatctctggtatttttatggtctggccagtctaagtttttttcctattccacaagtctcttacaatctatatccctagccactcagacccatcgtatttttctttgtcttcatgttgttgttaatacactaaaaagttggcatcctgagttgatagaccacagtttggctccaatcctgtggttttaaataagtgtagctctttgatttggtagaagtagcctacagttgcaaactacttaaaaggaatattttcctccccttcacaggcttagtcttcgaagactgtccagaaatttcatagtaacaaattacactttgggaaggagagagcttttttttcccctttccttctctctttaaaataatgttatagcacctttgatttgtgtttgcagccagttttgtactgacttcttagtgtttgacttgtaaaaacaggtatttagttgtaagctttgcttttgaaataattgtacacttgttaaatactacatagatttgctttgctgtgcctcaagtggctgataccgtttccttttgatcacaagtgaaaaagcatgtaatcgtttgatgcattttattttctagctggggacaaatagtacatgaattcctaggacactggtgatttcagcaccagagatagaaatgaaggatgttcttgggcaacactcctaaaatctttattatcaaatatgctaaaataattatcacatatgggattgggttaaattcaaggcaacaaagtagactttcagtaaactaggaagctcattccagattccagggaaaactgaggataaccgttgtacttcctcttccagggtcctagtgggtaattcactacttgggtttcttcagcccagtgataaaccagtagggtagaggaatagacctttggtgccagccattaacttggaaacagaaaaggaaggtcattggtaccagctgtgtgttcactttcttatgcgctgacaagtagctatggcaatgagtgttatctttcgtggtctctggagctccacagatgaggtagccagcctgtagcaggtaactactggaatggcatcacagagagtccccgtcctgtaaaataccatgtcctcattggaaaaaggtacccctacttcaaaatactttactgccacgtagtgaaaaatgtcataaattgtagacaatacatttatttttatttaagtggtacccgccccccatactccattcgtatgttaggctccagcttttaatctttggtatgtatcagaatcgcttgtggatatttattatagatgttcagctcaccccagaactgcaagtagttgaatttaacaagaccccacgggagattctgataacaccagagtttagaaaatgaatgttgatagatagtctcccactagtctcttactattcaaagtatggtccctggattctcaggaccagcagcattagctttacctgaaatcctcacgccag

SEQ ID NO: 132350 - DNA, 2169 bp, Homo sapiens
gaatataaaagtacttgcctatttaaaggaatatctatgtatatattatatatgatgtatataacatatataatacacacatatataatatgtgatggatacgtgaaagttgttttgcccttcactggcatccctagtcagtagttgcttgggaatgacttcccactgccctctcagccacttccacttggcatttgctttctagtattcccttgcatcattgttgcagttcctcttgttacctggagtttcttctttcaactcagtaaaatttcaagagtggtctgacaaaaaatcctaaccatttttgcttcttaagtattgtaaatactgcatctccatcttcgagtatggcagttctcaaacatttgcttttgagacattgatggacctaagttacatgcttctgactcacagatgtttgtgatttctaaatgaccgcttccttttttccctacttagagcttaatttgagtgtcagagataactttcaatcttcactttcattaaatgtggaagaacttcggtacttttcaagtaaatcatctcaacacttcacagctcttcataatatgtgaagctttgtggaataaagttgtgtggaacttgttattgcggtagataaatggtcactattgtaggaagactggaggagtacctatgaattagcgaaggagtggataatctgggtttaaaaagcctgtcatagcaagcatgaggaaaggtggttatatgttactgtggatgtaacttatagggtctcatgccgtgatatgcttagacatggtgctcttacgacattttttcctgtcaaatcaaattttaaaaagcaccagttgaaacagtttgtatttactcctgaccgtcatttagtagaaactaaccaggagctgactgtagaaataccctcaacgtcactctgactctggtccctcaaacctaagtggaaaaatgttctttcaatttccagcagttttatcactttaactgctatcttcatttttggaaatatgctactagttaatttgcatgttttatactgttagttttttttaattatctttaagcactttcatttaaaaatagtcataatgtttgtcagttgtatgttacgctttttcagctcctccagaattagtaaggtattttgttttgggtttttttgtgggggtgttggagaatgtcaaaatgatggtgtgaatgcagtgtttgctccttgagttttttggggtttttttccctccacgggagttcaagactagaggatgttcctttttttttttttttttttaaatcaaggaagcaatattcccatccctatccttatcagggcttacttgcttactgacttggaatactactttggcttatttagagtaagcatggtaacttgtgaggtagtacataatttaattccctgactgggaaacttgtgaaattcttgatcccttgttctacttgacaaatgtgaatacctgtagtgtttgagattgtgcttgttgggttcttggaccacctgagttcaaattactgatctagtagattaaaagttttaaattcaggacatacttttatttccatttggttgacttctcaaatatgatgttactgtgttagagttgtgaatgttgaaaagtaatacatatgaagagtagaaaatgagcaatttaaaaattgattatgtttctgggaaagtgatagttgtggcctgaaaggagtttagttttcttgtttcactgtatcatagtgaaattgccaactgaactttataaagaaacaaaatggagacttaatttcctagggctgttgtactaatgtaccaaaacctgggtggcttaaaacaatagaaatttactgtctcacagttctagaggtctagcaaggtgtcagcagggccgtcctctgatagctctagggggagaaccctttacactttgccggaaattttctttcttggcttatattaggtacatcactccagtcacatggctgcctttttcctgtgtcttcacattgtcttccggctgcatctttccaaatgtccccttattatgaggacactagccatattggattagggccctaatgactttgttttaacttaattacctctctaaagaccctatctcaaaatgaagtcacattctgaggtactgggggttaggactt

SEQ ID NO: 132351 - DNA, 1058 bp, Homo sapiens
taagaatttatggccgggtgcggtgctcacgctgtaatcccagcactttgggaggtcgaggtgggtggatcacgaggtcaggagatcaagaccatcctggcaaacacggtgaaaccccgtctctactaaaaatacaaaaaaaaattagccgggcatgatgacgggcacctgtagtcccagctacttcagggaggctgaggcaggagaatggtgtgaacccgggaggaggcgcttgcagtgagccaagatcgtgccactgccctccagcctgggcgacagagtgagacaccgtctcaaaaaaaaaaaaaaagagagagagagaatgtattggggtccagagaagacactgacatcagaggccattaagtattaagaatggttttaaaatctctaaactgtagtgctatggattttaagtttggctaggacatttgagcaactaaaaatgtagtaagatacattttagagaagcatttcactattctttctttattttctagttggaaaatggatataccttatttgattatgatgttggactgaatgatataattcagctgctagttcgcccagaccctgatcatcttcctggcacatctacacagattgaggctaaaccctgttctaatagtccacctaaagtaaagaaagctccgagggtaggaccttccaatcagccatctacatcagctcgtgcccgtcttattgatcctggctttggaatatataaggtatgttgttttcttcagacttactgttgtgagaatacaaataaatttattttctgttcaggatgttttgaataagtaaacattgattgccatttgaaagtaaagattgggatgttaatatcataacttttaaaagtagtcttttaaaaattgatatgaaatacgtagacaaatgtacaagatgtatatgtacagtttaaagagcaataaaggaaatacttgtgtaattgcaccaaggttaagaagtagattgatttaaaatactttttgtttgtttgtttgtttttgataacggaggcttgctctgtcacccaggctggagtgcag

SEQ ID NO: 132352 - DNA, 1081 bp, Homo sapiens
agttttgctttatcctttcctatctttgtaacttcctaattcttatcagttgcgataaatgggcacctatactgtttttcaaagcatttaagaccaaaaaattggtagatgaagtaaattactcaagattattcaaatggagataattttagatatatggaaaaatgccaacagatctacatatgtatatagaaagattaagaagagattagaaccatgtttccaaagaaagtaccaggcttggatggctgaattgttttaaacctatgaggagtagatcattataatgttacctaagttgacctacaacataaagaaggaaagcttcctattgctttataaattgagtttaatactgatactaaaacatgacaaaaagcacatcagcttcactaacattgacataaaacctaagttctagtcagcaaatagaattatggctgtatttgctgatttaacttgcttttaaaaaattatggctgcttattaaaaatatattactttaagcaaatatggtttgtcaggatgtggggacagttcattattataaaatgtttcaatataattcattgtactaataagccaaagaaaacatattaatttaaaatgttttctgcatttaaatacaaatttgagtcattagtgattttttttttttttttaaagaaaagtctcggccgggcgtggtggctcacacctgtaatcccaacactttgggaggccgaggcgggtggatcatgaggtcaggagttcaagaccagcctggccaagatggtgaaaccccgtctccactaaaaatacaaaaaattagctggatgcgatggcaggtgcctgtaatcccagctactccggaggctgaggcaggagaattgcttgaacttggagggcagaggttgcagtgagccaagattgcgccactgcactccagcctgggcgacacagtgagactcagtatcaaaaaaaataaataaataaataaaggaactcttgataagaggaatagacagaataggttaatattttaaacacattctataccggtattccctttaaagacgagctagacaaggaagccaattca

SEQ ID NO: 132353 - DNA, 1035 bp, Homo sapiens
attttggtttttgtgtatggaagctttttatgatgccagaaagatcgtactttcaagtggctgtcatcctggactaaataatgactgtttagaatgatgatggtaagcctttacagtttagctgagcatgtggcactgttaaacttcttacatgttttcttatgctcattgtataatagaaagtactggaaagaggagaattatcattgataacttcttatttcttttgtccacagtacagttcttgatgtttaacctttttgattatgaaatgtattagacaatacaaagagcacgatcactgtctataaacaccatccaagttatgaaatagaataacaatactcccaggaacttaccaggtgcctcctcctgattataactccctcttccctagttgtaactgctacccagacttctatggtaatcatttctttgttctttactaactttcttattaatattaacctttaacaacctattaataatctttaacttatttatgcaaccctaatccctaattttctggtttctgaactttatgtaaatggaaccatattgcttttgcttttttttttttttttttttttttttttttttttttttgaacgatctcattctgtcacttggctggagtgcagtggcatgatcatagcttactgcagccccaaccttctgggcttaagcgatcctgctgcctcagcttcctgagtaaccgggactacaggtctgtgccaccatacccagctaattttcaatttttcgtagagacagagtttcactatgttgtccaggctggtcttgaactcctgggttcaaacagtcctcctgccacttcctcccaaagtgctgggattacagtgtgagccatcacacccagccctgcattttaaaatttgtgattaaagaaagatggggccgagtgtggtggctcatgcctgtaatcccagcactttgggaggtggaggacaagtggatcacttgaggtcaggaattcgagaccagcctggccaacatggtgaaaccccatctctg

SEQ ID NO: 132354 - DNA, 1011 bp, Homo sapiens
atgctgcattctctgctatgcaatatttttatagtaatatatgaaacttacattttgatttgctgcgacagagtagtaacctcagtttattctcccaagtatgatggaccttaacattgattattttcatttttactgtgttgtctacaagagactaaatgtctttaaatttgtcagtgattagtatgggagaaatgagcctatgtttatttaatacatgaattaatttatgtaatgtataacatgctccatctctgattgtttgtcctacccagcatggttggctcttaggtttttattttttcctaaactgttcattcttgtgtaatattaaactttatgtctttcaagctatttcattgctaccatgttcattacatacagtgcctttggtcaaatgtacctcttctggtagtgacagttgatagtttttgtttagtctgtattctttctaccctctgtcattttgtggtttgaaacctttttatattttcagtaacttatttctaagttcctcacttacctttgaagttcctgtatacctgtcttgtcatttatatcaaggttcatggtatgatggcaagaacataagcttcaaagtcaagatgtcttcaaatcctaaccttacatttcattagctttaacctagaggaagttaatttctcagagcctttgtttccgtattttgtaaaataggaattaaacttcttagggttagacatatctaagtaaagaaccttgcataatatctggcatactgatatttaacttacttctcccacgaggtatgccatctattagacaccttaagagtggtgtcttctcccttcaaggaaaagataacttgatgaaatagtgatcttgtgttgatttcattttttcctttttaagggcttaaaaagaaagttgaaggaatttctcttggttgttgtcctaaaagggctctggccatttttttttttttctttttgagacagagtcttgctgtattgcccaaactggagtgcactg

SEQ ID NO: 132355 - DNA, 1835 bp, Homo sapiens
tgggattacaagcatgctccaccacgcctggctaatttttgtatttttagtagagacggggtttcactatgttggccaggctggtcttgacctcaagtgatctgcccctgccttggccttccaaagagctgggattacagtgtgagccaccatgcctggcctgatcttttaaacagcgtttaaaaggagaggatttgttttttaaacctttcatttcataactcttaattctctgatacacctgttttttaatactccttccttttgtcagattgcatgggttagttgtggatcagccactggaattgactacctccattttgtgtcttacgccctgttcatttttatattttatctttgttctttgaggtggtagataaatgtatttgcctagtgagttactaactagtgatcgaacttcaccattttgtatagatgggttcattagactcttttttttattgtgcataattctctcattttcaagttttgttttctttttaatactttactgttttctggttggactgtgtaagttatctttaggattatgaagaaattaatggaacagattagtcatattagcttaaagtcctggcttttcattagtgtcattcttactggatgacttgcaagaatgactcttaggtacaaaagaataatattttcaaaagtctagtgtatacgtcagtaaggcgtaaagaaaacacctatttcattgaaggaaatgaggaagaaagttagttttcatcttagtcaatagatttaagatagcacaaatcagaaagaatagttttgatctaatcttattaaccactttaaacatgagtagctgcaaatattgtttaccatgataacccacaaataacttgagttacattaaggtttttgaagcagtagacaaaattaagcttcattaactgattttaaactttttttaggtaaatgaattggtggatgccagagatgtcggccttggtgcttggtttgaagcacacatacatagtgttactagagcttctgatggacagtcacgtggcaaaactccactgaagaatggcagttcttgtaaaaggactaatggaaatataaagcataaatccaaagagaacacaaataaattggacagtgtaccctctacgtctaattcagactgtgttgctgctgatgaagacgttatttaccatatccagtatgatgagtaagtgctcaagctattgaggactttattcatattttcatttgtagaaaccaaagccttctatttcaagattattttaaatagtctttctgaagaaatcctttagaggttatgttcatttgttactttttggttttggtggttgtactctaatttaaaggtccttttagctctcgattatctctggttcttaagtggtttattttttagtatcacaatactggcttaatttagggtgtatgggtttctgtttgtctttttctctattaggtgggctttttttgagatggtctctctctgtcgcccaagttggagtgctgaatggcacaatctcgcctcactgcaacctcagcctcctgggtttaagtgattctcctgcctcagcctcccaagtagctgggattacaggtgcatatcaccacgcctgattaattcttgtatttttagtagagatggggtttcatcatgttggccagactggtctcaaacacctgacctcaagtgatctgccccccttggcctcccaaagtgctgggattacaggggtgagccactgcgcctggcctctattaggtattttgatatgtattttaacagtattttggaaactgtattttataatatgtagtgtaat

SEQ ID NO: 132356 - DNA, 1006 bp, Homo sapiens
caggtatgagtcactgcacctggccagatttttttattgagtagtaagctccaagtgagtcgatagaatgtggttgtcatatagttatgctgtaaatctgttttgctttattttatttatttatttttgagacagagtcttgcactgtggcccaggctggagtgcagtggtgcgatctcaggtcactgcaacctccacttcctggtttcaagtaattctcgtgcctcagcctcccaagaagctaggattataggcatgcaccaccacacctggctaatgtttgtatttttagttgagactgggtttcaccacgttggccaaggtggtcttgaattcctgatctcaaacacccaccttagcctcccagagtgcgagattacaggtgtgagccaccgcacccggctagtttcattagaagtaagatacctagtacaaaccagatgatgctgctgttgtactggactggctattccctactaggaatattgtcctccagctctcatgccttaaaaacaataccatcaggacctggtgcatgttcagagtaggactcaaaatgtaaaactacagtgaagagtagccaaaaaaactaaatacttagcttgaaagacctggattatgattgttcccatattgtaaaagctcttagaagagatttctgtataacacagaagggaagtttcaggataacctaaacttcctaccagtcaaatatctctgaagatggagaatggtctgccttgagaagtagccagtaaactagcattggccattttcaaccatagatgggaagacttattggagatgatgcactgcaaagagaatctatgaagttagtaattgtattagatgacctgtaatgacagcatgtcatttttacctctaagccagtgtctctcaaagtcacatttttgtactttaactaaataggctttaagtgcttataggttaccatcccattgcatttatggctttatggtatttctctcaaagaactactttttca

SEQ ID NO: 132357 - DNA, 1967 bp, Homo sapiens
acacttaggtatggtgtagatgtcagttggaaatttggttatggagtgtttgttgaagtggtattatctataaagaacctacaagctagtattgataagttttaacattgaattgaataaaatataatatttaaatccataagaccttaccttgtttgtaacattctgttgattattttactacatatatagcatgagactaaccatatttggagatgttgaaaagtataatttaaagtgaaagtgttaggtcaagttatatgacttgaaagtatactacacacaagattgcatttaaattttgcattattttgggagatgcctcaagagaaaatgtcaactcataacatcctaatgaaatgttttgactctgaaataagaattgatgaaattatacttgggtttagctttcttaataaagaaaatcttctctgacaggaccgaggtgatgagttcacatacactggaagcggtggtaaaaatcttgctggtaacaaaagaattggtgcaccttcagctgatcaaacattaacaaacatgaacaggtactactatagacactgtttagaatttgaacattgaataaaagtttcattataggactgtaaattgtaacttacgttgcagaggagaatttcaaactgggagttaaagatctgaaattaaaattccagtgcctgattatgtaattgtttttcagcatcctaacatatctttatactgttattttttaaatgccataatttctagtcttactgaatacatgtgatatgcatttgaaaatgttaacaactttgaaggaaaggagcctgtgtaatttaagtgaaattgagaataaggtggcttgtctactactccattggtcaaagctaaaagtgacaaactcctttttagagtaaactcagtaatttgaaataaagttatgtttgggagccacatttatgtacataaatgaaacataaggtaacttaatcagatctgtactgaatgtacttttagaatgtctgctaatcagatatcttctaagagttgttaaagggaatgttcatttagttacaaaagtgatcttttctaactaaatccccttaagacattacaaaagagccaccgtgtgctgatctttattctatagaaatactaatgacatctcagctcccgtgggtacagaaaatttattaatttcaaaatgttttattttataaatgcatgctaataccaatattaataagtaacccagaccaccagatagcaaaaatcacattatagtttgtcctgctgaaatttttgtgaacatttcataaagttaacagtttttatatcctgttactaagggtattttgtcgattgagtaaaagtgagtgtttttcactttgagtctaaatcactcagttttaagtagtgtccccttaatttctgattactgtgtgatgtaaagaatataccagtatgatttcaagactttcatgcgtatcaatttacatagaatctctgtttttatgtgttctatattgtttctgatagtaggattatttttactgaaccagcagaggagacaggtcagatttgctggtgaaaacattcttgagacaggagcttagctattcttttctagcaagaaagcagtccttcaagaagagtgtcttaaaataaatattttgatgtgtttttgtcaatgaaaatgtatctcaaatttgcaaaaggactctttcaagttgtcaaatctgaaaattatttttccctttaataatcgataattttgcttgaaaggaacttccttcataactacccaccattgtaatgtacatgttaagattcctttcacacttttggacaatctgataagtaccgctacaatctcattagaaaataattgacaagcagtaaacatgttttctataaagaggagatagtgaaaatgaaatatcaactgaaaacaatttaggattgaattatcagagagactttaa

SEQ ID NO: 132358 - DNA, 3498 bp, Homo sapiens
aatttatagcagtctgtcctcatgggaagtactgtaataggaattaaggtcaaaactgttttagtgaatattcttgacttactgtccttacagcaaagcagaatattcagaagttgcatttagttctggcaaagattattttgataccactaatgtgatgaataagtctaaattttaaatctcaaactggcactgaaatattgtgatttaggtggtgaaatactggccagagatttcatcaagccatggattcttggtttggcgctatcttttaagaagagatgatgttgaacctgctccttggacctctgaaggaatagaacggtcaaggagattatgtctacgtttacaggttagattacatttgtctaggctgcctgtgtgttcataaaaatatacacctcttctatctacatgccttaacactggatataacccacagcaattgactggtggactataaggggtgaggaataagatcatgcaaatagacagaggaaaagaagagaaaaggtagtatcctagatgtcagactgccctgggaccaagggttgtgcttgggaaaagttggacctgttaattaaaagtaaaatatttccaaatcaatttggaaatgacttgaagtgtgagggaaagggattcataaaatttaggtataggaggccctggaaaaggacatttatcctagagggcacagggggtgtctctctggtaggggaagggtggggaggtggctttataagagtggtctgccttctccctttctcacttttcctcaccccttttctctcttcccccgcaaagctgcttccctgccctgccaccacctttagtgctttgtcttttttcccctttgcccatgctcagctgttaacccataaagacttcgttgattttgtgtgcatagtggatggtatggctgcattaatcccttcactgcctgtataccctagaatttgtccctgacactgacttcagagcatggtttgagttcatctcccatcattccccattgttgtgcttcccgtaaaaactgccagctttatcatttcccctggctctgcccacactgcatgtgtaggggctgaactatgggcaagtgtctgaccacccaggcaggtgagtgtgtgtcttctaatgcaagtctgtttctgtttttgttgtctttttaaactcatagaattgattgttgaaaataaggccatcaactgctaaaacaactactaaaataattctttttaatataaaaataactttgtcaaattcactttcagaagatttttcagatgtccctgttgagagcattgttctagataggttatatttgaaactgtgagcagaagcatgtgagcccatctgctatgatgagtaatagtcattgaggcctgaaacatacagtgctttaagcatgactgttattacaaagcatgcttctcccaccccacccaccccctcaaagaaggtagccattgaaacataaggatgatagatagaatgtattacttcaaatctaactcttagctggtggaggatttagtaatttagttgctttaggtcttgtaaaagctcctgccgctaactttaggagatgagaagtttgacccttaatgttcttgatatttttttagatcaactccacaatttactgtgatccaatccatctgctttctatctgttgtgctctatgattggttctcatttaccttcatttctgtattctactttccttaaactttaaggaaatctaatcacaactcctgaagacttacctttcttagatctgaaacttaagatcagtgtattataaaatggaatctcttagcagtcacagctacataaattgggattttaatagttgtctgtgctttgaattcttttcctttaaatgtctgtttcttttatgtaaagtttttcagtttggggaacgtgtagtcttcccctcccttttaatttctcaccaggatctaaaccccccttctctgtgaagcttaaatctgcattgtactctccctcctccccccccatcagtatccagcaggttacccttcagataaagaagggaagaagcctaaaggacagtcaaagaagcagcccagtggaaccacaaaaaggccaatttcagatggtaggtaatgattgcaaaatataaataataataacatacttttgttgttgttgttgttgagacggggtctcactcttgtcacccaggctggagtgcagtggaaagatcttggctcactgtagccttgacctcctgggctcaagcgatccacctacctcaacctctgaagtagcccacggctgtacaccaccacacctggctaatttttgtatcttttgtaaagatggggtttctccatgttgcccaagctggtcttgaactcctgggctgaagggatcctcctgcctcagcctcctaaagtgctgggattacaggcagaagccactgcatccagccaacatactttttaataaagagaaatattaagaaaataaattgagacttaaatgaaagcaaaggatttggctgggggggcatggtagaagatggatcttttgtttaatagtgtcagagccaaatagcaggaaataacagtatcctaaattttaggggaaattagatgctgttttatgttggttatctttctgctaaacattacttgtgccagttaactcttttgtttcatagttctgcttagaaccacttgtaagtctgctgatacatttttaaaataaatctagatgactgtccaagtgcctccaaagtgtacaaagcatcagattcagcagaagcaattgaggcttttcaactaactcctcaacagcaacatctcatcagagaagattgtcaaaaccagaagctgtgggatgaagtgctttcacatcttgtggaaggaccagtatgtgaagatttttttaaataataacattctgatattaacaaatgataaataattgtctcatgaagtctgtttttcacacatcagtcaaaacttcatccttctacccggttttctaatccagtgccactacctttcagaaataatctgaggcaacacatatacatgcgcctaaatttactttaaacctcttagatgctggattttgacttctctatgcccaaagttactttactttgaggtactgttcctcagaagaattttcagtttgtgaaacatcgtcattttaatctaaaaatcaccacgaaagtttttgttacagttcaaagttacctaaccgcataagtcttaagcagttcagcacaattttcaaaacctacatgttaaactaagtggtaaaattaaccagattatctattaagtattttatgtttctaaattttcattttttcttaatctttaaattaatcacataattttaaagtaaaaaggaatcacagttaattaatgtgtgggctttgtgttaagctgtgttttgcaaacaagcccttcttatcaaatccctaaagttggagtcttcaaatatgaactatct

SEQ ID NO: 132359 - DNA, 1012 bp, Homo sapiens
tcagctcactgcaagctccgccttcttggttcactccattctcctgcctcagcctccccagcagctgggactacaggcacacgccgccacgcccagataattttttgtatttttagtagcgatggggtttcactgtgttagccaggatggtgtcgatctcctgaccttgtgatccgcctgcctcggcctcccaaagtgctgggattacaggcgtgagccaccgcgcccggcctctaaatagaagacattaaatgtgactgaaacatttttattgctaaataatagatggatatattttgggatacatgtgaaattttgatatgttcatataacatataataaatcagggtaattggaatgttcatcactataaacatcttttatgctgggaacatttgaattattctctactagctgttttgaaatacacagtagatgaattttattagcatattatgaactgctaacttttctttccttatccttggatactgttctagaattttctgaaaaaattggaacaatcttttatgtgcgtttgctgtcaggagctagtttaccagcctgtgacaactgagtgcttccacaatgtctgtaaagtaagtagaattccttcctcactttccctgttaggtatgaaggcacactaatttctatacctgtttttagcatgctaagaagcattttccgtgaagcgggatagttgcggaaccttctagttaagaagcatttagttacgtcttggtggtaaatgcatgttttaattagatagtgataataattcaaatatgtgtcatttgagatattctatcatgtttggaattttgaggaggggctgaaatgggaaagaaggtaagaggtcattgctcttgtctgtaatagcttatatgttttatatattatagcgcaaactggagtgttttcattaataaatcatataaaacagtttatacctagcatcatgcccagatgaattgaatattgtgttttcagtgtggtgtgaaaggaaagt

SEQ ID NO: 132360 - DNA, 1033 bp, Homo sapiens
ttttccatagtgcagattcaagcctttatgtttgttcattctgtacatttctctcattaccagtttctggttcctatttaaaagcataagttgctgagtacttacatgctttatgctcagattaaattggatgtttttgtttttaccataggattgcctacagcgctcctttaaggcacaggttttctcctgccctgcttgccggcatgatcttggccagaattacatcatgattcccaatgagattctgcagactctacttgaccttttcttccctggctacagcaaaggacgatgatctgcctgctttcactgtgttgttcatggtggctttttggacaataaagaatctaaaatgggtggggagggtggaagaaatggtggactgtatctctcacgttctgaagcagctaatcctctttcccacatagccatcatcttgtgtgtgtagtaagaggcccatttctcaactgtcttttaaatatctaaaggtagttcctgtaacaactagttttaatgagtaaaaagtcaaagcctcagctctagttgatatccaagttatgatttattttgcaactacctcaggacagaaaagatttatggggattttaaaaatcattgaataactagttaaatgaaattttagctacacactgcctcccaaatattagttgtgcctggttcttgtaatttgattttacagaaaaggaaatgacacttgagatccttggaatgaacacagcttctaaagtgtgcatatacttttttaacgtctcttcttccattacaatgtgtgttttgcaaggacaggttcattttttttagcccactttgtgaactccattgtgcttttttctggtgttttatgcaagttgactactaatgactaatgagaacaataatgaatgcattgttgctgcattagtgtaatgtggtgtggttttgcacttaaaagaggtattcatatgctctagttgtaaatgttcatgaaaatccacttctctactagtcgaactgcttttagtgtctcacc

SEQ ID NO: 132361 - DNA, 1582 bp, Homo sapiens
gtatggaaaatgacatagcaaataaattagacctatgttaaaagagaaggtcagctaaatatccaaacttaaggatataatgggcagataaacatagattccaaagtcttctttaagcagttgaagtctttcaaacacaactttgctataaactggtccagatatcaacagcacatagggatgcttaacaggggtggtgatcagggacacgcctcctgggaaatgcctcttttttttaaatggtaatgtagggttggattttaggttctcagaatatttgctgggctgatggtgtcttaggttgtgggactagcattgccacctcctttgccctaagagaaacctcccagaacatctcacagcatttccatcttttgtcctttgcagcccttcgtgaaaccagagaacaaattctggccaacgattgcccggattgatgacatatatggagatcagcacctggtttgtacctgcccacccatggaagtttatgagtctccattttctgaacaaaagagggcgtcttcttagtcctctgtccctaagtttaaaggactgatttgatgcctctccccagagcatttgataagcaagaaagatttcatctcccaccccagcctcaagtaggagttttatatactgtgtatatctctgtaatctctgtcaaggtaaatgtaaatacagtagctggagggagtcgaagctgatggttggaagacggatttgctttggtattctgcttccacatgtgccagttgcctggattgggagccattttgtgttttgcgtagaaagttttaggaactttaacttttaatgtggcaagtttgcagatgtcatagaggctatcctggagacttaatagacatttttttgttccaaaagagtccatgtggactgtgccatctgtgggaaatcccagggcaaatgtttacattttgtataccctgaagaactctttttcctctaatatgcctaatctgtaatcacatttctgagtgttctcctctttttctgtgtgaggtttttttttttttaatctgcatttattagtattctaataaaagcatcttgatcggaagaatgcctttctcttggtgtactttatagttttaccaccgttacaacctagattcagtgggagctgaagggcaatgagaacacccaacccaatagccattgttacatcatcagttttgccttcgactggctgaagaaacagttgtcttggtcaacagtgaaaaccactttgaccctttttgttggaactgagttagagtgcatgtaactgtactccagctatggaaggtcaatcaaatagcaatttatcttttctcatttaagtccagaggtaataagccaagcactggtgctccttcagttttcccgctctgccctcctttgcataaaattttcatccgcatggtctcaagaaggctgttgcatttccaggcgtctgacatacccattctagttaggattaaaagggaagagcaaaggccaggcgcggtggctcatgcctgtaatcccagcactttgggaggctgaggcgggaggatcacctgaggtcaggagttggaga

SEQ ID NO: 132362 - DNA, 1050 bp, Homo sapiens
atatatacgcaaaagtaattatttgatgttgagggtaaagttgctgaaaagtgtcaatggctctagaaatattttgtataaaaggatcaggactatacaacacatttaactgttgcaagtagattttatgtccgcagaatagaaataatctcatccccagacacctccggtcatatgttcagtaatgccccccacctgccattagccataatcaggttcacaggtgtgtagtgagctgaagataagacacatcggcacagtgtgctaaacatttttatttgtaataagactaaatgaaacctttattgccaataataaacttacccggtgcccatggcttcttggtcctcgctgatacacataaaaagctgatgcacttatttattaaattacttattcatttgtttgggtaaaacaataagctgatgctaatcttgggctgaaacaactttcctgaacaggttatgtgggtcatgaatttattttggacacgagacccttcaaaaagtctgcaaatattgaggctgtggatgtggccaagagactccaggattatggtaagtggcttttgacattcatgccgccgcccatgctggctgtggaccacttcctaaagcacaaatggaaaatgcaggcaccacagtaaactgatctgggggataaatggggagctcagggttcttggcaacctccaaaataatagagaaaaaagtttgcttatgactgcactggtcctgcccttcagaagatattaaaatatgcatcttgaatccattaacagccaagaaaagtgtttaagattaaaattaaaacccctttgagttgcagtgagtgtagtggtaaaggagacagagcaagtaacccatcgaagtggtagagacaaatggcattggagttttatagccacctctgtcatggcgtagctgtttcagctgcttctagagatgaagaaataagtgtagtagttttcacaaagaaaatgcaactttctttgaagcattttgaaagacacggacactttacctgtgcattagtgggtgttcattcagc

SEQ ID NO: 132363 - DNA, 1026 bp, Homo sapiens
cccctacacctggctaatttttgtaatttttttttcgtagagacagggtttcaccatgtcggccaggctggttttgaactcctgacctcaagtgatttgcctgcctcagcctcccaacgtgctgggattacaggtgtgagccaatgagcccagctccacctctttcatgtttattcattctataagaagcagagcagttcgtagactgtcttcaggggctattaattactggagctattcttcacaggcttgagaagttatgcttgctctgagtctctataagtggattcatttttgctgagagtgaggaaagtgggttaagaagaaggagtacatcattatctcatgagtagatactttcctggaaggaaattcatcagttggtggaccgtggaatttgggaagccccggaggaatattggtctatttattaaaacgctgacttaatggtttattcctgatgatggttgtgtggtcagtagctcattctggggagctactggcagcctggacctagagaagaagcctgtttatgaactacaggtcgaatatccctaatctgaaaatctaaaactttttctaaaaatttatatttatttttttgagacagggtcttgcccctattacccaggctggagtgcagttgtgtgatcgcggctcactgcagcctcgacttcccaggctcaggtgattctatttttagtagggctagggtttggccatgttgccctggctggtctggaactcctgatctaaaacgatctgcccacctcagcctcccaaagtgctgggattaccagcatgagtcactgtgcctggcctgaaaatccaaaacttttgggtgcccacatgaggctcaaataaagatctgtaatttcaaataagggatatgtcattggtagaacaaagtgaactgggtcgcacagactttggcctcattaactccttgttacttacggtatactgtttgacgtcgcgtatttctaattctttgtttgcagcctgaaaccaaaacatcaaaaggtc

SEQ ID NO: 132364 - DNA, 1035 bp, Homo sapiens
ccataacaccactttagttaactgtttaggggcattactatatgcaggtttctcctaggctcctagtctacacagcagcccaggtcaataaagattccacaacactgaaatgtgtacataaataccataagctaattatttacaaagtgctatgatatgccttgaaagagtagagtaactcagactgggtagaggcaggatagaatggttgacagcgccttcttgctggagccatttgagatgggcctggaagccagcgtagccgatgagagcctgagtaagcagagacacaggagcaaaccagagaaaagaaagctctctggtctggagtgaaggatgggataggggagagggagcaaatgacaatgaggctggaaatgtagcgtggggccttgaaggccttggaaggctctggacttcacccttgagctggacaatagccattaaaggtttttgagcaggggagggtagggattcatgaagagaccgttacaatcattaagacggcggcaagggggaaacatgccttagaggtagcaaggggctggggtggtggctcacacctgcaatcctgtaatcacacctgtgattgaaggttagctagcctctagggcttacagtagagggaataataggcaggggaacaaagtcaccctggaagtgatgggagggaactaaaaaccaggcatccttttacacattgggctgtgggctcaggacctaatagctgagtcttggaagtggtgaggccccaggaaagaatattgaaggtgagaagccagaacaaaacgcctcaagtagatggctacattaagagggagggagaagttgggtgcctggtgaggggcactccacacctgaggcagctttagaaccctggcagtgcttggcacagtgcctctccctcaacacccctgcctggccctcctgctgccgtgtggctccacctcctccctgcagcctccactccctcctcttgcccacccccgaccccaccccggagcagctgctctcccacttggtattgtctggctc

SEQ ID NO: 132365 - DNA, 1076 bp, Homo sapiens
gggaagaaagtaggccataagaattggtgcagtcttgatttgaagctctttgcagtgatgatgtgtatcccttatgatcacagggactcttaactaccaggacaagattgagcagtttttaaacataagcagcctctactagggacaatgggaaaataaaccagacaaaattgcttccgtggagatattggcccagatcccatcggattcctggcaattatcaagacctctcaaattcatagtaaacaaacaaaaaaatcacaaaacacatgtaatttaagaacaattcttttctctctttagataacacagtagtcagtagtcagcttgccctgttgtaggctttgctactacaataaagaacgtaaaactactattaaaagaagaaaacaaaaatgtattacaggcttacagggatctgacagatatccttgttggaattttccactcatctttactccagagtcatggtgggctgccttcctttgtgggtggagtttatctgggggtgtcttttggttggtttcttcacattcgtgtttgcctgttcaatggctaatggctctttttccctttgttgcagatgatgggaggcaagggtcttaaacaagccacggaaactgcgatattaaatgccaactacatggccaagcgattagaaacacactacagaattcttttcaggggtgcaagaggcaagtatcaactttaatctatcattactttggtttttttcttggccaaactaagtttgacctagatgcgcttttctgacatgggcaagagacttctatttcttagcacatatcagaaaatagtgtagagttcttggaaataactcgggtttattttattttatcttgttatttttgagatagagtcttgctctgtcacccaggctggagtccagtggcaggatcttgtctcactgcaatttctgcctcccgggttcaagcgattcttttgcctcagcctcccgagtagctgggactacacgtgtgcaccaccatgcccggctaatttttatatttttagtagagacagggtttcaccatattggccaggctggtctcgaa

SEQ ID NO: 132366 - DNA, 1117 bp, Homo sapiens
caagctggagtgcagtggtgtgatcttggctcactacaacctccacctcaccggttcaagcaattgtccctgcctcagcctcctaagtagctgggattacaggcacctgccaccatgctcggctaatctttgtatttttagtagagacggggtttcaccatgttggccaggctggtctcgaattcttgaccttaggtgatctgcccgcctcggcctcccagagtgccgggattacgggcatgagccaccacacccagccaggatcttattatttctttggaatgatttgtgaagggagtaatggctgtggtttttttttattgctgtcattgtactttgagacagttccaggaaagtaaagactgagacttcatctttcttcatcctttaaaatgaaaggcgaggatttggccaagaaagaaacatatcctccctccatgtccttctctaccccttttctttcacaggtggataagcacaaggagaacctagcagctatcatgattacatacccatccaccaatggggtgtttgaagagaacatcagtgacgtgtgtgacctcatccatcaacatggaggacaggtctacctagacggggcaaatatgaatgctcaggtgggaactgaagaggcccgcccttagttcccactgagaaaatggatatgtggaaaaaaaaaaaaattctgacttcttgagaggcttcctgcctgagggaactcagacccacgacctgaccactggtggttgttgatctctcatggccttggaaagccacttatcctggcatcagctttatcagctgtgaaatgggggctcaaagggcccaatcctgattacttgggggacagaggatctatgtactgtgaacctctgaagaaatgctgttgggagcccctgcaggagaggagtgacacaatctttttgagactcttattggtgtttgcttttttcctttttctttctttctttctttttttagatggagtctcactctgtcgccaaggctggagtgcagtggtgcgatgtctgctcactgcaacctccacctcctgggttcaagcagttctgctgcctcagcctcccgagtagctgggactacaggtgcatgctgccac

SEQ ID NO: 132367 - DNA, 1034 bp, Homo sapiens
acgtctgtcattatcatctgtcctggataagccaagcagagcactgaagctgtgatgtgggccctgagtccttgagtttaacttccagtctcatgttcttctaaggtgctttctgtgtatcctaactgagacaaggttagaataagtccaggcctatttttattgtactgggataaaggaagattgtattgatttcctgagcatcttcagggaacaatatttagggattcatatggaaactttttttggacattgctttgcaatgacaaataattaaattgtagcagattttaaagcactagtgttcagcctaaataaaaacaggtggtgtctaatttgtgctacaagcatgttgtagtacttttctgtcattattcatagtctgatgatgattttgctctttctttgcttcctttctattctgtaggtttgcctcattccgaaatcagcacatgggaccaacccagcaagtgcccacatggcaggcatgaagattcagcctgtggaggtggataaatatgggaatatcgatgcagttcacctcaaggccatggtacttgtcttctccttagcagatgggagaggccgggatggggagtgctggtggggatcagggacttgatggattatgtaaatgtcttctcttgcattctaatgaaaagtctgcagttcttcctttgaccagagtctactctacccctcccatcaccaacagggagaaatccccgttttctaattccagcttgtgtaaaaaactgaatgaattattcatggtggtagtaagagtactccttgcagaacctgcctgcctctttctgcccaatcttccctctccttctcgccttccccacttaataatcaaaatggcagtcacacttacacatcttcgtgtcaggaattgtaacacaaatgtcagctttgcaaatatccatgactgtgccagccccatcatgctgaattcctggcatcatgcagcttggtttccaccaacccccactctcaacctcccaacctccaggaagaagttgcttagc

SEQ ID NO: 132368 - DNA, 1022 bp, Homo sapiens
atgataggatgtttgaagtttgcttcaaaatatatagttcagcatgaaagtggttagtgagaaatataataggaaacaagattgaccgtaaaccaaattgttacagctggctgacacacacgtcgtagttccttttgttcttcactgtattttggtatagttttgaaatttttcataataacaaaaggctattttcaatgcgtggtcctgagcaaggatatagaaagctccatctttgggtaggagtggttgagctgtagtgcacaaactggatgctgttgctttgattgttttgattgttcaagaccttttgactccagcagagctccttgatgagcttctctcagcgtctggacagtgaccatgtgtcacgtgctggtgaacccctggccagggcccaataaatattgaatgagtaaatgaaagccagaagacctaaccgtgatccctttcttcttgtctttgcaagcggagcccagggagaatatgctggactggccactatccgagcctacttaaaccagaaaggagaggggcacagaacggtgagtatggcaggaggtggcgcttgctcaccatggggcacagaggtcctggctctcagggtcccttctgtgggacactccctccaagccttcttggaagcagatgagggaacatatagtcaagaaacaaatttctgtgaactagccattatgatccttgcttccaagacatcccacttgaccattttgaggaaaaacattcagagataaaagacttgctcaaacccagaatgcaaacgtcagccagttggctgtggaactgctctctagggagcagagggaggaagagggcaggaatgttgccattgcaagcatcctctccttggctcagccccggccctgggcctggatgaagggcagagaccatgctttaattcttcagtaacccctgttgtgctgaagcccggttctggtcatagtatgctcaaacaatatttgttgaataaataaattctccattagatgattctcaacttc

SEQ ID NO: 132369 - DNA, 1054 bp, Homo sapiens
ctgagtaaatgccatacactggagggtcttgtttttcttttcttcttttttttcttgaggtggagtctcactctgtggcccaggctgcagtgcagtggtgtgatctcggatcactgcaacctccacctcccaggttcaagtgattctcccacttcagcctcccaagtagtctggattacaggcatgcaccaccacgcccggctaattttttgtatgtttagtagaaatggggtttcaccatgttggccaggctggtctcgaactcctgatctcaggtgatccgcccaccttggcctcccaaagtgttaggattacaggtgtgagccaccacgcccggcatggagggccttgtttttctaggacagtttaagctgtgctcacataaacttggtgtttctgaggctccccgttcactggccagccctgcagctccagaccattcactacttcattttaaacagatgtcagaaaagcactgacctagcctgtcctccatatataatagtttgttgatggttgcttagtctgggttatgtagataagcaattatttttcataagacttttctaccaacaggtggcactaacaatttgttttactaatgccccagtagtaatccttgtgtcacatttgaatatatcatttgcactttttgggttgaaacatagctgatttttatagatgtttaaggccagagagagagagagagagagaaatccagcatttctgatcaagtctttagcatatagtctttctcctacactactggctcatagccagtaatctgcttcttccttcattcctagtctacaccttgattggcctttcaagaaagtcagatgaatagaattcatgagaaaaacataggggtaaatataaaatgtttttcttgaggttccttactgtaggggaaaggatgacattcatattgattgcctgtgctggaggaattcaatttttaaaatatttactaaatacttattgcagaactactacatgcagagtactgttctatatattccctgttgaagaatatacagaactctgagaatta

SEQ ID NO: 132370 - DNA, 1047 bp, Homo sapiens
tagccaggtgtggtggcaggggcctgtaatcccagctactcgggaggctgaggcaggacaattgcttgaacctgggaggcagaggttgcagtgagccaagatcgcaccactgcaccccagcctgggcgacaagagtgaaaccccatctcaaaaaaaataagaagaagaaaaaaataaattataactccaaggtgacggcattaggaggtgggagctttggcaggtaattaggtcatgagggttgtacaatcctgaatgggattagtgccattattttaagaaagaccccagagagctctttaccccttccaccatgtgaggacacagcaagaccacagctatctatgaaccaggaagtgcgccctcactagacactaagtctgctggcttctaggatcttggacatctcagcctctagaacaatgggaaatagctttctgttgtttataagccacccagtttttggcattttgttatagcacctggatggattaagacaataaccataaattttgtcaagataactttgcttgatgtagccaagccttcactggtctgcctagttccttaggacattttgatcccaagggtgtttgaagggcctgaaagaaaaaatgtcaagaagcttatccctattttctcctatttatttgttctacccataaaccccggggagggtttccagcttggtgtagaaaacagccaaataatatttaattaccttttcatttcccactgagcccagcggggcttgcttcagctttttctccataacactttgccactcttcaaatcattcagcagctcataagtacattctaggaattgctagtttagaattatgatgtgatgtttaaggcagacagaaagagtaattaacacctcccatggatatgtaaagtgaaagacaagttggaattattattagctcacttggcttaaaaaattgaggaagttgtttttgtccttaaaaactgcaaactgtgattgttaatgtagacggaggtggccattgcttttcccagaatctccttcatgggaagattc

SEQ ID NO: 132371 - DNA, 1027 bp, Homo sapiens
ggaattataggtgtgaaccactgtacctggccttcccatttacttttgtgtttgtttcttgttccacttagtgaagaaagagaacaatctattgctatataagagtttatgccaaccatacctgaagcaactcattgtgtttcatggaaagaaatctgttttgggggcttttcttccctgaaaagttagcaaaacattgtatttttgtgtaagttccctttttggacaactatgtcccacttttaaatgaagacagtaacggtacttaccttataaggttgtggtggaacttaaataaattaacatatgtatagcgcttagaacagtgcctggcacatagcttttctcatcatcgtcattattattaaagttattattgctattgctattataatatgtatatatgcatttttgttttctttcttttcagcctatcacatggaaagaatttgcaaacatccacccctttgtgcctctggatcaagctcaaggatatcagcagcttttccgagagcttgagaaggatttgtgtgaactcacaggttatgaccaggtctgtttccagccaaacaggtaagggcatttcttttcttattgtttcagcaatctattcttgtatagcatacaccacaaaacttaaaggcttagaacaacaacttttttgtgttattctgtgacttgctagacagttccactccactggggagagcatggctagaaggtgcatcgtgttctccctcacatagctggtgaggagctgtgggctgggagtgcatttgaggatgttcactagggccatagtttttctccatatggggctttccttgtagttccttgagcttccttgttccttacagcacaatgtcggggttcagaatgcgtgttcccagatgaagcatggagaagctgcaaatctctaatggccgaacctcctaagttacactgcatcccttccagattagtctatctattaaagcaagtcacgaggcgagcccagattgaatcggggaggggacaacacctgggt

SEQ ID NO: 132372 - DNA, 1296 bp, Homo sapiens
gtttgtgtgtcttgtgtgacttctgcgttttgtgctttggtaatcagctagggagttaggcagagtgctgctgctgatttcgcctgctgtggcctggttattctggctcagccgtggctcccaagtatttcatcctcataacgatcccgttcctgacttgggaaaagcacactttgtttcctggtggctctgctcccttggcagtcaggaagcagggatgaataattgccaggctgaagttcactcccaagagccctatatcctcttcttcccaaccttcaactcatacccacagtcagcttcttgtccaagacatcctctgaggtttgtgggggtctgtgcccttctctctgagtgtagttgacatattgtccgtggccaaaattgatctgcattttgaaagtagatttcggtgtgtcttatatgtcaggaggatgtgcatggactcatatctacttttggggcccctaattctgtgttttgtgttcacagctaccactctgaaacaaacattgtccggtacatgaagaaactggaaaataaagacatttcccttgttcacagcatgattccactggtagttatttgtggccttttttctcatttccaagctaccccaatcccacgtctcttggtcctacctaatatgctccaagagcaacaaaggggtggccatgctgggagaatggagggttgattgatggactatagaaaatcactaatgtgatacattttggatgttcttcttaaagggatcctgcaccatgaaactgaacagttcgtctgaactcgcagtaagtagctcacttctgtaagtggatactcagcaaggggcagtgttctagcttccacctaagcccagaactagtgaaatctactgggactgtgattctgtgattgaagaactattttaataattctttaccttgctattcaccaatcttgggagtaaccctgtatttctcacgacttcatcatttaaatgtatgggtaaacttattattttttaataaaattaattaaatgtatatggtatttatgcctttctatcctatccctcccccacccccacccccttttaaacctgtcatattaaaagcttttttaaaaaaaattgtttatagttctaaatctcaggtagaattacgaaccttaagccgtctttctagaaatcattcctgtatcagaaagatagggattcaagtcaacagaagatttgtgcaactcgctgttgtggttggcaagtatctctactaggccaggatccattttagcgaagctttttttttctttctt

SEQ ID NO: 132373 - DNA, 1050 bp, Homo sapiens
ggtcttttcagtaaaggatcattcaccctttgctttcttttagacttagtgttttcatatgtgggactgaaatgcacatattttgttcataatactcctctcttcacagtatgactgactttaagataaaggctctgataactgatatacaggttaagggaagaaaatctcctcaatatctgataagtgggttaagggaagaaaaagataagcatgtctagcttcaaaaggagtgtcctgcagccatggaatgttagagttcagaggtggctggcaaaactcgaagccttgtgaaacctgggactggtctagccaccttcctctaagccttagcgtggagataattgtaccctgatattttggaatgatgggattttgtttagcactgtctcccctttgacctctcttgggattcctccagtgatgtggagtttagagttgatgttttccattttgtttgtgtttctgtagcttggtatttctcttgatgaaacagtcaatgaaaaagatctggacgatttgttgtggatctttggttgtgagtcatctgcagtaagtaaaataaaaacatgcgttcctcatcataactattggaggtggtagcaaaagtagcttatcccctgagtgtgagggagaaggggcccaagtgtgacactggtagcttgttgttaaaattattccactgactatcccttgctagtcactgctgacagctggaggtcactgctgtagggctccagccagtattatgcacccaggctagttggaaagattgttaatggtgtttcattgaaagtgcctctaggctggggatggtggctcatgcctgtaatcccagcactttgggaggtcaggggggcgggggggcagatcacctgaggtcaggagttcaagaccagcctgaccaacatggagaaaccccgtctccactaaaaatacaaaattagccaggcatggtggcacatacctgtaatcccagttactcaggaggctgaggtgggagaattgcttcaacccaggaggcggcggttgcagtgagctgagattgcg

SEQ ID NO: 132374 - DNA, 1067 bp, Homo sapiens
aaaggaggaatgtgcaactgagtagaacaattttagagaaaatgtagattatgtgttaattagactgaagctgtgcctacttccagagagtatgaggcagtttagaaggtaaaacacagtattttactgggagtaagacagaatttttatttagcgtatatacagcagaaatagaaagggaacagaaaaagcctggaatgaggcaagtgttaaaatgggcagttctagcaaacagaaccgaataaggaacagtcaaaacagtgatgggggggccaaccttgaggagaaattgagtgttgtttggggactttttttttttttgagatgtcgcatacagtacttagtgttggttggatggatgactcttacattttccatatagttattctgtcataaatactcaaacaaaatgagggatttaaactgtaattagagctcttttctgagacatctgtctgtaacatttctctttttcccacaattaggtgaaaatgaaatccttgcaactctgcatgccatttcaagcaaaaaccagatctggagatcgtatattggcatgggctattataactgctcagtgccacagacgattttgcggaacttactggagaactcaggatggtaatgtatttctcagttcaggaacaggatgactgtgatttgcataattctctccatcctccatctgtccccttgcagtctcagagcctccacactgacacccacctcctagtgctgtctccaatgtccgggaacctaccgggtttctctggatcgagaaatgttcttgctcaaatgttgaggaaatagaagtttcttcccacttccagtcccataaaatctactaggatgctaaattgtggatctggtcatctcttcctcttctgcagcttaatttctgtgctgtatttgagtaagatgtgaaacctgcaggtgggcagattcaggcctttactcctccttggagaccctgggacataggctacttctgagctatctcattgagtcattggtggagtctgggagagaatcttggtccactgtcttctctcaggattccccgccta

SEQ ID NO: 132375 - DNA, 1063 bp, Homo sapiens
cccaagagtattatcgtgtctcctaaaaatgactgatacagtttttttaattagtttcctatggctgccatgtaatatagtaccacaaactaggtggcttaaaacaacaggaacctgttcactcccagttccgtagtcagaaatcaagatgttggcagggttggctcatttctggaagctctgaaggagaatcagttccctgcctctctcccaggttccttggcctgtggatacattgctccagtctctgctgccatcatcacatggcattcttcttgcatgtgtgtctgtgtgtcccaattttgctcttcttataaggacaccaatcattggattacggctgaccctaatccagcatgatctcattttaacttggttacatcagtggagaccctattttcaagtaaggttatattcagaggtaccatggggttaggatttcaaagcatcatttttgggaacacaattcaacttgtaacactcctcttatccatctccctcctggactatagtgctggcctcttactgtatctccctgggccggggtctcccctcagtgacctttccacaccatcagtagaattatcttactgtattgtaaaaagaatcatactatccagctttatttccaaaggctaaactcagtttgacagacagagcccttcacagactgttgtcattggagagctggaccaacgcagaacagggacctgtcccccctgcacaggatcataattgaagccggactcgcctacaaggcactgctaattaatctttcctcctactgggcgtctgaatcattctgcccctaagaagattatttgggaggtgattggactttttgcatgattgttcctagggatgttgtccttgcctatcttctcagatgtgggtttattgcatttttacttatttcctaaactttcaatggaagaaggcaagatcatcttccataaggtagttagattatattactcatgaaactaataacttcaagactctctttccttactctactgtggcaaagtaccatatctctctctttttttatttttttttttat

SEQ ID NO: 132376 - DNA, 1032 bp, Homo sapiens
aggagcaagctggttttgtccagttgaaaggaaaagggtgaggaatgtgctctgctgtgagctttgctctggggggaaaatctagttttctttttcccttttcccatttgctttccaaggtttggatggcacaatcaccttctcagaatgcttcttttactactcaggaggaaaaggctgccactttgggattgaaggaccccatactgtttcctctagaaaggtagctcttttccacgggagaagaggtgtacagtggtaggaattgtgtccttagttaggatttggggttttatttagacatcatcatgtcccttaacttggacttagacactggattctgtgaagttcagtttcaggttggttcagcaggtagatctctgatcatggacttttctgtcttctctccttttctctgcatctattgctatcttgacaccaaagttactcaaactctgggcttctaggtacactgggtttgttctcctgcagatctggccaaagtgatatttcatgagtgggtctgagaaatggcaaccagtgaacaaacatttgaaacaattcagacactcactaggctgtatgtttggggaattctttttattatatgtgggtgtggaagcctgaggtcttagattttatcacagtaagaagcagcttacccctctgttcatcaagtcacagactgtcttggcttctagctgggaagtttttgttgggaagttttgtagtgttgggcaatggatgagtgaatggaaagaagcgtgactagggacctactcttaatggctcgaaaatgtccattaacttgttgtataggggacagctcattctattaactcactttgttctcaacagaaggtaaaattgggcataactaccaagctatcatgagaaccaatccaggaaaactcattagtcccaagctggataggggcagagtccacaggtgcttgagaagtttgggtggtcctatagagactagagtatatatttatcaccttagaaacttctttgtctcatgtttgacag

SEQ ID NO: 132377 - DNA, 1117 bp, Homo sapiens
ttgtaaggcctgtttgagtgtcctccaccccaccatcagtcagtgacttggaagcaggaacagagaaatgtggtgactgagttcagccgaggggaggacttcaaggtccactagtcagctcagtgaggttgagagagaggtggggcagccccacccacattctgcctgcaagctcagtgacccgcctcaggaggctgggagtgagggcccgggctgaaccggggcgcgtgctagagaatagggacgtgagtcgctgtgggcgaatctgtgttgtgacttctattcttcatgtcctcttccccactccatcaaatagcactgtgccttgcttaaacaagtctcagttatacgatgtacggataactttgatctcattttgactcaagtttgctttactttttgtaagtccagagtattcatacaaaaatgcaaactgagaattttagtaagaattctcaatgcctgtatcatcaacatactaactgactgaacaatgaagaaataaaattttgggaagtctgaaattattgtagacactgcattattttatacaactttcttaatagctgcaggtttccactgataaatgtttctctgaggctcacacattttgggatgtagttgaaccaaatgtgagaacaatttatgcattgattcatcatcatgagtctgtgatgggtgagttcctgggctagccatacgtgaaagtttaggtgaattttcattgcaacacattgattcacctgtattttctgagcatttactataagagattacaatttacttggtgtgattctcggttggactgcaaatttctccatatgacttttttttgaggcagggtctcactgtcactcaggttggactgcagtggcatgatcatggctcactgcagcctcaacctcctgggccaaacagatcctcccactactgcagcttcctgagtatctggactacaggcatgtgctaccacatggactaatttatttcattttgtagagacgggggtcttgctgtgttgcctaggctggtctcaaactcctgggttcaaaacatcctcctcccttagcctcccaaattgctgggattacaggcatgagccactgtgcccagccca

SEQ ID NO: 132378 - DNA, 2034 bp, Homo sapiens
ggacactctttaacgtgctttcatgtattaatgtatattacaaccctatgaggaaaataccattaatacttctgttttaaaaatgaagaaaccgtgatattcagatgatgcatgacttgcccaaggtcatagctggtaagtgatggaggcagaattcaaacccaggcagcccagctccactgtccacactccatccactactttgctctctcttcattttgtcctttgcaaggtcgtgggtgtacaaagtggaaaacttctgtcctgactcacctggaatatccagtttacagatgtgcacaaacccagttgcactagaatcaccctgccatatgccaactgccccagtggaaacgcagcagcttcctggcagcacagacgtgggaacactcaagcctgctgctagggcaagggaaggggtcacggaagtgcaatactgaagaatgagcagtgatgctctgctagataaatctgggggaggctgctggaggtagtgggattaacatgtataggacagaatggccggacagaaccaggggaggacgggtggttcatcagtcactaaggatgctccccctcttcttggacaattcagaaagtgccttgacaaaatactttgatcatgaactggctgctaagtaagtcattattcagagaaacaagcaaagctattcagttcaaaatcctgtcctgctcaagtgaatcctgcattccccatccacacgcactcaacaacaacaaaaggactagaaggatatgtgtcactggcaacactgatttctctgaatggtgcccttattagtggttttagctttcctttaattactttgcagttttggaattttctgcagtgtaggtattcattttataattaattcaaagttaaaaattactttatgaccaaagccagttacttttagctatggtatgcctcgctgtgtagtcttttcagtgaattcatctcaaggcaactagactgaactagactgaactaatcatagataaactgcagggattaaagtttacacaaaattgcacattgcttgtggaagagagaggagaaactaaaccctccaatgttcacattattcaactagaactgaggagatgagttgtcagaatgatggacttgtgccagctgaatgttccagagtgatttctactaaatggttaatggagggcagtgagcggagggagggagcattgtgtaatgcagctgcaggtgttggctttgtcaccctagttgggttgcgcactctcctgaactgaccccaggggcaactaggccgtggcagctgttccccaggccgaggccacgacttgtctttagccagatgatgcccattgccaggtcctgcctgtaggccccgcagtctgtgacaaggctttcctttggccattcccgactcattcaattcccagcttataggaattattatttcttctttaggatgattccaataaatttccattaaatgactgtaacagtaaagattagctaaatgagagaaacaaaggctgtaatgagcttgctgtagcaagggagtcagacttgcatattggcagaggagaggaaagctttattgtggaaaaaagggaagcctttaggtgtgttctgattggaggttgtttacaagggaagctgtctgaggatttactagaagtcgggcaactgatgtgattggttatgggtacatgtttggcttagcctggttggtcctatgttggaagtgggacaaaaattagggaagctatcagttattaatcgagttctggccatttggggccaattgttagggaagttgttgttcggtttcctggattgtcactagagatagcaatctggctttctctgtaagtctaacttgtagcaggctggcttccttgattgtttattctaagtaagcgggttagtttcctggacaggtgtgggtgaaagttctatttttaaatatggtctggtaattgtctatttgtatatgtagtccctcacagcagaatctgttttgtccatatatatatatatatatactt

SEQ ID NO: 132379 - DNA, 1171 bp, Homo sapiens
aaccacaaactgacttattctctctctacatttgcctattctcttttctttctggttatttgttcaacaaatgtggagattgcctgctatgtgccagacactatgccaggtgctagaggtagggatatgggggagcagaacagacgatgttcctgcccccatggagcttacattctagttgtagcatcttagaatgatgaaataaggacatttaagcacagatccaaaggataaaaataaaccagtcttttcaagatatggggacagaaagaatagcaagtccagcggcctggaggctgacctgtactttgtggctgggaggaataggaaggtggtcagtggacttgtctggctatggtaaggcatttgggattttaagtgtagagggaagcactgacaggcttaaagtgggagaggaagatatggtggctgtttgtttctttcttttgctatttttgggacattattttgaaaagatcacactggctcctacatgaagaatgaattggtgttgtgggggcagagcacaaataaagcaccttgtctgggatagttatatttatctagtgaagagccaatggtgacccagaccagtgaagatgggagaagttgtctttggtctggatatgtttgaaaatatcatcttatcttattcttacgggtgccagataatattcttaaaaaaaaatggtagtgacttaagccttgtgggtgtaagtgacatgccccgagtcataggggtggtcagtgaggtgctgagaactcattgcacatttggatgcataggtccaaagtaagatctttgaaagagagatccactatatgatataattcatcgtccaacttgagatggtttgtgtgtcccttctataatgtaagtctattttaattaaaaaatttcccatggaagaatatatttcattgcacttgtttcaatttattattgttctaaatgttaaatttataatctgggtttctgtagacttgtcaatatcactgcataaatccctgagtcctgacagagtctgctgccaggccgaaccactcagttgcacttatgtaaagggttctccttgaaatccccagctatggaggtcagatagcatggaaaacagaagatagttgaggagagagcttccagaactattgggattggtgttcaactcctcct

SEQ ID NO: 132380 - DNA, 1316 bp, Homo sapiens
gggtgggtgagagagagaggaaacaagataaagagaaaacaaacagaaactaaagcttcgtaatgactttctcagatgagctatccttagtttaacttctttattgggttagctcatcaaaaaaaaatctcatttgggctgggtgtggggctcacgcctgcaatcccagcactctgggaggccgaggtgggtggatcacttgaggtcaggagttcgagaccagcctggccaacatggtgaaaccccatctctaccaaaaatacaaattttagccgggcttggaggtgggcgcctgtagtcccagctaatcgggaggctgagccaggataatcacttgaacccgggaggtggagggcagaggttggggataaccatctcttctcttctctgggctctgaatgcagccctttgtcctgttctctcccacttttgtttccggaaaacatgtactgtgttccactgaaattagtggagtgtcttgtgaggtagggtggcacgttcagtaactttagaagaggaaacagcagctaccctcacaagggagctgcatgcacacagagcacacctgcgtcgctgtctgcattatgtaactgaataaagttaatgagaactatgattacaaaacacacctgagtccagaccgtgcctcatttttaaaattgagactcattgacaaagttggagacattaatttactcaatcctgtgataatttcctattactcattattaggaatacaacgaactgtttcaaatcatttttgccatctttgacgtcaagtcacataagctcagttttacttactttccctcttgttctggaagttgcagtagtagcatatgtataaaactgtaccgaatcaaatcatattataaaaatcaagactgcattaatgaagctggtttgctttgggggctagtcctggggaaccgagccacccatgatgttctttgttaatgcactatttttttttttttttgagacagggtcttgccctgttaggctgggtggtgtgatcgtggctcactgcagccttgacctcccaggctcaagcaagtagcctcccaagtagctgggactcagcctcccaagtagctgggactacccacgcctgggtaattttttttattttttgttttttgtagagatggggtctgctgtgttacccagagtggtcttgaactcctgagctcaagtgcttctcccaccttggcctcccaaagtgctgggattacaggcatgagccactgtgcctggcccgttaatccactattgacaagatttaatgaattggtcttaatttatgatttgaagaa

SEQ ID NO: 132381 - DNA, 1020 bp, Homo sapiens
aggttggtgttgaactcctgacgtggtgatccgcctgcctcggcctcccaaagtgctggaattacaggtgtgtgccactgcgccctgccaatttcatctattgagaggcaggttaacataatcgctcagtgtgaattcaaactgttttaattagaatttcagctcaagtagtctttagccattttaacttcaaattattttacttctgtgtgtctttcaattttatctttaaaatcaagatgttaatagtacctactcaaaatgagtttaatacaagtacagtgtttgggatagtgagtactcaataaattttgctattgaataacatcatattgctttattgcaaatattcatcttttttttttttttttacacatttgtcatagagatactgagaaattcttcagttgtagtttatcagaatacttaaaagctaaattacttggagtattttcaagatgatattttatttcattattttatttttaggtgattcctcctaaggagtggaagccaagacagtgctatgatgacattgataatttgctcattccagcaccaattcagcagatggtcacagggcagtcaggactgttcactcagtacaacatccagaaaaaagcgatgactgtgaaggagttcaggcagctggccaacagtggcaagtgagtagaatcagtttgctatttctgtttccttcaaagatttatgtaaatatgttaagaaacaaagtagacagaggagcttataaatgaaaagcaggagtctcccatgcaatttttcacccttcattgaactgtttctgttttctgttctttaggtggttgctgaacatttgacttaaagaaattgctctttattttattatctcgttcctagcagttataagtggaacttcttatcctatagttgccatgagttttcgtttctacacatgattcatgtttgttgggcagtttttttggtgtgtgtttgataatgtttaagccttaaatgatttatatgtattagaagattagt

SEQ ID NO: 132382 - DNA, 1056 bp, Homo sapiens
agggacacaaacactgcggaaggcctcagggtcctctgcctaggaaaaccagagacctttgttcacttgtttatctgctgaccttccctccactattgtcccatgaccctgccaaatccccctctgtgagaaacacccaagaattatcaataaaaaaaaaaaaaaaaaaaagaagtggcacactgttacatctgccatattctgtttgttacaagccagttgttaagtgtagctagcctacactcaaggggaggagaatgaagctctacttcttgaagggaggagtgtcaatgaatttgtgggcatatttaaatgttgtcacaattattattattaaacttcttttaaaaaattctgatatgataattaaggccccagatgaaagcataaatcttacaaaaacaaaataaaaaaacctgaaagaccaacaaaaaatcatagtttccaaattccctggatgggtgtgaatgagattaagactttgaatgaatttaggtatcttcctttaaaaaaattatatttgacattgtaagcacatgatgctacttgaagactcttatttctgcatgttaaattcctactgtggaacattctggctattccaaagaaattgaaaattttatatttgatataatttgaatcatttcttttgaattttttgggttggtattaatagagttttattctttcagatcttattaatcgagaacatgaaactttcaacaaagattggaagcattttctttcagactcttccagaattcttttataagtgcaatgctgttgaaacaagattgcagaggcaattaaacctgtttacaagtataaactattgactgttttctgttactgtgttttagtacccatttccagtgtctctcttaaagtgttaattgaataggttaggtcattgagtagtaactctgcttggctcctttgatatttcaagggatacttactaaaaactattgttaatactcttgataattgtcataactgccataggaaaggtacaaagtgctatgaggtttcaaaggaatacaaggcttctgtggt

SEQ ID NO: 132383 - DNA, 1604 bp, Homo sapiens
aactttgcttcattatattctcatttgtttctttctttgcttattttcttcctgaagaaacattggtattccttttatgtggtgagattattgttcaaattcctaataatacagagaagtaagtgcttttctgtaatttctatgtgagagataaccattaataatttggtgtacatttctttctaatgacttaatatacaattacaggttttttaaactgtaaataggatatagtatacacactattatgtaacctgatttattcactgtggatagaatttgatgtcagtatcttgaaagagctatcttgttttatattctgtattttttttagctaattactagttgatggatataaacttgtattttcaattaatgctgcagcaaacatcctgggtcaactgttattgtacacatctctctgttgttagggtgaatttctacttttagattttgggtcagatatgtcaatttttaaaaagctttttatatgtttagaaaaattatatgctggaatggttttgccagcttatattcccactctagttgtctaagaggtgtcattattttcttgccattaatatattcagcatttaccaatataataactgcaaaatatcttattttaactttactttcttggatttttagtgagattattgtttgtcagtgtttctctaagtgttatgtcatttttatataaatatgtaaaatttcttagcatagtatagttgattaaagattttaaaaatactttaaagctgaaataatgacttttaaactgcttttctgcttctattgttgttttcgtgaaagtagttttctaataaaatgtaaagtaatattgagtattcagcaatcttaagactattcagatagctatgtaaatcagtttgtatgtttacttgttagaattgacaacatgcagtattttcgttttggtaggattttgttttagaaagtgatttaaatcaatttggtgggaaaaaccctaaaactgacttactggtttgtacatttttgtcatctaccttttacagatattgtactccaagatacttggattacgaagatttggagcgcaagtactggaagaacttaacttttgtggcacctatctatggtgcagatattaatgggagcatatatgatgaggtacattcatatttacagtgagttttgtaaagatcattggatgtgacagttttgttaccatttaagcagtttagaagtgttcttttgttgtgcttttgggtgatccataattcctcaaaggacaacaggaaatattcatcagtaggatttctgctgctggtatttttcaaactgaagctagataatcgtacaaatacctgaaattgttcagtagtaacatggtatgtggttatctggctgatcttttcattacattaaaactttttaaagcaaaaatacattataaaaatgtttggaaaacaggaaatatgatgcatcatactgacaccttaaagcagaagcagtattttagatatatttttccagtactttccctcaatcattaaaaaaatgttatatttgaacaggcttatattgtcctttttttcacagacaaattgtaatatata

SEQ ID NO: 132384 - DNA, 1631 bp, Homo sapiens
agttcgagaccagcctaggcaacatggcgaaactcctgtctctactcaaaatacgaaacattaggtgggtgcggtggcctacgcctgtaggtccagctgtgtggaaggctgaggcataagaattgctcgaacctgggaggtagaggttgcggtgagctgagattgcaccactgcactccagcctgggcgacagagtgagactgtctcaggggaaaaaaaaaaaatgattgttaagttctaatcaaaccagaatcttttcctatcaccttaactcttatagtagtgactctaaccttccctcgctctgccatcaccatccatattgttatactgttataaaactacattattccagcagttttaccaaagttgggataagtatttttaataggcattatgtgtttaaatttttccattaacataagaggtaaatatttatttgaagcatcagtagaagcacagtgatcagtggatactgccaagagtttttccaataattagagtggaactttaaggaaacaatgtattacatgctaagattgaatggatagggatgggagagagatagcagaagatatattttgctgttggtttcttgatgtgatatgtgatggtgaatattacctctaaactaatgtgcaaaaaaatcccaagaaaacccaaatctcaaaaccccaaaaacaaaaaggtgtgccaaggagggagagcacatgccggatcatctactttgaatcagtaattttttgctgacagccaagttgggagtgggtctgtaactttcatttccatttggcatcaggaagctatttggtataaatttctaccagatagttgtatggaaccacattatgctggtagtaatctttgaccaataataatggacatatgtatgtggctcttgaataagagttgttttatttttcagttttcagttagttagaatatacaatgtaataattttggtggatagtggtttgattagtaaatgctatctttcatggtttagtaagatttgatttctctctctttttttctctctcattccagggtgtggatgaatggaacatagctcgcctcaatacagtcttggatgtggttgaagaagagtgtggcatttctattgagggtgtaaataccccatatctctattttggcatgtggaagaccacgtttgcatggcacaccgaagacatggacctctatagcattaattatctccactttggagagcccaagtcttggcaagttacttgtttaatattcatttactttggagttttgaaatttgggcatcaggcacatattgaagaggattttgttctttgatttggtggattcagatttatgtgagctgtaaggaagtttttgactgtaatagttaattgtcttctattctgtctgggattgtgcttggaaaccataaaccccatggtaactcgtacagtcatgcactgtataacaatgtttagatcaatgatggaccacagatacaacggtcatcctgagtttataatgcaattgaaaaattctttttccatgtttagatatgtttagctaaatgaatactttgtagctaaatactttgtgttaaaattgcctacaatatttagttcagtacaggtttgtagcct

SEQ ID NO: 132385 - DNA, 1435 bp, Homo sapiens
ggttaactggatcaccgatttgagccacccctcagtatccatgaactgttggttccaggttccattcacaataccaaaacctgtggctgctcacgtccctgatataaagtgcgtggtagttacccatgcacatcctcccctatactttacatcatttctagattacttgtaagccctaatacaatgttaatgctatgtaaatagttgttatcccgaattgtttagggaatactgaccagagaaacagtttgtacatgttcagtacagacacgaccgtttcccctccacgtatttttgatctgtgattggttgactccatggatgtgggactctcggtgtggagggctgactgtactagaaaagtcgctttactactgcatgtattatatgttgagtattttggagaggtcaggaaagctttttaaaagttgttcagagttgatatcaactaatttagaataccttttttctcacgaaaaatagtgtgtaaaacactaaattattttctacttagaaaatattcagtagactaggtaatataaaatatattatttcttgaaagtcaagttttgtgccattgtcttactagattttataacaatgatgttaggtaatggtaacttactaatttttctgatcgctcggggaattaatttacatgtatatggttatcgaattgtatttgaaattccagattaaaaagaactgcccaactttccaaagcttagttattcccttcttgtaaggattttttctcactgtggcttccacagttatgactgcctgcacatatggttgctagggtttctggttttcatctgaatgttatgtcaggaaatgggccatgaatggcattaagggtgcggctgagctctagctgagttccttttctcaggggcttttaatctcaggttctgtagggcctcatttcaggcacctcattctccaggccgtactcttagatgcctagcttacaaggcaagaggactggcatttaagtgacacctctttacaaacatgtttattgttactgttttagcttagattacttggggagttcactctgagattgtgtgccagggctttcttgtatagtgctccaggaataatactgctcacagtgggggaggcagaactgggcagaaggggaaggtgaactccagcagagtcctggcagatcctaagggcagtgctggagctgacattgcccttcagaattgccccaaattcaggcaagatggccaagcctttatactcaagcctggaccatcccttgcatgtgggccgccattccctccctcttcaaggggtatgttcttgggggagggaacctgaactcatgaaggcagcaagggccttgccaggagtgggacttggcagcctgcctgcagcatcccctatagccatgctttctgttcctcacgttcatctgttt

SEQ ID NO: 132386 - DNA, 1116 bp, Homo sapiens
caagaactcccttgcatcccccctgaaaaaaacaaccacttcaggtagtggtttgctggtcttgttctttgtatctgcggtttatttaaaatgccattgtcttttgcttgttcattgtaaggggggtttttcccttggaggacagatgggccctgtcacttctttccttttgacatcttcatagtgattgttggggaaacagtgttggaaaatgggtttggagagtagatcttgtactttggagttaagataggtctggggttaggtgccagctctgtcatcactttgcttgagtgaagagatgcctgtaaggaagctttggcttcctcattagttaaatggaggtagtagtagaacttgtattataacatcttagcataagctctggtgtgttatcagtgctcaataaatgatggctgtgatgagctgtaatcatattattggtcagttcttctttttcactgtgtttttgaacactttagtgaaggtagagggcaagtcaggcatacaagcttatgcgaggaatggggccgggggatcattttggggttgttatctgttaaaaaattgtccttgaggtactgggctttcttcttcacaggggatgattgtgagcaaaacagcaacaacaagcagaaacataaataagggaggaaatgactacttcacacggccttagttaggcgcagggagtatagggcaggcttgttttaggactgacctgcctgagcatgacgtgggcctggaaggaattctcccctctgtggtcctggatgtcacaaggtgagtggaagctgggacatctgtaggtgctgcagcccctgttggtgacagtgacagagggacctatggcagctgcctgtgacagccctgtgacagacgtctgggcagtgggacaacagaaaccatttgttcctaaacacacagccccagggctcccaaaaaacaatagggaattttgagggagtgatctgagaagtaggagttagtctttgagaagtactggtaaacaagtaagtggactgagcatattttgaaagaagtacgaagagggcagttcctagagaaaacttgaactagagaaagtagattttcataagtatagatttacttact

SEQ ID NO: 132387 - DNA, 1034 bp, Homo sapiens
ttccatctaaaagaagaaaagtagaactaattaaatcatttggctaagataggaatagctgcacctgggaaatacttgtagaaaataataggccagtaagcctacctaggaggagaggaatgaggagattgaattggtatgattcagatcctaggagtaaactgaggatcagagtaggagtagagccatcttgccttactttttcctcctttctgcagataaggatagctaaattttctgtgagcatatggttgaactttagattgaggagctttaactttaccaatttttcagaaaaatgaatctgcatatataaatatctccatatcctacctttttgttggcaggcatattcatattacatgtatgtgtgtgtgtgtatgtatgtgtgtgatgaggaaggctgaccctcttgtttggaagggacatacccccacacccacacccacacccacacccacacccacaccccttttctgggtatatttgtgatgtaagccaggaattaagaactggtaagaagtggccataaatatacattgggtgatagtcatttagttatgctaaaattttgtcttcccatttcggttggaacaatttcattagcagtgccttaagcaacaggatatatgattgaattttcttttagtgaattgcatagttatattggatccaattaagttttgcatatgttatcagtagcattaaatgaaaccaagtgtggtgttaagtaaaattagttaagttactttagtaagaagtaacttgtactaagtatatattgagctagtaagtacagcaaatagaggtcttcaaaagtatagtttatatgtaaaacatggaatgattattcaaatttattgttaatatcctcattaaatttcctcattaaaatgcctttacaatttagtatttgtataggatattatgagattgttgttttaaaatttcttagcaagtccatagtaaaaataactatggaactagaaatgagtatttctgttctttaagggtgaaaattttttgctgtaatc

SEQ ID NO: 132388 - DNA, 1057 bp, Homo sapiens
gtttcccccaagggttatgtcactgccgacgcccagttcttctgtggcccactgggactggaggtgtgcccttagggaagtgtgaaggtgaatggctctgagtaacaatacacatgagattttgggccttcttggactggcaaaattaaacttactttactgcaggttgcatttttatttttcatggcctgctgcttcttctttagggccagaataaagaacttttctggacctctattgatgatcctgtgcctgcttttgtgtgtgtagacaatgccaatgcaagcagccaccttcctccttcctccttttttttaaagataagccaggcggccttgccctcatctacttacgtatgggaagcagagtcacattcaccccctgccatccttatcttctgttttgctagccacccttccagaaagaagatgtaggctggtagtgacttatttccagggaaaagtggagttccatttgagtgacaactgaggagcaaggccttctgcctttatccaggattgagtcctcagtgagcagtgctcttttagtccagtgcagatctaagtttcattggtgtgttaggtttgccttctattaggaaaagaattttgttcctgccttatatgtgctttcaattaataatgaaatggggacactgagaaacctcattgcttgacttgacagtttttaacagaaactgttaatggcacctaaaggttacttttccctaaattacagaagagtattagaaggaacagttatagtattacattttaagaagcattattataattttgtcaggctaataactataaagtgtctttttaaaaatgtaatacataatagtaataatagcgattgatgtaattgtaatcttgaactttgttagggactgttttcatgaataagttttggataatagattagagtagagcttataagatgattactgtaacacttaactacgtaggaagtgaactttgtgttaagactatattctcaactgtcttcttctctgtaataaaatttttccaccattttctattaatcttgctac

SEQ ID NO: 132389 - DNA, 1052 bp, Homo sapiens
tttctgatataaacttctaatgctttgacgtaaactgtctgaaaatgacattccagaaaatggttaccgtttgtttaatcagtaagaggttaatgaacttgaaggatgaacaagaacttgaaatcagttgcctgtttattcaaaactcttttgcagcaatattttgaggaataaagcagggaaaagaccctgcaagatagtgaaggatttgtatctgatgaccagatgccagccaaaataattgaattctgctaaataattaaaatgataaaataatgcagtgcgaatgatggagcattttagaatgtctagctgatagcaacacttgattcataaaatgaaaagtaggctcagatattttccattatcttgtctgcgcatcataattatcacacttgccttttatgcatgaatgctttcatctttggtttctattgaaatcttgattgactgtggcacctacaaatattttatccaaaagacattaggcctgcatctaataaagccaggagtttgatttcgcccttcagctgctttcttatttatacaggttttccccatattatatagacataaatgtaataaaaatctcaagtgaattgttacaatttttatacttgttatattcgtctgtaatgccattgcattctttctaatttttggtttgatacaattggattgcaaatatggaggagaagagagttataatgttaaatcatgaatgacagtttggaagattttcagtttttaaaatgtctaaatctcacctattttagaaaaaagataatattgctgttatattaagttaggtaaattgagaaagtgtacagatttttgtgaaaagtagtatttcatatttcatttgtcctttattgggaataaaatgctattattttaaaaaactgaaaaggatttactttgaaaattttggttactcgtccaaaatatgtgatttaggactttgtgcagccagttttgaaagtgtgaacaattaggaggaaacttatttcaaaggacagtgtagtggaagtgagtcaattcttttagatcct

SEQ ID NO: 132390 - DNA, 1017 bp, Homo sapiens
acttccctaaatattttctccatttatcagataatagattgaatccacatttgtttcaaattgaaatttattcctaaagttgagtaattttacaggttacaaaaacaacttatggtaaatctgtttgtaaagaagatcaacctttggtgatgtatcctttaatttttaagaattctaactctgactctgagttttagtacaagggctttttggcagaagaggtccatacttgcataagtcaaacagtaagaacactagaacttacacattaaaaaacctatttgatattttctcttaatcgacacagtgccacttacatttattgtttctttttaggttttttcccaagcagctcccaagggtgtgatgcatttcttcgccacaagatgacattgatttctccatcagtattgaagaaatatggtattccctttgacaaggtatgttagtattcatcttacacaaattaattttgtttgtgtaggatttgtatttaagaagtaatgtatctttaacttccagtagaatttttaggatgtgggtagagaaattcaaatttatgttttatagcatatcaattatttatctaaatcctaattagaaattaattttatttcaaatatatttactagagatttcatgttgctatagttcacttataattgtactgaaaataaaatgtagcacattctataaaataagaggaagcacttctatattaaaatcttttttatgagtaacataatttatgtatatgtgatctattttctaaaaatttcagagcaattattagcaatgggttgcttagaatcaatgattatggtagcactatgttgcttgtaaacacatttagacataatacaatcgagatttcattatggataaaattgcctgatgatttaataatctgatattgcttctgcgagttttctgaagattaggttctataaaactcagtagatgctggatcccacattctttgtgtctgtgggtggttattgggtcagaattattgca

SEQ ID NO: 132391 - DNA, 1007 bp, Homo sapiens
ctgccgtgacactcacaggtctgcttcctggccaggttggatcaaagcgccggccggcaggttgtatttcatttttccgtttgctgggatgaagtgcagttgtttgatgttaggtttgatggatttgtttgccactgcattcattagcttcacatcaaaaaactgacaggctgttaaatgaaactttggcttagattttcagcttgactgtttggagacatttgtgaagatattttgtgtttgtgtttcagcagcctcaagcactatgattgtctcgaagggaagaaaagttatttactgtactgattttcttgagtaaaaaagaatcattgtcttggggacagtcatatctcgtttataccgtctgaagcagtgtatttattacagtgtgtgcagtgaaagagacttactgtgtcagaataaatattatcttattggaaggaaaggtaatagttggtgacacaaaaatgatatcttttattttaattttaagtgatcatattaacatgatatgtcagaaagttgaaaaactgtactgcagagctgggaatgttctcttataaactccaggagtactaccttactatctaattttaagacattttgatacttgaatcctcaaatgtttgaacaagtttaaaaagagatgatagaattttaaaactgatttccctttaatctggcaggggtttcaactattaaattgtctagcatgtaagtgccatgatgtgggttcattctattttatatttcaattctctaaaattaagttagatatttcttaaatctggtagcatccttccagaaaatctttaatcttgggcagtctttattaaaacaatcagggatcatttttgtggtgagtctctaggttatattttaatatgcttttgatcacaaaatactagtatagtgatatttctctgttcctgtgacatgtgaaggaaagaaaatgtagactgctttgagtattgttcattttaacagttcttggcatttcaatttta

SEQ ID NO: 132392 - DNA, 2012 bp, Homo sapiens
ctatcagttaaatcttggagattatttatgcaccaccatttgaatgataacttccctgttgcgtagtgctggcctagacctgataaaactttgtgtgaagtctttatagaaaacttgcttaataagatgtgactgataactatgtattcatgagaattaaaggcatagtagattcaaaataattttttctttgaacttctcacctttaccccatgtcttcattttagtggatatgtttgttgttgttgttgatggtattggatgttgtatgtgatgtgatgtagaaaaggctgttcatttgctcctaattttgggttaccttatgagagttcgttaataaccataaatataataaaatatatcttagagtaaatttatctcaactcactggttaaagtattctaatcacacattcattgggttattttatttgttgacaacccaggttttcagctttacagaccttttagcgctcagttcattgacacatcattgtgatgggcaaataatctttccattgcaggcgtgcttccaaatgagcactctttccttttagtttttcttagtacatagttccctgtgaggtccacaaaccattataaccacattataaatgtgaatatatagattctcatctctattcagaagaaattgggtttatcacccattgaatgtttgataatgtaatgcattatcctccattatgtagtgactaagtattcatggatgatgtgttcaaggaccaactctgtgttactgtatagttagcgaaacgtttaacactctccaacccggttgtgtttcagtgcacttgcaggaaagacatggtgaagatttcaatggatatctttgtgaggaaatttcagccagacagatatcagctttggaaacaaggaaaggatatatacaccattgatcacacgaagcctactccagcatccacccctgaagtaaaagcatggctgcagaggaggaggaaagtaagaaaagcatcccgaaggtaatgacccctcaccccactgacctgccttgcctgtcgtgttttctcagttaaaatgggtcattggatgtggcaatttacttgctttttctatttattcatcataacttaatacctttctgaaaatgtgagacattatttttaattcttaggtgtgtaataaatacaatataggaagagatgtatatttattttgtttgagaatattcctgaagttgctcgacatggcaaatagaacaatatagaacttgttagaccacttacatgaatgtgttttatggttgtattattcctttctgtgcatttccatattttaatcaataacttgattttccactttttcattttgccaccattttgctttttggctttagtggttatcttcttcatttgtccaacatctgagctactgctctcttctggatgcttatattttactacattttatgcacatggttttattcttttgtaagatgtaaaacacagcatatagcatttctgtaacatgcttatccttgtgaactttattctccattccatctttgtggccaggatcatttcaaaagcttttagatgtgctgtgggcatcttgttgttttaaaacctattgaatagggtgtgtgtggtgttgctcaggtccttaggctaccttttaagggtcttatgttttccaattttatgttaaattttcctcttcaatattactcattgtttttctttcagattataaaagtaatatttgtgcattggaggaaatttgtaaaataaggaaaagaataatgaaggaatcccatatcactcataacctcactatccagagataaccagtattaacattttgtatatatcctttacctatatatttattatatattttataatattatatatctttccaaaattggggccatgctctgttaataatctgacaatcagttttgagtgtttttttcatgtaactgattgatttgctgcaacatgatttttaatgcctgcatgtatttaatcccct

SEQ ID NO: 132393 - DNA, 1050 bp, Homo sapiens
agttctgtcactacatggttctttgcacattgatctccagattttgagccctggcataatacttgagtagaagaactgggttgttcagtatcagagctagtatgtgatgggtacaaatgaggtttgttttgtgtgtgtgcatgtatgtgcatgcgcatgcgtgtgtatgtgtgtgtaagatacagaatcatttgggaatagtttaccaattctacttagtagtaatacagtgcatgatttattaacagtcttctgttttatcctcaggaaacagctgcttaagtacatctgtaacagaagacataaaaactgaggatgacaaagcttatgcatatagaagtgtaccttctatatccagtgaggctgatgattccattccattgtctagtggctatgagaagcccgagaaatcagacccatccgagctttcatggccaaagtcacctgagtcatgctcatcagtggcagagagtaatggtgtgttaacagagggagaagagagtgatgtggagagccatgggaatggccttgaacctggggaaatcccagcggtccccagtggagagagaaatagcttcaaagtccccagtgtatgtggcaatatccattttttaccatattcattatatggtgagagcacattttgaaaacaacatgctgtgcactgaaatcctcctttagggcacagataaataacattttacatttatgggtcttaatcatattcattcaataactgggaggtaagcctcctgtgagctgtggctcacatagtgataatttagcacatggagcttatggccacgtgtcgatgcttgattttcttttttttgttaaaaaattaaactctttactttgaggtaattgtagactcgtatgcagttgtgggaaatagtgcacagtgattctttgtaccctttactcagtttctcccaatgctaccatcttagaaaactatagtacaaagtcacaatcatatcgacattgatacagtaaagattacagaattgttctgtcacctgcagaagaattcatctgctgggcactgat

SEQ ID NO: 132394 - DNA, 1036 bp, Homo sapiens
aatacaaaaaaaattcgctaggcatggtggtgggtggctgtaatcctaactactcagaaggctgaggcggtacaatggcttgaaccctggaggcggtggttgcagtgagctgagattgcaccattgtactccagcctgggcacgaagagcaaaactccatcttaaaaaagaaaaaaagaaagaaaaagaaatatacattttaaagacttgactctctaggggtattttatgagaagatctgactagggattttcttttatatccatgtaatgccagtatattgcttggtactttatagctgctctgtaaatgttaattgtaataaattcttgaacccagaatttaattcaatgaagttcagttaaacttttattgagccatgtactatgttagatgaagaaagtaaaaatattggcaaagtagtttctggactgtgaattcctctcataactagaagataatctcatacacataaacctgttttagtattggagcttttaccgtagcagtagagacacggaagaagtaatgtgggaaggagggaacagtgtaattatttctggtagggatagggagggttacaaaatgagggtggttgtctggccgtgggatctgatctagtctttgaggcttgaggaggattataaggcaacttcccttatcctggctctctcaggatgtatttgaaagacaaagtaggtttggtttccggccttaatatcacagattctgtggaatgtttatttcttttgtactcagggtgattgttttccctggttcccatgctcatggtattttcctgccttctcccttaagaattgcctgaggttctgtccattgaggaggaagtggaagaaacagagtcttgggcgaaacctctcatccacctttggcagacgaagtcccctaacttcgcagctgagcaagagtataatgcaacagtggccaggatgaagccacactgtgccatctgcactctgctcatgccgtaccacaaggtaaaggagcctgctatcatagttcccttcactgctct

SEQ ID NO: 132395 - DNA, 1632 bp, Homo sapiens
aacattgtgttttgggttatatttttatttatagaaacaaatattttattcaagattatgtctgtcttagagttccttataaaaataaactgttctgttcagacatttcagagcaagaaaatgtgtgatatctcacattttcagacctttgtaacagaggaaataatttattcccttcatgttttttaatgtggcactggtgagtgacaaacattatttttctcttcctttagtcattaaatttctgggttttaactacttattgattcttatttctatattataatctgtatatttctcaataattaaaaaattcaaactaaaataataagatttgtggagatttaatataaagtaatacagtataaaacataaagtaatataaaatctgtaaggtaattcattacttatactttcaagtaagtactaaactttttaaaatcttttggtgtgaggtgataattttgtttgatacattatcctttcttatttagtgacatgtgccagttctctctcacttgctttcaaatactgcaagtgatgaggcaaaaattcttaaagcctctcttaatactgctgcacagattaaaactggggtctttgtacactccttcaagtgtagcaaggtatgattcttcagtaaatgaaaacagatctgttaactctagtgcatatgaagaagcaaaagaattgatgctttccacgaactaattttggaaagacacagttttagtagccagttgctttcttatatgaacagacatatagaatattgtccttttcctgcagattaacatttgggtgggagtctgaggtggaatattgatttaaaaaaaactagtagtttggtcaaggagaacaacaggaagaacaaaagttagaagttagtgtctggaacaggagttagtggatttgagtgactagaatgatgagctcttttccatgtttttcactcatgtggaaacgttatgtttttcagccagatagcagcaatgaagaaaatgatgctagatgggagacaaaattagatgaagtcgttacatcggagggaaagactaagcccctcataccagagatgtgttttatttatagtgaagaaaatatagaatattctccacccaatgccttccttgaagaggatggaacaagtctccttatttcctgtgcaaagtgctgcgtacgggttcatgcaagtaaatggatctataattcatcaatcactggcttttcagcatttcacatcatctttatttctcacttttttggaacctgtcagatctgttgcatggactattggcattcttaatggttatatcattctttttcatatttctgctggtaaaagtatgagttggtatattcatccttttttcaccactttcatgtagtatccgtggagagcaggtctggttttttttgttggtttgtttgtttggggtccagttgaggagtcatgatggggttcctttcacatgtttggattttacttactttaagatctagtttataaaaacttaatttgaaagtctgatactgattgatgactgcttttctttgtgacttttaaaagagaaatgaatgttcctttggttgttctgagaattgttgtactgagttaactttttttcattc

SEQ ID NO: 132396 - DNA, 1160 bp, Homo sapiens
ttagatagttattttgggtcaggcgtgaactgaatagacaaatcgaattgaaaatactccttcattgctaactctgaatttgcagcatttgccctatcattgaggttaaaggtagttagacttaatttttgaagcaattttaaattatattaatttaaaaatattaggttaaaatgtatttattatattatttttgacatttccttaaactttgccccatggattgcaacttattttaagatgtctgtgtgtgaacaaattagtagacttgacagtttaaaattttattacccattcaagatgttccataagtattcactgtaactgttgtgttagttatcagtaagactcacattcaccttgcttatgttttgttctatacagtgagaatcaagacagtatggtaggctagtgtcccatttttatttatttcagtactgagatctgcaatattttaaaggtgaaaaagacctaacgcatggatacatactattattttataggttgttatggtattccttctcatgagatctgtgatggatggctgtgtgcccggtgcaaaagaaatgcgtggacagcagtaagtagcttattttagtattgcttaacctttcttcccaccctacccactgtggacacatttaagtctagggaaaagataagattgctcaggtgcttatatgtgcagttctgcacttccttgtgtttctagtcttccctctcaaaagcatcttacctgctggttctatatccattatagaaatattaggtaaatttattttctttttttttttttgagacggagtctctctctgtcgcccaggctagagtgcagtggcaagatcttggctcactgcaagctccaccttccaggttcacaccattctcctgcctcagcctcccaagtagctgggactacaggcacccgccaccacgcctggctaattttttgtatttttagtagagacggggtttcaacgtgttaaccaggatggtctcgatctcctgaccttgtgatctgctcgcctcggcctcccaaagtgctgggattacaggcgggagccactgttcctggctttttttttttttttttttgagatggagtctcactccattgcccaggctggaatgcagtggcgtgagctcagctcattgcaacc

SEQ ID NO: 132397 - DNA, 1102 bp, Homo sapiens
tttcttgtccatccctattttgcaatacttgaaaataagtatttcaagtaacagtcaaggtgggggatcctcagtgacccctgaagaaactgtgttcatatccagtgtttatttttctctttttgagacagggtctcactctgtcatccagactggagtgcagtggtgcaatcatggctcaccacagtctcgaactcctgggctcaagtgatcttcccacttcaccctcctgggtagctgggactacaggcatgcgccaccatgcctgggtaatttttaaattcttttgtagagacaaggtctcactatgttgcccaggctgttctcaaactcctgagctcaagtgatcctctcaccttggcctcctgaagtgctggggttataggtatcagcccctgtgcctgacatcatatctaacttttcaactagcatgaggtctttccccacttactcatccttacatttatactttaatacattttagagtttctggtctgtactaggcattgctgtgaattttaggcagaatatttaataacaaatgatcccctatttagagaccaagaattgacttgacctaaattgtttttctaaagaccttgttaaaaatttaccttactactttcctgcagatttttttgggggcagaagaaaataataataataataatgttataaaagtttagcttacttcaaatctttgttttccattctaacaatctatgtcaactttgttgccatttgattaagttttaccttaatttttcttaaaaattgtctttcaagaggaatcagaacattcttgaaagtgacgaacaatcagacctcagcagtgtatgcctcactcatgatctcagagcaggtgctcagctcgatgatttcagctgtaatagcagcatttactttattcctcaatgatctctaatgacagagaattacacttccttgcaactgaagttaaaaacctgaatgacaatataaagaatacgccttatatgatgaaaatttttgtcatgactgtgtatatttagttctcagtaagtctgagagtggtgtctttctggatgattttattgctggcattcactttggggagtgaaag

SEQ ID NO: 132398 - DNA, 1017 bp, Homo sapiens
cattctctgctctagaattcttgcatatactaggtgtgtggactaggttctctggactgctaggttctctgtgtcacagctttcctttgatgacagtgtcaatttaaaattataccaggttcatttcatgatggttccctctgggagaattttataccctgaaatttgaggggtgtacctctaccatttccccctccgctgtctttctttttgaacttctcagagatagaccttcatgtaattcctgatggttttaattttagaatgaaaaatcaggatctctgagaatatttagatgaatggtaatgacttttgttatgtgggtctggtcatcatgtggtattttcttttccccccaggaatgctgtctctgcaatttgagaggaggtgctcttaagcaaacgaagaacaataagtaagtaatacattaattgtgttgaatttcattatttttctttctccattctagaacctttggatgacagttcgctttacctctcattgtacacgtggtttcaaagcttttgctgctcagatctgaggttggaattctgtgcttcagagacttctactgtttgcactctcatctcggcagggcaagagcagtccaagttatgcttctcttctttgtatttgacaccatgaaaaataacccctcttttactcacagagttttgaaaatggagttagcccatatcatccaggtgccattagaatcctggtgtttaatatgatgaatgctattggtctgttaaaacagggcatacctgagaaagtgaaaccgtgatcttcagataaatcagtcatagcaatgataataaaacaaaaccatttactttttacattagcaaatttatgagaatgtaagtgtactaaattagaaaagatagggagaaaacattgatgttaagatttaaagggatcaggtggagaatatgaagagagtcttgaaagagagtcataagtgaacataaaaggaaggcagtctagtttttatgactgttctgcatggatttt

SEQ ID NO: 132399 - DNA, 1070 bp, Homo sapiens
ggaaaacttttgctacttaaacaagtttgcttcatgacatttgtattattttaaaaggttgtgtgctatacccagttcataccttttattaattgaactaatcttttgccacatattgattagcttaagtactttaagcacatacatgcatattccagcatcaaatgaaataagaaacccacatttcagtattttgcagatcaagtgtagaaaaatatgtgcacgttaataggatagagtcgtgggcctttatcagctcttcatggcacaatgttgttgggcagctgtggtactgagtctgtccaggtatcattcaggaggtttacagttcagaatctgtttgtgatggatttaggcttttggctttcttgctcatctgtgtatttcccatctgtgagaactggcatcaccaagttgaagtatgtaagtttagggaacttttgtttatgtttaatgtctcctttcctgtaggtgggcccatgtcatgtgcgccgttgcggtcccagaagttcgattcactaatgtcccagaaaggacacaaatagatgtaggcagaatacctttacagaggttaaaattggtgagtggcaaagcttcttttttacctcataaattagtgttaatttcaagttctgaatttttccattaatgcacacattcccaaggtatattttctcctagctttcttttatttttctacccttattttcctttagcctaaatttatttattcttacaaattcttttcctgttatattgtaagtttgcatataaccttcctcaatttctgtctgaaatgaggaaaaagatagtaatacatttcctgaattaatgtgaactttcaaactataggttatctggtaagatttgtcagtactggagctgagccatctaactctatttaaattgtttagatttttctctcttgactctctttggttggtcttaacctagcaaaatgtatctaacctaatttcattatctcttcaccaagaagagacacacagagaaataaagaagcttttatttttacgaagatattttctcactcttgaataggtacaagtcac

SEQ ID NO: 132400 - DNA, 1060 bp, Homo sapiens
agaatccacgggtctacagcgaagatatagacagaaagagaacattttcaatatttgtcatttttagagaatatcttggttggaagaactgaattcaagactgacagaacagaaattgttaaatgtttttaaaaacaaacctggatttttttcttttttcaaatccaaatttcttttttgttagcaaagcaataaagtctggtaacatgtgcatatcagctactatatacttattaattatataatctcatttaacaatttaacattacctgttcttatggaaattgaacaaccaaattgaatactaatcaagtttcacctaagattaaaattctgtgatgtatgtgtatatgcacatagtagtcactgagtaaatatttatgaaatgaataaaaggcagcaaatcattattcattatttgcacgtcaggcttataatgactgtggctggaggagtgcgatcagacaataacaaatggcctttgcctttccacggtttctcctttaaatgtaacagatctaattcacacacatgtctgcatattgctctaaagcaaggcattactttacttatctgcatcacaggagacatatgattaaattgtagagcccagcagtactccagagagcctatgaaacatgcatgcagtactcatcttgttggttgaaaattctgatcttggaacttctggtcagctggggattgaaaatgagtggacaagtggttcatccctgaagcagcagcaagggctgcatctcttcagtacccacgaggtggtgctgctgcaccagtttcttatgttgctcttaaactaccacctcccttctctagtgcctaaccagagctctggccacacctgcagagagagagagagagagagagagagagagagagagagcgagcgagtgcccaagggatgacaatagagcatcgaaagtactgctcgtgatgcattcaaagtgttgaattccaaaggacagttttttagtttagtttttcatttaactgtagaaaaagagctgctgtcccttggggcaagttagagtttttctgaataagt

SEQ ID NO: 132401 - DNA, 1091 bp, Homo sapiens
ttcccccagtgctagccagtattgacacatgagtgattgacttaatgaataataatgagcagaacataaatcttacaggtagggttaaaaatcaaaggattctattacgaaccctgtatttaaggacttggagcaaactgaaggttttagcctcgatcctctgacttgcctgcagcaatagtgatgtccgttgagccaaacattgttccctgtttgagctgggagtgttaacttgctgtgtggtgcttagaaaaagtgtccttagggggcaaaaggagaaagaaattagctaatgtatcattatcattagcctgtgacttaatcaggaaacaacaattaaaaagcattcacacctattttggaatacctgcctgtttgtggaagaaaaaaacatcataaaactagcaaaacaaaacaataaaaaatcagaaatcatattaacaggaaaaagggggaaggagatgtgctttgaacctccagctccttcacagttcatcatttcttgatgccctttgccaggctggatgctcaaggaaatctaatgatatacaaagcctcattgccagatacttcattacttcctcaatccattagtagccttaatggcctatgccactggaataagtatggaaatccagtcccccaagaaagtacagtgctctataaatcacacctgcctgaggattctctcagcccttgacactgaagaataggtgaaaaaaaatcattgcacttccttaactcccttgtactagaagctgtcggcatgagtgacaccttttcactttttaaccctgtagcctcttggttctcaaagtgtgagctgtggatcaacagtatcagtatcactgggaacttgttagaaatgcaaattcagtggccccgccaagatgtgctggaatcctggggcggaagagagccacttctgttcttgtcatcagccttgccagaactgtcctgtcagagatacccactaacagcttttggctgggtgatcagctccctggagtccagtgctctctaaccttctttcattcccctccctgcagaacatacacttttcaattttcaattttttcaattttattttt

SEQ ID NO: 132402 - DNA, 1247 bp, Homo sapiens
atttccttgtctttggaaaacttaacttgcccctatgctgtttgggtgtttttgaagaccacatctaatttaggaaagaatgacctgtcctccaaacccatattctacttcttgatgcacagaaagacctgtcatgcaggagggcaaaacagaagtagcttcaacattcatggattatttataggagcacctctggggtcttttcccgagctctgtgcctgcaggagtatgtgcgaaagtgtttggctttccttgctacaagaaatagttaaacatatgtctggcagtctgtgaccgtagcagtgtgtttcctttaaagaaagtagattacattgccacagatgctgtcaccactagggcccctggaggggtcaggacttgttgatgtaatcagttgtttttttttttttttcttctctagtagctattgttctgtaaattgtgggaactgactgggttacagaatgtgaattgatgttcttctctgttttaaccttccagaaatgcatcttctgcagacaccgggttaagagggtctctggagcctgcatccagtgttcctacggtcgctgcccggcctccttccatgtcacttgtgcccatgctgctggggtactgatggagcctgatgactggccttatgtggtgaacattacatgctttcgacataaggtcaaccccaacgtggtaagatgtgccctcccttcctcagtgctaagaccgtgtctggattttctcctgttttagactacctcccagacataatgtgctttattctgtaatatgactcattgttgacatgtctagaccgtgagttccttgagggcagggattgcgcactgttatttcctggtatttgcctaggacctgtcaagtgcctggtgcacgctaggcacaataaatctgtctgagttgaatgagtgaatgaacagatgcatgcagaaaactctccatgcctgttctggtgttggatctgtacacagggctgctgagcttggttgtacacattgtgcactgcacatatccaggatgagagtgagaccatttctgcgaggggatcaccacctgagattatgtagtgaacagtctatgaaactgtacactgtggtcttgggctgttattttatctcctttagaagaaacaaagagcagcagcacagtaaaggaagaggtaggatggccaggagcttttgggactttgctgcctaaaatggcatatgtgagggacagcctggggccctggaagg

SEQ ID NO: 132403 - DNA, 1027 bp, Homo sapiens
tgagtagtgtttttcctgtttcgaggataagaaacctaagttcagagaggtttaattccttgcccaaatagatgcagataatgagtggcaggtgctggaatgtaaatgcctttttagctcatactctattatttggtgaattccaaaccccaaacctcaaatggtgctagaggtgttcatctgaagctttgcttgggatcatacattaccgttttaatattccaaagccctgtggttactgatgactatattgaagttgctattaaagagatccaggtgtttaatcaggacctcattcctcttaactctcatgtgtggttcagtcaagtttaggttactaatgtgtttcctaaatgatgatgaaaaagaaaatagatgagtttgaggtgatttagaaactactgtctcctacagatccactttcagcttggtatactttgtaaagactggggaaaagatcatataatttacaacatcacgtgaggcagcttttcctgatgagggaacaattttagtgttcttaaattgcctttgctacattttctaggtggaagcactgttagcactgtatttcccaagtatatttctagtagctgttacttatccattcttcttccattcgactccaagtacggattcctccccaaagtgtttgggaactaaccagtaggaatttatagaatctggcaactttggttaagaacattgtgatttgcccctattgctttaaatgttctttccttatcaagcatagaaaagttcagattcaatcaaatatttctctttgtgtaaactatcaatgctaagaggtatgcttcttagagcagaaactgtagtttgtctgtgttctcaaccatgcattgattatttgaaagtaataggcaattgccgaatcatagcagtgaaaactgtaaaataaagttcaggctaacttggcagcctggcccagttgttttacagaataatggaggatgcctgtatgatttaggtgaaatgaagtataaacctactgttgcttcaatagagt

SEQ ID NO: 132404 - DNA, 1447 bp, Homo sapiens
gcttaccaaatgtcaactaagtaataaatgtggatgggtgatagagcaggaaaaatcagcatacaccaccattgcagtaaagattatgcacaaaactcaacggacactaattccaaacagagatttaagaggaacaggacatttacatactgatgaaattgtctttcacagattgctttagtataatagaaaaatagtaattaagtggagaaattgaactatactttgatcaggatcaaaattaacattatcattgaggggtaagcaaacatcatgtgccttcagaatatcctgagaacaagagaacatcacctatttgggattctggccaaaaatgtataacctgaatctaatcatgaggaaacttaagacacatgctttattaaaaagcaggaagaggaagaattgtatccttccaaagtagcactaccataaacaaagacagaggaaatggtcctgattaaagaagcctaaagaggtgtggcaactaaatgcaatacttgactctagactggattctgtgcttgggagtttgagggtagggaaggtgaataccataatggccattattggatcatttgaccaactggagtatagatggagattaaagtatcctatcagtgttcagtgtcctgaagttgatatatttgcatatacacatacacgtgtgtatatatatacatacatattgttttctctctctctttgtatatgcatacacacacaaaaccaatggatgaacctgggtaaagagtgttagtataaacaagtagtgtttatactatttgtcttcttgcaacttttctgtaagtttgaaattattcttcaatattaagttaaaaattttttttttaaatcttggccaaataaatgattgtttttcaaatgaatattttttattttacgtcctttcttttcctgttctcttacttcttttcttccttttttgtgtcccttcttttagaagtccaaggcttgcgagaaggtcatttccgtgggtcaaacggtcatcacgaagcatcggaacacccggtattacagttgcagagtgatggctgtgacatcgcagaccttctatgaggtcatgtttgatgatggctcctttagcagagacacatttcctgaggatatcgtggtaagtaggcttccttgagtgcctgctacccagagtaatttaaaaaaaaaaaccaaagtaactgagcccttcagaatttttcttttggctttttgagtagctcattcacttggttcatagactttatcattctaaataatatccaggtgaacttagactgatcttcccacattctttttttggccaaacgttatttggccaagaaataagggagcagccctcacgacctaatcacctcttaaaggtccacctgttaatactatcacattggcaacacctgaattttggatgggacctattcaaaccatagca

SEQ ID NO: 132405 - DNA, 1515 bp, Homo sapiens
ctttctaggccttttaaggtttttgcatgccagaatctcacctatttctaatatcataaagatgtggctgctttggaaaatatacctctgaggcttaatgctataataacttccagaataataaaacaacctccgtctctgggacctcagtaccttaaccaagcatcgtgtccactttgggctcatcattggagggaaagtacgtactaacaaagcagcggaccaggcactgtggctcacacctgtaatcccagcactttgggaggctgaagcaggaggaccttttgagggcaggagttcaagaccagccttgccaacatagtgagaccttgtctctataaaaagcaacaaccacaaaaaactagatggccttcaggaattcaccaaataagttttagtgcttttatttttgtgaaaataacagacctatcttttagaaaataggtatagctgtgtatgaggacattggccaagtgtgactggtggaaaaaaaaaaattggctgtttgagtaagcaagatgggcttcatttcagcttaagggacaaccacagcatcttggagttcagaaagggtgtgtatgtgtcctttagaaacaaacaaggccaggcgtgctggctcacacctgtaatcccagcacttcgggaggcggaagtggttgtgcccagctatgttgctgggcaacatagcaagacctcatctctacttttaaaaaaaaattagccaagcatggtggcacgcacctgtattctcagctatttgggaggctgaggtgggagaatcacctgagcccgggaagccaaggctgcagtgagctgtgatagtgccactgcagtcactccggcctgggcgacaggagtgagaccctgtgtcaaaactattaaaaagggaaagtggacagtagacttggatagacttggagtttcccagaatgattagtgtcagtatagaagcagcttggcttgaatcgattaacccagagcctgaaattacaggggtctagaaccagcacagaacacgcttagatacagatacctcagtgtggaagcattccacattttcttctaagcatgttagaaagctctcactctgaaaaagacgcagtcagaagaaggggcacagaattggttctttcgttatacacagaatgtatagtttaggctgcgagataacctcctagaacagcagttcccaccctgctgagcatgagattgcctggaaaggcatttggcttggaccagctgaatcagaaatttctctggtggttaacattagatttatttactgcactagagaaatgagtctgatgttgaatttttcaaagctgatgaaactaagtttataaatagtttatatgcctttttaccaagtaactcttattctaggagtctaagaatagagtcagtaattcagacaaagatttatgataacaaatatacaatagcattatgtatgataggggaaaattgcagtgacctaaatatttaataaaggagtggctaaattagttgtggttc

SEQ ID NO: 132406 - DNA, 1050 bp, Homo sapiens
tgaagtcacatgatgcttctttgtgttgacatttattggtgcacaaaaatacttactgaatgtgtgctctgtgtaaaacaccaggagcaaacaaagataccatcaaggcatttgcaatcttgttagtagaagcaacattaaaagtattcaggagtagatcaaaggggactcggcataattgaatgtctgtctattcttttataggtttttcatggattgactaccttctgtctcagaaagttactgatgtttgtgtcagttcatcattaagctaaactctgactttcataataaaagggataaacaaagcctaaatgctagttgtgggaatactaaagcagttttttaaaaaggaaatagtagtttcatgccctcacataccattaaaagatgaacaaacatggacaaatattcaaaactgcagtcattgaaaaatataattcacaataatttagacttcatattattgtatcataaaatattcagtggaccctgaaatgaagtcagttttattcatttagaattatatctattgtgtctgtgaaatgataaatcctaaatagagaaatttgaatggatggggtttttctgactaaaatgaaattttttttctgaataattcagtttagtgagtgcttatgatatacttgtctgcagtgatagagtcactatagattatttggttattttggaaaaaccaagggttttcttaaatcagggatgtccaatctttttgcatccctgggccatacttgaagaagaagaattgtctttggcctcacataaactacactaacaatagctgatgagctactaaaaaaaaaaaaaaaaaaagcaaaaaaaaactcataatgttttaagcaagtttacagatttgtgtttggccgcgttaaagccatcctgggtagcatgcagccggcgggccatgggttggacacgcttgccttaaacgttcagttgtgtatgcagcttttttccagtcagatgggatcctgacagcagagtaactgcatcaggtgggaactgactttcctctcagctgcatccttc

SEQ ID NO: 132407 - DNA, 1876 bp, Homo sapiens
tcagtttagggataggaaggtgtcacaggaattagcaactaggacttcattcagcaagaacagtttcagggaaggggtggggcagaggcccaaagctaagtaggagtaaaggtaacttagagatgactgttgacatttgtcaaaaacagaggggagatgaaaaatgagggaagtttaaaacgagaagactttaatcttgcttttgtttggggaaggtccctggggttggagggtggggagatcctggagaaagtagggctaaatggagccccccactttgggtgggagaggcgagggaaagcccaaagccatgcctggggcccttttagcctgagctggtgacctgggcatctgcaccctaaccccagctgaccgagtcagatctttgtccagtgttctgaagatcaaatgccgtgcccttttgcaatataacaccagctgcttttagtccacagcctctgacatgcgatttgaagacacgttttatggagcagacattatccaaggggagagaaagagacaaagagtgctgagctccaggtttaagaatgaatatgtggccgaccctgtataccgcacttttttgaagagctctttccagaagaagtgccagaagagacagtagtctgcatacatcgctgcaggccacagagcagcttgggttggaagagagaagatgaagggacatccttggggctgtgccgtgagttttgctggcataggtgacagggtgtgtctctgacagtggtaaatcgggtttccagagtttggtcaccaaaaatacaaaatacacccaatgaattggacgcagcaatctgaaatcatctctagtcttgctttcacttgtgagcagttgtcttctatgatcccaaagaagttttctaagtgaaaggaaatactagtgaatcacccacaaggaaaagccactgccacagaggaggcgggtccccttgtgcggcttagggccctgtcaggaaacacacggggacctctctctctagctccagcaggtggcacctcggtacccagcgggtagggcgataatttatatattttccacagtcagggaaggactctcacttatttgtttcaaattgcagtttttataaaacatttttaaaacacaaatggcatgtatgctaatgagatttacccgtgtgctatctgtatttcccttgtacagaacttttacatttttgaatattcctattacttttgattgtgtctgatgggaactgagttgttggcctttgtgaaatgaaatttttggctcttgagaaagaattcttatgaattgttatgcgaattttatatatttaaagagggagatctggggctgttatttttaaacactttttttcataatacatattccgagtagatatttataaaatatatgtttctttcattatgtgtttgtaaaattagagtttaaataaatatgctttgatgcatagttttgaactaatgtaacatgatttttcttttttaaaacagcctgaaaatgtactagtgtttaaaaataaagatttccattttctccagtcctgtctctgacttgcttatttgtctgggtttaaaccagtagaaaaacaagtttattggagagctggctatcaggacatactgcggcccaggtttttcagaccctccttctgtcgctgactttttccatggttgtggcacatgcatggcgatatttttggagacaaagtcccctgcctgcctacttcagtaccaatggaagtgttttcttcaacttcttctaggccctgaatacatctcagacccttgagtctggatcacttttcgttccaggattcctggtccgcagctgtcattagtaggaattagaggtcctccagtccctccttca

SEQ ID NO: 132408 - DNA, 1500 bp, Homo sapiens
agtgtagtcatatattttatcaactaatcaagcttgaattttctatctctaggttttgaatggaactgacctgctctctctataatatgccaggaaagtaggcctggttaaggcattaagaggaattaatctaaataggatcatttgttctgtacaagtttgcctgtcagcaagatttctgattggctgccacagggagaaaatgtgcagaggtctatgcgatctcaaatacagctgttttttatagtctcacttaacatatgtgcctataaccaagtacagctgtatatggccttagtaaaatagtgctggccacaaatgcactctggctattgagaaaggcacctttgtttcactgcattctgcataaagtggttattagctctatgaccagacagaccgttaaaccattttcacttactgtgtggcacctcaattgtgattttaatttttttgcgttacactagctgcatgtttagtgtatacgtgtagcataaaatcagctgaagtccttctagtattaaaaaaaaattgcttagctgtgacaattctaatgtaacactaattgcaagccctttctctggaggttaagggattagtaaacacggcctggcatatttcataacattttaattcctttttgtgtgtttgaaatgagaacaatgtgattcttgtcagttaacttttattaaaggacttttttttttttttttagttcaactagagagaaattgagaagaagcatccactgaagtatcacatggcttcttagaatttattacacattgttattgggtcacagtatgtgaaaacatggagaccgagaatacagaactgtgtagaagtgaatgagtctgccacctctccttgtacctatccactgtgaaacaagggcgttcatgcacacgttactgtaaatgccctggaggccttatgaataatcattggagcagtatctgctgcaagataacattgtgctttatttttgcctttaagtaaaaggaatctgaaatgaaacaatcttcatttcagatataaatcagccccataaacttgaagctaaccagagatcctgaggcattctcattacatgaagtaattggttggttgcaagactcaattgtactgcaaagtcttcctgagaattcagatgagcagttatctgaagagttacacatcctctcacccgacatgttgtaggaacacatagcattggccagtggggcgaatgatttctagtctctgatgaggccggaactctccagcaagtgggcctatgactgagaaaccccgggcaactttgaggtccctttgaggaaatgaaacttcatcaaaagcagccaatattaatgatatattgagcatctattgtgtacatccagtcttctagtctccttggtgacattcatcttatttaaccttcccagtaaatcagcaaaataagtaccattaccctcttttatggaataaaactaaaactcacagaggttgagtaacttt

SEQ ID NO: 132409 - DNA, 1048 bp, Homo sapiens
tgtgaggcaggaaacttaagagagccagacttctttaaggagactgaaaggtgattcatttagtgagtagcgattacagaatttctaaaacagtgggggcggggggggcggcggggaggagggctggaattgtcctccagcgcatacaaggttgttgctgccagagaaatccagcaggaaagagcagcattctttcaccttttccgcctctgaagcggaggagaacttcatttcccagcagcccttaagattcctccgcgcactgcgctagcgtcccggcattctgctttccggcgctctgccttccggtgcgtcgtttacgccagtttgaaccaaagacgcccaaggttgaggccgagttccagagcatggggtctcggttgtcccagccttttgagtcctatatcactgcgcctcccggtaccgccgccgcgcccgccaaacctgcgcccccagctacacccggagcgccgacctccccagcagaacaccgcctgttgaagacctgctggagctgtcgcgtgctttctgggttggggctgatgggggcgggcgggtacgtgtactgggtggcacggaagcccatgaagatgggataccccccgagtccatggaccattacgcagatggtcatcggcctcagtgagaatcaaggcacagcacttgggcgggttgggtatctgcggggtagaggaaggaaacggagcagccacgtgggcggggaggcggggaggcggggtgctgccgctggtcaggtggtgggggcacctcaaacaaggtgggagaggaagttgttggaacgcctttctttttttttttttaattttaagttagtatttcttgagaacccttattagactcagcccttttaattctcagaatagctgttagaagtaggtatgattatagtatttactgtggagcaaaccgaggcaacgaggagtattgtgttcatggtcaggaaatgacagtcacttgatcccaggtatatcagatctcaaagcccatactttttctccaggtcctggagaaagcctgagcgagggcc

SEQ ID NO: 132410 - DNA, 1050 bp, Homo sapiens
atttgtttgttggcctgtattcttggcacattttaaactctggcttgccattaagagatgttagcaagtacatatttatgaaataagaaatagagaaacatttttgaaagtaaaagtatatttagaaagaggaaccaaaacctttagaaaataggcaatattcataatacgttgaaacgtagagcttttctgcacatattccattaagatcacatacaactgacaggtctaatattgataagttattttctatatatatatatgtatatatctatctttgtgtatttttgatagacttggaaacattttatcattacacagtaggaaatgacaggaaaattgatgtgatctccagaattatgactactcatggacttagaaatcacctaaaattagaattgactatatatacattttccaaaagctagtgcacattggtttagaaaatatattttgcctctctgataaccagattttttttttattggttttatctctttagattctttatgatgatgggaaaatggtagaagaagtggatggccgagccacacagaagttaattgtcaacctgaagcctgagaaatcatattcatttgtgctgacaaatcgtggaaacagtgctggtgggctgcagcacagggtcacggcaaagactgcaccagatgtattacgtaccaagcctgccttcattgggaagaccaacttggatggcatgattactgtgcaactgcctgaagtacctgcaaatgagaatataaagtaagttgattgaaggcttagggctgaaggaaagaattataggtaaataggaacattatatctcaaaattatagaggtcgtaaaagaagatactgcttaatgtagtgaaagattcttctgctcagactcccagttttgctatccgagttcttttacaacgtgtcctagtattcattgtaacacagattttcattaatttaacagtgagtttttaatctgtattgcagggacagtgttatttaggagaaacagaaaaacatatagaacatggttcttactacaaagctt

SEQ ID NO: 132411 - DNA, 1055 bp, Homo sapiens
tagagtttgactgaaagagtgagaagaaatctgccagtttaaacaaggggagaaagagcatcccaggcagaaggagaaacatgtgtcaaggaatcgtgctcattgggtatcccataagcttttttaaagatatgatgagaaccagtgtgtggggttagagagttgggagaagttgtcagagaccagaccacgcaaggctctaaattttaatatttgtagaatttcttctgtttgtcaggcatcatgctaaacactgggcatttactggtgatcagaagagatactatgcttgccattaaggggcttaccgtccagcaggagagtaaaataatggatgaatacacaattgcaaattggataagcactatatagaaaaaaaaaaaaagatggtgcctgcagtcttggaatcttggtcttgtacatttaagtaaagacctgaaggatgagaaggaatcagttggatatgggtagctggtatcagcacgtatgaaggataaaaggcaggaaataactgtgtggtgaacggaagggaggccagcagggctggagggtggtggactgggtgagtcaaaagtgattaagattggagaaaaatggtcaggaggtctgatggctcagggctttggtaatgagattggatttcatttaaggcacaataggagaccatgggagggattgtaggctgaggggtgaaacaatggatttaaaaaatatataaattattctggatgctttgtaaggaatagattgggaggtaacaagagtagaaataggaaggccatttaggaagctattataggtagtctggatgagagatggtggtggcaatgactacaggatttccaactgattgagttaagggtgtggaggaggaggaagattgggaagaaattgaggacagatacaggcctttatctgtgaattgtcagaggcctgtgaaccagagcaactccatcttaaaagctgggtaaaatgaggctaagatctactgtgctgccttcccagacaaggcattctaagtcacaggataagataaaaggtcagtacaaaataca

SEQ ID NO: 132412 - DNA, 1039 bp, Homo sapiens
gctcacgcctgtaatctagactcttccccaaatggtggggggatgggtgggttattaatggtaggtattggggggttagcttgagatgggacttggtcttagaagagagctagttctaaaggttgtttacttttctagggaggagtctgctactagtctaatcagctgttgggtggatcacgaggtcaggagatcaagaccatcctggccaacatggtgaaaccccatctctaataaaaatacaaaaaattagctggacatggtggcatgcgcttgtagtcccagctactcaggaggctgaggcaggagaatcgcttgaacctgggaggcagaggctgcagtgagccgagatcgtgccactgcattccagcctggcaacagagcgagactccgtcttaaaaaaaaaaaaaaaaaaaaaaaaaaaaggtttttattaatactctgaacttaagacctaaaattactttaaaaaatgtgtatcaaaggtcagagttttaaaattaaccccactattttttgttaggatggattttgttggtatacttagaatataatcagttgtcgagtagatgtcctaatgttaaaaacttttttatttttaggcaggagaaaacaatccaagaagagtattgtttttcagtgattaaccagtatctctggtattttagagatgtgccaagggctctctttctttgtgaaatagagcatatcttgtagtttgctttgtcaatgttctcttagactatcaaaacactcaaattttacattttgagcagtatttacgcctgaattaattcacaagtttcaaggtcactaactttggttatattatattgttattttccaatttagccacctctttatttgtataatagagcatacagcagcacataaaacgcaaaactctaggacataaaaagtggcattcggacgatgttgctctgaaatttatgcattaattaaaccggtatatatgtatgcattaattaaaccaatatttatgaagttcctactgtgttacagacgtggatccaggcac

SEQ ID NO: 132413 - DNA, 1033 bp, Homo sapiens
gtgactgttatatatgcattctgcttattggcagcctgccctataccattttatctgagaaacttttgttaattataatgtcttctaaaatactcttgttttcatttcacccgttagtttcattatcaataagggtggatgatttgattattttttccatttaacctattttataatagtttagcctcttctccttgtctgtaagtcctcagagaactatttctgattatgattttataaataataaaatacaggatcttatatttgtttgatgatttggaaaattattttttctctgacaagaaggtaccccgaagttttaaatcagacatgatacataaaataaagttacatggaaaattactcggtcttttatggctttcatgatatctgaacaattaagtcttctttgcccaggtttctaaaatgcttctcacatgcatacactggcctatttagccatatgtttttctaccagttaatctataaacataacttcctagaagcatgaagcagggtgtacttttttaggtaatatgtagcaagggttttttttatagttaggttatcaatacacattttaaaataatacttataaattaagaatgataagtttaataaatactgttatgtatattcagttactgatttaagaaaggactgcttatgtttattttaatccgacttttactatttaacagactcgacctgaatttgatttatatgtaccaaaaaaaaaatattttaggaaaatattaatttcaattttgaattttatcattcaaaatctgttttctctcagttacacttgtattatatcgaggataccaaaatagatactaacttcctttccaccaaattattcactgtcttttcatgttattaggtatcatctgttgaaaggcccccatcttctcatgcttggggtgcagtctccttgtgtttggttttgacctcaccgtagttgcttctgtgctctgcagccagcatgatctttaagaaactcaaatctgatcacgtcattccttgcttt

SEQ ID NO: 132414 - DNA, 1049 bp, Homo sapiens
ctctccagattacattatatagcatcaattataccatgagcttcttgaggacaataattatatcttttcaagtctgcagtcttaatttcatgagtgaatgaatgtcaatagtttaagatcttataaaacattttcttactctgaataaattggcatataagttataaggtaagaacttgtggttttgcaagattcaaataccaaaacaaactgaatatttttaaaatatgcttagtcatgaatgcttagtattttcttacaactttctatacccctatatttttatttctcttttggattgtgtattttgaagtattgttattataaaatgcccaaaattaattttaataaatgttaagatatcatcaactaatatgactttctataactttctcaataatctcttaaaactgaaatggcaagataccacatgtgcactcttttgctgtggtaaagacatacatgttatcaaattttacaggtaggccaacactcaggtagtaaactatagacctgaacaataaaaaactaaaaataaaactgataaattagtataaaacaagaaacaaataatgagctactttgatttatggtattcatttccatttcacataagcaatctatcttaatacatactacaaaccttgcatctgctttattaagtagtacatttcacattcagccattctaaaagagaaagatagtatttgggtgatggagcagatcatttctgtttatcagaaggaaaaatttaagcaaatcttaaaggggcaaatttttatagtactatttgctctgtattattgacctaagtactgtaatcaccattgatatagtagacgtcattaaatcatattttgtaaatttagagatattccattacagattgatttctctatgtatacgtatgtatgaatatgcttcctgaggaaacctgtttaattaaatcccattaatagaatatcctttttctgcattgtacacgcatttatgtaaatatatacaaaattatcttctagtctgaaggcgctatagttcagtgaatagca

SEQ ID NO: 132415 - DNA, 1131 bp, Homo sapiens
tctatactccatattagcataacctcattcccttaaagcctgcctaacagccctaccacttaccattgttcagtgctttaggaagatgctatgttattctttaagcatgattttttaaaccattttagtttaaatgttaaacagttaaacttattgtgtaatatttcatttcaggaatctcaatcatcttccactatttctcatttgcaaaaatggtaagccaattcagcatcaactagaaaatagaaataatatgtgaaaagacattttcatatgtctcaacatgtttgtggataacttttcaaggcttacatctttctttgacattagagtttgtatagcaagaatgatacacaggctcaggcaaagtggaaatattctcttattacaaataagggaggagaatgaaaaatggataggagtgtcagctgaaaattgtagaatgttctgtatcaagaacacataatacttgttaaataataagtacagtgttctgagtacccaaggttttgttaaaaagtatgtacaataacaaacagagaataataagcagagagcttttgaaattagggaagaactataggatagtatttatattttggtgaacacctggagaagagctgcttgatttaggacaggaggcaagaaatcatacagcaaatgtgtgcttaattaaccacaaaacgttctttcaatgtattagcaatatgatagataatgtcagacttattagaatcactatataaattattcttggccgggcgtggtggctcacacctataattctggcattctgggtggctgaggcaggtgaattgtccaggaattcaagaccagcttgggcaacatactgaaaccccatttctactaaaaatacaaaaagttagccaggcgtgatggcacaagcctataatcccagctactcagaagttgaggcaggaggatcacctgagcctaggatgtcaagggtgcaatgagccaagatcgcaccactgcactctagcctggataaccagagtgagaccctgtctgaaaattaaattaaatgaaaatatcttcataaaagcattcataaatattttatgtcagatgagaggctaaaataaaaaagtagatagtttaacttcccac

SEQ ID NO: 132416 - DNA, 1052 bp, Homo sapiens
gttgtctttttattgttgagttctaagtgatctcaatattttattagatatgtgatttgcaaatatttcctcccattttgtgttgtctttcactctatggtattattttatcccaataatgtagaattttctacatatagctttacatctttcagtagatgcattctgatttgatatttttatgttaccagacatggtatttttatattacttgtatatagaaatgcatttgatttcttagtgaggaacctcaataaaaaatcatatattaaaattaataatctggtacattcctttcaatttactatccacacttacacaataatagttttatctagtctattcaaatcctttaactttactaaaaaggcatgcatgtgtgtatgcatgaattcacgtgtatatgcacgtatacattttgcattcacgcatttaccaagaccacaaatacaacactgaatacaagtggtgatactgggcatccttgtctttatctcaaaaggaaccactgctactaagtgtgatattagttgtaagcgtttgctagatatttttatatcataataagaaagcacacttctataagaatgtttataataaagggtttttttgttgtccattacttaaatagttacataattacttagagtgtctttttcttgcgcttctcatctttgctaagttgtatttttctagaaattttattcaaaattctatgtttttagaaaagtaatttctaacatcctctcaacatccttttagtatcatcagggtttatagtgatttaactgacattagctttccttgaatcctctattttttttacttggcaagttgcatcactgtcactttcatcagtttatttaaaaaaaaaagccagttgtggttttgttgatcccctctgttgtatgcagtacaatatatgatataatattttccattatattaccttctgatatttattatttctcttcttttgtatttgagatatatgtgctgggtccttcctaacttgttgagatagatacttatattatttttctgcctttttc

SEQ ID NO: 132417 - DNA, 1075 bp, Homo sapiens
gataaaacaaagtgaatctgctcttatctgggatggaacaaaaaaaaaacaaaagtacctgttaggttaatatttatttactttgaccagaggacacagtttttgctccaggaaagaaaccacatctggaactctaactgttatcaccaatcaattaaatatatgctaatctagtgtccctctttagcagctatcttcactaacccaaatggacaattaaatgaggatgcaataggaatcaccatcctaggtttttaaaatcttaggtggctgtactaatgttttacccttcctagagatatgcaattaatttttattaactgtttgaataagaaatgaccccagaggctttgggttgctccttcctgccaaactagtacttatttcagaaactgatggaccagtaaaataatcctgctggtggctgttatcttttccaaatgcatacttaggaactggtagaataaacacagggtgaattggagatctcactgggctgattatgaggcaaatttgggggcaaaacttcacctgaccactataaactttcaccctgattggtgaatttgtggagttcagggttctcaacagttaatgctaatgtcaatcagagccactatgcaataatccatggtagatctgggcttttttcttttttcatagcatggagattatgataaatttccacactacatacagtgaatgactgttacatagtccaatagtagtacctgtgatttagaaccctgttgtgggaagtcagggaccccaaacagagggaccggctgaagccatggcagaagaacgtggattgtgaagattttatggacatatattagttccccaaattaatacttttgtaatttcttatgcctgtctttactgcaatctctaaacataaattgtaaagatttcatggacacttatcacttccccagtcaataaccttgtgatttcctatgcctgtctttacttcaatctcttaatcctgtcagttgaggaggatgtatatcgttccaggaccctgtaataattgcgttaactacaaaaattatacagcatgtgtgtttgagca

SEQ ID NO: 132418 - DNA, 1079 bp, Homo sapiens
atggaatgaggaagagtaggtttcttgagtgttcattataggattccagaattataatgaattttaaggaatcgacctgtttttctctttgtgatttgaaaacagatccaaaatatgaaaaatggctaccacatattctagtgttgcaacaaaaccagcagctgtgtgggtttccccctaaaattttttgtctctacgtgaaccttttaaatacccattttcccaaaggcatccattttaccaccttgcaagaagctacagtacatacaatattgttggtttaatctcagtattttttatttatatcatccagaggaggatttcctactaagtggcaggcattttaaaatttttgttttgaaataattccagactttacgtaaaaattgcaaaagagtaccaaaagttgctatatatcccttatccacattcccccagatgtaaacattttatattgacctttctcattctcccccgccctcctctctctctccttctctctctctcctgccctcctcccttctttttacacacacacacacacacacacactttttcttaaacatttttcaactttcttaagaaatttgcacatgatatcactgttcctcaaaataattcagtgatcattcccctcctccaaaagaacagttgtggggcataaatgttgtccttcgtccatcgtgtgtacactgttgtcacacaattaatgccacaattaatgacttatgtcactttatttctgctgacttcagacctgtcctaggaatatttttcgacagagctctgcaagtggtcacctcccttaaatcagaaacatacctgaggccagtattcaggtagataatacaagtgggtctgcctaaagcataggagggttgattagaagaacatgcctttaatttctcacctttctattggattaatgccagaaattcagttctcacaaatcatcttttcagccagagcttctgacccatatgaaaatataaaatagtagctgggaggtttgggactatacatggtatttagtaaatatattttgaatgttagatgaagtaacaaaacaattgccttgc

SEQ ID NO: 132419 - DNA, 1010 bp, Homo sapiens
gatatgttcaggccacttggttagggtcagggatgcagcaggggttttattgtgccttttggagcctgatgcatctggcaggaagtgagttttttttattataactcctaccatcagtcagcaattatcaaaaagttcctgacaaccagtccacttatattttattctgtgaatttaaaattctgaactgcagcagacagtccccagatgaatttgaggcctttcgagagtgtaaaatggctggaatatctttcttctctctttgtccataggttaacctcagagccacagacgtcaggctcatgcgccagttgcttgtaatcaatgagagcatcgagtccatcaagtggatgatcgaagaaaaagccaccattaccagcagaggcagcagcctcagtggcagcctgtgcagtttgttggagagtcagagcacctccttacgtggcagctacaacagcctacacgatggcagtgatgggctggatggcatttccgtgggaagttatctggacacgttggcggatgatgtcccaggccatcagaccccttcagacttggaccaattcagtgacagctccctcatagaggactcacaggcactacacaagcgtcctaaattggattctgaatactactgctttggctagtgacagttttttgcatgggactggtgtgcaatgaacttgtatttatccttcttctccgctgctatatttttggtgtgatttttattttaataagatgacctttttaaaagaagctgattttgaaactgcttaatggtattgctgttgctcctaatacttctcatctgagctgatttatttttctctgttacatctctattttttatttattacaatgattttctcccttcttttacagtagcacaaacaaagtagggggaaaagaataagcaataattatgtttttgcttttgttttcagagcaatgggtcagggattacaagaaaaactttgctaaattttacaataaaccaaagtctgata

SEQ ID NO: 132420 - DNA, 1578 bp, Homo sapiens
gcactcagggctgaagaggtggttgaggcttctggaaaaggaagattattagaatgattgtgcaagtctcttatggcttttgaatacctcacccatgtttgactcatcaatgcattttggtcacaccaatgataaatttagtggtttagtcatgataaaaagacaggtgcaacgttatcttttggaagaaagaacaatgagacccatataatttcaatcttggatgaaaatcaccagttgctaaaataaacaaaatgttttcagacctggttctcatctccttttatatgcaattcccttaaaaattgtgctttatatttctattatctactgtctctatgagctgacactgatataaaatagtttttgattctgttggtgtctacagaacagttccaattaatttgaaataggaagtcatatagcataaaatattattgctttcatgtttcattaagaataactatcacagcgtcctcttcctgcctggtgttggtggtttgttctcagaggcttgtgtcaggactgctgataggaagatgtcttcaggaaacgctaaaattgggcaccctgcccccaacttcaaagccacagccattatgccagacagtcagtttaaagatatcagcctgtctgactacaaaggaaatatgttgtattcttcttttaccggcttgacttcacttttgtgtgccccacagagaacattgctttcagtgatacagaagaatttaagaaattcaactgccaagtgattggtgcttctgtggattctcacttctgtcagctggcatggatccacacccctaagaaacaaggaggactgggacccaggaacattcctttggcctcagacccgaagtgcaccattgctcaggattatgggatcttaaaggctgaagaaggcatctcattcaggggcctctttatcgttgatgatatgggtattcttcggcagatcactgtaaatgacctccctgttgactgctctgtggatgagactttgagactagttcaggccttccagttcactgacaaacatagggaagtgtgcccagctggctggaaacctggcagtgatactatcaagactgatgtccaaaagagcaaagaatatttatccaagcaggagtgagtgctgggctgttttagtgccaggctgcagtgggaacccctgagaacaaagtctcttttgtggttttttttttccatgagtaaaatacaagacttcagattcagccgaactgtggtgtgttacaaggcaggcctttcctacagggggtggagagaccagcctttcttcttttggaagggatggcctgagtcgtattgtggggaggccactgatttgtatgatgtgtcagtagagggcatcaacccattgatcttttgtagtttgtattaaacttgaactgagaaaaaaataaaagaatatcataatgtattttcttatattattttatcagatatttaaattacaaatgtaatacatgctgttgtcaaaagcaaaacaaaataagtatactcgaaaaatggtaaatggactgtactcttactccctccaatcagatttctcca

SEQ ID NO: 132421 - DNA, 1241 bp, Homo sapiens
tgcaacgaaggtaatttaatgcagattcactcagcagtaccttcactggggattatcgtaattataaggcctccatccctagatatcattctaaactcaagtacattttacatcataaaattggtttcctccaaagcaaactcaccatgaaggatcattttctgattggaaaggcagaaccagtttcattttaaaaatgaattaattgtaaagcacagaaaagtcatttgacaatataattcctgggactctaggcatattctctgtcagggaatattccagtttctagaggggatttgcattcctgtaaataggcaatgcttatctccttgttttgtttttttaacctagtgtgttttatgacctgaagaaatataattcaacattgactagaaaactgtcatcatcagtacccatgtcaagggtagcaattaacataagcctgcatgacagtgctcagcagcagtagagctgttggaggtctaatacgctaaggggagcctctgagtggctgggcttcctggagggattttcaagtaggtgcttgttactcacctctcaggtttatataagatctggcatatgaatgtgtttataaatttggttattaaagcaaagttaacattcgtcacttctcattaggtttctcaatctttaaaacataatgtaattagaattctttaaggaggaatacattctttttggagacacattaaaaacaattgttatctctgtaagaattatatatcctaaagaaagaaaaaatggaagcatccataaaacaatgtaaataatttttaaaccagtcatttaaaaatctagtctcaccaggtgtggtggctcatgcctgtaatcccaacactttgggaggctgaggcgggtggatcacctgacgtcgggagttcgagaccagcttgaccaacctggagaaaccccgtctctactaaaaatacaaaattagccaggtgtggtagcgcatgcctgtaatcccagctactcaggaggctgaggcaggagaatcgcctgaacccgggaggcagaggttgcagtaagccgagatcgcatcattgcagtccaacctgggcaataagagtgaaactccatctcaaaaaaaaaaaaaaaaaagctaatctgaaagtatataatgaacaccataaatatttgtataacttacatgtttgttgttggggctgcttatttttgttttattagtaattgttcatttaaaactcttatgtaaa

SEQ ID NO: 132422 - DNA, 1035 bp, Homo sapiens
tttatttttaaatataagataattaaaagattgaggtaaatacaaagtctcttttcccacagtcatgggcccatttctctgccccatccctcagagtcaatctgtgtgatgagtttgatggatatgccttagtaaccaatttttatttgtatttcatttttaacttatttttagatacaagcagatcatcaacaccagcaatttttgcttctgatcctgcaacctgccccattatccctggctgcgaaacaaccatcgagatttccaaagggcgaacagggctgggcctgagcatcgttgggggttcagacacgctgctggtgagcaccacccagaggtgcttctgtacaggccgtccttcagccaggcctcagagacgattatggggagatttctatcagttctagtaaaggaaatgtgaaggccgaaaaaacctgtatttgttattttaatttatagggcaaatattcaattggatacgggggaggtttcctttgagtaagccaataaatattgactcagcaatattctgctacactggtgattttgatcttgaaatttcaaagtgtttctatcagttcaccagtccttgctacattttaatttcctttttgctgatatccaggttgggttaaacccattttaagaggagtttgagccaggtgcagtggctcatgcctgtaatcccagcactttaggaggctgaggcaggtggatcacttgaggccaggagtttgagatcagcctgttcaacatggcaaaaccctatctctactaaaaatacaaaaactagctaggcatggtagcgtctgtaatcccagctacttgggaggttgaggcaggagaatctcttgaacgtgggaggcagaggttgcagtgagctgagatcgcaccactgcactccagcctgggtgacagagtgagactacgtctcaaaaaaaaaaaaaaagagtttgaaaaattgatactttgtagacaaagtcttctagatgtcaaaaataccttaaaagtgatttcatttatggataagaaagt

SEQ ID NO: 132423 - DNA, 1163 bp, Homo sapiens
tacaaatcaacgccgacaaggttggataatgcccattgtcttgctgttggttgccttttgcaaatgttttgttctttgttactactgtgtctttgtcccagttcactatttgctacatttgggcagggaaaaaaaaacaaaaaaacaaagctgtttggagtgggcatgcagatcctttcttaagcacattttcctgccagagaatatttatttttattgctgaaattaaatggcccttctgaagagtaagggagaatcatgagtccagtgcctttctttcattttggtgtcatttaaaatttctgatatttaaatttttgttagttgccaaatgtatgatactttcacacataatttctttaaaaccatgtgttgatttaaatccttttcatacttctacaaggtgatcataaaagctcttccatgagttaatcactgcacaaataattgtgtatgtgtacatgcaggagtctgttgaatattcatgaagcatgcccatgtaattgcctgaatcaggaaacgtaactgtttcaatgctcgtaaatctatacttggatcttctcattttctgatgaaattataaaaccaaaatcgaaacacaaatttataagaatttatataccataatttgatcatgaaaaggaagaaagccatcaacaatttttttcaggaaacactttatgaatattcatcagacttccatgttattgtaacaaataccatgttattgatatggataaccaaagatgctatatctgaaggaatatgttttctattgctataggaattactgaattcaagtagaattatcttccattgttccccaactaacccttttgctcccacaccctttaaggtttgtgtcagtgtggaattttcgtatgtgggtgtgttacagtgtgctttatgtgtgtgctgtacttgatgtatacatacatggcatggagtgatctcaagtatacactgcatttttgacaaggaaggctaaacaatctttgttaaagagctatattttcataaataaattttaaaaagtgtcactaacgaggcagatacatgatcttgatgagaatgagggtgtcagggatatgaaaacataacacctgattgcccctcaagtaaatagaggcttatattggttttattagtcaggtaggttaggg

SEQ ID NO: 132424 - DNA, 1070 bp, Homo sapiens
tgctaacaaccttacgtgaagaatacctccaaagattccataaatccttctaagaaggtactctgtactcactagtgtagtggttctcctagattcactaagctacttctaggggaagttcatagaacatgagaagaaagcttaatggagtaaccagagcttttaataaattaggagttagtgttgtgaacatggttcatagcattgaaaacatgatgggacagtcattcatgaaatcaacaaaaatgtactttgtatgaaaatagagaatttttagcaaaatataaattttaagattataaaatgggctgtattttattttgcatgtgattttcattttacacaattgatatactactacatgtattattttccattttgcttaatttttctctcaattcttgacgttttgtaaatctatcaagcttgatacttaaagatctaattcattcaatttagttgttgtgttgcatttcaatatgtgaatataccatagtttattcattgtcagattcatattagatagttaatagttatttgctattataataattctgttcagtaaatatatttatttctttatacttacacatgaaaatttatctagggaatatatccagaagtggaattggaattgctggcctgtaagtttatatgcattttttactttcagttgtcaaattgctttttaaggttgctataccaattattattattatttttctgagacagagtctcactctgttgccaggctggaatgcagtggcacgatcctggctcactgcaacctctgcctcccaggttagagcgaattctcctgcctcagcctcctaagtaggtgggactacaggtgcgcaccaccatgcccagctaatttttgtatttttagtaaagatggggtttcaccgtgttggccaggatggtctcgatttcttgacctcatgatccacctgccttggcttcccaaagtgctgggattacaggcatgagctaccacacctggctgctataccaatttttatttctatttccaatatatgaatgttcccttttccccacattcttgttac

SEQ ID NO: 132425 - DNA, 1044 bp, Homo sapiens
agcaagatgcattgtggctacggtgtttctgaatagctctcactgcttaggctttagggctaaggacctccccccatcccctgcctgtcactgaatattttaaggactgtttctaagttctaattcttgtctgtcttctaactctgctttcttcgtcatactctgtcctgttgtatttccaggtcagggctaatttttacctctctgccttgcatcctctggacaaagatttcacttttactatttctctgtcaactctttgacattgtttttaggatctccctcttggagctcttcccaccagtcctaccctagtgtcagacttagactctaggagccctaccctcattcgaggcgttattctttaattgcacaggagggaaattcaaacacaaaaccaatgggtaggacctatagcaaagagattttattctaatagcttaaaaacaaaaacttaacattcaggtccaagaaagaatgagatgttcttggagagcctggacatttgcttgccagaaatgttgcaaagcgcattcaagctcagatggatgactggattagatgacttctgatctttaattcaacatattatatcagttgagacagttcagtattcctgtcaggggagaatggctgtaattttacatactttcttttgattcttcagtttctgtaaatatcaactgaaaacatttattgaatcagagtttttatagccttctctgctttaagaggaatatgtggacatatttctttagaaatccaatttttaccaacagccaaggcacaggccataatcagtttaaccattctctattgtcctctcagcctcatttattgatacaaagtattcctttggactaacaaaatatttcttgatgttgttattattgtacagttttctttacagtcaatcagtagactggacacattttgttacatgcctggcatttggcaaaatctaaattgctacataaacggaaggtgaccttgaacacagacgcgttgtaaactgcttcttccattaagaagtattctgtgcca

SEQ ID NO: 132426 - DNA, 1060 bp, Homo sapiens
tttatctttattttattttttcattgtttaaaatataatcagtcttctttcctgacataatgtattatttgaagggctaaaagcaaatttgctattcaatatatttttgtagcaccatagagaagatgtctttatagatgaataaattaaatagggccagaattggaatgcaactttttcagctagcctagtcttaaatccattgatctgtactttgattcagtttttgacctttgaggtaaaagtgtcacgaagagattcccagaggccccatgtattctgcccaagtgatcagtatgaccaggagagctgatgacctgtgatagcactcacttctatttggattgtgctcctcagcttacagtagcttcacaaaagtgacatcctttttgtggtagagggtatggaggttcagcagtggtgatttaccccatgacactctgcgtggtagcagaactgtgtcttccgactccaaacccaagtgacctcgcactttgaagtgaaagagtgaatgctttctatagaataaccaatatatttgaaattatgtatactcctctttcagtaaattatgacattggtataaatttttattttattacaacataaaagacaatctttttatctttgccctccagtgctgaggttttgtatacttattattttaacagataaattatggacagagggtttaataatctttgtgatttctaatttttagttgcacaaacatgctgtattgagttcagatacagtatttctcttatgttactattcattaatttgaagatcttgaaacagtttactttaaaaagtatgtccaccatgtcagaagcaggacagcaggacagcagtagacttgaattttcatttatcagtttctaaacattacagcaggagtcagcatctggcacagtgtcttccgcataataggcattcagtcagtacttgttgaattagtaaatggccattcacgtgtaaatagtagtcttttctttgagaccaaagtgaattttttaaaattgcttcaaattagtaagagtctttccataaactcaaa

SEQ ID NO: 132427 - DNA, 1008 bp, Homo sapiens
atatttttaaataacctacccaactctgcctggcacacagttaccacttagtgaatggctaaaatatggatggacacagcatttctgtgtggataggtcttacttgtttacatactatccttttaaaatacaataaatttggcccataatgatacatgtcagataattctctgtgacattcaggaactcacattttcctgtttgtttattgtttttcattcattcgtatcatgatgtcaagaaatggagctaatcagcttttctgaggatacacaatacatagctaaagttaggattaggactttgcataatatgtggtccagtcaaatctcatttaaggtatattgagagatgatgttaggatttgatttatagtatattgaatgaatcagtacaatggaataatttggaaaattttgaagaataaaatgcatagtttagtattcatatgggtgattagaatagggtagaacaagaaacataattccaaattttatagcactcaaagtctagtaccctatatgtatccatacatgtttttatgtgtataatgggattattacaataaagcaaatgggtgtcatttgtatctgtggtcctaggctgtgcaataattgattagaagcaaagatattctacaaactagaatttcatcctcataaacacatctttctttaagttatgttcatacagatgaacaaagttgaattaacctatattaacctagtattttgaatccctatttctgtctgatgctttatatatgttacttcatttagtcctcagaaaattctatgagatgggtaactctgggacccagttgatgaatattgctcaatgtaattcaaattttaaatattcaagctgcttcaagctgggggcaaatctgatttcaaatcttatgttttgccactgtgtatgttaatttgttaatgaaataaccatatgcacaagtcacagcattttagaactcttatttgtatagagtatagaacttttgcatatatc

SEQ ID NO: 132428 - DNA, 1050 bp, Homo sapiens
gtggtcccagctacttgggaagatacgatgagaggatcgcttgagcctaggaggttaagattgaaggaagccatgattgcaccactgcactccaggctgggcaatagagtgagaccctgtctcaacaaaaagggaaaaaaaaggcatagaagcctgtgtcctaccctagaactagtgactcattttctggatatggtaccccagaatctatattaaaataaacagaagcctctcaaatgattctagtgcatccctgttaatactggtttccaaagagatattagggtcttactgtcaattccctgataaggtgaatacttattctccattcttttcacactaacaactatacatacacattttgtgaattggtaatacaaatatccatttatttaacatgtaacatgcttttttttttttttaatcacaggtagatggcacaaaccttcagggttttactaatcagcaagcagtagaggtattgcgacatacaggacaaactgtgctcctgacactaatgaggagaggaatgaagcaggaagccgagctcatgtcaagggaagacgtcacaaaagatgcagatttgtctcctgttaatgccagcataatcaaaggtaatcctatgttaatctggtttttagttagacctttatattgtctccaattttttttaaattccaaagtaacttactatttcagaatggttcttaattattcagaatgctttttaccctcaactattcattataaaccaaggcgagtaaagaagtgtaataaagtcaggattgactggaaccagcaatgtgtttataaactatggagtaggcttctgaatagagcagatttctttctatcctattcattgtcaccatttctcagttggaaacaggcagtcatttacctttctgtttctgccttacttctggatgtcattgcaatgttctcactttagggggatgctcttctgcctggattatttatgtgaccttcataaaaattctaaatgcccagcctttccttgaaggaatcgactttaattccacatttaga

SEQ ID NO: 132429 - DNA, 1049 bp, Homo sapiens
cacacaaactgctcaataaatggtagctggtctagttgttgttattcttttcctgatagttgaccaaagtgatattttctttctagatgaagtggcaaagctagatttaacttgttgatctgaattcataacattagttctttcagatgtactgcatcctgacttctccagaaattaagatgagccatctctgaaaatagaatttgctaaaaaaaacctgtttgatttaaaatttattgtacgcaaacaataatgtattctctgataagggaaggttcaaccttattcctgcctgatatccctttctgagcaaaaatatgatgatgcctatccctgttttcaggattaaaggaatcgtctctgctataattctttgctagagaattaaagtaggcctgtggctttattttatcatggtttttttgtttgtttgtttgttttttgttttttgttttttttacgtattatttcactgtatatttattgattttattttaggttgatgcttctactcagaaaggtgaagaaagtgagacatttgatgtagaactcactaaaaatgtccaaggattaggaattaccattgctggctacattggagataaaaaattgggtaattttaaacattaagtattcttttaaacttgacaattacctctgatatctatctcttataaaatattgagttgatattacatgtttcaggttgttggataaactggttgaaaacttccttaggaataatttagtgtaggtgactcttatattgtatttaagacagacaaaacaattatcttattctttagcctgtgtttctactagatgatacgtatttattctgaattagagctttatagttggagaatcgaagatggatattctttgaatgtgctttgaaaattgtgaaaaataaactatttctaatcttagaaccttcaggaatctttgtaaagagcattacaaaaagcagtgccgttgagcatgatggaagaatccaaattggagaccaaattatagcagtaagttacacatttaacaatagctttgtt

SEQ ID NO: 132430 - DNA, 1048 bp, Homo sapiens
acgtacagcacccactgctttgggcatcaccctctcctcatccccaacttcaacaccagagttgcgggtaagtagttaagagtagttaatgtgaaagtcagagaaataacacttagatgacgacagtgatgtttacttagaaactagacttactaatgttcctatattagtgctaaagaatggaatgaaattcaaatgtagggatgctttagcactaatgatattttattaatcaggaataatgtgtaaaacaaatgaaaaataggttgcttaaacatgctagattattttacatttttatttaagcagcatatttatgaggataatgttttaaagtatgggtaaaagtttaaaaattatttggtactgatacctaaaatgtttaattctgtctttttctcagttagaagactctctgtaaggtgggtcatagttctaatcattctctttcatcaactttcccattagtatttttgtttttgttttgaatgtgtggaggttgaggagtgggggcaggcttggtgagtatgaataaggcttactaaaaccttttagtgttattgttttaaagtatgtcttagaactgttatcagatttgtaataagtagtcattattctgacccagttatataattttttaaacaaaagttattcttttggtgttataacaaaaactttattcatatgcatagcattccatccttgtcaacttgatatgaaaaaagctagagaatttcaaaattattggaaagtagtgggtatctcagcagatttacaggtcgcaagactacagaggataaatatcaacaaaataatttatccagaagtctcttaaatatttaagaattacacccagtttctagataagccttatagtaaatacacgtcctatattcttttcccatagatgtaaaaaatctatgttttgttctattaaagttttttctaagcagttgctacaaattcttttttaatatcctaacctcctccacaagccctttaaaactttattagaacacttgtaatttccatgattctgttgttttta

SEQ ID NO: 132431 - DNA, 1028 bp, Homo sapiens
gttcagcattttttattggcgtgttatttcataggtgtgattgattgccctgcctatatgattaaaattcagctccgagtttgggcttatatcatgtggccttggggcccaccatgaagaagaaagatacctcatcactcaggaaattctgagaggggaaattctgagagtttagaggttacttcataggatctggggacagaaaaatatatgtgtggatgtatatatttatgggtgtgttttaatgagtaccctgaagttgaaccctggcggtagtttttgaattttcccatctaataaatggtgctgcattgaacatttagtgatgcacacacatctttgtgtattatcctaatgttcatccttgaaataaatttcccaaaatagaattgctggattaaaggatttggacattttgaaatttcatttgtatgtccttgtacccttgggatattttctatgaaatagtttatggaatgtcaaaattcttaataatccctgcattactcttaggtaaatattgcaacttcagcaacttcaaatattgaatatgcccacgttcctcatctcagcccagctgtgattcctactctgcaaaatgaatcgtttttattatccccaaacaatgggaatctggaagcacttacaggacctggtattccacacattaatgggaaacctgcttgtgatgaatttgatcagcttatcaaaaatatggcccaggtaagaacatttctttctgttagttattgtaatacctgtagtaatttaagaatgtgatcaagttatggataatttgaagaatatagtgacatttataacatctgaaaacattggaacaaaaagtcagttttgtgggagtttagatggttcagacgttttctattacagttttatcatcatttaaatttgagtattatatgttgtattatagaaatattcttcaggataaagtgctaacaattaccttggaaaaatgttattcaatttcttttttttttaacaaagaaatgattctgataagatga

SEQ ID NO: 132432 - DNA, 1051 bp, Homo sapiens
cccaaaagtctcttctcaacacattgatctctttttcatctgtgattgtagaaagctaatataatggttaagttattggtaactttggtaacttaatgagttttctgttttatttttaaggataggtaacaaactcttatgtatagattttggtgacatattgtgaaatattttgatagcttctgtcagtggatgttctttacctaatgttttattttaaatgatatctcaaatgttttgtggataatacaaggactgtatgttttctgtataatacaaggatgataggaacaccgtgatgaaaaaaaatctaggtcacaaacaacttagctgtgtgactttacgtaatttcatcatccttagcattgagatgatacttgaaaggttgttcaggagattggatcagagttagatccttaaaaaatagataaacattttttttctgccaatgtatgttgaacaactctgtataaggcattcttctagagaacgagggcatagtaaaaataaaatagtcaaaaatttccactggagagtttttgcattctagtcggtctccactgactgggatgaaagcttcatgacagcagggtgtggatcaggtggtaatgagtgccatgaattaaaacagggcacagtaagttcgtggagtataatggtgctgtcttagataggaatgcgaaggaggacttttctgtggtgagattaggcacacctgaatgaaataaggaagcatgtggatatttggggaagaatatacctgtttggtagagtgaacagcttggcactttgaggcacagtgaggaggggagcacagctagggctaagtgggtgagggacagactgctaggagatgaggtcagagagtgactcaaaaacatcaatgaagtaagctttctgataagtagttacagataaaaagtcacaatccaggcacccaacataaatatgaaattaggattgactgcattgctttattattatttagatttaacttcaaactcttttaaaaggcacacacaaataattatagaatcatttcccaaagtgg

SEQ ID NO: 132433 - DNA, 1230 bp, Homo sapiens
ctgagcctggctgactttaggcagttgtgcattctgaagcgcatttatccccatgaacccaaacacaagaagaaggttaacaaacgttctacagcagcccaaactttttaccttatcgaagacatcaggtttctcctccatgaacccattgtcaacaagttctgggaatacaaggtgttaatccggaagctcctgaaggcctataggaagagcaagtggaaacactgtagagtatctaaaggacaataagcccaactacaaacttgaccgcatcatcaaggaatggtaccctacgttcactgatgccctgcgagacctggacaacgccctctccatgtgcttcctcttttccaccttcccacggactggcaagggccatgtgcagaccattcaccatggagttcatgcactacatcatcgctgctagtgccctgccacaaggtcttcctgtccatcaaaggcatttactaccaggtcaaggtcctgggacagcccatcacgtgaatcaccacttatgccttctcccatgaccacccaacagacatggactacagggtcatggccaccttcaccgagttctacagcaccctgctgggcttcatcaacttccacctctaccagtggctcaacctccactacccactgaagctcgagggtcaggcccaagaagaggcaaaggccagtgagggcacccatgcattggactctgagagctccatggagaaaatggctgccctcactgccagcctggcccgcgtggtggtgcctgccacagaggaggagcccgaggtggatgagtttcctgccaatggggagatgtcagcacaggaggaagaacgcaggaaggagctggaggggcaggagaagcacaagaagttttctgagggcctaaagttcttcctgaaccaaggggtgccccgtgaagccctggccttcgtcatcagtttttggggggaagtgtcctgggacaagtctttgtgcatcggggccacctatgacatcacggactcccgcatcacccacaagattgtcaactggcctgggcagcagacctccatcattggcaggtgctacatgcagccccagtgggtgattgactcggtgaacgctaggcttctcctcctcatggcagagtacttccctggggtgcagctgcccccacacctttcaccttttgtgaccaagaaggaaggagattacatcccacctgaaaaactgaggctgctggct

SEQ ID NO: 132434 - DNA, 1038 bp, Homo sapiens
gtttcacagagcattcaggataggcagaaaactaaaacagtgctatgtctcacataacgtgtcctcagggagcagaatcttggatttgtgacttgtagcttcataaggactcaacgaaagagattgcacagggacatcttcagcggtgtgacagcaggacatgttctttacctagattcaaattctatgtactgtgtgaaatgatgaaggctgcagaaagttatcccatattcagtgtacagtattcatttttaatgaaacaactctacaatattgctggcagataggccccaagcatgacattcaatatagtttacatgttcctgtcaaggtcttttgttaacattaaccagctgcatgctttctggactttaagaaattgggtttctatagaaaactttttttttttttttttttttaatgtgcaggctattcaagttcaatagtaaaagctcaaaaatgaatgttctactccatgctgaaggagctgaaagctgccttcttcatattttgcactttctggtagttcccctgttttttctaattccctaaaattgtgtgggtggagtggagccctgcagttggggggtaacatggaccactgattttgccctttgaccctgcacaatgacctttgcatcagccaaactcattgccatgacaactctttgtactgtgtccgtgccacagatctgttggtcacattgttaatagtaaaggggacaagttggagacggtcaatttttacattttttgttgcaattttttcttcaatggttgtaagtagtttttttttttttttaataataaaagggttcactagttaatactctagaaatatctgtgtgttgcaattcaaatgtatgttgagattgtgaaaagcgcttcagtgccactagcttaccggtacactagactaagcccttgatgacttattgcatgatacagtaccaggaacaacaggtggcctaaatacatgaaaagcagtgtaagctagtgacactaaagccagtcttgtattactgtatttttgacaga

SEQ ID NO: 132435 - DNA, 1055 bp, Homo sapiens
gtttcagaggagatgaatacatagaatttcagatcatttgaccacttagaccagctacatattctgtgcactagtctctttcgcaacattagctaggttataatccagcttgtatggtgcatgaaaagttcactgtctcctgaagccaattaattttgccttcagaccactctgttcaaaagttctttcttatgttaagtcatctgacttcctgtgtaggcaatataatatagtgaaatggccagggaaatcagacagatctgagtcataactgagggctaagtgggagactttgggcaaggaacttaacttgcctcagtttcctcatatgtgaaacagagatactgatggccatctcatgagctcactgagaaaattaagtggtgtagcatatgtaaaacaccaaagatggtaccatgcttatagttaagtcctcagcatggctatcgtctggaagttttgcctttgtgctgttgctacaacctgaagcatgcttaagcggtctacattcctttccacatcaactgctatatcttccctgtctacccttagctgttctgcaatgacataatttggtgagtttttcaataagtaaatgccataaagttaggttttcttccacagtgctacctagaagaaatacagtacttcagaggtagtcttaccaataacaaaatgaagcaggaccatcaccagtaatgcatcttaagctctaaataattcatttgcttcttcccttttggggggagccatgtcatacatttggtcaaaatagcaagaaaatagtatccatgatatcaaacattttatttttggaattttgatttagctcttatgtattcattttataatgaactatctcattatatgcatagtaatagtcattaggatgagctgtactttgtgttaaggtactatcaaattcttttgtgtttttttctgcttgatttttttgcaaagtaattatatcttttcttttttaaatggttatatctactttatattttctaaagatgtgctttcaactttcagctatgctcatcttctctttgcct

SEQ ID NO: 132436 - DNA, 1069 bp, Homo sapiens
cacgatcttgtctcactgcaacctccgcttcccaggttcaagtgattcttaacgcctcagctaccagagtagctgggattacaggcgtgcactgccacgcccggctaacttttgtatttttagcacacactggatttcaccatgttggccaggctggtctggaactcctgacttaagtgatctgctcgccttggcctcccaaagtactgagattacaggcatgagccaccatgcccagccagtatcttggtttgtttcttctctttctatcctgattcagaaagcacataattgataatggcagccatcacatttctacattgaacagatattattgaatctttatggtgagctgtgctaaatgctgtggtgaatccaatgctgacagttcttaaaatctaggtgtgatgcagttcagaataaataaattcaaatgacataggttgctttgctttgttgtagttttcaaaaatggacacaacagagttcatatttgataatacaaatagcccttgtcggtggcatgatagctttatccatcttttttagtttatgacttgtggttatttttaaaacattgaaagaattttgaaaaaagtcataaatgtctgtaacactagcacttttaaggcagataatagacatctaaaatcttcagggcatggctatggctttagaatcatctgaataagttgaaaatatttaagaaatataggtctgttcatccaaagaattaaataatttgcctttgtcacgatggaataaataaaatatcacaggttatttttgttgtggtagatgccttttaacaaaaggcaatccctggagactgttgtagaaaaggacaaagcaaaacgggtgttttggttttgctttattttgattgattgttgtttgttgtcattactttctttgtacaatcacttttccatggtcaccctcttttctgctttatactaattgccctgttgaggtgtttccatgtcaaatgcagctcttgtcggaactgaaaatggcagtgccaagggagctgtgcaagtataatcaaagctggaagatttcctccatc

SEQ ID NO: 132437 - DNA, 1035 bp, Homo sapiens
gacgacccattttgagaacttttaagaaatcttgccatattgcttcccgctagactgaacacatttacttctttgaaatattgaaagtatgtcatctgatttaaaacaaagcaaagtgtacttttttttccttcatgtgagtattttggtccattttaagagtatttatgaccaggcacccgtggctcacacctgtaatcccagcactttaggaggctgaggtgggcggatcactcaaggtcaggagttcgagaccagcctggccaacatggcaaaaccccatctctactaacaaaaattaactaggcatggtggcacactcctgtaatcccagctacttgggaagctgaggcaggagaattgcttgaacttgggaggtgaaggttgcagtgaactgagatggtgccactacattccagcctgggtgatgaagtgagactgtctcaaaaaaaaaaaaagaatatttatttttctttctaatttatttactgatttatgacttctttatgacatatatcctgagcagaatctacatgtctatcaatctgttgatctatctatgtatatgcagggaatttttttcagttctttaaatcataaaatcacttttacttgaaatcctgaaatatgcaaataactaaaacacgtggtttggaaattttagctagtatttttagagcctcatagatcgatagaaaaatgagcaaaaactatctttctaaaactcctgaatcactattacttagtgtgtgcagaagctcgatagtctaaaagggaaagtaaagattcttaatagcctatttctttggccacaacattatcagaaatgtttaaaatagtttatcataaattttaagtttatgataatttatggtactttggttccagtcatcatctggaaattctcactgaaaagcagcaaacaaggtttagtggattactgtgaagaagtcatcttttcaatgtaagatgctgttaatttacagtgtggccatctgaaggttaaaaacgatgattttctactgtgtttccccc

SEQ ID NO: 132438 - DNA, 1034 bp, Homo sapiens
ggccaggaacaaggttctctttccagagaccacagaactccaccctaagaacatatgcagtgaaaacttcaccttcacatctttcttatttgtttaaactgttccaaccttccccctttactgatagcttttttggaagataatcttactttcttagttcaccttttatttggttttgaaattctgggcattttctagacaatagaatttcatattggtatgtgcatataaattaaaggattaaaatgatttatatgagtgtgcatttttgtaaggatatgcatatgatcagttctttttgagagtctatattgttacaaaaataagaattgttccccacctccacatgaaaacagacaattctaacagactgaatttctaaactgagtggcacttggtattttaaatttgattactattgggagaaaaaagcaatttcctatttcttaataaaaaatacttggaaaaattcttacagcattcttaaagctttgaacttagaaaaattctatataaatgaaaggcatgtatttatgtgccacttaaaattaaagttttaaaataaaaaaagagaatttacagctgaattacctaacactgattctgtcacaggacagaaactaaggaatcaccaccccaaactcaaaaaagattatcacctattatgttaaacttatttaaagcctaatgtaaaattattttttattaggaaaactgaattatgctaaaggcaagaatatgtaacatgaccccaaaagaagcttaaatacatgtagtattaaccttttaatatatagagtctgttcacaatttgcttggtcaggaatatcttggtcaaataagattagaaattgattttcttaggaattactatcatggaaatctttggtgaataagtgatttctattttaatgatttaattgcatcccccacccataccatcactttaaaatttcactttatcagggagttttgttagttccaagatgctttatgaccaagaaggtttattaattgaaaaaaaccaacatgaa

SEQ ID NO: 132439 - DNA, 1039 bp, Homo sapiens
agagagatacagtgaacatcactgcatgtaactctgtgcctaatctgattgggtgattcttgtctagttcttttcactgtcccaagtccctagcatactgcctggcatgaagtcaccaagtagaagttcagtgaaattttgctacgggaataaatacattcctactgtagaattactaagttaaatcttatgtccatttctaaggcttttggtaaatattggcatagatcttatcaatttacattccctagagcagtgcctgagtggcttaactccattgttataagccgtaataatttcaatgtagcacatggctctataagcaatttcaaagcatgtcctctgacagaaatttatagaacattctttatggccctgtgactttacccatgcacctcttttttatcatttgaattttatttaaaccatcaaggaacacaccatgtgtcttctccccatgagccaggatagctccatttgtgaagaaaatggagaaattgagagggtattgtacaaaggattgtacaaagctttcaagtaaaggcagagcctgcttggtctctctctcctttcttcctccttcaggacacacaccctcacccatcatcagtcctttatttattaggtaaaacctgttaaagtaaggattgctgtcattctctacatggagatccttagaaataaatacctcaaagctttggactgggatcttaagtatctggcaggctagatgctgccccaatctggccttaatagttgtcttattctacataacactcatacacttataaataacctggacactttcctctcttcaacactgtttatcccagggcaaaaacagaggcagagaaattgtggtctttttagctttcagttggcagtcatcttctctgccttctccttgtcctctgggaacagagcccaaactgtttccttgtctcaggactgactctggatttgtggcctgaagtaaaaatgtcagatttcagctacaaaactcatcccacacacttgatttggtagcctgtcatttact

SEQ ID NO: 132440 - DNA, 1003 bp, Homo sapiens
tatttattatcatacatatgttttcttttagttctgttctagtctttttgccttaagcctagtgcactgtaattgtgattaggaaactctaaatactggtgtggtcttagacaaatcacttaacttcagtaactcttgagttttcccatctgtaaaataacaaagttgtatactaagatttgtgttctaatattttagattttgaatctattggagtccaagaatttgaagatcttcagtacttgagtctttccaaagccgtcattaacatggatcttttggaaaattcagaaagttttctgtttcttaaattattttttgaatgttcattttaaacactctcattgaataacaataattgggctgcttatgtgcttggaggccccgtatattttgctttatacctgaggaatgcgcagttctcacaaatgcatgtcctgtcctgcaccattctggtgcaacaaatgattgatagagattgagttattataacagaaccttgttatggaatcagtgtctcctactttgaaaacaaatgactcagccagacagcaacatttattttctctaaatgactagggatgtagcaatgggagaccattatcctgtgacaatattcggtttcattgacattatctcacaaatgtaattggtccattactaaatagaggttttgttactgatgaatttcacatgatttctaaaaccattaggataataaatatgccatcatagtaatttcattgacagaatgttctttttttcttcatttacatttgttggagaaaaaaaatatagatttaggttgaacttaaacactacaatttataccaattttgactacttttccattaagagcaacagaatattgtgcagagtaatcatatttgcattgagctgctgaactgatgaccttaaaatttttgtaattctttttctaccacactaaatcacatcaaatcataattgttctcaagcaattagtttactacctcagtgtaat

SEQ ID NO: 132441 - DNA, 1046 bp, Homo sapiens
gctaccaattgttgtagttatttatatgacttaattcaagtatgtaaaacaaaaacgtagaaaggatagaattttgcttcttgtattaaataaaaagcatttttgtaatttatgatccagccctcaccaagtgaatgcctaagcaaccaggttttttttaggaaaaaaaaaaataatcaggaaaagcagttctagtcatttaaaatgtatcctgtacttttgggtttcacagtgggcaagtttacccagaggcagtgtgacagcctattagcaaaataaatagatcttccaaacttgtagtcctctgctcttttccctccacttttaagtaaattagcttttcagtgcgtctgggcttgggttgtggtaggatgcattaacttctccccacactgttctgattgcgcagcaaagcgtccattaccaataccatatccaaagtgacgtttccatacaggctgcctgctgtttcattcataaccacaaaacaaactgaaatgactttacttctttttacaacttgcaaagagttaatggactgtgctggccccctgccaaaacctttaagaaactttattaatgtgttatgaggctgggacaccatagtgtgggattttattggttattcatcttaatgaataaaaatatgtatgcacaattaaagccacattctctagcaattgccttctaataaatgttgagtctttgtcagtgcccgtcattgcatttgcttatcgattgtgatccttttccttccaaatcctaaagttaccagtagtgcaattacgtgaactttaaagaaataccagcttagtattggaaacgagcaattattcagtgatgaaaagaacataagcatgtcataaaaatgaattaaaaatatctccatgtcagaaacagtagttataatctgcagcatttttcccactatatatgaaaaaggctgggctgtgatgtattgatgattcataagacagaggcaacataattttgctgtagatcatgtaagaaagtgatagtggaaaaaaataacttgtttactctga

SEQ ID NO: 132442 - DNA, 1097 bp, Homo sapiens
ttaggctgctgggagctgtgctgctgagatagtgtgggtgaaaatgggatgtggtaatgtgtgcttgctgaggagctgagatgtatccagttccataatttgccttcaggaccagctccctaatgtgtgggcctcttgttcaaaaattaagagtttcaagatggtgacagaagagcatgaagccaagcatggggaccacgtaagtggggctctatgtgactgcatgggtccatgctcctgacactggccctgtgtgctttgagatccttgagcatgctcaggacctgtgaggagaagagcaggctggtggggaaggggaagttggtgcctcattcagggatgtgctcagagaagtgcaggttctctctttgggctttccttatctctgtcgcttcttcaggaaggggaattaatggggggctaggatgtggcctatttggggagcagagtggggagtaataaagaagggttgaggagggctctgctagaaatattggaaacgagacctgatgcatagcccgaaggtggcatcgattcttaagtaaaatgatgtgaggtgaaatgaggggactcttccccccttaaatttggagcagtgggagttgggggtatgtttacaaaccacttctggaatgttgagaacagaggcaaggaagcatgtgataacagttccttacagttttaggacacagggaacacattttcctaagagcacagatgagggacataaaactcagcccagcagcttggggtatcaggaaaggcccagaaagagatcctgagcaatgcatctgggtggagacctgggtgtccacatactgttattcatttagcactttggactttatgctaagggctatggggaaaccactgaaggcttctggagagaagctacatcagactttcattttctgaagtatttcggtttcccatgttactgtgtagcagtggttcccaaagtttggtcccacgaccagcagcactggtctgacctgtgagcttctgggaaatgcagattcatgggccctatctggacctattaaatcagatctctgaggatgggccagaaactctgttaggacaagctctctgggtga

SEQ ID NO: 132443 - DNA, 1054 bp, Homo sapiens
tcaaagcatctctctctaagcctatgaaccacaacaagggctttaaaatagcttcagataggcacctttgccttgtttatgaagcgtgtactaattagagttgtgttttctttgtggtataagcctttgcaatggatctacattgtccttgttatcaataataactaatgagattaaaatttaaaacaggtgtctgataatccttgatgaagagaattcaggggatattgttcctgattttgctttctctccacttggaaaggaggtggacgagcccatcagaccacagcctgttgctaggaggaaattccttggctcaacatgcagaaagtgtagtacgcctagattacagtttaccagggacgagggcctgttgctttgatgcgctcccaagactggagttggaaaagtttttttggtgtagttccatcctctcatagtgaagttcttcattttcccagggatggaagctttgttataagagtcccagtgtagattctgatgtaatgattcaagatattggctttccagaggattcttaatatattgctttattcaccatagctttaattccattgtgttaaaaagaatatgccactttcttgtcatctgaagaactcttaatttcttatatcccatcaaatgtagtattatttgctcaagctttctttccaaattttgctctggagtgtttgtagacagttacatttatctctaacattgctcaccatttagtaaaagaaacaaaacaaaacaaaatgccagcaaaagtaactcctccataaaatacgtgtaaagcaggaataacatgtgaatgaacaaaatcctggcttgaatctgttcttttgcaacaaatgtaatgcggttgtaattttgagaaaagaagcctgcaaacaaaaatagttagtagtttaattttaggtttacagttttgacattgtaaccctaaattacatcgtatttggaaaaatctcttcaacttagactttttttttttttttttttttttaccctagtgctacaagatgactctatattaaagtttctctggaga

SEQ ID NO: 132444 - DNA, 1147 bp, Homo sapiens
tttgcattcagaatcatctgaaaaataaagactcactagttatgtttacagagaatcttaaaacttttggtaattgaggtttaacatattaaatatctgatagacatgtggactctgtcgccttttgctggctggtttgccttataggcttaacttctggaattttttttgccttttcaaacaaattcttctggttgaatatcagcatatggtaggaggctcactctgagacaggataatttataaatgaccatttcttgtcttgtgatcttatgtatataaagaatctagagtcatgagtcaaattgggatttttgttcaggaaaaaggttaaaaaattagacatacaattggctttctttgattctgtgtctataaggagaggaagaatgggatttaatttaaaatatatttctgcattgaatactgatatttctgtttttgaatttgcttttttttaacatctggtacacaccagactaacctgtacatattattcctttggaagcatatggttgtgggccctgatccaaaagtagcttatgtatctacatttcagagtgtaaagtttcttgaagaaaggtggggagggaacaactatgagatatgttgttaattattgtttattttctaggaaatatggcaagctgtaaacttaagatgacaatatctgtttttttttgaattatgtaatatgctactttggagaaagtcgattaaagaaaaatttggaagccaattcttacgtgccctaggaaaattaataattcatgcagctacttctgtcctatcagtcatcttttcactgccacatttatacttatgtattatgaactgctgtttttttagttataaatgccacaggtagatatggatgttgatactgatatagtctatttatctacttattacctaaaccttgatgcatattcttgtatttacttagccttggtaatggcctggtccgttatgcatacataactattgaggcagtttttgaggttctggaattattcaaaagacctggccagaaatggttaaatggcaggtaattgccgaatacatttgcccctcatttgcctaaaaggtattcggtgcctgagtgtattcttgccatgtgctttctttctcagctgcggctgattca

SEQ ID NO: 132445 - DNA, 1074 bp, Homo sapiens
tgtactttttttttaaaaaatacccaattaggtaaatctaaccataggttgactttctggctggacttgaaaactcatttatttccagtttgtcttccctcatgaaacacaataaaacaaaacaattccacccccaaacctgctcctcttctagattctcaagggacttaggaatcggggtagaagaaaatggtcaagacagcccacctgatttatttctcttacttatccagatttgttttggaatcacatgccagcttctccaccttcaaatgccttatgatgcagaatattatatattttttgagaaggtaatataagttgctttttcttctctttcaaataattagttatcttttttccacttcatatgctagaagtaaaacaataaagaaacctctgggaattttcattaagtgattggttttcatatattctgtctttctaaggagggagggaaggaatgtcatttaaatttttaaactctagtcttgatgactaaaatgttctcaaacttggttaaatcagctatctctttacataactattggatttctttcagggggctgtttccttaccgacatactgtacaaataaatgcagtttaatatagatatatcttgatgtgtttagatttggtaaaccctcttatctttcaaacatgcatcatttatttaaaatgcataggcatatgttcagaacaaagttattttcagtacatatatattcattagcctgtgtgtgaaagtacatttcaaatcacaaccatttcaatatttgtttttctttccaaactttcttttctctccatcttggtttaattgaaccctagacctgaactctttaaagcattcctatggagccagggtacatttgaatgtctttgactgatataaaataattgctttgttgatcatatacccatgcatgataagatatgcataagaagaaatctggtacagaagtataaataatacttatctttaagccagcatctgtcatctgcttcagcagacagtgcttgctttcttcctagcacaaaaaggcctgaaagatttatggagcagctttgtt

SEQ ID NO: 132446 - DNA, 1001 bp, Homo sapiens
agctaagacttctgtgaaagtcaggagagcagcaagaaggacataggaaagcttgtactggtaggaatagaaagaaggaggcatattattatggatgtagggagaaggagttgggtgtgactgtgatgtttctaatttcgtcacctgggtaaatgttagtttccttaacagaggcagtggaagaaccactgagtttggaggtgagttgttcagtttttttcttctaggttgggtaggcatgacccaagtgttgatgtctgacaggcaaatgaaaatacaggtctgaatttagctgttgttatcccaaacctttgaagccaaagtttgattgaggttgcagagggtgataaagagaaccaggggaatgctgacttttagaagaattggagttaatacaggagaatgatagtgagaagtcagataagtaggaggagaatccggacaccccaatgtcatggaatcagagatgagaaattaggcacatgctgcactaatctaggctgatgtatggccagagacttttatcatgaaagtactgtgtaataataataacagtagcaagaacaacaataatagtatttactatttttttagtacttattgtgttccaggcattttgctcaatgttttttctacatatcccatttgtttcaaactttgagcctattatctttgtttaaatagatatacaaattcaaattcagagaggtcagtaatttgtctaaggccaacggctaataagtattggaactgggcatggtttgtgaactttgatatgctgcaaagttactaagcagttattttattttttggtggggatctgtctatggagattgtggagattaaagttatcggtaaagcttactatactcattcccattagctcagaagaaatgtaattctttcctgcttacatggatgagaaagtatgtgggtaagtttcattcattttgaatgtctctcatttaatcagcagattcagaatgtattagtgactccaa

SEQ ID NO: 132447 - DNA, 1054 bp, Homo sapiens
ttattgtgtctcagaaagcagagagagagagagatatagtgaaagaaagcaagagagagagagagagatcaggcacattggcatctcttctttgtagggatactaaacccgttttaacaggccttcaactttatgacctcatttaaccttaattacttccataaagaccctgtctccaaatgcagttacactggggattgggtcttcagcatatgcattttcagggacacagttcagtcaatagcagggtgatattagtggttttctgtgaaccacacatataccttgatatttcactctagcctgttagcactgtcagtggcaccaaataagagggtttggcataggatgtttcctaatatttgcctgttaatttgggggaaagtaattggaaattactcactgaagttctcatttacagcaaaagctcttcaaaaatgatatggcaaacatatgggcattcactctacaaatccatgtatgagatgtgtggaaatagagctatcaacaaagggactgaaggctcagaggaggacacaatgcagggttgattaggaaggacttcagcagagtgaaattaaacttgatatcccagggtaaatgggattttgcagggtgaagggcagagaggcattttggtggctggctggagcacagtcctgtatgaaggtgtagtgacttcctgtacctaagacaaagggatgtggagagcagtgggagcttcctcccatctaatgggtcggagtttagaataccagtgccttgccaatgcaaggtattggattttatcctagaggcagtggaaagcccttgaaggtcttatggaaaagggaaagtgttaaaattaggtctgggttttagactggcgagttttaagtgtaaacatgttgattagagagcttagagtctaacccacgctgtccctgatatctagaatgccttttcctctctaattctcaggaattagagaggaaaaccacacattcctgttcattgcacacatttgtgcaaccacacattcctgttcattcttcaaaacactcctctagagtga

SEQ ID NO: 132448 - DNA, 1010 bp, Homo sapiens
gcagagttgctaaagattaactctttagctactgtaaatatatcatgtccttcgttatgtgttggtatgcaatcagatgaaagcttggagggaggttctaattcctcattcagtgattgcacctggagttcctctcttgtaaaacaaacacccaaaggcaaggaaaaacaccgtaaagttctttgtatgtatgtttcaaaggaatgccagtggataggtttttcttgaggtttctagtttgctttttaaaacaaaatactataatctttaattatgtaaaatgttagatgttgcattctgatcatacttcaggaatagacatcacctaagaaaagtctctgaaaaactacaagcatttagtatttacttattatgacacatacccatggatttcattttcaaaaaaacttttattaactcagagtattctagaagaaaggaggtactatactcaaatgtcataagtccagagaaaccaattcttttgaataaacgtgacttctcaatggatttatttggttatcttttactagaaaaggtgataccttagtaacttttattccttctctcacatagttaaaataaaatataattgacagagatatacaggttgacttaaaatattctatatactgtaatcccggtgatgaatttggtatgtttaatgttgctttaaactggaatatttcctaaggcatactctcttttctctaggtaactatgacataagcaagggaacaccaaagttctttgatagtgcttcagcactccttcacaaaatcaaattgaggtagtagtgaggccactgtggggatgtagtagccaatgatgtatcatttatcttgggacacacctgaaagttttaatggcaaaagctgaagttttggaaatctgtcttccttttgagctaaggctttaattctgcctcctctttgatcttcccttccaaaaagctgcctttgagaaatggtacaatttctctctcatgtttaagaggtttgtgacattag

SEQ ID NO: 132449 - DNA, 1051 bp, Homo sapiens
tcagcagttaaaactttattactttactgacagaaaaaagaaaggatgaaaaactataaatataatgatatagaaaatctacagtatttttaaatgtcatattttaaagatttagtctctttaaagtgagtttttaaaatgaattcatataaataaatgcaaagtgccatagaagtaatgaggaatattaaaaatatttcaaggtttttaaggcattgggaaatatgttcaagactttgaaaacagagtccaccagccatatcagcccgtttgctattcctgatgtttgtattttcttctggaggaagaaagattaaaaagtggatcttgttttttaattctctgcattagggagtgaaatactttctctcaccgaaagataagggtaatcacagttttaaaaactggctactccttacatgcatgtacccttgcaaatcctgtagcaactgaaaaatctcctgatagatgtaaaaattaattaatgtcttactaccatgcaaagaatgtgggcataggtggataacggtgactaaatcccacagaatttgtgtggcttgcctactaaacctcgagtaatataatataagtgaaagccaaaaccagttttctgttgttttcctctccagcttgttctttataaaagttggacctgtttgttttgttctctaagtgtgccatgtgcagcacgcctgtgtaattcctggtccttggagcagactgcggtgtgcaggatgcccgtgcaggatttgggtggctggaactgacaaactgggattagctgacctcctgcaggaggctccagtggcccctcggccgtggtgagaaggagcagagccttggtgtgtatgtgacctctaacagtgaagtgatgcctagttcaccgataccacttgcagtaacctgaatgactggttattctggtcaggagaaaatagcactgacatcatgtgattctggcaaagtaaaccacattggaacttggcctttgaatacccaaggggctggcagcaatctcaggggttggctgggagccccattgagttcacta

SEQ ID NO: 132450 - DNA, 1044 bp, Homo sapiens
aagttatccagtgtagctggaatacaagacccatgatgtgctggaggccacgtgaaaaaaataaatagagattacttcatggagagccatgaatgttggcttgagagagttttacttactgtaacaattccgcaaagatacctagaggcagcacccaggttattacgtagtctcaaaagagtatttctgacaacttcattttaaacatttttttcttttttttattaaaaaattatttttggaaatggggtctcactgtattgcccagagtggtccctaactcctgagcttaagcaatcctcccgcctcagccacccaagtagttgggactaacaggtgtgagcccctgtgctaggctaaaacattttatttgtgcattatttcttcattgccaaaggatcgaaatctcacttgcttttttccttctgggagttttgtgggctgttttggtctgcttagagaaaaccacacacttccaggctattctgcctctgtacatttccagccttccttgaaacaatcatctcgagaactgtgaaattatcccgctataatctaattggtggtgaccactcagtccctttgcaccagagaacttgtatctagcaagtctctttctttcaaacatttgttagttcgttaaagatgttatgttagcagtaggatatgatgcatctgagaaggaaataaaagaccaggacaaaagacatgttgaatagtcaaagatgagctgtaaccatcagggaacactaactgtagcacctgattttgattgaaaaacatgataacattggctttgaagttgttgcagatctgcttaaactttcttcatggatggaatgaatgaaaattatgaagcattgatgtaaaaataattgtttttggtcttttttttctttgtagaaaccaacctgccttccctccctccctccctcccttccttccttcctccctcctttccttccttccatgcatccatcaccagtcttttcttactgtacaatttccttgacagatggacttcttgtagaagtttacctgagt

SEQ ID NO: 132451 - DNA, 1074 bp, Homo sapiens
gtctttgggtttgttctcatgactgatcttgcagagcgtctcatgttgtcccctgaatctctttctactcacttaacactgttgataataactgaatgtgcttaggctgcagcttgaaaagaaatttcatgagtagacgggtgtcaggcacaggaacatgttaagagggaagtcacggaacctaacttatcctaaagttagattagattattatctgcttgggttgctatcagtgtggctttgccttaggttgggggatagcccagatttcctttcaagttccttattggctttaacgttctctgattggaacttaaaaatgatattttccagactgtttgaaatccttttctcctctacattctagaaatagagtctgttgaaaataagaacagatccaggaaagaagtatgtacttaatattgtaggggacatatagcagatcggaccctttgaatggttaatgcaaagttttgtcttactgtaatctgggtaatcctcagatagataaaaattcatcattgagtgtttttactttcctaaagaaaccacagtaatatgtctttttctcacctaaatgctcttaaatgcacagagagtaggggttcctttggtttctatttttataatagtatcttcctttagtcagtttctttattcctagaacattatttattgggcacgtacttttgaattaaaaaacaaatgacctaaatatagaaataaccttccatggggaaaagaatggttgttgactgggcaggtgaagtaaggccaggagtggatattgaaccacctctcttagtaacagagaggaaggaaaaataaaattggacttttgaaatacgtatctagtcttagtagggatatctatttgctttttttttttggtcaattttaaatagtcgtttctatatttctgtaatattcactaggaaatttgtttccctgaggccagaagtctgggctagaggcaaaacctttgaagtttgtctcctttcttcctttgtacattaaaataaatcaaaacaaaactctaatccttttattatatttgacaaccatgggcaattg

SEQ ID NO: 132452 - DNA, 1044 bp, Homo sapiens
tggaatcttgctatgtcggccaggcgtgatcttggctcactgcaacctccacctcccaggttcaagtgagtctcatgtctcagcctcctgagtatcagctgggattacaggcacccgccatcatgccgggcacatttttgtatttttgtagagatggggtttcaccatgttggccaggctggtcttgaactcctgacctcaggtgatcttcccaccttggcctcccaaagtgctgggattacaggcgtgagccactgcgcccagccctgaatatttagaacctaaaacaggctacgtatttattcatttgaaaggttgtaaagttttaaatgagcacctgtcataccaccgatgttcctaatggctttggatacagtagcgtacaagacagacatggtctctgccctcagggggctcactgtctattcacagggaacaacaaatcaattcaacaaatttataagcaagtcatttccgattgtgttaaatgctatgagaaaactaatagggtcatagataatacatagattaaagtgaaaatggggtatgggggtctttgttggctaaggtcttttgggaaagtctttctgaggaaatgaaataggaaaagatgagaattaacccagtttcctagtactttcagtactcatttgtgacgtcagttatgaatatagctttggttaaaaggccctttgagccatttgcatttattgagataacctcagggacaggttaacctttcataattatcagaaagctatctataagaagcattttgctgtattcctctatagactacttttgtggaatcatgatttaaccttaggttggcttcaccgtgaattaaatatttaaaaatattttatatgtaaaagatccatatgcagatctttgcttttgtataaaactacctttttcctattatgtgttcagtgtcccttattcaactcccctgcaatatatttctctgaaaaatcccttccaggaaacaaattttctttttctgataagttggcatgcctcttttcatcttatgatgagaac

SEQ ID NO: 132453 - DNA, 1053 bp, Homo sapiens
aggatacaaggcctattgtagtttgacatgtagagttacacagataatacacagagaagctgagtttctttttgggattgatgagggggaaagagacggaaaatgtacttattaaaaagagtgccttgatttgctgtggagtttaaaactgggaacatgttttcccagacgagcaaaagctttgtagcattgctggctcgttaatgagtgatcttctttctccctggcgtgccctggctgggcatgttttcttgacttaggactgacactctcaatataatcttaattcatttttagtctaggctgactaaatcttctgatttggcaaagcagactgtcgggattgccattgttatgtttactctggatttatatcttaagttgaggctaagtaacacatttacataaatcaactcagcattagactctaacacaaaattgtttaccgagagaaaagactaattgtattgcttcctgagatttgctttcataatatattaaacctcaaaggatttaaaaatgtagcatgttctgttttaaaattaactcttctgggggttttgcttttataaaaagatagaatttttttttttttttttttttttttttgcgagaattgattatagctgttgctactgtggatgactttcctggaggtagaagataaagtggagcaggccgatgttatttagcaagagtcatatgctttcatagaaggatttatgttttatgaaactggcagcacaaatgctagaaaagaatttaaaaagttcttttaatactaaagatattgcaggaagatgaagaggctttaaatttatagctgcaaacattttcagtaggagtgtttttaaatgatagcattttatgattcatgcaaatatcatgttataatttatttcctttaaaataatggcaaggaaaaatgtcatggctctattgcatgggtcatcatcctattaagtcatgttctatttaaaataattttacctttattaaaatttacttgcattttaaaattacgacaaaaagccagattgaaaaattgggagt

SEQ ID NO: 132454 - DNA, 1969 bp, Homo sapiens
cagtatcttttccccaactgtttttccactgcattttaaatgttttaagtccaaagaaaatttgtgcttgattcaccacctcataccaaaaaatggagtatggcaaacctagaccttttttgcttgacaagacaaaacaaaaaacccctgcagtatctagtcatgtaattcttagtgaacatcttctcatatttcagtataaattggtaatttgtcaagctatccatatatgcttgagagactcttcatttttggttaagggtaagaaagttttttttttttccttcctagtttcagagtttttggtatactggtagagttttgaacatcaacaacttttagtcttttggcataataggattagatagattatggttactgaattcacacaaatgtaaaagaaaaatagagatagggaagtgagggaggagggacttagttcttactgccgtatttatctatttttagtgccatttgaaaattgccacaggaatgtagcatctcttttctcctgcagacttagttttacatcagtttcttagtatgccatataggatagcattatactcatgtccttttagataagtactcacaactaggaaattaagatgccaaggatataagcccctgggtgtgatagggttttcacttatatacacagatatcattcttcaaggatactgcttgtgaatgggatgactcaggagatgttaatgagagtcttcctagcctggcatgatatcctaaccatggcgccgtgcactttttcttccctgtttgcctcaactgcactgatatcgctttattcttcttcttactatgactttatgattgatggttacgaaaatcccagaactgatatgaattcaagtgtgttcaacgattagagtaagagaatgttggctgataaagaagaagttgactttagttgaacacaaagatattgaactctaagttactcatttaaatatgtgacacagaagtagaattcacagaggttaaccccttggagcactcagagaccatgatcctggccttgtccacgtaaaacaactcccttcagaagtaacaagagcaaggtccagccattgccaactgaagcccgttgaatacactgggacgtgggcaaattaagaacttactgatagttcgcccactggattttatcatagatcttatcagcttcatggtctatgactgttgatttgactttctcatgaagtaaattaacttcaaaacaaaacctcactatctcttatctgttgcctaaacaatgtttccaaaaattgaccaccttactatacagttcacttggatttcttaagaaatcagttaatttagctaactggcaaacagaactccaccacctcttctctggttctgaaacaatgtttccaaacgatggttgtcctttagcatgctgtcagagcacagtaggccccaatttttaaaagagataattcttttgtctttaattttgtcaattttagcccagttcgacttagttcttgtgcctcatgttggatagttgctctagagaaatgtgatcccaggaatgctggtgatttgctgttttaaaatggtgctgtgctttaggtttctgttcaaatctaagatttcagaagagtcagtaactgcaaataatctaaaaggggaagagtgaagaatgcttctaacttccctttgaaatgaatagctctgccagagcagcagctattagaaaaacaaaaacgacaaagaaaagctgctcagcccagcacacagaggtaaatttacttacatcagactgaaaaatgagggctgggctttgaaaagacatcccttctgactagaggaaagcttgtaattttggcacggctgccgccctcctaagcccctgagaaattctgaaaaacattacggaagactgttcttaatattaatggatgtcttcgtgtgtgtgtgtgtgtgtgtgtgtgtgtgtgtgtgt

SEQ ID NO: 132455 - DNA, 1069 bp, Homo sapiens
caatgaattgccttattcttttaaggtgtgttataaattgaatactgaccacaggagcactaatctgatagaaaatactgcctctaatctagttttaaaataagtaaagtgtgagtgtagggttagagaagattgaggtatttaaaaaatgattaggataggtcctccttggtaaggcaacatttaagtaaaggcttgaagggggtggtgaatgtagatactcttttaaacacttgaatgtgtgtgtgtgtgcgtattttcatctattccttacatcagccccatgaggcaagatctattagtatctcctttgtacatgtgagggaacgaaagaacagaaaaattatgcccagggtcacacaactagcaagtggtggaatcagcctttggacacaggcattttgttaaactattattttagatcagcccctaagctggcttagtgaggctgatccaggataggactaacctccttagcagactttgtactaaactagatatacaggactcagattaattcctcttcctgggaaataaaatcctggattctacctgtcatttccaaagtgtgtcattttgaagtaccatcttggatcaagttaatacgattggaatgggcacttcagctgctatcagagcaatcccgctggttgtgttgtcattgtgttttggtgctttaatcaaagcacgaaagatgtgagggaaggaaaattgttttagatgagaaatatgcaaaaggaatctaaacatcattcttaccttctgagttcacatcattattacaggaccattgtttacatttgggagctttatggtaagtgtaccttctattgaggtctgagatggcctcttcaaccagttcataataagataaggaaccagagatgaagagtgtgaaaggagtgtgcagaaggagcaaatacagactagcagcagtacatgttgtggcccataaatatccatcctggaaaatatcttaggtgctttgagttgtagatgagcaacatccttcaaattagatttatgttttattgtctgaagtaaattatatcgatctctgttgccttga

SEQ ID NO: 132456 - DNA, 2641 bp, Homo sapiens
gttagagaactctcatgagatctcagtgtagtcctacctacctacctagacaaagaaataattgtatggtttgtcttttcctgtctactgtaaatgtttcttctttctacttgcttagatgtgcatctgtttgtcctacagacactgttcctctgtccctcagtgagctacaagcaacagagctttcttgagtgttcctggatgccaacgcacaacatttaaacatactgactttatatatttgctccctaacgtgaatatggatatttttctcttctgatttcatttcctttaaaaagagcagtgatggctcaggccaaatcaacttgagttcatgcagccctgagcatgatcaggactgctcttgccctgaaagaggagtccattgtcctcaaggacattatgtcagagcccttaactgtgaactttcagtcaagatgctagacttgccagttagttacacagaaactattaggtccaggatggaatgtggcagttaaaacagaggaactttgatccccaagataaagtggatacagacactagtatgcttgcattttaccacagttttgatttgcatagtttttctcaatctaaattccttcaacctgtgtccagtgagtggtgcaatgatacaaatacacaagcgttttgctagaaaacctttaagaatggctgatgcgagtcattccccaagagcccctagtccggagtcacagtgatacccagttatgtcagttcgttttcttttaaaatgtgtgctaaatgttaatctctttaaaaatgtgcactaaaatgtttgctaaatgttaatctctggatttgatatttatgtggttatttatttaatcctttaaccttgccaaacttagccagagtagttctaagatgatagtaacagtaacaacagccgcaacatctaatatttattaagcacttactatgtgcctgggactgtgttaagggcatcacatagcatgttttatttaattctcacaactaacttatgtggaagctattataatcatggaaagtaaagttctcagacaaagagagagccagtcatgaccgaagttcatacaacagtggttaaaaggaggaacaagtatttgaacccaggtgttcaggtctgaagccctgcatgaggagctcacctggctgtgcggcctaattcagaaactcattagtctggtagctttgggaaagtcgccctccttcaggaacctgtttcctgatctgtaaaaaggacaactactcttgccttcctgatcagattgttaagaagaccaaataagaaaggcacattaaaaaagtacactttgaagaaatacgcaaatagatgagactgttttaatgaccttagcacactctaaagactatgtttatcaactgccatttctgtgagtaatcacattagaaagtcacatcacttgtaatttggacttttgcaaagtggtccaccatgtgtaatataacattattttaattttcacatctctactgttactgattgtacaaataattttgtatattagaagaaaagtcattaaacacaatacgattttttatctgagaacatcatgctttaataatatttatgggatatttattgccctcttgatattgcttgttaccactttagtaggggaggagaagactgacttttacaaaaagaaatgaatgcagcatttctgtctgtagcaaataaaatgaggtaaatagttgaatggttactgaaaaaatgttatcagtgtaagggaatggtttaaatatttaaaaattgccctccaaataatgtaacttaaatccaatttatatagtagcagaagtttttgtactgaatcaaatttctgcaattcttcttgccccctgagtagacagagctgtggaatagaatatttttagaatgaacacttaccacaaagtttttcctttaaagtttacattggttttttgaaatataataagattttttaaagtacagatatttgacctatgcagcatccattttttgttcctctgggcatttataaatatgggatttagtcattcttatgttcactgaattaatttccctaaaaaaaacacgtgtggggtgtgcacgtgtgtgtgtgtgcatgtgaacgtgtgagaacacaacctaaggattataatcatttagtcaaggtcataagtgacctgacatgccctggagcatgctgtttataattgctgtggttagttttccttctcattgtttttacctataatgtcaaaacacaactatatggagttggtatgttcactaatagcagtttatctctgcatggtttatagacagagtcaaaagccaacaactgtaattacatccatgtttctaacttagcagcaagctagaaaagtgtggttgaagtatgctgtggatatagtgcagccagtaggaattatagggtaaagtcatttctctacattcttttggttttacaataattgttacttaaattttgttttctggattttaccactgtctgttgtgtttatatgaccacataaagagtgcttgagttacgtgtctctccactctatttttctactccttgccttcctttataaatgtactagttctcctttcactttcttcagactcagcagacagtacatt

SEQ ID NO: 132457 - DNA, 1032 bp, Homo sapiens
cattcctttgtttactgatgtagagattcactctacgccatatagtgattgaagcagcttgctgaagtggaagagaaaaacattgctggtcctactgtttgcaggtgcttgggaaactttgtccctctcagtaactcagtttctgtatctgtcagggaagagaattggcctagaggacatccactatccctgttagctctagcatcctaggaatttggtttctggttatcttggcagagagcagtcctcttcatagtaagcaatacttaataaagtttagcacatgcttgttaaatttagggttttaatacattttatttattaaagagaaatagaaaatgtgtaacctgactcttgagtaacactttcatgttgctcatttcaaagtccaatagttaactcatttggttcaatgtagataaaagcttactttttaagaaagaggtctttaacttgtagaattttagagccgggaaaatccctacagatcttctcactttacagtttgggatactgagtctaagagaggcccagtgcttctttggatgcgttacttttactgctgtaggaggaaaaataaacgtaaattatcaaaaaataatgaaaggttattatttcgtgaaaacatggcagcaatttttaaaggaaaatagaagaaaaataatgattaaacatcttgtattatcatttgtaattaagataaattaattcaagagactaggttttttcttttatacattttcataggaagtattctaacgaaatcaatctgcagccatggtctttctctttttttgtgtgtggatggaagatacactaaattgcactcaactaataccaaaatttgatgctggttgaaaaacagaaaggacccattaaaaatatatggccaattttccaataacataagaaaagatgattgagatttgttataagaaaactttttttttttttaactgaaagtcagatttttaaagaaaaggtcagagctagttatgaggagctgttagaagttctgcttttgggtgtttg

SEQ ID NO: 132458 - DNA, 1011 bp, Homo sapiens
tatcgtgttaagaaaattaaataattaaatgagctccgtaggaaataagttaacatttattactgaaattgacttcacttttgctaagaacaactggaagccaagtggagaatggttacaacatttacttcttacgaaactgtgatttgggatcaccgtgtttgacttcagtagctctggttggttgtgtccatggaggtccttggaggaactagtttcggtgcttgtttccctacggccactgaactgcacccctcactttgcacaggaggtttggaaagtggagagattagctcatatccacaatccctactaggaaaatttaaatcacgtgtcacattgacgtagggtaaaaaggcatcatattcttatatggagcactttataataagtgtatcacgtacctaggggttctagccaggagttaataggaaaagttatttcactgtttgtccattagttaaagggtaactagggtgtacggaaagcaggatcagtacattgattagcttgtttggattctggcacataatttttaataatctgtggcattccttttctttttgataacacactggtgtttagtagcagttctgttcatgggatacacaaaactcgaaaatcatatacatgaaacaaagtgcagccacagtttttaaacatatgtaaactgggattgctgttgatggcagaaagatttgatatgatgtctttctaatgtatttgaaaagctttgcttacacttatgatttaaagttgatgttcacttaaagtgggagcgtatacatggttgttaaattctagttgcctttcatagcctctcagagatgcttgcatatttctttattcctgatggtaaagcatcaacattttaggatatgacttatagttatcatgtaacaatttctgttctatttacagtctccaaataagggaaaagctgcttatagtaatatgaggatcactggtcttacagtaattaaatagacttgttatactacattaatccct

SEQ ID NO: 132459 - DNA, 1019 bp, Homo sapiens
aagagtgcaaagagcacatgaaacactcattaaaatggtcaattattaaatacctgaaaattatgggcaaaggcgatccctggctctgaaactagcttctgggtaaatgtttctctttggtttatgaaagaatagcattttccagtttgaagttgatgaaagtagaacttgcggcacttaaggggttttcctatgtatgtgctatggcggagcaaatgattagccaacataatgttcaaagcaaattttccagcctttttccctccatccttgtgaaggaggaataattttagaaatctcaaggactagtggttatgcgatcggaaacttgagttattacggctgcatgccccagtgccaagcatagcaagaagagacgcttccttctgatcatgctcacttttctgtggcaacgtggtatgttgtctcattttaaagtaaattcttgggaccttgaactccagttttgtgatgcggttaatttaactgaatttagttgttagaatttggcatagagaataaatcatcaaactgcagagaacttgtgaaaactaagtgcgttgtagtaaggagtgagtctgtgggattagcttgtattagattgaacgttagagtgagactaataggacttgaatggttgggctttttggttgttatattattcagaaaattggaagaaatggctaacaagtgaggtggaaagtccttgaggctgaattgaaagccacacatttttaaaaaaccttcaaaatttaattgttctaaaatgggaaagcagatgattacatgcataactatattgtttatagtaaaacacttagatacacatattctgtttatgatgatagcttaaacaggacagcactgatgaatcactgacaaattaaagatctctgaacaaggactatataattaaaaatatggggtgatggatgaagtaattttactatcaaaagttgcctggaggttgtgtattttcagaatcctattttaaggcagttcagaacatgtagtaagtt

SEQ ID NO: 132460 - DNA, 1067 bp, Homo sapiens
catgtttaaaaagagagagagaaaactttaaagaggagacctatgcgttaaggtctgaggtaaaatcagtcattctggaatttctcgattctgcaccacactgttacgaaattctcagtgcacaattttgtacactgggaaaatcaaccaaaagcctaaaataattttggttaaagtttcctagatagttagcgttaatattgcttttcagttaaccaccgttatctcgttaattaataagaaggattagcagttctacccaaagggctgcacagaaggaagtctggcctatgggaggccttgagttgccagactgtgtcctgtctgaaggggaaaaaaggaagggggtggtggtggtggtgggagtcggggggcgggagtgggattggcctttctctgaggcaggaaagcgttttgaagagagaggtcacaacacaccaagacatttaaagatctcaagagatagcaactgttgtcgtgtatgtaacagattagagtttaaaatgagtcaccctaactgatttttggactgtactttgcactcttattaaacatgttttggagtgttaaagagagcccagaaacctcattgctatcctgaaaaagtagtttcctttagccttgttgaacccttaaaattatgatctcttgttgggtggccacttttgttgctttattgttaaatgttataataattgaagtacattttgaagttgtgaaaaatgtgacttatttacaggggaagtcataatcattattactgtttttgaaatagaagccttcctggttgtcacatatcattagtgaggaagcaaatgctaagaattattttcttcctacagttactgaatttcagaatccttttgggtaacaattatttctttatgaaaagcttaagtagataattgtttgcaagttggcagtgtattttaacattttaatagatttcacttcatctgcaggtatttcccattatgggaaaaaataagctttcataattgattaaaatgaggctgctctctaggatgatttggtgtgtctgcactgtgaaatgctctgggaacata

SEQ ID NO: 132461 - DNA, 1527 bp, Homo sapiens
atggcctgcagatagccaggtgacagactgttacctgaggtttgttatataaatgtgggacttaataaactgctatgagctttattattcaaaaaaatcaaaattacttttttgactctgaattctaggccctcactatgtgctttttgtcttgattttcttgtagctttggagataggcttaagtgtcattttagaatttttagtctgattttaaataatggtgttggacattgcacttttagaaatattaccttttcctgaaaaaatgaaacattgcatttaatatttccatgcatttaagaattacagtccaaataatgatggtttggggaaaataatatttttgtcccatgtgtcctaaaataaaactcagtaacacatgacacttatttgattgacagatgtctaggaggtgacactttaaggtgggctgtatatatgtgttggattgactataaatgtgttgtaactgtgttgtgaaagtcaaggatggaagtaaagtttcaaaaagtgggtcatgtaactttttagtgcagggagggaagatttgcaaccacttcactactgctcacattttaagttgcttgaaggctaggttttgaggtgtgcctgcctgcatgcacatttactcctggggaaggcagccagctctcttagttttgatgaactgacaataaagatttgtagagatagattgaaaaaagaaaaaaaacgcataaatgccttccatgttgcaccactggtcatgataactataaagttttaagcaactcttaagagaccatggttttagataaaacattgattttgttgttggttcaacaatctctattgtaagaacttttcattattttatcttgtgtatataacttgtatcctctgctacctgccagtgcatcatcttctcttaacatctgttggttcttcctttgaaaaactcacgtcaggatgcttttgtgttttccccttttcaaaatttatatattcttctttgtcaagtgtaggttaattatgtcattttatagtgcaattgattaaagaaggcagattttaaaagataattctccggtcagttagagggctgcatatcgcgagtgatgactttttatttgtcttctaagtacatgataactcacctaagtctgttttataaatcaggaaaagaagtataaaggaaaacacgaaagaaaaatcagaaaagagaaatgtaatgtttgcagcagaaagagcaacaaaattacgtttccccctttttctctctccccacttctaaatgactgggagaaaaacatgagaaagaacagagagaatgccaaagatggttgccactggcaccaggattggcatcagaccctctttgtttagctcaggatgcctgtgatttgttagttggcatccgcattgcagtgtggagtgatgttacaatatattgacaatttccagatctagaaatgtcaatagtcctcttggttatttatacaagatcacacactgcatctcttctggaagacgaaataaagaccaa

SEQ ID NO: 132462 - DNA, 1046 bp, Homo sapiens
ggctgaggcaggcggatcacgaggtcaggagatcaagaccatcctggctaatacggtgaaaccccgtctctactaaaaatacaaaaaattagctgggcgtgggtggtggcacaggcctgtagtctcagctactcgggaagctgaggcaggagaatcacttgaaccctggaggcagaggttgaagtgagccaagatcgcgccactgcactccagcctgggccacagagagagactccgtctcaaaaaacaaaacagaaaacaaagaaacaaacaaacgaaaaccagtaacagaatgcaagtgagggaggatgatcactttatggggataacatcaaatatgctctaattgataaaggaagtacctaactaaaaagttaaatactttataatattcttatctgacatacctcacagaaatgtgatcatgtgctaagaccctagtagagaatcatcatcctaaaaaatataaagattccctctgtacagagaccatattttccgatcactaaatcagaacacatggtgcaaccaagcatttttttttaaatgattttaagattttgaaaagttttgaaaaacgttttttaaatagtttttaaccgtgttttaataaatccattctatgaaaataacaaatgtataccatctaagaatgatgatccatgtctgttgtaaaattcttagaaatttgcctagaaaatgggatttgatgacaatcactgccatttcatcatcataagcatcctgtgtagtttgtacttgcagtgctttgtttttttagacagaacaccactctctaggttttgctcccaaatggaggtagacctgaggacacacatagagtgccacagagtcaacacggtgaataattgagaagctcgtacattatgtacatgttgagtctacagttactctcttggtgggtgaagaagaggtccatattcaatcaggctccaggctcattcatagatgtgatcttaatggcccatattctaatgaaagcaccctgttaattgggcagcttgggctctctacttcatatatag

SEQ ID NO: 132463 - DNA, 4929 bp, Homo sapiens
gtaatatgtatgttggactgaagtatttctttataaacattctatttgattttaagcaaaatgtatgttaaagcatgtttttacatcagtaaagtcatttgtcgaccttctggaaatgaaaggtttttacctagatactgtaagttacacctccttaacaatcatatttgtcattgttgttttctgcaaacaaaaatgtttatgggcttcatgtaggcttaagattgtaggcaaaaatggactgagttcaggacccttcaagcagtaggcattcagttacagagcagttggtactttgtaacccagacttacagtttaaaaatatcaagttagctgatgtttcattataataaaaatactattttgcttaagagttgtattacaaatatttgtgcttaacattagaaatagctgttttaaattgtagttaacatattaactttttcagaaaaaaagcatggtttatttttaataatgaaatagagaacataatacgtaatgttcagtataacagctgagttaaaacatctgccaggattaacatcagtgcgtttttgccaatgcatagaggcatttttctctaagtatgatggctaatgataactattctttgttacacattcaagtcactcccatacaagtaactagtgggtgatatgtttcactccaaagggtgtattaattctgaatgctaatcatgaagacttaagttaggacaacacttcaaaccaggaagtgtgaactgatttagattatagctacacaattttctgtgtgttagatcatggggtagtttgagtgttttcacatgtattgctataaaatcacaatgtaccaagctctggtttaatatgccattaatactaattaatagagctgctagtctctctctggacttttctctagtctctgcttctcttgcgcttcctgtatcaatagattacttagctcaagtttaccaagtttaataacctatagttactttattgaataagtttctgacatgacctctaatatacatagatatatctagaatttatttgataaaattcacacatacaaacattgagtagtttgctaatagatacaaatattagattttcacacaactctactactgctttaaaaatataagtattggtaagtgtagcaaataagccatgtacatttaatgtgttctacttgctagtattaactgtatgattaatgaatgtgttatttaatgcccaagtttgttaacttttattctagaaatcatcctctgaatttattataaatcacagatttcattgtgctctatatttagtcattctcagttgaattctagaatattccacagtacagtataagaaagtattagaaccaacttgcttgaactattttgaaccagtgttgtaattctatatgttaatcagtatttagcatttctgctccttttgagatgatgatggtttaacttcaggaaagtgacttttctgacttcttttattatcattgtgcaatttttagcaacaaaactcactatatctttgtcagttcttcagatgttacaatactgcctgctaatttgaaacagaaataacaatggtattttaaaaagtcattgatattactgatactttccattatcattatattttttactattattatgttctttttgccttgtccaccctagagaataggtacaaatgagtagtgagtatccacaaacttactaagatggagagaaggctagatggtgcatgaataatcagcatctcagcaacagagttgactggagccagtttctgacatcagagaatctctttgctgtaatcattttagccttatctcttatttataccatttttatgggaagagttgttagtgcatataagcatttagtttgaattatttaacttaaagaatttatattgcggtttctcttcagttggtcagatgccttttataaatattttagttttaaatataattgtgtagagtatgatcatgtgaagtgttaaaaataatgtggaaaactcagctatttaatgcagaggagaaatgaataggttgaccaaagtttgaaaaaactggcaccttttctggaaatctcttattgcaaagaaaagatactgagtgtatagaaaattttgtcaccagaggaaaaataaacaatatataagggtggctttcactttaacatttgggatattttggagttcttgatacctcgaaggtctccatttctattggtattttgaatatctgtaacatgtaatgtcgttcttataacagttcaacactgatttttttggtatcgatagctttatatataaacaaagatgcggacaaaatagcttaacagaagttgtgggcttttttgtggctttgcctgcctgtttgaccaaatacagggtttaattgtttgcaggctgttaactaaagggaaagcttacctgcgtattgcaagctatatattcttgccagtatacattggatgatattttaacctactggtgcctgaagttcgtgttttataacctcaacaactataaaacatcctggtgctattcactttagcattgagtgacatttttaattcctgtaccaaagagttaattttctttttggttgactgagttttcttctcacatcgttgtgtatttataaagtagaatttaatgttactaagaacagtttgattaacagatcttattttttgcatgctgctctggcaatttaatggattttaaatgtttctcatttggatttttttttaggtaggcatgtatggattttaattttgtattttaatatagcttggctactttaaaaggtagtttgataggctgaaattacaaaagataattgaagcacttttcacaagttgttttatttctgcaacaatgaataaaaaggtaagaactctaatttatataaatgaactatatagcttattgggcactttagtgaatactgaaacaaaatactaagatgaagagttaaggttcgttctcattacaaatcgagttcagcgtgtgtgtgtgtgtgtgtgtgtgtgtgtgtgtgtgtgtaatctttagtggctttaaagaataatattgccatttgtctactttgcaaataaagataacagaacacctttaaaatatatgtatgtgtacatatgtgtgtgtagatatatagagagagagatacggagagacagacagacagagagagagacagagagagagatgctttcccaagaggaaatgcatatgtaccttgatttaagcaaaactgataacagaaaattgaacttaatgaaagaaaaaagtctggatatggttactcactttacatagagtaagatttttaaaactaattttgcttagtagttaattttacaaaaatgaagagaaacaccctttaagtgtactcgtaatttaaaacacctttgaaatgtaattgtccaaatgtaatgctgctatgtatattatttgggttccagatttttccctttaaaattctcaaaacactcagtgtccttacaactgcagctaaaatggttaatcattctggcaagaaggtgacagtgtgtatattggaaaggcagacattcacatttgaaaatattttgcattattgttagctaaaatcaacctctccttgaatgtagatacaatatatggttttgcagtcaattctgaatggaaaaaaagaatcaagtctgaaatttatgtgaaatgtggcttcagatcatttgaacgatatgtagaaatctagatgaacatatcattagaggtgaaagcaaaatttgaaagcctaatgagatgaagcaacattatctctctctaatctgccaacaatattccctagattgtgttgccactgtattgattctgagtaatttggcttgtttatgcgtgatttaaatgcatgtggctgaatgcagtaatttttcaagttattgagtagtagagaattcaccactattcactgtctcccagagatgaacatataaaagaaaaaaaattctacttcatatatgtaagaataaagcaactaaatgatacaaaagtaaaaacttccaccagaatcagagatattccgacaagtgaattgtgagtctaacacgggaggacaaagctaggctcttgcaaggacagagcacacgtggatcatgctgtatgagctcactttgtgtccctggaattagtgtttttttgtgtgtgatctaactggcaagtttaatgaatagccaaaatctatgttattcttgaggctcctaaaattatgtgtgaaccccaagttctgtctagtattatatccctaaaatgcttttaatagtggtatgttacaagtggcataagaagatcctgtttttaaatttgtcaggcattttattattcagtacataatatgtatagatctgagtgctgttttccttgcattgtctattatttttaccttgtctttcccctaagagaatttgaagaaaatcttcaccaatatttctagtgttgatggtaattaggaaaatagtagttgagagatgtaagaatagtttgagaagagtgagtaaaatgggtgaaatgacaagtgggaaccatgtagctgagatgtatttgtttagatgaaaagtctacactggttcttaatgtgaaaatcaaaccatgtatctaccttaagaacaatgttgttgtttttaatttattgtagcgatttagtttttttcacgtaatatttctattttctttgcagattgtttttaatttaaattgtggaatttttacttctcaaaatgtattaagtactgtattttttgaaatcttatttttaaataaatattttttaaaaacgtaggactgtttttatcctcttacctttcttacttaggaaaattaacccaaattctagatttcagcactaccaatgtaataggtcacttttaaaaatttt

SEQ ID NO: 132464 - DNA, 3259 bp, Homo sapiens
atttaaaattggaaagaactggacatacttgagaaatatgtgcatatggtagatagataatataatgatggctttttcttggtgcattgtctgaggcctgtgctaggcaagctaccccagtcttacagtaggggttttccagccatggtagttttcacactaaaatgctgatcattcttgtgccttgtctaactaaagtaagttaaattatttgtcctgaaagtacatcaaaagagatttgctactgtgttgttgacacacattctgttaatcctgagattttcctctgcttcaaaagttgcgctcggttgattgacgacacagatacaatatctgctatccagagttaaaactcagctgcatgccataatgaaagaaaagctgtatttatgatgctgggacacaattcatcagagtccagtaatggatccccagccaatctgtattgttttagctgactgaagtgcaccatgggagtgctgtctttcactaataatgctgtcttctgtagatcgaggccccgaaagccatggcagcagaccttctcagaagtttttggcactcgttggaagatcctgtggttcattcctttcaggcagaggcaaccactgcgagttccctaccactttgccaatcatgtctaaacagatggatggtgggcacagatgggtcctccatgctggcaatgcgttacaggttttatgataatagaactatgacagtcttcaagtcaattaaaatccacccaccagtcttaggcatcataatgtgccccaggctttattttaatagtgatcttgatcctgttgtgggactaatacaagatctatatttaagttttaaagcatgtttactttcaaattagctttccacagggatttcttgaaatgcttttgttattaaactcaaaaggcagtgattaggatgaaataattgtacataatttattttagtactgacagtgttacagattctaatttatggtaaatttcagatgtttatttaaaattttcacttttaaacagtaaccaaatctaaatttaattattcaggttttacaaaagttgatacaccttcttatagtataggtaaattttctttttcaaatccaatttaaaataacctttccttttaaatgtgctgcaacgtttttaaaaatgcagcagcataggagtgaacaacagcaacacaaaacgggcattggtttcttaggagtggcttgcttacgttttcttcttttttcttcaccaaaaccaacatgaaagtaccactgaagtaaaacaccaactacctaccttactataaaggaaatgttaaaatttttttcacaataattttttcaattttcactattactgttgtaattattgattgtgattaaaatatttgctcccaggagaactcctgaccagtgggcatgtattcctattttatcctaagattttaatgagcaaaaaggggagagaatttgcaataacttcacaattaccttttctagtgcagttatattagaatgcatatgtttttaaaatgctagtataactagatagtatataatgtacagtataaagaggaatattgtgcttttgaaaagagtatactttttacttttatttatgtactagtagatgtaaaatttcacattgaaggtttatatatattggccaactcatatagaaattttatttataggaagctactactaaaaaaagtcactaactttgtgtacctataatccctaaattaaaattaaattttaattggctggctgtaatttgcattgagagaccttttactagtagctagtgttaggaagtgaacctaaaataagaaaatataatgatctgtgtttatcattagccttgtacaaatgtaaattactaatagtgatgttcttttgcaaggcatagaacatttgtatgaaaagacatttagtatgctttgaaaaaaactcagcttttagtttttttccattagaatactgcaaaacccatatatctttttaaaaaatttatgtactcacagtctttcccttgaagagaagattgaaaaagtctactgttcataaaccatgctaacattttccttttagctagttttgaaagtaaggaacaatacctgggaaataattaaacagaaggttaccattgtcagccagttggctatactgtggttagttctttcagaaattgtaaatatcttgtagcatattctgaaataatagagtaagttcttctcagagatgttaatatcatgtttttcatgttctaattagaatactttattacttacaaactcagaaatacgaacagaaatacagcagacgaacatatttattggtactgaaaagagacgtagtaaattaaatagaagaaatatatttataaagcttagtgaaacacaaaattagaatgttcatgtcaggcacaagggtttggattttgtgcaagctaatttggccacatttggcctggtgacagaactgttcataaggaagtaatatatagataaggtaggtagatatcagttgaatgccttatattgtatacattcctttcaaataaagaccttgagaaaacagcagagccaagtgaagatcacctaaagaactttgtggctaatttatacttcatgtagtagcagtgggtactgggcagggtctctttcccactctgatgatttgtgctcttatttttcctagatttacctcatctagggcatattcttttccctcttcctctttacctttcctggtcctgatccctctgtactcagttcccctaaattattggactacaaactaatatactagaaaagcatacacttattttatttgaatgcagaaatgctatctatcagtatatatacataagaatgtatattacagtatatctatatatacttaacactgtaactttcagtattccccagttagcgtacctaactctcctgtgggttttgttaattcttattagactactagagaaaaaccaactggcagtttgctaagcatatctactggtgttgtttctgcgccctcttttggctaattgatgtaattatactggctctaaagatttactgccccataagtaaatagtatagccacattctgaacatatcaaaagtacaaacttaggaggagtgtatgtacaaaaatgtaaaattttatgaaaatgaacatgtttttatgatgttatttctagttcataagaatgtgatgactgctttgcttcatttatgtacgttcccattatat

SEQ ID NO: 132465 - DNA, 1084 bp, Homo sapiens
taaaacctagaaagttaattaaaatttaaagtgtcccttctttttaaatatgcttttaatgtcatatagtaaaattgggtataatattttttagaattttgtatatgataagtttataaaaaactaggttcccccttgccaagggcatttgcttaaataccaagttatatttcatatttacatgaaatactcttttaaaaaaattatcaaaattattttgataattatggtgtgtggaattgggctactctttagcatatgcatgttcctatgtaaaagcatatttatattgcataatttctgtttgctcagtgtaataaactgcttgtaagtatttttgataaaactaattaaaaagaaatctttttctataatttatttatatgtccttaaatcactactgattgcttgagtgattaaatagatgcttaaaaagtgttcgtaaggaaactaaacatttatgggttttccttttactaacaatttttcctagatattcattttattatttcatgatctgaatccacacaaatatttaatctgacattaaaacataggactgcagaaagcagtaaatcttatatttatggtttgcttatggtattttggcacaataatttatgtacattttattgatatattattattccctgaatctcagccaaaggggcatgttaaatgcccatcttatttctactaataaccaaaaatcttatcaaagtataattttggtgttaaaagtgtaagagtagttaaatttgagttttgattataaacagtttttcagctgttccaaatattctgattagtgcgagacttatttctacaaaacattattgtatataatcatccttgctggcttcctctctatgttactatataattatttcctgtatacttgactacttttactagattgtaagttccatgatgctaaggactgtgtcataatagatacttggtaaatttttgatagatggataaatgaatgaatgaatcatggtttacatatttaggacttgttttttcaactggattataagctcttagagggcataggattttatatgtgtagtctcttgta

SEQ ID NO: 132466 - DNA, 1147 bp, Homo sapiens
ggttctgtcaactcccaaagtcatttttccacagaaatcctatcttttctaacagggagagatttgagccaaaaaagtaagaattaactgcagcctgatatacaaaaggattaaggtggttgtattaaatgaggcaatgtatataaaacatttactacaatatctgacaagtaggatgtacttaaatggtagctatttctaattgtaataaaccatatgcatccgaatgtttatatccccttttcatttgtttaattaataacatttcagacaccctgataacctcttccttaccccttaaagctttttaagcattatgtattggatatagctactaccattatgtacttgttggaagtatgtgagtgataattagctgattctgcagaactgctaacagttttggtcaatagggggctctcttgtaatatttaaagaaaatgttcagttgagaaatataatcttcgaaaacaaatgctgcgtgaattctgtattgtatctcattttaaagctgtcacaaaaatctgtgaacaagatattgtatttaattctgttttcttagcattggctctctgtataaatatttaaactggtatagtgtagaatttgacaaatgtatctgtatacatatatgtagtatttatgtttgtatacacatacatgcatatatgcaaatttacataatgagcctcttaatttataattgcttttatttaaaattgatgcaagtggagtttagctttttctaatgttagtctatttagagttttctttatttttgataacttattttgatagcacagttattcagcaaacttctggtggaaatttgtttttttgcatagactgtttaaaaagaagataatttcctgaaataggaaaaagtaagagcattttcgataaaagcattttgttactacataaaaattttaaaaatttctaaatctgtcaacaagatagagtagtgtatgacatatagttgatattcaaaactgtgccttgaatttaaacgtaaataattatttgggaattacttgggaataaagattaattcccaagtaattttcttaagctcagtgatctgtttgctctcacaatagtaatagatttttagaaagctacgtgaaacatgtattcagataattgc

SEQ ID NO: 132467 - DNA, 1021 bp, Homo sapiens
agggatgcttgctcttttagagagtgtcatctatgtatgtttacatccaggaaaaatggacatattttaaactatacttttcactatgtaattttttgttgctgtgagagatctcttccagtgatgaagaaaaatttgttctctagtagaggagaataaaaatagagttcaaaaattaatatttgataattttgccagtcgttttgctggctcatgtacttttctgcttctaatgttaataaatttaagctactctcatatatacttagtgaaattcatgttctgtttttagtcctgaatagaactgaaaaattaaagaaagaaaggtacataaaattaataatattgaacacgttgagagagcacttgtcatttcttttagcacttgataattggcaagactaaaaaattaacattgtcttgaatgtttctctttttaactgtgtagatagcttaccatttgtatttgagattcctttattaaaatgattcttagcaaattaaatagcatgctttatcctgtctgactttcttcattttaatgataccaatctgtcttttgatttttaaattaaaagataaataaatgaaacttttattagtttagtggcctgggcactatttctgttttagaattcatacacaagttagaacataccggatttaaactattaagtggtattacatttgagttctttttttgttttgttttttgttttttttctgctgccccaatatttgcaggaactagggatgagaaactgggggtattcctttaaaatcaagtattccttaatctctttttctttgtttcagtagctttatagctttgaagaacatgggcaaggcctctaagggatggtgccctgaggcttttcaattgattatgaattgttcttagaatgaagtagactgggatataggctgaaaatctgggaatcacccttgacactttcccctgtaacccctaatatctaatcaaccagaaaaacacactggttcgattctagcagttgctcct

SEQ ID NO: 132468 - DNA, 1083 bp, Homo sapiens
tggaataaatgaaatagagcgtcatttaaagaaaatgatgaggaccgtgtcacttttgcctacgaggtactttgtttaataagagaaatctaagcatttaaaaatgcagacatataatcagcttaacaggaagttctgagacaagaatcaatgaatcataacatgtacttcttatttgcctactgcctcatttctttaattcgtaatgaccgattcagaacctgtggaaaaatgcatgaataaaataatggttttataaaatgtgacccacatatagcttgaaaaagaccgtaactcaaatggtctctgcagttacaatccagggacctgttatagtgaatagtaacaagtgcaaactgctgccatccataagccattttcccgaaaacctctttgggttgagaggagaggagtgagaaggtcaataaaggagcagtttattgtttgtcctcctgctagtcttattatatagtggtttagtaaagaaactgcttgagaagttgagtaatgtctcaacatggagctgtttttctggaattgtaattgaatgtgactcagtgaaaacttttttagcataggaggtgacacagtggcagtatcaatactaccaggcaaaagagggaaggcagaggaaaggctgtttttattgccaagagtttgttccctaaattcagttttacttttatattaaggaatgtaaccttttatgttgttttagtaaaacattagggctcagattcaacttttcacatgcattaaatataataggcaatttagcatctagtagaataatcagtgcttaaataactcttattaaaggtaaaaatacaggtgaaattgtaaaacagtttttattgttgaaagtgatttgttaagaattcttgataagtcaagtcagactagtttaaaaagcacattttcatagacatgtgaatcatcactgtgctcattgataggtccctgaacaaaaataccttagtatgatggtactttatgtgtttgttttgctctttagacctaacctaggcaaaattgtgacatttttgaagtttgccttctgcctttcaagctgctttttcctct

SEQ ID NO: 132469 - DNA, 1046 bp, Homo sapiens
gttcctgcacgccccctgcacctgctctgtttggaacccgggggtttctcggtgcctccccgccccaggcctggcctttttcagagcgtcttctgctagagctacagccccttgctaagtgctcctccctcaactgggggtggggggttcctgctctagtcgagacgatgttggctagttatttatttatttattttaaatctgtatcctgagtttctcgcttgtaaactacagtttctctccccgcacccccgtctggagacctgcactgggatcccgggtttctctgtgctattccagagcttttcattcattccagacttctggtgtgaagctgcagagaggacaaacagtttgctcctttattgaccttctcactcctctcctcttgatccaaagaggttttcggaaaatggcttatggatggcagcagtttgcacttgttactgttcactgtaacaggtcgctggattgtaactgcagagtccatttaagttacggtctttttcaagctatatgtgggtcacattttaagatcccttgagagtcagggtggatgtctgtatcaccagggctgagaggacatgaccaattattactttaaaatattgcaatatagcagtctctaaaagtagaagagaaaaaaaaatcaaggtcattgtgggcgggtcataaattatattgtaaagttacagtccaaaggcgactaaggataattaagtgcaatttaaaaagatgtgttaaataggtcctcagcctactatgctaatatatgcacttttaaaaattcactgctttccttgtggtaagaataatattaataacagtcaccatttgatgactgcttagtatgcgccattcctggattaaaaggcttttggtgtaatattaaattcttccaactctttagattttacttattttaaaggtaaaattcggagagatgctctgtttttccttagtttgtgccatctcttaaaagcaaaaagatatttgaagaattgaggtgagaaatccactggaaagaaagagccaaatgagatttg

SEQ ID NO: 132470 - DNA, 2084 bp, Homo sapiens
tagcctaagttagaacacaatgaaattaacaaaataaaaccacaggcaaagatgcgttccacacattaggagtaaatttcacaattctactaacaaaatcacagactgtttggaaagctgaagctgaagccacacactggttgtgcctcacagaaatatgctgatcccttcaacgagggttactgaacctaagtgtaggccaagtgctgagtaggacctagtgcctgctctcaaaaactttacagtctagttggagaagataagaatacatagaaatattatacattgagatatgattgaggacagcaaattattattgaacatatacactcttatgtacgtttttatttacatgcattaactcatttatttatttattttttcactgttcaaggtttattgggggttttagttggtataacacttggatagttagctgcattgtttacatgtagatctttttacattatatggtaatgtacactgctgatacatatagttcacaaaataagatcctttggaacaattatgcacaagacatacgatattggatttacacactggatcccaggatgtgactgactgggaaaaaacgttggactaggcatgttcagtgaaggagccaggaagttatataacacacggtaaacatccacctggctcaaggggcaaatgcagcatgtacagcattggcagtggtgcatcagaggtggcagaactacttcacactaaccagtttaggactacacaagattaataccatccagcatcaggatatagctgtggattttacaaatcattcctatttctaacttgaggagttgatgtttttcccagtccatcttaaaatattactgctttaatcacagatcagataaaaaggacagcatgtacaacctccaactagaatcctgttgtagcctagacagtaaaatgatatgacatcagaagactttaaaattgcagctctttttggatcccccaaagtgtatctgcactcttcttcaaacaggcctcttcctcaggagtcagagtcactttcacaaggtctgagattccattctgtcccaaaatgcaaggaaccctaaggacgacatcatcctttattccatagagacccttaatcatggtgaaaactgggtgcacctgcctaagattcttcactgtacctctgccaaatctgctacagagagtccaatggcccaggatgtgtagcctttgagtttgatcacctcataagcactctcaaccaccagtttgtgaacctctttccactgttccttatgtttatcagtctctaaatctgggtgcggagtcttcagggagacaccagcaacattctttccactccatacaggtgcactggaatctccatgttccccaaggacccacccatgacagcttaatgggtgaactcccagcctttcccccatcaggtaacggaattgggctgaatccagattgcaaccacttccaataacatggtttttgggaaaaccacttatcttccaagccacgtaggtcaagatatccactggatttgaaacaataagcaacttgcagttcgggctgtattttacaacattaagaatgatgaacttaaagatgttcacgttacgctggaccaaattgagacggctttcttcctcttgctgacatgtcccagccatgataattaccagtttggagtttgcagttccattatagtctttgccagagacaatctttggtgttctaaggaaaaggctgccatgttggagatccatcatctctcccttcaatttgtcttcgatgacatcaacaagatcaagttcatctgccaagtccttcattaagatattgatggcacaggccatgccaacagcaccaaccccaacaactgtaatcttattctgggcggtctgttcttcctttagaagattatgaagcagctgatccttgagagttgccacattggacttggaaccaaaaggaatcaggaatgcacatcaggcagtcgtcggggcgtgtggcaatgagatctggaatcagcggcagtggctgcagcactcccattattaactcatttaaccctgacaacaacc

SEQ ID NO: 132471 - DNA, 1749 bp, Homo sapiens
cctcttgcctcaaagattgaattagacatatgttatggtgcctgaccagctttcctatccctcttccctgctaccatttctaaaatcttttcccaccccatgtgattctgatgtgtccacatccaaagcccccactccttcccctgttgttctgtcttttttttttttttttttttttttttttttgctaaaactgttatgaacgatgactctcttctttttggttcacaagtcataggtatgcaggcctacattgctgctattcttctttcccatgaaaaagcctgtgttacactaggagcaaataaggttaatatgcaaagtaatgtggagacagagcttgctgatagagagagaaagaactgatgctattatttaagtccctagatccactcaaggtagtagggttgttgtcagggttaaatgagttaataatgggagtgctgcagccactgccgctgattccagatctcattgccacacgccccgacgactgcctgatgtgcattcctgattccttttggttccaagtccaatgtggcaactctcaaggatcagctgcttcataatcttctaaaggaagaacagaccgcccagaataagattacagttgttggggttggtgctgttggcatggcctgtgccatcaatatcttaatgaaggacttggcagatgaacttgatcttgttgatgtcatcgaagacaaattgaagggagagatgatggatctccaacatggcagccttttccttagaacaccaaagattgtctctggcaaagactataatggaactgcaaactccaaactggtaattatcatggctgggacatgtcagcaagaggaagaaagccgtctcaatttggtccagcgtaacgtgaacatctttaagttcatcattcttaatgttgtaaaatacagcccgaactgcaagttgcttattgtttcaaatccagtggatatcttgacctacgtggcttggaagataagtggttttcccaaaaaccatgttattggaagtggttgcaatctggattcagcccaattccgttacctgatgggggaaaggctgggagttcacccattaagctgtcatgggtgggtccttggggaacatggagattccagtgcacctgtatggagtggaaagaatgttgctggtgtctccctgaagactccgcacccagatttagagactgataaacataaggaacagtggaaagaggttcacaaactggtggttgagagtgcttatgaggtgatcaaactcaaaggctacacatcctgggccattggactctctgtagcagatttggcagaggtacagtgaagaatcttaggcaggtgcacccagttttcaccatgattaagggtctctatggaataaaggatgatgtcgtccttagggttccttgcattttgggacagaatggaatctcagaccttgtgaaagtgactctgactcctgaggaagaggcctgtttgaagaagagtgcagatacactttgggggatccaaaaagagctgcaattttaaagtcttctgatgtcatatcattttactgtctaggctacaacaggattctagttggaggttgtacatgctgtcctttttatctgatctgtgattaaagcagtaatattttaagatggactgggaaaaacatcaactcctcaagttagaaataggaatgatttgtaaaatccacagctatatcctgatgctggatggtattaatcttgtgtagtcc

SEQ ID NO: 132472 - DNA, 1464 bp, Homo sapiens
tttctttttttccctgagacagagtttgctcttgttgcccaggctggagtttaatggcacgatcttggcttaccacaacctctgcctcctgggttcaagcaattctcctgcctcaggctcccaagtagctgggattacaggcatgtgccatcacacccggctaatttttgtatttttagtagagacagggtatctccatgttggtcaggctggtctcgaactcctgacctcaggtgatccgcccacttcagcctcccaaagtgctgggattacaggcgtgagccatcatgcctggccgagttcagcttttattcacattttttccccaaagtgatttattcttcaaagtagacagttatgttctatagagtgttttgttttttctttaagaaaataatttacataaacagagattatggtaaacattttaaatcttaggctgttggttaaatttaatggtttaagcactgttgggttctctttaattaatatttgcagaaggagaacatatgtgtttcactgatatgtatggtccagaaaaattacttaattctcaaaaatatgttgcattctcatattgtgttagggaaaattccataagtagtctatttttttttttcttttgctgactgttaacatccaaacacctgaatgaaaactgactcatttctgtattggtgtttaaaaatattgatttgcagatgttcacagaacacttgcattttttgattcacattgctaaatcaaatgtaaaggcaaatatgtatatttaataaatgagaagtatttttttattactgaaatttattctcaaagcaaatgtattttgtagatgtttcatttgggagattttgctttgccttaaaacatacaaaataaacctgtcttgtggtctgcccacctcaaaacctctgttaacttgacatgtagaaggagttcagaattctttgataatgtgtggttttcacttttgtttggattaaacaaaaataaaattagagtccatagcactttgtaaactaatgtgaagtttcttgttgaatcataaaagctacctgtatgtactttataatttaatgttctgttagtaaaaattgtcagcattttatctttttctcttctcattacattttagtctccaatctttcccactctcagcagtcacagttttgcagagcaaaacatttttagaaactgaatatgtgtgagttctatataaaatgaatgtgttagtaacatccatctgctgatcaaggaggcattggatctggtactagaaggtgaaattgattgtagctatcaaagcattttatcaatgtaagtcaagaaaaaagaagaaaactgtgaacctctgatatttttaacataaaaactgttcccaatgagtgttctcttgctgattttgtgttaatgttattgtctatgatttttaagctaatgctaatataaaatctaaaatttcaa

SEQ ID NO: 132473 - DNA, 1090 bp, Homo sapiens
ttgaggccagcctgggcaatacagtgagaacctgtctttacaaaaaaaaaaaaaaaaaaaaaaatgagccgtgcatggtggagtgcacttgtagtcctagctactagggagacttaggtgggataattgcttgatcccaggagtttgaggctacagtgagctaagatcatgccactgcactccaccccaggtgacagagtgagaccctgtctcaaaaaaaaaaaaaaaaaaaaaaaaaatatatatatatatatatatatatatatatatatatatatatatataaaataaaggtttgtggacacatgttacccatttagagaataatttatttttgaatgtgtatgatacctaagtgatatgcatatatataattaagacattttaaatctcttcagatatttcttcataagatacatgtatctatagatagctatatacaaaactacttacaaataataaatagacattgttttatacagttctttccaaagaaatgcaggatttcttatcctagtccttcctccccgagtccagttatttacatatttttgtctttaagtgttagattgcttgtttctgctgcctattgttggtagttttgtcttttacacatttgctgttagatttagttattttgaaatgttgaacttgaaatgtaatgaaaaggacacatcagaatttatcatcagggaagatatcttttatgttgagcagctgctatctgatcttgacagactgtcctcttagaggactgttgaagtccattctagtcattttgtaacttcataactgcagaaagaaatgatgcaaggactgtttagtggactgagatggctgagcaggttcttggcctgaattatccagaggagataggtggatctagcttcagaggaagtctacaccccattcccttctgcttacaatgtacccatgatatgtgtttagcacagtaatactgtaacaggacatcacatggaaaaatcaaagcagctggctcactgtatttaactgaaaagaatgcctacagattggatatttaatagggaaaattaaggcactttaataacaaacttcattatgtgaaact

SEQ ID NO: 132474 - DNA, 1193 bp, Homo sapiens
tggcgtaatctctgctcactgcaagctcctcctcccaggttcacgccattctcctgcctcagcctcccgagtagctgggactacaggcgcccgccaccacgcctggctaattttttgtattttgagtagagacggggtttcaccgtgttagccaggatggtctcgatctcctgaactcgtgatccactcctttttaaagtgagtctagtctgttgatcttcataaataggagggttttcctccagcttggacattaaaaataatttttaaaaagatctttgtggctaactggaaaatcttctggaattatctaatgcttcattcatttccctccatttctgttttttttttttgtatttatactctgcatatttagaaatcttaaattcaaatacatttagttaaaatgagttgacgaagactccagtgatgttttaataccctaagattttgtgattccttgggcctggaatggatcttagaaaattaccttgccctcatgagcctgtaaaccgtgttgtttcccctcagtcttgctctgtccagtacagtagcccctcgccacacatggctgcggagcacccggaatggcttacagcacatgtgggaatggtgctgaatgctgaggaagcattcactcatacgtgctgcacttcttaaaggcctcccaatagcctgctttgcggagttctggcttttacttgctgtctactatgatcacctgatttgtgcttcacatacatatctgtgaagtttgctttttctatttaaagtgcccttaaactttcatttgatcgtgtttatctgcagatggtcagtgtcattggcatatttgaacattattctgccctccctccgccaaactccttatgtactagattaagaaattttatttttgagatgatgattttaatttgattttacagacattcttttttacaaagtacagttgttagagttatagaagagtgattcacatctttgagaagatagatttcatgattaatatatatattttttgagacagagtttcgctcttgttgcccaggctggagtgcaattgcacgatctaggctcactgcaacctctgcctcccaggttcaagcaattctcctgcctcagcctcccaagtagctgggattacaggcatgtgccaccatgcccagctaattttgtatttttagtagagatgg

SEQ ID NO: 132475 - DNA, 4225 bp, Homo sapiens
ctaaaaagcaatgaaaagcctccactaactcaagacaatactgacaattcaaacataaagatacttcccagtaattccaagactattatctgcactttccctttatgcattaggagctttgcaaagttgcccacattggtggcatttaggaaaatactcaattccatctgtcggtaaactccagtaacatattgattttagtttatgaataatacattttactaacccacatcaagattaccagtgagtagcccttatacctgttcaaaatgaagggctatagaaataagtgccactgtaaagaaagcagttatagctcacccatgggccaaggcagtatgtaaaagtattccatttttctgattcttaacaattctggtaaagggaggtcaacataaatgctcttaggcaggttttaaataatctttggatttctatggccccctttaaagacattggcctaattcttatgtaattattggccaaaccattgatatttacatgtgagaattggaataagtaattttgacgtcattaagtaattctgctgcctttgttgcagttgtttcatttgagtttcttgagtgatcgatcatgtgatcatgctaaccatgtttatatgcacctaccttaaaattttccaatttaaaaaaggaagtctaattatttaggactagttcacaaaatttgtacagcccttctcacaacttcttgctatgcttgtgaatgatttggtaattaagcagaaccttgctactcaaagtatgacctttagatgaccaccaggaagcttctagaaatgcagattattgcagttccccccaaaaccccccaacagaaccagaatctgcattttactaagatctacggttatgtatattagagtttgaaagtaagtaagtagatcagagagaggaatgggagagtggtggtacctggtatataaggaaattttgactgtacaattttattgttattgtcttcaggaacaactacaaagattactccctggagtccagactacacttcagaattcaggcagctcttcacctctggagaaaaccttcctcagattgatcagaacttgaaggatggaatttttcctcaattagcatcggcatctgctatagattcaaccttatattaaagtggaaaaatgatcttgtgaataagagacaaaaaaacagtttttttggtcaatattttctatcatctgagagatttactgttggtctacataattttttttcctatggaatggcattctatattatctagaaaattcttatattttgcctcccccaaaagaatttcatattatttgaattagggggcgaagaagtcttttgaaagacttgcagatgcaatagtctaattagattatttatttttttaatgtgaaaattaatattgtttagcaaatagcttacaagttgagccaattttggatttgttgggtagttaaacttcagagatattttgttgcctgtatttaaatttcagaagataaataaatatcattgcatttaaaatagcttaacagtgaccttcagaagacttctgaaaaagacagtctgagaacatgaacacggatcgatataatgtacttcatgggttgaagagacctttctctataaaggatgatgcagtattcagttagtggttttttactcttcatttgattaaaggtggtgacgttttggagagactgattttgaatgtacttaagtctattataataacaaaattcaaaacccctgtgtatctaaagggaaggaagtgtcatattttaggaatttttcttaaccttagcaatgagagcctaaaatacatacatggattatttttcttctaggaagtaaatttcctgctgctttaaatgatatgtaaaatatcaataatttttacacttaagatgttggtaagacctagttttctaatctctctagcactgtgatgtctccttgtagataatctggaccttgcttagtcctttagttgggaaacagaatcagggcatagagcagaagagagcttgacactccatatggtcctggttctgctacccattagcgattagtgaggagacctttagggagtccactgtgccctgtgtgtcaccacattttcttctgtgaaatcaagattaaagaacagatgactttcaaggtctttttcagttttataactgtgagtctatgtattaggtatttattttcaacaaatgactttaaaatgtcgaatgcaaaccattcccacttggagtgttttatttttcaatcatcatcattgcccccaactccccacatgtatgtgttgtggcatccagagtgagaaaagacaatttatgagttgatgaatctgggccttatttctatttccattttgaagaataacttgtcatagaagcctctgcagtttaacagaaggagccacatattgggagtcacgagttcatctctgtgggttaatagttccatgacacggagtacgtagctcagcttttcaggggttcagttgccccactatggatagcggtgtggtatttggtacttgtgagggctcaattagataaaacatatgatagctttttgtaaactgtaaaaggctatacaaaagtatgaattattataataattatggttttttatgtctggattacagtatcaacacaaaagtattggctgatactgtggtttgtgttgtaaaatgaaagaagtgtagaaattcaaataccttactgtgtattcatgtgtttgatgttgacagtaggctacccaggttatatgaacctgctcctgccgttccctgccacatggacctgtatcaagcagtgtgtggcttgttttcttcaaggtactgattcttgaccaacactgaggatgtatatccaatgaaagatagatatcaatggcggtagatatcaatgtgttattagtaatacaactttaggtacagacaaaatagaaaataaaattaactgtcattataattagtagtggaaaatacattaaaaattatttgtgtatagctttggaaaaaagttttccaaaaaaagctttttggaaaaaagctcttagaagagctttggtaacattatttttgaaagcgcacactcacattgtgactgtgggtatactgagcatatattcttacattgttactgtgagaagctgcaagtcagtgctgcaagtcagtaacaaattctcttttggggataaaatgaaacagttttaagcttagagtggccatttttattttaactctgcattactaaacaaatataaaagaaattcatctccatttaaaaatcttttttgttatttatattttgttttatttttgtttcctattctttatgcagttacctgatactatggacagtatatccagtggatcttttagtactgtaatatcaaaatgctacaaatatttatgtttcctgctatgttcaagatattgtagtggcaccaacttcttgggcatcagctaatattgcattttggagtcattagggtgttctgtgaagaatgaatactgaagtgacagttttatctagttttttgaggggcatttatgatggggttgggttgccattgtgtctgacagtgcaattcatgtagttcctggcataattgccttttttttttccttaatggagaggcagggttctgattggtgctgtataaatttaagtaactttgtgctttgtaggaatggtgacaaggaaggcatgatttccccctgacaaggaatgaaaggtgaactgtatcagctcttatctggacatatatgttaatgttttctatgctccctgatacaagaagtttccaagttatataggaaaattaagtccattgatcctgtctttatcctcagagggcagaaatgagacaagtggataaaggctgtaggaagctgaattccagattaatcagtgccgaggaagatttttcattatcggaaaacccaacagtctaaaatcaataaccagttcttctgcaaaggggtgagtttaagcagggctaatgtgactgtcatttctgcctgtcctgcaagcttagactagttgaactttgaggtcactctatgattcttttattagggcttcaaatcagcagggagtgtgtaaagaaaaaatgctccccccctaccatttcaaataaaagtgaatgttttctctttcaaagctactattagaggtagttgtgatagacactaacaa

SEQ ID NO: 132476 - DNA, 1029 bp, Homo sapiens
actttttcaattctagctgtttttggcacttgagggttttttcttatgttctggtgagctaagctatgcatttgaaatggtgttagttgtattttttttcattgcttttacatgttttataaccagagagttctcctaatagtgctgaaaacagaagtgttgaccatttctttattggccttttaaagtattataagactttaaaatacaaagggagttgaaccttagtttaaaaataatacaactttcttatttctaaatggagtcattttctgaacacatttgtgttcagaaagatgatcttgccatttctagggttaatctttaaagatccgtatgcgctgatttacttaagagacagcgatcaaccatcagtgctgggtttacattaaggaataaaagattaatataggaaaagaacattatttattgccatagtttaatgagttccataactatacaatggccgcctttctatgataatagacttagtgctgcacatgttttctgaagaatgggaataatatatatttagaaaaatgtgtatttcttgttctgttaagatttacttgattttcctctgctctttcagtgaaaagctactgaagtatgaccactacctagtgccgttcactctatttgaattggcatctttgtataaaagccagggggaaattgacaaggccataaagttcctagaaactgcaaggtaagtgttgaaggcagcttttccttgattgttatggagtcagaaatgtcagtactgctctaacaacagcagtaacattatatacttaacaattaacaatgtcaaattagtaataatgctacttttgctaacttctggttgatttatgctcatggcttttgctgtaattgtgctgtttccaaccctcttactgcctcaccctgtgactgtttacagatatgattatgggcatctatttgaaagatttctaacttattttattctatatcaggggttggccagctttttgtgtaaatggctagatagtaaatatttttagc

SEQ ID NO: 132477 - DNA, 1007 bp, Homo sapiens
tgtatataattgagttttgttctggttttattccccctcagtagcattgatgatgatgtcctgctccattactaaccatagagttgaatcagggtactgatgcctggcccttttctctgtatcacaaatgcagtatttacaggggccagatatgtaaccttacttaataaggccggctgagtggtggcaggaataggattggtaggctctataggtcagggtgttttctctgaagagtgtagccacactcctcagctctatttgattattgctttgcacagtgtgggcccaatagcaataatccctaccatttttcacgagaagcctggaatctggatattatgtaaaatcacctgattttaaaatattggctcaaattttttgaaaatattctgcaagccaaaacaatcacagctatagactgctggtggacatcctgtgctctgtgtcatgtgcctttccatccgtggccacctgatccccttcttcctgacagtattgatgggaatataggaggacttgtgcccctgtaagaataaagagaaaatatctacttcccaaatgtactgtctttagtaatattctgtaattagtaaacatgttaaagaaatatctattgaattctattttattagtgtttctataaggattaaaaggatgatcaaaaggatgacctattgtgctgtttttttgtatgtgaatctcatagtgaattgtttgctcatgtgctttataattgtggattgtgaactcaccttcattggagttttttcttgagattcccatgaggctatactgaagaagagttgctctacagtgattttgcattttatttctgtcaggtaccctaaaggttttttctgcccagggcctctttcatgttaatttcattgcttacttcttggatcatttagacaatgtaaatttgaattgcacattcaatgtgggcaggcctattggttattgatttcctaaggaattcttttttcttctcattgaaagtgctg

SEQ ID NO: 132478 - DNA, 1008 bp, Homo sapiens
tgcccagttcttttcatttaaaataatttcattgtattttatttagtgaggcataacaaatgctaaaaagttttccttatttgtaaatgatccctctgaaactttgttctttctcttaattaagatcttaaggccgggcacggtggctcacgcctgtaatcccagcactctgggaggccgaggtgggtggatcatgaggtcaggagatcgagaccatcctggctaacacggtgaaaccccatctctactaaaaatacaaaaaattagccgggcgtggtggtgggcacctgtagtcccagctactcgggaggctgaggcaggagaatggcgtgaacccgggagacggagcttgcagtgagccgagattgcgccactgcactccagcctgggtgagagagcgagagtccgtctcaaaaaaaaaaaaaaaaaagatcttaaaaagtatttttctttgtgtgttttctttgtatgttttttgttttaagattttaacagcttctctgtggatgatgagtgcttagtgaagttacttaaaggatgttgcctcaagaacttacagcggcccttgcaagctgaactatgttacaatcatgttgtggaaaggtaagaccaaacaataaaaccagcccaagtgcaaattgtggtttctggggaattgctgtgagaaagtgatgcaaaatgcttttatctcttactgctaaactcttacttggtgttaccagaaagaaaatccagtagtgtgttgttgttgttcttcctcgtgaacaaaattatggtctgggtggaacatgactttatgtatttctacttgatgtttaaagatgacttacaaaaactgtatttatagctcaactaacaggtgtctagccaaactctggcagcatcatactgaatctctgctactcattaatttttttgttttttacatatttctttagtttttcttttcttttctttttttttaagagatgggagactttccttgttgtccagactggagtgcaagta

SEQ ID NO: 132479 - DNA, 1904 bp, Homo sapiens
attagagccttagctccatgcctgattcatttttattaagtgatttgcactgggaaggtttttctgtctcacagaactctacagaaaattttctagactatcatctttctttgccttaatacttagataccagtgtatacgtaagtgtatcctgctttgactgttaagaaccatagggaaggttaactccctgcacttctttctccaggtctatggaagtagaatgtacaggaaattggcttgaaatgttagtactgggatttttttttttttttttgtacctaggaattttaccaaaagcctgtttttcataaagtctcagatatgagcttgccctcttctgataaaaagattttatcaataaaaggaatttttaaaagatcatcatcaatttaaaaaagattctgttattgaattgaactcttgctctattagcagcaataaattgttacatgtaaaattgaaggtagagtgtcatgatcttagttttcggtgccataagataaagatacctttgctgccattctacttgagtgtgtcgtcctcatttccactacctcctgctaagaggcttttcaagctatatttttatcatatcttaaaatttatttccaagaagatactaattaccctgcttacttcatacccttcaaaatacgaactgcactatcaggaacattagaaaaatattttcaagcaaaagcacatttgcttttgatccaaaaaaattctcatctggtagcccattaaatataatctgtaatgagaaatcattagtttacattttaggagctgtcattcagccatatggcttttaaatgaatacgttttctgcatattggattacattactggaccgtcacatgtttctaattgtatgaaagatcctaagcccagtgaaatattccagtgtttatatccagtgatattcttggaaacattttatgtaaacaactggcagacatttaaaaatatttttctttacttaaaagtaacaacaaaagtttacattaaacagaattattattcatagtatcggtttaaaatatttatttctgtatctgtattctattaccttccaaaagaattaaatgcttgtagatatttaataaatatttgttatatgaatgagtttaaatttttggtaaaaatatatatactgaattgcttcacagtataaaaggcaaaagcaaaggaaaatgatctgtaaatattgtcctgaggttcctagaaaccgaagcaaaacacatgaacattgtttggggatcataaaggacattgaataacctcatataactgcaaatggttttcatttttcctcattaggaaatgatgtatgtctggaatggtttttcaatagtgagcaaaagaaaagacctttctgaaaatctgttagtaactgttgaaaaagctgaggcagctttacaaagtcaaagtaagtatacacagtaagcaccgaggagcctttgtctctgctccatgactgctctcctgtcttttccctgtgcacatctgccaacattaatttgtgtacatcccaaggacaaagagcttgagctgcaggggtctgggtgattgcagtcaaatgcagggaggaatgatacacactgcaactgcatgaaccttggaaacagcttactaagggaaaaaggccaggccagccataaaagaccacatattatatgattccctttacacgatactcagaatagggaaatctataaagacagacagcagatgagtggttgcctagggatggagtatggaagttaggagttatgatagctttctggggagggaggtgatgacagtgttctacagttgactgtggtgatggctgtacaactctgtgaatatcctaaaaaccattgaatggttactctcagtgggtgaattgtatggca

SEQ ID NO: 132480 - DNA, 1049 bp, Homo sapiens
gagacactgtagtttaaaatccatagctccatattttgcccggaattaacctaacataagcttgactcatattggaggcatattatttcatgttattttttctttcagtgatgtaattgagtattgccttgaattctttctcagcaacttgtttgatgcatccataaaattatgcataagaaagtgctcccaggaacatgtagtctccccatcctactgtcatttttacctgcttatgaatttcataattggaattctgtagaattttaaaaggaagtttctaaacatggtacacatcctaagctgattatttcccaaacaacctgtgcttgggaaacattttcttaaattatacgttaattgttggctgtcttttgagccatattattttatagatctgtgtaatacttgcaaataggaataggccatataccagtgtaccctcttctctctccctgagtatccacaacgtaagtaaatactttggactctttcctgcttactcgtagaaatcgccagttgtatacctagatttcctggactgtgtttgatagatttaagacattagctaagttgactggaaagaaatatgtgtcagtcagtggttctcaatcttgagtgtgcctcagaatcacctggagggcttatcaaaatctagattgctcggccccggccctggagttgctgattcagtaggtctagagtagggcctgaaaattggcatttcaaataggttcccaggtgatgctgctgctgctgctggtggtctgtgaagttcactgtgaaaaccacaggtacaaataatgtatgtgttgccatgacctttctctggggctgggctggggttcttcacagacaggtggacagcttgaagcagagaattgccgggaaatctatccctactgagaagtttgctgtgaggaaggctcggcgttactccgcctccttacctgcacctgtgaagctcatcttacctgccctggtatctgcttttattttcttttcatgtactagaaataaattacctactcacagcagcagggagcata

SEQ ID NO: 132481 - DNA, 1781 bp, Homo sapiens
atatgattttccagtcttgttctctttctaaaaatgcatttaattcccataggagttgggcctcctgcagttacgtgaaggtgcttcaggaaggagcatgaggtctgcactgtgctgcttaaccatcttagcttttcatacttacatctccctaatacttggtaagatctggattagattgtttcattgaacattgattgtcttggccagacatggtgtgttacacctgtaatcccaactacttgggaggctgaggtgggaggatcagttgaacccaggagtttgaggctgcggtgagctatgatcacgtcactgcactggatccagcctgggccacagagcgagatcctgtctctaaattaaaaaaaacaaaacaagacaaaacataaagttgattatttttaatctgagtaagtaaaaatttagaaagatcagcaagagctagtagttcatatctgtttacttttttttttgaataaaggtagaaaatagtgtcctttgtcatagtgacatttagcagaaggagtagggtagtttctttcattaaataattttcatctgttctcagctaaaatttctatattaaggtgatctattttatcatatatgagatttttttctttgcagaaaatgaaattttgggctaaataagttaatattgctgttaaaaccagaaattccaattaggaatctgagacagccacctgcattcttaagaattagtgtgtcctagagctttcttaaactaaagttataggtgagactggtctttattttattccccagatataaaaatgatgaaataatagttttcatcttttccatgagtaggtctttactgtatgttaatgaaatttggagagctggttataaatatccccatgtcttatgaagactgagtcttttcctgttaaatttctaggtacaggagaagtgaatgttgcggaagcagagcgtctcctggcacccttcctccagcagtttccaaatgtacgctcagtatttcaaagtgtatgtttcaaccataattaatcagccagtgttgactgttgaacagtgtgttttcttccttgctctgcagggctcactcgtgttgttttatcatgcccgaatagagttgctgaaagggaatcttgaagaggtaatttattaggtgggaattatttgggggagttgtctgtatggcgactcctacatgagtcgctgtgacctacttattcaacaaaagtaaacttggctatatggactagacaaaaataaagaaaaaaatatataagtaaaaagccaaaacttttaacttgtatatacattctattatataaaatctatgcagtggattactgaatatagtctacatttatacatagagtacattaagcactttagggtaatatataccaaataacaagctcagggattttcaagaaactgtgactgttaccaatttctgcattacacactgactttggaatctagcccctgtgtgacatgcaggtctactacgtgtgggctccgtatcaaaggacccctcaaaaaacgaattccctcaaaaacgaagcgtcgaggtcagaagtagaaaagtaaggagccatttatgtatatacattcacaaaccattttttccacacaaatgggatcaaaatgtatttttctgtgatttttttttcactgtttacaatatgtcttggatctctttccagatcagtatgcctaaatgtctcctattctttttgatggctgggtttcatttcatgggatggatatactatacctattaaagt

SEQ ID NO: 132482 - DNA, 1007 bp, Homo sapiens
tggtctcgaactcctgacctcgtgatccacccgtcttggcctcccaaagcgctgggattacaggcatgagccactgcgcctggccctttgtgctatttttatgatgtatagcagatttacatatattttaaaccctacaatgcggtgtcagactttctctttaatcagttatatgttgtagtcttctctctttacccatattcttaccatttttcatattcttattcaaaatggtaaatatatttcctgtttactttcagactaaagaacttcctttagcatttcttagagggtgtcagctttcaacaaattctgttttcatttatcttaaaatatatttactttttactttttcttttcaagcttatttttgctaactatagtattctgagtcgatgggttttttttccttctttcagccctttaaaactggcgtcctattgtattaaagcctgtgttgttcagtttttcatttgtattattgttcccctatatataatgtgtcttttcttctggcttttttgaagattgactagtttgtatctttgggtctcagtagtttgactatgatgtgcctaagtgtggttttgagaaatttgtggtcataatttttcaaactttttttttctgccccattcttactttcttctctcctgagactcctacttttttcccttcattttccactgtgtaaaaatatgttttaaatgtatattttgatttttccacaatttgtaatagttacttgtgggaaagttaatctgacataagctaccctaccattactggtagcagaaccaaaatttagtattttaagaggtactttcactgaaaatcctttcacaaaactgtgtttcattcaaaatcctggaagggggtggtagatcttgggtacctgacatgctgttgtatagatttctttgtgaaatatttttagaaggtataaacgaatgttaaattcaatgctaattgctgttttagtcatcaaaacctaaaaatactaaagg

SEQ ID NO: 132483 - DNA, 1061 bp, Homo sapiens
cctagaaatgtgtgtgagtaaaattcgcaacattaaaaagactctgactgctaaagtactctgtgaaagaaggaccattgtcccatttactgggtgtaatgtactggaaggtttggccttagagcagattgttaaagtcatccattttacattctgttaaacccagaagaaaattgctcagtagatgtcaatgtttattaaaataatttggaccgcatatggcccctaattggtgaggattacctccttagtaatataaaataatcgaaggattttacaagtattttctttttgttgtcctctaatgtggaagaaaaattaccccaaaaacttttaaatgtaaagcaagagtatgtgttaatttcaaaattatgtcctcaaaatacttttttttgtttgtttgtttttgtttttctaatcacacaaacacacaactgtggggacaatttaaaattttttgctaaataatctaattttttaactgaattattttcaggatgaaaatatgatcaacttcatcaaaggtggactcaaaattagaacaagttaccaaatatataagtaagttaaaaagtaagatgtggtttgtaaataattttgtgctgtgtactcctttgttcttcacagttctcctaaattaagtttgactaggattttttttttttttttttttttttttttttttttgagacggagtctcactctgtcacccaggttggagtgcagtggcgcaatctcggctcactgcaagctccgcctctcaggttcacgccattctcctgcctcatcctcccgagtagctgggactacaggcgcccgccaccacgcccggctaattttttgtatttttagtagagatggggtttcactgtgttagtcaggatggtctcgatctcctgacctcgtgatccgcccgcctcagcctcccaaagtgctgggattacacgcgtgagccaccgcgcctggcctgactaggattttttatttggtgttggtaaaaatgaacttaattttttgttgagtgtgtattcagtgttataggacaacagaatttaagttta

SEQ ID NO: 132484 - DNA, 2495 bp, Homo sapiens
aactttaatcaggaacttcagataatgggattagactagatacaaggtctgacaactactttggtcatggctcttgtgaccagcctaacttattccaaaatcttgtttgctcttggcctttggctggcgaggagagggattattttatataagcctttatttttgaaaaaatatatcagaatctctctgtcaaaaaatacatttccagcggcctttattttagcacttatttcagagccaaaggccgtgtgctgcccctttttcaacagaaaacagtttgcttgcaatctgcctgcaggctgccctcttgtgttgaaatagggaaatgcatattgtccccttcaacctggaacattttgttctgcctgtgtgggtttacattggaaagtccttggtacttgagtttttaagaggttacttttcaccacccatataatttcagtgattatggtgaaggaataaaggttactgtgcaagtcaggacatgcatttactaggatttcttatgatcagtatttccattgaattaaaatgtctgaattccctgtgttcttcccagggctaaggagagtatgtaccatgccttgggctacagtaccattgtggtgttgcaggctgtcctgaccttcgagcaacaggacatccagaacggcatttctgccatgaaggacgctttacaaacctgccaaaagtatgacgagtcattaaatacttaagatgtgactgcaaacttttatgcctgtgtgacaaaaataatgtcatttgcctgaccaaaagctctgtgtttgaaattggccacagttacagaaaagaaattcagcctcgaagctgaaggattcccatttggcatctacatattccacttttctttttgatagcctggggtctgagctacagagatctgggggggatttcggggggatttcagtgggattagcagcaagcatctctcaatgtagatgacattaggtactgcatgccaaaccaagccacacaaggaacattcttgttttaagtgggagatgcaaattcatgagggaatgttttatttgtttaagaaggacctgtttttgaacacttttgtttggtgaaaatgagatagatttttagttttattttaagctttactttgtgtgtataggaagaccctatcaaaatttttttcaaggggtaagttattttgatatcttttaaaaaatgataggtgtttcacagtatggaagatgcttggtttgtggacatttaggaatattcaagaatccaggaatggctggctgcagcaccctgatcagatggatgggaggaaatgacccctgttgctgtcaattgcttgatgtgccccccataggactagggcagaaggttcatgatcagaaggttaacatgggtgaaattacatcctgatgtaattgtgttgtaagctcctcaaatgaagagagcttccaaatattgcactttaacttcatttttaacctgtggagaattttaccacaaatactgattttagttatagggataagggaaggtactttggaggttagttttcattggtgtgtgtgggtttccccacgtggtgttcagtagcacagactgagttcccacaaatggctagccagtgctgcatgtagagtgttggaaaaggatgatctgtgtcctatagacttcagggtttagagtttcagctttttgactctttggtgtgatagtgactgaaatgaacgtcaaatgaaaatgagctcagcctgattttttttttctattttctatctccctttttatttattcaatgtagatacaggaaaaaatacacagttgtagaatctttctcaagtcttctttctagaggatccctggagcaactgagtgaaggtaaaagtcatttaaaagatcacttttttccttgattttaatagttaaatgatcatctcataaaattccatcctgaagtatataaagtaaatggaatgtctttttctcttccctatcatactcaccctctggaagaaatcattgttaatagttcattttgaagccttttctgtgtacatactcaaatacataaataaggtacacataaggtttttgttgttgctcatggattgttcattttttttttgcaagcatagaatcacataataggtgttgtcctacaatgtgaatttgacattgacacttccccagatcgttacatgtgagtgtttaacagctgtgtggtattccataggattgatatactgtactttacttggcttttctctatggtttttattttttcactgatatgaataatggtgtcctagaatccttatacatatggattcatgcattttaaaaagttatttcataagatagattcctaaaagtggaagaaccaggactgacagtttgaaaacttacaatatttataggtattcccagtttttttctacatataggtcagtttatattcttagcattcatctttgagagtttcagttttccacaagctattaaac

SEQ ID NO: 132485 - DNA, 1057 bp, Homo sapiens
gaggacatttggcagatgttataacaggttcaaaggagaaatcaaaacagaacaaatttctgtgaagtaaagtactgttgaaattaatatgcaaattcaggaaaactaacttattccacggtcggggagggaagttagttgaacctctactggccaggacaaaattaacatgcctatagacaacagttattttgcactgctattagttacctacgatttacagagttgtaatttccctgagaatcagaatctaattacctgtagaggtctcctctagagtctcaacagtgcatggttttccaatgaagcacatttttttcctatgtataaccagcctgtcctgtctccagaatccacacacagacacacacacagacacacacacacagacacacacacacacacacacacacacacacactcccttcggacaacttgctgatcgtaaagctatagaaattctctgtgcttttttcttgatctttagttcatcatcaaccaaggtggatctcaagagtggcctcgaagaatgtgctgtggcattgaacttatttctaagcaacaaatttacagacgccttagaattgcttcgcccctggtaatttactttgtctcttttagataaaatatctttcagatgtttctgatgattctttgatgtcatgcttgtaaattaatttagctgttcccatctgaatattgataagctaatttagttcagacctctttactttggtcacttttaaaattcaatttagaaatctgagttttcaaatataattaatagaaaatttctgattgttttgcatattttaatctctcttgttcagatattgtcatcttataagtagttttataaggcttcaattttgctttcttcagtgaaatgtttttatgtttgttccttttaaatattattgagaaaattttcctttgaaatggggaggggaaaaaccagaatatgctgatctcaatgctattaagaaatttaagataagaagactattattggggttctctatttgttcgaaaaacaagcaatttaatttcaattaat

SEQ ID NO: 132486 - DNA, 1170 bp, Homo sapiens
aaataattaggcaagtgagtaaaggggcttattaacagtagtttgtaatgccaaaactttgggagtaacctacatgcctgaaaatgagggacaggtaacaaattatcattatttccagtcagcagcatgttgcagatgctatgataaagcaactctggatttattgagaagaaaagattcagaataattcctatatgtaatccattatactgtataccataacccattataataagtatctttaataaagttttattaaaatatgtatagatttacttgggaaaaaacctggacggatatatacaagatacaatcctatctttgggtggagacctgtggagtaatttcagttaacttattttttgtgtactagaatgaaaaaataaagttattagggctgtatttcaggaatgtttgacacataacagtagatttttgttacttgatttttaaaattgataagaaatggaggtaagatgtataaaaataattggaagacttatgttgtgtaattgcactggtgtagacttttctcacaggacaaagaaataaaaaaccttgctctgcctttttaattaacagatcttctcactcagatatggcaacaagcagccttcactttgcatcatgtgatacacaacaggcgcccagacagcgcggagcgtctactgtcagcaggtcaggaagggttgtgggcattcctgggggaagaggggaggacagtcccacccttgaaggaatataatactgatatttgcatagtgcattgcgtttgacaaaccaatgaggtcaggagaggcctaggcaagtagagtgcccattttataaatcagggaaggagatacggtggctgctcagggactcagtgaataggtggcactgttacatgaaagcaaaacaaaattcaactttggggcacaactccctttcaagtcgcttttatctttaaatatttttagctattatttttattataaaataataaatcacactgccaaacattggggaaaatggaggaaaggagaaacaaccataatgatgatcacttgaacacagaattttggtgtatttccttccagtctttttcctaggcatgtgcttcttgatacagttgtaaccataatagattttttcgtcaaatattatattatgattatttctttcttacat

SEQ ID NO: 132487 - DNA, 1206 bp, Homo sapiens
gagaaacacattgagtagtgatgtattctgacttcttcatgtggagagggccaaaaataataaattatactgttcttgcatatttcttagataactattttgagttatgtgtgataaaaagggatgatcagagggtgtttccttaaattaatatttgaatattcccttcatgaatatagacttaaattactcaaaatatatgcttaacttttttcattattgttaaaatggtacattatcatttttgaaaaaattgaaaaaaaaacattgaaaagtacaaagaatctaaagattacccacgccctacaaataatactaagggttacagttttgattgaggaaggctttgtaagaagtctaagcatagattatttagggagaagtttatctagtttatctattcgccagtttctcgtttaatagaacagttatatcctttgttggtgcttgccctttggcctttttcagctgtttttccttcgtgaggaacagggccagagtggagagaaaaagttgaaagtatattcctttgattctgaatgcactggtgacaggcctggcaaaatgggattggagttggcagtaaaatgatacttggggagtatctttttatttttgggctcttcttgctttctcattgtcagcagcagcacctcctccttcctctgatcatcggccatgagaacagctctttgaggaatcatccttgggcagaatttggtctgggaagcagttttttttagtaagaaagacaaatgttgtctatgtagctaatactattaagcaatagatttccagtggtgtgtcagagtcctgcatttcataattctagtggataccattttttatttttaaagttttagatttgaaggtacatgtgcatgtctgttacatgggtatattgcataatggtggggattgagcttctagtgtactcatcacgcaaatattgaacattgtatctaaaaggtaatttttcaaccttcacctccatcctccctcccctcttttggagtaccaagtgtctgttatttccatctttatttgcatttgtacctattgtttagctttcagaagtgagaacccatggtatttgattttctgcttctgacttatttcatctaggataatggcttctagccattcaagttgccgcaaagatgatttcattcctttttgtggctacatagtattccattctgtatc

SEQ ID NO: 132488 - DNA, 1047 bp, Homo sapiens
tttcaactgttctcctttactctggaactttcatccccattgaggacagaaaagcacattaagtggtcaattaaaaattacatcatctgttcaaatttccagcagtctgttttggagtgactcaggttttctgggagatgtgggaggggtaaatgcccagttaagtaaaaacttaaactctgtatcaggcttatatcttccttcttaaaaggttttccctctctctcctccttctgacatggcgttgggtgcaggaagaggtggtgtacagatggcccctgtctggggactgctgcctggtagagggccccatcctgttgtctttgcattggcctctctccttgctgcctctgccaccaaaggatttctggactgttggtgtgcctgtggcccaagggcttggcattctccactggcattggttggcccacaggttcctgagatccagcggccactcacatttaatcgctgtctctgccctttgttacagaatcatcatgccaataagcagtcttttaaaaaaacatttttattttatgataattccaaacttacagaaaaagtgcaagaataacacagagaacttctgaatgcccttaattcagttttaacattttgccatatttgttttattattctatgtatatacattattaggtattttctgagtcatttgagaataggattttgctccagagaaggtggtctagaaggatgaaccaaaatctttctagtgaatggagctttcatattcctttcttttctctgctttcttccaattcttctttctttctttctttctttttgagatagggtcttgctctgtcacccaggttggagtgtagtgacatgatcacagctcactgcagcctcaaccgtcctgtttcaagcgatcctcccgcttcagccgcctgagtagctgggactacaggtatgcaccaccaggcctggctgatttttcgtattttttgtagagatggggtctccctatgttgcccaggctggtctcaaactcctggactcaagtgatccgcctgccttggcctt

SEQ ID NO: 132489 - DNA, 2226 bp, Homo sapiens
ggatttttctaaatgcaatggaaagctcttgaagaggtctagaaaactggaatggtgtatgcttattcaaaaacatgaagtaaaagaatgatattgttgtcatgtgaagaattgaatggagggtgtcaagcacaggagtagggagaccagtgaggtggccctttggaggtctcgtggcttgggctatggtaagagtggtagggatgtcagagaaggatgcttggaagattaagctgggttgtggtggaccccggatacctggatgaggagcttaggtttggtttttgcagctgtgagggagctgttgtgaatgtgtgagtttttgagtgagtgcatgtgtatttgtatgtgtgactgtgagattgtgtgtgagtcactgtgtctgagtgtggagtgtgtgtgtggtcttctgagtgcatatgactgtgtgcgtttctctcctgttgcagctgtgatcaggccagtggcatgaagcaaagggctatcctgtgtggcacagagtaaactgggggaaaggctggtggcagggagacgagctgagagggtggtgcaatatgtgaaatgaaggcccagaggatgctcacttggctagccatggagaaagaaaagactacatcgggcaagtcctcttatttattttactctatagttgggaagaatgagatttaggagtgaaaggtaacttcataaaagacgtcatagtctctttaaattaggccagtttgatcacttgctgagtattttaccagccttattaaaaaaaaaattaaacgtcactgaaatgcatctgcttgatttctgtaaacagaattccataagcgttaagttgattgattctactgcctgctataccttcctgccaggaccactctccccaatgcgtgtattcattttctcttttagaattcttgagaaacccattgagaattcttgagaaactcattgtattttttatttcccccaggacgttttcgaagatgccttggaaaccatctcaatgtaagtaataacataataaaaagtatgtagtaaggaaaaattgatggttgtcttacataaaaagtaaatatttcattctcattttttggagagtacggcaatggctattttcagaaaaaaaaagtcacttttctataattaaagaggatgtgattatatttaagaaaggatctatctaatactttcagatacatttctgagtattatttcttgtaacaaaataaaatatttctcaacaaagtatttgtttatagctaactcttttaatagttgttcatatttatgtcagtctcattttgtagatttttgtgtttggtttgcacttagttttattaaaagcattcactgtaagcctatatagtttttgtaataattctaaattgctaaatcatattagatcaaatggaatattacaatttacttacctgcttctccattgttagacatttaggttgtcactggcttagaaatgtagaactaagttttacatgtgtatagctttgttatattttgaattatttctaaaggttaacataacaaatgtaggattactgaattaaaagggatgaatatgtttattgttctttgtatatctctaattgccttcctgtattagttaacttcagcttctataacaaaacacaatagcctgggtggcttaatcaacaataatttattttctcacaattttggaggctagaagtctgagttaagggtgccagcatggttgggattctggtaggggctctcctcttggcttgcagactgcctccttgttgtgttcttacatggccgagagagtgagagcaaaagctctctggtgtcctttttttttgagacggagtctcgctctgtcgcccaggttggagtgcagtggcacgatctcggctcactgcaagctccgcctcccaggttcacgccattctgctgccttagcctcccaagtagctgggattacagctcccgccaccacgccaggctattttttttgtatttttagtagagacggggtttcaccatgttagccaggatggtctccatctcctgacctcgtgatctgcccctcttgtcctcccaaagtgctgggattacaggcgtgagccactgcgccctgcctgatgtcctttcttataagggtgttaatcctatcctgaggaccccactctcctgacctcatttaaatccgattgtctcccaaaggctccatatttaaattccatcacattg

SEQ ID NO: 132490 - DNA, 1008 bp, Homo sapiens
gctgtaaatatcccacacccggcttttctctcatccaaaagaggctcagcatctttgacatgaaaaagagttgttgaggaagtatagttagggatcccagccccatctcctgagtctactggttggtcccatatctgagaatttaatatcctgtgaagttgtatttattgagcctgttttaagtcggacctgttctgtgagttatctcacatccttacaatcccagtgggcggctggaatctttattgtacacaacaggaagtagaggattgaaaggctggactcacctagggtcagaggtggagccaggattcagtcccagacaggtctaacctccaagcctaaatttatgctttccgctctactacacaggctgtgtaattaaaatcacttgtgtatttatttatagtgcgtagtacttagggagtagaggcagatttgcttcctagacacttgagcacatgacatggactttgtattgtgactatgtggacacatccaggagtattttgtgcttgtgagagaagggagggctcatgtcatcaagtcatgactaccttgatgggcactggctccatgccaggcactttcccctctgatctcctttggtcctcccaacagcttcctagggtgggtgctatgggcatctctaatttacagaagataactccagagtggaagggggaaaggattttctatagggatactaaggaagaaaaaggaggagagaatgggtgaacagcaggcctgaagcacactcgtgttgtatctggccctcccatgctgaagttgataaaccacatggtgagccaggcaggtgcaattaacccactcctttcttcaagttcattataaccctgctgccaaatccaaaggacttttataggctaagtaagatgtcctactaataacctcttaaatttcttaaatttttccacatagtgacagttgaaatcaaggcacagggccctttatactagcaaactacctgctcccagaggggacttt

SEQ ID NO: 132491 - DNA, 1025 bp, Homo sapiens
accttggcttcgtcatgcccgcgctctctagcttctttccaggtgtgcccagccaccgcagagaacaggcggcaggaaagcttaggaaaccctcccagagggcgtgccagaccgggaaactttatctgggaggtgactccacccacttgggcggggctgccgcccgctgggggccgggcaagtggcccggccagcggcgcggcgtccggggaggaaatggatgctgtgctggcctgccggctccgggggcggggaaatcgagtagctgcactcaggccccgcccgagacccggagggagcgccgggccgtccccttttgccctcctttgcgctgggctgagcccagagccgagagcaggagtcggctctgagttccctgcttggtttttgggtggcagcagccagaggaggaatatggcgctcttaggcagccgagcggagctggaagcggacgaggtacgatccgatggggattgcgggcccggcccctgaagccctggacaggagtccgggagagaagagtgagcccggctaggacggccgaggccccgcccccttggtcccctctctggggtgggctggcgggcgccgggtgggggcgcccggccttggtaggtctgtccccgctggagctaggagggtccctgcggcgcgcggagcggacgcagtgccgaggttcggagcgccggccccgcgagtcgtggggatggaggacccacgtcctgccagcacttggatgggcgtgagggcgcgggaccataggacccgcagctctgagctgttccgggccggcccagcgacgcctgggctttacgaagtctgaccctgaagtcctggcactggctctctgggtgttcgtggaatcatccctcgacctgggaatctcaccttctatggaagtttcctggtggcagaaccgaaaggcttacgattgatgaaaagagggggcagcctgaggaacaatgagtagaggggtacctgccgcgacagcagggcagggctgccaggggctggggctggagggc

SEQ ID NO: 132492 - DNA, 1005 bp, Homo sapiens
tgttaataaagaaaagcaatcagggcaacagcgacgtgtacctgccattgacagacactttgacaatggaggaacctgagtaatggtgaagctgcgggagacttcatcagaggagtgttaaaaccccgactaactggtttcttttggggaccttccgggtattctgttactgaaatatttcttaaaagtgccttatttggggatgaaaatataaaaataactttaatctctttctccatttaacagtactggctgccttcatcggccttttcattataaaatataatcacagaaatcgttgtcttaagttctggcctctctgagccgcctgctggattttatctgacttcgtaattcagtaatgtatttaggaaaacaaccctaactcgctgtgaaccagatgcagagtcgaccttaaagtattgcttttcctttttgttttagccttgataaactgaaatgccttgaggacggtgaggatccagaagtcattccggagaatactgacctggtgactttggggtatggaggacttggtttttatgacctatttatttaaacattttttcaacattatgttttgaaaagttgaaagtgcagtattgattgttgtctgtatacccaccccttaaattcagctgttcttaatatttgaccatatttactttagccgtgtgtatgggatgcctgctgtgtgttttttcattttgctatcccccattcagtaagttagacatgataatttacccgtaaatacataagcatatagcttctaaaagtatcattctcctacataattattgtggtattattatacctaagaaaaccgtaaatacataatctataatattcagtccatattcaaacttgtgtttattttttaatatttttgaatgtttgtttatagaggtaatctacttagatctggggggcaacctaaatactctgacagtgtttttcaaactatttgtggtaaaggacagttcttgtttttaaaaattttta

SEQ ID NO: 132493 - DNA, 1027 bp, Homo sapiens
ggaggcagaagttgcagtgaggagagattgagccactgcactctaacctgggcaacagagtgagtgagactctgtctaaaaataaataaataaacaaataaataagtgatgttgctgaagcttttggaatgacaagtaagttttagcagcacccatgtattaacaattatctctcctattcctaggaattaaaaccaactaagtagtcaaaaaaaatgtcaaaactgccaaagctatgtagtttgctatagattaagggagcaacatgtatcaaggaagaatcaatatctaccaactacctttggtcccttatatgcataaaacgagctctttcatttgatgtgggaaagaaaaagtaccagaaatttattttatgtcataataaagaaatgatgtacttatgttttatttttataatataataatgtgaaattattggtgaggaaaaggaaggttcagagaaagataaagcatagagatacaaatttaggcttttgccacaagtctaatttttttttggcaggaccattaaggttaacaatggtcatgtattaaatacactagcttcacagtatatcaaaataaccccagttgaagaataccgtactgatttacattagattatatataattctacccacaaatcctgtttggagggactagaagaaaccaaagagatctagttgacctagtagtgcaaagtagtcaagggaaataatgtttaagcagtcttaaaattactatttaacatggcttaacaaaattactataaatcaatgaatacattattaactatagcaaaaaagagtctgctttaatatgattatcatcaacgttcttttttcagtctatctctaaaaatcacttcctgagtcttctgaaagtttcatttattccactcattctacaaatatttgttggctccctactatgcaccacagttctaggaattggtaatatagcagtgagtgtggcagatgtaacttaaggaactttcaagtgtagctaagaagacagaaaattaaac

SEQ ID NO: 132494 - DNA, 1816 bp, Homo sapiens
ttaccaaaatgctaaatttattcctatcatgaggaactagcggtcaaacccaaattgaaggacattctataaaataactgattagagctctttgaaattgtcaagatcgtgaaagataaggagagactgaagtattttaacaaactcaaggagactaaggaaaaataacagatgccatgtgggatcctggataggaatctggaacagaaaaaaaaaaaaacgagtaaattaaaaattgtgtgaaattttaaaaaggcgtatagctaataatattgtgtaagaatttatttcctgttcttaattgtctcatgatcaagtaagatgttgacataagggaagctgaacaagagatagaagggaactttttcctgcttttgctacttaaaattagttcaaaataaaaaaacttgaatgttaaatatgtttttgaagcccgaataacaaatgttgaactttgatttttttttttcttttacatctacaacagggttagaaaaaggttcttggaacatcgggaagaaaccattacaatagatcgagcctgcagacaagaaacattcgtttatgagatggtaattaagagtctcatctttttcacccttttctcttaaaacagtaaaccgacattggctgagggttagtaatgacagtatggtagctttatactggatatgcttagttgaaaacaaactagagaaactcctttgagtctgggaactagtgagagaagaggacccttagaactcaagtgaccacatgtttgactttttcagatctctgcctttattcttgtttggttttatcttgctttcggtattaggctaaatttatgccttttcactaccctatttctggtctttttgttctgctcctgattttggtttaaccacattctcaatcctcatctattatctcttgtgtaaaactttgggaaaatttaagatgatgactcttgaggaattaggagctagtagacacgataggttcagaatcaatgtgctaggcactgtgctggcacttgatcatgcatacgggcacctattgtctctcccacttattttacttttattgtggtaaaatttacataacataaaatttaccattttgaccattttaaagtgttcaattaagtggcaataagtacattcacaatgctgtaaatcatcaccatttccagaactttttcatcatcccaaacagaaattccatacctgttaagcaataactcaccagttttccctcctgcagcccctgctaacctctattctaccttctttctctatgaatttgtctattctagatatctcatgtaagtggaatgcttttttgtccttttctgtatggcttttttttttttttttgaaacagagtctcgctgtgtcgcccaggctggagtgcagtggcgccatctcggctcactgcagtctccgcctcctgggttcaagcgattctcctgcctcagccttttaagcagctgggattataggtgcctgccaccatgcctggctcatttttgtatttttagtagagacggtttcatcatgttggccaggctggtctcgaacccttgacctcaagcaatctgcctacttcggcctcccaaagtgctgggattacagtcgtgagccacagcacccagcctatggcatattttacgtagcataatgttttataggttcatccatattgtaacgtgtattagaacttccttcctttttatggctgaatactatctattgtatgtatacaccacgttttgttctatttatccgttgatagacatttgggttcttttatcttttggctattgcgaata

SEQ ID NO: 132495 - DNA, 1031 bp, Homo sapiens
attttttgtagagatgaggttttgccactttgtctaggctgatcttgaactcctgagctcaagtgatcagcccacctcagccttccaaaggtgctgaggatataggtgtgagccattacacccagccagcaatttgagatcttaatcaaataagattagtattaactacatcccagatgctttgtaaaagcctatttattcataagtgcaacttatatatatattaatatttcaatgacaactcatcagaatttatgacacatctatttaaggaatcaagaatatatacactctggcctaggaaagagttctttctcctaagagattcctagatacccttgacttaataatgttctgtattttcatcaaagaagagctgtctctggttagttcaataacttcccaagtattctaaattagtgaacataggctaattcctccattagccacctattctgcaaaaatccctcaagaattagtagaattagaatcattatggatttacatatactttcagttgcttctagtgcagaaatcaggcatatatttcaatactatacctgtaatcctactggatcgagagattgtttgaaatttgaccttatttccaatattccttattagaacagatggcacaagattatagattgtcaactctaaaaataagacatcagataggcagcatatgcttgcatttattagacagggtctcacgctgtctcctaggctggagttcagtggtgcaatcatagctcgcttacaaccttgaattcctaggctcaagtgatctccccacctcagcctcccaagtagttgggattacagatgtgcaccaccatgcctagctaatttttttgatttttagtagagacaaggtctcactgtgttacccaggttggtctcaaactcctggcctcaagtgatcctcctgccttggcctcccaaagtgctgagattacaggcatgagccaccactcccagagtgtttatttttaatgtaagcataggaatatgactcttcaaataattaa

SEQ ID NO: 132496 - DNA, 1122 bp, Homo sapiens
cagccttttgctgggcacaatcatgacagatcacaactctgacagagcttcaaacgagtgaatgaacagcaaagtcatatgctacagtgaggtcaagttacataaaaatggaaaagtgaccaactgcttagaaaattaggtggtcactattgagctgagatggcgacactgcactccagcctgggcggcagagcgagactctgtctcaaaaaaacaaaaaacaaaaaaaaacaaaaaagaaaattaggtggtcactattagcccagaaggaaaagtctccatacaatagtttagaaacaaatgagagatgaagaaatcaaaacagagtctagcctcttctttggaaaagttccggtgataaagggaaggaatgagatagtgtagtttgatggaatcccgcaggagaagaaaaggatttactgggacatttatgaaccagctagagtaatcgctattttcttagcttgttatttccttttgttttatgggaggaaatcaccttactttgctgatgtgctcaggggcttggtcaggagtgttgctgaattcaccaccaatctggaggtcactgacacatcgaattgaatccctcagttgtgtgagtttttgactgcccaacaccagcattgtttggtatggtttgtgttctttgtgctaaaagtcaaagaataaataagtgttcatttagagacaaagcgataaaactacaaatcctgtcatgactagatcaaaattaaattgctggttttcttaattttaaattgtccccataacttgatgctctgtattttcacatccaataattatagggccaaactcatggtcaaaattgtttacatctcccctgtgatccagagccactctgaaaccacctcctttattacacaccaagccactatttcccctggtattccctcaacctcaatccacccagggccaagcaccaggctacaagggacagcccctctgccaccaaacctactggaattgttcgaactagccaatcctaaactgtttactcttccctaccttgtctttcccacagaaaccccaataaaaactgtggtctatgccttcccctctcccctttcagcctcctaaatgagaatgatgcttcttcct

SEQ ID NO: 132497 - DNA, 1042 bp, Homo sapiens
tacaaaaaaatgccagaaaaacatagctcgatgatcattgttactactggggaaacattaaagataggactttgtttaggttttagttctagtatccaacactacttactgctctgtaagtataataaaataatgatgtttatttgatttctaattgggttcctttcatgaatctcaggagaatatacacatttagatcaaacgtagtgattataacagcaatagggtaaaattgaaaatagtagcagttttttaacacatattagtgtgattttatgatatatctattttgaattaatacttagagcaatttcatcattgttaatagttgattttctctcaatacaatctgttttcttgtaggacctatacaaatcagccttcttttattttgaaggaacattttataatgataaaagatacccagaatgcagagatttgagcaggtatagtttccaaaaatcttctcaaagtctttcctatttctagttatcaaagtagtgttatctccacaaatcctattattggcctattaaggacctttgccaaggaattattgataaatcttgtcttttgcattacatacatccaaaaaaaattagccagacacagtagtcccagccactccggaggctgaggcaggagaatcttttgaggccaagagttcaaggctgtatagcatgctataatctcgcctgtgaatacccactgctttccagcctgggtaatatagcaagactctgtctctaaaaaaaaaataaataaatcaccttaacatgcattattagtctctggcctttacatataagtaatagtggcaaattaacctttcactattttttctgcctatccagcatatactattgtttgccctaggtgatggtgatatatatatattgcttaagtacataatataggaaaaatctgtaagctcattttaatgagaccatactttcattatcaatgtcttaacaattacagtatacaagtatatatattattgttgccctttttaaaaaaaaaaaatgaaaaagtctcgttc

SEQ ID NO: 132498 - DNA, 1013 bp, Homo sapiens
aaaagacaaacctaaaaataaagttgcaatgttatatataaatggataagtactatatctgaataacagctatttaatacaaaatagagatactttttaaagtattaacagatttttaaccgtctaatagtaaagtatttcttaaagattttccaaaataatgaacaatagaggatgcaaatggatggaaagagttggtatttgcatggaaagaagacagtatttttgctgctcccaagccaagttgcaatggttattacttttactcctcttatttttaaaaaaactatctctggttttgtactctgaaataaagaaaaaaaaaggtaacaaaatgtcttaagtgctgtcacctaccttatgtcagtaatgacaatgacatgttcacagtctccctgatgacagtataagtaaggaaaacccagtttaatacacaagtcattgaaggtgaaatcttccattctagcagtctgaaactttccatagcctctatcatgggactctgaccactcaatgatagttctgaggggggaaaaggcaaggatatatcatttttccacaaaaacttaaaaactacagaaaacagtttgtgattgcagtaattcacattaacctagctcacccaactaactggacagttgccatcttgagatgaagaccaaaatgtttgacacatgttgagattaggaacgctgaattttcataagggatcagttttctgcaggttacatgatgtgcatcactttagcttaaatgcaaaatgtgtaacaatgccactcattgtgttttgaaaaatatttttcacaaaatgttagtatgtaatgagattaatatttcaaatacttcttagtttcaatgtttaatattataaatagtgatagttataacccacataagcagtagctcattggggtcttcaattatttatagtataaagaaatgcaaggctgggcatggtggctcacacctgtaatcccagcacttcgggaggccgaggtgggcggatcgcttga

SEQ ID NO: 132499 - DNA, 1031 bp, Homo sapiens
caccatgcccagccttgcatttctttatactataaataattgaagaccccaatgagctactgcttatgtgggttataactatcactatttataatattaaacattgaaactaagaagtatttgaaatattaatctcattacatactaacattttgtgaaaaatatttttcaaaacacaatgagtggcattgttacacattttgcatttaagctaaagtgatgcacatcatgtaacctgcagaaaactgatcccttatgaaaattcagcgttcctaatctcaacatgtgtcaaacattttggtcttcatctcaagatggcaactgtccagttagttgggtgagctaggttaatgtgaattactgcaatcacaaactgttttctgtagtttttaagtttttgtggaaaaatgatatatccttgccttttcccccctcagaactatcattgagtggtcagagtcccatgatagaggctatggaaagtttcagactgctagaatggaagatttcaccttcaatgacttgtgtattaaactgggttttccttacttatactgtcatcagggagactgtgaacatgtcattgtcattactgacataaggtaggtgacagcacttaagacattttgttacctttttttttctttatttcagagtacaaaaccagagatagtttttttaaaaataagaggagtaaaagtaataaccattgcaacttggcttgggagcagcaaaaatactgtcttctttccatgcaaataccaactctttccatccatttgcatcctctattgttcattattttggaaaatctttaagaaatactttactattagacggttaaaaatctgttaatactttaaaaagtatctctattttgtattaaatagctgttattcagatatagtacttatccatttatatataacattgcaactttatttttaggtttgtctttttgccaaaatttgaagaagataaaagggaattggaggaagagtaattctaatatttgacaaatgtgaagtctt

SEQ ID NO: 132500 - DNA, 1257 bp, Homo sapiens
tggcccaggtcttccattcttctggtccccttactatagtaattctagttactctcatcttattctgaggaaaaaaaaaaaaaccaaaactttttaaacttattttttgacatagggtcttactgtgtcacccaggctggagtacagtggcgtgatcttggctcactggagccctgacctccctaggctcaggtgatcctcccacctcagcctaccgagtagctgagacatggtggcacaggccaccatggcgggctaatttttttatttcttgtagatacagggtttcactatgttgcgcagaatagtctcgaactcctgacctcaagtgatccatccgccttggcctcccagagtgctgcgattacaggcatgaaccacagcgcccagcaaaataaactttctttattttcaggtctagaccatcagatagatttattcaaatattttctgggaacctttatgggtagaacatttaatactgtttagaagacttttaggaatactatagatttcaaatgcatcatttaaaataaataaattccactttctctctcctaggttgtatttaaatttgactgaatatctggatggctaagaacagacatttatcttacacatggaaaactgacgaaacctataagcctatgtgtttgacagtgaagtatgttttatggacttaaatgccacaaacagttaagtccattggcttggagatgacaagcacgagtttctggtatgtctagtgttctcattcactgattcagtcagtacacagataatcagtatagagaacttaagaggctggcttatgttatacctaaatttttactttcttgtatacaacaatgctaaaattgagcagattgataactgccagcaaaccatagatttaagataaatgaatgatttacccaaccctaaaattccatgggtaaaaattttgattcctttattttcaatactgcgttccttataggtcttacatgcatatgcaaggatattttatcttattcattcatttcatactctcaaaacaccaaacttcaaaaagttaattattgtcataatgcattattccatgtgtggtgtcaatacattttagcggacaaagaagaaacatgccagttaaaacatttctgctactgggattctttattaattatttgagaatgttattttgctagttcttaaggttaagtttttcatcaaagactcaggtacctattattgttccctggtgaaactgaggagaaa

SEQ ID NO: 132501 - DNA, 1027 bp, Homo sapiens
aatcaaccaggttactcccacagtttgcccgtgtgttatgtatcagttatacaggtatcccaccaagttcaagtcaaaagaaattcctaactttgtatatttctggagctataaaacccctgatttaagacagcttttctcttttttcgaggcagcttttctttatgcttatttcaatcaaatgtaacacgcctgtcaaattacatgtaacacattagctaatgaagataggcaactgaaaatgttgtcatgaacatgtcaacctgcttggtagttgaatttgacttttatataatagtggatacacatgcacagaagttactagagaagcaatagctatttctttaaacattcttcaggcatcagtaccatttaaggacaattagacattctagttttactaggagaaaggtcagtcatctctaacattgtgttgcagaattacacgacacaaacataaacacatttctgcctattaaaccagtttctttgtttctaaagagtttaatgatacaggtttgctatttccattagagcatcctttttctggccaatcggacaaaatagagttagcaaagccctcacagcaccctatgaaaaatctctgctcttatacaggattagatgcagacctcatcttgacctaacatctgtaaccaggtaagtgtatgagtaggaacacagacagcagtactgtatcagcaaaatctatcatattatttgaaatcactggatataatattaattataaagtgtatggttctctccagttgttcacataccaaatcccagtcagttctcagattcagatagatgtatctgcaatttctccaagcagctaagaaaaccttcaatggtcagttctgcttggtcatggtatgactctttttttttttttttttttttttttttgagatggagtcttgctctgtctcccaggctggagtgcagtggggcaatctcagctcactgcaacctctgcctcccgggttcaagcaattctcctgcctcagcctcccgaggagct

SEQ ID NO: 132502 - DNA, 1017 bp, Homo sapiens
tttggtccttatacagttttaacttacttagatttattctagttaagccataagttcaacgtgtaaacttgttttcattaaagaatttttctatcaaactctgctagtaaattactttcttgctatttacaagagtaagtgatggaattctgggtttgctgccaaggaaataatttcttagttaactggtcacagaggttgtgctgttttgggaaacggggtaactaaacagtaagctcaagatgataaaaaataaaggtaatatttatcttttgttcaccctccctttcttcccatgacccaccagatctatagttttacaaagaagccacagaatattccaattctagagatagagcatcattctcataatttatgtcagcttgtacaggctgaccttgctctaactagttgatgtatgttcgcttcaagcataattgctgtttctttaatcataactctcaagaaatggtgtcataggctgatttacagataacttctcagaactcttgataattattcataagacttaagaactttcaggatcattgaaattgttcattggctcaatttgtgtgtgtggtcaaaactccacagcttgacaaggcaccaaaaggtaattttgagatagataacccccaccccaccccaccccaccccaccccacccctccaaaaagtacgtgtaatatgtatgttttaacacctcttttgggctggtatgtgtgtgtatgtacgtatgtgttttgattactggataaaagagtcatacatcagccgggcgcagtggcacgtgcctgtaatcccagctcctcgggaggctgaggcaggagaattgcttgaacccgggaggcagaggttgcagtgagctgagattgccccactgcactccagcctgggagacagagcaagactccatctcaaaaaaaaaaaaaaaaaaaaaaaaaaagagtcataccatgaccaagcagaactgaccattgaaggttttcttagctgcttggagaaattgcagata

SEQ ID NO: 132503 - DNA, 1409 bp, Homo sapiens
gaagcatcccttctaattctgaaattgagggaaatcttgttgtctatgtgtgtatcaacctctctttttattaagattttgaaatatgttggtatcacagatataaaacattctcatgttctttaaagagaattcacttttatgctagaaatgatggaaagggcttggtccatgacactttgctgagttattttgcttcatctgcatattactttgggaagaagatacaacatggtaaaataacagttttgaagaagaaaaaaataataatgactgttctaataacaagtcaagtttttcttttgtttggttggtttcagtcttttcatgggtttaaaaatataatgcagacttaatgtctttttttccttcatcaggagaaaatcctaattccagttgtacctttcccccttttcttcaggccatccagtgaagagagagagactgaaatatctctgaaggattctacactagataactaggttgacatacctggaatatagagaacacttgagaagtttgtaatggttttcatttgaaatagactgctgaaagttttaaatttttataagcataggtttgatgttgaaaacttgttttgagggagaaaatccctttgttttaaagtaaagtaaacattatcgctaagtgtacttgtgcagtattaacagctacattatacagtaaatgtgggataaaatccatttagaaaatgttaaactgcttttccagacatggttgtagcatattttcaattagtgtgtgtatgttaatgtgtaattgatagtagaacaaagttacatttttaaaactgctacttgtataaaccttgcctcttttcccaaatactgtgggttttgtgcatagtttttacaaaccttggatttaccagactgtcttttcactgtttgtgggttttgtagaagttacacatttttatggtagataaaatgttacttctatacaagtactcactccctttttatcaaaagttaattttaatctcacagtctacattgtgctacattatccagcttctttggaacaatgtgtgctctgtatggttttttttggtatgacaactaattaagcaactgacatggaactgagaattctacaaactataaaacattaatttttgaaggtaatttagttttgtggctgggcattcagtgaagtcttaggacttctttgcagacaactgactgggtatatataggaatgaatctggctttagggttaaatcatttaaggtccttttataggcaggcactagtaactaaaactgaaaactaagtaagtttatttttgaggaatgttgttaaaaatgtctttaggaagtcactaaaacttaattggaagaaaaaatcatgatgcttatacaataaatatgaataaatgttatataa

SEQ ID NO: 132504 - DNA, 1093 bp, Homo sapiens
tagcttcatcttttattttctcacatgatcttatgagtatgtaaatttaagggataattactggtcattttgcactacctctttttttttggaaacgatctttagaaacagattgtttaagtgttaagataattaacagctatgaaattactgttttgtcatgaaggatgtgaacagatgcattgaggccttggatgaacttgcttcacttcaggtcacaatgcaacaagctcagaaacacacagagatgattactacactgaaaaaagtaagtgatttcaagtcatgtggattctttgaattttgtcattacttcatttaaaaattgtttaaaaaatcaattaggaaaacaattatgatgaatgtatattgttttctcagatacggcgattcaaagttagtcaggtaatcatggaaaagtctacaatgttgtataacaagtttaagaacatgttcttggttggtgaaggagattccgtgatcacccaagtgctgaataaatctcttgctgaacaaagacagcatgaggaagcgaataaaaccaaagatcaagggaagaaagggccaaacaaaaagctagagaaggaacaaacaggtatgtggtaaaaagccaacaatttcacaccagtttttaaaccatttgccaggactgcttttaaaaatggctttcatacatagtttcactgtgtatacgccacagaaaaagtatacaaaggcaaaatggtgaaaatctgatgggcctattgaaggactagagcagtgtgcattgagaacaaaaaatcatgtcagtttatattcgacttctaaggcagaaaccattgctcatgaggcagatgactctggataaacaatttttaaaaacccatccatcacaatgcctcctaatccctagagtacccacttcctggttgctcagctgcttctgttttcttctcacctaaaaagtaaaatagcgtacagtagccttttaaattaaaacacagcctcataggtggagactacacctgccattacttgatacaggtattctgatgatgctgctgagttaccctgaacagacttcacagtattaatgccatgtcctttttttttt

SEQ ID NO: 132505 - DNA, 4877 bp, Homo sapiens
tgcttaagttgggacctttttaccctgcaaagaatatttgagttctaaaacgaccgtatttgatttcacttccgcaattccatttgtcccagtgtgtctactttttaaacataatttattcttacaaatatgtagaatttaagttccataagagccagggatctgcccatcttctatcttctaatttataccaaaaggatgttctgtgacagaattccttttatgattggatagtgaagacactctttttactttgttttagatttgcctttaaattaaaaattatagcttactgatatctaaaatactattatagttgaatgacaagtatacattgttatgttctctaaaatagcattactgaagaggacaaaagtaagaaaaaggggcaagaggaaaaacaacctaaaaagcagcctaagaaggatgaagagggccagaaggaagaagataagccaagaaaagagccggataaaaaagaggggaagaaagaagttgaatcaaaaaggaaaaatttagctaaaacaggggttacttcaacctccgattctgaagaagaaggagatgatcaagaaggtgaaaaggtataaagtttacatatataaaatggctgttctattcttagtttatatatatattttttgttttttctttgttttttttttgtttttttttttgttttttttttgtttgagatggagtctcgctgtgttgcttaggctggagtgcagtggcacaatcttggttcactgcaacctctgcctcctggattcaagtaattctccagccttagcctcctgagtagctggaagtacaggcatgtgccaccactaccggctaatttttgtatttttagtggagacaaggttttgcaatcttggtcaggctggtcttgaactcctgatctcaggtgaacctcccaccttggcctcccaaagtgccgggattacaggcaccacacctggccatttatgtatttcttaatctgcccagtttaagagcttttaatattttggaggaagtctataaatatcagtggcagttaaaatgaatttgtttacctttttgaatagacttgaattagctgtgttacaaagcatattgaaaacgtccctttattatctgttctctaaattcatctattttacaattatgatctggaaattaagtaaacagtacctttccaataaccccatctgtctagaaaaggtagatgaaataggctgtggccagtgaagacaaatgttaaaagaggtggatttatatagagatttttgttatttacccccaagaagttcttaacacccttcaggcctattgtacattttatcagtggtatgtaaatttatttggacgccatagttgttgggaacctcattaaagctgtgtatccttttgtgtagaaaaataaaattttgtgtatagccttagagatttacagattcaggtcatgcaaatcttttgtttactttcatctgatttttggctcatttcttaatcttttagaaaccaaacattttaaattggataggtcatgtagtgtgcttgtcagtactcaagtcaaatcactctgtagagaggcaaacagactgacatactatattttatccaaaggacatcactcctatagcagggcataaaacaagatgattatttcacggtcattaatcaaagttaaacttgcagagataggtgtaattcaaagactatttttaggttgctaatttgagtattcatcccttttttaaaaactagctgctgcttttcccccaagattataattccataagcactagtcactgactttatagttaaataaaaccatcctaattctcaaaacagaagagaaaaggtgggaggaactttcagactgctcacagaaggaatatgctgaaaggccaacatgagaaagaagcagcagatcgaaaacgcaagcaagaggaacaaatggaaactgagcagtaagtatttttttttttctaaattttgggttctttttaaaggctagcatggaatttttaaataatagactttcattttccagactttatgaagccttttgaagaagtgacttttcccatgtgttagaaaaatcttcaatatatgatgatgatcttatttcaggcttcattctcttctgagaggatgaaattgactgaggcagtcactctgtgaattatttttgaatttaaacgaagtgcagataggatttaattgatactggctttgcaagaagtgtactcatcctcaaccatttgtttgtataatataatacatatagatagaggggcgataatatactggtagacaaagaatgcaggaaatgcccttattcatcacaccaccaagcaggcctcaccctaaagaccagcaaaagtaacaaaagcacatttggaaacccaggaagccagtaaaagtaaatctaaaggctgacagggtgtacattattatgtatgtgcaatataaatcaaattcaaagctgttttctcttaaattttgatacttatagagacaggacttgccatggggaatttctttccccttactatataattttattactagaaggaaaagtaatagcaatgataataatgaacagacttcgtgtctttattacatttgctttcctagttacctttagactgtcacttctgagttctttctctgacatgcttttcttttctcgtgaagcgtcttacattctgactaaattttgtttttttgttgttgttttagtgaggtgatttttaaaacatgctctaggtcaataagacaaagttaatgatgagcagtaaaacaattcttgaacaattttgtactttttttctttatataatatatccgtaagccaaagtctttcttgacaagtacagcgttttactctgctttcttagtttggaggatatacaagtagttttagctccttgagggagtaatttaaataacttatctaaagctcaaaaatattattccctctaatgttagactttaagcacttctgtaaatatttaagttattctttgtcacctatcattttctattctatcttttcactgaaaagctgttggactgtttgttgcttttgactttattgtgatctcaaaattaagatataaaattagttgttactagtatatgtagcccaacccttctttagtatcttaaagttatctttatgtatttcagtttcttttgaatgtcctccaatgtaactttctcaaattctaatatttgtgttttctttccttctcctgttattacaaaactttgtacttggacagttttgctctgtaaagcatttcagatgcagcttgtgtgaaatgcattatgcaaaataaagtttattgtattgtattcccagccaaacaacatgtaatctacagtaataaaaaatatatctcattttgggctcaaagcattaatccagttactgaaaagagaatacaagtggagcaaacaagagatgaagatcttgatacagactcattggactgaatttcccccttccccccattgatggaagaatgttccagattctaaattgaggacttcattattaatggcattactgtgttatgattaacaaatttcctgtaaggtacacactacatactaaggtcggccatcattcctgttttttttttttttttttttttttaaccaagcttaaaatgaagctttgtgtttgaaagtaataacaagctcagacgaagatggtggttgtacattattcatctagaaaatataaaaattcattttgttttgaagctagttattaaactggaatagcagttatatccctgagaatggggcccttctcttgacattcctttgttgtttaattctttagaatcttaataaatgtttttttaatcctgagagattaaacagtagtagacttgttaagaatgaaactgtaaccaaaattttaaaataaagttttttttaaaaaaaaaacctgatttttagatattttttgttcttgtctatttgaattggttcataatatggcctgaactctaagccaaggtactagaaattaagatttcaattttaagtggttatttttgtgattgacaataaaatggtaccttttgtgaaatgttagtgaatgttactggacgtcattcaagtttgatgaattggccaaaattttaaaaacagtgttatcttaagtctatttaactttaaagctaacttcagaactcattaatctgcttgttacatgcacaatgattaaattggtctattttaagatgcagctttaaaaaagaatggatgtagaagccattaaacatttataggtgtcatcttcccattgtggcctgtttgtccagtgaccctgaaattgctcttctagcaacacactatttgtgatgtcactgaaaagccagatatgatttaatctagcatgttaattagagttttgcttatatttatgctacggaactgcaccattctaagagctacagtcagttcctttgcagtctaggctattgacttattttaaggaaaacatttttagcttttacatagggattgtgggcatttagtcacaaaattccaatgtgttgaaatatttttgttaacatttgataggcagaataaagatgaaggaaagaagccagaagttaagaaagtggagaagaagcgaggttagttatttcactttctaagatacataaaattatacatggaaaagaagttatatagacataacttttcatgtattggttttggaataattttatactcatatcctacaaatagaatttttcaaatccctaatgggctttatataaattgcattgtattttaagcataatcaagtgaacttgcttgagttgtttatgtttaatgctcattaattatttgat

SEQ ID NO: 132506 - DNA, 2502 bp, Homo sapiens
tctttcctccttttgcagttatgatcagtaccaactgctgcctcatgtttacattttgtttctaatttgtgttcttaacctttgttccattctaatgcttaaatcaataatactgattctcatttggggccattctctccaggagaatcatactagcagttatcaaagggcattagagtttgcaaatggtcagtggattccttactctctgttgtagtaaatcctttcttacgggaaataagaataactcctaaaggagaactgttaggtaacagtctcagtttagaaataaaatgtgtctgtatgaacgaagaattagaaataacattgtgttagttgcagtgtaatcacatactttgttctccatatcgcatcaagaatattagctttatttttacaaatgacttcatttctaagaaattttttgttttttttaagagttgttcactagagttataaactaagtttgaagatgttactcttgagttgattgttgaaaaaacaaaagatcatatagaggttatatctatacttgaactcaacgttaccatagactggcatatttttgccatcgaattaaactttgagtgcctactatttgctaaataagttaattaaatttttgtaattcaggcagaaaaacaagtagaaactgaggaggcaggagtagtgacaacagcaacagcatctgttaatctaaaagtgagtcctaaaagaggacgacctgcaggtaggattactgatgtttaaatatctgtttggcttgtgattaatattccagtccatttaaagtgttgctgcctcaaatattttggaatgaagcaaataggcaattgattatgtgtaacatacagatttcaaaggagataaacatgatttgtgctctgtttcaaagtatttaaatttgaaataaactttgctttatctctgttatgttttccctaaatagtggtaagagaggctgtggggaggttaaaattatcatgaataatgggtttattttacctttcacttaagagtcgtaagatttcaaaatggagttataatcagagaatgagaaatagcatttgattaaagtcattaatattttaaatttgtgcgttctttattgatagggattttgatttttacagtttgcagctctcttcagcattgcctatttaaaagtattttcttaatttggcaaattggaaatattttggaaaaatcttcgtaaaacaaaaccaaaattgagtgaattttttttctactttttaataggattcttactgaaaatggggggtaagatgagtaatacccagaaaagaaaaaagatttttatttatatattttggagtttaatattgcagtggataaaattaatagtgctagggaaactcagtgaattttgatatgaacttccaaagatatgtaactgcataagtaatataatatgtatatgaatattaaatataagtgctgtttcctattctaaaagttgaattttgtgacattactgttaaaacgatagtgaaaaatgttttaagccctctcagtcataataaggacaaattgaggattactctgtttacctctttataaattttttgttgttgctcattttaaccatggtgggggaggtattattttttcaatttagcaataattgtatctgtaataagctactaatattcttaaatagtatgtatcatttctaatatttatatctgagatttgtatcttaaatagaaactagtagttactgattttttttccatgtgtatattagctacagaagtcaagattccaaaaccaagaggcagacccaaaatggtaaaacagccctgtccttcagagagtgacatgtgagtttatttttaatgtataattatgcaataaatgagacatttgactttaaacaagcacatatctctgcgattttatcagttttctcttacaggatgtttgttattattttgatctttcttaaaattacaggaaaaactgggaaaattttgtaaagtaaaaattggtaaggaatggctatttatcatttcattaattaagactcttgggtatatcaatttatatagatacttagataatacaacataaaatatataatagagaaattgggcaagatggtatgtttcaggaattttagaatatatttgaagtaatgtcacaaatttttttttttttttttttttttttaaagatggggtttcactctgtcgcccaggctggagtgcagtgctgcaatcgcacactgtaacctcaaactcctgggctcaaggagcctcttcccactttagcctcccaagtagctgggaccacaggtgtgtgccaccacacctggctaactttttttgatgagactggtctcatcgttcccaggctggtctcaaactcctgggctcaaacgattctcccacctcatccttccatagtgctggaattataggggtgagccacgtgcctagcctacaaatcttttttttatctcctctagaataggtgctt

SEQ ID NO: 132507 - DNA, 1086 bp, Homo sapiens
tgcactactctagcctatgtgacagcatgagaccccatctcttaaaaaaattttttaaaaggaggtatctaaaatttaaaataattcaatcatttcccatcacttctgtaagttccaaggtctttaggacaacatcaggtttttttggtacccatttccctcagactttatggtgtgttaataatgaaatacaatactcaagatgcttgagtaggaatttcctctatgtgaaatggcttcatgtgtccttccctgctccttcatccgcctgacaaaattctgcctgtattttaaaatcttgttatcacaccacttccaacccatactgcacaacaaataagccactgtaattatttattttcatagtttacctcctcatgagatactgaacttttggttttctttgcatctttggtatatgataataatttgagacataaataggtcagaaaagggtgtgaacaaaacttcgtatatggaaggaaaatttcatattaattaaaagcctactatgtacctaaccttgcactgtcactcacactcatttctcacaacgtgaagtaacaacaacaacaacataatggacaacacttatataacacttactagtgtttaggtatcaggatttagcataaacatttcacatatgttaaatcatttaatcctccacaaccttggagtatatatttctacccaatttagagaaaactgaggcacagtcattaaaatgaatgaaaactggtgtattttatttcctttaccactcaagttactttaagggtgctatatcactaagaaagaaacacagatagttttgccaagtaaaacataacccataaaaaattaaagggtttagaataaaagctgaaatttaaggtttcattgtatctactctccctcaacccaattaaaataaaaattcttttcagatccccatggttggtaagtcagtgaaattacctttctctttctcccccttctggcagcttttggagtagttatgtcaactgctttagtcacatcctaaaaaagaaaaaagaaaactgaatactgaataaattattccaggaatgaaagaaaccttgt

SEQ ID NO: 132508 - DNA, 1046 bp, Homo sapiens
gtccaactgtatatgatctgtgtgtaaagatgactcatttagcccttccaggcctaatgaaatggttgttagatgatcttcaatgtcccagccaccctttaaaattcacaattcaaatttatccacccctataattcagaattctagtgtagaaaaagtagttttataaatttaaatagacagacttcctggtgtaccagcaaccatgacttacatttgatctgacagtggaaatgcatttttctcactttataatgttgagacacaatgtttttaatttcagaactctacagagcaaaacagatttccccaatgctttcagttaaacgtgcttgtaacttttagtttaacaaggtttctttcattcctggaataatttattcagtattcagttttcttttttcttttttaggatgtgactaaagcagttgacataactactccaaaagctgccagaagggggagaaagagaaaggtaatttcactgacttaccaaccatggggatctgaaaagaatttttattttaattgggttgagggagagtagatacaatgaaaccttaaatttcagcttttattctaaaccctttaattttttatgggttatgttttacttggcaaaactatctgtgtttctttcttagtgatatagcacccttaaagtaacttgagtggtaaaggaaataaaatacaccagttttcattcattttaatgactgtgcctcagttttctctaaattgggtagaaatatatactccaaggttgtggaggattaaatgatttaacatatgtgaaatgtttatgctaaatcctgatacctaaacactagtaagtgttatataagtgttgtccattatgttgttgttgttgttacttcacgttgtgagaaatgagtgtgagtgacagtgcaaggttaggtacatagtaggcttttaattaatatgaaattttccttccatatacgaagttttgttcacacccttttctgacctatttatgtctcaaattattatcatataccaaagatgcaaagaaaaccaaaagt

SEQ ID NO: 132509 - DNA, 1296 bp, Homo sapiens
ttcaagcgattctcctgcctcatcctctcaagtagctgggactacaggtgcacgccaccacgcccggctaatttttgtatttttagtagagatggggtttcaccatgttggccaggctggtctcaaactcctgacctcaagtgatccacccgcctcagcttcccaaagtggtgagattacaggcgtaaggcaccacgcatggcgatgtaaccatttttaagtgtatagttcagcagtgttaagtacattcacattgtgcaacgtctgtggttttacttaataggattatggatttaaatagtagcttgttactgaatttaataaaagtatttggaattattaattgccctttaacttatttaagatttgtaatgcagtttaggttctgtatttttgataattgtgtaatagggtgtcttatctaataaattatgtatttgagcttgctttgcactcacatcttccccacttcttttttagtgcttttttaggaccaaaggatatatttccttactcagaaaataaggaaaagtatggcaaaccaaataaaagaaaaggttttaatgaaggtttatgggagatagataacaatccaaaagtgaaattttcaagtcaacaggtaagtcatattacataaaatttgatattacttatttaatcctggggaataatcactatcctagctgtaggaaagtaaatactaaaagccttgggaatttcatactagtttgttgtgttcttatttgtgaggttgaaccttgggcattttatatcaaaatgaattgacaaaatcattattttatgtagttaaacagatctcaagaaactgggaactattcagttatttaactcctgatagagggtttaatacgtcattgaatataaagctgtatgtactgttctaaatttaggttttgcgacttacatggtgtatgcctaagttttcttattctctttaattaattaattaaatttcttttttttttttttttttttgaggtgtagtttcgctcttgttgcccaggctggagtgcaatggtgcaatcttggctcactgcaacttatgcctcccgggttcaagtgattgtcctgcctcagcctcccaagtagctgggttacaggtgcccgccaccacgcctggctaactttttgtatttttactagagacagggttttgtcatgttggccagactgatctcaaactcctgacttcaggtgatccacccacctcagcctcccaaaatgctgggattacagatgagagccattgcgcgcagcctttaatttctaaatcca

SEQ ID NO: 132510 - DNA, 1067 bp, Homo sapiens
gctttaaaggcaaatcagagctaatttaacagggttattaggcagtagacattaattcaagggggaaatcgtaacgtaataggaaactttaaaatctttgaactttggaaagagtctttaagtctctatttttaaggtagcgtttacagatgctataggtttattttttactggaattgatatttccttaaccaaaaaggaaagtagaaattctctgagcaataagaatgattgatggatgaaaatacataaggaaagttttaataagtgatctgatattcctatacagtaaaataagtgctttttataaggactagttggtacctaatttttggttttatgatatcagatatgcaaactgtgtatattgtggagaaggtgagaagaggaagtctagctagttccctccatgtgtttatatggtccctgaagctctgctgcctctggtgggtatgtgggcagagaactgatgtgaagcaaatttttcaaaaattgcagctgaatgttgacgtatgttactgccaagtgcatgggatcactcaggaggctaccgttaatttcccgaagaatgttcctatgtacctataatttaatggccttagaaatactatataatctggttgattttggacttgaagtttggtgtctgtcataattttggtagtcttgtttacctgggatgaggagaaacaaaactattgctattctgattagaattatgtattcctaagagtggctgcaatggcaatatttggtttaaagttgcttagctactgtataaactttcacacaatgtctttaatagctctattgagatggaatttacatacaaagaagttcacctgcttaaagtgattttcaatagattttagtatatttagtagattttagtatattgactatcataaccttttgatgatcactttcccctctccaaccgtaaacaaccactagtctactgtctgtatagacttaccagttctggacattttatttgaatggtgtcatacaatatttcataataagtttttaaaaaaatacaactttggatccagaattggtttggc

SEQ ID NO: 132511 - DNA, 2351 bp, Homo sapiens
ggccttgcgtgggcggaagggggccgctcgcttctcggaatccctgcctttttctctcccatgcaccccctcccttttggggcttaagctcggtggaaaaagcccggagaaagatggggcgggcagacgggcgatttctggccgggcagcatccctgcttcaggtggtggcgtctcttcggtggcggggtggaggacctgctccagcgcggaggcagcgcactggcgggggaggagcgggaggcggccgtcccctcgctctcccacccccacccgccggttcccctccccctccccttgcggcccctcccttcggggttcttcgctttaaccgccctcggtgctctccctagcaggcgcgtcgggacgccccgaggcatcctcccccgcccgcgggcccggtagctgggcccgcgtccgccgcccgcatccccgcgccgccgcatctcctcgccgcctcccgggcttcggacccccggtctcgcccccgaaacatgactcgcgatttcaaacctggagacctcatcttcgccaagatgaaaggttatccccattggccagctcgagtaagtgatttgtagccctcgcgcttagcagtgctaccctcctctccagaggcctgctgcccaccgtgtctctttattttttcttctgtcctttctctccctcgctttagtctcatttgtaacctgacctttcattttagttttttgcccaataatctcccgtgtaattatgaaaatccagacgtttctacatacctgtgtatttccctatggtttattggcagacttggacagattttcttcctaggaaatatttaaatgcgttgctagttaatattccattgtaggtgaaataatgaagagtgaatttttgtttaaaaattagtgaaacattgacatttccatagttttggatcaagtacaaaatatcaatggaatttgtgcagattacacacaaacacttggatgtcagagaagtgcgtatgtgattaaattggatttacagggttttaaaaaaaataccttgtacttgatgaggccttctggatttgcttgtttaatacagattcaggactggatattcttgaaagtattacagtagtttagtaccgaggaagggccagaaaattcatttctccttttttatttgagatgtttatgaccttgaagaagttgttttacctttttgtttccaataggcaaaaaggaggtgtggaccagattcctcagttcacatctagtggtacagagaaatgattaaggacccaggatgttttgtgacattgaggaattgagactgtttaaagatctacgctccatttttagaaaaagggttctttttgtttatggtggtacccaggctctcaaacagagatagataggacctaagatatgttgcaatcaattagattaggtaaactcaagatcctttaaaaatatacttacatggggttctgaagttttatttttccaagccatttattttcgactaatttactgtcctttgaaaatgtatttcttaaaaataattaaattctgtagttttagttatgtcagcaggggaatggtggaaaacacccattagataacggagtcctgtctaggagctgagagtgccatccaagtgtaaaacgatcactgttccttgactttcttccatctagctgctctacgtaaactcctgttcacaagtttccttccaaagcttttttccttgcctataaagtctgccttttcggtgcagtcttacttgaacaatccttagtcataatccttgtctgtatattttacattctaatctattcctttcgtgataatcttttgttttaattcttaactctgtgtatgctttgacctccaaatatattgtgagaccgagggcaacaaccttaaatggaatttgtttataccctccatagtccgtagtatatatgatgcacctataaaacacaattcacgttcaaatggagcctagggaaactgatcaggtttaaggcccctctgatatactttttcatggtcttcgaggtatccttgtttattttgaggtgtttgaaaatatgaggttgtctaatagatctatattccgatttgcatgccacagtgaagttaaaagccaaaggaaatgtttaaaaaatctcccaaatcaccctccccacgctcatatgttaagtgactaagagtgctactgaaaataaaatagggtagcctttggaagaccagagtgttttccttatttaacaagttctacatttaacaagttcatttggattggaagggaagtgtttgtcttttcccttttccccatcattttttctgagaaacacctccatttagtgttggtgta

SEQ ID NO: 132512 - DNA, 1057 bp, Homo sapiens
ctgcctcagcttcccaagtagctgagattacaggcatgtgccaccatgcccggctactttttttgtagttttaggagagatagggttttgccacgttggccagactggtctcgaacccctgatctcaggtgatctgccctccccggcctcccagagtgctaggattacaggcgtgagtcactgtgcccaacgtccagtgggatttttaaaaaaaatcactagatgacctgattacttctcatctcagatacttggtttgcttctttcttacatctccatctccagtcttggttaagggttctcttacccacatgtgtatatgccatactcctctttgactctgctgcctgattttgcctttttccctgcttcatcttattcctttgtctacattctttctcattttcctccgtgttcttactccatgattttggtgtgtgaagtgtgtagctttgaaagtagaatgatgtcttgctctggtcaatagacctaccaacctactgatgtcttttattgtctttgtaccattgattcttctaggtcagctttctcagagtgttttatgagaacagtagtatagcttgagaagttaaaaggcctaaattagggaaaaggaaattctatagacaagtgaatttgagaaacgcagagtcaaagttgcatggctttctttaaagtaagacatctcagagctgttaatatattaaatttgctttatgaatttctaaaatgggtttttagccatcagtccaaagttatttgataatggaactcccctttcttttttcctggaaaaccgtcacctaggactagtgatggtaaatattgtaccatgcaacattttggcgatgtgctttcttatgagcttattgataagcaggggatgtgaggttgagctctgatagccagacagacaccagaggctttactttaaatgcaaatttaatgtatcttaatatttagaaaaagtaactcaggtgctcgatgttcaattacagagaaaaaactaatagttaccactttgatatgacataagaaaagagagcacagactttgg

SEQ ID NO: 132513 - DNA, 1038 bp, Homo sapiens
tgggatgttcgaaaaacttactcaggttgccagattaagtgatgtacagttgatgtggctcagactgttaatatgttcctcttaattttttcatctctcttaaactcatagctttgcgtcttattttcttccatcttcctcttctttcttcttccctgttagctttcttttaactttttctgttttatgcttattagagctgctgttctctatttctttacctgaccataatatgaaatttaagacctgtttaatgaaaatgtctttaaatagtaagtacaatgtttttctttttataaattactattctgtcacttttcctaaatatattcttttcttgtacatattcctttattgacttttctcggtagattagtggcctttgggggaaagaaggcttgcaaagtttctcttgaaagatgtttctcccaaattaaaattttaagccataagaaatgaagtttttctagttctgcattcacagtctggctgttatttgtgctttcaattcataattgttgttgactgaagacagaatgacttatgaggaagattttcccttttgcttttggaaacgaaattgttttaatgacatgccatgattttacataccctagtgtgtcttttccacaattatatttcttttgagcataatagtttcagtattttacagactatggatgggaagcataaattactaacaggtaatttttcttcccttttgaggtaccagattgttttctagtttaggtcatgttcatggtcattatttaaatcttggtctttattttctctgttacattggaaaagaaagttaaagtcactatcctctataggtttactcgtgagatcaaggtgttattaataagatacaaagacttgagcaaattttgagacttacaaataactttgtatgtgttagtacagcatagccttatgctgtatcctgggctagatacagcagcagagctgttagaggctttagagatcatctagcccaggatacagaaagtcttaataaaccagttggaaagtgat

SEQ ID NO: 132514 - DNA, 1131 bp, Homo sapiens
ttagaaaatgaggattttctttccagagtttgaatgtgaaacaaaaaatggttagaacattctgctttatttcatgtaaactgtttgcagatttttaaatcttacttactttttttcccattgagatatttgaatagcttgagctttggttccagaagtaacagtatctttctcaatctcaatcaaattaattatagaataagtaacttcattagaaagagaagatgaaaaatttgccatctaaatatacaagtaacacaattttctgctaacgtgtggcagtttacactgctattttctttttttaaatttctttatttacattttatgttaaaatttttatatgatcttaaggaataaaatatagtaggacattttgggtattttattgggggagatgacacaaagaaatagcttgtgagcatatttccttctctgttgcatctccccgtatagataaggcatctagagtatatctgtaaaaacaagtctgacacgatgagagagcttcagcagactcaggaagacacctttaccaaagtggcagaacagatcaaagcccaagagagctgctggcacagacaaaagaaggaactagagctgcagtattctgaactcttcctggaggtgcagaagagggcacaggtatgctacctttacaaagagctttaaaaaatgggttactcagtgtaaccattagaaactttttttttttcagtagcagtgctaaatcagtttaaacttcttaagaacttcgtagaacttgtttagatacacatatatttgtttagatacacacacatacgtgtgtgtgtatgggtgtgtatattaaggattgtctttcatgtaagtttggaaatatatgggtttctgattaaaatatcccaaaatgcattggtcagttaattaaatgcgaaaattatatttcctttatttatttttaaaataaaatattaaagtatttggtaatgtattgtcagttttagtgtaggtattcctttatctggtttactccatttgtggaggttcctatgtgaaccatcatttaaatttatttggggttaaaatctcctatgcctgctgatattatataaggttatattatataactgatattatataaggttatag

SEQ ID NO: 132515 - DNA, 1050 bp, Homo sapiens
accgtctcagtcaatgttgctcttcagttgttgaattatatgtattcttataaggataaaacatttttaatttggtaagactagctgaatttgctttttgtgcttatgatgtaaagacaagatttaaattaacaccaacagcagaggctcttaaaaatgtagaatgttatactatgaatttaaataatctttctgtgcttgtcattttacattgatagtatcataagacaagtaatgacagattaagacctacctagcagagggaaaactaaattacatggctttattaaggcgtaaataaacctattaaccattatctggaataccaattagtagaaagagcactgacaattttatttatcaacattaaacacaattattaattacagacctgatgaatctagcagtaagcaggccatgttggatatgctgggaccttaagtccattatatgagaaggatgattaccaaaatcctgtggggaaataagtaattgtagttgtaaaattttaattgccttggaataaggcaaattatattttcttgtctgagaatataaatagtatggcatgaaggtaacaagctttggcagttgtaaatagaaaatggatttatgttaggttttaaaacaaagaaaagagtgatgaatttttagtgtcatgctattccatgtgaatggcatactgtaaatacatgcagattttttttgatgtattctttagtaggtgagctattctctgaattcctttttttcatagtgaaaataatgtgggaaggacctttttgaatgaattactacaggtgaatgggaattatataattaaaaaatattttcattatgtgattagcagtgttgtgaaatgcacaagagacaattcacatttttgtgcctttttttctttttctttgaagatccaaattccagaatttgtggacatttactcataggtgcagccaagaattcttttgcaaaactcatggataaaattagtctggtaatggaatgtatacctctgcacagtagcaggagtattacatatgtagaaaaaga

SEQ ID NO: 132516 - DNA, 1060 bp, Homo sapiens
ctatcttcttattttatattctcgtagtttctcttcactctttgtattgaaatgctttttattgtagtaatattttaatttctaagaattgcttttaatttctcattctcttttcatggcatcctttttaaagtttctgtgttttcttatagtttttaaaactggtgtttaacaagcaaatattataataaacaattatttaagttctctgaattctctttcgttcttctgagatcttcatatttttttcatttgtttttgttgatcctttttttttatgctgaaggccatggaagattatattttccaaaaatggccacagcaatatttctgatcccacaagtgcttctagaaccttgctactcccatatcaagatgtggagtctatttccctctttttgaaattgaatgggcctttgtgaagtgacagtgcatggcttttgagactatgtcataaagacatggcttctgcctgattttctttctctctctcaattttctctgttggaaaccagccatcattctctgggaaagcctgggtcacatcgtgaactagggataatatgctcagctaacagctcagctagggtctcttgcaacaagctagcatctcatgcaacaagctagcatcaaatgccagacctgtgtgaatgagccttcagatgacttcatataccagccttcagctgaggctccagataatagggaacagagactagcagtccctgctgtgccatgctctatttcctgatccatggaatccatgagtctaatcacagtagtttgacaccattatgttttagattaatttgtcgtatgtaaccctggaacacatgacatattgttctaaattgtaactggaacaaaggctttcatcaaatttatgaaaagctttgtttgatcattcacatttaagaatgaagaaaaaaatgctaactaggagctctttgtatatagttaagagttggtggctggttggctttcctttaggatggatgggctatgagcttgctgttaggctgggcaaccctcaaatgaatatgctggtccttcctttttg

SEQ ID NO: 132517 - DNA, 1086 bp, Homo sapiens
taactctaattctatttggaataaaattgactctaaatttcatgtgctttctcccctgaaatctttattttttcatcattaaaagaaagtacaacttgagatttttataatcagattatttttagtaagaatacaatttgccttgcagtatttgaaaaaataaaatggaactgtattttgtaacaatttcccaaaccttatcagttctatcatttctaattagtacgtatataaaatttttgcagaaaatttgttaaactttgatgtgtaatgacccaagtctacttctcagtcagtctgtattcttctttgtttaatagcctatggcataaattgaagttaattatcagggctgacaagtaactctgttttctgtctgcttgcagagtctctccgaggcaaagatggagctgagaagaaaagatcaatctctgcgtcagctcaatagacatcttacccagctggagcaggacaagcgtcgactggaggagaacatccatgatgcagagagtgccctccgcatggcagccaagtgagcatttggaccttggggagatcacttaaaacagacaaaagatcaattcttactttcatgctccgggttttagccctggataatacagtgttagaaaacaaaagtacagctgtctttctttgaaattctctgatatatcctcaaaaaagaaaaactcttaacatactaaatgtatattttattgagaaacctcagaaaagtataagcttctatgtaacctctaattatgcttattttgggctctgttacagtgttacatgttagaaactatgttttattaatgtgaaatgtaagactctaaaagttttgcatagtatcttctgttatacattcctattctcttctgctccactgtctccgaaattttgttctgcatatattattatatactaatattgcgagtaatatttccataaagaaatgttagcatacaatcagcatgtgtatcatagcatttaaaaaatacaataaaacatattgaccatggaaaactcatttaatttttatagctgtatattctaatattttaagtagaaaaatatagttttcag

SEQ ID NO: 132518 - DNA, 1018 bp, Homo sapiens
ccctattttccagcttgataatttgatttgaatagtcagttttttagatctttaattgggatgtagccagattgataatttgattcaagagatcagtttttttatttctgtaattgggatgtaactataatgtgtggtgtggttgtggtggtggattttgccctcttttctggtgacagcagctggcagtcatgggagagttctggctttgctccagagttgtagattaagttaaataacctgccagcaaaagagggctagttgcttacctcccacttttcaaattatgagtttctatgcttgctgcagtgccaatggaatgcctgcttctgctgagagagtgtcaaggtctctttccagtaggtgtggaacacagctggaactgttgcttatatcctgggacattgtggtttggggatcctccattatgacattgtgatcattgtataaggatgattgctacacaggtaacttgtttcttagtgtaataattgtgttcatgtgtgtacacgtgtgtgtgtgtgagagagagagagagagaggatatgaatgaatgaggatgcccacaggtgcaaggaaactattgaggaaaataaagatgtttaatattcattgattatcacaaaaccacttttatgaaacaaacattgttgctaagattgccagacaatagatataaagaaaaaagatagggaaatggaagtaccaaaatcttaagtaatttcttcaactgttaattgttcatatatagatattaaaacgcattattgtttggcgctaagagcactagacttagtatcctcatattagagatggcaataactatttcacaaggtgggtaacagaatcaagtgacgtagtatggagagtacggttgtcccttggtttccttggggattggttcccaaaccttctgtggataccaatatccatgatattgaagttcctgatataaaatggtgtagtatttgcatataatctatgcacatccttctgtacactttaaattgcttctaga

SEQ ID NO: 132519 - DNA, 1049 bp, Homo sapiens
tttgaataattgccatttcagtgatactcctcataccttccagttttgaaggagacttttgtttagaagagcatagtatattttatacatattagtaacatgaaacctgctttctgtattgatcattgtaccttgctgctctgaaaaagtatcatatgcactattatacaaattttattttgtctctcaaaatactactttaagagagttggaatgtttaagatttgaaatcctaagaaaaattggattattatattctttttagtgttataaagaagtagtatgtggtttatattaatatttcgctgaatattagaatttagttattaaaagtagatcaaggaagagttatccactatataaaatttctgacattacttctcaaaaaatttatttttaaagggagatttgaaggaatatcatttatattatttattccttttagaatgtcataaagatgaaattcataaaatgtgtttctccaaggttagaaaatgggataacttttaaaatgtggaacttttaatcctaaaatattaaaggtcaattctcttgtgacttacagtgaaataataatccaggagcctattactgatggaagggaactttcttaccattcaataagcatttatgcatgtttcagccttttatacattttaggtccttagacaataaaagtatatatctaagaaccacatatttcagattgtctcatttagattttagtggagaatttaaaaatagaacaatagtaataatactacaatgaaattcaatagtttaccatttttagagtgctttcttatattaaatgcaacataggtgaagggttaagagagtgagtttgcttgagaaatacttggatttgtatcctgaccattgtacaactaattgtaaacttggactagttatttaatccctccaagctcctgtgttttgctctgaaaaactagattaaaaaaagtatctactccatatggttactgtaaagataaatgaaattaagcatgtaatatgctacatggtccctgcacttcagtaaatcccta

SEQ ID NO: 132520 - DNA, 1049 bp, Homo sapiens
aggcaaatgcccatttcccctctcccctcacaccttgcctggcttcttccatgaagtccttgctgcttttctgcctccccaaaggtgaggggaaggggctggttggggatctgggaaagccagttctctgttctctcctgctggtgatggactaggccttttagaactagcaagatccctcacacagctgggagaacacacacctttcttactccagacccattggtgtgtctccagtaacaaaattattggactcagcctccatatttgacagcaaaagtggccagagggagttgaaatatcttgaagaaaaggaattttcactaagatatgtcctctccctctcccagagtttagctgtttattccttttttttgtttatattgttctcatctgcataaaaccagtctcttgcaataagcctgccgcagaatcaaagtctgtacttcaaaaggtaactgcaccaagggatgggacagtgtgcatcaccctgatctaatcattgtgacgttggtagcttcctaaatactgtatgtaccttgaacaagggttttatttttgttttgttctgttttgctttttgtttttattggtaggctaaggtaattaaattttttaatttgctgttactttggttgtattttctgtactataactgcctacagtatgtcttttgcataaaatgcataagggtttggggatgtaaatggaattttattcatattttgtccaaatacctcttgtaatttgtatcaaaattcttgtacaatttttatattaaagatttatcagtcactgatctcttcttacctttctgatttcaagaaacctccacacgctccagtagatctttacaaaatacaccgagcagcccttcagctcacagtgtaattcaccttatttaagcacacttgttggtgaactcagagccaagctcaaccactgtattatttaatagatttctcaggaagaccaagctcatcttttgctcagatggcaaagctgggtcagagctgcagaggtcctggccgctcccaatggagcacagc

SEQ ID NO: 132521 - DNA, 1044 bp, Homo sapiens
tagaagtgaatgtgcttatttgatacctagtgaaagctgaatcaattttaaaatgctttcctttttctcacctttccccaccccccatccacgtacccccccttccctcttgttttcctagacacagtgccaacataaacctacatcgtaaactgttgaccaaagaactcgatgacatgggcctggactcgtcgcagccctcccttagcaaggacctccgcgatgaatttttggtgaagatatatggtgcccagcaccccatggggctcgatgtcagggaagacgcctcctctcccgcagggactgaagactcccacctgaacgggtatgggagaggcatggcagaggactacatggtccttgacttgagcaccacctccagcctccagtccagcagcagtatccattcctccagagaatccgacgcaggcagcgatgaggggattcttctcgatgacattgacggggcgagtgacagtggggagtcggcacacaaggccgaggcccctgccctccctggcagcctaggggctgaagtttcaggatctcttatgttcagcagcttgtctgggagcaatggtgggatcatgtgcaacatttgccacaaaatgtacagcaacaaggggaccctgagagtgcactacaaaactgtgcatttgagagaaatgcacaagtgcaaagtcccaggttgcaatatgatgttttcctctgtacgaagccgaaatcggcacagtcagaaccctaatctccacaaaaacattcccttcacttcagtagattagtctcagaatggacactacaaatgccagctctcaccagatggcctacgtgtttgaactgccatagtcagtgtgcgcttatgtacttggggtgtgtgtgtgtgtgtgtgtgtgtgtgcatttatgtatgctctgtggctacatatacacacacgtatttccttgagataaacaagataaacactaggtgcttttgaatttttttcacttccctttatagttttgggaaaggagtgggatctttgatttcagggtgaaaacagag

SEQ ID NO: 132522 - DNA, 1044 bp, Homo sapiens
gatttcatgtcttctgtggttgcatggtaaagttttcatcaaaggaacagaaaaagactggtagtccactttagtccagttagagtacttccactcagcatttcaaagaagaaggaagtttggttctgcagcaccctcccctcagtccaaggttttgtaactttttgcttttaagggtgatattggtctttaacaagcttttggtagattcacagtatagaaagagtacagaggtttaaaggaagcatttgtagttccaagcatagcccaagttacagggctttttcaagccctaattttgtggcattcccttataacatactatggtattaatagcgtcaggatcaccgtttgttttgtcgccaccacctttccttggatattctgttacatgagtcctaccttgggatcattgctttcttcccttctacagtgtattttgggaaatactttttgaagactcatgcatattattgatggaagggaaaccaatgtacttttaagtacctcctctgtgcaaagtattctactttacgtgcaggacacataagattgagtaagatttagttatgttcttgaaagtgaacgtctggggctaaggtttggaccactgccttaatgattaccactgcacttcttaagaccaagtccttaccccttatacctatgaactcattttctctctgcattccagtcactttttttctgtaagaggaacttccttccatatatctttcttgccttccaaatcaaagcaagtagaaacaacctttctactgttcatgttcttatagaatgtaagaagttctaatacagtcttagatatttgttattgagtattcttccctctttcctagagataaatattcagaacactaaatctgtttctagaaaaaccatctctgtcgctggagagctcaaaattggttccttgttggattctttgttccaattgttacatacaactgagtagggcttcctctgccagggagtccccctcctgtttccagcactctctggccttcctgccattttagggtcttc

SEQ ID NO: 132523 - DNA, 1647 bp, Homo sapiens
tcttactcttccttatgaaattgcctgctattaaatgatactaaaatatagccactcaaaaaaaaaagatacagtttagtaacaaggtatgaggggtagtgctactttattcatctttttgattcagaaattcacataactcctatttaaaggaattttcatcattgaatccagtgtcatgtctgcttatgttgaagaagtaaatttcacaagaagtacttaattccttcctatagtatcactatttaataaggactaaggtaccatttttttcatttatattggatttcacagcaagagttcacatcttatactaatatatgctaaatagttgcatagtatatagatcattgttgttaaaaaagcagtactgaaggcattttagatcacagagccccagtggtctacattttgtttgctttgacattattaaactcaatctgtttctctaactgtgactctaattactacatttgcatggcagaaaagtttgctttgtgggttgacttttattaacagtgcttgcatgttgttttctgctcttgctcagtgttttatgagcacacagagcaccttcagttgcattgaataattatgcacaatcaataagtttttgtgtttgtctttgttgtttctttgatgtggcctctaggatgctgctggcaaggtgctggaccgctgggccatcatgtctcgagaagaggaaatcatcacccttcagcagtttctgcggtttggagaaaccaaatccattgtggagctgatggcaattcaggagaaagaagggcaggccgtggctgtaccatcttcaaagacagactcagatataaggactttcattgagagcaataatcgcaccaggagtcccagcctccttgctcacttagagaacagcaatccttccagcattcatcacttcgaaaacatcccaaacagccttgcatttctgcttccattccagtacataaaccctgtctcagcaccactgctagggttgcctccaaatgggctactgttagagcaaccagggttgaggctgcgggaacccagcctttcaactcagaatgaatataatgagagcagcgaatccgaagtttctcccacaccttataagaatgatcaaacacccaatagaaatgccctgaccagcattactaatgtggagcccaaaaccgagccagcctgtgtctctcccattcagaattctgccccagtcagtgatctaaccaaaactgaacacccaaaaagctcattccggattcatcggatgagaaggatggggtcagcctctaggaaaggaagagtgttctgtaatgcatgtgggaagacattctatgacaaaggtactctcaaaattcattacaatgctgttcacctgaagatcaaacatcgatgcaccattgaaggttgcaacatggtctttagctccctccgaagtcgtaatcgccacagtgcaaaccccaatcctcgccttcacatgcctatgctaaggaataaccgagataaagatttaattcgggccacctcaggagctgccacccctgtcatagcaagtacaaaatcaaatctggcactcacaagccctggccgacccccaatgggttttaccactccccctctagaccctgtcttgcaaaatcctctccc

SEQ ID NO: 132524 - DNA, 1023 bp, Homo sapiens
tgtgtttgacagttttcataggaatggacacccacatgcacgtactcacacatattctttatgtaaaatggtaggatgctaggagtgagccttacaaaggggggcacataactatcagagcttttttaaaaaagtaattcaagtaaatgccaaatacccacttaatcaaactagctgtgatgattcagaccatagggcagtgtttcagagagaattttacatccacaggttgaggagagacttttcccttgcaaaagcagtacagatcccttatgcctctcatcatgcttcccctagtgtaacatcctacataaagcacagtggctgaaaccggaaaattcagatgggtatactactactagctaatctagagactttattcaaatgttgctaattttcccactaatgtcttttttctggtctaggatcacacaattattttttattagtcccctctaatctggaaccattcttcattttttataaatctttcctgaactttacactttgaagagtactatctactgttttgtagaatgcccctcaattttggtttgcctgatgatttctgatgattgagttgaggttgtaaaatttttacaatgtgtttgtccattcccatgtactaataaagacatacccaagactgggtaatttataaaggaaagagttttaatggactcataattccacatggccggggaggccccacaatcatggcagaaggcaaaggaggagcaaagtcacatcttacatggaagcaggcaagagcatgcgcaggggaattcccctttataaaccatcagatctcatgagacttactcactgtcataggaacagtacgggaaagactcacccccatgattcaactaacttccaccggctccctcccatgacatttggggattatgggagctacaattcaagatgagatttgggtggggacacagccaaaccatatcattagaagaatgccacaaaagtgatgtcgtgcccttcttagtgtgtcctaacaagcggaac

SEQ ID NO: 132525 - DNA, 1027 bp, Homo sapiens
gaatcatagatttcagattaaaaacaaattcttctaaattatctgcagttgatgcagtctgtcttttttaaattattatttaaagatgctcattttgtcctaattttccctgtaaattttatcagagcagatgtggtcactgtgatgcagcagtggcctaaactaatttcactgatgtaaacattgttaaacaatttcaaatgcaactttggaaacattgtttctgaacctgtttaataatgtttaaaaatgcatcaatgaaattggcttagcctgtggcctttattacattatctgttctcaattacaaagattctgtgttttatgtctggactagttataagtcactgaaaaaaaatgatgccagctgaagagtgtggcttatacctaacccgtttaatttgatttaaaattgatgaaccttggaaaatacttccagaatgccatatcagctatcaaaataataggaaatgtattcaggtcatcatattggcattacaattttagttaccctccccccccgccccacctttaacttttattcccattgcttttcacctcccattcacccccatttccattgttgtgattccactactaaattccaagctatcagctctgaaatgcaacatagaacattaaatatgtttttactaattgtgatccgctaaaatttaagctctgtgccaaagcctttttatttttatttcagaagtagtatttaagtgatgacatgcagtaatttgttcattcttctgtcagtataatttacaaggcaatggcagataaacatagcaatacaagattcatttacggtgacacaatggcagatacacagagcagaaccctgcctatgagataaagtggactgagtgacttatgcagtaattaggggataattgtcattaacctcacaaacagtagtttacccatattgtttaaaaggctccaggatgcataatgacaaggtaatctgtcaaagcgctagggggaaatattaataagatttgtgcaagcctggatagaa

SEQ ID NO: 132526 - DNA, 1056 bp, Homo sapiens
ggccattttagtcttaccaagtcttctgtaaaagatgctctctaccacttctccctctgccccacctgcagatgctgatatatctcaaactctggccaggactcaactacatattgttttggttaaagtattttaaatgtgctaatattcagtttcaccattgggcagttcagtttttgcccacaattggaaattgcctctagtctatcagcttttaaatgtatattcatttctcacatttgcacctggggctccgtttctcatacttagtctctagtccctgcatttctttttctttccaacttgtttttctgagatagccactctttttctctcttgccatttatttttacatttgaggaaatttaagtttttgcccttaaaactataaacaattctgtaacaaatgaactaagaatcataggctcaaccaaggtcttaaaatattttcagaaagatgaatatttacttgtattagaaaatattaatattcttatttctgagtatattatgtaaaacttctggatatctacatttgcaaatgtgactgcctaatcagacattgaaaaacaggttttaggctcacactggctgtttttgtttgttttattttttagtaaggatgtcgctaaagaaggtagttgagtttacagaagtaacaagtggttagttttcaacagaaacaaattaggtataagaacagcataattcataaaaattgtgttgtgtggctcacgcctgtaatcccagcactttgggagactgaggcaggaggattacttgaactcaggagttcaagaccagcctaggcaacataatgagatcccatctctgtacaactaaaataaaaaattagctgggtgtggtggcacatgcctgtagtcctagctacttgagaggctgagccaagagtatcgcttgagccaaggagtcaggctgaagtgagctatgatcacaccactgcactccagcctgggcaacagagtgagaccctctctctaaaattaaaaaataataattgtattataaatgtgatggttttagtaccatccaagc

SEQ ID NO: 132527 - DNA, 1049 bp, Homo sapiens
gaatacaaaatcaaaaccaagatatttgttaatatcccaatattgatttttgttattagaagtaaattttagaagtaaatgttgaaaaggaccacaaaagctgcttttccagcctctaatggaccagcagcctcttttgggaaatgattagttgcatcttccaataaataacttttgatatattaaatactcatttgatggctgctctctaaaggaaatgaagctagcatggtcccttggcttccatgagccttaatctcatgtatctgttattgcacagtttataatggtaggggttttcccccttaggactgactatgttttcagtaatgttatttttttttaactcaacctaactggacaccgtagagggcactaataaatcacacctctctgtgctcaaataaagacagacattctacctctttctcccacctacccacccattcctggatcgagcaacagaactgagcttaaggccacctagagccaccatcacagaatctctctttatgttggatggcagtggggatgcagatctgaaacactagtgcatctgaaacaacaatgggaaggtgtggaaaaaagggttagcaggcctgagactgccctctttagggaggcctgcttgccaggttggcccttggctggcatccaggaacttggattttgggagtattcccaccatttcctcacctgatgaaagagtggctcattgcttctacactgtaaataatatgctttatgccgaacacgcgctttccttctgggaatctggaattttggtccatgctaggcaaagcatgcctacgtgaccactcccacaaaaactgtgggcactgagttgcaaatgagcttcccttgtagacagcacctcacacctgttgtcacaatttaatgctggagaaattacatgcatcctatgtgactcctctgggagcaccactggaagcgtgcacttggtttcccctggagtttgctccatgcatgttgccctgtgctgatgctgctttgtatcccatcactgtagtgagtcttaggtgtgcgta

SEQ ID NO: 132528 - DNA, 1139 bp, Homo sapiens
gcatttgtgaactgcatgcacatgagaagtgagcaggcttccagctcagtggcaggtgcaagatgatgttagaaacaaaataactcttatacttgaataaattcacaagaaggttgtgagtccctgacacagtaggtatgtaaaaccacgtagctgacatcaaggcctgttgcacttttgtaacctccttgaatcactggagcgagcagtccctggtgatgcagcgtgttgcagggctctgtgccttgatagggagttgcacctgtgatacccgaaacctccttacaaactccccccgccaccccccaccacgttgtcctggatcattggaatgcaggcgctggattgaaacgtttattcatagtagattaagagtctaagtatctgtgaggcctcacttaggaggctcttagaggattaataaaatatttacaaaataacctatgcaattgcttcattttaaagatatttgcctcttatcacagcataaatcctcattcaagtggcttctctgttctgtgaaggaagttctgtacttgttcttctggagaagcagaaacagattcctgccatactttaattaaaaacatggaagcgcctggtttctccacacgtgcacattcttgttcttacacacacagccccaacaaagagatcaacagagggatataaaatgatcatttttgaaaaagacttactgattcaagtgagcggcattcacatgtaaaatgttccgaaaatttattctgttatttatgataaagaatcttatccctgcatgttttacctataaccaagagagcctcaattgatcaaagtatagtttttctagtaattaaaaatgaatattgatgtaattaaaaatgttatccttaaaagtctattatggtacttactgtatactatcttgtctgccgtcttggtagatcaagttgtacagtcatatttctagatgtaggatcaagatttcagttaatccttgggtttatgctaaggccacaagtatgtattatctgtatgaacaaccatttatggagtgcctgccatatgcctagaattccgtgaggcctttcacgagtactgctgtgtcatttaattcaatcctgataataacgctaaaaatcagggatttctcatct

SEQ ID NO: 132529 - DNA, 1034 bp, Homo sapiens
gtttatctttggtatcaaagacccagagaatttggagaaacatcacacagcttgaaaagttatttagacaagctataatatcacatgactgccccctgagtggtaagacattgcccagtggatctgaaaacacttttaagtacttaatcatcatcgtatcttttttaaattttttatttcttatttatttatttttgagacagagtctcgctgtgttgcccaggctggagtgcagtggcacaatctcggctcactgcaacctccgcctcctgggttcgagtgattctcctgcctcagcctcccaagtagctgggactacaggagtacaccaccacacccggctaatttttgtaattttagtagagacagagtttcaccatattggtcaggctggtctcgaactcctaacctcaggtgatccacctgcctcagcctcccaaagtgctgggattacgcatgagccaccacgcccggtcccatcatcgtatcttcatgagatagtcaggaatggaatttgaatactttaaattggaacatggagaggtgaggtgactgtctaaggttgctttgacagtggtggagctgggatcaacacttttatttttatattttaaaatatacttcctcttagccttttaattcagaaaagttaactttagtttcttaaaggaattcataagtgctacctcatatccctgtatagcagtcttacctttacagagcactttccggtttgtttcttgttagaaccccacaagggaaaaaagtaggatccccttctgaagatgagaaatttgaaggatggtcggttgttaaagaatctgaattcttctgactcttcgtccatggcattccactgtataatgctaattaaaatagtttcttctcttctgcagagatgtaaggttccactgtgacaagtgccattttgtctgcccacacactaggaacacctcaatagggaaagaagtaagagccacctgatttgctcttcttgtatcatgcttagctccaaagtagtctcccagatgtgt

SEQ ID NO: 132530 - DNA, 1074 bp, Homo sapiens
tcatctgtttgcaggatatggaaagatgcaggggcccgctcaagtctttttctaaggagaaattttagttcctaagcacctaaaaaaagacatgctgagaagttcaaattgggggccaggtacccccaccggaggagactatcccctttgttctatgagttgcttctaaagtaggagccaaaggaagtttccctccaggcctactctgaggatgcctgtccttttgaaagcattcaagaaaaaacacctcttgattcaggatcatgatacaaagaaatagagatatcaaatttttgataaaaaagaaaattctataatgttaaaactgaaatgaaatataattatatatgtttccccatgaatatttttaaactttttttagggttataaggaaatagtctagatatattaaatgtctaaatgaagttcttagcttttcagcaagaagaaatagctaaaaatttaaagtcaggaagcttacaaaacagatccaagagagtaagagacaaataactaattctttttgaaaaaatgtttaagtttgccattaataaatgattgtctaagtgagacagctttggctgttgcttagacattttaaaatcttgatttgttaagaaaatcaaggactttttttttttaatctccttgtcacattgttatcaaggaaagattttctttaaaagccaatactagaccctaaaggtaatcaaagagtattccgaagctgcatgatagttttaaaattttctctttttaaaggcagtgtgttgctctgtcacccacgctggagggcagtggagtgaccattgctcacttgggaacctccagctcctggcctcaagtgatcctcctgcctcggtttcccaaagtgctgggattacagacccaaatgatactttggctgttcttcagggagaggtctttttctctcttgctccttttcttcctgtcctctccttttctaccctgatggagcaacatggtggtttgggacacttgtatttaagttctcattgaatatcggggttcctcttgaaggctcttctggatcctacattacttctgacaccc

SEQ ID NO: 132531 - DNA, 1092 bp, Homo sapiens
tttataccaggatactagaagacacaccactgtcttatacagattggttcaaatactgatggttagttactagttgtgagacattagacaacccaataaccacctgtctcattcctgcaaaaggactttatttaggtataaagcaccaacagatagtagtagtgtactcttaaaacagagtgatgggtgtgtcctattttgccactagaaatgcttttttcacatctgtattttaaaatgattaagggatgatcattattttccctccctcatgcctcctgctccatccaccctgaaaaactaaattctttggccaaaatttgcaagcgcatatagaagattggttagcataactcagacttgcatttatgactgtatgggcaaggacaaagtagactctgtaattgtttagtcatatatgagctatatatatacttcaagtgagtgaaatgttttgttcattctagattttttttatttatgtgttttgggtttggaacccttagaaaatcaaagaaaaaaattgtttgttcttgctatcagctttcatatggttcccgagacaagtgctatacatttagaaaattaaaagggtaaacattaaataagaatgcaggagttggcaagaagtcaaatgaattggatgttcattaaatgcccagggtttggggacaggcaaggttactaaaaactggagcaggcttaatgagacacatcagacttgagttgagtttggtggatgggtaggattctgaatggtgaggagaatagtcttgaaaaggggtagaggagagagggaatgtagtggaaaccagggtagagtcagcatgcatgtggctagagacatgtttcagccagtgggctgggctgcaggaattgaggaggagttgggagtagcaggccactaggctaagaatctgggagtttgtgaattcccagctatgaaatggggccccatttcatagtctgggattactgaaggtttaaagtggaagaatgaaatccagaaagctgagttccaagagccttagtatgatagtagtaaattgagtagttagaatgaagattgatcatattttcttagccaggaga

SEQ ID NO: 132532 - DNA, 1548 bp, Homo sapiens
tgatcaagtccaagatgtctttgaccagaagtcctgaggacctatggagcagaataagtaagtctccttttagggtttatagcagaatcttaaaatttgttagtgtgttgaattatggacaaagaagcaatgcggacctttgttgcagtacttaaactttatatgctgttgttacctgttttatctctctcactagacttcaaattccttgtggcagagaaagtatttcttgcttatcttcttatactctgtgcctagtaaaatgcttgataggtcatcaatactcaatgactaaaattttctgtaatttgcattctcattggtagtgaagtattataataatgaacgattgttatgtactgttccatttaactctattttggaatgttctcaatagtttggccgctttaagcaagtgggagaatattctcaattatatttgggtttgtactagtgctatgtgtaattaaggttcatttatttattactaagtgtttattatggacctactatatgagcaagttgttgaatggaagcgtagaagaaggaaataggccaggcgcggtggctcgcacctgtaatcccagcactttgggaagccaaggcaggcggatcacaaggtcaggagttcaagaccaacctggccaacataatgaaaccctgtctctactaaaaatacaaaaattagccaggcatggtggtgcgtgcctgtagtcccagctactcaggaggctgaggcaggagaatcgcttgaacccgggaggtggaggttgcagtaagctgaaattgtgtcactgcactccagcttgggcaacagagtgagacttcgtctcaaaaaaccaaaggaaaaaaatgagctaggtgtgggggcatgcgcctgtagcctcagctacttgggaggctgaggcaggagaatcgtttgaacccaggaggcgtaggctgagccaagatcaagccactgcactccacactccggtatgggcgacagaacgagactccgtctcaaaaaaaaaaaaaaaaaaaaaaaaagcaaatggacacactgccctcaaaaggcttgtagacaagggagaaagatgagatttctctattaataactgcactgtttggtagaaaatactatgtacaatatgagatgtctagatataaagtgctgtagaagtttttgaaagtaggaaaggttccttttattccagaaggtcaggcgggccttatagagaagtgtaggctgggcttggtggctcatgcctgtaatcccagccctttgggaggctgaggtgggcagatcactgaggtcaggagttcaagaccagcctggtcaatgtggtgtgaaaccttgtctcttactaaaaatacaaaaattagccgagtgtggtggcatgtgcctgtaatcctagctactcgggaggctgaggcaggagcatcacttgaacccaggaggcagaggaggcagtgagcccagattgcaccactgcactccagcctgggtgacaagagcaaaactccaaacaaacaaacaaacaaaaaaaaccaaacaaacagcctggc

SEQ ID NO: 132533 - DNA, 1016 bp, Homo sapiens
acagaaggaacatgaaaatttggtttgaaacctagtaactctcaggctgcatggtctggagacaatagaagtatttcatcccttgaaaccagacgaatcttgagtaatcaggtgaacctgccttgctggctggtggtgcttcactgaagggttggaccagggtgtagaaaggactttggtggttcagatttccactggaaaactgtgacatcctgccatctcagagaagaaagttgcaggagatagccacacgtataggtgattcctgcttatctggctaataatattcttgctaatatttttgaaaagaaattagttttgggccttcacggaagctaacatttaatctcatagggcataaacacgagcgtagggtggaataacagcctaatgttttgaaccccatgaatttgctaatccataggaagttccattaagaaactccctagttcatcattcatagtatttcacctgtagctctaatccccaggcccatgactgcccttctctcttctgagttgtgtgtcagtcttcaacctacggtccttcccgactatggactcatgtacaactctgaatgaaactagcatctttcaaagaagagtctagttttcttcctggtcctgtacccctctgtgtttcgttgtactagagaaatttcttatttattaagaaccttttcggcctggcgcggtggctcatgcctgtgatcccagcacttgggaggccgaggcgggaggatcacgaggtcaggaaatcgagaccatcctggctaatatggtgaaacccgtctccactaaaaatacaaaaaattagcggggcatggtggcaggcacctgtagccccagctactcgggaggctgaggcaggagaatggtgtgaacccaggaggcagagcttgcagtgagccgagatcgtgccactgcactccagcctgggcaacagagcgagactctgtctcaaaaaaaaaaaaaaaaaaaaaaaaagaaccttttctcatgtcttagacccgtgtc

SEQ ID NO: 132534 - DNA, 1033 bp, Homo sapiens
cagagacatcaaagagaatgtgtactggatcaaggtgattttttttcgaccacatcattgccagctgtggtgtttatgattagagacagacgttccagacacctccgagtcctcactaagcgtcagatctttaacgggatccatcccaactgagtgacactaaacagacagccagaggggagttggtgggatagaacagggaagagggcgggtgagggtgagggaggctttggtgccgggtgcattcaccagccaagctccgctaatgccaggctgcaggctgcccagaggccccgtagcattcctttcagcacagctttcattagccaaggggatgactggagcccagcaaacacagtcattgatcctcttctcaccgggcgcagggatgcagtgttcaggtcacagcccagtcggctttgaagcggctccatttcagacactgacagccacagactattggcttcttggagctgacatgattccctctcggatctccatgctctgctccatgcagctaatgatgttgaattccctctggatgttgcttccacttgcaatattaacacttgttcagtggtcctattgatgcaagaattatgtaaatagccaacagtactgatagctgtgcattaaagggagttctctttcctcccgtctgttcccttctgggtcagtgtaactgccagacagttttgctggttccagaaaccagaatatatatctggaatcagtaatcaatgtggtggtttggagttcaataattggaatttttaaaatcaagatgatctgcttatccagtgattgccattagcaatgaagaaagaaatggttttgttgacaactacttatttctctctccatgtgaaagtgtttttttgtttgtttgtttgtttttcaattctgtcatcatcgagacgtggatcccttgctaacaacagttcctggtgactatagaaattaagactccttagaagaaaaatgttattattacaattcaaaaaagaaacaaatgtgctcacctgttggtggg

SEQ ID NO: 132535 - DNA, 1066 bp, Homo sapiens
ctcaggaatgatatggattcagataaattacttagattgggctgctgggatgaaaggagtctcccttggtctacactctcttatgtgctgttcagagaatgtcctatctcttgctctccaactcttgctatctatgctatcattgtctaaacacaggaagaagacagatttaggtagtgaaaaatgtctgtgcatgcaactacctgcaatattgcagaggaataggaatctcatgctctccattcagattgttcttacaccagttcctttccttctcgattttgtacttaaccattcctgcttttctttttgaatctttggcttctttcttgttcaaggttttctctcttgcttctctccctttccctcaaaatcactcacataatgaagcactgaccttcgatgtttccttttctgtgacccttatgacaagaatgcttcaagctggaagagcccaagtgtcgggttggtgttcagcagtgtgagatgattgttttactcttgcctgagagtcccatcaagaagcacgggaaaggtttcctcgtaggcctcctggaactactgtgcgtgtgcatttagctggaagagaagggagcagacatcatcctgcagaagtcagattatggtagccaaaatgtgtcggtatctgcccattagagtttctcaagaaggattcttaaagataatttgatttggtccttggattctgggccttgccatgtttggtcccaggaactatggcactggtccctgccagtgtctgttgactgtctcgtgggtatggtcatctgtcctccactggaacataactcctttagttctacctggaaggaggccaaacacagtctttggtgttgtttcaaagtctgattctttctcttgccagttgtatgacttgagcaaattacttaacctccatgaacctcacttttctcttctgtgaaatagaaatgataatgtctaccttacagggttgtagaaaaaactggagaaaatggtagttaagtgcttagtacctaatgagaactccacaagtagcagctatttttgttgtcattgtctgcta

SEQ ID NO: 132536 - DNA, 3300 bp, Homo sapiens
tctcatcctttttccacctcttacctgagctccaggatgacattgccttcctgggtgaggcagcgttgcagcatctcatctctcccaccttaatttgtagcgatgcgttgcatttgggtgacaggcagttgttcgtgcttgaataactcaggatttgaattctacagtttgtggcatccgtgtaatgcttagcagtaggtacagctgttaactattcgcttataaataatcttttttgcctctcaacctgtctcccaggtagtgtacctgtcaccattaataactctttagccgctccctagtgatttgacctatcagttgtcgttcacagaaaagtggtgctctggcctgctattgaagcttatgcaggttctttcagctcctcagtcaccccagcagccatatacttgtaggaagttgtgttggtgggcttcacaagcaggcagctgaacacttcgtacagtttgataaaggtggcattacattttgaacaatagatgataagactcccatttagaccgcaaaacagtgccacaggggtagacaggggtctgggggagataagatgggtggtgaagatgaccaacagcaaataaactttcctgtctctttgatgctaattatctctttgcacctaattatcatggcatcatcatcatcctctgatgtttgcaaactaagagttgatgtgtttgatcaggttagtgaatctgtcaggtatggcattctgcctgtttctgaagcttaagaatgagaagccagtagctatcatgcggaagatgtgaactgccccccagtccttgtcctttagcagtgtgtcattcctctgtttggacatgtgctctcttgcttcctctcttcctctctctgttcctgaagtgtgctgcttccaacacttccccaaattaattcctacctgcatttaggtctcaacctagccatcactttttcaggaaactgctactgctctctctatttggcattgactgtaccaactaaaatgcccatatggcagttttcgtttatttcttattatgctctacaataactgcttgtttacttgtctttttctcctactggattgtaagttttttcatggatggtacatagtgttgtttgctatatccacgttctgggagtgtcatagaatctcaataaatttatgtgaagagaatgagaatttattttttatgaactcactttccattgacatatcatggtcatatcaatggggagttcaggcaataaattatggcatatattgtctactgtatactgtgctggcaccaggggttcagataggaaaacatttcgattgctttttacccttttagtgagtgactaatggacatttctttgtctgaggatatatcttggcagtacaggatttcttcagacgtggctcaggaaatggccgagagtaaggtgaatcacaaggcaaaaaaaaaaaaaaaaaaaaaaaaaagcattaaactatgttgggaagtaatcccagcattggtggacacacattatgtttttaaaaataaatcctccaaggaggtaaatcagttaggtattatgttggtttggttttcatttggaaaggaatttacctcgtaaacgatctttgttatccttatctcactgggtgtaaggagttagcaaatgatcacatttttaatacccagaaaaataccatattctttgccacacagatgtacgcatatgccacatatacatacatatatgtgtatgtatgtgttcctttatatataattaaatacaacagtgatctgaaaagaccaaaaagagtaagaaacttagcattttagggagaacaaaaacaaaaacccaggatgaagcattttagtttacctttataaagatcaggacaggttatgtctgtaggaacttatatacagtatctagtagatagaatgataaaataagaaacaaaaagtatttagtcataagttcaaggatagactcttgattgtgctgtatcaaatacacttttaaagttaaaatgtattctaaaaaggaatacatgcctttagcaaaaaaaaattatataaaggactgtggttgaaagtaagtgatattggggtatagttctagaaatagtctgtgcatgtaaaacacaacatatctttctgtgtgtttgataaaaatggtgaaggggaatatagtgagcacattattctgcacttttcctttttcacttaataatatatcttgtaaacaacttcatatcagcacataaagagctacctcattcttttttaacagctgcattgtatggatgtatcgtaatttgtgtgcctattccttcatacactggtagactaggtgatgaaacatatttttgatctttggtattctggttgttgataggggataaatggtagtacattgcttttatttgcatttctcttaatgagtaaggtttaccatccttttatgattatcagtcatttctgtttccattttttttctaaacgtcttttcaggttctttctatatttctattgcgttgtaaatccgtttcatttttagcacctttttgtatctaaagagtattagcccatagtatatctgtattgtgaatagttgttcatagttggttttcagctctttaccttgtttttgcttttgcttttcatttgtttttgttgcgtagttggttttctttttttaagttttgtgtggttttattaccttttgattgacttttgattcttgagtctggcttagaaagatcttcaagtccttaaaacaatgtgaactagttaatgttatctagttatcaatgttatctactagtattttatgtagtaattgtattcagtgaatttcaatctccttccccccccctcccccactccgggtctctgtctgtcacccagctggagtgcagtggcgctatcacagctcactgcagctttgacctttcaggctcaagtgatcctcccaccttagccttctgagtggctaggactgcaggtggtgccaccacacccagctaatttttgtattttttgtagagacagggtcaaactatgttgcccaggctggtcttgaactcctggcctcaaatgatcttcctgccttggcctcccaaagtgctgggattgctggcatgagccactgcatctggcctgaatttcagtcttactgaataaaatttttcagccaggattgttattttcttaaggtaataaatgttgttgtatagagcttattattaataagatttttcattcatctattttttcttccactgtattgttattttaatgacatttatttacacagagt

SEQ ID NO: 132537 - DNA, 1276 bp, Homo sapiens
taaaaggacagggaaaataaatattttcattacaaagattacaaaaataaagattttcattgcaaaattattcttatttttttttttctgtatgtctcttggctgttgtatatctcccacttgaataataagcagatcctatagtcagtgcttcctaatgccactccagtatcaaggataagctacttaaatagttttactcaacaggatatattgataatttatgtgttaacagaaagtagtagctgtgttgttaccaaaaaaaaaagaacttaaatctttaaaaatttaatatgcgttagcaactgagataacgaaatgaacagtgtggagttaaagaatctcatgcaacaaatggcagaattttaagtgcattttgtcaaacttccccatttaagaagagggtgagctccttcctatattactattggcagcttatcggtggtgttagtcaagcattttgaataaaataatatgttaaaaaatataattgatttctttgggggaatacaggagatctctagataaattcatttagatgggttgacaaaactaatggtgtgcatgattaagaagaaaaatttgacatattctgtgtataaccctttgagtattaattctgaccagatcacactgtaaataatgttaactgtcataaaataaacacagccggagtttgcaccatatgttttataattattttgcagcttctttttttttgtttgtttgtttttactgaaaatggaacctactgataactctgtgaagttatgtttacataaaagtaaattatacttgcacgttaacaaacttggcttcacagaccagtgtctctaggtttttgtttaaaaaaaaaattaaatgaaagaaaaacttctccctctctcgcttggttttttgtttttttttttcttattccctcagaaacatcgtctcaaacagaaatctgctgtagcatcttgtcgccgctttcttgtttttgcacatgtgaaggagaagcctttggaatgccacccagaggagggaaaagcctaaccactgaactcacagagagtgtttggtttaagtagccctggagtggcctttcagactgaggctactgtggtcttctagtttgtttttgttttctaccttcttccttgcaagtgtttaacactgccagaaataaaggctcccttagaacatttaagtaatttttaaaactgttattattttcataatcaccatctcctcttgatctcaggggaggctaggcatccttgtttatctttaatag

SEQ ID NO: 132538 - DNA, 1079 bp, Homo sapiens
ttcctagtttcatttctctgaactgagcagctacctaggatttttggaaacttagttttataggtgatgaagattatttttatatgtagaaatgtcaattgtgacaaaagttaaaaatttggaaatcattttattatctacagatctacagaaaaaaataggcagatttttctttccacctagatttaattttaagaatatgaatatttgattcatccacattttcatcttaacagatactgctacatgtttaaccaaaagattaggatttttgaatggtttgctatttagttacgtttcagagccaaagtataaaagttttgattttttctgccatttactttgtcatctaggttaaactcctccaaactgtgaatgttttttaaagaaatcatatctaggttatttatgaaaatatacaaaagccatcttcctgctgagtaaatagaaaactagtttgttcatggtttctctgtacttcttatagatgggtggagaatcatttttttgttaaagagtatacctacctacaaaagacgataaagagagatacttggggagaaagcaacttagtgcattatttgtttccagaagacaaacatgcaatttataatttaaattaagatcagggtacataaactattaagtatgataaatgacaatgtatttcaattttatattatgtcagtttagagagacggattaagggaaagggtaatgaaggaggaagagagacacagatttttagaaatgattttctcatgattttttatgatgtggttttgcaaccatggtacaaatcagaattaggttgcacagttagatgtccattcctgcattactattgtgtgattctctccttcacgggcagtcttatttactgtaaaactaaaacagggagacttccacaatgttagatcgaggaagaaaaccataattgataatggtaagaaagcttaacagtgccaaaactagtaatcctcaaaattgcatcttctaatatcacatctagagctctttgcattgagtaatatttctctttaaatcataacagtagtaattcattcaggataggacta

SEQ ID NO: 132539 - DNA, 1042 bp, Homo sapiens
ctatatagccgaactaaccttgaggagcatacagttcatgagtaaaacaaacaggtaataaaaactgcttttgtttatagaaatttggtttaggacagaaactaaaatttggcttagataatgttcccataattttctcttatttccttccaaaatatatctttggaagaaagagcaaaaatacgaagattcatctgaaagattattatattttctcttttcatttaaagtacattattagcttgagttagaattctatgaaatatttatgggatatatatacaaagctttatttaatgttacagttattgtagacagggcttaaatacaagactgaaggagaaggggaattttttttctccatgtcaaacaggctgtccaatttatgaaaagaaagggaaaaaaataaaaacaaaaggctgtgtttttgtgagtcttaaattgtgaggctagaaatacatttagatagaataaaaactcacatacctcagcttattagtgattgacttttgagaccttctacagaaaagaattttgctgaacttcacaacaagaaagaccacatagggtattttagaccacttttattaaatttagttagcatttttaatttttccacaatgttgcatgcctttaacaaagtccattctgaaatatagaattgtctataaaagatttggatgaggtatagaaaggtatacaagaaccagagcaccaagggcgtttattattagtttaaagagtttcatttcactgaaagctgatttttttttaaagtgagtaaagcatatattagtatattaatagtggtttaaattcccagcattttattatttttcacaagtctgtgggtcagctgggcatatctgcagtgagctggcatgttgacctggggttggttggtctaggatggcccatttacatatctggctattaggttgttactggctgttggttggggcagtggagataactgggcaatttatcatgcgtccttcagcaggttaatttgggcttgttcacctgcagatagttgtagggt

SEQ ID NO: 132540 - DNA, 1043 bp, Homo sapiens
ttctctggtgactttccgttggattcaaattgtggtctcttaggtgaaaaggtcagtgtgttattcattcagccacacatcgatggagattaactgagagcagtacaagacatttggatcctgccagacctagggcacctgaaggaagtttatttcttttctctctagcctttactatgcctgctgcagaagaggatggccctgtcttctgggagtaggggagggttttgattggctgtgtgttaactgcctcaaatccatggccatagggcgagtaagaaccctggagaatcaaacatgtcatctttgtagcatcacctgatttagtgcttttcctcaggtctgagatgtctcagggggcctttttcccttgcagcactgatctttcaatgaggtgctagtgtctgtcctgagcaataacaaggaaaaaccatgaagtgtgaacagctcttattaggggggtaaatgtcattagcgcctttgtagccttctctgcaatctgaatgctcctgtcaaaagagcgacttactgaagcctcctttaaaatcacataaatggaatttaagatgctgaagttttacattttaattaagcaaggccattaactccctttacatatacacttttttgtagccagttatgcttgtatgccttataaggctattgaaaaattatccacaaaaattattttaaggatttgagaaatagttggttaactttaagtcaaagttttagatatagagaccctatactcatgtgcccaaccattgtaatatgcgtattgacgtatatgataggagaaaacactagcattttgagttaataagtaggtcagtttggattaatggaaagtttgaagcttagagtgtttaaataatgattttattcttttcaatacacaagtggaaatgtttctccagtctaaattccccctagtattctcctgaaacaaaatttttatatgcagatatttgcttcttttgcaagtttgagaatttcacagtaacttctggttaccctgggttgtgtcttgcagttaccaa

SEQ ID NO: 132541 - DNA, 1032 bp, Homo sapiens
tgaaacacagttcagttaacaaatcaatgaggtttttagcaccagccacggtcatttgaaaaccccctcagtgactctttatctgaaagttgaatgtgttttctatttgttgttgcctgcaatttataaacacatccaattaaaaaaataggaaagaaaaggggtaaaacagaaaggaggtgtcagagaactattttctttgcaagatcttgcttaaacacctatggcgaacattcatgtgtagaaatggagccctggtaacttccagcaatatttctaactcctgttctctctctttatcttattcccaacacccccatctctggaactttggcgggaccaccacagccttggataagctcagcacgcagcacctgtaccaccccacccaagtggagattgtgcagtccaacgtcgtgtttgacatcagcagcctgatgctctatgggacacaagcagtgcctgtgcggctaaagatcctgctggaccgtctcttcagcgtcctgaagcaagaggaggtactgcacatactgcacggccttggctggactctgcgggactatgtccgaggatacatccttcaggtagggagaggacttgaacgccgcccgtgtccggggccgactgtgggtggggaagggtgagagtccttgacaaacctcgcaggaagggctgcacaccctcctctggttaaagtggtcgtttcagcaggcttgtcagggaaggggaaaggagagagacaaagcaggccaccatcgggcctcaggctgtattagaaggaaaacttggcctcttgacttgcgttacctttgtttgcacctttttgaattcaactctttctctacatcatgggctttctggcttcttcaacaagtcttattataaccctattaaaaaggagggctctttgaggcgggtaatgggtgtgtgaaaatctgagattacccttcatttgggtttattagggctttttctcatactcagtttgcaggtacggtgtttttcttggttgtctttgtacctaaaggtaca

SEQ ID NO: 132542 - DNA, 1398 bp, Homo sapiens
gagtgactccacaacagtgtccatatgataatttgtaaatgtgtcaagataaagagaggagactaaaaaacaactaagtttcgtctgacaaagggagataatgttcccagcaagctctggcttggagactatcccaacgaaaacaacattttctttcgtagaaatttttttccagaggggtgtttagggtttggtgaacagtagcacaggcactaatttgagtcctcaggggaagggaagtacatgcttagcagtggcaaagtaagaaccagatccttaggggaaatgtttctagggctttgttcagaaacacaaggatagaaacactatcgtcttcttcccttggtgcactcgtttggaaaaagcggaagctggtgcagtatctgcttaaagaatttgtctttctagtggacttagtttttccagattgtaaatgctgaaacccggctttgcctagctgcaaaattctcttttgctcagggaaaacagcttttagctgcctcctagttttggtgaggcagctggattctggtctctccatgagcaaagtccttggacttttttcttcgttttagagagcaaaagcaaggccattttcctgcctggcacaggaggcttttttgggcttgacctgagggcacagtgccctcttctgcctctctcctttacttgctgatcactgctgataagctctaaagggaagacatcctcataaatgcaaaggtttggtgcttgattaatggcactaagtattttcttattgtgtctctgagcagcttttgatttgtttctcagcctgcacactttttggatggtgctttgcactccttaaattttctttaaacccagcgcaaacagtgcctccccttcaaagtcctgggctgtctgcctattagctccccagattttctttttttcctagctatgttttattcagatggaacataaagtgaggctggcaagacctggcctccagtgtagtcactgctggtctgctggtaaggagtttcgtgggagggtgttgagaatgaaacacacagagctgtatcccgcttcgggtgaatgaatgggaggcaatatacaaaataggtaagaatgttgttcttgaatgagactgtttacattcacgtcgcggctctgtcacctactgtaggtagaatcttgccaagttgtataatctctctgttctgtcatctgtgaaatgtgagtgatgatagctcctagctcatagtgttcttctaagattaaatgagataatccagatgcctcatacatagtatacacttaataagtgttagttgctgttatcactaacttcctataaaagtaagacttcaacactgtggacatgatagacatgttttagcaaagtagagtgattaaaagttgggtgtggcc

SEQ ID NO: 132543 - DNA, 1079 bp, Homo sapiens
actgtccttgaaataccatctcattttattggccctcccttgatttcggtaaagcagagctattttttttaaagcatttatgaaagcttttattattgcacttcaaattatatgaatgttttaatgtcaacatagttcccgtatctgaatttataattagataatttgtaaagttcttgtttttagtggaaatgctgtcctctaagctctttttattttggtcacagtacaatcaagttttgagttcattaactaatgaacatgttatttaaataaactatttctgacttgggatgttctgatatatttctcagttaacaaattattgaaatttaagaacttctggaagaaacgtttctccttatagtctacaaattaatcacttctatatacaacaaagtttacaacctagctacaattggaccatgtttggaagagagatcctgaaatatcagggagattatacaattaaatatttccctagtgctaaattgaagcacaaattaaagatgggggtgaagtatgaatggagtctacagtgaggactccaacatctgaaaccaatagggatccatagatttaatattaattaatggaagagaaatattttacacttgcctgatctaaagcatagggaatggtaaaagcctgctcagtcttattctctgtgaatggaatttgtcccagtcatgttaacaatatccaaaatactgcctgttacaaatgagacagtttctataaaaatcctaatggttccagaaatatgagcatctggagctgtgtgagtgagcatggctttcaggcacagagctgcagtttcaggtatccccatgcccacccctccaccccagaatcagtaatcattgattgcatctaaatctgcagagagatcttttcctggcagttcaagtagttacagtagattgttaatctgcgaatgatcagactaaatcccttctgtcttcagaatttctatgcaaattagaattaactgtatgagataaatttattaactgtagtccgggagcttaggtcagctttagcactattcttaaacataggtttttattcataaaaag

SEQ ID NO: 132544 - DNA, 1034 bp, Homo sapiens
aagagggtaaagatttagaggaactcctttctttagggagcccttcacattgcatctgggaagggaaagatactgacttaggatgaggtgttatatttggcacaacttgggacaacttttgtgttacttctgtacatctttgcttcgtcaccaaagtgtgtgataatcatgcaaatcgattgttctttctaggattggaggtgcttttgaaacataccagaatttaagcttcatcttgtcttgcttcttgcttaatgaggaatagtttctttgtaaagtgcttaaaggtttataagtctttttgcatctcattataaatcctgtccttattaatgtcttctctatcatattatattagtaattgttttcatgaatgccacagagaaatgtaatcacattaccatctttcaaattgcattagtgaaaatgaataaaatatatatcaatggaatacaaaattgctgattcaacattaagatgaaatgagattattattacttagcatcatcagatatgagaagtgctttgcctccttctataaagttaggtgttctggtaaatatagactgagttaaaatgtgtgtttttctttttttaatggcgagctaaccccttattttcaattaggtgataggtctgttcatggaaggactatttactttctatttatgttattacagctgcctaagtagcctgtaaaatttgtaagtatacaggcaataaatggagtatcttaattgttaaatgttaggtaagaaaataaaatgtttttgcctaaattgaaatgccttttcatttcatgtttctttaatattactaattgcctaacaaaatcgcatgtattatcataggcctaatttaattgaaacacacacacacacacgcactccaaagcttgcgtatgctttgatgccatagaagcatgggtattttccttatataattggctatatcccgctgttgatttttactctgaacttctaaattatttaaatggggcctttcttatatcgattgatagtaggttgtgatag

SEQ ID NO: 132545 - DNA, 1050 bp, Homo sapiens
ggtaaaaacacaagcagggggtgaagggacaatggaaacatgtgacttcttaaggattggcctgaacccgttattagctaaattgtacaccgtaaaatgtcctttgtacctcataagacaaatgacttaattttttattcctcagttgaggtcattcagtcataagtggtaaaaattatcaacactgagctctttttctctttttactttctgcaaagtattatgatccgtttaaaccccaaattataatatgaagggaagtcatgcaagtaaaagacattaatttgctgaaaaatgcccatgacgggtgaagaactttaactggagtgaactcttgctactgataaaatatgagtatggtattacagctcataagaaacacttctaataccacagggtgtgaggagaacaataaatgggagtttctttgtctacacatgatcaagcagactcaaattgtatggctggaggattgagagactagtcttttaagtaattttggtgtcattaatgggcttgcatcacagtatctctgtaatgctcaatcctggtattgtgcagaactgctggtgtgagccgcattgaatattggcctgttatcaccaggtttttgagcttgtgaatattttacaactgcacaggccgaaccatattctttggaaaatgaatgccattgctgctgtgttgtgttctccttacataggaatatgctttgacatttgcttgcttctgcttcattctgacactggagttgttttacttttgtccccactcccatagcctgctattgagacaggtggtattttcaaagtctaagtaaaatattggcagattatgcctctaccctcagactctgtttttcaactgttcccttctaaagttctgcaccgttcatgcctcactacatacactccagcagttgctggactctgcagaattagaaccaggtctgtctctgacaattagctcaactggctgcaggataaataaaggaatgcgctcaggggctgtagtctgtgacacagtgtaacagagcgtaaaaaggtgcat

SEQ ID NO: 132546 - DNA, 1101 bp, Homo sapiens
aatgttgaagtgcaataagaacaggaggactctctgctttctttggaaactattaaccagtaaatgaaaatttagttgaaaactagtagttaataattgccattttctaacatgaaaggattttatccctcatgtgttttgttaaacattgtaaaagtgtcaaaattagctgaactctcatgtatttgtatttaatataatctgtttagatgatctggatatgaaatgtgataggaatgatggttgtagcttagagagaaagagagagagattgagaccctctctgaatatttggtttctggatttaatcaccaatgcacttattttattactcttggcttttgtagtctgaggactttgttttcttcttttgcttaattttcttaacctgaaatgtgacttggcaaaattaaggacagaggtgtatcaaattctttgctagtctctatttttttttttgtgaagaagagatttgtattactacgttttatttataatctttagaagagctataatagaaatgggttcatagatctgtaaaaatcaaaatcactcttaaaaaatccctcaagctgtctgtcactaatgggggaaaaaatgtaatccactttggagatttttttttttaatgagacagggtctcactctgttgcccaggctagaatgtagtggtgcgatcatagctcactgaagccttgaactcctgggcttacgcagtcctcctgcttcagccttccaagtagctaggatggtaggcatgcatcaccacacctggctaagtattaaaaaaaatttttgtagagatggaggtcttgctgtgttgccgaggctggtctgaaactcttgggctcaagcggtcttcctgcctcagcctctcaaagcactgggattacaggcatgagccagtgtgcctgacttgagatttttttttttcctgtgttttcacatgtgttgttgtaaggttcatttggttttgttgttattgttgttaataaggacataaaaaaatttgatatgagaattaacgaagaggcactaacataaagataatagaaaagaatatagtggtagcattcaacagtggtgtattgagattgcaat

SEQ ID NO: 132547 - DNA, 1128 bp, Homo sapiens
agataactaattatttgagacccaaattctggtctcccagaatttggtacctcatttttttttttttttttgagacagagtcttgctctttcacccaggctggagtgcattgtcgtgatcttggctcactgcaacctccacttcccaggttcaagcgattctcctgcctcagcctcccgagtagctgggattataggtacgcaccaccatgcccggctaacctcatacgttttaatcccaaattaatgccagctctatatagaaaagacaggtctgtgatcattattcatctgtgtagttttctttctactgtgataatcatagctcagtttagggagcacttactgttggcctggcaccatgacagcagttttacagggttactttcttaattaagtatactcatattctcgtttcacaaatgaggaaacaggcccaaagagaaagtaacttgtctacatttttagagcaagagtaagtggaggtgctggaattggaaccctgatagttagattccagaactgtgactcttgaactacttaactgtaccttctcctagaaggatttgattattgcttttcattccaaaacaaagttttgtgtagactatttaagccatagggactgtagactgtattttgaaagccaaaattaagaaaacaaaaaatgtggccccaaggcactcactgtttttcttccttgattcttgaatcttaagacagcatgggatattagtgatgacagtcttcctactgccaaatggacgcttggccactagttgtagatttgcttcaaagattttgtgtcctcagaagtgaaagaaaaattttagtgaggcacatgctgtgggaagggtggtttggtcagtggttttgtagtatggtttgtgttgttttctcagtgtggagaaaataaggaaagctatatagtaaggaagaatatgttaaaatatgtactctacctttcaaagaagagtccagggtgagtagcaatgctagtgccacctgaaagaactttggagatgtttcttaggtcagaatgaaaagctgttgcagtattgcctaaaatagaatttataaaacagaacgctattgagacttgttaatgtttacagatactgttttcttt

SEQ ID NO: 132548 - DNA, 1182 bp, Homo sapiens
tgtctccctgtgcctcttcctctactctttcaaatcttctttttctcttatccaagccaaggttcaaggaacattattaattgttatcttttttacctgcaagtcatagacaaggactagagaaattcttgtatgtgttaagagtttacctaagagactattatgacagcagtcaggaatgatttctttaaagtatgtaaatgtagcgtcttcattatggcttagatttacaatgctgacgactttgtgaagcagagaaagttgaagagttaggggctgctttacgaagtgtactttggaacagtttctagtttctttcaaactttgaattgaaagagaaaaagcaaagtaagtacctaaatcagcactagccaaaagaaaagaaagagaaagagaaaagaaacctgcacaaggcagcagctactctccattgggaagctcatcccctccttgacagttgctgggctggctgtgcaatgtttgatatgtgctacttatttactgtctttctgtttctctcttgatgctcttagactgacactgtgttaactgtcttatgccactgattacatctttcctttcatctttgttatgactagtttaaaggataaatggtgattttctataaacacaatacataagcttaaagaaaaagatgaacattttagagaatttgggattattcagaatccctatgactataaatgacttagcatatctagaatgcaccgagttgatttatttttttctattaatagtcatcatgattagatagtaccagctttaattttaagttttgttgcctgtgaagtttattttcaatgctcaataccatccaagagagaatcttgtttaaaaattttaatcaaaacatatttaaggtgcttggaacctaagggatcacttgattcaaccttgtcatttctctgttcatcttgcaataacttgagggggccacctaaggttattctagatatctagattcttttcctcttcttgccccttgactccattgataaattgagaatgaaaatatctctctggaatatcttttgatttggtatgtataggaaactttgatatcattgtagaaaggcagaatagaaataaaagatatttcaaagtcttttgatgtaggttaccatttgtaaatctgtgaatctctgctttgacttcctgaaa

SEQ ID NO: 132549 - DNA, 1042 bp, Homo sapiens
cttgaggaatatgagtgtacatgggaaatatcatctacaaccaggttgcatttaaataaaatcaaccatcattctcctctttgtcttccgacacccctttcccccacatgtaatacttttaacttgctctctcatgtctgctcatgggtgggcatggtctactaaactgacaaatgaaacagatctgtctgtgatacttcatatggggaaccttatgtaacttatgcgggggactcagctatggatgacatcccagtagaccctctatggattcccagctgttacaatatctcataccctttgtgaccttttcttctatttttgcatcccttttagaaatttaggatttttttaatttaaccccgaatttcttaaatgtgggtacaatttacacagaatgaaatagacccattttaagtgtacagtttatgagttgtgacaaaatgtgtatactcatattaaactatcgccccaaccaaagtacgtatcattttctttaccccataatgttcccttatgccttttccagttaatctcctttcccctaaggcaaccattattttgatttgtcacaatagattcattttacctgttcaagaactttatataaattggatcatacagtatgtactatgttgtgtctggctttttttgtttgtttttctcatattgttgtgtgtattagtagtttgtgtcttctttattaccaagtagtatttcactgtaaacaacagccatttaaaaaatgaatatttagacatattttatgagttgtttctatatagtggagacatcttaaaattgcagcaactcttgagtttaacaaatagttgactgtcatcagactttcacttttttactacttccctgcccaagggtgctggaattccccagctgtgggctgaatgcccatcccaaattctcaggcttctgggtattcttggttcacatcctgaacttcagaaggaatggtgacctccagttcactgagatggtttagaacatcttaaaacttttgctatcctcacttacgttgtgaaac

SEQ ID NO: 132550 - DNA, 1982 bp, Homo sapiens
tcaacttactcacatacagattgatccattgtcatctcctttgcatctcatggattgttgtgaattatttgctcaccctgggagagacgtgctctgaattataataatttaaaatctgtgaatctattaaaaccgtatttgtagctctaaaaaaattgatattcactgggcagtttgcccaacaagagaaagtcaaagagattacacacttaccctaggtaacagcaaccaccctgccaattcttcctttgaaagaatacagcagacccaaattatacatctgtggataaggggagacaagaaaagaactcaatatatcaaaatcagaaagtaaattccacaataatggctacaataatgtttcaagatggtattttagcataggcctagtcattgaactaatcatagcttagaggggtttaaaattgtttaaagtacatcctgacgttgttaagtatgtttaccactctcacttgaaatcagaatattcactcatgtatggtataccctgagatcatatcggagaatgacaatgactgcattgtttggtggaaaaagtgaggcccagagtgtcacaatggttttctgatttctcatctaaaggtcttttcataggatacttaattaacacatcgagctcccgcggtatgccaggggctggcagtgtaaagatgcataagaagaagctaggtgcagtggtttgtgactatagtctcagctgctcaggaggctgaggcaggaggatctcttccagactagcctgggcaacacagtgaggtctcccagtgaggtctccttcctttagaagaaaaacaaggtgcataaaaataagctggtctttccatgggagcttcgctaaatgtgatcttcccgaaggacaggtttagtcctgttcatctttcaggtctcagcacttaccattgcgtctggcacttagtaggaacgtacctaataattgcttgatgtgataaatgccaatctttgtgccatggaatcacagaggacaggaaaaccaaggaagaatttaaaaaggggatggagttttagttgagttcttgaatagtgttttggggtgcaaatagagtggagaataggtaagcccacctaaaagatgctctccttgagggcaagaataaagttgtgttgatctttgtatatccttgtatccagcatagtgccccatacatagtaggtcctcaaaacatatgctatatttttttctgtatataaacttgaactatacctttcttaactttcatattacaaatgtggtaaatgttttggtttcaaaacatttcttgtttgattatatctaaataatttatgctagaaagaaaatgctgtcaaaaggctatctcatttaatttaattatgtcaagaagaagttgaaagtattatttgctcagataatcctcactttctgataattggaaatcgactttcttggactgttaaggatgaccacctcaaattactacatttggcactaagtggagagtcccactgttaattttcaattaactacaatgttgattatcttgtcagtaacaatgctttagttgtttttaccacctaatctcagttgaggagatcatggaactaacaagagcttgattgtggattttattcttgtataggccggttaaatttgcaaaaggaaaaactccttgaataaacatagacagcactccaaattttggttagctgttaaataaatggatgctattattacaaaagaggacttggctaaagaaggtagatcatcacatctcattaccatttggataaacaaccaaaacatgtattctagtgacagtacttttataacatcggcgtgtgtgcgtgtgtgcgtgtgtgtgtgtgtgtgtgtgtgtgtgtatgtgtatctgagtgatgtgtgcttttctgaaattagtatttagctttttagtggaaataggaagcctacagtgttctttattggttttaaattttttcagagt

SEQ ID NO: 132551 - DNA, 1039 bp, Homo sapiens
aaactaaaaatagtacccagtgggattgaaacattatgcatgctttcagtacttatttgatagaagaatctgtttcagaaaccaacttctaacaaaagcagttgaattacacaattattatatgtttttaaattgtagttacatatttttattggagtcatggtccacaaattataaggttaactattatcatgtatcatgcagaggagatgaaaccacatcaaagtttcctaccgtccactctaagctgcagttcaagtttctaacacgtttttgcttcttataagtggatgagctgatcttcatttctttttccgtggtatctgatttctttctggttgtttctgtttaaagaaatatgtactgcttataggaatgataatttaagcagttagagaagaagtagttctctatttgtgcaggtagatggaaggaacaccttgccaatgcataacatagtatctcacatactttaattccctcaataagttattgtattttaaaggtaaaagaccaggacagagaaacaacagagggcctgattctactaagaatttataactgttataagatcctcaaccaattggaagttgctgtctagtgagatgtgcatctcatttgctattttgctccaattcacaatagccagtactgtttcaataaaggaaaaatttagtttactctgctagaactttctcttgatctgagggagttggatagttggattatttgaggttaacataccttagcacctttagggcaaaatgtaacctgggggtgtgatagaatattccatctagaggataaggagttttagattataaggaaaattactcccttagtgggctcttcaggaacaattttttatcttgtggttggtcactttcaatatatggcagttgctttccattatattctcaggctccaatcaatacgtacaatattatgcaacttatagttacattataaccaaaatatgtcaaatgtggtttctgagtggctgatttacagtaagtcttcctcagtccccaaagtgggt

SEQ ID NO: 132552 - DNA, 1585 bp, Homo sapiens
ctcccggctcaggagaacagcagccattcaactgagtgctttataagaaaagcaggacttaatgaaatatcttctgtcttcatgcgttggaagatatgtcttgtggtgtaataggagtatattagcaaagtacattttttttttttttggtgaaactgttggattgaaattcagttcgttttgtatggtcttgaggcattagaagtgatttggtgtattgcaaattaaaaatgtaaatgtgacattttggctaaaggcatgcctccatttctatgtacataataatatttaaggaatgtgtgtgccaatgcaaagatgcaggctgaagtttcaacatgggtagcactccctagcatgaggaaactcatacttttttttttaggacctccatttggccttattttctaaattttcaggcttataagatgagcatagtgagctcagttttaaaacgtttttactgatttagaaccacaaatgagaagagagaaccatttaaaaaatggacttctatgcagtgagaatgagggtagaagtggtggtaggaggaggtttcagtttttatggtaccgaagggtatgccatctctagcacacctgctcttggcccagggaagaccacctgagctctgctgtgccccaaactggtactgtctgggtggtgtatgtctgtgatacaacagaaaagcaggtgggacacatgagacacgatcatgtatttcctagttctagaaagctaacagcttgtgtgtgacatgcaaatgcagagtgatggaagactttttgtggagagtagtctgatccttgaccttttttgggtaggacgagtgatgttcttcaaacacatcacctggaatggtctgtcatgggtgattgttggaaatctgtttttaaaccttgaattacagtgaaaagaaaattgggttttgcagatgtgagtgtgtaaaataaaactggaaaaaaaaacctattgagtacattgacatactatgggagaaaatgtagaaaatgttatatttacaggttaaagtaacattctggttgtagatgaaccagattgtggggttgatagttcagaaaggaccttgcaaagaagactaagttcctggacaaagtaatgaaagtgacattattggatattcctcattgtggatcatcattttggtggactgcgtggaaggattgaatctgttaaaagatgatcagctatggagagttagtcaagtagctgggacccacttgaagcatttcttcctctcttctttttcttctgccttcctaaatgtgcttcttctgcacattttagaaatacctagtacatatacatattatgtccaccataataaagatgcttaatatacttttcaccagctatctatttcaggagtattttttagcttagactgctttcattcttgccatgtcatgtgtcctagtcctttttaaattttttcctagagaatgagccatttcttattgttcagcatagctttatactctagggagctcactataggacttgccagtcatctccttttcctgcttgtatcataggctttgccccagggctaggcattatcatcact

SEQ ID NO: 132553 - DNA, 1051 bp, Homo sapiens
tgagaggaaaatgagggttaatctacacgtaagattccccacatagtgactcgcgcattggcctgcacgtgtgaaactcttgggtaaagagtggttgtaaacttcaaagacagatgacactctgtccatttcaccttatgagcctagtaaagaagaataaaagacttgaaaagaatgagagaactggacctaaaaatgtttgaagcgttgaccgagtaccttttatttttcttttctttccagtgatattcactagtgaacttgcaaagtggagtatactgaacgttgtttaagtttggacgattgtactgatttttgggtgaaaagaaagagggaagcaccttttaagctagcatgcatggctgaaaactgatgtctgaacaaagcaaattgattagcacagatgatcttaattggagttttaaaaaagtcaaagaaaacaaaacagaggagtgctttgatagggaaagaagacaaaggtgagatgatgcttagttgatgtattgagtttagagacatatagacagatatatgattagtgtgagtagtataagtatggaaataatgaggaacaattagaaatttttaaaaagcagaaaacatgtttaggtggaatctaaaaccttgtttaatcttaaaaaaatctgaaatgaaataagcaagggacagtaggcagtatttagggatgatattgactaattataatagcttagttttaaaaagggatcttagtggctttcagtttagaattttagatatagagaaacattcattaagttttaaccttgtttttttattattaggacagatacataaaacaaggtttttaagcttaaagataacatgtttaaatgagtaactattaataataaatattgataaatagaagtctgcctgtgctagcctacaccaggaacaggaaaaataaatttgaacaaatattttaagaacgtaaaggaacttaggcattgttgaatgtatttttttttaaattcctacataagaaaattaaaggaaagaggaaaagaaaaaatttatgtcaccaatgtga

SEQ ID NO: 132554 - DNA, 1099 bp, Homo sapiens
tatcatttctgtgacttttctcttttttcctttgtcccctttctgccacccatttttcacagccattcatcttcaaatattttcaacggtagctcccatttacaacctggagctttttatgtcttcttttcagaagtctggtccctaacattttttttttttttttttttttttgtgatctcagtaaacaaagagtgtgtgtatgtgtgtgtgtgtgtggttatgtgtgtaggaagcctgccatatttcctccctgccccacagaaaatatgttttctggaagcccttttgacaccgaagtgaatgcccactggccctcccttgttgaattctcctgaggggagagagagaggcctttatacttgtcatatcttttgtttctgctgattatacacaaagtaagttgtaaatagctctctcacacaccatgattccttcaaggtatgtatatacaggagagtagatatgtactcagcctccacttgccctggggatttcagagggtccctttcaaggcctctgacctcctgttacagtactaagataatgaaatttacatcagttgtaggcagttattccataattaaacctgtggcataatgtttagaaatattagctgaacagttcaccatttttttttgtttttaagttaaatgattttattacttttaaagcaacatatacaatcatacaaaaagaataaaagttaagtacctataatcttaatcactgtgaacattttggaaaatctttgtagaactttgtactatatagtatgtcaagtatgtcattaaaacaggcactaggtgttagcacagaggaaaagtggataaaacggaattccccaaatcagtttaaaatttatattaaataatggttaggcacaccccatattttattatcctaatttacaatagactaataataaggggttagacaattgatatctgatttttcttcaatcattttttgattgcttgtggctggctaacttctgaggcttctaaatcaaaaggtggaatgagatgtgctaaattacaactaattaggttatcagcttttatctcttttgtatcttccttagtacattttgatgaat

SEQ ID NO: 132555 - DNA, 1127 bp, Homo sapiens
gtcttactgtgttgcccaggctggagtgcagtggtgagatctcggctcactgcaacctctgcctcccaggttcaagcgattctcctgcctcagcctcccaagtagctgggattacaggtgcccgccaccatgcccagctaatttttgtatttttagtagagacggagtttctccatgtcggccaggctagtgtcgaattcctgacctcaggtaatccacccaccttggccccccaaagtgctggaattacaggcatgagccacgacgcccagcacccagtgaagtctttaacactaagtccctctgagctgacagcgatcttttcggtcattccaaacacagcatcactctaggaagccttctaaaagatgattgagttggcccttggtccctaagtgagaccaagtgactctgtctctttttagtttccccagttgcttataatattcctttgacccttgtggcttgctttcctttcccctatgcggcttccatcgtggtctcaaagttctcagccttcattggattggtatgctgtggtgctgcttttgtgggctgggggcagagtaccatttacagatatactgtgtacctactgaatccttaggtgctttacatgtgtcatctcattcaaccttgccaaccctgcacaataaatataagtatcctcattttacaggtgcaggaaacaaggctcggagatacgtaactgagcaactttacaagatattgcggtagagatttaaacagagatctaattgcaaagctagaactctttcagtattacctgtctttaagatagctggagttgagtgttgaggatagaaagtaagttaacctgggtgtggcatacttgaaattgcatttaatgtcagttgtcagagttgacaatgtatttgcccataagcaacaacctgtggtgttcaatttccaaaataatgtattacaagaatgattgcaaaccaatagaataatagaattctgtacctttttttcttaaatataagaacccgccgggtgcagtggctcacgcctgtaatcccagcactttgggaggccaaggtgggcagatcactttaggtcaggagttcaagaccagcctggccagcatggagaaaccccatctc

SEQ ID NO: 132556 - DNA, 1160 bp, Homo sapiens
atctgctatgtgtaaagcagtatggcaagtgctattgggaaatacaaagagaaataagttagttcttgatcctaaggagagaaaaacatgtttttaaggttcaaggtcatgtggtgcttagagccctaaggaacatagagcacttgggacgatgagatccctttcatccaaaggtatcaggaaatttcatggaagaagtggcatcaggaaatagggacattttcaaagggagaatacaggcgagggtattccaaaaagagcagcatgagaactatttcaggttaggaaagtccaaatcagtatgcaagagacataaaatattctaattagagtgtctatcaagcatttttcatgaagaaggaggagaagataaagctggaaaggcaggttagagctagattgtagagggcctggaaagaactgtaattggtaattggtggggagctataaacatgatctaggagaatgtgttcgacaattggaggggtggtgtatagcactagttggcaagtatggaatgataaagtcaggattattgctaaagggttattgcagaggtctgagcatgtacttgttagaattattctggaaagtgtgtgggggacagctgaggggattgaaagggcagaatggacaggctatcagaactgactgggttcaggaaataaggagaagccttttaataatgatgtatggttctgagtctttgttaatgggcttatggtaataacattgaaaaatatagaaaaatccagggaaagctgtagtaaagaaaggagaccagtgaacctatttgcttgtttagctcgagatgttaactggacacttagaaaaatctagtgagagtttgaaaatgcaggactgaaattcacatgagaggtaaggattagggatttgggagccctgttcacacagaggtacgtgacagatgagacttgagaagagcttcacgtcacttaacgagaatgcgtgtaagagagaaaatgcggccacatgatgtggctcatgcctgtaatcccagtactttgggaggccgcagcaggaggatcacttgaggccaggagttcaagaccagcctgggtaacttagcaagacccccatttttatcaaaaaaaaaaaaaaaaaagaaagaaaaagaaaaaaatttagctaaaaagaat

SEQ ID NO: 132557 - DNA, 1412 bp, Homo sapiens
ttaaagtttgggtgctgtatatcacattatagcatatctattaaagacatatacatatcatacaggcatatatgtgtaaacataaggatggagaagataaagtggatcaacttaactgggaaaataatgtcaaaatcactattttaaataaattgcttgtaaaacaaattaactgccatgataattctgtaatatctttataaaccagaaattacaggttttctcaccagataaatttacattgggaatttatgtagctctttattagaaatatgtctctttcatgaatatagtgagaagagtccagactttttagctagatttacctgcatttgaactgatctctttcctatgtgactttgtaaaagttatataacctctttgaatcttagttgcttcatttataaaatggggcttagaagtaaatgatgcctgtgaattctggcacagagagggttagttagaccaatttcttcttctgtctgttactattgtagattgctagtcttatgcagtttgcacttggtatctgtttatcaacagtgccacagtgttctttatacttgcatcatgtacatacttggccttttcaattactagtttaaaaaatacttgtgtcactcttgcagaagtcttacttttgcagaagaaaatgagggtggagagaaatctcttctttcttactcttcactgagaatcagtcactgagcagcataattctaaaatcttatgtggcttttgggtactttatgaacctttttatggtaacccagaagcaaggcactgattgaattaatacatttccatcaagggactattctgttggcctgtcttcctcctcctaacccatgcatgcttctataagggacttttttgttgcattatttaggttgccacatatagtggggatgacagtttgtagatgtgcaggttactggtaagccttatagcctttctgtttttaaaacaaagggaaaggacaaaacaaaaacaaaaacaaaaacagaacagcaacaacaaaatcactacccaaaccaaaagtaacttaaaaataccatcttagctttctggaaaacccagtgctttataaaatgtagaatctaaagtttgcatactgatattaatttttaatagttttaaaacttttaaatacaacttctgtacaaaaggatatgtgttcatagggcagatctgattaagaaaacctcaaagagagaaaactgcctgaagggctatcaccaaggaactgttaatgtatttttagtcgtctttcttcatttacaagtacctaccaatgtatgaataggtggtagtttcataaagggatgatgttacatgtatatgtgacttttaaaaaatgcattgttatcctaagtatctttccatgtccgtaaatataggtattcatcatg

SEQ ID NO: 132558 - DNA, 1056 bp, Homo sapiens
tttttggcgggggggcggagtcttgctctgttgcccaggctggagtgcagtggcgcgatctcagctcactgcaagctccgcctcccggattcacaccattctcctgcctcagcctcccgattagctgggactacaggcgcccaccatcacgcccggctaattttttgtatttttagtagagacggggtttcaccgtgttagccaggatggtctcgatctcctgacctcgtgatccgcccgtctcggcctcccaaagtgctgggattacaggcgtgagcctccgcgcccagccttcttgctgtattttatatagattaaactgacaatttgatttcagcatttgcaatttgaaatggaagtgtttcacataggttttggtaacctttgcttctgagttggattgattctcccctccccccagtcaagtataattccttttttttaaaaattaattgctgtcctctcatgaattagcatggcttggctaaggtgaagggattagaatgacttttcaaggcatgataatgtctgtttaaaggaaagaaaaagaaaaaagtcttttaactagggcttaagactaattccagctactaaggagacaaaaattactctaaagaagacaatttggttttattttatatgtgcatgttaacctgctttgagatcatcattttgtattttagggtattctcttagatgaagtaagatgttcttcatttgttactgaaaggggacatggcctcactccaggagattaaagctggaacaccttctgccttctgtagggataatcacagctcacctggctgtagctcaaggtcagggcaaaaagaggggactttgtgctttttagaattgcctatgactacagtagagaagaggaataataaaacaattggacaagattgaaagtgaatgtgcatcatatgaagatagttaataagatgaatgatcagaaaaagacaatctggaagacatccttcagtggtaggagaatcagtggtagaagaagaaaggggtattttggggtgcaaaactatgacctctgttaacttg

SEQ ID NO: 132559 - DNA, 1050 bp, Homo sapiens
aatgcttaaactttgaaaatttaagtctgatcatactttaattttggcaacaaaacttactaacgtagtctttccctgtctctcccacaggttagaaactgtgcaatcattatattaaaagttaactaaattttattaaggaataattaggaaacaattccaagaatttgatgtttaataaaataggtttttcttgagaaagaaatagtccctctaatgaggctcctgaatgctgggctggcatctgagttctttaacatctctcctccatgtctcaaaactaaccaaacaaaattcgcttaactctctcttcccttcctattttgataagctctgtggaactgtggtggcattgcaagtgtactgtttaattaaaatccagttgtcagcaggctctcttccactgggtgtgctgagagacttaagtaagtttccataaagtaaattctgacgatggcagcgtgggttgctgattcaagttattccttctcttctgtgtcacttttgacggatggtacctaatgcaatcaaccacaggccgagaaagccttttctttggttgctttagtaactggaccaggagttcccctccccacttcatctccccttcagtggcttgctcactccttgctgccacccccaccaacacttcagcccaaataggaaagcggaaagaacagcagaactacctaggactggctgacaggctttccctaaacctccatttcccagcggtgaagccgaagctgcctccctttgcgtgcgtttttgataaatttaagaagtcaaatcgctgacacagatagataatccaagtgtatagggtgaagcgttataaattaacacattattccctcttaatgtgaaatacttgagaatgcattttctgagtcccctgacatctacccagtgagggctcacattgtgcttttctagtggcattgatttgttaaagcgctgaatcagcatctcaggccagctgcctgatccactgttttgttgtggggctccagctcctcctctctgccagcaatcccttttttccttcgg

SEQ ID NO: 132560 - DNA, 1406 bp, Homo sapiens
gactgtgtggatattttgtgtgtacctgtgtgtgcatatatgtgtaatggtgagcatcagtgattatatggagagaatagaaatatagggaactaatttatgcttaatggatgctattaaaactgtataatattatgctatttatgaaatagagtagtacaacaaaaggagagaaatcacagttttaaatatgttttcttttttttttggttttgatgtagttagcaatcactcctatccccccaacccacctttttctgtcatggtcactgaatgtttacctcttgtgcatttttggaaagcatgtaaaagaggatatgagcttgcattttttttctcttcaagatgacattttagtttgtataaatattacataacttaagttcaaactatgtgagtgaaagtatgtgtgctgttcatatttaatatgtttgtttttcttacctgtagttcatcagcaatgctgattcagcacgtgtgtgtgtgtgtgtgtgtgtgtgtgtgtgtgagagagagagacttattgaaattatatctctgatatctcttgaagccagccatttaaacgagtattactttcaatatatacagttacgctagtttttgttacaggtaaaagtttgtccagtttaatcaaatatgtagaattctgtacatctcattgctgaggcataaagaggtttctctagattatgattattttatttctaagtaaaatttacttagcttatgaaatgaataaaatttattgggttattttttttaaagttttctttaatagtataaaaactaatattttcctgattatttatttagacgtttgaaaactctgactagtagggctgctataaaaggtttcaaaactgagttacagataatttaccatcagtatttaactatagagaaaattgtgggaaatgtccatgaatactgaaatttaataatctagttttatgtgttctattagtaaactaggaagtagggatacaaaaatctttgtcttttgtttcatatgagcaaagttggatctgcttaaatgtacatctttcattctgtctaatagtaacaaataatcacaatctgaagccaatttagatttagtgggatgaagtatgtgcccctaaagttcaagtgaagtctatttgactacattttcctgtgcctgtacattttttcttctatactcaagtatgattttctcaaattatttctatgtatatagctgagtatttgagaacattaaagggtatgacacttgtgtaaagggagttcttctttggatcagtttgatcagtgacaggtggagaaagaaccttattttgcctattttagtttcacaaggtactgttaaaagcaaaaaatgaggcttgcttttcaaagttttttttttaatcacacttgaggag

SEQ ID NO: 132561 - DNA, 1049 bp, Homo sapiens
ccctgtgcaccgtgattgtggtgctgcctggagtgtgcataagtgtgtatctatctgtatatctggagaggggttagtgcagggtgtcatttggtgcctgacagtggaacagtgcagttgactcttagctctgctatccaatgacatgcagtggctgagagtttgaagctgatggttgggtctccagtgccgcctgcacacctgacaggcagctgttaaactgagcaaaggcaagcttggggagtcacaatctatgcataaatgatagggatatctgtgcagaaggtgcgaaagaagctctgaccccctccctcccccaaatctcccccttcccaaatgaaatgcacagttcagccagcttcttaactacactacactcctgctactggctgccaagaggctcaaaaaatccaccttcacttttcagtcagaagaggcagaagtggatgtgagagaaagagagacacagagagacagagagccaaagagggcaagagacttgactttaagagactcctgtactgacaactccatgcagttcggaaccagaacgactacggctgaaccagggttcatggggacatggcaaaacgctgatactaacctcttattcagaatgtcccaacaggtaagttactttctttcttgattttttttttcttttttttaagaaaccttgaattgttatgggcacttttgtttctggtgtttttctttctaaatactttttaaaatgtggtcacttcctagttaggctcttgttttgtcataactgtgttactggaatgtgcagggttacttcatggtttccctaagggcgtcttaaaagaaaaaggggaaaggataccgaagtaaaagaaagcagagacattgttgaaaagtttcacagtacaatctgggtcaggggaagacttaatttatttctttgttttctgttgagaatgaaaaaagccacctcccaacaaatgtatctatcaatatgaatcacttcgtccaaagtgtttgctctctcggagtaggttccgcaacctaaaaaacagtcatcaaat

SEQ ID NO: 132562 - DNA, 1151 bp, Homo sapiens
aatggagaaaatcattttccaagccctcaatagcagatggtgccatttactgaggtaggcagcgctggaggaggagcagatttgaggagtaataagacagacacttgggaagatgtcaagtttgaagtttctattagacactgccccggaaatgacaggagtgcattcatagtggagaagggagatctaggctaaatatagacatttactagccgtcaacaggtagtactgaaccctgggaatgtactgggtagcttagggacatggaacggtgggatggggaagaaaggatgggggggtcatctcttttgtcatataattgcatagttagcatagtgatattaccctaatggttaagcgcagcagtggtcgacactttcatcttttgactacttttcctggataatgtagctaaaagtttacatcacctactcttgtaatctagactcctgcccttttctgttaatagggtatgttctgaggtggtgtccccccacagcctcctttccttttgttcactgattatgcattctcttcagtcccctgggtctcctgtggactgttttcctgcacccagtgtgcttctgcctccctccatttgaggccatgtgtcttctcatgctctcttgctctctctttttgaactgttgcttatttggaaatattttcagttatttccacacataacttctagatgtttatacctttttacagagtcaggtatcctttttctggtgtatttatttggtctggaatgtgtcaggttttgaggccacagcacagatgctttgctctcccataagtgtgggcaatatgtggagaatggctttgtgtggattggaagtggaggtgaagggggaagtatcttgttgggaagaaatagctgactgtggccctcaagtgcttcttgggtggatgcatttaataatgatcttagtgaatcagttgctgcatattgaaaacaagatggctggggccgggcgcggtggctcacacctctaatcccagcactttgggaggctgaggcaggcagatcacctgaggtgaggagttcgagagcagcctggccaagatggtgaaaccccatctctactgaaattacaaatattagctgggcatggtggtgggtggctataatcccagctactcag

SEQ ID NO: 132563 - DNA, 1781 bp, Homo sapiens
aggcatcattcatgactgattatagcccatggaaaaaaacctgttacttttaccaaaagagtttggggttggttttaaaatttagctttggaggggaccaggtggtgattctgtgactctgtgcatttcattacctaacatatttcagcttttctaaagtcaaattatttctgcttttctaaagtcaaatatttctatttaaaaggcactagttttgactaaaatgttaataataacagatttaataatattgagtaatattgtttccatctgtttagaaaccaaaatttagcttttatcccttcatttcaggggtggatttttgcttctccaaaatagatcttaaatcttatgtgtatattttaagcaaattattattgcattttaggagtcttagccagaataaaatctgattacattttcaattcataaaattacattgtgaccccagaaaacatcctctaattgctttagtttttacctaataagactgtctctttgtgtatgtttaccatattagagacaaaaatccctcaaatgggtctagaatactaaatatttgtgtacgatagagtgtggatagtacaaacgtccgtccttagctgcttcatcccttgtctgactctaaagagttgttacttcttcctaaaccaagagccaagatggaagatataaccttccaaaaaatcagagtatatgccacagcgggtttcgtatccttacagaagatgttctctctctccttcttttttcttccttcccttcttccccatccctcctccctccttccctccttctttccctccctctcatttatttttgggataattttgagttctttcattgaccataagcttattgtgaagaacaaattcagtttatcaaatttagctaccaaatcttaaaatttgatttttaaagtagaaagataattgcttcttattaaaaaaaaaacagacaaataagtaaagttatgtcaatttgtataattccacattaatgagctagtacatgggttaaaatgttatattagtagtttcaagaaaggaaatgtgagctataattattatatgttttctatttttgttacatttaaggtgagtcttgtaaaagggccaatgaaattgccttaagtaaaatgattattaaccaatacaatttatggcatattgacttgggtaatattaatttgggtacatgacaggatatatactcatggtctcttgtcacagatttttaggttgggttacttaccagatgaatgagtttgtgtttccacttaatttttttaaagttcaggaggccaacaatttgacagatttgaaaataaaaatgaaattgaggtcactttttttctagtggctactttggtatgccgtgcatagactctgtttcttaatgcagaaaatacaatctttatgcctgtttggagtttcaaatgtaatataaatgtcatgtatcatcataagtatgcaaacatgttttaaaacacagaattgtatggaagcaattactggcagtgagtgagctacacaccccaagggtgggttggggccaaaaaaattaaagttcctaaacagaattacttttgtgtgggtgggaaagagagagcaatgttaacttttattaggaaccaatcccagctcttattttaattctcgtcacatacttggtaactcaaataaataggtagtaaagggacattaagggactttgtgttaggattagttttccccccacttgctatagtcttccggtagggagtgattagtgttcagcag

SEQ ID NO: 132564 - DNA, 1086 bp, Homo sapiens
tgtcaaaaccctttgtccagtctcttcttaatggtgactttaaaaattgttaggctctgtatttacacttgttaagtccctctttcctctctttggttcatctttactccataaaactgggtaggggagttgtttttttgtgtggggagggcaacctccagccagctttttgtgagagcccactctaaagcccctacactagactcttcaggaaaagcaaagtaaccttcccaaaccatttaattcatttcacttatttctggccatttgatgattccaaactccaacaggacctgtagcccagaggtaaaagtagaagatgtttaaaagatttgagaaatgaactaatttttgtggtctggagaagtaaagaccaaggtatgagttaatcactgttttcaaacacatgaaattattttgcatggaaggtagtaccagctgttagccatttgagtgaaaataaacaaaaggacttagattgcagctggagggattttagttagatagaaatttttcattaagtggttctgggtgggaactgggttcccatcccagtagattgttgatttaggtccagattggagggcagtggggcagatttgaggaatttaagcatcctgaaaatcagtcctcatgattaaaaaatcagcagctgcgaatgctcttcgtgttcagagctgcagaatgaggattcccctcatccctcccaccttcccccaagttgaaagaaattaacctcaattaaaggaaacagtgatggatggttgcagagataagtatgatatatcacacaggaaaaactacattaaaagcacattaaagttgagacagaaagcactaaaagtgaagaaattcacagttaaggttgaaaagtgatatcgtttacatctctgctaatatggagacctaacagggtacacttaagaaattatgagtgccgggcgcggtggctcacgcctgtaatcccagcactttgggaggccaaggcgggcggatcacgaggtcaggagatcgagaacatcctggctaacacggtgaaatcccgtctctactaaaaatacaaaaaaattagccaggcgtggtggc

SEQ ID NO: 132565 - DNA, 1030 bp, Homo sapiens
agctattgctcttgaagagtaagggctgtcactgaatgaaactgataccctggttacctcacacatttgaccagggactgtagtgtttctgaaaaatcatttttagttttaattctagcacacatacaacatgaagaaatcatgggagtttttttttttttaataacgaaatcagtgtttaaggaaacagtggtatggactccttcactgtggagccagcagctacttctgtatattgctcttcttatcccaaattagagtttataggggacattcttcatttacttataaataaaatataaatctcaaaagatgccatgaatctcaaaaagcgattaaacttgagcatgcatcagtatcacttgcttgtcttgtgtaatcacagattgctgggcccctacccccaggtcttttgattctgtagtggtcagggtctgataatttgcattcctggcaagttcctggatgatgctgttgctgctacttgtgagacactactttgaaaacaactgttctaaaggaacctagaaataatgtttgcattatctgtattccttgtaattacatgtattttttctctttactgttgtacatgacagatataactgagcatattttagtaaaagcaaaaacaaataaaaaacgcttcattggcaaaatacaagagggtcactggataacagatatacagtcttttgtgggataggccagcagataaggcatccagaggcttaaagcactcagggtcctgggttgttcagcccaaaacaggtttccttaaatattttgtagccttagtttttttgtagaaaaatggcgactgctaccagatctctctggaccctttaactcctaaatctgtagtcagatattcagtatgtttaaacaggcttacaatactgcaaatatcttgattaagaaatgcttgtatgtttttagtaaatgttcagagtaatttaataaaagccttatttgtaagttttatcacaatggagatttaaaagttggatgaggaaataaacattgaaat

SEQ ID NO: 132566 - DNA, 1029 bp, Homo sapiens
ctttgattttacagtcatgcgtgattctgacatgctttttacatcctaacagttctttttttttttttttttgagatggagtcttgccctgtcgccaaggctggaatgcagtggtgcaatctccgctcactgcaagctccgcctcccgggttcacgtcattctcttgcctcagcctcccgagtagctgggactacaggcacccgccaccatgcctggttaatttttttgtatttttagtggagacggggtttcactgtgtaagccaggatggtctcgatctcctgacctcgtgatctgcctgcctcggcctcctaaagtgctgggattacaggcgtgagccaccgtgtccagcccctaacagttcttatgaaataatttccctgaggtttgatgataaattcaattcaaatttgctcctcatgtttttcacaggtcttttgaatattacaactcatgtggcagaatgtccctgttctcctttttgctcttcatctggtactagttttctaatgtgttcatacccccacatccatttaccttggctaagactcttcttgcctttgtctgccccaaaccactgtcctatcgtttatttatttatttatttacttttattttttaatttattaattaattattttttttgagacaggagtctcactctgtcgcccaggctggagtgtagtggcgccatctcggctcactgcaacctccgcctcctaggttcaagtgattctcttgcctcaacctactgagtagctgggattacaggcgtgtgccaccatgcccagctaatttttgtttttttagtagagatggggttttgccatgttgaccaggctggtctcgaactcctgacctcaggtgatccgcccaccttggactcccaaagtgctgggattacagatgtgagccaccacgcctggctgccactgtcctatcttttaaagaatgattccttcatattcgtttctttcaattgacccttattattaacttcattaatttgtttccttcgtgttgcccat

SEQ ID NO: 132567 - DNA, 2001 bp, Homo sapiens
taaaaacttgaatgatcgtcatcttatttcttcttccactcttgtcatttaccaagtcctggaagtagattgttttagtttgcattgccttctggaacagtcctctccttaaaagaaaaagtctcattattattgctccgcagttggagggcaggggagtggtttatactgtgagttcacatcactcttttaactccttttcattcccactgacctactataggcttgttgcagtacctgcccactttaactttagactttctctaggatactctagtgattgagattggaggcttttaaaaacacctctgactttgccagtgctcagccccaaaacttcatttattgcagactctctgtattcagagtaagcccttacctctgtgctcagtatccctccttgagtgtaggcttgcttacctttctacctccatctctttctgacactcttttgatattgtgtcctatccatattgtttcccaggaatacctcttattttgcagtctttttcttaaggcacttattactttgtcccttgtgggacaattatttgtacatttgtatagcgctccaaactagatttagaaattcttgaaaatactttatttacttttagtagtggtagtatagtagtagtagtggtaaatagttaaaaaagtagcaccagactactgcaaagaccttagggcaacatcccctgaatactctgaaccctaattatctgtttgcacagctgtcttccctgctacattgtgagcaactccagggctgggactgtgctcccagaatctccagtgctacagcagtgtggcaggaaagtctttttgactaagaagatagtcatgtttgtttcttattcatgtgatgctttcctccattccttgaataggaattttttttcttgttttaagcagaaattttgcctttttcccaaattcactggaaaaatcggatgctattccactgttaattgaggtgtcactaattactttgcttgaaatttcaattattctaaaatcttccaacattttcatatatgtatcgatattttaaaaatataaaagaattttaaaacttacatttggaaaatttaccaatacagttttggctaattgggttgtcagttagccaaaggttagggatgattgatctagtttaaatatagctttgcgatttcattgaaattacttaagaaaaaatatttctagacagcatggaagaaaggtgaatataatagtggtttaaatgaagtagaggtttaatttgtgaattaatttttgagattgttatagagatactgtgatcaagtgctaagtcaataatgtaaagcagtgcatatcatttgaagctgttcccaaatatatcttaaagctaaatcaatattaaaactgtcctaaatagtaaaattgtttaatcattagacaacctgagctttatgtaaatttgtagactcttgaaacttgtcgtatgcagaagcgtaagcgtagctataacataagcataaaccattgtgatttgcataatttatctcttcagcataaatattgtacttgtagagtaacatttttgtcctggaaatcagattttggttgtctgagtatttgtgggactggaggaggttttaggtttatgtttgtgtttagattaaatttgaatggtgagttaagatttatggtgagcagtgtgcagaatgttttatttactttttcaaagcttatgaataaaagcaacatctgaatctgatctttgggaaccaagttcaggaaatgtggtataatctattttaattgtctcccttaatttcaacttacttctgtttatttgcaaattgtgtatttaagacattaacatatttaataccctgttattggatatatttaactttctactagcttcatgctttcagagttttgaactctgaaaacacaagcagcattaagacctgtcttttgcttaaagtactgagtgattacactccgatgttttcattatatgaaaca

SEQ ID NO: 132568 - DNA, 1372 bp, Homo sapiens
tcttgcaaagtaaactttatttcttagttggttccccccgctggtatttatgcttctactcactagaattgaaggaattgaatgtatttgaactattcttttggccccttctgcagactgggaatggtctttctagcttctcagatctctgcatattgtgcatccttgttcttttgccagaaacctgaaaatttcccagcagaactaactggcaatgatctttgaattatatgaatcaggtttgcctggcttctaggagtcaatattatacccttctcaatgactgtatccttctttctgaggaaagcagataagttagtgatgaagttttgaagaacttcacttacggagttacacttcctgagttcaaatcctgacttcactgcttacaggttgcatgcttttggacaagttatttgacttctttatgctttggtattctgaatgggggttataatgcaactgatcacgtaggttgtcatgaggattgtaagtgaaaatttgtaaaatgttcttaaaatagttcctggtgcatactgagtgtatagttggtatgatggtatctagttgattttttttttttttttggagggtcaaggtcttgttctatcacccaggctggagtacagtggcatgatcttggctccttgcaacttccgtctcctgggctaaagggatccctccaccttcacctcccaagtagttgggaccacaggcacgagcaaccacacctggctaatttttgtattttgatagagatggagttttgccatgctgcccaggctggtctctaacttctgggcttaagtgatccacctgccttggcttcccaaagtgatggggttacaggtgtgagccgccgtgcctggcctctagttgaatttttaaaagtactttttaatctattttctcttttggtcctcacgccaccctgtgaagaggtagtagtattacttattttatagggcaagtcatagaaacacagtgtcagtatgtgactttgttactagtaacagtgttcgaattataatctagatttctcctctcatctgttatagttgactgtgaatggggtctttaggaagttgctgtgattctgtgatgttatcagtcagaaggtgtaatgggaagggcatcaatctctgtttcttaaatttggcccagtggtgagccagttcattctaaaataatttgtatttgctaaatgcagatatttctcactttgcatgattttaatatacacaattttcagttgccatggttaactaaataatactagtccctcaacacagtccaagtttcagttatcatgttacattaactataattgtggccgggcgcggtggctcatgcctgtaatcctagcactttg

SEQ ID NO: 132569 - DNA, 1351 bp, Homo sapiens
gtggacttgaactcaagttttctgagttcaacttgcttgttactttttggggataatagtagtagctaccttatgggatttagagaaggttaagtaaaaaaaaatctatattaagctttaggaatagtgacagacactgagaaagatatagtaaatgaaagctgccattattgtcatcatcatcatttttacttttatcattcctgttgcactttattactaccaacaccatattttgtgaggtagtcaggtagctaccttaacaaaagctacctcttgttttgtgccatatcgtagaagccccacttttgctaacagactgaagcaagtgttcaacttgcgacaatttaaggaaaatttgacagtatttgaccttgtacagagacccacaaaaggcattagttgaagataaataaatggtagttagcaatcctaatttgaatttttgtacacttgtgtgtgtgtttatagataatgtttcccatttataaagatttgtcaaatacgattctactcaagtacattctcttgaaacagcaggaattctatggaataaggatttctttctttctttcttttctcttcttttctttctttttttttctctttcctttcctttccctttcccttccctttccctttcccttcccttcccttcctttccttttctttcttttttttttgagacggagtctcactctgtcacccaggctggagtgcattgacgtgatctcggcttactgcaagctccgcctcctgggttcacaccattctcctgcctttcatgatttcttattaagcagtctcctatacttccttgcttcctgagacttcttcattaaatatgtactatttcaaatgttttaaatttcctagtcctgtcagcacagggctttaagttagaagacatcagttatgaaatctatcagggtgtagttatttaaaggactagacttttgtgaaatttttaattatatgggattatacttatgctatattaattgaaaagaaatggatgtaaaactatataaagtacttacgaaagaagccaagttaattgtgccttggttagatagtgaatggttaatgccattttgtgtcatactggctttgtctctgttttatgtacctgctgtctcactaacagtgttgcttagtagaaggagtgtgggctttgaagtgagatgggtttggggcttcactccattgtcttcatttaagagctttgagactgcgtaaattgtctctctgagccttagttctggttagacttggatgctctctcctttgcaaggtttctttatcctgaaagtggcttgctcttggaggtgcttagtaaatgttagctctt

SEQ ID NO: 132570 - DNA, 1014 bp, Homo sapiens
caagtgtcccaagcagtgcctggcacacactgaaaactcagtaaatgcttattgagtgactaaaagtctccagtatgagcaaaagctgtaaatcctggatctacttctgttgctggcctagttctttctgatttgtttaaggcacgttaaaccatactctggcaagggagaggaatgaaggagtatttgagaaacaccttcagtgtgccagatgctttcatcaatactgctcagtttatctccacatcagccttgtgggtttatgcctcttcaccttttttattttttgaatgaagaaatgggaactcagtttaaacagattgtccaagatgtttgaatttgaattgggatctttctgactctagacccttatattttccagacatccatagcagtataagaaatgattaattgctgttactatttttaattgccatcatgatcatcatcattatcacctttagattttacaaagttgtcctcaaatggcagcctgttgcctctaaaaagggtgggacattactttgcgaggagaggagaacattaatggttcaggcagcagtgtttctagatcctcttattccttacagcacaaatctacaccagtctcttgtgtgtgtatgcaaatggctacctgagtaagggtgtttgttacctgagatcccttccagctactcaagtcaaagagatttttaagttggaatcagagtgttctgcctatgtaattttgatattttagatggaaaagtgagctggaatgcaggaaggttttcctaaatggaaaggcggctgcctcttcaccctctccactttctttttctttgtcagttgctggagagagatggccagtgacacaaaagtccttctaaactttggggagtcctagatggctggcagatgagatcacttgattccagtgaaacctaccagctgccttaaattcactcttccagagcaccatactttttattactagattgaattataggataagaaaagtgctttgagcatctt

SEQ ID NO: 132571 - DNA, 1074 bp, Homo sapiens
tctggctctgtcgcccagggtggagtgcagtggcgcgatctcggctcactgcaggctccgctttccgggttcatgccattctcctgcttcagcctcccgagtagctgggactccaggcgcccgccaccgcacctggctaactttttgtatttttagtagagacagggtttcaccgtgttagccaggatggtctcgatctcctgacctcgtgatccgtccgccttggccttccagaatgctgggattacaggcattacccaccgtgcccagccccacctggctaatttttgtatttttagtagagatgaggtttcaccatgttggcccagctggtcttgaactcctgacctcaaatgatccatctgcctcagcctccccaaagtgctgggattacaggcatgagccaccacgccctgctgggttcttcttaattataatactctttcccaagctccttgcaacttctacagtttagcctgatatgttgtaacctcttgctgtttacactgtccactcttgtggaggtagctaagacactgactgccagggcatgttttatagtcatataaaatctgtacaaaagaaagttaattttcattcaagaagccaatagcttctggatcattgccttgcattggaaataatttttttttctctgtagataaaaggtaagcattattaagttattaaagcaaacaaataactgtagtcatcctgccactccaagaacaacaggatctagagtataaaagtaatatcaaaatttcagaggcctgcagaccctgttgctgtttatcactttatcattctatttcctccttgaatcctttttttttctttttttttttttgagacggagttttgttcttgttgcccaggccgtattgcaatggcgtgatcttggctcactgcaacctccgcctcctgggttgaagtgattctcctgcctcagcctcccgagtagctgggattacaggtgcgtgccaccacacctggctaatttttgtatttttagtagagatggggtttcaccatgttggccaggctggtctcgaattcctggcctcaagtgat

SEQ ID NO: 132572 - DNA, 1924 bp, Homo sapiens
agagtttacttcacaagtagaaaatgtttgctcctgagagttaagcttcagaacgtattcttggcttcatactacctaactatagcaggtcctgtaacttaaagagacagtattaattttatattcatttcatgggaagggtttatgcttactcaagactaagcattttcagttagggttttgtaagtattatgaattgatacctggaagttcaggtaaatataatgtgttgtttgctgtggtttttctataaaatataatcagtatttctcactggattagttacaaatttatttgaacctgtgatttttttttgggcacagttatagaatattttggtattaaaagatttgattaagctactccatttttatcacattttaagtagcatgcagatgtctggttatgtctgtcaatttttttcctgaggtactttttacattttgtgtaggattttggatgactttatagtgtgaacatatcattgcagacatggaaatttagacctgagatcatttagtgttagtagtagaaatactgctttcagtttataatggatatataaggtaattctataaagcactgccatctttgatcactttatgaagaatacagacatgcctcaataaatgttttttggatgaatgggcatatcatatggattcaaacaaaatacatgttgccattaatcatgagtctgagatttataaattataggggcccattttcttttttgtttttgtattcctgtactgtaattcagtcttgaaaaatgtagccagctatacatgtttcacacttcttcccatatgtaccatgatactcttttacacacgtgtgcacatagaatctcttaatctccttttcttgttctttcaccagtactcacaaattccactcctttgcacgcaccccatttttaggttgagacccaatgcacttaagtcaccatgaacaacaaagtttatagttttcctttttgatcgaattactcatgtgttgactgagttctccggattctaggaatatgacaatgagtgacaagtaggagaatcagagctggactcacccaagcaattgtcttcatctttctccatcagtacaatacctctttcctccactctcagtcaaattcctgttcagtgggtcccactgaggctggtcgcagctgctctggagtacctgctctcaggaagactagaagaacactgaaaggtcacataattacatgtgaatttaattcacagagacctgcttgtcgcttttccatgtgtttctcctagttacacattattaactgtggtgccttgtagggcttcaattacttgggcaaatatgtatcgtgcagagactgagcacaagttagaatgctgagagtggttataaaattatgttttcctctccagatgtaactttacagtaattaaacctaatgcaatgtaagcattatagtcagtgctgtggtagctatctccaagtctaattggtaacatcgcttaaatcatagcacttattgctggttatctgggaactggaataaaccaaaaaagttacatacattaacctttggtttttctgcatcaggtgaagtggatagcttgtcccttcatcaaaatctgtcatctgtattatatggaattttgatagcatttagaaaatttttttcttatttagatagctctgtgtattcatccatccatcgatcatccatccatccatctatccatccatcatttcatctgtctttaggctattttccatagtttgttgccctggatttggagacttgatccagcacagagctattgtccacttgggttattggggtttccctttctaagtagatgatcaaaatccatggtgaaaacatgcttgccttccataaagggctacttgtttactatatttcagtcatttttctgcc

SEQ ID NO: 132573 - DNA, 1683 bp, Homo sapiens
tattcctctgccaggttaaatgtgtgaattacagagtaaagagtaagttgaagatttcttccatttcctgctctcaaataataatttttcatgtttttcttttttctgtttccctttggtgatctactttcagaatctgagtcactaaatgagttttatcaaaggagaaaaatgtacttagatacttagaaatggaaacaagatttgtaagttggcaatcaccttgaatgaaaatacagttggccttctgtatccatggtttctgcgcccgcagattcaaccaaccgtggatcaaaaataatgcgaaaaaatccagaaaatgttacatcgttgctgatgtttcagtatagaatattttcttgtcattactgcctacacagtatagtatatcaaatatttacgtagcatttacattgtattagtaatctagggatgatttcaagtataagaggatgtgtgtaggttatatgcaaatgctacaccaatttttaagggatttgagcgttcgaagattttgctatcctcagagggacctgcaaccattccgtaccaccctgatactgagggacagctatactaggtgaatactgccttgccttagccaagctgataactgtgtatgttatagagataattgccctccaatgcagttttgttttttgtttataccatgttggaaaaccgttagatattttattgaaatataattgtgtggagtttttgaaagaaaatatggaatatgttgtttcaaaagcttttcacatagattgtaaatttctttacagaccttctaggcttttcacagatataagcatttatagcagaaatgtagtgaatatttttatacatagtctctaaaacttaagtaaggcccattctacaaatgattggagtagaaataggcattaaaatgtggtggattcatgcacaagtaggtggtttgtgtcctatagtgtgaatatagtgttttctattttctttaggggggcatttctgttcccctggggaaataaacttcctatttatttttcttaagtatttttaagcttggttacttatttttttaagtaatccctgccactgtttatatgtagaacccaagtagcatttgtagttgaattttgtacattaaaaatattttgatcagcaaatatttaacaagtgcctactgtgcgttaagatgtttgtagaattgccgttttgtttgtgaatgttagcactgggcatagatctaaatcctcctctttgcaaacacccctgagaataggaactaaggtgagaatgtgttttggcctatatcgtgttttctagtcatttctatgtattttattagaaaaatatttttaaaaaatgttttgggttagggaaccaacccacttgtccaacttgtgaaagtctgcggaacaccaccaccatcaaaaaagacaacatattcggatcaggaatgtaatcacccagtcacctaataaaaagagtgcttgagtatgcatatggaacaaaaaagcaaaaccattcatttggtaaagggtgagtaggggccaggagacagccctaccctgaagatagaatgctttaaaaacatgttgccattaatatttaagacagaaagcgttttgagcccgctcctctcttctacccttcctcagcattcatgttgtagtttgctccctaatgctcacaagt

SEQ ID NO: 132574 - DNA, 1048 bp, Homo sapiens
aaatacaaagcagtgaccaccaactggagtttgtggggtcagagaagatttctctgaagggttgtttgagctgagatctgaaggatgcagagaaattaactaggttgtctgagggcaaggtagagggtgctgagtattgcaaaaggactgaaggcctgagattagagagagcttgcttgggacattggaggtgtggacaggccattgtaattggttccgagagaacctagtagagtaatgctggtgagctggtatcagactgaagggaaggaaggggctaggaggccatgttaaggaccaagagttactactctaaatgaaatgaggaggttttaagcagggtttgagttcacatgattttcttgaagggcttgcttagccacccgtcattccctttggagtggtcttccttctggagtcagggacaccatttgtcttaagtgcagtagtaataattccttatggcaagtggccaaataaccagcaattcccagcatgtgaggcccccataatgggcctgcaaggacagtaacacttgaaaaacatcagagagaaaaaaaaattgctctttgcccttagtgaagtaaggctaaaggaaccataaaggaatatagtcaaccattactgctctgaggctaatgacctcgaagctcttggcttcccaagctagttttttttctcttccttcttggcatttcattgcttgagaaaactgttccaggaaatggaaaaagaatggagttcagactcaaagtgggtctttactttttgacgatcctggtaaaatgcttacagggacagaaggttgaaattgtcaagaagagtgtttttggatttgttaatcttggtcctctttgaaggcagagtgcttctaagagaagatcttattcatcgtctgatgaataggtcagttgtcacttgggaggagggagcgaaattggtggtggcaagagaagggtggatttgtaggaagcatatcactttcctgagggttttgttctaattcttctccagatacaaataaacgcaacattgggtgaattgattt

SEQ ID NO: 132575 - DNA, 1016 bp, Homo sapiens
atgtttcatagtgtttcaggtttatattactgagatctttgttgtgggtccattttttgggttcaaaaacatgaaaagatagcattttgaaagtgttttgttacttctctatgcttataaaaatttgactcttagaacttacctatgtagtcccccacctgagataccaggacagtggggagagaatttatgatgtggtaaattttttttttggcagagccaaaatattgtaacatatgttgaaccaggtgtgtaagttgaataccttttagacatgtagttgtcactgttaatataagtggcctgctatcactcaatgctgtggacagcccaagggccttttctgaatcttttataagcaggaagtttaatttgcctatatatttttctttcttttttatttttttgaggttggttcttctaccaaaaactgaaaaaaaaagtattattagataatttttactttatgggatttgttagtcccagtctttgtagcaatttcactttaaaattcgtgattagcagaatgtcctcttcatttctgatgactttctgtggtgaggagggttcacttagaacctgggacaaatgagagttggttgagtaggatcaaacttaataagaatcaaggagacattaaatatattcttgaactggttttctaggattcttttttttttttttctcctgaaaggaagagctgggccaaagttttaaaaatcaagacaaactagaggtttcttcacattcatggccatattattgtttgggattctatttaattttcatatacccctttatgtttctaagaatatgtttctgatggtctactttatatatgcattcgtttgactccagctatagtaataattgattataccctaaaaaaacgacctctgattcttcatttaaatcagaacaaattgtttttgaaagcagcgccatgagaattaccttgaatgaccatagacttggcccacaaaggaaaggaaattatgaagaggaggaagccatgc

SEQ ID NO: 132576 - DNA, 1097 bp, Homo sapiens
ggggagacgccatgttaactatgggcattcattaactgcgtggatatgaaatggcagtaagttctctccccttttatgccaggggcattggattctgtaaaagcaaaagggagaggagcgtatgtggctgccaaaatgagatggtaagaagttaaatgatcaggacacagagaaattaaggaatagtaaggtttagtgggtatgtgataaacattgcagataggctctgtggtatggaccagaaggcacaaggtctggatttttttctaacccagactctgtcactgactgcctgtttgatctttgtaacttctttggtacttctttagacctccttatctgaagttaaagatgtaaaacagtaaagatgtaaagagtaagttaaagatggaaaacaggtttcaactcttatcaatattgatagattggtaaaggctattgagaagagaatcctgcagctgtgtcttgcttgggtcattggaaggagttctgggattagtttagcagtttctggtgactgtcatggggtggtggtgggtgtgtgcttgcaggcatgcatgtttgtacgtaggtacatgcaccacaccgcattggttgactaatcatttgtaaaaatccttttcaattcagtctatatattggaaattacgtttttcttggctgtaaggttgagaggatcttctaatcagcctttaatttttctgactgaaagccagtgtacttctagttttgggagagaattacgtgctatagagctggatgcctaataggcatatagtgatggcgcctaagaaggaatgaaatcgttggtccgagagctagagagtgcgcagcgtgctttagacttgcatggggttctcttctaacctgcatatctgtgtgagtcaaacatagtaggtcctttcagataggtaatcatctaatgagccacagttaattaaatgtttatcattgcttaatatttggtatagggcattttatttctattctaggatagctttcaaaactagtaatttgggcagtattttagtactacatagaaggaagactggtacaaaatgggtgatggcgtgtaacttttaccgtattgatacata

SEQ ID NO: 132577 - DNA, 1070 bp, Homo sapiens
gcgtatattatgacttgtagcatttgaaaagctccatggtctaggccatgtgacttctgaggactgtaactgtaaaaaagctggtgttgaataattaaaaactccctccattttaaaaaaatgcccatttctcttagaatttttatggtgtcagtcaaattaatgcaggtatgtttggttttaagaataacatgatagaaatccgaatttacactgataggctgcctaagagaaagttatttcaaaacatggggcatcctggcagtgcctgggaaggttggcccccagcccgactgataggaacttcctactcatcagttcgctgtgaagtactgacaggtggagggggtttaggcttctttgggttctgaacctggtgatgctactacctacacagtgtttggaaatcttgggcgatgttttgtttgtcacaaatgactcaactggggggctgcctcctgctatttagtgggtcagggacactgcagcatcaggattgcagaacaatttacatacagtgatgagttgttctgccccaaataccaataatacctttcccagaaatgactggatagttattgatataaaaaaatgaaaaatggctgggtgcggtggcgcatgcctgtaatcccagcactttggccaaggcaggtggatcacctgaggtaaggagtccgagaccagcctggccaacatggtgaaaacccgtctctactaaaaatacaaaaattagccgggcgtggtggcgggtgcctgtagtcccagctactcgggaggctgaggcaggaagaatcgcttgaacctggtaggcggaggttgcagtgagccgagatctcgccactgcactccagcctgggtgacagagcgagactccgtctcaaaaaaaaaaaaaaaaaaaaaagaaaagaaaaatattcgtaaaaatactactcttgctccccatccctagaattaccacctgacatcttttttttttaaaggaatgttgattttttttaaggtgtgtacttgattgaacactgaattctacttcttaacgtttttaagtaaacatgatttgtaaaggcata

SEQ ID NO: 132578 - DNA, 1505 bp, Homo sapiens
atatcttgatatatctcggacaagcttttaattgtcaaaattaagttatactaccttgtatattttagtcttagaatttaatgttctattcctgattgaaaaacctgtgactagcacttcaaaatttcctaaacgtgtttggtcaattcttttttcctttttaaccaaatgaattttataaagtcaacttccttaatttgtaatgtaggctcagtgaaagcttcagggttgttgcccgccgcccccccccccccgccccgagaaatcttcagagagatgtttaaacaaatcaaaatatacttaaagtgtaaaaaaggtaatttgatgtggcaagttttaaataaataaaaaaaataaacgcacacactccataacctttctttgagtcttggtttaagttctctgtcatatagtgccaaaaactttgttttgagctgcgtgtgtgttgaaacatgtatgcctgtcctagtgtcataactaattatatctcttatatgcttacttctagtaattggaaagtagacctaccgcagcatacatcttcacatttagttttatcttgaggacctgctacagagatcattttctaccatgcagcaacttgacattgtgaacagatattactattttaaatatattatctactttgtgttttgcagaaatagtgtactttcagggaagttaagtttcgggtgtttccaaagcacatctgtctttaccagtaattatacactaatactgcctttgcagttttgactgagatatttcatctgtgaattggaaattgatggcctagtgctgtgatagcaaaattttataggatttctttttactcaaagttttcaaaagattgtggctgatggaaaacctgctggtgctttggtcacttactcttcatggattggtctaaaataatttggggcttcttttgtaaaagtgtattgtagaattttcacaaacttagaaatcctgtcttagatatgcttatgactggggccgcaaactgtttctcatatgcaccagcttgtatgaaaatatgtggtccttgtccatgcctgctgaaagagaaaccctaccagtcttcagtttctgagctgcagccttgtcgaaattaaagtcttaggactgggagcagttaatgctggtgatagattgtggtatttagcgctgtgctgtgttgcgtggtggacttacacgattctagtcagaacttgggaaagaatataccacagaattggtgacaaatatttttcaaagagaaatacgatgacttttcttattaatgagcagaccttttgggctttgcttaaggaaatagtgaaaagattgtacagttctgttattgataatggtttagaatttaacactgaaaatgctggattttctttcctcttattaagttaatgtattactttgaagcatcttttctttttttacagttagaaattcaccaaaactatatttcaaacgtagctctttttaattttatactaaattaatttttt

SEQ ID NO: 132579 - DNA, 1370 bp, Homo sapiens
ataataaggcggtgtgactgcgggtgagagtgtaaaatctgttcccactcttcaaaagatcacacatctcatgttgagttgaaagtgaaatattatatatgagattcagcatgaatgtgtatatctatatgttttatttaatattcatcctctggtggaatttacaagtctcttcagttcagggtatacctgttttggggtcctttgtacctgtgctaacatatgtgtgagaagtatgtgagctctttcagtgactgaaaaaattattacttgattggtctgttttggcgtgatctgggcttttgattaatctttgaataactttttccttcatttttaatagttcaggcttgttaatgatgcttcactggcttctttgggtatctgtgacttaagtttttaaaaacagttttattgagaaataatttgcataccatagaattcattgctatgaaaagttttacagtaccattttataattacatgtgattttcaagacacaggaaaataaagaaatggtatgcttagaatttggaagaaagtctagttatgttttcattttatttttatttttttgagacagggtctcaccctgtcacccaggctggagtgtagtggcatgatcatggctcactgcagccttgacctgctgggctccagcaatcctactgcctcagcctcctgagtagctgggactacacgcatgagccatcatgcctgggtaagtttttttttttgtagagacaaggtctcactatgctgcccaggctggtctcaaactcctgggatcaagcaatcctcctgccttggcctcccaaagtgctgggattataggcatgagccactgcacccagccgctgtactgattttaaatactttttaagtgaaatgagattttataacatttgaagaacttaaaatgtttgacaggattaataaatttgaatgaagcattgaaataattactatactaatgaatacactaaggaaatttgaaaaccacaaataagcagttacaaataagtattattatttataaaatagtcaccctagaagatgatgcagtgatggtgtcatagcttaaaatgctcttggaggtcttcattttacattgatttcagacagcctgtgtctagttcttctaagcgtctttggtgctagcaaatcttccatgacataagctttgattttctgaatcttcaaaagtcttttggtgttaacttacttggtgggtgttaaaacaagataattctatttttgatttttttttttatttactttttagaagcagagtctccctctgtcaccctgaccggagtgcagtgatgcaataataactcactgcagccttgaactcttggacttaagcg

SEQ ID NO: 132580 - DNA, 1170 bp, Homo sapiens
atttaaaatgatatgatgtattttaaggataattttttttttccctaggggaaacaattctgtgaaaattctgtagaggatttaaaatcacttctttttttttttttttttttttttttatttgagacagagtctcactctgttgcccaggctggtgtgcagtggcacaatgtcggctcactgcaacctccgccggccgatttcaagtgattctcctgccttagcctcccgagtagctgggattacaggtgcctgccaacccgcccggctaattttgttttgtatgtttagacggggtttcaccacgctggacaggctgatctcgaactcctgacctctggtgatctgcccacctcaacctcccaaagtgctgggattacatgcgtgagccactgtgcctggcctgaaatcacttctaaaaattgttacagtaaaaattttatgtttaccagacgtaaattttggttacatatacatttatcccaattgacacattttattcatactgaataaaacattaatgttacttttctattttttatgatgtattttgacatgtgtttagatgtatgttttatatgtatggactgacaaaatcatatatgctattatttggcatcttatgtggttggaggtcataaagaatgtaagtaactgaaacaatacatttgctcaaagaaaggccactcaattctctgccctgtggtatctaatctccctgtaatacacatttcaccatctaggattggagaagttcattctatcaacacgaatgctaacaggtaggcttctggaagtacaatgtgatagttcagatctttctctgattcaaaatggtgatttaaaagaaaacatacttggctgaattggcttttgatagactaaaacattaatttgccttaatgtgcattaacgctaaaggatactaaaaaacaaaaatttttttaaacccagaaattctaccaggtctggagccatatttttcacccagtaaatgtcccttgtaagaaatatatttacacgaagggctgggtgcagtggtgcatgcctgtagtcccaactatttgggaggctgaggcaggagaatcattttgagtctagaagtacaagtccagcctgggcaagatagtgagatcctgtctctaaaaaaataaataagaaatattttcg

SEQ ID NO: 132581 - DNA, 1103 bp, Homo sapiens
tacagtatttaatagttgtcaaaatgtacagtattgtcttggaacttgtggttcatgagttcatagtccctgcttttttgtgtttattacaaagatgtaacaacctacacaaaacatttttctcttataatgaccttacatttgccaaagtgccccatgctgaaattccttttcagtgtctttttttttttttttttcagtccaaagccagacgtgtacccagacacaaaagcctctgtgtatagcaagctgttttaaatattgtgactcgacgatgtgctgtcctttctctgcttgagccaaggatctctgctcagtgtctgtggattaccaagctccttctttattgtacctcttgtcaactattcctattcatttaacctttcattagtgtctgtgcagcttcactgtctggaaaggcaaggaaaaaccgaaaggccccactgtcacagttattagatttctcggttacatcccagcaaccgtaaagaagtaagcgtcgagactattgtcgtgcatgctgctgtcctggggtgcagctcttctgtgcatgtcaaggacatgtgccacatgttgatatgcatcccagggataaatgcacaacatgggggataggccgacgctggcagtaatgagctttgtaggagttattgcaaagaccaacagtttgtgaaggaattttgcttaacaggccaaggagatagacagagttgagggttgccaagatttgcctgtgcggggcttgtcagtcacattgttttcatccaaacttcatttgaggggaaaattgaatacatttgacagcaatggaaagtcttattttcttttttcaaatctttcagaggacaaaagcagtatttctggtgactaacataactatttttagtactgactaaatcatatatatgaatggatctattagcagtttatctttttccatatctagagaataattaaaagatatttcatagatgtcatatatatgttttaaaatctatgtaaaaataatgtagcctattaattttcctttgctcttttcctcctttgattttcctctagcatagcctggttctttagaaatacatttgcttaattggctagat

SEQ ID NO: 132582 - DNA, 1105 bp, Homo sapiens
tccccgctgcgctcccagtggcctcccctaaacttggccccaagtttctgaggcgagctctaggtgggagggtgcacgtgagagggggcttctcaaggtcggccccgctcgcggcttccgcgcgaaggtgagcggctggctaggggaggctccagggcgttggggacgggctggggggacgaggtggaggggagtgggggatgaatggagcgctggcaggagctcggggaagagaggaaggcggctgggacctacgggaacttttacaacttgccgccgagtgagggaccggcggctgggcgtgggtgccgggtgcgctggggcgcagccgcccgggcccggcacgttgactcttcctctccccttgtcttcacattcggaatcttcccgtggtaaatggagatgggaggaaatgctcccgcaggctttacggagaaggtgcagaacgcagggcaggaaaatcaaccttgcagagacggctcttttcgaagtgcaattctataggagccgatttgttttacttgcacgttgactggagggtgggatttggggcctggggagggagcagaataaaaaattatatatgctgaaaaaccctaggtgaaatctcctgtgaagtgagtttaaggttgaaaaaaagttccaagtgcaagtggtggaggagatgggctggctttgccaagcgagactccagcacagcccctctacgagaagcgacttctttgcagcgaggaagcgtgcaattagttcgcctggtgatgagccgctctgtccgctttcggggaagtgatttgttagaaatggggcttgaccactcccttctttttagtttgcttcctcccagcgtcgctattgttacccccacttggggatctgacatggtgtattccgtatatagagggaacatatgagaatacaggtgagatagcgggttggcattttttcctcttccctgctccctaatgtgacatctcttgtttcagtgatcaaagtcacaactggagtgtaggagatgggactgtcaaatgcaggggcgcgtacacacacacacacacacaaaagcaagagcccaggactgtggttacagtaacgctgacagaaatta

SEQ ID NO: 132583 - DNA, 1188 bp, Homo sapiens
cagaaaatataagaaggtgcttattttttctacattcctggccatcatattgtttttaaactttttaatttttttatctgaaatgtaaaaaatgatatcctgaagtagttttcacttgcatttctcttattatttgtaagtgaactctaagggccattttatatcgttttctatgggatttttcttttatatatctttgtatatccattgtcgtgccatgtctaattcatgtcctatggtgcccttcaaactcactatattatgtaaagaacttattggcttcttcttttagttattttactacctaactttctcactatcacaggcatgacattttcttccctttctttaaatttcacatcttgagggtaatctttgataccttttggactctttgaacagaaaatcaatgcccaagttcagtcacttcctcttttgcagtgtcactcaaatttagtaattcctctgtgtccttaactttcaaatcctctatcttggttctcagtagctcagctctgaacatcttattgatttcttttccaaatatcagttctgttttacatctttactttgagacaaaggaagatataagccaccaaagaaaataatttgtaaaattcaagttaaaggtagccaatgaaaattctaggactttcttaatgaatatctggaggaaaaatgtaacctttaagcttggatgcctagaggatacctcatgttgcaaagtaacctgactgtgagatttagacatgcatggccatcattaaaacagatatttccaccacatttacccattcatcaggtatcaattgaatgtcatttgattgtcagaccctctgaaaaagttagagaaagagatagctctgcatttagctattaaagaatactctctaataggaaagacatttgtagaaagagacaatttataataagaatttgataaatactataatgatattcatattaatgtaattatttgatctctggaaaaagttaaaaaagttctcactctcactaattctaagtaattagaagtttatgttgttgaaagtcaaattttgatttccttagtagaataatatcatactagaaaatatttttatagtatgattttattcttataaatttgtagaaaatattattttctatgatatgtagatatttaagtttacctgtcactttatgagt

SEQ ID NO: 132584 - DNA, 1060 bp, Homo sapiens
ctgtaggtcagaatcactttcattttagaagtaaagagctatacccgatcccattcatttcccttggagcactgcttgtaaactagttggatacccaacagcattttctttacatgtgctacaactagcaacatgttcgttgaataggcagatattgaatattttattctttagagacatcaagatcagagagtatctaaaaatatattgttttgggagtaattagggaaatgattttctcagctttttttctacgccctttatttctcattattgggcctgaagaatattttccaagggccttgttttattttttctggtagttcattcctaaacattaaaatgtttaccaggtctccctgatggagaagggatgcctgatgtcctcagactgcccccagtttactgaccagtgacttggcaactaccttctcttgactaaaagttggaaagcagagtggtcatagatctaagctaggacattcaatgctgtacttagcttctagatcacattttacagaacaaatcaggggaatacggggagggaaacaagctctagccagcatttaccagacaggaattgaaggtagcagcagttccctcagcttcctgttttgtttcttcatagcacttactatagtttattgttacatatttctggattatagaccagtagctacctaaaggcaaggattatttataacctttttcttactgaaaacagagaactagtatagtgccaactacatagtgtgtgtaaaaagaataaatgatagatattgaatcgggttctgaatctaggtactgcatatctaaatctcccagcaaatgtcaagttggggccacgaaaaaaagcagtttgtgaatgaaatcccatataagaaaacaagggaaaataggccaggggtgactaatttaccctattcatgggatcctacagttgcagctgagagcagcaaacaaaagcttctggtcagaggctttttgcttgtcagttaaactacaaaatgcagatctggtagaggcaatttatatttctagcatagaaaatggaacatac

SEQ ID NO: 132585 - DNA, 1057 bp, Homo sapiens
aagcgaatacttacgctgtgacctatttcttacataatgtgtgtgattactacttttttatccttctgaaataggttcaaatttatgggatctttaaggattttgatgacttaccgcgaaatgtttttcatgatttggtgttaaatagtttttcataggttagccttaattaacgagctttctcataatttctcggaagtagtgaggtttttcctaggctaccacagtggcagccttgttatgaaccacatccagaaaaggtgagggttgtgttttacagaaccttggttaacttagggtgacagatgcagcatgtaattcccgtcgtgtgtgtgtttgcacgcatctgcatcatcttcatcacacattcttgcctttatagaatcaattatacctgtcaacttaggaaatcaagaaaagtaagactatttctgtaaaaatgtttcttaatgtaattatttttgcttttctattataattggagttatctgtgacctctctgccagacatgtttatgaaagtaagtgatttgtttgttgatgtagtttggaaggcttctaataactttatactgcaagttctttcaggtttacagaaccaagcatatgtgctgcccaggaattctgtggcaggacttcttcgatattactaacctttttgattgctctactggtcacttctctatagcatatctcagcactgcgtttaccaacacatcttttttccacttggattctaaagatttcttttgcaaagcttagtgccctcaaaggcaattaagagtcttggctttggagtgggaaaggctaaggtttgaatcctgcctctgctgcttctgaccttgagagagtatttaacttctgaacctgtccatgctgaagtgatgataatttccgttgtctcttcagggttgaggtgaagagaaacgagtgtgtagaacacacgtataaagtgttcaataaattatagttattgacataaaggatatttttattagtataaaatactatcccttatgctgtgaagaagttacccaagctagaccttttagtttttc

SEQ ID NO: 132586 - DNA, 1340 bp, Homo sapiens
cccaagcttccagataagagcccagtctagccaacgccttcattttggccttgtgaggccctcaacagggagctcacttaagcaggcccagacttctaatttatagaattgtaagataataaatgggtattgttttaagctgctaaatttgtggtaatttgttatacaacagctgaaaatgaagagaaggaatagttccttctgtttatgtttggttggctggaacttgtaacatggcccctctgtggtacacctaagagaaatggaagaaggcaagtgtagcctagctatgtgcccaggatgtaaaagtgggtttttggttaaaaagctagcagttttgctattactggtgcctataattaattaattgtgtgtctgtatattaatctatttgtgagcttgtaagtgtatgtatatgtgcatatgtccatatgtacatacacaacatacatatgcacatatgaattttaagtctagtttgctgaataagtcttttcttaatacataaggctcagtatgttccatgtgccttttgaaactgtcgtccaggctggggtataatggggcgatcacagctcactacagcctcaatcctctgagcccaagcaatcctcccacctcagcctccagagtagtgggactataggcgtgtgccgctatgcctggcccatgtgcctttttaatatattttttattttatagatttttttctacagtgctttggctttttgatatttagatgtttttctctgatgaggcacaagtttatttctgtggctcctgatcagttttttttttaacagtggcaccgttaagtacttgctgagcagtaccttagcctggtgggctggtggaacagtgacaacttctctaaccttggaatagagagactacagatctgcaaagaagtttctgaattcttagtctctgacagtgtggcagggatttcagttagagtagaggagttgactgttaatcctgcatctgtttttgtgcttgggggaaggctgaggccaacacagacagtgaaatgccttacttagtgcaggcacatcggatggctacatggtactttgaagttgttcattaagttgttgaggattgcagatttgtgtagcacatttgaagtgtgttgtggtgtaagcagcagggttgagggtggttgtgggccccgtaacatgtgggccattgtctgtgatccgttagccccatgctctttgacgtgattcatggatccttagccctgaatggttttctaggtacatctggtagacggtgccagacataatttggaaggcatgcggtctggcaccctgagatatattttagggacttggtgt

SEQ ID NO: 132587 - DNA, 1083 bp, Homo sapiens
gctacgagatgaccagtggctggggactcctatagcttcaggttggggactgttcaccagaaagaccaatgtatgcttagagggttgggactttcagctccagcctccttagaggggaaagggggtgaaggttaagtggatcaccaaaggccggtgatttaatcagtcatgcctatgtaatgaagcctccataaaaacccaacatcacagggtttgggaggattttcagacagctgaacatgtggtggttcctgaaagaggatgtgcctggagagggtatggaagctccaggctgcttctcccatacctcgacctatgtgtctcttccatctggctgttcatctgtatccttttaatacctttctaataaatggctaaacataagtaagtgtttccctgagttccgtgtgctgctctggcaaattagttgaatcacaggagggagttgtgggaaccctgatttatagctgataggttagaagcacaggactgtgcttgtgactggcatctgaagccagttgtgggaccgagccctcaacctgtgggatctgacgctatctccaggtagtgtcagaattgaattgaattagaggacacccagctggtgtccagtggagaatcatctgcagaatgggttgctggtagggagaaatccccacacattttggtaaccagaggtcacagaaatagtctgtgctgggtattttgaggtatatatataataggagaaactgtgtttgtttttttcctacatccttacaaggacacaagaatgtaccaactgtcttgttcaaaacatggcccttcccatacataatttgactatggaaatggttgacctttttctgagtaccaaggagttttctgcctgtaatggggtatttaattatattttagaaaaaggaaggtcatttgtttagagcagcactgagtcatctgttctgtgcccgatgttcagaaaggaggtagacatgttctttaagagaagcttttgaagtaatttagaaaatggtgcaataccatccgtcatcaggctgtgtggcacaagatcagtaggagcccagagacttcacatctcctagt

SEQ ID NO: 132588 - DNA, 1344 bp, Homo sapiens
aaggaccctgccattctatacttcattctgttgccagttcctagcctgtagtgggcatttaattgataattgttgaatgaatacatagcttctgtttctgttgatccttatgtatatttaaaagggggtcctatgcatatatttttgatgtattcatttctgcttaaaatacatcaccgatttctaaaagttaatgtagaatttaaagcacaccctcataaaattgtaagattgtaagtttaaaataaacttccttcattgtacaaatggctagcctaggtactattttaactcatttattactcacagcaaccctatgaacattattatccccattttacagatgaggaagctgaaacacagaggtggttacacagcttcagtggcagagtcaggattgaaaccacaccacctggtttcagagccagtaactgccagtagtttttaaccatgagtcctattgtcaccttatatatcaaaccaagacatacctaaaagctcttagtggtcaccaagaagacgcgaacactttagtagaaaaataagacaacaatatgaaaggcagtatttgaaagagcaagtggccaagatacgaatgcaaaaatcaaggaaatcagacagcaatatctgacatttttcattgtttagattggcagagatgaaaaggatagtaacattctgggttagcaagagtataagaacatggatccccgtttatggtgggagtgtaaactgttaaaacacttctggagatcagtagttctcttccctgtaattctgtttttaggaaactattcacagaatataaatgtataagtatgtacaacttaggtacaagattgttcactgtagtagttattgtggtgaaaaattgtaaacaacctcaataagggatgaggaagtaaatctgtatgtcaatattatgaaatctctacagctattttatctatagggcaatatttattgcagtagggaaacattcatgattattgccaaaatgaaaaaagccagccataaagcagatatgtaatatgtagtaagcctgatattgtaaaaatatagctatgatggtagctaaaatgcactgagaatttatagaccaggcgttatgctatattgttacagtaagattatttttttaatgaacatttgaacagtgattattcctggtcagtgggtttatgggtgagtagtgtttctatattttctttcttatctttggtaatttgatctattacaaaattttctttccacttcatcgtctttacttgtaaccccactttctcaggataagttgaaaacaaggaatcgaataattttaggagccatcacggggactaggaa

SEQ ID NO: 132589 - DNA, 1097 bp, Homo sapiens
agctaataatattgggactagttgtgcatatggggaaattctcagagagaggaggtgcctgggggaaggttgcctagcagcagagctggcatagaaggcaagcccgtgacctgtctgtatgggggaaagtccggctcttcaagggtggcattgcctgtctgtcctctctctctagttctgtgcacagaaggaacaggaacaggaacagaaggcacagaggaacagggaggaaaagcccttccgggagtgtgcctgagtgtggcttgtggtgaatttgtggtagtagctctggtcagattttacaacttagaatatgttttgaatccatatatgtggtacactctttttgtgtgggactgacacaaccctcttaaccttaccacatctggaaacttgcttgaactgctgaatctcagaccctatctcagacctaagagtcataattgctcttaatcaaggttgtcaggtgattcttatgtacattaagtttgcaaaatgcagctctattgaaatacagaggaccagaaattgtataattgagaataaggtgaggagaggaaggggtgcatgtgtgtatgtgtgagagactgggaggatgcatttcacttgtgtatgtaattgtgggagtgtgttctcattttacttgaaaaagcagctcactgagctataattcacataccatgcagttcacctattgaaagtgtactgtttaaaccacttattggttttaagtgtgttcacagccttgtgcacccataaccgcaatcaattttggaacgtttttacacctggaaagaaaccccatacctataagcagtcactcaccatttttccacagtgcctaccttgcttccgagaagcccctgattatcactaatgtacttctgcctctgtcttttggatttgtctattctggtcatttcttgtatgactgaaataatacaatatatggtctttagtgtctgaatttttttcacagtttatccatcttgtagcgtgtatcaatgcttcattccttttttactgctgtcattttgttgtcaagtttattttgagcaagaatacagagattcacctttatcctaagctttgatgac

SEQ ID NO: 132590 - DNA, 1047 bp, Homo sapiens
tcttcacagatttctttgggatggaaagttctttctttaacctgattactgtttctaggtgctgtaaattgctgatcattctcagtaaatcaccagcattctgttctttctcagtcttgacaaagttgccattgtgcatatgtgtatttgtgtgtgtgtgacagggaacatgcatggtttctgaaaaaaaaaaaaaaaaaaaaaaaaaaaatccttgccccttttagatttggaaattagcatagctaggctagccagatccctcttttggaggaaatgggaaagattggattgagcccttgtgtcaaggaaattgacttggctggatttcagggatccctgtggactggcccactaaagatctgtgtcagtatctttagtggcactggaattgggacagcgtagctattttctgtcatagggcaaactcagggggaaaagggcaggcacccaacattctatgagaacttccatgtgtcagagagtgttatgtaaatgctatgtatattcttgtgtagtatgacaaccttgtgagctgtatattactactgttgttattattaccatcactgcttcacgaatggagaaactgaggcccagggagatcgtatttcctaaagttctacagctgagaggtgggttgcggaggctgctgtccttttctaccaagtgaagtttgtctttgctctttctctgccatattctttaaaggggcagatgttacaaggttgatgcggctgatggaaacactagcataggacaaaaatacaaaatcccttcacagactcaagtttccccacacccaaaaggctccgcgacagcatttccaggtataggggcaagcttctgtagcctccagcaaccacagaggtgcccagatgccaatgacaccctgactagagtgagcatgtcctctctgctctcagagtcctctgtcattggacccctcccaactgctgtggacacttgggctgtgtgctgcctactcccaggtgttaagttactggtaggacccacggctgtgtgtttattgcacaatttggtgaa

SEQ ID NO: 132591 - DNA, 1892 bp, Homo sapiens
aacaaaggggttgtatgaaattcccattgtgttttaattttgataagttattataatttcatgatagaaatgaaatatagtgtgcaagtatttttcctaaaattgtgagatcacgtctgtgagatccatgcagcttgggtggatccaccagtcttttttataatgaagtctctgaaatacttattgaatgaatgaatggtgctattaaggtgatggaaataattttccattcacaaattgctaacatactgcctttcatttcataacattcttccaaaaaacaatattcttgtgactattattgagtataaactggatacttctggatacagctctggttgtacataagtgttttcctaactaaaggattgtttggggaaaatgagatttaaagaaccaagatactgatttttggttatttagcactatatccttgccatttttcatggattcccttgtcttatattcagagaacattttcagattgccttaagcctgtttgtttcctgtttatccaggtttcacttttcattgatgggctactacaaggcctaacttttgcatatacctgtgtccaggtgtctcagtccaggaagttctgtagtcctgtttatgccatgtatttggactttcatatattcagcaactatttttttctgtatatattttggggtctcttacaccactgtttaaaatgtggttcccaggccacctgtaatggaatcacatggagatgcttgaaaaagtggcacgtttctggttaatgtgccgttcttactggagcagaatatcttggggacagacataaaaagcctcatgttttgcaagtgactctcaaatttaagctggcctcagaatcactgcttttggaaatcagggttatagctttgttcatgttcttagaatctaacatataattagaattcaatgaatatttttgagcaataagtgagcacatgagttgctgggtttgtggtagttagaaagctatacaatacctttaccagtctttttgtaatgaaagctctgaaatatttattgaatgaatgaatggtgctaataataaggtgatgaaaataatttttcattcacaaattgctaacatactgcctttcgtttcataacagtcttccaaaaaacagtattcttgtgactgttactgagtataaactggatacttctggatacggctctggttgtacataagtgtttttcaccttgtgttacacacaaacacacaccctactccgtttgttggaagcctgcaagtgatcacgcgtatcaatgctaggagtgacgtcaagtagactggctgggaagggcagaatgtggtaggcggttaaaaagcaaaaggcacatgctatatgactttttgccttttcttgttgtctttaagacttttgtgatggttacataacaccagtgggaccagagactagggcaggccaaagatgcactgattaaggaaattactgctacctaacagttattctggagctcaaatatttcctgttcattatgcaataatgtagcctttcgagtctccaaatgccatttggaagaagagggtgggggagttggaggtagtaggttggatctgaggcttagtctcttgcctgctgttttatgggcaaggtggggcaggacctataaaaattccttcacccatggcccttttctcctacaatgactgtagaaaattagaaccctttaactgtttaggaatgtgagtgttcagcataaggatccaattaggatgatggggaggagagataagtagcaatagatttaatatgtgatgtttgatagcattaaaaatgtcccaagcctatgcatgcagtgattgcttgatactgtagttttaatttgagttatagcatagagatggtgat

SEQ ID NO: 132592 - DNA, 1017 bp, Homo sapiens
tgcatttatttagggaattttaaatgtcctttaaagttttgacattttctccttgagaatcttgtgtgatctttgttagattaattccaagatgtattgtttttgttgctcttataattaatgctgtgtttgccttttttctggttattgcagaggaatactcttcactttgtgtatattggttttatatttgacagctttgcagaattgtgtagttagttctccattaccttattagctgtatatctttgttttagcagtttgtgggtgataaattctttctgcttttgtctgtttaaggaagtctttattttgctttttattttgaaagagatttgtgttggctaaagaattctaggatgacatttttttccttttagcactttaaagatgttgttttcatatttccaatatttcctcatctttagtattgatattgcttaacttgttttaaattcttattttgtctgttttctcactcattacttcagtagttatttttcctctatttttattctgtctttaaactgcccagggtttacttttacttatggtgtgagtcggggatctttgccaaatcattgcctcctctctcttgtcagtcctgcctgagactcttccaaattattagccttttcaaaataccacttagtggttcattaatcagtctgagtgatgaattgattgactggattttttttagttcattgatttctgcttacatctttattttctgctttcacatttctggctttattctcttggatttgtcccctttggtggatttagttatcagctaattgtaaatcattattattttctattgaaggcatttaaagctcataatttactgttgttactgttttaggtgcatgccgtaaattttggcatgagttcttcccttctcattatactttaaggattttatagtttccctcatttcttctttaaatcattattattcattattatttttacatatatgtgtttttattttatatttcagatatgtgcagt

SEQ ID NO: 132593 - DNA, 1059 bp, Homo sapiens
gcccaaagcaatgaacatgttatttgttcatgattttgttggaaaatcatgggctcatgattgagttgggctcagctggatgtttcttctttttgtctttttaggggtcactcatgggtcctcattcatctggtcgcccagctgaaggtagaaggtctagaatgaccttactcacatctctggcaatttgttgctggctgtcagctctgcctccctctctcatccttaaggggactggccagggtttctttccatggcagtctcagagcagcaagagactaagggtgaaagttgcaaggtctttagaggcccaggcccgggaagtgtacagtggcagttcattaacattgtcttggccagtgcaagtgaccagaccagcccagattcaagggatggggagtagacttcatctagataggaggagccaccaggttacattgccaaggggtgtgcatacagggatgggaggaatgtgattgtttgttgctgtcagcacagtataccttactagaactgaattgacgtctctactttttgagcattttttgtacattgttgtggtatttctttgtggtagtcatctcacatgctttaaacttcgtatgtcttatttccttccttagtaggtcacattgggagctcatcttccccttcacttaggagacagtgcaataaacatttgtatctctcatagcacataccagatttttaaaatttggcgggttttaattcaggacttaaggggtgaattatcttattaaataaataactcaagtatacagggaagtgaaagacagtcatttacctaatgctctgaacatctttcttgagataaagtagtgctgtgaactgataaagttcacataaagctaaagaaattcctttatgtattaatattacaggcatttatgtaatatcagtatctgtctgaaaagaatgcattgattacaaaactctttaagttgtacagaagttatttttccctagaacttcaaaagtctttgctctgcaagggaggggagagtaaaaaaggtgccttaaggatgtagacatgctgta

SEQ ID NO: 132594 - DNA, 1021 bp, Homo sapiens
tggttttcctgtttgtttgtttggattaggaaataaaaactaagatttagcagaagtactgagtttacagcatcctcagctagttgccacactagataagtagctgtaggacagaccaggcagtgactcacatggacactgcttttaggtcagaggaaaataactcaggcagggctagcagagcttccattttattctcagcagagcttagatctccctttggctgttcccagaattagaaagctcgtcagggatgctacagattatgctttagagttgggagttaagactgagcctcaactgcccccatttgtcttccttaaaagacagcataaattttaaggtcaaaaaagaaactactcattttagcagaggacaaaacagtggagcccttttgggaataggtcagccttttatggtcatcctaattttgcttcctgctgttttaattcacccaatacatttccttctgggaatcacctagaagtagattcatgggtttgaaggagaggagttaggtatgtttagaagagaagggacacagatctctaagggcacatacaacttggtaaagcaatccaggttgagagtatataataggaatttgagtgctttaaatttgtattttccaggctcactctcagtttcttaaagtactgcttcaaacaatcatttaaagataattatgttaacatttaaagatggttaatttggaggtctgatgatatttttaataacacagaagtttcattaacccaagattcttaatatgtaataaatttgtgaatgaacttaaaagctagtctcttcagatatgtgaattagtaggctttttttaatcatttgaagtagataagctagtagaaaatggctttcttcctccttcttatgaaaatatagaacatatccaagatactcttagtaaaagaataaagctcttcataattgaacaacattcaaaatgatgtgtttgaaaatcagccacagtgtattaaactgtttagaattacttacctggaga

SEQ ID NO: 132595 - DNA, 1125 bp, Homo sapiens
ccaggtatggtgcaaggaggggattgaagctcagcatggagcattagatataatcccttggtaggtcccttccaagtgagattttgttcttgagttcaattatatgtcaagtgggaggcttaaactaaatcactggatttagtttctctggtgacagctgcatcagtcagctggggcaagtgttaagatgtagattcctaggcccccaccctagatatcgattcaagagctcaggaatccatattgtgatgagcaacttacgtgattctaacagactggatgatttgaaaagcaagactgccatttctatctcacttaatttcaaggaaagagtttttcctctggcttctcatgagataccatttctcttgaagacagggcctgtggggcctgtgagtgtgtcctttcattgtgtgtagggcatgtgcattccttctctgtttctgtcatgggctgcaaaggcttagtccagcttggctttggcctgacaaggccagaaaataaagggcactgatatttcctataatttatcttttattcttaattatttttaaagatattcccccatatttagcctttgaaagcactggccccattgatgcatgtttctttatttctctggtggcgttgtattttaaaacttagcctatcttaatttggaagttaatggacgtgatggagaagtgagctcaaataagccttttccataagccctttcaaagcctattcctgcccttgacttttgcagcatcatctaaagaagttggagggtcgacgcctggattttgattataagaagaaacgacaaggcaagattccggatgaagagcttcgtcaagctctagagaaatttgatgagtctaaggaaattgctgagtcaagcatgttcaatctcttggagatggatgtaagtgactcctgtggttttcaatttaatcttatcatcgaggcacaacattaatatgttaaaggccataacccttaaaagcattaatatctgattacactatgtgataagaacttcagtagatagttatttattttaaataattgtcagtcataaagtagactgagaaatagaaaagtttcttctgcattcctgtagtttaactagattctcgactg

SEQ ID NO: 132596 - DNA, 1047 bp, Homo sapiens
aatagcaccaaactccagttttagaacatctccatcacacccaagagttgtgcccatttgcagtcgaccctgcttctacccccatcttcaggcagccactaatttgtgagtaatgttttaaattacaaaaattgagatattttagttaagtggaaatcattatagtttcattgataaatagcactggcatcattagccatccgtcttgaaaaatatcccaactaacgtgctcacctccatgaaacctctctccacgtccttaccactctgataaggtagctccagcatctgtactttgttcacttcaggctctcaccatatccaagttttaaggggctatcccagcaacacattaggactagctccaggtgttgaatattgagtcacaggagagttctcccatgccaataaattatccaattcagccttaaatttctctcatccatccccatttcaacactcttgagattcactcccacgagtctgcccctagtctctgccagtacttatgagcctgctcttcctacagtgcatagactgtttcccccagagcaggcactgtgtttttctgctctggatgtactaagctatgtcgctttatcagcccagaggcagcaggggctgaccttgggaagcaggacccttaggtgaagactttgcaaggtcttcaagcaaggggaggctgctggtcctctagcaaagtggaggaaggatttgcctgtgtcagatgggatgattcaggagaatccaagagttgaagattctgagccttgtccacctagacaggtccatgacagtttgtgggtcccactgttccttgctctgacataagagaactgttgagattgtacattctattttcttttcctccttcttcttcttctttttttttttttttttttttttttgagacagatgtcttactgtgtcatccaggctggattgcagtgccatgatcttggctcactgcaacctctgcctcccaggttcaagtgatccttccacctcagcctccagagtcgctgagactacaggcatgcactacca

SEQ ID NO: 132597 - DNA, 1071 bp, Homo sapiens
tgatggtatgctatgacccttcgtaggagaaccccagtattgagtgggatcgaattttccacccaagagttggaattaagtggctttggaaagaactgtgatctgaatttgtttgcaaggcttgtgcctacaactccctcctgaaacctcagggatcttatgtcatcaattatcacctgtctcccctctctctgacccacttcctctgctggttttcctcttcaatatgtaaatacattcaaatgtcccacatcttgaaatgataccttcaccatgcgttccctaactgtccctcaatctttctcctcccttgcatagccatcttcttgaacgaagcatctactgctcatatccatttcatctctccaacttaactggcttctgcttctgtactcagcagtccacagaactgtcctggttaaaggcaccaaagtgtggtttcctgaccctgtttcactgaagtgggaagtttccatctggaaactttgttactttgccattggagacgcttcattctttgctttctccctctgctgttttatagtctcttgtctctgtgtagctttcctttctgtctgtctgtgggtattggtcattgtgagggcctctctccacacccttttcttgtctccttctctgtatatatgttccccaaagagtgaccaggtcgacttccataacttcaattaccatgtacacattaatatgttgaaaatctttctcttaagtccagattctctgattttcatatatgaaattcagcttctttaaattcagtgtgtaaacagaattcatcatttccattgtgtcctaaatctaattctcctcctcaattgtgaatatcaagaagtgacccatctacctacctcattatttaagccccaaactttggattcattcttgactcctcccttcatctcatcttctagttctcacacgaatgaccaaactctgtccattcaactttctaattattttttagatctctcccttttgttttattcttaggtcagaccctaatctctgcctttctcccccatcctcgcttataccattatagatatcctactt

SEQ ID NO: 132598 - DNA, 1029 bp, Homo sapiens
gagatgcagctaaagcagtacttaatgagaaatgtatacttctaaaagcttagaaaagaaaaatgatctacaattgattatctaaacctccaccttaggaagctaggaaaagaggaaaggagataatacagataagagcacaataaatgaaccagagaacaaaagaatagaaaaaaagtcaatgaaaccagcagctcattctttgacaacatcaacaaaattggtaaaacatcaagctagattgatcaagaaaaggagaagatgtaaattacaaaatcagtcagttctcatatactctgttttgaaatgtaaacctttctaatgcaatcgatatactttgagcatagtatactttcacatatatttatacacagctttgtacacaacaaacgctaggtaagtgcagaaaactatacccagctgaaccaagccacgtaggaatacacaaagtgcacacatgtacacacctcagacatctaccagctaccccatttcactgcctgtgtggcgagccatgcccaaccacatctagcgctggaaattccagccgacttcagatgaccctcccttccaccacttcacagtaactcataagctgcaacaatcctgatgtctaactccacaaacaaatttcaggtttttttttttccttttttttttaaatcttttaaaaaaaattttattattatactttaagttttagggtacatgtgcccattgtgcaggttagttacatatgtatacatgtgccacgctggtgcgctgcacccactaactcgtcatctagcattaggtgtatctcccaatgctatccctcccccatccccccaccccacaacagtccccagagtgtgatgttccccttcctgtgtccatgtgatctcattgttcaattcccacctatgagtgagaatatgcggtgtttggttttttgttcttgcaatagtttactgaaaatgatgatttccaatttcatccatgtccctacaaaggacatgaactcatcattttttatggctgcatagtatt

SEQ ID NO: 132599 - DNA, 1066 bp, Homo sapiens
ttaaaactacttttgtgtccagaaagttattctactctcacacttgttgcttattttgcatgacatagactcctaggttgaaaatagttttctccctgcttctactcccctccctcaaattttggtggcatcaccgcgttctcttttgacatctcatgttgctattgaggaatccagttccattttaaatctagatcctgtgtcttcagcctgcattttttggtctctggaaacttctagaatgttcattttatatctggcactctaaagcaaaggtcggcaaactttttctgtaaagggaaatagtgtaaatgttttaggctttgtgggctatacggtctttgtcctaacttctcaactctgcctttatagcatgaaagaagcctagacagttgtaaacaaatgattgtgactgtgttccaataaactatttacaaaaccaggcaagagggcggatttggcccatgggccatcgtttgcagacccctgtgctaaagtttcataatgctgtgccttgctgtgggttatttaaattcaccatgctaggttctttgtgggctttcagtagatctgtctctttcaatttagggaatatttattttcatatatcctcaataatttcctttccaacattttatgtgtttgctttttgtaaaactcctattagttatttggcctcttgggttgttcatcatctcttaaaatcttttgtatttatttgtttgttatactttctaaaggattttctcaattttattttcaacagagttaaatttacgtagattttgaaccagtattcctagctggggacaaacttcactcatctccctcttctttcaacagcaccaggtacctccaagtctgaagccctacaggccacatggtttggtgactccttgttttatctctctgcccgcacaattctgctaagtcagttacaattcctccaccagttttccatattccaaaaatttattttcatctttcgcctgttgttgtgtcctttccaattcttttgtcatctttatttatttactgttattttagcagacatttgggagagaaa

SEQ ID NO: 132600 - DNA, 1024 bp, Homo sapiens
atatgcagtgaataaaactgtcttgggattggttttacagtgaatgtatacattattaattacagcagcacctatgttcgtatgttatttaaagaaatattagctactatagtagaaaaatcctgaaatctcagagttttaacaaaatttctcggtcacataaagtccaattggcagggctgaagtgggggtaggtgctcttcaagcacctggtttgatggagtcatccacctggtttgactggtttgatggagtctctgccgtctttaacacatagcttccaaggtcaccctggtgcctgtatctggatgacatatgggggaagggaatgttgagaattgcacgggtaagttttcttgggggtagtcctgggagtggaatgcatcacttctgcccacgtctactttttgtattcttaactaggctcaaatctggtagggttccattccctcttgtccctccacaagaaatcagtttcatggtcatacctcccagcaagggaggctgggaggatagctgtgagcttaggaggtcacacaaactggtctctggcacattgtgcttggagagtcataaatatatgtgcaagtgtgtggctgatgtctggatacatatggattcacaaatgactttcaagaatatagaaaccctaaagaattccaagacccagagggtggaaaccgctaaaaataggagtgtgagttttgtttgtggagaagtttttgcctgcttcatcattttcaacattgtaaggtaagatatggtggagtggggttgaggggaaccagttagaaatgcactatgtgcatcttgactgaacaaagctatttgttgccctacagtagtgaatcttcccaggctcttgtgtagctgtattcataatatgcgctgattagtatcttgtcagctgaatggaagcccaggtggggttctggttggactgctggcggcattgtccttaataaaatggggcctttcaaccaatgtgctattttcgttcccacatcacctgataagtcctagt

SEQ ID NO: 132601 - DNA, 1028 bp, Homo sapiens
atttttgtgtaatttttgtacttttaatagaggcggggtttcaccacgttggccaggctggtctcgaactcctggactcaagccatccatctgacttggcctcccaaagtgccgggcttacaggcatgagccaccatgcccagccactaccatgttttagcaactataatttaaatctgtacgctatgagataataagtcttatctggaaagcagtttctctctcttcctcctttccctcctcctcctcctcctcctcctcctcctcctcctccttcttcagaatgtcctagctttatttggaccttgactctttcatatgaagtttataatcattttgtcaatttccatagttttttttttttggaatcacactgactgtttacattcatataggtaaaaatgacatgatactgcaaaccaaagctgcccatggagaaagctttgtcacatgacacattgtattgctaaaagttcaggttcttactgctgctgttgatgctcagctgtcacaaggacatttgttcatttacttgttgatgctacaacccttaattaaacaaaagcatgctttatgcctggtggataggctatcctataactaccccaccagaaatgctacccttagagatttcacactctattggcagaacgttgggagatttcactgagaagggaacaactgagcttgtccctatttattaaaaagatttaagtttccaaggggagaatagaaaactagctttacaaaagcaaagtgcttttgacccagaaatttcatttgtggtaatttgtcctacagatatatgtgttcacaaagacttacacatgaggatgttcattcatcgtcgttcctaaaagcaaaataataaaaacaatcaaaatgccaatcactatgggactggtttaatactctgaaaactgccacaagtgttaagtctttatgtactgatttagaaacatataacattaaatttgaaaagaataaccttaaagctcagaatcatacatggggaaagaaaaaggata

SEQ ID NO: 132602 - DNA, 1007 bp, Homo sapiens
ataaaagacttaaagaaaacagcagaaaattccagagtaaaccagcttatgcttgggaagcccgggtgactgtaactatttcagtaggtttgggtgctgacccacctgaaggtctgtagcatgactcagttttcctgctctctctctttctttggacttctggaaagccttctctgtatgtagcattatttctgccacattttattgatcatgcaagtcactaaggccagcttaggttcaagcaattagaagccatttcaatggtagaatggcaaagaatttgcagccattgttaatctgactcagatgtataagaagtttgttaatagcaattgtctctggagatgagctcagggggtctgggatattagatagacttatatttcattggggctattgccctgcccctggtttgaatatgaaagttaagtatttcattcactgctgttctttcctcattagcttgcaagaattaaaatcatcctactttggtgcctgttaattgttactgctaacatgtataatgaaatggcatagctatctcatgattcaggatatatacatattttcctagattttcatgatttagaaaacatggaattagaaacgctccggtattgtcaattttaaataagaaaactgatattagaaagattaattgaattaaaaaacggatggatatagatataaacttattttaaagatcaataaaatgttctaaaagaactcacaaacccacgtaccctcagtctgagaaacgcagctggagaatcagagcctagaagagcccattggagttgactccccagaattctgtccagaaaccctttctgacttccagagactgctgctgttgcttcttcccttagaccctattagcagcttcctattactgctaatcagcatggcttggaagccaatggactcgacagatgccaccaccaaggcatggacatcatcattgccttatagctttttgggcttctgatacctccaccttcaagctt

SEQ ID NO: 132603 - DNA, 1048 bp, Homo sapiens
tctatgttaattactaactgatgtgctatatttaggctgatcttttaaaaaatttaaagcaatcacatcgcttattattttaactttattcattagagacaaaccaaaccaaccaagtcctggtaaagatttctgtggtatccttaaagaaagttccatcatacatgataaattgggatattcagagttttgacaattcctatgactaaaaggagattattttcagactttcaattcaattgggcttgaataattgattctgtgagctggaggccccaagggcatgtaagtacccatccaagtaagtgtggttgactgtttctccaggttatgaggatgctagattgctttggtctgctcagaactctcagatatcccagtcctctgggcgatgggattctacatcccagaagtaaagccaggcagcttttttgctgatgatggcacatctactagccaggaactatggcctgttccaatcacttgggtcttctctactttgttcttctcctgccaaattttgaactagtgaaataaagcaaacaagcaaacgaatctcctgtttctgagtaccagtgcagtggaataaaagttgtttgtcacattgttgcaaatatggtccacatattttagaaatgttgaggcccaccaggagcttcttggatagatccagattaagagaggtctgggaaaccttctgaatactcatcaatgaatacctgaaggcacagttcttgctttaaggaaacaagcccataggaaacacagagaagaaataagtaagtatagtaagtgctatgtcagagtgttagtatagaaaaggtttacttgctcatttactttttttaactttttactgtaaaataaaacaagtacaaaaaccacagaaatcaaatatatgacttaatgaagttgaaggtgaacaccacccaagcgaagaaacaggactttgctacgcactcagaagcctcttcatgtgccgcattccgatcacagaccctcccttctgcaataagtaccaccattctgccctttatagtaacttttt

SEQ ID NO: 132604 - DNA, 1049 bp, Homo sapiens
taactctatgtggttagttttctaaagttttgttaatgtgttaagagaatttgatattatgtaattgactagccttgtgatttcaatttaaaatgtgtaaatagttttagaatttatgatttttaaatggaaatacataaggtgatttggctacatgtatagacagaattggactgttaaaataacttgagagacacaatatttatgtctaattgattagttttattgggattaataacctgggaacattttgtttgttagtgaggcttttgaagttaaaaaaaaaatccagcacataaacttgtaaaatgtagtgtaaaatgtgtataaaaggggatgtttaattatcttattttttaaatgagaccaaatgttaatcaaatcctcccttgaaggcagtttaaaaaatacattacttggtttgtaaatagataatgagattaataagttaaatttaagtgatttaataagagatttataaaataagttagatttaaggaatgtaagactttacaatttatttaattgaaaattattttccaagtagccacagatgggatttttgtgtgtgtgtttaaggcccattctcaagaataccaaaaacttactttagcaattagcagattcttgtgatttttctttctttttcaaaattaaaatagaatttttcctaattaaaaaagggacacataattcagagtacaaaaagatgtaaggaatgaagtaaatttcatactctcagcacccagattatgattgttagcagttttgtgtatccttcccaatgactagctggctgactaatttatctctctgtggtctatttactgatgtttgattaactactaaatgggacaatattatacatgcttttttctagccttcttttttctttactagtttcttttgggcacttttgtcttataaattttaactgtaaggattgtattgtatcccattatagggatttatatgaagtatgtaccaattgacaagttatttccaaatttttctgttataaatattatggtgaggaacatacttaattt

SEQ ID NO: 132605 - DNA, 1074 bp, Homo sapiens
tgctactaagaaaaatgctgcattattttttgctggcaaaagaagggcaactagtgaaatgcaaggcaagtagcttgaagtaaagttataatgaactgaaagacttagtaaggaggaaattgcattttttggcaaaaggaaattaggtgctcccttttattttgggttaattgggaatagtttggtctgaactagagagaaaagtggagtaacattttaatttacttcagctttattattttaaaagtcacagtaatttgttttaattctgacttctttattctgtgaattccttgccaaattgttttttaacagaaggcattcaagaggaagccctgacaagattgcttaaattaatagagaagatacatttataattagtatttatattataggagttagagtgctaaaaacagacgtactgtattatttatggcatactggataaaaatgctggtgctggaaatagaggatccaggttcaaatcctggctctgctacctcctggactttgagcactgacacttattctttctctgcctcaatttcctcatctctaaaatgacacagtccgtatagctaggccatacagctgttgtgatgaggactaacgtaatctaagctccttagaatcgtgtctagctcaaagcaagtgctttataaatgtgggttgttattactcagtaaacttcaggcttttaatactactaatatttttatcattccctgtcttgtggataaacttgtctcatctatattaaattatcacatcctaacttaccagtgttcaaagagtgtttttaattttttttttttcaaaatattttgagagctcccatcatctgtagttttcttccactctccacccacctcctgccaccaagccttcattaaaagaacaaccgctgtattaattatcataaggaacacagaccttgactggcttttcacttgtgtgcttttacttccttggcacacaaacctggatgttagagagaagatgggtttggggatagcagagaccttttcagtataaggtgagggtaagactgagctacaatgttatattcagtta

SEQ ID NO: 132606 - DNA, 1042 bp, Homo sapiens
taggcaaatttagcaagaaagaaaaaaatctgtagagatggttttgactaaaacttggcattatgttttaagtctgtctacaaagatacccattcatgatcaatgaatgcttattaaattagatgaatgggtaggtcccagagggaatttcattgcccaaatacaaaagcactgcccttccatagaaattctcacatatagtgataggccatagctttcggcagtgaatttaactctattttaccctcacattgtctagtcatcatttccatggatcaggctatctggcttgaaaaaaaagccttgagttgttttctttaagaaaaagttgtgtggcctttttctactctaagtcctgatactcacttggtgcctttattttctgtgtgacagtgacacaacaaagttccaatatattaacattttcatctcaattgacaattttggagcaaaaaaaatttccctgttctaaagagacagagatagacagagggagacagaaagggtaaacactgagatattgaagaagccgtttgtaattaaaatataaagtactggtttctctgggaggaaggaatctgttcctagccattgtggaaagaattgtcttgttcctggatgatatattttgttcttttttagttttctaatctgtgaaagcaaaaccacagtgggattttaagggaatggcaagttgaggctaaattgtgagaggcatatataataaaggaaattatgagtaaaaagtactagttaagatataggcttgagtgctgtaatgcagagactcaaaacaagagcgacttaaataaggcagcaagttgtttcagtcttgctactaggcatgatttctttaccacaggccttttctagcttgttggtctgccacctttaatgcatggctttcatctagctgttcaaggtggctgttccagcattgctcatcccacatacatttcagtcagcaggaagaaaagtaaagaggcatataagccctttcctgttaaggacatgaccaaaaagttgcattatcaaccacttc

SEQ ID NO: 132607 - DNA, 1081 bp, Homo sapiens
gtagctcatgtctgtaatcctggtgaattgggaggctgaaatgggaggattgcttgaggccaggagttcaagaccagcctgaggccaggagttcaagacatagtaagagactgtctctcttaaaaaaacgtttttaaaaaagttagttgggcatggtggtgtctgcctatagtttcagcgacttggaaggctgagttagggagatcacttgagcccaggagttcaaggttgcagtgagctatgctcatgccactgaactccagcttgggcaggagagcaagagcccactattaaacaaattgtaaaaggttcatgtgtatagccttctattttgtaacagttaactaagggcagactttagaaaccaagaggaaaatactgtattctgaaatgaataacttaaatctctttcctcttttatctaaatatgtttgtcaagcattcattttcagttttggaagaggacacagagacattcattgttcaaaacaggcataattcagtgttcttttctgttagcgaagcgaatgcagggaagggccatgttgactaggacccgtcagaatggcgggcagcccatcacccaggatgggacagtgatgcttactgtataccacgaggaagagctcctggatagttcccacaggcagcctacttcagttttgttcatttaaaccaataattggggaaactacactagaatcatcttgtgagtatctgtccatgcataaaagtctttgggctgagtgatttggctgtcccaaaacaccctcctttcttgtggcctctgcctcttgctgttgcagagacgtttggctctgcacctcctttatgagtgggtgttctgcaccagagccagcttccaatttccgtgccggtttagaatcaacaaccacaggactcacattttatcccccactgcctcccttctctcccctcattcatggcaccatgcatatttttatgaatcccctctcttttttcaaagttaaaaaaataaaagaaacagggaaacacagatgctcctactgttgctccatatggaaacccactttctaagcaagcaaattgtagatctggg

SEQ ID NO: 132608 - DNA, 1028 bp, Homo sapiens
ttaatattttatgcatttgtgagtcaacttttaaaatatcaatgatttatctggtgatacaatgccaacatttaaaccaaaaacatttctagttgtaccttacttataaagatgacttgatatcttgaactgatcattcttctggaaaaaaagaaaacaacattgctcagcttgttaatatttttggcagtttgcagctttgagtgggggtggactttgataagtctagtctatcagaattagtaagtggcagttactgtctcaaggtggaaaactgctcttttagttctgaagattgtagagaagataccatcaagtctagtgtgtatgctatgtatccccaaatataatattcagagtaattgttttacatgtagtaatactttattgtgaatgagtatctttttttcaagcttgtaacacgaataattctttttcattgtttttttctgccttatattactctcactttataaacattcccaatctttaagaacagttaactatcctacagctgaccttacatacaagagtactcagtagtcctattaaacatttaacaagtcttcatgaaaattgtatgcaggtggatcagggcaatactttaaaatcactcgagctgaatgacacatgtttgcagatttccatgggcccagtgcatgttgtttggccaagctcatctttttaaagaaactgaaatcaggaacatagtttttaaaattagaaaatgacttgctttctcattttgtttgtacctctcccaaaccaaggaacaaaaattgaatcctttatttttgtctatttatattttgattattattataattaatagtttagactttaaagattattaaacaagaatatgtaagcgtatctgcattgttttaaacaattgttttagcacagtgaagaaaagctatgtaactgtgaaaatactagcgtatgcttgtcctggataaactcaggtaaacattttatatgcacttatgatgtgaggacaaggttaagattgatgaagagtctttgtt

SEQ ID NO: 132609 - DNA, 1005 bp, Homo sapiens
acctggccacagagataacctgtaatcactggattttgagattgtacacccgtcagttaagaggcaccaatttagcaggggatgttcctggtatccattggaggagccacatgccagaatgttctagtggttctcgcattaatatgtatttgcgtgcattgtttttgattgctctaatcagccttgaaatgaatccaagagctttctgcaactaattgcacagtgcccaatccctccaggctctgtctgaaggcttaattcagctaccttatctctctaggtatgcggagaccaaagccaaggggctgttttcctgcgggaatttacactgattcgaagagagagcctccatgaagatttcctgtctgacctcttgaatagtcacaaaactgaagactcggtacagtgtcgcttcttctacttattcacagaaaacactgaggttcaatggctgattctgacttgtggtggtggtttttagcaaatctgaagaggtttggatggtattttctcacatctgtgagaggagggggaggcaaagtgtagggcagtggacagactgtatagggcaactttctgacttttcctgggtctggcaagatttaaacattttactcaagcgttaaagtttgtttggggcagcatgtggaggattcacattaagacactgatgttttgccagcgagtctgaacatgaaatggtaataatttaaataagtgaaggaataaggagatttatatgtaaagcccagattgttttatgggtcagtggaaattccactgtcttccaatcctggcttctttgtagatattcttacttcaaagtgctagtgatatttgttttatgaaagtttgtttctctggtggtggttttaggggaaaacactctagaaaatgagctctcaaatgaaaacaatagtacagttgactggagatgtcaagattacaggcctttctctgcttgcgaatcaaactgtgatttgtaatttggacttctttgtgaga

SEQ ID NO: 132610 - DNA, 1052 bp, Homo sapiens
acaggtactaagcatttggtaatgtaaagcctcaaaatatggtccacaaagcaatgagcagcagtatcaccattacctggcagcctgttacaaatgcagaatctggggcctattctagacctactgaatcagaatctgcattaaccagaccccaggtgattcatatgtacagtaaagtttcaggagcactgttgtcaattttcataaaaaggtattcaaaagtagaggaatgtaacatttttcctccatacctgagcttggcctcgtcacaggccctcaagttctaactggctggaagaaaaactacttttcatttgtagcctcaaggtaggacagtgtctttcagtttaaaatagtcttgctgtggcaaagatctgattaattcaggatctaaccttagtccaaggggacagtcaaccaggatgcttccatcatctgagaagcctcacatctgttattcattgctcagtaacaaacaaccctgaaacacagtggcttaaagtaattatcactttaaaaaattttctgatgattctgggggtcagctgggcagttctggtctgagttggcttggctgatctctgtgggtagctgatgaccccatgatcagagaactatttctctgtcctaggcctaccttttgcaaatgaaaggccttaaacacgtactcaaatgccttaaacatatactcaaaggaaaaaagtctttaacccggggtgacagtgtcctctccttaccactttctccacagccaaaagcagtgtctacagaaaactccctgaagagtcagggaaagacaatagctacaagaaagtatagaagactttgcgacatttgtaatttaagttaccttatttaataactcccttccctcacaaaaccccacagtcctataatatagaattaatagattaggaaagttaatcttagtgcatttcagaaactctcaaagggatggtatgtacatggttgggccagaaatggatcctagtctagctgtccccttctacctcatttaaagaaatgtctaaggagagaacacagggtttact

SEQ ID NO: 132611 - DNA, 1035 bp, Homo sapiens
ggctgagaagtttaaatcctatttgcttttccttagccctgctctcccttggagggcagcaccgaccaaatgacttgcaggccactaggtggcgctcccttttaccacccagtctatgcatgacagcaaagccagctgtcaggagctccgtcttcttaaaacgtttaaagataaaagaaaaatctgtaaggttcttctccttatcatagcagctaaaggtatgttactcaactaattgtgaaatcctgtagtcaatatcatctgagactataaaagcaaatatctagcacatttgagagactcaataaatattaaagaaatatacaactaaattgaggacccatgattttttttccttctttttgaagacagaaaactatacatccaactgaactgcttgtttgcagagtcatttgaaaagccagtgcctcccagctttgaattttaataactccctttgaaagtctgcatagaagatacgacttaacctttacaagtccacatcaatcctcttaataaacacctggcaaaatgttagagaatgaaagttgttttcttttttctctctttctctgaaattttcctcaaactttggaaatctcactacaggaaaatagaagattggagtctgctatgtagataaaaatatacacttatcacacatcctaagttactttgatgtataacattccctttaaagtttaaaccaaactctttgatacaatggctcttttagaataaagctctcgtttgtcttcagaagatattttgaatttcatctatggagagtgttaaaggacaggaaacttttaatacacaaggtaataacaaaaagccacctgctcttctatagccaaaactttattcacaattgttaggtgtgttagaataataaccattatcatccagccatcccaaagtagccatttagtggatttgggttttcatttggcattaaaaattattattattacaacatatattttgccttttaaatgtctgcacacttgtgcagcaccaaaacttagttaaaaa

SEQ ID NO: 132612 - DNA, 1050 bp, Homo sapiens
tgtatctatgtacttatgtaagaaaatatagataatttctcatacatatatgagataaagtttaatttataaatcacattgagaaattagcaaaaataataaaatagaattttaacatttaatattattgatagaatttttctaacaatatgctgtaaaaacctctattgtactattataactctattgtaactatgcagttataactctatgctattataactctactataacaacatgctgtaataaaacttaagtgaatgtgatctctctttcattctctcaaaatatcttattgtactgtgctcacctgttctcaaactgtgggtgactgtgtgtaactaaaaccccagaaagcaaaaccacagacaagggggactactgtatataagtctgaatttcaagcgaggaggtctgagttgcaaatagaaattgaaacactgattttttttttccgagaacaaaatatagtacattggattttatcgatggatatttgctattcagtgctttcatcttaactttgaataaaagatacagaaagccaagtaacaaagaccaaaatatgtaaaagaggcagcccaccatctacttaggtgtgctaaaagattcgaaagctttagaggatatattttccagaacatttatccatttattatagagcagccttttatggtaatcttttctggttttactgtcagtaaattgaggattcctaatattttgagggtaaaacaactggtaacattttctaacatcatccagtagctggtaaatttccacgtatgtttttatcataacgtggttatccgcagttgttggaggataaagtagatgccttgctaggcagttctaattgcgttttcttgcatagtaactgttatggagagtgagtgattaggacagtgtggaggggcagtatggggtttaagtacatttctaagagaggaaaattaagtcagaagcatggatttttttttttttttcggttactacagtacatgtagtcatctgaatatgatttccaaggttcttgatactatcagatac

SEQ ID NO: 132613 - DNA, 1026 bp, Homo sapiens
ggagacagggtcaagtttgcaaaagctcagatctatttcagcccctttggatttgacaacagcatataggaagtaagatcacaactcaaattccattgaaggaatatactctccttgagaggtcagagcagatggagttccattggataattttttttttttaacttccctctaccctgctaaagtagccaatggaataccagcaagcatggttggctctttgggaaatgacctctggtagggttctgttagaaatgaaaaatacttttctgaaattgctgtggagtagcaaatcatctcctctgcattctactcaaattaaagagaaatgtttagaattctgaaaacatccttccttagctctccaactccaggactactgatttttcagagttaattcaggaaccactttcaaatatatacaatcgagtaactatcattaaatttatctgtcagcacaaaatagagatttctcatagtcattcttctaaaacctaaggtgctgggaaagacatattttcagggactgggacaagttttctccttttttctcctttggagttcctgcccatatgaatgtatcaatatgccagttgaatgtaatgaaagaaagtgggcattcagcaacccatcttagtataagggatattcaaaatttatttattttaatggagaagaatccctgaatctaaatgaataagccaaaagcaaatcagttacgatctttttaaaaggaaaagtagtcttctggaagttgggaatttaaattcttattaatcagaattaacaatgaaccaatcaaacaggagtcacaaaatcctaagagaaaagtgagctggctgatttttaatgatccccaaatttccagagccagatgaaaggtgagctgctggatatagtgatgggactgagttggaagtagctggaggtagcaatttggctactctttctaactctagccttgtgggttcaggataatcagttacattttgctgaatcactgcactattatgacaatggaaaaat

SEQ ID NO: 132614 - DNA, 1053 bp, Homo sapiens
gtagtcttttcctttaagaaaggagaaagagtactttgatcttgctctatttccattgtctgtatttgtattaggcaattgtaatgtcttttaataaaaagatgattttttaaaaatcaccagcaaatggcagccatttgataaacttctcctacttctctttatccttctggcacattctaccatggtttttctccactttcctgtttttgctttgttcctctgaggcttgataacataagggaaaaaaaaaaaaaacttggatataagttcagaaagaaagtgagttcaatgtggggaatctgagtgccagaagtttgaagagagcatgtggcgagctgacagtgccttttggcagaagacaggggagagatctggcaggactcctccaggtgtggagaactgctcacctggcttctccactgggccctgcagagcagcctcatgttccctgccagtgggtcgcctcacagtctgtaaatataagatggaagattcttccagagtagagaaacataagtgaggcagtttgttcagcatctgctatagattgtggtgaggtgcatgcatatggtgggctttattgatatcaatcattttgtcatgagacatcatcagtgctaaggtaaacgaatcaattccattttgtcagtatgtataatcatcaggttgtgtattatataatttacctactgtcggtcttgaatagggcacttttcattgaggtatttatttgcagacttggagatgatatagggctctcaatttgcttcagtttcttccttaggagcttctccatctttgttttgtgattcaggccctagaggtcacccatccctccctaacagtagggtaagaggaatgtctatctgagcacagtagtctagatcctctatgagaacaagaaggtatgggcatgagaataaagaagcacctttaccattaaaaacatgctcccaggacactatacagccatcactgcacacatgcatgacatttccttttgtacctaacagtaattcctagattcctagataatgaacactgattcag

SEQ ID NO: 132615 - DNA, 1054 bp, Homo sapiens
tttgtagagatgtggttttgccatgttgcccacgcttgtcttgaactcctgaactgaagagatccacctgcctcggcctcccaaagtgctgggattgcatgggtaagccactgcacctggcctgttcagacatatttttttttaacagtgtacataattatcctatcattggaaggatttaggttaaataagataatcccaattgttactcaatttctctgaaccttaatattatcatcctatctttaggagaatttagtttaaattagtgaatctcagaagttacctgacttctctgatcttcagtttcctcatttgtaaaacagggaaaacaaaacttgccttatactattgtcgtgactagatataaatatagacatgaatctagatatagggatgtatagcctggaacacagtaagtattctgtaaacattattttcctctctctaccccaaatctcttaaaggacagggattgaaaaactattttttttttaaatagtgtttcaactctccaaggcccctagcacattatctgttgaatgagaaaaaagaatcatatgctcccaattccttccctggagaggttacattatcgagttctctacaaagttgaatattccactcatgacaaaatcttatagctgtttttaatgtcatacattgttgaatttcagagagctaagaatttgtggtatataagaacaacaacagaaaaaagtgtaaggggaatatagaaaaggaaccaaaaaaaaaaaaaaaaaagttaagattaggcctacagagcttctttggtttgtttgttttttgagatggagtctcactttgttacccaggctagagtgcagtagcatgattgtgatcttgactcactgcaacctccgccccctgggttcaagtgattctcctgcctcagcctcaagtagctgggattacagacttctgccactgcagcccggctaatttttgtatttttagtagagacggggtttcaccatcttggccaggcaggtcttgaactcctgaccttgtgatccacccacctcggcctccc

SEQ ID NO: 132616 - DNA, 1035 bp, Homo sapiens
tctgatagaaggaaacaacttagttttcttgccagcacaaaagaaaacagagcttgccattggaagaatgatcagttgaccaagatgatggataattagtttgtttttctcttttactgaggatagcctatataagtcaatgactgtatccaaactattttaaaaacaatctatagccaccaacttatgatacattggcctcttaggtggggttattttattaattacataataaagattgtattaattatataataaagattttctatgaccttgaaatatcatatgtcctcataaggtccaggatgcagctagctcaacaccctcagattaaacatttcctgggtaacaaacgggctttccaaacatatgtcagaaccaaaaatcgctctctgctcaggaaattataagtaacatcatttgggatgtggcttgaaaaggaggtatctaaatagggctcaccttgacaatgaaatctgctgtgagtggtccagccattctcagtatctctttgtctggaaatttctggaagtccacactagaattgtccacaaggaaagttcctgtggagctgagactgttttcacctttagtcccctggagggttttggtttccagatctatatgatcaaacacgtgaagatgagagaaagatgttcctagggcaaccacaggcaagcacatttcatgcaacaatgtttagagctaggtaagggagacacatcattctttatatagctgacaaaattgaaattgtgatatcaacaaactatacaggcactgctgagtcacataggaatttatgctggagttgaaattatttcaaaagtcattagccaggcattcaagggttcctgtcaaaaaaatctttgactctccagatgatgttatttgggcatcccgctttactgcaaccctattcctttgactaaaccaattctcatatgtctctttttgacttcaatcttgatggccctcagcctaggataccctccagttttctttttgctctacaagatccagggtgtatctctg

SEQ ID NO: 132617 - DNA, 1005 bp, Homo sapiens
tgtaaggtgctgggggacctgcccggcattcaggtctgaaacagaaggggaaaagtcaaaggtgagattggaaaggtgggcacaatccagctaaaccagagtagcagatactgtggctatggatttgtcttctaacctagaggcaatgagtgaaggtgaggggttatgaaggattaggaaagggattttaggaaacgcactctgaaggtaacataggcaatgaaatcagaggctggtaaactagctcagggtccatggtactagttcagatgagaaaaagtaaaggcctgcgctaacgcagtggcagcaaggatggaggagaaaaaccaatgttgagagatagtttggatgaagtctgaccggtggcatatagaagggaaaatcagggtgaatcaaaggtttctgatttgcctgggcagacagtgtcttcatttataagattaaaaaaataaagatgataaagcaggtttctggggctcaagttaaacttacgcatgtcgggcttgttgtgcctatgggttattcaagcagtgatgtgcagaaggcaactggatagatgtaacacatttgacaatgctgtgagctgttccaatgtaagcaatattgcttgaatccagttatataatttcagtatgtgtattaactctcacaaggccactagggaaattactatagtatacttggtctatttaatggtactccaagggcttcaaagaataaagacatctttcacttctttactggattttcttgcttaacagaaatcatttaactacctacagcatcatttctattgtgagctacctcggatggcttgtagcttcttgctcacgttcatgtggctggcgtctggactggattaaaaagaactaccatgcagatggagacggaggacagtattctggaacctttctccctctaaccttactgcctattgcattttcctatatgcattcttacttccagctgccatggggtcatcaagctttagcttaaatcaaatgt

SEQ ID NO: 132618 - DNA, 1023 bp, Homo sapiens
tcctggctaacacggggaaaccccgtccgtactaaaaatacaaaaaattagccgggcgtggtggcgggcgcctgcagtcccagctactcaggaggctgaggcaggagaatggcgtgaactcgggaggcggagcttgcagcgagccgagatggcgccactgcactccagcctgggcgacagtgcgagactctgtctcaaaaaaaaaaaaaaaaaaagactgtttcctctaatgggactttacagacagaaaatgtctttggcatcttggcggaggtatctgccttacaggagggcctcgagattccactctgttcagaagaaaggatctggtccaagacagcacaaaatttcttccatgctgaagtaactctactcttataatacccaagtatttcctcacagaagccaacagtttttagactaagtgaacaccattacctcctccacaggttgctgagcaaggaaagaaatccgtctccctccatcggtggatgatgggttgatagaagatgaactggactgtactgtcagcggagcccgagttacgaatctgcaggagtcaacaggaaagtagaagtaatgtgacagtgcggtgctttctggtcccttgcagcttcgaacaagagtatatggtagtgctgatggttttaggctgtgtgagggactgcactgcgggagaagtggcaatggcagtatcatgtatcctaccattttaccagtgaatggtccttgcataagctttcactatcattatcttctgagttctgttgccacagagcaagggagaacaatatctcaatttgtgatttcactatcatcttattccaagcctgtattccctttccgtcctttatttccaacctctttggtataatagataaaattatgtggattttaaaatgtagattcagaaatagacaatttgttctaagaaaattatatactgcagaaaataaaagatactggttttggttaagaaaaaagacgagttgaagaattaaataacacttcccattcagagac

SEQ ID NO: 132619 - DNA, 1048 bp, Homo sapiens
atgtcattttgaagaataaaaaaattaaggggcagctttgagacagatgctgacttcaataatttttacaggactctggtcaaacactgccttatcatgccatcagctactcagcagtgaagcgctggagcattttggaactgttcctaggttagagaaacccaaaggagagcttttgtcttttttgtctactttttaaaactcaacatccataaaattttgggaaaaaaggaagaaagactactcactccacgtagcagatacaaataaagccaaattattcctttcagaaatgaaaagtgaggatatgacacttgtttcagaccatctttctttctctttgcttttctgatctaaatgaacagaaaatgatttgaaaatttgcttttccttgcaaatagtctacttaaaaggccacatcccagggactcagatgccatcacagcttacaatgctatcactgcatttgtagttctcagcttaatattggaatgtagtttaaatgcataacattttccctgactttgataaagatttaaaatattggaaactcaatacttttcatgtaccatttcttctttacatggaatgaaattagtttatcttgtaattttgtgaggtttctttcccttaattcaacatgtttggcaaagctttccaatgaaaagttcagttcattaaaaatgaccttaatggacttaacatatattggtggtgacagggtgcatactttattttggcacacaaggatcccattaatttgtctttgtcactctctagggctctgctaagcgacagttcagatttagctttctgaaagtagccacagaacgagcaactgcggtgacagagggagggactgataaatttagaacttcttggtttgcaatcaaggaatgactacaaaaaaacggctctatctgctctcttgagtttattattgattctgctgtttctgcgcatggagatcaagtatatttaactcagagtagagagaggttgctttttcacccaggcagcttctgaacttttcttactcatttttgta

SEQ ID NO: 132620 - DNA, 1045 bp, Homo sapiens
taacatgactgttatggctctgccttgtaactgtttgtatactggtttcctaataagctgttagtgcgcggcccagggtctatgtcctagactttattgtttctccagaacctatgacacagtaagaattttataaatgtttgctgagctgtgctggattttctcttaaccagtagaaaatgcccaccctcccaaggattagagcaaataggaggagataatgaaggctgggcattcttggtctagactgggcagtccctttcctctataatggagcctgtcttttcttcaggaaaaaaggtgagaacacagttttctaaagtacacacagatcacctacatcctccaatcaaggactgcttcttacaaagatacgtaaaataccctacaaaacccaaaactaatctctattaccattcatagagtacttagtatgagcgaggcactgtgctaagcgcttaacacacttctcctcacaaccactctctggggttaaagaggaagaaactgaagccctgagaagttcaacaacctgcccaaggccaaagaggcagcatactatatgaattggattttaaccctgatttacgggacttataagcccatgctctcacagctggaataaagggataggaatcagtcatttacaccttagtgtgaattagtttaggtagttttgttttcctaattcttagctgagttgagttgaatgaatgggggtgggggtggtggagagtgagaaaaaaagagttgaaggaagtgagaagactgtaccccgtacaagtgacagagaagggtcagctgggaatttgggtagtcaaaaggcaaggtgactgagaataagtcttcaggggagagagggaacaggcactaggaaagtcagaaagagagtagcacagaaaaggaggcaaggacccaggtttgcactggggaaagagaagagaagtggggtggggggcagagagagagagtgagcgagtgagtgtgtgtgtggggggagtggtggtgtcggtaatttacaacatgaacaagcatcaccaaagca

SEQ ID NO: 132621 - DNA, 1012 bp, Homo sapiens
gatgaagccatttcccatgcagagatctccctgtctctgtctcaggagtttgatatgtgagaagacaggagacgaagcagctagctattgatgcaggggtgattaattccctcagggctggggagacacacacacacacacacacacacacacacacagatagtagacatgtacacacatatacacacaggcattgatacacatgcatatgcgtgatacatacacatacacacccctgtgggcagtgcctgctgtttgcacaggcttcctattcacacagatgttctattcacaggatatggggaacagcagcccctgcactttctagccctaaagggtgttgacgtggggagtgagaatgaggctttccacaaatgtttttatatatgaccacacaaaagtgacctaaactgatttttcaagttaggttcaaagatctcttcatgtagaatgcatgttttactctttgatgttttgttacctcagggcgagttaagggattattatcagaatgaagcctgaataaattgaaaccctcatattaggatttatattggcttattaaatccctcatttgtttttgattatccatgattctcatttattgctaggacttttatccctgggacactatttttaaacacacttggatctgatagaactgatgaattggcctaaatccctaagttgtatttactaagtaggagacatgtgagcataatgtcaagaaccagactgccccagaactttgaatttcaacataccatccacttccatctgtgttttatgaccttgggaaagttaccctttttgaatgccaactcatttatctataaaataaggatgataacaataattacaataatagcttccagtagttattgggtgcttgctatgtgctgggtactgctgtaagaacttcacatgtactaattcctttaatcctcatggcaaccctaagatataggtactattattataccattttatatatagggcaattgaagtaact

SEQ ID NO: 132622 - DNA, 1127 bp, Homo sapiens
tagaattcctgctggctgttataattcagatatgagcctcttgagaaacaaattagtagggtagatgatctgcaaagttatttttactccaaggagtttgatatgttaggtggtttgtctagatttctaggtataaatttcttgttaaaaatagttccagggttgttctccttgtggtggtcaagatcatagaagaaattactcgcatcatgaatggtgtcctctattgttgtgtttcttctctaataccatattttgggttttattgcagtttgtctctattttatattaactgattagcatcttcacattaaaaaccttccactaaatgaaccctttttcttttctagaattacctcctttatacagagtgagtttctgccaggcacagccacttgttggcttcccaatacaccatgtttctctttcacatctgtgaatttgcttccagcttttcctgacttcatgttcctacctcaagatcaaggactgattcaagcccttcctcttccagcaaggtttccctcaccatcccagctcacatcaactgtaccgtccttgagattccattggatttacttccatttacattctgcaatacttactacacagctattctaagtaaactgctatagcatttaatctgacacaattctctttgcttaaatgtttttttccccctagttatcatcccaagtagaccacaaggcatttaagatttaggatcaagtgccttgggattaaggaaataatttgacattcatccaatcaggctataaatgtctctatttactgatttgtaggtggcattactcactaaaaccctacaaacctaagtatttctccttattatgggttggattgtgttcctgcaaaagatatattagtcttaattcctagtacctcagaatgtgaccttatttagaaatagggcctttatggagataattaagttaaaatgaggtcactagggtggatcctaatccaataggaatggtatccttatgaaaggggaaatttgacaccatgacagacatgcacagaggggaagatggctatgcgtcagataagatgctgtagcactctacttagaacagccacatagtaagtattgtagaatgtaaatg

SEQ ID NO: 132623 - DNA, 1120 bp, Homo sapiens
gagttgacagatcaagctgaagccctcctggcttgaccctgcccagtacctgaacaactgacttctgaccaggggcaggcaggagacatagggtctccctccaccttaatggctggaattagtcttcctgccctttgcccagcctcaagtgtgcctggattggcctgtcactttaactggattttaagctttcagcttggcttcctaattgccactttgtttcccggacagtgctggagttctgcctaaagtccagcctactagactgtggtcctgtctctctgcctggatctggctagcccttgaacttgggctgggcagagcacccttagccatgcatgagctaaaaactgtgacgtgaccacaatccagctgacatcacacatggtcaccaataacaatagtaatactaacatttatatcgtacttaaatgagccagattctgtgctagttgctttaaatgcattattcctgtccacagcttcctgagataggtactattatcctctctattttaacaagcaggagctgaggcctggagaattcaaatcatggcccagaatgcctgctgctgggtattcctcaatgccatgccaccagagtcacacccaagtccaccatgacatggacataaaggcaccgagaatggggctgcttcttatcatgggaccagctctgtggatttatgaacctcagttctgcatgatccgagcctcattcactgaggtctcagcagagcccagaacttagcttacctaagatgtgggaacatatattgacttatttactagtgataaaggtactgtaagtttccccattttacaggatcagctaacagagactctgagaggttaggtaacctgtccaaagtcacacagctcgtaaacaagagaatcagcattcaaacttaggcggcctggctcctgcatgcctaattattatattatactctctcttaaggtcaatagaacaaagtattaatagacctgagtggcaaatgctgggcttcctgtgcttatagtttcagaaaatcacaagtgacaaaatgacagatctatttctaaataatagaaacaaacacactgataccacccagggccatgaatccacttgcagttg

SEQ ID NO: 132624 - DNA, 1032 bp, Homo sapiens
atgaaatatttatgaagcattggtagtatgtgcagcatttcataaaaaaggtagtcccatagaggactcaaaaattgctgaaaaggatgtggatttggccctttcacagagcttgtggaggaaggtgatctcaggggcagccatgtatctgcaacttaaatcagttatgttaaccagggaggaacttgttattttaattttggaaaatattttcttcatatcgatggaaatttccttaaccttagattttattttcttagagtctctgttacacattaagaggaaggaaaaaaaattgaggacttggtttcatattacatgttttaagaagaattcttatttttaatttaaataaaattgacttcataaattctgattaaggaaaaaaaacacaaagaacagcctttaacagatacttgctgatgacttatctttagcagaatccagatagagatgccaagaaaaaaaagaaaaactttcacgttaagattgaatttttattgtagatttcatgtacttttcatgttaagctatgttatgctccttaaaaatggccttttttggatatcagaattaatgtttaattgttcataaatacctttcatcttataaaatgagtacaagtgggtatatgtcaaatttcagatattattagagtacaacttcatattccaattacagcagtaaacatgatctattcgaccttatagtctgcagatggatccgttcagagtaacatgttctgattctgttctgtagtgggcagttttaaacgtcattccctccattgatattaaaatatttattactgaccttcaggtgatttatagtttatttggaaagatgacatgtctcgggatgggtggtggaggggtggaaacagctacccttagatgaatgagaccaataaaacaagtgatgtaggatgtgaggggtgggagaggcgctttgggatggggtagccggggaaggctttaggatggagaagtgatgaggaaagtgaagctggagtgagactgcctggtttcaaat

SEQ ID NO: 132625 - DNA, 1034 bp, Homo sapiens
tgagtaaatagcgtccaatgtttaaagactggggaagcggggagaaagatgaaaggagtaagcagcacacacttcaaagcccacttttaagcacacgacattatgaatattaaaaataaaggatgcaaacaaaaaaggcaattcagcattttcagaaagagcatttggcaatattcaacgcataaggagactgtgcttggggccatccactctctccagcttctcaaagtgtttccgggcattgcgaatgttgatcagagtggccgcagaagggatcgacggatctgacatgaccaccatcacgtacgtatttgaggtgaagatgtcgatgaaagcagcgaagttggaattcctaacttccatgctctggaaggaagcggccaatttactgcagctcagcttgaactgtttgatgatgttgctgatcttctcaaaccggtggacgtcgcgctgctctttgcactggtagtgggaaataaccaagaatgtagctctttcgaacagcagaacttcatcggcctcaatgatttgggcaaaattcctgaggttcatctccagctgctgaacgttgggaatcagctggtagacgatgctggaccaggctttgtagagcgtctcatcccagatggacgttcgaaaacaagcacactccagcgggcgagacagacgcctcaggtcttcctctcgctctttaaaaatcaggtcacgctgatcctcctgaaccagatccattttgtgcaccaggcagaagattttggcgtcaggagagttctggaggatggcctccagacacgactggtaataatgcatgtccttttccagttcgcggctctccacgtcaaacacgtaaatcaaaacttccacgttacggaagatattgtctcgctggctggtgaagtaattttccatgaaggtgtcctgaccgccacagtcccacaggttcagcaccaggttccctaggaatcggacgtgggagtgttccacgtcaatggtggcccccaggcgccgggtgtcgcgagcaatgtaattggcga

SEQ ID NO: 132626 - DNA, 1103 bp, Homo sapiens
agaagatcagcaacatcatcaaacagttcaagctgagctgcagtaaattggccgcttccttccagagcatggaagttaggaattccaacttcgctgctttcatcgacatcttcacctcaaatacgtacgtgatggtggtcatgtcagatccgtcgatcccttctgcggccactctgatcaacattcgcaatgcccggaaacactttgagaagctggagagagtggatggccccaagcacagtctccttatgcgttgaatattgccaaatgctctttctgaaaatgctgaattgccttttttgtttgcatcctttatttttaatattcataatgtcgtgtgcttaaaagtgggctttgaagtgtgtgctgcttactcctttcatctttctccccgcttccccagtctttaaacattggacgctatttactcagctacccagtagagcttgaagctgacctttctgagaagttggtatggtgtaacactaaagtaggtggttcgtgtgtgttctcattacctggttatgatagatatgcacatcaaagcctttaccagtatcttcctgtattccgtatcagattgcaaagacggaatgttactattttatcagcaaggtattaaaatgcatttataaattcttcttggcttcattcatgaataaacgtgttagcaatttaaaacatgtccttatttgaaataacttgaaagtgcttaatatgcaaatctaaaaattctgactgcccacaagtattgcttgactggcaaatttgattctgtgaatttagcccccagcactttagtgatgtttggtaacagctgtagaagcgcttatgctatggactgaagctagaccacctgagttagtattctggtcccttcacttactagctctgtgaacatgggcaaatacttaatttcattacacttgtttcctcattggtaaaatgtgggtcagaatactactttatagccagtcgtggtggctcacacctgtaattccagcactttggaaggctgaagtgggaggatcacctgagatcaggagttcgagaccagcctgggcaatatagagagaccctctctctacaaaaaaaaatttttt

SEQ ID NO: 132627 - DNA, 2305 bp, Homo sapiens
aaaaaaattcctaatgccttttagccttctttaatatttttaggtaaggaaagtatgtttggattttttcctctttgtaggtatatgagattgaaatgtgaagtatttggacaacaaacgtcaagcaatgggaagccattttgatttcttgagtaatcttgtaagcattaagtgaatgacaaagtagtagtgtaacttatttcttatgttataacttcagtcaattaatataaggatagtttttgttgtatgttcactaaatggttaatataatagccattgaatatactaatctttcatcttagagaactatacaacttttattgtttcttaatggaacattctggctaaccagaaaaagtgagaaaagtagtaccttgggatgtgtagtcaagatgacaaattttaagactggaaaagctctaaacaggcttaatgattcttcaggtagaatgatcctgagaagtgatgtttgatggaataaagtgcatgtgatgattaagtgaagactggggcagaatgatttaaaaaaaggaaaaagatggaagatgagtagacacttgcaaggaacactgtcaaactataaatccattcagtgggttgtataacatttatatttagtctaatttagactttgataatttaatgctacttttatattttaacaaaaatataaattaaaattttcattagtctgttttgttgttgggtttttttgtgaggtactccctgttgggggaaaggaacaaggaacaaccatcagaatcccccagtccctacagaatagcctcacagtaacttgagaaaactgaacttggggttaaataacttgtcacacttgcagtctcctgcctcactccttcaggtgccctgcctagaaaaagacttgtgtctagcatccaagtgaacacatactattgccctctgtgaaccaggaggaatggaacaggcaatggaagggtgatagtacctacaataccctttgtagaccccatctcactaccatcaaaatcttgtccactagcccccaaaaaactggcaaggaaagaaggtggaggggaaatttatggaagtagatggcttaatagttatttcttttatcttgggctgcctttctctaagttggttgtcctgtcccagtgtgaagacccatctttttgtgagaaaagacaaaagaaagcacatgtaactaccttctttgcaatggaaaaggagaaagaaaaaatcttctcctaagttgctgttttcttttattagttaataaaacaaatcagggactatgcaggtctatggggaaacctttagtctgctttaagaaaactcagtatctgaaaatcttaacttagcatgtgatactgtcttatcagcatctgcagaagtgccaaagccactgctagacacttaatgtgtattatttcatttaattatattttaaatgtgcttccttggtaattcttaagctcgagaaagagtttgagaactgctgctaggaaatagagattcacatttaaccctgtggtacttttaagaagcaggtacgttgttgcatatatacttgggtagagattggtaactatctgatagggaagctcaagttggccacccaagtctgagaaacccttaattactgagaatcaaaagagcagaatgtctgtagacattttggatttgtaaaaatcacattgttgagttatacctgtgatgggctgaaagtttttggcattctttcctgttcttcatatgccagtaccataaacaaaaagtatctcagatctgtcactttcttctcctaaaccaatgtgatggcagctttttgccttcagccttttccctatccagtatctcctacatagttaccttttgatcttaaggaactgttttgattgggtcacttccttgcctaaaattccattgattgttcattgttaattctaaaatagagttcaaatttaaaggcatgtaagttcccctgtaacggatttcctctactcccccttccgctgtaatctcccatttttttactgaaatgcttcagtgagcatgggtctttagaggtcttgatatacaattttcctgaagcaggaataccttgctttcctctactagtttaccacaattacagctctcttttaagcctcagaaaaaaatctcacttccgtcttgaagtcttaatccacgctttttatatccatgtgcctactccttctctgaaatctcctatggtttatctttttattcatttaatatcccacgaattgattttattatatattttttatggttgcatgtggtctttctagttata

SEQ ID NO: 132628 - DNA, 1800 bp, Homo sapiens
ttatagaaaatgtttgccaaactgtggcttagatggacaagaaaaggtctttttaatacatgtaattcatatgtgctgtgtaaaattggatgcatatttcaggaacagctgtctttatatgtgtttatttgtgcgagcagttggagatggggttcttcgatgttgggatttgttatattgtggaggcttatcatccaaccagtatatttatggaacatgtactgagtcaggagctttatcttcagtgttagaaataaaatgattcattgcatgctctatgtttgggaatgttagtaaactgtgtttttctcccctttaattagtaactgaaattaggagctcatggagaaaagctattgaaatggaagaaaacagaactaaagaaccaattcaaatggatgctgaacatagagaagtattgccagaatcattacctgtgttgcacaatcaaagagaatttagcatggctgattttctcttagaaaccactgtatcagattttggccagtctcatttgactgaagagaaagttatttcagattgcgagtgtgtgcctcagaaacatgtgctgaccagtcacatagatgaaccaccaacacaaaatcagtcagatttgttaaataagaaagtaatttgcaagcaagatttggaatgtttagccttcaccaagctttcagaaactagccgaatggagacattctcccctgctgtcggcaataggatagatgtgatgggtggcagtgaagaggagtttatgaaaatattggaccacttagaagtttcttgtaacaaaccttccacaaataaaactatgttgtggaattcttttcagatatcaagtggaattagttctaagagttttaaagataatgattttggcatattacacgaaactctcccggaagaagttggtcatctaagttttaatagttccagtagttcagaggccaattttaaactggagccaaatagtcctatgcatggtggcactcttctagaagatgttgtgggagggagacagactactccagaatcagactttaatttacaggctcttcgcagtagatacgaggctctgaagaaatctctttccaagaaaagggaagaatcttacctctcgaattcccaaacacccgaaagacacaaaccagaattgagccctactccccaaaatgtacaaacagatgatacgcttaactttttggacacctgtgatttgcatactgagcatataaagccatctttacgcacgtccatcggtgaaagaaaacggtctctttcaccactaattaagttttctccagtggaacaaagattgagaaccacaatagcatgtagtcttggagaactacctaatttaaagggtaaggtttaaatagacctatgcatattcacctgttgaagttttctctcaacttttgataaaaccagtacacaaagaatgctgcatgacctttattgttaatgtgctcccccttccttcatttaggatgaggggaatgatccctcactggacaggtcctttcagaatctctgtttatgtatatatagttacaattgatttgagacaggggtgggaaaaaaaagcccccccaatctgaagcttacaggttttataatacaaatgactgaaaagtaaatgtcatcaaaatcttgcccagtggaaggtggtttttaaacacttgagaaacccaattttaaatatcatcactataatggtgtaatatctgggggtggggtgtagaaataaaagaagccaggtcagtgtattagtttcctagggctgccataacaaagcac

SEQ ID NO: 132629 - DNA, 2250 bp, Homo sapiens
agtttaaaattggcctctgaactactggaactattaaaacttagatgaccaacttcttccgggagagtttcgtgtaatatgccaaaatcattatctttaaaactcttagaactaattccacttgatatctgaaaagaattccacaacatagttttatttgtggaaggtttgttacaagaaacttctaagtggtccaatattttcataaactcctcttcactgccacccatcacatctatcctattgccgacagcaggggagaatgtctccattcggctagtttctgaaagcttggtgaaggctaaacattccaaatcttgcttgcaaattactttcttatttaacaaatctgactgattttgtgttggtggttcatctatgtgactggtcagcacatgtttctgaggcacacactcgcaatctgaaataactttctcttcagtcaaatgagactggccaaaatctgatacagtggtttctaagagaaaatcagccatgctaaattctctttgattgtgcaacacaggtaatgattctggcaatacttctctatgttcagcatccatttgaattggttctttagttctgttttcttccatttcaatagcttttctccatgagctcctaatttcagttactaattaaaggggagaaaaacacagtttactaacattcccaaacatagagcatgcaatgaatcattttatttctaacactgaagataaagctcctgactcagtacatgttccataaatatactggttggatgataagcctccacaatataacaaatcccaacatcgaagaaccccatctccaactgctcgcacaaataaacacatataaagacagctgttcctgaaatatgcatccaattttacacagcacatatgaattacatgtattaaaaagaccttttcttgtccatctaagccacagtttggcaaacattttctataagggccagatagcaatattttaggctttgcaggccatccattctgtcaactacttaactctgccatgatagcatgaaagtagccataaacaatgtcaacaaatgaatatgcttatgttcaatacaattttatatacaaaaacacacaaggtggggccaaatttggttcataggctatagtttgctgacctaggctgtggctcagttcaaactgaattaaatcagcagcaaaacagaaattatttaattactcaaccaagatgatgtgcctacctaaggacaccaatatcagaactttgcctacacaaattacaggttataggaaaaaaggtattgggcagtttgactcatttgggaggggtaaagacctccgcacacatggtttatggctgatgcttctggttgatgactggcagaacacagcctatgtactctataaatatgtagatcacaggtcagaccaggaggcaagagatttttttttttaaatgctcaaataagatctttctagataaaagcaaagtataacaacaaagacaaaattgtacattatcaaaattttatatctctgtatattgagtacactgaaggcacaaaatactgctaaaagactgttatgtgagaatgcccacacttagtacgtcgattacaacagcataaataaacagcctttggcaactcagctaaaaagatctgtcaggccatggttctaacagtggttatgtcgatgaaagaaaaaagtaacagaaagcattattaacttactcaagttttctggagtacggggaatctgattccttgttaagaaggggttagaacccagagagtcaattagttcctctaattttatttcttttccttcagagagctgtggtgaatcagataaaactgctctggcaacctaaaacagaaaagaaaaagtaaagcaaagattaccaagcccattggtagaatgcaacaaaacccctgataaggataataagcacttcacagtcagcagcccctcccattgcagacaacacaaaaataagcaacaaagaagttccccaacaactctgtatagaccatccaggtacaatcctgtaaagtgaaatgaaacactgaagtatttcctcatcttaaatggatatcccattataaaggagagaatagataagaatctttatgctgggaagatttagaggcagttccagttgtgcagtgacctaagctgctgtctgccacaactgtgagcttgacagctctgtattcactaaaatgactagttttaaaggaagcagactcttctcaat

SEQ ID NO: 132630 - DNA, 1567 bp, Homo sapiens
agcctgactcacatggagaaagcccatctctactaaaaagacaaaattactcaggtgttgtggcgcatgcctgtaattccagctactcaggaggctgaggcaggagaatcgcttgaacctgggaggcggaggtcgtggtgagccaagatcgcgccattgcactctagcctgggcaacaagagcgaaactccgtctcaaaaaaaaaaaaaataaaataaaggatctgctacaaagaaactgtgatttggaacctgtgacattgtaataatgcagttctagttaattgaatctgtttttaacctgtgttcaagttgtggagtattcattaagtcacttaactctttcaaatcaaaatattgttgactcagtatgtggtaagtaaagtcttcataattgggaggctgatacacaaattgggctgaaatactgctctacttgtcaccatgcctccctagaataaactgccttttgatgaccgggacgaattgagtgaaatcgtaacggacagatacggggcagacagattttagaatagactcgtaaagggaatggaattcttttctccttataacttggatttgttgtcttttttccttttagccctgcctctttcttgtcgcagtcagtttcatcatcagatagaaacagtgttacagtacttgaaaaggtatattttaaaataagtctcaattaattctggaccatactaaattataaaatattatttatttttgttgataccacagttaaatttaatttctaatttcacattttctactatttgtacattttgtaccatatctacttatattccttattgctaagtgggaatattggaattagttaattctgccagtgacatacaatttcacaatagtattaacaaccttttataggttcatgataaccagtgaactgctaatgaagacagcttcaggatcagccatgattattaagggtttaacattacatatctgtcttcttcaggacacaaagatgggaactcccaaagaaaaaaatgaagcaatttctaagaaaataccagaatttgaagtggaaaattctccattatcagatgttgcaaagaatacagagagtagtgcatttggagggtctttgccagctaaaaaaagtgatccatttcaaaaagagcaagatcatctggtagaagaggtgagaaaagactgtaatgagtatacttaaatatcagttattggatgggcacagtggcccatgtctgtaatcccaacacttggggaggtttcggcaagaggaacatttgagcccagaagttcgagaccagcatgggcaacatggcgaaacccatctctacaaaaaaattaaaaaaacagttgagcatgggggcgtgtctctgaagtcccagctacttactggtgaggctgaggtggaggatcacttaaagcccaggagactgaggctgcagtgagctgtgtttgcatcactgcactccagcctgagtgacagactgagaccctgtttcaaaaaacaaaatcaaaaacaaatattttctcaatggtgttgggatcctaagcgaaatacagttaat

SEQ ID NO: 132631 - DNA, 1194 bp, Homo sapiens
tatctcttaaaatattactttatctcttattcttttgatcctttccttctgaaactcctattgttgggacttctaattctgtctttcatatcttttaacttctcattcatatttacaacttttttgtatctcatggcttcattctaggtattttctttagatacctcctataactcactgatttatcttttagttatgtttaatctgctttttgacctgtctgtctagtatttagtagtcataggtatatactttttacctctgtaatccttacttcttttctgtaactgcctgtttttcatggtgtcatctttcattatggcttctgttccacttggacatgtacaaatggggaaagcctttcagaaggtaacatgatgaaagaggtcgagcccttggaatatcagatcttctgtaatccagtcatggctttctctaccaatcttatttcccaccatgcttccactggatgtaccctgtgctccatcatagcaacttgtacctcgttctctcagtaccttcatgccttcttcccactctgcagtctgggctggatgtctgtcctctgcctccttaaattctgtatatacttctgtcataatactgtagaagtataacataacacttgactcatcactatcctttcctagactgactcttcggaggcaacatttccatctttcatttctttcttccattgttggtatggtagtagcatgtagttattcagtcataggttgaagaataaatatataggttgactgataccataaatgtgcactgaaatatgctaagactgtaactttttggccttgctggcttttgtgataatctcatgatctgtgtatgtaaacatgaagcatataacactggggaattatggattcttagtctttgagtaacttgttttagtattagccatcatttcttttataaaagctagatgttctctattacttttctgctcatcactttatacttatcaattgaataattatgttttcctattagtgttcatattttggtttttctgttttcttctgtttacaagttgttctcgaatttcaaggaatccttgaatgttagaatgtacaaacataattaaagagtaaccaatttttaaatttctttagatgcacataagcaacataaccaagaaaatggttgcagaggagacagtgataccttgggagc

SEQ ID NO: 132632 - DNA, 1034 bp, Homo sapiens
cctctgcctcccaaagtgctgggattatgggcgtgagccactgtgcccagccagaaaacaagactcctcttgatgtgaggtactatgatgtttgagaaattcaaggactaagtaatcccccttgctcctaatgttgtactctgctttaaaaatagttatagggctgggcgtggtggctcacacatgtcatcccactgttttgggaggcagaggcaggaggatcatttgaggccaggaattggagaccagcctggacaacatggtgagaccttatctctaccaaaaacaacccccaaaactgggtgttgtggtgtgtctctgcaggcctagctactcgagaggctgaagtgggaggactgcttaagtccaggagtttgaggctgcagtgagctatgataatgtcactgctctttagcctaggcgagggactgagaccctgtctttaagaaaaataaataaataaaaatagttatctgatacattcttggtaattctgactttcttattgagaagataatctattcatagattaactcagtattgttattgtggtagttagcaaatatgtttacttcaaaattgtgaattttctgttttaagtctgtagatcttttaccaccaatgtctcccctttcgtttgatcctgcctcagaagaagtgtatgcaaagagtattctttgtcagtatcctgcttcacttccaggttggttatttatttatttttttctctttgaaacctccttcctgtcattctttttcattataataatagttctttaaattccttatctttttcctccatttttttttattgtggtgaaatgcatgtaacataaaattcacaatttcagttattgcaaagtatataactcagtggcatttagtacatttacaatgttgtgcagtcatcatcactatctagttcttgaactttttcttttatttttttttgagacagggtctcactttgttgcccaagctggagtgcagtcgaacaatctcagctcactgtagccttgaccaccccaggctca

SEQ ID NO: 132633 - DNA, 1073 bp, Homo sapiens
atcccaacactttgggaagctgaggagggtagatcacttgcggtcaggtattgagaccagcctggccaacatgatgaaaccctgtctctactaaaaatacaaaaattagctgggcatggtggtgcacatctgtagtcccagctacttgggaggctgaggtgggaggatcgcttgaatgcttgggtcggaggctgcaatgagccaagattgagccactgcacccagcctgggagacagagtgggattctgcctcaaaaaaaaaaattaaaattaaaattaaaaaattggcaactaattcaaatgattttaagacatagaaatgtgcaagccaaagaaacatatttaagtacagatacagcctttaggggtcattgatttgtaacttctgttaaaaaatgaatttatggtcttttcactaaacctgctgtttctgctcaatctttatttttctttccatctattaacatttcttttattctagttttcaaccttttgtgtaatataaaaatgtagcaaaaaatgtagcaaggcatgttactctttcctagtagttttcactgggccaaaattatttacgtcattttatgtttgggggtatttgatttttttccccccgcttttttttttgtttgtttgtttgagatggagtttcactcttattgcccaggctggagtacaatggcacaatctcggctcactgcaacctctgcctcttgggttcaagcgattctcctgcctcagcctctggagtagctgtgattacaggcatgtgccaccacgcccagctaattttgtatttttagtagagacagggtttctccatgttggtcaggctggtctcgaactcccgacctcaggtgatccgcccccaccacccccaactcccagagtgctgggattacaggtgtgagccgttgcgtctggcctttccctcttctttaaggtaaactttaatagtaaaaaacataaatatttttatgtaatagtttgttgtaacaacctatagttcaccaatttttttctcctcctgattccttagttgcacataggaaatgtttatgaggctggaaaac

SEQ ID NO: 132634 - DNA, 1127 bp, Homo sapiens
tcccaaagggctgggattacagacgtgagccactgcgcccggcttctcttgaaaaatttttaaaattatttctccctgaatgatcttcattcgattaattacatgtcagcatatagaaaatgctaattgtatcttgtataagatttcttagatttggagctgggtgcagtggtgcgtgcctgtagtcccagctacttgggaggctgatgtgggaagattgcttgagcccaggagtttgagtctggcctgggcaacatagtaagaccccatctctgaaaacaaaaaaattcttagatttgtttgaaaattatagtgagctagattctcctgatacatttttttaaaaattccctttggaaataatatccaaagggacttttaaactattaaagtataattatttaattttcttactagaaatcattctaggaaatttgttactaagagtgaacatacatttacatttttaaaatatgtacagattatgtgtggactttaatattttgtttctgtttccaaaggttcggtctttgtgggcttcagtgaatgaaacgctcatgtttttggaaaaagagagagaagttgttagttcggtccttagtcttgttaaccaatatgctttagatggaactaatgttgctattaatattccaaggctcttacttgacaaaattgagaaacaaatgtttcaggtaagcatttgatattaaggaagcttttgagaaaactcctatcatgtaattgtatattttcttgcaatgttcttctgctttcagaatttgttttttgttttttgttttttgttttttttttgagacagaattttgctcttattgcccaggctggagtgcaatggcgtggcgtggtttcagctcactgcaacctccgcctcccaggttcaagagattctcctgcctcagcctcccgagtagctgggattacaggcatgtgccaccacacccagctaattttgtatttttagtagacggggtttctccatgttggtcaggctggtctcgagctcctgacctcaggtgatccacccaccttggcctcccaaagtgctgggattacaggcgtgagccaccgcacccggccagaatttatttctatgagtgtgtttagta

SEQ ID NO: 132635 - DNA, 1105 bp, Homo sapiens
gtagtgtttattttatttcgtatccttttttgtcttgctatttcattctgtaaatttttgcatattgccatagtgtattactatttttttttttttttgagacggagtctcactctgttgccctggctggagcgcagtgtcacaatctcggctcactgcaacctccacctcccaggttcaagcaattctcctgcctcagcctcccgagtaattgggattacaggtgcatgctaccatgcctagctaatttttgtattttttagtagagaaggggtttcgccatgttggccaagctggtctcgaactcctgacctcaggtgatccacccgcctcagcctcccaaagtgctgggattataggcgtgagccactgtaccctaccagtgtattacttttaatgtctattagtcctgttagtggatatttcattaagcagatattctttcaggtaggtagtccatcatttttttaaaccacttaatgctattttatgtttaggttcatctatgcagcatatctttttttcttggagtttcttctatgtgtcagatactgtttaggcattgatattacagaattaaacaggacagacaaggctgttactctcaaagaataggttgtatataattgtgtgtgcatgtggtttttttttttttttttttttttttgagacaaggtcttgctctgttgcttagctagactagagtgcagtggcatgattatgactcacggcagccttgacctcctgggctcaagtgatcttcccactgtagctgggagtacaggcgtgttctaccacacccagctaatttttaaatttttttgtagagacagggtcttgctttgtagccaggctggtctcaaactcctggcctgaagccacattcctgcctcagcctcccaaaatataggcattacaggtgtgagccattgcacctggcctaatttcttttttgcaattgtaaacagttacagtaggataactttgtagaatgctttgttatatattactaaagctatagaatcctttgaaattaactgaaatgttgcctgactgtattagataacatttaaatttattcctgggtatgtgagatgaggataag

SEQ ID NO: 132636 - DNA, 1058 bp, Homo sapiens
tgtgtttggatttaataaggcataagacttctaagcatggattgtcctatttctggatttaaaccaattccagtcaacgtgttcagagtctagataacttctaaattcggtacactcatttcctgttaaatatttagaaattttggtggtttctttttttttttttcgcagacgaagtctcactctgttgcccaagctggagtgcggtggcgcgatctcggcttactgcaacatccacttcccgggttcaagcgattctactgcttcagccttccgagtagctgggactacaggcatgcgccaccatgcctgctaatttttttgtatttttagtatagatggggtatcattatgttggccaggctggtctcgaactcctgaccttgtgatccacccgcctcggcctcccaaagtgctgggattacaggcctgagccactgcgcccggccaattctggtggtttctctgaggcaatgctagaacctggataagcaatgttaatacattgtggaagtccctgattttcagaatattcatgtttttgttgtattgaaccatgttaaagtaggatttattacaggtaaaaacctgaactctgaaatatttacatgagttattctcaggtctactctggtttttagtaacacagtgacgaattgtttgagaaatgaacagtggttttatttggttatcctgtcctattggtcttactaggaggaaaagtaaactgatggcagcaatggagatgatgtgatctcctcttatctttttatattgactttcttcctttgttaaaagattctatggctgggcgaggtggctcacgcctataatcccagcactttgggaggtcagggcgggcggatcatgaggccaggagatcaagatcatcctggctaacagggtgaaacccgtctctactaaaattacaaaaaattagccgggcgtggtggcgggcacctgtagtcccagctacttgggaggctgaggcaggagaatggcgtgaaccctggaggcggaggttgcagtgagccgagatcacgccactgcatttcagc

SEQ ID NO: 132637 - DNA, 1047 bp, Homo sapiens
gtgcagaagctgtttagtttaattagatcccatttgtcaattttggcttttgttgccattgcttttggtgttttagacatgcagtccttgcccatgcctatgtcctgaatggtattgcctaggttttcttctagggtttttatggttttaggtctaacatgtactcttaataaatattagctatttattgttattcagtaaatgtaggttgttaccattataaggcatgtttctcttgaaataggttttccttccttttctgtagagtgttttcattaaagccagttctgccagtcttatattgaatctgtgttttcagaattagaaaatgaaagcttgtatgtttttcttactggttataaaatacacatgaatgagaaaaattaatttgccttgacttcctgaagagaatgaaaacattaatttgtgtcaaagtcttactcagcttttgatgatgtttagcttattaacctttttctttttctatttctatttcatttttaaccactaggaacatgtttgacaagctgaaccgtgatgcctttcatataatttcttattttttgtttcaagttctggaccagtctctcaccaaagaagttttcaagtaaggaaaaataatttcattttcttaaatttctttccaaatttgaaaatggacagcgttttgatacaagccagaattctctcctttttttttttttttttttttttttgagacggagtctcactccgtcatcgaggctggagtgcagtggcgtgatctaggctcactgcaacctctgcctcctgggttcaagaaattctcctgtctcagcatcctgagtagctgggattataggtgactgccacgacgcctagctaagttttgcatttttattggagctggggtttcaccctgttggtcaggctggtctcaaactcctgacctcaggtgatccacctgcctcggcctcccaaagcgctgtgattacaggcgtgagccaccacgcccggcataagccagaatttcaacttggcctttgactgttgttttgaatgaatatt

SEQ ID NO: 132638 - DNA, 1137 bp, Homo sapiens
ctttactcatgtacacattaaattttagttgctggctgggcgtggtggctcatgcctataatcccagcactttaggagggcaaggtggttggatcacctgaggtcaggagttcgagaccagtctggccaacaaggtgaaatcctgtctctactaaaaatacaaaaattagctgggcatggtggcgtatgcctgtaatcccagctactcggtaggctaaggcacgagaaggaggttcagtgagctgtgatcgcgccactgtacttcagcctgggtgacagagtgacactcaaaaaaaattttttgtagttttttagttgctttacctgtgctaaactggaagtaaatgtggagtcagtgatttaatagttaaatagaggcagtaaagagctactactgcttggttaatttacacatattgataataaataataatgatagcaggaatagatcttattcaactccaggaaattcttagtttttatgttgcctgatttacatcatacatctgcaaacaggctaacgtgaatatctgacttgtgtgttcctttgtcttgtttcaatgtgtctagattgaatttgccaggaagaatgtgtatagtgccaatcagaaaattcaggatgctcaggataagctctacctctcatgggtagagtggaaaaggagcattggatatgatgatactgatgagtcccactgtgctgaggtaagatgactgggacggtcatttgttggttgctgaagaagttcttatcagacttttcatttcaatttttccatactatgtcttagaatactcttctctatcaaaaggttgaacaataccatgtacataggtggctagttatgtggcagaaaagcaaaactaggcagcgaataattttatctaacaacctatgagtatacatatgccccaagtgagatacaactaaatgagaaacacaggccttgccctcataatgggtacagactaacaggggatacagccagccatgctgtcctattttgtgcctttttaatgctccttgcagaagagggctatctcataggcagtacactcagagtagccaagtccggttgttgtttaacggcataaatacaggtactattggctgggcgcgatggctcacgcctgtaa

SEQ ID NO: 132639 - DNA, 1019 bp, Homo sapiens
tgtgtgactttggaataagctatataacttaccttcttttcttttctttttttttcttttctcttctctttttttttttttttttttgagacagggtcttgctctgtcacccaggctgagtgcagtggcacaatcacagctcactgcagccttggcaaacagacaaatttcatatctgtttacttcatttgctcctcctgcaattcccaaggattggcaggtagggcagatatacttgatagggaaattcaggctcatcaactcttagtgacttgcccaagacctaaagctagagtgagaggactagattccttctttaactcttcagctgtgctgccttagttaagaccttaggtatgtccttgtgctcatttttctcaccagccaggggatctgcttttctacttacagattgttgccaatgccaaaggcgctgtgactggggcaaaagatgctgtgacgactactgtgactggggccaaggattctgtggccagcacgatcacaggggtgatggacaagaccaaaggggcagtgactggcagtgtggagaagaccaagtctgtggtcagtggcagcattaacacagtcttggggagtcggatgatgcagctcgtgagcagtggcgtagaaaatgcactcaccaaatcagagctgttggtagaacagtacctccctctcactgaggaagaactaggtaactggaattttatcttgaaatactgttttatattaaatctttcttaaacagcttcattgacatatactctcatcttgagtctaaatttacacagttgtgcaagcatcactgcaatccagtttcagaacacttctgctaccccaaaagatcctcatgcctgtttgcagtcagtcctttttaatttaatttaattttatagagatgggatctcactatgttgcccaggctgatctcgaactcctgggctcaaacgatccacctgccttgacctcccaaagttctgggattacagatgtgagcaaccactaatctttttgcc

SEQ ID NO: 132640 - DNA, 1031 bp, Homo sapiens
taatattagcttaatgttgtataggcggagatgacaaatgcacccagaacaattagtgaagacagggttgcctctggaggtgatgacctcatagtcctccagtgacccaagtcttccccaatttgggctccagtgcacactccgttttgtgctgtgtcttacaagaaggggcaatctctgagtgattgtgaaattctaaatcttttgaaatggccttcatatcagtttgatttttgtagcattgttttcttactctcttattttagtgttctgaacttcatgctttgctgtattttatactgcatagttcattatataaacgttttaaatagactcttctgagtaaataaatgaatctttagttggtatccaacaaaatcaatttcttttcactcttttgtcttttttataaacctaattcatgttttacagtggggttccagcgtgtttctgtgttataagaagtctgtacctgcttcaaatgcaatagcatataaggctggtaagtgagttaaaaaaaattgtctcaattgctatagttattggtgcatattaacatttggctaaaagagataaagtatgctcccttacatagtttgtagaattgatctattcataaaattatctataattttagcatataaagatatgtgttttcttaaatacatatacaagatatattaatacccccaccaaacatgctgttaatttaatttaaacatttatctaaagcaaacatatgtggaataaacattcaagcttttggtctacgttaatagacttaacagtataatggaaagttgctgactctctgaccttttatattttggcaatcagaaaggtgtcaaactgcgtctttacttcttatatttccttctcttatctctttgtgtctgatttgaaaccacatgttacttgccatgaaaggtggacttgcttcctttctcctttgttgcaaagaatcagctatatggaggagaggagggcctgagaaacttttctgccatgaagtgtttgagaaatctatcgcc

SEQ ID NO: 132641 - DNA, 1010 bp, Homo sapiens
acttttgaaaatattggtttgagatgcctgtatgacatccaggtggagattagtgagtagtcattttgaaaataggagtctgaggttcaggggagaggtcaggtagacctagagataaagatttgtgttttgttagtataatgattatagttaaaaccatgagagaatgaaatgttccaaatagaagtgtgaagttagaaccttagggaatgctagtatttaaatgatgggtgacataattggatctagtataggaaagagagaagtagccagaaagcagagaaatttgtactgtcaaagacagcaaaggaataaagagtttgaagacagaggagtgtcagctttatcttgtgtcatacaaggaaagggtgtggaggaattgaacctgtcaacattgctgatgagaaagtcaaatgctgctgctgtggaaaacagtttggcagctcctccaaaagttaaacttagaattaccatatgatcgagcagtttcatgcctaggcatatacctaaaataattgaaagcagagactcaaacagatacttgtacgccaatgtttgtagcagggttattcacgataggcggaaggtggaaacaacccaaacgtgcatcaacgtatgaatggatacacaaaatatggtatatatatatgatggaattatgatttcttccttaacaaggaatgaaattcagatatttgctacaatataggtgaatcttaaaaacattattctaagtgaaataagccagacacaaaagcataaattttgtatgattcctcttataggaggtacctagaatagctacccttatagagatagaaagtacaatagagattaccagggacttggattgagggcaagagaatgggaagttaccatttaagggttacagagcttttgtttggggtaatgaaaaaagttctggaaatgaatagtgctactgggtgcactgcattgtgaaggtacttaataccagtgaattgtacacttgaaaatggttaaagtggtac

SEQ ID NO: 132642 - DNA, 1011 bp, Homo sapiens
gccattctcctgcctcagcctcccgagtagctgggactataggggcccaccaccacgtctggctaattttttgtactttttttttttttttttagtagagacggggtttcaccttgttagccaggatggtctcgatctcctgaccttgtgatccacccgccttggcctcccaaagtgctgggattacaggcgtgagccaccgcgcccggccatgaatttttttttgttgagctctttaattatctgttagcattccctggaaaataattagtttttttttttttttaaatcctggatgcttttagttggattttgatctgaggtaattttgagaattaataggtgaatgaaatgtgtaagagttaaagataataagtttattttatgatatttggggccattttattttattttgattctttccataaaattggaatgtgtgctttgtatagatactagaagaattaacatgcaaaaagctgttagtatttttattgtgcttatgatcatcgtcatggcttgaaaattttaattacatttgttcttagcattgcttagtagtattttatagtcatttagttttggaatgaagtttaaggtaaacaaaacagacttaactgcttttcagtggtcccttttcagtaatactagttacttatatattttttattgcaaatttaaaatttggttaattttttaaaactttttccccagatgatctttccatttcagtggcaatgcccatatattcccctttgtcctctttcactggctgcagtgcttagtgcacctttaccatttatagttggagttgactcaaggtattttgatcttcatgacccaccacaagatgttgtttgcattgacttggatacgaacatgttatatgtgtaagttgattcattttatattatctcccatttatatttttcactatgtagagttacagttctttgaaagcatctagaaatatgctatttttggtagttgttaaatcttcgtcttaaatac

SEQ ID NO: 132643 - DNA, 1021 bp, Homo sapiens
atataaaattttaaattattttagtagccacaataaaaaagtaaaaaatagggggaaaatagtagcatttcagcatgtagtcagatttttaaaatcattgatgaaatcttttacttttttcacaaacatctttttttttttttaaagacagagtctttgctgtgttgcccaggtggaatgtagtggtgcagtcttggctcactgcaacctctgcctcccaggctcaagtgattctcccgcctcagcctccctaatagctgggattacaggcgcgcaccaccatgcctggctaatttttgtattttaagtggagatgaggtttagccatgttggccagactggtctcgaactcctgacctcaggtgatctgcctgcctcggccttccaaaatgctgggattacaggcgtgagccactgcgctcggcccacatctttgaattctggcatgtattttttagttagtgtgtcttaatttgggtcagttacatttcaagtgctaaattgccatatgaaggtagtggttactgaattaaacagtgcagatctaggggcttggttaaattcaggtttaattctcttggcaagaagtgccaaaatacgtggtgctcacttcttcctattgcatcatcttatgaggcacatacatgtctggctgtcctacttttagtgttcctaataggtttaaagtgttgttaccctcactcattcattgtagttcacccatcagcctttgacttacttggtctagcagcctttgctgatcattgcctggatccactagaaggaaagaaagcctttcattataacttgtggagaataatttatttctattttatttaagcttttctctactaattagtatctaaaagggatggcagtcaggaccacagcatcaaagaaagaaaggctgcagagaaaaccatgtttgaaatggtggcattaaccaggttatgcaggatcttttaggattagtgctggtttcagtttttatcctaagagtaattggaagcctgtaaaggat

SEQ ID NO: 132644 - DNA, 1018 bp, Homo sapiens
tgaaattttttatttgagaagccagataaccttgtgattggtcatcttttgtcttaaggtttacaaaacaactaatcaaaatagttttctatcctaatagccacaagtaaaaaattatgctttagcctaagagtatgtattcagcctaaaaatatactgtgcatgttttgtatcagctggtactgaaaaggggtagtttttttctaaatcagaatgtaagataaaaatgtctattaaattcatagtggacattttcattaagaatctgttttctttttttctagttgtttcctgataaaggcacagagaaaacagataaggtatgtttttcttagattttaagggttgaaatttcagaattagatcttgtttgtatgcaaattaattggggaaaaataatgattttcaggttgattttgattcagcagaagataccagattgatagaactagatgattcacagaaaagtgagcatactgtatttataatgccgccagagccacctcctgatgatggaaaggacctgtcaccaaagtacaggtagtaggaagttttaaaagagcttaatggcacagcctatcagtttcttttaatttttattagtagatatgtatattagtcttttgtgaaactcattttcagtattagttcagtgaactaatgtagataaatattttatggaaatgccactaggtgttataatttaagaattggatggtattgtcagatgttgatcattgtttaccttagtgtttgtattttaatctttaaaagtttcaattctgaagaagaaaaatgatacttttatgaggctccctgctccctttgggagtttcattttgaaacaaagactgtgaaattcttatgaattagtaatttaccaagaaaacttaaggtagagggccaggaatttattctttattaagataaaggataggatttggatgtgactcttttaagaaattagaatggattttgtagtttttttattgctataaatttaataaacttagaaaat

SEQ ID NO: 132645 - DNA, 1396 bp, Homo sapiens
atagttctaatgatgctaacaatggggagcacacagtcttcgtcagagatttaatcaggcttgagtccattgataatcactctagcacaggtactaaaatccagattttactaacccttcacttactctcatgttaaatctttcctttttcaaaaagcttcttccattcttgagtttgtgtgatatgactactttaaaagtactgtatgcttacaagagaaacaatacgagtctgcagatgacttctgtttatttcctatagtacaaaattagtatgggagtgctgtgcacagtgctctagcatgatgcttctttgtatttgtttatcattagtttgtgaaagtgtatgctataattaggaatcatgagctaaggaacttgaaaattagtgacacaacttgcaaatctttttaaaaaattaaatagaaaatgtatcttaaaacttcaagagtatgaatattaaagagggaaggaaggaagtcacacaatgagaaaaagtattctctttaagttacattttttaagatctgagaagttattgaagctgcttttatgtacatagccatgggaataatccctctcctctgaagttagaaataagtgtaactaaagtagcacgttgtgcagatatatgtgtgttacatatccttcttcttgtgttgtttttttgttgtggttgtttttaatatctcaagccttcctttaaaaagaattctgggtctaattcctgtgcttcatctgatgaacttgtctcaatgactgaagtttccttttctctgctctttgttgctttgctttttgctctgtgctgtttcttggtgctgcatttgtccttggctgtcatggtgtggggtgcagacagacttatatgacgtgaagctatggatacacgtgtgcattaattctacccttgaatgttaaccacatcaggtaatttcccatttattaggttaaattttgctgacctgcaagggtgggggaaagacctttcattgtattttaagtttgttttgagtggtaaacagttttcattttcttgccttttctccttcagataaatgtaatcatatatagactcttgaaaatatccagctaactttttatggtcagtttgcaaagcatgtttgttatcttatttgaaaatatattatgccttgctaaaattcttattttgaggttggtttgtagcatcagtgtgacaaatagtgttataggcattgaagaattaattgtttcagctgttaaggtggtgtggccattgctttccaaaacttatctgctgaattcttgtgctaaaaacaaccttcacataattacaggagcatgtgtaaatttgaaagtcaacataaagctacaggttacaatcctgtttgtaattaacttcctcagtttgcca

SEQ ID NO: 132646 - DNA, 1604 bp, Homo sapiens
agacaaaagcattttcctgagaggagttgtagttttagttctgaaagtcgagcaggaatgttgcttaagaagagtagtttggattcgaattcaagtgaaatggctatcatgatgggagcagatgccaagattctcacagcagcattgacatgtcctaagacttctctacttcatattgcaagaacccatagctttgagaatgttagctgtcacctacctgatagtaggacttgtatgtctgaaagcacttggaatcctgagcacagatcatctccggtgccagagatgcttgaggaaagccaagaactccttgagcctgtggttgatgacgtacctaaaactactgcaacagtagatacatatgagagtctactaagtgatagtaacagtaatcagtccagagacttgaaaacagtatccaaagatctgaggaataagagaagtagtttatatggtattgctaaggtggttcagagggaagatgttgaaactggactagatcctttgtctcttttagccactgaatgtacaggaggaaaaactcctgattctgaagataagttgttttctccagttattgcacgtaatctggctgatgaaatagaaagctatatgaacctaaaaagtcccctaggtagtaaatcttctagtatggaattacacagagaggaaaacagagagtctggcatgactactgcatttattcatgctctagagaggagatcaagcctacctttagatcatggttcaccagcacaggaaaatcctgaaagtgaaaagagctcacctgcagtgtccaggtctaaaacttttactgggcgtttcaagcagcaaaccccctctcgaactcataaagaacgttcaacttctttgtcagcactggtgcgttcttcgccacatggctcgttgggttctgtagtaaattctttgtcagggctaaagctggataatatactctcagggcccaagatagatgtcctgaaatctggtatgaaacaagcagcgacagtagccagtaagatgtgggtagctgttgcgtctgcctacagctactcagatgatgaggtaagaaagctttatgtgtgtagtctgtctgctattggagtgtttatagtatctttctagaaatatatgtattcttgttcagagatttctgtgcccaggctggagtacagtggcatgattttggctgtctgcaacctctgcctcccggctttgagcgattctcttgcctgagtagttgggtctataggggtgtgccaccatgcccagctaatttttgtatttttagtagagatgaggtttcaccatgttggccaggctggtcttgaactcctcacctcaggtgatccaactgcatcagcctcccaaagtgctgggattacaggcatgagccaccatgcctggctgatttctggtaactttggtttttatattttgcatagtctatctaatatagaatagtctatctgtagtctattttgtgtagtctatctgatatggaatgtttgtatatctttttaaaaatatgtgaaggattattaagacagttctggtaactttggttttcatatttaaaaactatgcatatttggtttctttct

SEQ ID NO: 132647 - DNA, 1143 bp, Homo sapiens
attccattggcaaatgaatccttggagcacaaacctgtatccagtttagcagaacctgacttgatcaactttatggacttcccaaaacataaccagatcataactgaagaaacaggctctgcagttgaaccaaggtatcaaagggtacagagacctctttatgtagtaataaatggggtacccttgtaaaaattctgtctctaaagacaacctgactcatataggcataagttctggcatttaagagtacatcttaacttattaccacatagtgtttaacgagctaatgaatgaatctgatgataaaccatttttgaactaagtttaatattttacagttgtcttttacaaaatgaacttctcaacagtaaaatatttcccttttaatatagtcattgccagtttccagaggcgaaatgttctctttctgtgaaatgtacacttggcccttaaatactaattgaatcaaacatttattgagactctattgtatgctaaatattatgctaagctctaaaaataaaaaagtaaatatgactgggtctctctccttaggtggatcgtggcctagtagagattaaatacttgtcagtgtctttattgtacttatttgcatatagcatacttctaggtaattttgtttaataaagatgaaataatatttgagtaaagcaactgaatgggtactttgtctttttaaaataatacctgtatatctacaatatgtcatcttcccacccctcaccagaaccatctactccatcctgtttttctgaccagttttacaaaaatggttgaaggaaatgcaattcttacaaggtggtgctgattcttcttagatatatttagtagactcaaggtccattgtagaaaatactctagctctacagatttagactgtttttcaacatgaacatagcatttcttctatatttatttttaagtgatgaaataaagagagccagtggagatgtccaaactatgaaaatttcatctgtgcctaatagtttatcaaagcgaaatgtgtctttgactcgaagtcacagtgttggaggcccattgcagaatattgactttacccagcgaccgtttcatggcatctcaacagttagtcttccaaatagtctgcaggaagttgtggta

SEQ ID NO: 132648 - DNA, 1070 bp, Homo sapiens
actataaagcatctgaaatgcaaatatttcttataaaaattgaaaaaaacctaatacattcaggccattgctctcagtgtgatagagaacatgttttaaagagtctgttgattaattttcttttgtaatgatttaacttaacagtatttaagtattttcttttttaggttttcattcattagcatattctcttgcatgtagcaatggtcctaaaataactgatttaaaaaggatagagaggcattatctcattgagaagtgctcttgagcatacagatttaaacagataatattaatttctttttgtattttttttaaggatcctttaggaaaaagacccaatcctccccctgtttctgtgccctacttgagtcctctagtactccgtaaagaacttgaatctttgctagaaaatgaaggtgatcaggtgattcatacatcttctttcatcaatcaacatccaatcattttctggaacctcgtttggtatttcagacgtttggaccttcctagtaacttgccaggacttatcctcacatctgaacattgtaatgaaggtgtacaggtagggtgccaacttttatacttacattagtattcagtaggatgaggcttaacttcaaggtcctgaaagtatacaacagtagcagcttaacaagacagatttatttctctctcacttaaaagtttggataagcagtcctggaatggtaaagtgttaggaacctaagatccttttatatttttgtttagctatgcatatcctccatttccaagttctgcttttggtccaggatggctgattacctccaagctgtcacatctactttctatccagcagttaggagaaaaatggatggagaggagagtatgtcttttttcttaagggatagctcctggagttgtagataatatttctacatatattttcttggcctgaactcagttattaggtcatatctgtctgcaagggtagctagaaaatgttgcccaggctggagtgcaatggcgtgatctcggctcattgcagcctcctttttctgggttcaagtgattctcctgcctcagcc

SEQ ID NO: 132649 - DNA, 1505 bp, Homo sapiens
tgtgtcaagggttttagacccctaacttacttagaaattaatctgttactttgtcaagtgacaaaagatgagagaagactctgcttttgtaaattttatttagaaattagagttaaaacagttatgtattgttgaaatgtaataaagttaagccatttttgttactagtgtgaagctttatgcccattaactatgttttaactttaatttggaatagaaacctgcaggaagttacaaaaatagtacagaattcaatgtagccttcacacagcttcctccaaatgtgacacctcatataactaactgtaatgtaatattaaaaccaggacattgacatagttatattactattaactagatgacagaacttaatgtcttcaccattaaaaaaaatgcatctgtgtttttatgctatttgcccattgacttttaaaacatatttgttttataggagtttatacagagaaatcctcttcttatcattagtgtctctaggaagagagaatattgatattggtaagttggttaataaaagattatgaaaggaagttttacattttattttcaaaagtaatttttaaaaatgtagctggtatgtataaaagatttaaaagatttctacttctaaatatatagttcaaatacatataatttgactcaataccaatttgaaatgaacggctgttgtctttcttaacaaattacaacttcatttttgaaaatttctttcagaggcatttgacaatgaatatggaattgcatacaatagtctgtcttcagagattcttgaaaggttgcagaaaattgatgctccaccaagtgccagtgtcgagtggtgcaggaagtgttttggagcgcctctcatttaaatagagattcactagaatgttgacacacaaggcttggggattagatttcatctggaaacattcaagtttttttttccaaatcgtaagaactggtgaatacggaattgaagtaactcttggggacaatatataatgaattatgattcatattgcattaccttgaaatatgaagtgccatttgaatgtcccagggcttattaatattgaagattttcaacccctgaactgcttttctgcctctgtggaaaactactttgggattcttcagtatttgtagtagtttgatagaaataatgaggaaccatattcattctaggcattgtttatatttgaagttactgagtttgaggaatggcaaattaaatttgcctaacccccaaaacaaatgaaatatctcaattataaaagcaacatggccgggcacggtggctcaggcctgtaatcccagcactttgggaggctgagcaaggtgggtggatcacttgaggccaggagttcgagaccagcctggccaacacggtgagaccctgtctttactaaaaatacaaaaattagccaggcgcaccactgtagtcccagctactcaggctgaggcaggagaatcgcttgaactgaggcagaggctacagtgagtgg

SEQ ID NO: 132650 - DNA, 1027 bp, Homo sapiens
ccaagctggagttgcagtggcgtgatctccactcactgtagcctctgcctcagttcaagcgattctcctgcctcagcctgagtagctgggactacagtggtgcgcctggctaatttttgtatttttagtaaagacagggtctcaccgtgttggccaggctggtctcgaactcctggcctcaagtgatccacccaccttgctcagcctcccaaagtgctgggattacaggcctgagccaccgtgcccggccatgttgcttttataattgagatatttcatttgttttgggggttaggcaaatttaatttgccattcctcaaactcagtaacttcaaatataaacaatgcctagaatgaatatggttcctcattatttctatcaaactactacaaatactgaagaatcccaaagtagttttccacagaggcagaaaagcagttcaggggttgaaaatcttcaatattaataagccctgggacattcaaatggcacttcatatttcaaggtaatgcaatatgaatcataattcattatatattgtccccaagagttacttcaattccgtattcaccagttcttacgatttggaaaaaaaaacttgaatgtttccagatgaaatctaatccccaagccttgtgtgtcaacattctagtgaatctctatttaaatgagaggcgctccaaaacacttcctgcaccactcgacactggcacttggtggagcatcaattttctgcaacctttcaagaatctctgaagacagactattgtatgcaattccatattcattgtcaaatgcctctgaaagaaattttcaaaaatgaagttgtaatttgttaagaaagacaacagccgttcatttcaaattggtattgagtcaaattatatgtatttgaactatatatttagaagtagaaatcttttaaatcttttatacataccagctacatttttaaaaattacttttgaaaataaaatgtaaaacttcctttcataatcttttattaaccaacttaccaatatcaat

SEQ ID NO: 132651 - DNA, 1885 bp, Homo sapiens
cggcattgcctcagttccagcactccaggatcctggctttaggtggagaagggtctcaagtaggagaaggctcgcctttctggggcatggagctttttggccgaacggatggcaggcgattgcggctggagccgcggcgggccgggagcgccatggtggcgtccccgcgcccagccgggacggatgcggcgtgttgcccagtttgcggcaggcctgtggtgcggctcttgaccccggctttcttgcttcgggagggtgaacggctgcggagtgccctcgcccccagagtcattccgcggggcttgaggggaaaacgtcctgctgagtgcggcgcttcttgactgctactctgctttcacgtgcttttagtgagtacagtcggcatcttatatttcctgcttgtgtggaggcaacatgaaaggctttttgcagtggaattaactttgtagatggctctacaattacctgtatagatagtttcgtaaactatttccccccttttaatccttagctgaacatctccttcccagccactggctgccagaaactcattgaagtggacgatgaacgcaaacttcgtactttctatgagaagcgtatggccacagaagttgctgctgacgctctgggtgaagaatggaaggtaaaagttgacaaattgttgcaggtatttaagtcagagacggtaaacgccattggtaactggtatttggaatggggttcagactccgggttctggcttctgacctttggtaagttgcttccgaatgccactttataaagttagaggtattaccttggagggggggacgtagagtaagccataaaatatacgtaaagtttacatcaacataattcttgccctgcatcatgcatttggcaatatgtcacatagctgtcctcataatccccaaagtgccaaaaagggttgtatctgatttgtttgttgctgtttgatattttatcttcttagtgctgttatctctaataaaacatcggttagaaatgcgacttgaaagacatttgataattgaacttgacaagttgggaatatagacaaaactcactgaacagagaaaacgtgcttaagttcaaattggttttcataattatactttctcatataggtgtgttcacagaggtcacaatcctgtactgtataattttggaatagaaatagtaaatgtgtcattcattgtatgctcttgcagggttatgtggtccgaatcagtggtgggaacgacaaacaaggtttccccatgaagcagggtgtcttgacccatggccgtgtccgcctgctactgagtaaggggcattcctgttacagaccaaggagaactggagaaagaaagagaaaatcagttcgtggttgcattgtggatgcaaatctgagcgttctcaacttggttattgtaaaaaaaggtgagggttacttgtgttcaattttcgttgaaattgatttaaagccagttgtccaaatgcttattcatttgcagtatccagacttacagaccaatggatttgtttctctaccatcaattcaacattaaacattctgatttaggattcttaaggaagttgttgaattaaaatctcttcaactgtttcttctaaggagagaaggatattcctggactgactgatactacagtgcctcgccgcctgggccccaaaagagctagcagaatccgcaaacttttcaatctctctaaagaagatgatgtccgccagtatgttgtaagaaagcccttaaataaagaaggtaggagggattatgcaattagggcttgcttaattttggtaatttgtctatcattttgtgtgcatatcagaagataaatatgtgcctttggaaggccttagcactattcacttggagttttta

SEQ ID NO: 132652 - DNA, 1093 bp, Homo sapiens
tataatggaatttcattcaaattggcttcttaactgtgacctgttccaggggctcttggccaaagtaaattgtgctaatgaggaataacagaaacttcaggaaaatcatgtactcctaaattgaagtcatgaatgaggccttggaaatcatctagtccagccttttcgttttacagataaggaaatgggtcccagggagagaagaaagagcgtgtctaggatcacgtcgccacttccggctctttctactgaaatgacctccactgaggggtgtgaagatagtatcaattatttgtctaagacttgtcatttcaaaaacttgtcgatgtaaattctagtgcatactagacttgtaggttgtcagtaaatatagactattttttcttagtctattggaattttttcttaaaactttttttgggtgtgctagacatgtaggacaaattttcttttaaactaggttgctttatggtttgtgaatggtctctgttttacttatgaaagttatacatgttcactttgtagaacggggggtgacaaactatgtcctgtgggccaaaagggttctgttttgcaaatcaggttttattggcacccagccatgctccttcatttacttattctctgtaatgacagagttgagtagttgagaccttaggacctgcaaaacctatatatatatgtgtgtgtgtgtgggtgtatgtgtgtgtatatatatgatttattaaatataatttttatttaatataattacacatatttattaatgcacatatttaattatacttataaccatatagttatgctatatatagatatgtataatatagttatatataaaatatataatatatattctttacacatatatataaatatatttaattaaaaatatacatatataaaatttattttatttttaggttatagcttactgtaaactcaaactcctgggctcaggccatcctcctactttggcctcccaaagtgctaggattacaggtgtgagccaccatacccagcccaaacccaaaaacccttcatagaaaaaaattgttaaaccctgctgtagaacgtctgaaaaaatacagag

SEQ ID NO: 132653 - DNA, 1043 bp, Homo sapiens
tttccctcctctccctttggcaaatgccctgcactgaaattttgcatcagcattatgctaggaatgaaatttgtgtagctgatttttcacggtgggtccctagctttactgcactcataatgtgtattttttactctaaaccttttttgaaacagctgctttcagttttgttttgttttttaatccatctcactctgagacagtacagctaatcaatacatgaagtaaaaagaatggaaaatggatgtaagtcatgacttttctggggtttccctttggccctaccttcaaaaattttccacctcttccataacttgcttagaataaagacaaattagttttcatgatgaatgtattttaatatcaactaaatacatctgtttaatcccaaattaaagatgccatgatatttcctatggatatttcttacagtacgtttgtgtatttagaggtcacctctacttaacgctgtgtttctcctgctccctgtattattgctgtgtcacactatataatgtagtggttatactttgccatggaaacaggcctttcctcagggttttctgcataccatggccacagagattgagatgttccacttctgtggtttggtgttgaagtttttcccctttactattttagttaaaatttacagaaggggaaaagagctctgaaggtgagggttgctattgctggcatctttattcctgctactatccattagcaatttaatttaaggtaatgtttctcccggttgggcttacagaagggcccaggttgtattctcagttattgtacttctgtatgcaaccgtctactatcagcaccaaaacaaacattcaatgtcatttcacgtgtgctgccttagacattgagactcttactcctggcccagggaacatttgtggatgttcatcactgcaggtgagcattgttatagttagaatcttagctctggaaaaaatgttcacataaagcacatccatgatgcaagataatgagtttcagaggctctctaggtcccagttcccattaacccatgg

SEQ ID NO: 132654 - DNA, 1072 bp, Homo sapiens
gtaagagtaggcatccttctcctcaaaacatagtgaatttgttaacccaaccaagaaccagatatgaactcacctctgcaatgctgccatcttgtcatctgggttgcgttttccaggtttcttatatacctactttcttcacaatttgtctttcgtaatgaaagacccaaattccagatatcaacaagtctagatgaaactcactaccctgaaacccttaaaatgttcaagggtcacctttgcctgtcagatagactggggtttccccttccttagttatttggtgctgttatgctcacttgtagtgtgggtctttaaggtactgctctccccagccacatgtcctgaatgcttcaggaaaagcactccatctctctttgatcatcacggaaactagttttgatcatgttgatcaaaaagagcatcatcaagagtcctgaatggaagtttgctttaaggatgttaccctagttctagaagaagaacttccttgaagaggaaagaggatgtccttcagtgcagcagcctgatttccaatgggggaagggattcttgcctcttttagaacaaaccacatcgtccaaggaggactgtctgtctctttcccaggcctcagaaatttgaatgaaatgtcacaaaacagtaaaaaaaagttggagcttattggccctgcaggggcatcctgaaaagattgcccatcagttcctgctgcctggtcccctagagcaccctgtgtctactgtttttaaacccaattcttgattttctttcaatccagtgagttccccattccttacaataaattgccctttccaaattaagcaggaagtttcttttgcttgtaaccatagtattccaagggctactccccaggaggggagatggtgaaaagccagacacagggaggaactgccaggaagtaagagaaacaaaaagaggtgtggagcccctgggcccaggaccggtaaccatgaaatcaccaacagcttttttaagtgtttcctccccgcctcaaaaaaataatgtttttaaatgctcccatctcagcacaagaaagctgttctagctatat

SEQ ID NO: 132655 - DNA, 1048 bp, Homo sapiens
tgtctttcttttcttccatctttcataagctgtattcgtcttcttaatgggaagacagctgctgcacttccaagcactgcattcccattgcacacaggaagaaggaaagaaggcaaaagatgcatacccattgtccatacccttttcagaaatattcctgaaaacagtgagttctgacaaataaattgtaaatagcagcatctgacaagtgctgcaagtaggtctggggaggcaaacattgtagttgggcagctctcagaaaaacggccttccgttaataaaaaaaaattaaggaataaatcgatattagggagttagtttgcagcatctgttgttgcatccactatgagagtagcttattttaatattaaggctgtagttatatccctaaaaaatagttccagagattgggtaagacaataacagctcaatctggagttgagcagttaattggattgagagttaatatgtcatgcttctgtgaaagtcaaataatatgtcaggaatggggagcacattttctattaagagccactgacctatagggagtagttcacaaatttactgtattttttaaaagaaagctaattgtaagaagagaaggttaaaagtttcagttctgctgttactcagcgtggcattaggtaatctaaaacttcattaaataaatgataggctcaataattaaaattattctcttttttaagattattgacctaaagagaatcagaggtaagtgatagaaagagaataacagacaactcaaatcaggtagaagtttgtcagctgtttactctgtgcaaattttcttttattgccctgatactaactttgctgcctcccccaaaaaacgctgtgcccaatacactgcccagatacagcatccatgtccaataaaattattagtagaataggaatgggaagatactttacatggtaaaagaatctctcaaaccaatcatcaccttcattcttaatgttgagacttcagaagtgttctcctgaaagccagggcaagagtaatagtaaccgtcatctctgtcattta

SEQ ID NO: 132656 - DNA, 1048 bp, Homo sapiens
tttgtcctctgaaaagagcctcctcagggtgtgtgccccattagatatctcagtgactgttttttatggtcatattcaacccctgtttctctccttgtctctcagaccaacctgtcagcattccttttaaataggagaatataacctctttaatatgcccatggccttataacatttccctttagaagtcttttgtctgataaaaaggaaactgatagggaaaaaagacctcaaaatggactgaaacttaaagtagcttacttataccaaccaaaatcctgaccactggctgctctcaagtttagttgatgaaaaacgtatgacctatttagatgatttccctagttgttatttagaatatctggatattctgtgattagttgttgcccacctacttattgctgcaactcctgagtctgtgtggtcatcatgtaggtttgtgagtcatctgatacagatacacattttgggggctgcttttcttgttccctgcctgaccgtgctgtgttagcatgtcagtgccagtgtaacatttgatcttcactgcacttgtgaagtctcaactgtttaatcagtttaaatacttagccttccacttcactcaagacacattttaaaacagcacttcaactgaacacttcattaatgtaatttagttaagaaaaacaagttctatcagtttttgctaaaaggatgtcccagtgtatccttttcatttcctatcttgtatcttgtctgtctgaatacattatagagctagaatgtgattgcctattcagagtgaaagaaaaactatcctgatttctaaaacagtttctgtttctgagaagcatattacattaggtgctatataaccagagaggaggggagcaaatacggaaagaggacatctctgagggaggactacattcagcacagtagaataaataaatctctcctattgtggataaaagaaaattccattttcttctgaaaagaaaaaatggggaggaggtggtgtggattgtctttagttctttaatttttaaaatatatcattgtagttttc

SEQ ID NO: 132657 - DNA, 1033 bp, Homo sapiens
gttatgctgtactttcatattatgtacaagaaaacacatacaaaaaattgaaaatttaaaagtaaaagactaatatgaaaagaggtcttgttattttcttttactactatgtattatcttacacacatctatgtaaacatatacattcatacccacacccaaagaactttggagttccttgatctagatagaggaaagagctccagtattctaattctattgaggaagatataaggcttgtagagaaataacccttgcaactatcagtagtccttgtttcataagctgataatgagaaaatgttgcatttttgacctggtgaagatgaggtagtcttaagtcaacactttttccccagtggattttggttatattaaaagtcaaactaccatggacataagttcttagcaaataaaataaactcttaatgccactgccatgatagtaaatccaggtttcacatttaatcgggaaaattctgtaagatagtccaaagattaaaattaatacttcttgacatctgtgtaaatctgtaaagattatattggtgtcaatcaaatgctttatgaacattttaaagtgacacattttttaaaaggttaaagttaataaggaaatgtagttaaatgtcttgtcaaaataatctcttcagatatatatcttttagttatttcatttcattatcacctttatttcctgaattcattctatttaatttactttatacttttttataatcccaaatatactttaatatttataatccagtactgagccctgtagccataatgtactttttatgactttgttcaattcagtgttcagttcaatgttgccgttataaatgttgagaagacaaaagtgattttccactattttaaatttcttatgctctgcacaggagggttacttcacaagtaactgaatagttctgacaataatctcaagatctcattgtaaactgacaagtagtggtgtttcgatgttcattggtcaactccaataacacttaattatgggccagttctatcag

SEQ ID NO: 132658 - DNA, 1051 bp, Homo sapiens
aattgtttgacattttaaaataacgtaccccccatcatagagctgatagctgcatttgttttctgctcctcaccaacacatcttaatatatataaatctcaatgtgtatgcatatatacaacacaatagtgttgtaggtgtagttaatagctgccagcaaacagtgccatctgtgttttctcttgtttctcacttactggaaaatgttactgaagctcaaattatgagtaggggcttaaagttcatgttcagtatctccaccttttaactctaccaccttttatttgcacaagaaaatgtgatcctctatagtgactttaccctgtttacagaataggagtgtgtgctattactgataggatgggcaggtcttacagtttaaaaatacccataagacaaatagatcctgcaatctttacatagtcatttctttactttgtacttcataaaaccctgcaggctagagcaaggaattgatgtaagttgatgtcaaactgactttacaaaaacattctggaattctaaatcagtgtgatttaagatcctgttatactaagagaggtagttaagcatttgacatccgatctctctagaagaatgtctgcttaccacacatacagtagtatcagatgggagaagctagtttctaaaacagttcggggtggatgtttgcctctgattagcctgtgtatgtgttagatgaatgagcaattgggaagtcatgaccatgtgtttgctgtcatttaaactgccagtctaatctaaatatacatgtgggtgcctaaggagacttctttcttttcaagaagatcattcttaacagctctccattccttgctgacacacatgaacttaggggcacttctgttttcctgagggctacaccgttttcttttgaaagaggtgagaacaatttctttgcttgctgtgtttctaatttttaaagataaactatatgtaaagtttatttactatgagtagtaatttcataggcaagatagcttctgggatattatgtaaggtaatgaaaaatggggtgagagggatggaa

SEQ ID NO: 132659 - DNA, 1023 bp, Homo sapiens
gtttttagtatattccagaattgtgcagctatccccacaatacatactggaacaatttcactggccccaaaataaacccataccctttagctatcaactctcaattctcttatctcccctagccctaggcaatcacaggcaaccagtaatctactttctatctgtacagttgcctgttctagacaattgatatgaatggaatcatataatatgtgatgttttgtgcttggcatctttcacttagtattgtatttccaggacttacttatgttgtaccatgtaccagaacttcattagtttttatgtctgagtaatattccattgtgtggatataccacaatttgcctttctgttcattggctgatggacacttggattgttttcaccttttggctgctgtgaataatgctgccgtgaatggctgaaaacaggtttttgtggattcagtgtttttttacataatatgttactgatgaaacattactttctgatcctactgcagcatttgcagtttctgacattcttgttcatgtaattttctatttctcttcagagcatcttgagaaggctgaaagaattctgatatatgttgagggagatggttgtttttctccccactggaatgtcacgttaggtcagttattaccaatattttcaccacacacaaaaaaacaagataaactatatggtctcacccacattcttattcttggtgacatcactctttttcccaatatgctggcatataactttcgtgagaaactgtcttgaaggatcccatcttttggaatcatggtggtttttttttcctttcttcctgtttattctttgtttttgacaattaccttattattgttttttaatgggagattcttttggagaatagttttgtttttttgagaccgagtctcactctgtcacccaggccatagtgcagtggcacgatctcggctcactgcaagctccgtctcccaggttcactccattctcctgcctcagcctcccgagtagctgggactatag

SEQ ID NO: 132660 - DNA, 1007 bp, Homo sapiens
tgttagattggcacttaaaaaatgcatgactaattactacataattgaaaaaatccaataatgacttttctcctctgtcaactagcattacttttatcacgcaataaaaagtggttatgtaaggcatagctgttggagtaaagaagagaggcattgcacatatttacagtcttcaggcactgaccttttcatagcatgtaacctaaaacattcagacctgtatttaattatatcagtgaatatttttgaaatcgaagggaaatctttatagcaaggtctactgtagatgatatagtgctacagttaaagatagcgttctaagtgagtaatgtgagcatttagcctttgaaatgcaacaatcagcatccagtgataaagtgagcataatcttctatgagtagtcctgacaaatcctcagattccagaaattgccgattggtaagtcctatagtgtttcccagtaaactctggaattgaatttgaaatacgtagttaaggaacatttggaaaagactgtggctgtcactaggtcctacctggttattatacctaacaatcctaatttctttattttttataaggttgactagagaatgcaatggctcatcctcatcagcatttttttttaattgagatggagttttgctcttgttgcccaggctggagtgcaatggcatgatctcagctcactgcaatctcagcctcctgggttcaatcaattctcctgcctcagcctcctaagtagctgggattacaggcatgtgccaccatgcccagctaattttgtatttttagtagagacagggttttatcatgttggtcaggctggtctcaaactcctgacctcaggtgatccacccgctttggcctcccaaagtgctgggattacaggtcatcagtcttttaatgataccttaggataaggtagaagaggacctggtgattcttgagatggatggatttgtactcactctacaaatgcatttaaagagtccatgtcagcctgt

SEQ ID NO: 132661 - DNA, 1004 bp, Homo sapiens
tggtctcttaagtacctttccattcttttcattctagtaactacctgtttatcctccaggacctaattcagatgttacttctttatgaatttttgaattattcttcgccccatgctcccaacagaattaatagttcccgtcttttggttgtcaacatctatcaatcatagatacgtcatagttattaagggtggggtccatgtgttattcatccttgtatcttctaggacaagcagtagttaacatttgttgaattgaaatgttttaaaactccatgcttcagatgattaagaaaacagctttcctcattaaattatttgataataacctactctcacctgtttctcacatacactattctcacctgttatattgtggtttttggtttatattaaaatatttttggtattttaatgatagcttgagaggaatcaaagaaggatcattttatgtagatctcttttgactcttcattgctatttagttttgggagtttcattttcttctcccctttttgcaggaccctaataggagtattcataccagcagcagcagcagcagcagcagtagcagcagcagcagcagcagcagcagcagcagtagcagcagcagcagcagcagcagcagcagcagtagcagcagcagtagcagcagcagcagcagcagtagtaccagtttttcaaagcctcacaaattaatgaaggagcacaaggaaaaaccttctaaagactccagagaacataaaagtgccttcaaagaaccttccagggatcacaacaaatcttccaaagaatcctctaagaaacccaaagaaaataaaccactgaaagaagagaaaatagttcctaagatggccttcaaggaacctaaacccatgtcaaaagagccaaaaccagatagtaacttactcaccatcaccagtggacaagataagaaggctcctagtaaaaggccgcccatttcagattctgaagaactctcagccaaaaaaaggaaaaagagta

SEQ ID NO: 132662 - DNA, 1049 bp, Homo sapiens
cctaggaaaagtagtttcagcttaaccaggctaacacagcacaaaccacaacatcctgctaattaatgagctttgtaattgtagtgcttattttttttaatgtgtgtgtgtgtttttacagtgcgtgttatgaacctaacctcccctgtactcatgtgacgtgtcaattatgctaaacaaatatagaatataatttggagtgatctaattgggatagaatggagtgaaggttagtccaggcatgaattataagcctagatctttccagaaacagggctgattacaatataaacaatggggagactgcatcccctgttacatggaaggtgtttatagcaacataaacaccttttcaacacagtaacataaacagtttctcaaggaaacattctgtagcattcaggaaatgtttctttctttacaaacaaaaaagtgtgtttttctaaagatttaatttactttagggctctgtttagaacaaggcaatgattgtagagggataaagttattcccagagcacttttgtggtaggttacagttgaaatccttatagaaagcatcttgttaaaaattctgtggactaagcacaggtcagtacaagtgtgacatgttgcatattgggcaaacctatggaaagttctgcaaattgtacttttgtgactcaaactgtgttataaatttccaggagcctgttatttggtattgtcttatgaaaatccttcttgaaattatgaggaccctttgttacaggtataacattgactgtctactgtgagccgagggcctatgataggggttatgtatttgtctcaagcatatttaaattaatttgtgaagtaaatgcttcctcaaattggtcaattaggattcttacattaaggttctttaaaacattttttaacttggagcaactaaaaatagatttcatccacaagacccatcttaggcttgaaaaagaggacaattctttagtaagaatgctttgttaatagagaatggtgaacagatatacctattttcagtatgttattaaaaaatctagttccggt

SEQ ID NO: 132663 - DNA, 1058 bp, Homo sapiens
ataatttattgttcagtgtgtgttttttttaaagacaatgtttttagagcagtttgaagttcacagcaaaattgagaggaagatgtagaaatatcctgtgtaccctctcccctcacacatgcatagcctccctgtatcatttacagtgggttttaaaaacatattaaacactaaatgcctgttatgggctgagttatatcctcccaaatatatgttgaatcctaaccccaggtacctttgaatgtgaccttatttggaaatagtgtcttttgtagatgtgatcaatttaggatgaggtcatcatggattactgttggcccaagtccagtgactgctgtctttatgaggagatactttatatgaagatacagaggcaggaagaagcccatgggaagatggagacagagattggagttatgctgctacaactaagaaatgcatttcaaagattgccagcaacctccagaagctaggagagtcaaggaaggattcttttctagagctttcagagggaatatggccctactgacactttgatttcagaattctagcatgaatggttaaattcctgttgtttcaagccaccctatttgtggtattttgttacaatagccctaggaatctaatacactaatactaaggcagtatgctttagtgcttaaagttatattgaaacaataaaaacaatttgctcttcaaaagttacaaaagttaagccacagcctgggagaaaatatttgttaacatatgtctgacaagggcatgaatccagatcaggggtgtccaatcttttggcttctttgggccacattggaagaagaattgtcttgggccccacatgaaatacactactgatagctgatgagctaaaaaaaatacaaatcacacacaaaaaaatctcataatgttttaagaaagtttacaaatttgtgttgggccgcattgaaagccatcttgggctgcatgtggcctgtggtcggcgggttggacaagcttgatctagattatatgaataacctacagctgaataataagatggttcagttataaaatgggca

SEQ ID NO: 132664 - DNA, 1203 bp, Homo sapiens
tttcagacatcttcaagtgaggcataggaaacaatgccataagccaaggtaaggatgaatgaggaattactgaaatagaagagtttttattttagaacttataggctaacctcttcgaattcttatcctctgcccacttgttatttttgctgttacatatgtgtactttgtacagattccatttttattctgttattcatttttatgactttgtttttaaagtttcttgttctctgacatctcaggcactctggtttctacattccaattttgttggaggaaaaaaaagtttataatttagcaaataaggtgatcaccatgatgaaaagtcttactatttaaatttgtgattatgtgttgaggtcatattctgtcacttagtatgccatttatggatgatgttttaaaattaaccaagcttcttgcagaaagtgagtttaaaatcactgtcatcttggtttatttcctctcttagcttttgatctatttgactttgacacatgcatctcaccaacttctgtagattctcattttgacaggatgctttgattaccaccaacaccccaccagcaaccaccccctgttctggttcaagccatcagtcactaaattggatgttcttgcatctgttttgttcacttcatgtcttttgacttatggtgagcccttcttttttttcacctgaacttagtaatttttcctacttttgggctcctttccgtcaaaccatttttctcattgtggacaaatacctttctgaaaacatgggtctcatcaagtttttctacttaaaaaaataattttttaaattgaaaaataaaaattatacatatttatagtgtataacatgatgtggaaatctgtatacattgtgaaatggccaaattgagctaattaacatatgcattatctcaggtactcatcatgttttgtggtgagaagacttaaaatccccttaatgtttttcaaaataaaatacattgttatgaactgtagtcaccatattgtacaataaatctcttgaacttattcctcttatcaagtgaaattttatatcctttgaacaacatctccccaactctccacctgcccccacccaccaccattctactctttgattcaatgagttcagcttttttagattacacatacacatgaaatcatgtgattatttgtctttctgtgtctggcctatttctctta

SEQ ID NO: 132665 - DNA, 1046 bp, Homo sapiens
ttagtgaacatgtcaaatctttttagccgtttgggtttaaaacttttttttatgaatttattactttttgttctgttaagtttctttaatttacgaggctagtctacttgaattgtatgaagtctgactttgtaaagcagtggtttgttcttacccatctaaatcatttcttgtgcctgaatttttaatcttttgtcttcttcattctttacctctaagatttactttcagttcctccctacagttatgactggggttttgttgactagaatttcttctgctttaggtctctagatcctgggatgatagtgttggcactgcggtagtgtcctctcctatctctttctaccatctgtaaacactttcattctccttttagtggatgggcctcctgaggatacatgatgcagagtgtttgtgaaaggaaactgataggactgaagacatttttctttataaaaggggaagggcggaatgtggggtgagaggtaagggaatggatctgttgtcatccttacttgtttcaagtgttctgtaggtttttcatttacctgcagttttgtgagaccataaataagaacattatgatgggaaagttgcagtattttaaatttagagcagtttcaaaatctgtgattctggttagtaggagacagatgctaaactattttattgtgatgcattgaaatagaacctctccttttggattaagcagcagggaatatacatttgaatatcttaatgttattgaattaatttccagatttattatggctacctctcccctcatgtaaactgcttttattctttttttaaacaaatgtgttatattttgatgtctaatcatgattttaggcatactttatttggattgttatagattcttattgtgaagagtacctttccttttccttttattctattatgattttaacattaaaatgttgagccaattgatttatctatttttctgggcttgagatttgtttttttttttttttttccattttgggaatagactacatgacattttgtgattggttaat

SEQ ID NO: 132666 - DNA, 1079 bp, Homo sapiens
tcttaaactttctattaaaactatttcctaagtaaatctaaggtttatttggataacagttatattgttatcaagaaaaacatgaatgtattacttgggaggaatgtcaaggtagattattttgggtccttaaaaataaactgcttatcagaaactcaaaactcgtctttattatcacacctatcactgggctcataggttctgttctcgcctcttctgctctcaaaccgtctattctgccccaacaacaacaacaacgataacaacaacaaactgggaaggagatgttctagcagctagagtctagctgctagtggtgccgcatgtgatgagctgattctgctcacacgagtgatgtcagccttaattaaaaaacaaaaacttgaattttggtggctgaggaaattaaaagggtagatggaacacttgctaccttgcacctgaactctaccttgtatctactgggtggtcttttgcaagtgacttaaccttatttttggtgtgtgttaaataggattacgaatgcttccatttctaaagtgtaagaaggctctgatgtgagtgtaaagttctttgcaaacaagactccaagtaataaaatcctaaaaacatctttgctactgttgctcactgtcctctgccaatatgcttctgagaattgatcagagctttataaaaggaaagtggttacagtatgtcaggaagcaaaacccgtgagaaataagtaatccataaactttacagtcataaagggatccgggtgggtggatctgatgacttggcaactcagagagggaagcaagtgtaattgttgattttatcagagcaggtttgtgtatttgtttgtgcacgtagggggatgggggttgaatgaagacttaacaacatgaatttcgtgaggttacaaaagtctactgctgcataaatcgtaggtaatatgttcatgtctatagggtgtaatgttaatgttcaataaaaattaatatcaaagtctgtcatagattttatgttttggggcctccaggtaaatggtttgtatcatcattgggaatttatggaagttgatttaagtatacagt

SEQ ID NO: 132667 - DNA, 1004 bp, Homo sapiens
ttggtctagttgtagttaattaattagaaaggaataattaaaattaagattaaaattattgtttcttacagacttaaattctctttccaccgttcattaggcagttattaatttagccacttccgtttgagtatctgcaaagtagttaatttagtttttcaaaagtagtcatttttcaccctcattttattggttaacaaaataataaattacttaagtacaagagcaaatggtcaagaacaaaagcaaaaagccaggtttcggaacaaacaagatgccttgtactaagtatattatgggagaggtacttaatagctatatacatttgctctttggagggtgtcacccatgtattttacagagggaaagtaggtatccttgtcagattgagaggtaagtgaagtcagttaaaagtttaaagtatatataatcagctttgttttgctgaactttgttttattgagagttttgtgcaatttataatattgtttcattgattttctttcttattgcatcttatatggactgttgtaacattctgtgagtatattttgttcatgtcatccatttttggtgttcagtaattttaaaaatgaattttaagtagggacaggagcttgaatatgtaatttggttttatgtaccagaagatccatcagaaactgagtagccaaacttgtaacaacctgtattggtgcatattctgccagactatgaattttcttaagtaatagagaacagaggtctttaaaaaattgtgaactgagatttttttaaaggtgaaatgaaagcagtactgtacaggaaattaagtttttgggtaaggaagtggaattggtttgattgaaattgttaatgtctctttaatgaggggttatatgaaaaatgttaggcagaaagtgtgatccagttaaaaatcctaaatatgaaattgattcagtttgaacaaacagtatttggaactgaacagagaggaaaaggaaaattcttatgtggaagaaact

SEQ ID NO: 132668 - DNA, 1059 bp, Homo sapiens
tcataccagccaccattcattaaaaaaatcagtgaacaagctctttaattggaaacttatctctccctgtttacttgaactcttttgttatcttatttctcccccaacttttatttatttatttatttattttgagatggagttttgctctttcgcccaggctggagtgcagtggtgcgatctcggatcactgcaacctcctactcttgggttcaagggatttttctggctcagcctcctgagtagctgggattacaggtgcccgccaccacggctggctaatttttatgtttttagtagagatggggtttcaccttgttggccaggctggtctcgaactccttaccttgtgatccgcccacctcggcctctcaaagtgccgagattacaggtttgagccactgcgcctggccttctcccccactttttattctaatataatacatgttcatgttttagagtcttttatggattatcatgtcatacttatgtaataaaaatatatcaatactgaaaattaaaaatatcctatgcctcaaggattatttaatccagaagtaattgtataaatatttccatttgtggaatggagttgatcaaaataacatgattatattacaaattctgataaatgattgataaaaaataaaaatatttctgtttatacattcatctattgcatatatacaggtgttttattctttataaattcgtttattactagatgagaaaagatttggcatcatttttattttccctttttcttttctgtgtaagatgcaggcactgaaaaaacttgtcaaaaatgaaaaagggagtattatagcagtgccagtcaattgtttggagtttttctgaagttatatggcaaaactcacacagtaatctcatcagaacttatttttaatgatttgttggcagatggcttaaagaatggatgctcctgtaattttgtttgaagcaatccaacttgcaaaagcattttgttcccttttagacgtctagaaatgtttcttatttatttatttgcatcaagaccagtttgcttctagtgggtct

SEQ ID NO: 132669 - DNA, 1953 bp, Homo sapiens
ttgacaaaaactgttctaacagaagtgaaatgatatcttattgtggttttaatttgcatttccacaatgattagtgatgttgagcatttttttcacatacctgttggccatttgttttgtcttttagaatgtcttttcaggtcctttgcccattttaaaatcaggttgttttctgcatgttctcactcataagtaggagttgaacaatgaaaacacatggacccgggatggggaacatcacacaccagggcctgtctgggggtgggaggctaggggagggatagcattaggagaaatacctaatgtagaagatgggttgatgggtgcagcaaaccaccatggcacgtgtatacctatgtaacaaacctgcatgttctgcacatgtatcccagaacttaaagtatagtaaaaaaatacataaaatcaggttttttttattgttattgaattgagttgcttatatatttcagatattatgctcttattacatgtaggttttgcaaatattttctcctattaataggtcatcacttcactgtgttgtttgtgtgtgtgtgtgcatgtgcttgtgcacactatgcagaagtttagtttgaggcaatcccattgtgtagttttgcttttgttgcagttaaaaggtttttgttggaaagttaaaagcttttgttggaagttataagctcacctgcagcattatatgaaaataaatctttgtttcccaaggaatgatatgtatatgtgtgagtacacgtggtggtccttgtttttttctgtgtgtaactaagccactgtgtgcttttctatactacaaagacatgtcttctattttcagtgagtgataaagcctagagttttactcatggcttcttaattttgtatgaaatacagtttagcaattgtgtagttagtttacaaagtctaggtatgactcatcttcaggctatggctttttcaagttatgcttaaaggtcagaatctatttagttcttaaccctgccttttctaagtgggaagttagagtcaaaaaaagtaagaaaatatggaatttgttgggacttaatccagacctataggtttcttattttattgggttgctttttaaagaagaacaatcggtattgctaggaatttccagaatttctaagtaatttgaaagttaatcgtttaacagtgttcataaaagttggacctttggatttttgattttgcttaaatgtttggttctgacaaatacaaaaattggtaaggttcacaattcattttctactcatgtcataaatgtacatatgtctaaatctgttttgttgttatagacattccagaaatctcatttaaacaaaaatagtttgatgtaagtagcttaagaaattgttaaaactgtgatacatgtaggagaaataatttccatgtttgttagaaagtgtagtgtttatgtttagccatattaattttagtttcatttctcttaagtgttagtgaataaccttgaaaaaacacagtactttgactctgctgttgttgtttattactaccatgctagtaatgctgacggaagaaaattaagattctatgacttgattctttggaattctgactgttgtcactgtataaataaaacaatctctggctgctcatgcagtttttgtcccttacaatataatatcctggcatttttcatactctattttcaaagccaaggtctagaattttaagtgggaaattggctctgaaataatcaaatgccaaacaaagcccatctgaaagtccaataaagtaaaattatagtaattgcaaaatagcgttactgagctaaatccccacagtttgaggatctttcatttatagaatagatgctgttgtgttgtcagagtggagggaatgtagtttgggccagctgggggcaaatgaggagccaacggttcatttttctgctagggttattggaggagaaag

SEQ ID NO: 132670 - DNA, 1004 bp, Homo sapiens
ggacttacatggacttcttttgagtttatctagcagttcttacattcttatttagtcaaggtcagcagaagagctgactgtagtacagatcctccaaattgttgtctatctcttctatcatgccagccactaataattccctttgtggtggagtatttccttttgcaaatgataggaacttaaaggaatccttttctgtttagtagtatgtaggtctggattcagttgttgatagcagagaccactttagccagttttagcagggagagatttgatactgggaactacagaggatactggaggatcaggttttaggttaaatttctaggaatgattcccaaataatatagaactggccagccaggaaaactgctatgtctgctgtaatcaggaagctgaacacatgagcagtcttccattatcacagcagcagacttcaagaccctaaagcctagctggcaaaatggtgtgtgtgttcactcttctcccttgaagctgaaaactaaacactaggatttattcagaagcacagccccaccccacagtgcttatttctacctttcgaatctgtcatggctgtgtctggcagaagtctgtcttctattgtgcagtaatggggctagaatggatttgaatggacaagtctgtgataattgcccaagtggttggtatattggtatgaaagtgagagatggtcaaggtgaatctttgctgaacctggggctctttgtcttgctgggagaatttcacagagatgttgaaaaggtacatgggttaagagaacaggcgctgtgaaatgaaagttgtgttttcttctctggagggcatttcttcagattcatatcatctgaaaagataaaaacaaatggttatactcctggatcaaactttattatgttgtgttttgaaagatctcagagcctaactccacgtgaatatatcaggttagtgtctagcctacttcatgatttttttgtgcatctgaacattcagggccttaaaaa

SEQ ID NO: 132671 - DNA, 1028 bp, Homo sapiens
acactgggaaatagaacagtgaaaagagtattttgcgacaccttgccaaagaaaatgtacagatggcaaataagtgatgaaaagatgctcaatatcacgtcattagagaattgcaaattaacaaaaacaatgataccactacataccattagaatggtgaagatttagaatcaagtgctgggaaggatgtggatccacagggactcacattcactgctggtgggagtgcacagtgacacagccacttttgaagatggtttcacggttctttacaaaactaaacacactattactgtacgttgtggactgactgtttttgtgcccctaccaaattcatacgttgaaaccctacccttctacgactgtatttgtagatagagcctttgtggaggttaaagggtgggaccctgatctgatggaattagtgtctttataagaagggacaggatgttgtgtaccataaatatgtacagtttttgtcagttgaaaaataagagactgaaaagaggcctgcctgccccccggttgtttgaggacacggtgagaagttggccatctacaagtcagaaagagagtcctcaccggaaacagaatcagttggcccctttattttggactttccagcctccaaaactgtgagaaacaaattactaagccaccaagtttatggtattttgttaaggcaacctgaacagattaatgcatcatgtgattcagaaatcatgctccaaagtatttactcaaatgagttgaaaacttatgtccacacagaaacctgcccatgaatgtttataacagctttatttataactgcccaaaatttgaagcaatcaagatgtccttcaataggtaaatggaggagctggtgcatccacacaatggaatactgtttagcaatgaaaagaaatgagctatcaaactacgaaaagacatggaagaaccttaaatgctgatgcagtttggctgtgcccccacccaaatctcaacttgaattgtatctcccagagttcccacgtgttttgggaggg

SEQ ID NO: 132672 - DNA, 1051 bp, Homo sapiens
tactttaagttataaaaattatagccagttataatgttatgtgccaaattatgtgccccctacccatgcaccacaaattcgtatgttgaagttctaagaatgactatttggaggtagaatccttaaagaagtaattaaggtaaaatgaggtcattggggtaggacctaatctaatatgacttgtgtccttataagaagagaagattaggacagacacaccaagaaaagaccatgtgaaggcacagagaaaggatagccatctgtaagccaaggagaagcctcagaagaaatcagccctgctgatatcttcatcttggacttagagcctccagagctgtaaataaattcctgttgcttaagccaccccatttgggttgtttaaacccactttgttatagcagctctagtgaaggagtaagcataggtaagcaggttattctggtttatatctaaaaccacatgtaagttggggtaggggagatgatagggttaagtaaggatggattgtgaggctaaaagtctaatttttcatcttccattttaattttttgggatatgtgattggaataggtagaatgtttactcataggcttgccttatctttttctgatctcttaatcacttgggaatgaaaatatgataatataggttggcggctcactaattcttattcattctattcttaatttatttttattattaaaaaaatgtgttgcctaggctggacttgaactcctgggctcaagcgatcttcccacctcagcctcctgagtgactagctacaagtgtgccaccgtacctggcttcattctgtttaacatttcttaaaaacactcttcctttcttttccatttgggaattaattttctgtttttagtttcatgttccttagaaaccatctttcacatggttgtcacaaaaacttttttttgatacacattcacttatctgcttaaacacctttctcttaaagtattctttctgtgaaatatttcatattcaagatgctccctaaatggtgagttcacagtttgcatgtaagtttggtaat

SEQ ID NO: 132673 - DNA, 1001 bp, Homo sapiens
tgtctttcttccaacaaataaatgtaaattaacaattatttagaagtaaagcaaatgttgctgagacagaaacaggacctggttgattttaaatggtgctttggaacactaagcagatatctaagtttaaagaactatttggaaaaaaattgttttagttaaaaaatattagtaagcttctatagaatggcagaattggtgactgcagttctataggaaccttacttattgtaatctcttactccttttattttccatttctttttgtttctcttctgaaaattcaaaagcatgaaataggcttcacagaaagaaaaaacaaagctagtaattacaagacgctaaaactttcttatcttattggtcaagtgcaatacatgacaccactctgcagtaatactggtgttcagaagagttatggaagaatctagtaataaacatagtaagaagaaggagggatgaacctcatttgtatggttgaaaagtagatggtcttctgaggctcttaacagtatatgaaggtaaatttgttgtaaaggaaatcttattcagatttttaatatgatgtctatacaaattacttgtgggacaaggatgatctatttctgcagtaagacctctagctccttatggacaggattttttttttttttaagtcactgtgttactcagacctttgcacataagtggtattaaataacaactttatagtaagacacctttgtaaggccctagataaataaaagtacttcagtggcctactgtgtgccaggctgagtactgggtactctccaataattaccttattagtctaatgatccctatgaattgaggtactacctgtactatccccataatggatgaatttatcaaggttatagcatacaagattagtataaaaagatagtatttctacgtacttgcaatgaacaatctgaaaatgaaattaaggaaacaattttatttataatagcatcaaaaagagtaaaatacttaggaac

SEQ ID NO: 132674 - DNA, 1413 bp, Homo sapiens
cctgagcacatgcgtgtactatatgggttaggtgtttgtgtgtctatgtgcccatcccacatatcccatatacaaatgtagatttttttataagccatgtgagagtaaagttctgttaatttatagtcaaaacatataatttgcccatacatacaattcctttattgaaattctgaccacatttaaccttattgaaagcttctagcttgaatgagttttgctacattgaataaatactatgctgtatagttatttatgtgcttaagaagctgaactttcattccatcccagtaagttcccatgggataagttattttagtaaatcagaaaatttctctgaaagcaaagtaattcttaatttttggaggcttgaaaatggagaaaatagccatacgagttagcgggaagaagttctcattgattcatatcgctaaaaaataatttaaaatacttgtactcttaaattatcgtgagggggaagaacccaccacagtgctgctgaattgttttacttctgggattatatctttgtgtgtttataggagtgggaacattttatcttctgtgtttctgttgaggttgtttttcagcagtgccccaagaaaagtcctggagtctagctttgaagcccggtggacaagctggatatcaaagagccagaggaattcagcagtaattgttttatgactggccagaaatcagacctatttgtataggtagcacacaaaatagctgtgatttgacaatttggtgctatttatacccaccataaaaagagaaaagaaaaagttaaagggatattttggaaacaggaactaagctgtaaatgcaaattgcttcattttctcaaaggaacaaaaaaagaaagggtttaggaagtttttattgaagctacattattgaggatctgtctgctttcaggacactcaatattgtactcacattgaaactacacttctttctgtttgcagttttttccctattcccatctgactaaaattatttttgtggagcaaaagaaactctgggggaggagggatagtggagtcacaaagtttccaactctatcttagtagacatttacagtttcatattgctgttgttatttagcttggggtaagaacagtctgctgttgctacagctaagtatttttccatataaaagttacatattttccacagtcagttgcagatcatttattatagtgaagtgtgagactttgctaggtaagttttcatgtgtttttttagaaacacgcagaataaactttctactttctatgactatttttgatctggaagccagagacatctttttgaatacaaaacgccttaattatttgttcctctcacctggagaatattctgaactaaaggtgggcagtgtatcatggtatgtctctacttaagtgg

SEQ ID NO: 132675 - DNA, 2861 bp, Homo sapiens
gtcttgaccctggaattttttggcaaccgtataaaggcaggtattgcaagtcagaaaaagggttttagaatccctggctttactttccactcctgtaagttataaattattactcagatttctgaaactcatttcttctgcacctctaataattgactttgtgtaaacagaaccaccacttgaatttagcaggaaacattgtgtctgctgagaatcacattttctagaatgtgttctagcatttgtaataggcaaaaatgaatttttctcttttctcttttttcccttattctttcttcacttactttggatgcttaaaaagaaaagctagacacaaacttgaaggacttggccagctctatcatttttttactacctaatccatgaaatacaaccagccttttagctttaaaaataagagtctaatgtaattccagtaactggtaggagcagtatttagcagtgtggcaggaaaggccctggcctgggaggtagaaaggatgtgtttggactgaataagctgtgtgggcttttgcagctctgaaaatactgtttttcctttagttttaaaaaggataaattctgcaattgtcattgatctagtgtttttataacaatgaaataataactaccctttattaaatagctatattggttatcatgctagacaatagacatgtggagtatttaatttctgactcttcctaagtagtagttcggagaatgatattcttgagaaaataaaataccaatatatgaacatcagtgtattggaattttatcctttcttatggtgaatggacagtgaaatgggtgaaagacttgctgcagtaatagggaagtagaagataacatgagtaattcaccaaataagggattaagttacacttgtaaaagttaatttctgatcatatcggtgccattcacctcaaccatcaactattacttgtagattggagcatttcaagaactcagaagaccacccagtgttgataggaaacttcttcctcaattatggctcttgaccatgccattagatcgttgggtttttcatgcttttttgtcttttacataaaatagaccttgaaattgtgtcacttaatttgcttttctgaagtatcacttaccagatattacttgtgtttttattatcaatagagtaataattgaggactgcccatgtaagctaattgagggctgtctgtattatcatgtgaacagattagaagaaagtatatgaaatttttgatcatccaacatacttgcatacatacatataagaataaatagggttttctatttaataattcaaatgctgaattgaagttgttttgaaaagcaagtacttttctactcttcagttgtaacatgctgtataacttttaggtcaaagaaaaaataattttagttagcattccaattctgtaaaggaaattgtcaagcaattgactagagccgataatttatccaaaaatacacaaatgcagacatttaaaatagagctgcaaataaataggaattttcttacattgtaaaggctaaacaatagcttatagttaatgcttcttgacagagtatcttttttaggttaacatcattgattcagttcattttctgtgttagaatggctagatttgttcatctttaccccacattttgagaagtatgtgatagataaaaatacatcactgaaaagatgggaagaaatactatcgtagaatgttaatataagtgatctctgggacgtgggatatcaggaacttcttattgttgtcagtaaaattcgttggctttttcaagttttcttgaatgactcatattatgtgaaagtaaaactagtatttaaatgtatgtatgggcacatttacaataagatttttagttttttctacaagtaatttggaacatgattaagactgtctttcccaagaaacattttcaaattttgctatttgacatttttgccaccttgtcgttttgagtcttttcctttaatgttactatgagtatttgcacaatgtttcataagttgatcgtaagctttaaagggagacatgtagataacgttcttacctttcttaacattttgtattgaagttataaaagtaatgagattaacctgatttataaatgtgtattcatataggatagtcttggtaacagaaagatacccatgtgtaatatatcagtacagtatacatttttggagtacttaggaatgttttgaaaagttctggcccttttttcctgtggagttttgataactttgataattaacatgtctatcttgctgtgtagtgttaaaaatttttctagagcctacatctgactttaaaaatcaactacaaataaaaagactgtcatcatgttgcttagatatatggtgattatgttgaagaataaatagtattgataattggaaataaaagactcaattccaatgtgtgcatctttgtatataatttggaagttaaacatgaacttttaagaaataaaaagtaccaaaacaagtaccaaacataaggcatagagaaaaaaagatttagggcagagaaagaagtggtcctttttggatggagaattcatgcataattccataaattcaaactattttgatactaagatgattttattaatatttcatatataagctacaaaaataactagaggtttttacaaagggaaattagtacataattttatgttttatatacaatgcagattgatatgaatattccttaagcataactaaaaatgatttccgcaaaatgaggaggttaattttagttgtctcaagggtctctctgcaatctaaaatttatctaattaagtccatgattttatagtccgtgagaaaacac

SEQ ID NO: 132676 - DNA, 1047 bp, Homo sapiens
tctgccccatggttataaggactgaaatttaagaagcctgattgaatagattccttcaaaatttccccccaatacctacttaataagttcctgggataagaggttgtctcagaatccagggtgagatggggtagagttggggcagaactatacctatggaagcagcaagagaacaaattacttctgtggtacatattctgcaaaaatgcaagagccacagtcaagggcaattgacttcttccttgtaagaccctctttttctggttaaaaaagtttttcttctataaatctagttctctaagtctcataggccagccctgaaccacatggccatgacttgctgtaaggaagtctgggaaagtatctggcaaaggggaagaagagagccatggttggcttaggttaggggtaggcaaactatagtctgtgggtcaaaactggatgatcacctaattttagaatgttttcaagctaagaatagtttttacataaaaatatataccagagcatagccatcatgtcaaaacaagaaaagaagagaaaagtgaactttttgtgtcatgcttttaaggcacagtggattgtggattattttgttatcaaattggatgacaaagtatgtgtttattgtgcagtgatactatacctgtactaaaagataatatacatcaatattcccagattcatcacaatattcccaactcacagggagacaatggtcagaaaatgtgaaaatttacaatggaaaacgtcatcacagcagaatttcttcacaaaaataacaaaagagttgaaaccaaagtaattttctgagtggcttctttgttggccaagcaaagaaagctgtttactgatgatgagttaattaaatcatgtttgatcacagcagctgaaaaaattttttcccaagaaaataaacttgtttcagacgattaacctttcagtgagatctgttgtttgaagagttgaagacactgggagcaacatcaatagtcatgtacaaaacaaggtagatgattttgagtggttttccttggctcttgatga

SEQ ID NO: 132677 - DNA, 1358 bp, Homo sapiens
cttctacagcttcactttccctgctgttggtgagagcaggtcaccaggtcaagccagatgaaggggagagaaaattagcctacttttttttctgagggggtgcagcaaagtcactttgtaaagcagtttgtatacagagattgggagcaattggaggccattttttgcaaactgtcctggccttctaatggattgcttctatctttccccttacagtattgtcagaacagcagccagagtgattttataaaaacgtgagttagatctcttctctgccccaaactctccagtggcttcccgttgccacccaaagtaaaaggcagtcttgggattgtcctgtgaggcttgccatgatctgacccatttgttgcctctccaactccatttacagccactctctctctcttacttaatctgctcaaatgagcctctgctgttcttcagacatctgaggcatgctttcaccatggcattggcactgctactctttccgcctagagtcttcttttctgagatgacgaaactgctcttttactccccttcaggctactcgagtacttcctcagcctttccctgaccatccttttaaaaatagaaacctctctctctaatactgtctatcctccactctggtttacttttatccatagcacttatcttcagaaatgctatgtaatttactattttgcttattcttgtcttgcctctactaggaatgtaatctataagggcagggatttttctctgttttcccagtgcttagtatagtgtctgatacaaggtaggcatctcataaatatttcttaaatggaggaatgaaaggtactgcaacctttttcaggattaggtatctcttccattctttatggaaaagctctggaccattatctgaggaaattcctggtctcctttgcaagtacttttgcaatcactatttatttatttatttatttatttagatggaatcttgctctgttgcccaggctgaagtgcagtggcacaatcttggctcactgcaacctctgcctcctgggttcaagtgattctcgtgcctcagcctcccaagtagatgggattacaggtgcgtgcttccacgcctggttaatttctgtatttttagtacagatggcacttcaccatgttggccaggccagtctcgaactcttgacttcaagtgatcttcctgccttggcctctcaaagtgctgggattgcaggtgtgagccaccgtgcccagctgcaatccattttttaaaagaggtcttctagaccaagtattcttccacatccagactctaatttattctttgcaagaagattatcatgttctcttaactatatgcaatacctttcttgata

SEQ ID NO: 132678 - DNA, 1023 bp, Homo sapiens
agtttgagaccagcccgaggaacagagggagtccccgttgctacaaaaaattttaaaaaaactttagccaggcacggtggtgcatgcctgtagtcccagctacttggaaggctgaggatgggcggatcacttgagccctggagtttgaggctgcagtgacctatgattgtgtcactgtactccagcttgagtgacagagtgagagaccctgtctcttaaggaaaaaaaaaaaaattctgtttagccctgagtttcagccatatgactgcccttgagccgttcctatatagaaatttggtagtcaagagtgctcaaagtcaaatgtctgtcttcgtcatcattggaccctcctcctccaactaccttgtatatcagttattgtctctgctgggttttcataattgttagatttcctcttgcttttaagattgtgtcctttatttgaggtttgacattaagtacttttgtgtgatacatagttgtacaatatcctagagaaactattgagaaagttgaaaacccaaagtgttttatctactgctcttttattagtgcaattgatagattaattttcttggaagtattcttaggggctgaactaccttggcagataatgtgataattgcttatattaaacaactgttttgattcactgggaacttaaagacttcattaaaaattctctttctgatttaggtttagacagacaaaaaaggcatattgaaaggttggagataaatctttgaaaatcaaacatgcatttttgtagcatgtggtttatggattatattgttactggtttccttttagtaaaatggcatgacaagaagtaatatataaattgtttttccttaatgtataaaatacccaaaggaaattgagtttgaaaataacgtagactgctctccagactgggtgacaaagtgaaaccgtctctgtctcttaaaaaaaaaaaaaaaaaaaaaagtaggacacgtactacacttgccaatgctaaagtgaccatgtgtactgttttttgaa

SEQ ID NO: 132679 - DNA, 1049 bp, Homo sapiens
atattcatgtaaatgagtgacttatatcacaaaactagaccacaagcaccacggtcttaaatcagttccaatgtgtgaaatacaaagagaaaaatgaggaaggagtgggtgctgtgtttttatttgagctgttctggagactttgcaggactgacagttattcacagctataccgtaatttggtcccaagtgcaggatggacagttgtagcaatagtgaagtagtttccaacccgtacacagaatggcaatgattgttgctagcctattggctctaagacatattcttcatattcgttaacagtgtgatgaagcatggtggatttcgtttcagtgcaaagatgattttaaaaactatgggctttctcattcatgttttaatggagtaagcaatctcaagttatcttctgatactgacagcaatttgaaccaaaaatctggcagttttcttaacctctatgcactatagttgcttattggtaacctgggatagatatgcctaccttgagggctattctgaagattagaaattgtgcatgtggagtgcctaattcaatgccttctacatagcacacacttagttaatgggaattttacttaatcctaattgactgcctggcatactcatatcaactagtattgatatttggaaagaacttctaagggactgtgttcattaattttatttctttttaaggctgtgggtcatcttattgctgcagtcctaaaggaaaatggtttttcagaaaagattcaccaatctacaaatcaggtctgtgtttaactttatgctttaattctcttcagataagattgctactagctggatcacatatgcacctgtcttgtttccctgatagttcagatcacagtagaaatgcttttgaactgtgagaacttcattgccttttttgtttatttgtttgcctttttaatatatagcaataaaaaagttttaaatttattaaaaccctctaggaatgagacatggagggaagggctggagaggagtattcttatgactattaatgaaaaataatatgggtggaa

SEQ ID NO: 132680 - DNA, 1235 bp, Homo sapiens
agtacaaagtggtgtgtcagctgctctaaaatgtgcatcctaattacttggggaccttgttgaagtgcagattctttttccttagtctagtgtgggctcaagattcttgtctaacaggctcccaggtgatgctgatgctgcttttgccctaccacactgttgagtagcagagctaccgccgcatcggcatacctgtgaacctgtgaagaatgcagaaccttggactccatctaagagtgccagagtcagaactgcattttagaaagattttctacgtaatttataggcaccttaaagtataagaagcatcagtttagatgatggtaaaaagaagttttctataatgcagagaatttgggttactctcattttaatcctgattgtcttcaccgtgtgcaattgttagacctttaattatctgtaatgtttgaccttttaattcattttttcctatagttggttcctttaacttcagtcttgtttcaaaaggcaattgctgcaaggtgtgaataggaagcctagtttgagaagctgagaagaattggatacataggcttgtctttagatacgtggcacattaagaggtccgtaatcaatcacctgagttggcataatctggtaatgtttatggagagcccttatgtgaatggccgtttagcactataaatcagtagagagtaattgagtgtataagagccttaagttcctccaagggggattgtggatggcagaaacagaggagaggtgagcctgaagagcatattcccctcaagagagctatgattacctgagtcaatcataaaattgtcatgctgttttagagccttctttgccacatgttggttagcaatatcatccagccttagagaggcaactgatgagctgtgtatgaaagcataaaagggatatgagaaacttagaactccactgagaggtgttttctggttattctgtaggattaatttaaaatagaaggagtatggcaaataagtgtaagctttctgagcatgcagctaatctgtgtttttatggtattaagcactgtgccagtattcagctggggcttaagtatttcttacttctttttcttctaatagctgattaatttgaatcacagtgcaacagaatacttggtcatcttaaatggtctgtgctgaaccaaataagttgtaccagtatgggagtggacagaaaacaagagatatgagaaccaagaatgttaggcggtggtttcc

SEQ ID NO: 132681 - DNA, 1020 bp, Homo sapiens
tttgaatggaagtggtttactgaccaggctttgagaaacactggattagaatcatatgtagttaatgcagctcatattgcttaactggaccctcctttctaagcagtcttttctttagctttgtggcttaaacaagattaggcatagatatttaaataaggctgcaactctcagttacctttgtaactggaagcatagtgcagtacatttggctactgtgattagctaaggagcatatgccaagtataaaactctagacccatgagtctcaactctgtctgcacattagagccctcttaggagctttaaaatatatggatgactgggctttacccagaatgactgaagggttggtcttaggtgttggtatttttttaaaagcttcccacgtgatttccagcgtgcaggtaagggtggagaactgctggccaattgttgccatgaaacaatgggacttcattgttgccacacgttcagatctttcaatataaataaagtttttatgtgaaatctcctgactgaatgctgacaaccaattcaaacttttcaaaatgtagggtaggtagacaaaacacatctgctcacaagatgcaatcagtgggcaacaagtttgtgacctctgatgcaggtactattttcaagaatttcagaagccactttctagttatactaattaacatttttttaaaccactatgtagtatcctttagttcagactttctttttttctcccttttttatttggtctgaattttcttttgtttagctagaacccctcttttgtgtaacacacttatatttaagttatttaaacatttttttttttttgagacagggtctcactctgtcacccaggctggagtgcagtggtgcagtcttggctcactgcaacctctgcctcccaggctcaagctatcctcccatctcagctcccccagtagctgggactacaggtgcgacactacgccctgctaattttttgtagaggcagggttgtccaggctggtcttgaactcctga

SEQ ID NO: 132682 - DNA, 1053 bp, Homo sapiens
tttagtgctctagggaggggaggccgggacattggctcaggagaagtaggcacgggctagaatatgaaaggccatggcaaagaccgggttttacttaaagagccgtgggaagtcattaaaaacatttctttttaacttactgtattgaaataattttaaagttcgagaaaagttacaagaatagcaccaaagactcccatgtaccatttacccagatttatcagtgtttttgctctttgccatgtttgcattatcattatctctgtataattaataaaaaccatttgagagtagattggaaacattcaagagtgtgttttctaagaacaaggatattctcttatataaccagaatataaaattgaacattgatataatactttttataacatacagtccatattccagttttgtctgttgtctcaataatgtcctgccttttgccgccttactttttaatgtataggatctagtttaggatcacctgttgcctttggttgccatacctttttagccttttaacatctggaactgtttctcatcctttctttgtttttcatggtgttggcatttttgaattccatataaatgacgctgtgtccttctgaggttaatcacatctggaggtactggtgtccctcttgcccctcattggggattttaattttggctacacagtcgaggtagtgtgtggtttctgtactgaatagttatcatttttttgaactaataagcaatctgtggggaatacattttgagaccatgcaaatattctgctcctcattaagctcagcactcccaaccaattttcactgtgatgactacaaaatggtgattttcccaactccaccactccctttatgtttattagtggcaaaagagatagctatttggtttagaggtggaaatgactattaagctatcaatcaaggatattaaggagatatatcagattctgatttggacttattttctaagggaaatccaagttaaatttttttttacattagcagtatacttatactgctgataaatgtgctttctaaaattaaa

SEQ ID NO: 132683 - DNA, 1038 bp, Homo sapiens
cttaatgatgttgctcatcctctaactcttaaaaaaatcgacgatcagctattatcttatggttttattgtcaaagtgagcattttgcttttggggggttgattatttcattacttgaatatattacctgaagggatctcctgaggtataaatgtttggttttacttagcataatgtaagtatgacacctatacaatcaagctgccataagggattgaaaccagtggaatacattaatacaataattaattttatttttattttgctgaagttataacaacttacactcagggagccaccatttctggacagaacatatcatataactttttaaatttttttttggaaatggtctttatagtttttttgaaagcaggagttctaaggagactgagttgtagcaactacctaagatatacttaggtttaatttactggtatgtagccttttttgggagggtggtcaggaccttcttaagaattacataaaagttttggactttctcctattatagaaaatgtacacatgcatatatactaaaaattttacatatggtttcagagggcttgtagaaatcattatagaaaaatcagagaaagaagatgggaaaggatgtagtcagattcactcctgaaaaagcccaatggagttaaggataaagaggaaggtagggcagtaattgagaaaacatagctagtaatacttttcaagggccatctgtctctttgcagttccattctttctctctagctacatgttttgctcctgtttttatttcctcttttccttcttcttttccactcaggaaagtctttattcacaatttatgggtctaatcacctggggtttacacctaagatttataatcagacttttagaataagctgcacccatcatacagtcttccagttagcagtagccaccagaaaacactttatatgttcttctaattgtagatgtttaattgaaagattgggattataatttgctgctaaatgtctttaaggccacaaaaatgttgtagtttttgcctattat

SEQ ID NO: 132684 - DNA, 1065 bp, Homo sapiens
gtgactgcaggcattgtttcctcacacagaaaaggcaatctgtgtctgtcgctgaatttatgatgtaaatcaaatcatagctttcctatattcagagatgtagcaagaaggttgaggtgacctaaaggttacaaataacttttgctttttgatttgcctatcacagactattttttttaaccccctcatttctattaggattgatgtgtttatacttggaaaggtgaatccagttacagattttatcattgcctctgtgctagtctgggggaaccatgcatttatcattcactccttcctcactccattctgttaggatgcatgtactgtactgctctgtgctgttgatgatattaataaagagtgggaacactgaaatattaggtaccaactctgtgtgcttcctctgcttttttcttctctgaacagtgttgactttgggacaatgtgctagagggactgtgttaaattggcttcccatgatcctgtttattctgtcatttgcaacaacatgaatcaaccagtttaagagtttaaaaaggtgatttggggaaagtgtgtatgtgataattacgtttattgtagataggcatttggcactgaaagggaaacaaaaagattaagaagacacatacccagctttcatgctgcttatgctataatttaataaacaaacctatcttgatgataatcataattgtacccacttatgtagttcttctatttgctagatattatattaaatgctttacttaaaatagcaattaaaatatttgcaaatcacgaaatggggaagtgccaaaggaggtacaacaaattggatcatctattgcagaaaaacaacaacaaaaaatgcacacagtgaaggagacattagaggcactagagaccaatgaagggtgacctgactgcctggtttgtattgatcttgatatttagaaataatacaattctctattaaggagaaagcagaatctattggctatctcaggagttaggaaattcagattaaaaaatttctgtgggctcttcctggacataacacttccttctgaaataaaaaaa

SEQ ID NO: 132685 - DNA, 1412 bp, Homo sapiens
gattcacaactatgggaagaaagcaaaatgttgtaaggatagctagctatttatgttcattttaatattatgtatatgtcctaaaatgacaatatatcttcatgctagattttttgggggggggcgttacaattattattatttttaagagattgggagtctgctgtgttgcccaggctgaacatgaactcctgggctcaagtgatcctcctgtctcagccttctgagtagctgggactataggcatgcacctctgcacacagtatttgggtattattttataattaagttctgcattcatttattgaaggcctatgactttaacctttcaggaactgagaatttgagaatggtgcaaattgataatatcatggattttaggctgggttactttaagattatctagtctaacataatttttcagatgagagaaccgaggagagcaacattaaacgacttactgaaggtttcttggctagctagtggtggagttgggcctaaagcctccgttatttttatttttatttttttttgtggcagagtctcactctgttgcccaggctggagtgcagtggtgcaatctcggctcattgcaacctctgcctcacgggttcacgccattcttctgcctcagcctcctgggtagctgggactacaggtgcccgccaccatgcctggctaattttttgtatttttagtagagatgaggtttcactgtgttagctaggatggtctcaatatcctgacctcatgatccacccgcctcggactcctaaattgctgggattacaggtgtgagccaccgtgcctggcccaagcctccatttttttactctctctctaggtctgttttttttagtacttctccctctgtggtgaacttaaatataaaagacttgtgtgtaggtacatacataattggttacatttgaaaacattttaaatcactttgggatttcagattatctgtttttttaatattcattttttcctaagccctggtaatgtcttactccaccgaagtgatgattaatcatcagataccacatgcagaatctaaaatcagaacagattaagccaaggggatttttaaatagtatattgtccttaaggaagttcaacgtttgctcctgatgtcaaatcataatggcatcttggaaatgtatttctttatatgaaccttacatttcaccttcagcatctcaaagtagaagaaaaccgataagccatccatggatgctgttgacacccggatagtatttattctttggggaatacattattaaagagagatggagaaggaagtttcttaaatctcttttctgggaactttcactttgtatttcatacatacattatctgattccttcatctatctttttttagtttccgaaagtagaaggtgtgataaa

SEQ ID NO: 132686 - DNA, 1881 bp, Homo sapiens
tttctacataaagacagaatgttacttcaaaattatgcttgtttagaactttgataatgttaaagattagagagcctttaatgctaggttgctgagattgtcttttgaacctttttttgttatggaaaattagaaatgtacacataaatgcactcaaggaaatatattgtcaagtaaacattaggctttattttaaatccgtctcttctctgtggccttttgactttcctactgtgtgtttgcaagagagcaaaataatttataccagactgtttattttttataacaatgttttctgctatttcttctctttgatcttttaatatcttttttctcttgtttgctagcaactaatttttctctctgtgtataactaatagtcatttgggttattatggtgataaccactggtaaaaggtactgccggtcaaccgtaggctttcttcttgatgaatttagcagacataggctcctgattgaagcagatggtccgttgtttgtaatctctgggaaatgccaatgtgtctgtgagcaggaccatatccttaataccaactccagaattttgatcagaacagctgggtttgaattgcattgggattttcaagagcacccaggtccttcctatctaatacattagcctgttgagaagacactctaccatttgaatatggtcttttactatatctgccaagtgtggagatgatactctcagttaaggctgcctgagcaagtatcttgcagataaagggcttagtaccgtgttagaataacatgctgactctttactatcaggtatctatgttggaattgtagaaatgagagttcatttggagaattcaaaactaaacttaatttccctcaacatgttgtcattgtcatgtaacttgttttaagacatctgcactcagacaagctagaaaaatgaaagaaaagaaatttgtaccagccagcagtaacaaaaacagtagcaaattggattttggttaataaccagaggataaggtgcagttgtatagttaatccttcatggagttctgtaactttttttcatctcctttaagtctttataggtttagagaaaaaattacattgttcaaagctttttgtgtactttaaaattatcttttggtttgtgtattttttaatatcatataatgacttttttaaacaggtaaaagatttgatacagacaacagaggcgatgatgtttattgaggaagtatgtttaagccttttgcgtcatcctgttttctggaaaattcagcttacccagatgagtcttcagctgctgtgtgtcagtgaagtcagcttaaagataactggtgaatgttcatcttcaattcaccttttagagcacagtgttgaacttctgaaggaggtaaggatagtagtatattatactgttcatgcattgctattaagaaatacctgagacttggtaatttataaagaaatgaggtttaattggcttacagtctggcaggctgtacaggatgcatggtgctggcatctgcttagcttctggggaggcctcaggaaacttacaatcatggtggaaggtgaagcaggagccagcacttcacatggctggtgtaggagtgagagagaggagtggcgagatactacacgcttttaaacaaccagatctcaatcactatcacaagaacagcaccaggaggattgtgctaaaccattcatgaggaacacctttgtgatccagtcatctgcaccagaccccacttctaacattggggattacaatttgacatgagatttgggcaggggcatagatccaaaccatatcagatagacgttttattgtgtcagttatcactcaagtgagtctttcaataactgggtggatctgctcatttagtt

SEQ ID NO: 132687 - DNA, 1003 bp, Homo sapiens
catcttgctttttggccatataatacatcattttgaatttatgtgtgactgtgtggcattgactaattctttctttttttttgagatggaatctcgctctgccacccaggctggagtgcagtggcaccatcttggctcactgcaacctccacctcctgggtcaagcaattgcctcctgagtagctgggaaattagcctggctaatttttttgtatttttttgatagagacggggtttcaccaagttggctgggctggtctcgaacttctgacctcgtgatccacctgccttggcctcccaaagtgttggcgttacaggcgtgagctgccacgcccggccgaccaattctttctttagtagagcacacttgctgtataaataaatttgtgtaataggcttgcagtctttcatattaaatatattcttcctggatacatgttacaaagccatgattctgggaacttctttaacaactcctttttccccctctattcttttaggattttcctgttgaactggtcataattggaatagctttactacttctacagactccagcaagtcagcagaagccaatcttaaatctaggtaaataaaaatacagtcactagagtaaaatgtaaatataacatgagtattgacaggattcacttgaactatgtatcctgctatcttgtgtattttgagtttccatctgtaatttttaaaattattaaatagaattttttttcttgtctaataagttgttaccttgtgcaagttttaatataacataatttaccaagtatctcggctgcatgttagaggttataatctaaccttatatggcagtaacattcaggaatatattgaatggcatagcaccttattcaacattgtacagcaaaatggaaagctttagtataaaatccttgaaagaaaagtgtttagtagttgtagttatttttaaaactctccataccttaactattcaaaatgtaaatctagctagaacaaatgaaag

SEQ ID NO: 132688 - DNA, 1476 bp, Homo sapiens
gattggattttgttttctgacaaaaaaattctaaagcctcagaaaatccacatttcaaattctgaagctatgttcttatattgtggttcatgtgtaagagaaagataatacagtatcaaacagtcaaatacttttattatttcctggttagcagactttttctttctctcgtaaaccaatatctctgatttgaagttaccttagagtgaataaactgtactgaacactgctaagccaatatatcatgttggaaagtaaggaagaactgtggggaaagagtattcaaagaaataggataaccaagagaatattgattattccaaatttaaaagatttatttatacattaatttttatattaatgtaatattacactatgtagttgttaactgtagccttgattacaaatagcaatttataaaaatgcctggaatatttagatttataatttaggctattaaaatactgctattatattcatttcctgttatattaaagataatggattttcataatatctcagaaacaattatggattaagaccaatatttaggcaagaaaagtaaattagtagtgttagagtaacaggtgtttgtacttaatatcatgttaaggtttgacctccagatgatgtaaaatagaatgctgacaactcattgacatgattcaaggcttgtagaatttttgctgtagtggggaaatcagttgaatattttgataatttaacgttgaatcccctgaataacatcttttagtaaatcagggttaattacatcactttgaaaaaaatattgtgaaaaaagtatatttatgccttaactcattcagttaatagtctagagactctacatgtaaatcagttattgtataactgtatgtatctggtgtgtaagttgtttccatgttaaagaaccattcactaattttttttgttgttgttattttggttctggactttgggactttcacaatctgcttcttagcaattacagctgaagggcagtcctgcttcactttgctgtttacttaagcatctgctaataggattcttagctgcctttgtaaaggaagcatgtatgttgggcttgttagccactgatccaggaattcttggtctcttagctctgtttgctgagggcaatactagcatctcagaggatattaagggcaaatgttgaattgtattttttaaaaaattcatattaacctaaaagagtatcatcaatttttcagttatatatgttaacagcttattttatataatagtttatttatactccttttatttccttttaggataagatttatcaacctagttatgtgtctgacccagttataaaagggaagaaaactttcttgcatatcattcttaagcaaaattgcattttgtttgactgtggtattaatttttaaaaatgtgcattattgttttgatgaatagctttgaagctcctctctgttactgaggatcagaaaa

SEQ ID NO: 132689 - DNA, 1046 bp, Homo sapiens
ctgtcttttgtcagttgtgtcatcaaagcttaacacaatctcagtgtagatttggccctcacatatttttgatggctggatatgtaactcataagagagttttctgtttattattgatgctggaatactctagaagttattctttttagaaatcctaaaaaccattgttttcttaattgccactttcttttaaagcaaaatgtggaatgatcctggtttgggggtcccaaagatgactaacacgtttagttattctctaaaagaactcacaagactcagcatagagctgtaaccatgcttaagatttattacagtgaaaggatagaaagcaaaattaacaaaggaaaaggttcatgaggcaaagtcaagaagacatcaagtgcaaacttcctagagtcctttcccagtgaagtcacacagggtgtactgaattccttcagcattgaatgatggcaacatgtatgggttctttgggaaatctgctattttattaaaccccaaaatattgaatctatctagcttagttacatagttgcttacctagatgagctatatttaataatatctaattgttggagagatttcaaactcctccttctaactctggtgtaaaacacattaccaatgacagacatagtagtagaaattgcacctaattatacattatactttacttataggacattggcttttaacttttatttgactagtcagactgccaaagatttagagctcacgtggcagaaatgtgtagctacttttgtccaagaaggaaattctatggatacaggaattcagtcactatagttatcatttatgtaagtttcagaatgttagcaatggatataactgttgattatattccttttttccctgctggtagttacatattggtaatgtagccaaccattacatcatgatttaagtttttcttatactgttttctaaataaataagttttctgactctgagagataatagtcagatggctaatgagactcacctggaaataaagtttaggccaggaagggtcgtggctattttct

SEQ ID NO: 132690 - DNA, 1064 bp, Homo sapiens
ttttttttttgagacagtctcgctttgtctcccaggctggagtgcagtggcacaacctcagcttgctgcaccctctgcctcctggttcaagcaattctcatgcctcagcctcctaagtagctgagattacaggcatgcaccaccatacccagctaatttttgtagtttttttttttttttagtataggtggggtttcaccatgttggcccaactggtctcgaactcctgatctcaggtgatcctaacacctcggcctcccaaagtgttgggattacaggcacgagccactgcacccggcctctccttcgtttttgaaggatagttttaccagatatagtatccagtatcttggttggcagtacctacccacccacccctgcccactcctttcagcactttaaatatattatttcactcccttcttgctggcaagatttctgctgagaaatctagtcatagtcttataggggctcccttaacagtcccatgattataaattaatttgtttatcaaggaacttaaacgctggaggagggaagagaaagcattgagttatatgaagccagatcttgagacagtcaattataggacacttaccagcttcttttatattaaaggcgaaatctgagcattcattgtattttcagcctctgaagggtataagattcaagattaggaggatcaagagctggtaattacatctcaagtaaatacatattcacaaggaaataataataataaaaaattagtccatcttttatgtaaaattattttccacagatgtctatctatatctgtgttttcctagtgaaacagtccctgttttattttttccatttaattggggactgaatttgggctattatgccttgagaactgtattaagtctaagattatttactgtaaacatttccttcttttttcatttctgaactggccagaggaaaagacacacccttacgtgctttttttagggccaagtctcataaaggaactgtgtactcttagacataaatacagtactttatttctcccctgacagtataattatagcatttgttta

SEQ ID NO: 132691 - DNA, 1034 bp, Homo sapiens
aatcattttctgaacttcagactgttcccagaattataacacagcagagagaatctactgttttagagaaatgttttagagaaatgtggtaattgcaccaaagatcattcattgacctaaccaaaggttttgacttagtgaacatatatacccaattgtagttttttagtgaatgagactaagtagaattctcccaccttaaggttatggtcagttatggttgataatgatagtaatgaatataatgatctgataatataagtgacagccatattgagcgttatgctcgtgtccttgggctaagcactttttatgtatttttcttaacaactctgcagtatagggattaacaccattttacagatgaggaagatagaccccagagagaggttagatatttacgccggatcttggtatgagaatacacttctattatttttggtgaacactcatttcagcaggcagtgaacatcattgctgtttaaaaactgatgtgtggtaaggacaatgctttcacatcctgtgcccaatatttggaaaagttgttagaacttaatggcaaggggctattatagcaggagaataccacacatgcccaaggacatttgattttactgcttctgtcagtcatctgagattgggaaatatctctttaatagttatattactttcataataagtaatcctgaaatctatttttaaaccagttttgagagaagaaagaattctaaactttcaccaccaaaaggtgaccatttttactgttttgttgtatttccttttcattattttttcctaacaggcatcaactaatttctgaaattaacattttttcttataataaatagtaatttagccttattgcttttatgattccattgttttctctgcccatcccctcctgttactataaggctgtacagtttatcaatgctttttaattcataagaaataccctgagtttggcactgactttcctcattccatttctctaagacatcatcattaactgtggttagtactgaagataaatt

SEQ ID NO: 132692 - DNA, 1047 bp, Homo sapiens
agaatacagcattccctaggagtttatgcataccagttatatgaatttatgttgtgtgcctatataggggtgtgtgtgtgtgtttgtgagtatgtgtgtttccatcattttgttagccatgcttattccaggtgtggattgttataaggtttatgtgaggcactgttaaccttggctttatggaatttctttctttctttttttttttttttttgagactaggtttactgctgttgcccaagctggagtgcagtggcacaatcttggctcactgcaacctctgcctcccaggctcaagctatccttctgcttcacccttccaagtagctgggactacaggtgtgcagacccgtgcctgactaattgtttttgtattttttgtagagactgggtttgccatgttgcccaggctggtttcaaactcctgagctcaagtgtcttgcccgcttaggcctctcaaagtgctgagattacaggtgtgagccactgcaaccagcctgaatttctgtattctttatggttatgcttaagcacaactccacacaaaaattactttcccttttttttgaactatgcaatcacttaatttttttttatttttaatgtttatgggtacataagtgtatatagttaaggggtacacgagatattttgacacaggcatacgatgtctaataatcacatcaaggttaatggaggtatccatcacttcaagcatttatcatttctttgtgttatgaacattccatacctggccctgatttgacttttttatatgctaagagataagggtcaagtttcatttttctgcatatgattatccagctttctcagcactatttattgaggtgactatcctttccccagtgtatgttcttggcatctttgtcaaaaattagttcactctagatgtatggatttatgtctggctactctattctgttccgttggtctatgtgtctgtttttatgccagtagcatgctgttttggttactatagctttgtaatgttatttgaagtcagtaatgtgattcctccagttttgt

SEQ ID NO: 132693 - DNA, 1035 bp, Homo sapiens
tagtcctagtccttaatagagggcagagtttattatgagacttcagtgtctgcttctttatgagacattttgagttgtccaggaaatgtctaatttcacaatccctccctcactgactcaatcagtttctacttattagaatatgcatattggtttttaaagtatttttaatgcatgagacacatttgatgctcaaaaatcagaaaatatggattagcagaattagaagcaaaaatttacccatatgtcactatccagatataactctgataataatttgccatatataatttcatgcatttttctgaacatctctgtatgtctatgggtatttttagaaatgagattgtactgaacatatttagtagaacctgattcttctcctcttgatatattttatgcatcttttcctcgatatatatatatatatatatatatgacacgtggtatatcattgtacatgccatgtattgtccatttactagtcctttattgatggatattttattagattgtttccaattttttactgtcatctacagtgctacagtgatcagctttagagctaaactgtagcacatatctctgattatttctttataataaatttttagaaatggggctgccggtccaaggatgtataattaccatttataaagatttctcccatatggactcctacctgtattatacgggagtgctgctttctctataagcttttctgcataggatataagttttttttatatgtgtcttcatatttgttttggaaaacattgttgaccattgtaactaaatttctgattctttcatttatgtagtaaatgtgaactgtgtgcaaatgctaacataataagcattattgatgatttggttgcagttatctgaggataaactatatgatgcattgaaataaatgtgaaaatagaaggaaatctcaaatgtttattatgaggttttgtactagaaatttacatttactttctattagtatggacttgcggagttgcaaggaggagtgctcagatatcttct

SEQ ID NO: 132694 - DNA, 1071 bp, Homo sapiens
taacaatgatgcaactcaaaatttaaaaaaactcttagtcttatggtcataagaaataaaaataattttaatttataaagttatttttgttatagaggcatatgagaggtgaccaatagcagactctgaaccattaaatatattagaataaaattatgaagcataactgtaatagaaatacaatttctttttcaaaaacattgtattattttatttttatttttttatttttatagatttaggaggtacaagtgcaggattgtcacatgacagaaatacactgtcgaggaagaaaatctatacaattttggagtgttagaggcattttttatgtggattttatgaaatggatgatggtagatataaattgctatggcattttatctaattgtataaacttagtagaatgttatagcaattttattttaaaatggaagtatttaccatatgttagaaaataaatcttttgcagtctttatacttcttaaatgccaatttacatgatttttcaaaactttttaggagttgcatgagcaaaaagtatttaaagactcctaccttcagttatgctttaaacttgattttcttttatcatatatgatttaattggcacaatttaaattggtataattggaaattaaaaagacacaacagagcatctggtacataattgctctttaatattatttcctccaggaactcctttctgatctctgctctcttccttaaccaggtaatttccccctctatatctagtatgaaacttctgcagtttctcttaacacaaggttttgtaatgcatgtttatgtatcagtctctactacctgatgctaaggtcctcgaagatagaaagtatgttttagcaactgacctcctcctgcaaagcgtccagcttagtacctggtacatagcagttgctcagttcacatttcttgaactgaacaataaagaagataaataattagtcttatgaaaatattagataaccttaagttggtttaagtgtcagggtttgtcttgtctatctctagtgaaaacttattcctttgcatattttgtaggaataattt

SEQ ID NO: 132695 - DNA, 1045 bp, Homo sapiens
tgaacatagtccccttaaaagcagaagtgaagaaatgtagaagggagagaccctccttcctcctcccactttcatctgtgtgtgtttagataattggttttttaactacttagaatttgtctggatgtgagccaaagttgaatttaatttttcccagagtgcttcttaagtcatttctatccctagtaacttcattagcttaagtttccctaaaatgtagtccaacctgtttacaacaagtccataaagcattctggaatctggcctcattagtggtctgtatgctgcactccaataaaaccaaaccacttacagtgtccttcaaacttttccttcctccaaacttttccatttcttttcctttgttcatattattccctctatctaaaattactttctttttcctctttaatttaaaaatatattttaggaagaaaaggattgttttaactcatcccatcctttgagagtttgtctgcaagctggagtcttttgttcccaaagttctttatactgttctaagaacgtttattctattttatactacaggtatatgtatgcatatattattttccccattcaactataggcttattgaaaatggagtccatgatttaattatagtgtattttctgaattgctttgcacagtgcttgcttcacttattcattgaatcagaatatatttattaaaactgcgctaggtcttagagatactaataaatatagtcaaccctatttttgagtacctattcaatccccatcactcttactagtttataccaattagttctaatctctgataggaaggtatcattttttattgtattgttacagaaactaaacctttgagaggcctatttatttgacaaatatttatgagtatctgctatgttctaggcaagtaacttgaccaagactgtagttaaaaagctaagtgaaagctgatgtctgaatccaggactttctagtttcatatcctttgttttcgcattataccatgttatcagtccctgccttctagaagctcaaaggtaggtaaagga

SEQ ID NO: 132696 - DNA, 1057 bp, Homo sapiens
gaaggtattaaaaatgtaattaattgcttaacagttatatcttgtgaaaacaatgtggaaatctttttacatttttaatttttggttcaaacaaacctaactaatcaaagagcagccacaaaaatcctcaaaatgcaaattagacacaataatgtacagctaccaattacagattttagtgtttttgtattccacagcaacaaactgccaagtcttaaaaaaaaagaagtcaactaaagcattctgttgttccctgagctctactgtatattctactggaagattttaagctctgtcatggacatatgactagaatcacaaattttttaaaaagtgttcagacaaggcaaatatctaactatgagctatagaagttaaatatattgagtatgtcagtgtttgcattttatttttggatggtatagaattttattagttttctataataatcattgcttatactggcttacagtgatttactgtattaacataagctttttatacagatctgagattgtatctaataagatgactagagtcatgaccatttagttaatctaaaaaatgaatagatttttaaaaaattaatttcagtggtcttttatgttatagagtgatggagtctaacaaaattttaaaatcttgtcacaaaaaaggatacagaaaagattttgcataatgttttattattatcctctctatgatcttttcgcttatcatttcagataagaccagaaattcccattcctgaagagttagatgacgatgaagatgttgaggatgtggatctttcagttcctggctcttgctatctcaaactgttgtcactcactccccctttggttttaccaggtgactcctatttggtagtagagaagctagcattttttagtggttcgatttgtctgattgtattcttttgtgataggtacatagtatagtttaaccttatgtgcttattttttaaccagaatgttaaatgcacccatctgttctattgaaacagcttgaggtagtatggtgtttaaatcatacgaaaaaacgttacatctgagta

SEQ ID NO: 132697 - DNA, 1404 bp, Homo sapiens
gtctatgtgcagatatgttcttgccccttgacatgtttcaccttttgccagaataggatccttctgagaaaggaagaaattactttctttcatcatagtgcctctaccctcacaaacagttgattcatagctgcattctgtaaagtctataattatacccactttgaagcagtccctgtgtatgtgtatgcagaaattggggtacatggcctgcaatcggatattactcatctgttttgtgtaaatgatgtattgatcactgttatgacaagaaagggtgggggatacattcagattgagtaattggagagagtttaataaagaacctatttacagttgtgttgtcaaggttaagggaaactcacaagagatggtaaaccgtctcagagtgcttaatgtctctggcctacagagataacgggaggaagaagaaagagtatctgtattataaattggggtgcctaaggggagccaagactttcagaagaggaatgcaggcaacctgtagcaatcctgcaagaagccctgtgtctggggaatacatctcctgacttcactgttttcaccctttgatgtcctgccagtgactccagtggttgaaaccaaccagaagccagaggacatgggagcctgttaatgcctttctttaaagactgtttttccagagcacagagcagggttgagaaggatagaggatagataagaaggagtaaatggaaaacgtcacatattggtgtttttgagctttgaatggagaatcttgattgcatctaggagggtcctgtcagaaatgggtatataatagacggtccagtgagctcttgctgcctttaatttaatcatattcatttaaaggagacttttagatagatctcttcagaatgaaattccagttaggtggacccttgctttttgtttctgtaagagccacatgcagtggttttcttttttcattttccgctacatatgatttgtttagctttaatgttttttgtttttttgtttgtttctgtattgggcaacctctagtggtccttaggaaaatcacatttgaatatgaacctatagtcttatcaaatattttgtttatacatcctgttgtcttctgacatcatatttctgttattatatagtaagtaaaatgtcaaatgataaagatcttgggcttaattagaaagaacacaagcaaagatagtggacaaatatctcattttaaaataattgtcctaatattgctaagtatagatagttatgaaagaggtttttctgaaaacacttaaatgataagaaggagccattctcatgaaaatgtgggactgatatgttccaggtggaagggatagcaaatgcagtggcactgacttaaatatcaactttgtgtttttgaggaatggaaagaggcca

SEQ ID NO: 132698 - DNA, 1041 bp, Homo sapiens
ggattccagcatgaatagaacatgacctctgctccttaggattgtatgagattaagatctaaagacagaatctgtggagtgttgtgggagaggcacatatatactggaagtatggagatgagaaaaattatttcagtaagtagaaatgagaggaaaatcggtcattcaaggaagaggaagcagtgagtgcaaaggtcctgtgaagtataagacaagcttgggaatcggttcgtaatttgatgcagccagaatgtaggttatataaaagagaggagcaagacatcaggtggagaaattggttaaaggtcttggccagcagttatttcttaaggtaattctaaaagactttgaacattatacaaaagagtttgggctttattctttaatgaaccatcaaaggttttgcaaagttctgagttaatgtattaacagtaagggtagcaccattggggatgtgttaggacaaggaaagattttaagctgttaagagatcagttactagatcatagtaatctaggcaggaatcagataggactaaaccaataaaggaaaaagttgggacatatatattaaatatttcagaagtagactcaagaattgagtctcaaggcaagggagattcccaagataaatcagaaatttcaaacttgggtaactggaacattgatagataatattgatgggaacaggaaagataacaggaagagtgggtttcgaatgatgatgacaaagaagtgtgcaaagtctaatagatggtgagaggtgaaagtttgagaagtacatgttctaaaacttgtgatttttttaaactaggtattttcaattctatttttatttgggtataatatgaatacactagagttctcacattttactgtctagttgtatgaattttggcaagtgcacacattcctccaaccagcaccacggtcaagatgagaaggttctaccaccctcaaacatttccccatgctcctttctagtcaggccctttccccacctccatctcctaacaatctcacatgaccaagagggctgaac

SEQ ID NO: 132699 - DNA, 1751 bp, Homo sapiens
tgtgtatatatgagtataaaggagttaggtccctagaagtttcttaagaatgatttcggctggatgtggtggttcatgcctgtaatcccagcactttgggaggccaaggcaggtggatcatttgagcccaagagttcaaggccagcttgggcaacatggcaaaactctgtctttccaaaaaaaaaaaaaagatacagttaaacctgcagtaactaataagctaccttgaagtgagctcttcctcatcctcacttaattggaacacaatcccaaatctaagtaaagtcatcacttgatttattatttcaaaaagtatttattgagtgtctgtcatgtgccaggcactgttctaagcacagaggaacagcagtgaataaagccccttctttgtccctccaaagcttatacttgagtagatggaaacctgtaataaacaaataaacaaatggaatatgatagaagttgattcatggaagaaaaataaagtacgatagagggaacagagagtgaatgaggcttgagggaggttgaggggtggcattaccattttctgtacggtgttcagggtctctttaataatatgacatttgaatgagacctgaaggaagtggtggagtgagccaagctgatatctggagaagagcattctaggaagaggaaacagcgaattcatcataggccctgggagtgtacctggcaaagcctgtgtggcatggagagcgcaaggatggaagtagtggacatgagagtagagaagttcgggagattgcagggtggagagtctttgtcagcacaaagaggactttgtgagtgagatggagaaacattggcagatcttaatcacagaatctgactcatgatttaaaaggaccactccagctgttatgttgaaaatacaccctgcggggcatggttaggagtccgttgcaataatttaggcaagagataatagtgttttagactaggatgttagtgtggaaaagtaaattgattttgaatctattttaaggcagatatcatacgttataaatgctaataattgaaatgaaggatgtgaaagaaagggatcaatcaaagatactccaagattttaactctaaacaaaagtatggcatttccatttaagacaaggaagactagagaaaagcaggtctgcgtagaataggaatcagattttggacttaggcctgagatgcctcattagcctccaattagagatagcaagcaggttgttgactagtctatagttccagggagagctcagagctagagaggtgaatttaggaaacatcagcatattgatggcatttaaaatcatgatgctggatgaggtcacttagggagtgaataaagaaagagaagatttcaaaagattgagccctgattctatatttaaaggtggggaagatgaagagggaaccaataaagcagacgaaaaattagttatcagtgacgtagaaagagaaccaaaagagagtaaaatcttaaaagccaaggaaagaaggcattctaaggagcaaccaactgtgtcaaatactgttgttaggctgcagaagatagggactgagaattgagcattagattcagtctcttgaaaataattggtggtcatgacaggagctcttttggtagagttattgagacaaaagccaggttctagaaggatctagagagagtggaaggaaataacgagagtcatcaagcataatcttttacacaagttttgacgtataacagaccaagaaatgggg

SEQ ID NO: 132700 - DNA, 1046 bp, Homo sapiens
catgtgtattaaaagtccatatcatccagaaatttttaattgtagtatagtttatccttttcatgtcacaaaaccttctgtagctaaatagattttgccttaaaaacagaacaaaaaatgatctaccttagagttagctttctatcaataatttcttaaacagacacttaactgtgaagtctgatctcagcagattatcactgttcagtctcatgtcttctggataaagagaaatagaagtgataatcctcccctgactcagtcctatggaaggcactgggaaatatctgttgataaaatgaaaactaaagtacagagagcttagatggagactcattcttgtcttgttttcccactttggtgaattgcagacatagtgggagagggctcagttgcatatcagagggggaggggatgctgggatgagaatgcaggctgtctttgacctttacctgtaatagtttgttctcttatgtagtctacatatatcctattaaaagcagtgctctgacatttgctgcaaaaacttgaatgcagaagaaactaccaactttctcctaaagcaaattataattcctcgtgtctagtagatattgcaattttccattctaaaattttactccagtgtgactgtaattttcatattcacaaagtatcacttcgtgactaatacctaaagaaaatatgtttacatgagtaaaactaattcatgttctcatggtattaccttctcatcaaaacttacaaagtggccgggcgcggtggctcacgcctgtaatcccagcactttgggaggctgaggcgggcggatcacgaggtcaggagatcgagaccatcccggctaaaacggtgaaaccccgtctctactaaaaatacaaaaaaattagccgggcgtaatggcgggcgcctgtagtcccagctacttgggaggctgaggcaggagaatggcgtgaacccgggaggcggagcttgcagtgagcagagatcccgccactgcactccagcctgggtgacagagcgagactccgtctcaaaaaaaaaaaaaa

SEQ ID NO: 132701 - DNA, 1088 bp, Homo sapiens
cagatttgttctttttgcctagtcttgctttggctatgtggacttcttcagaaagctcccagaattgataacagaattcagcaaagtttctggacacaaaattaatgtacccacatcagtagctcttctatataccaacagtgaccaagctgagaatcaaatcaagaaccccaccccttttttttacaatagctgcaaaaaaaaataataagatacttaggaatatacctaaccaaggaggtgaaagacctctgcaaggaaaactacaaaacactgctgaaagaaatcatagatgacacaaatggaaacacatcccatgctcatagatgggtagaatcaatattgtgataattaccatagtgtcaaaagcagtctacacattcagtgcagttctcatcaaaatactaccatcattctacacagaactagataaaacaatcttaaaattcatatggagaaatatttgtagaatgtgattttgaattcctttgcagagagttttcagtaataattaatcaaaaaacttattattaaagctttcttgttctgaaaaccaggtttcagcaatagacaaattatttaaattcaaagcaacaactatcatcttgcagcttacaccttatattactaagaccttagttttgacttacgtttatcatacaaggcacatgtatggggacatggatgcatgacttaatctttttttaaagtatttatttttatttatgtatttatttagacataatctcactcttattgcctaggctggagtgcaatggtggaatcttggctcactgcaacctccgcctcccgagttcaagtgattctcctgcctcagcctcccaaattgctggcattacaggcatacatcaccacgcccagctaattttgtatttttagtagagatggggtttcaccaattggtcaggctggtctcaaactcctgacctcatgtgatccacctgcttctgcctcccaaagtgctgggattacaggcgtgagccaccctgcccagccgacttaatctttttaaagatttgttgaggccatttgaatttgattgggctaagagggcctttgaccgatga

SEQ ID NO: 132702 - DNA, 1044 bp, Homo sapiens
atcactctgttgctcaggctggagtgcagtgataccacaatcatggcttactgcaagttcgacctcctgggctcaagcaatcctcctgcctcagcctcaagtagctggtactacaggcatatgcaaccatgcttgactaatttttttattttttgtagagacagggtcttactgtgttgcctaggccggtgttgaactcctggcctcgagtaatcctcccaaccctggcctcccaaagtaatgggattacagatgtgagccactgcacccagcatagttctctttttggcttcaggttcaactgatacttactgagcagctgcatactgagctaggcattttcacatctgtttctcatggagttacatccatgtcacaacctaaacatgatactgaagtaggaatcatcatcactttggtttacagataaagaatgtgagtctcagataggaggcttgtttcagggtcatatgcttaataagtggcagagccaagagagaaacctgggacatctgacttcaaagccatttttctttcttacataacacagtatggataacacatttcaatagaaggaaagcagtttgatgctggacagtatactgtgtatttattttttttctgacatgcaagtgtcacccacacttttttttttaatattttaattcttccttctgctttttaactagacccagacctgaaagcctgactcatgatttaaagtattcccttatctaatgagatttcaggagtctagggcaagcctccctcaagtgaaacagtggaagtcttactagaaggtagttagtagatgcgggagtgtactccctcaaatgatagaattcacccagagcaaattcaccatgcttcccgatttaatggacatctccctgctgaaagaacccgcacacctggccaggctggtgttcgtgagcctatcactaagattttactgccatctagtggtagctcattgtgccattgtgatcctcacagccgtaactgtagtcatgcagtcatcaatgacccaagctttggttaatt

SEQ ID NO: 132703 - DNA, 1057 bp, Homo sapiens
aactcatggctcggaaagattacatgagttacatacagagttaatttggtgacaaatctagaaactaggaaccaggtccttaaagcttggaacagatttattttactagatgtaatggtagtttgtatagtattcatgtttcattaaaagtctcttcatatatggctggagtttttctggcctccgattttgaaaaaataatggggtagtacatttaaaggtgtgtaccttcttagccttggaattgaaattctaggccttaatatgacaaggccttttctatttctagctttttggtaaaagcagtaaaagatatttgcagtcccgacatgcttaatgtgcatttgtacttggagattttctggggaaggcatgaccgttaatacatctgctccttgctctttatagaattttgacccactggctatcttggacccaggccagagaggttcaggtaccaatgattccttattaaaacttagttttacttacccactgacaagtagtctacagatggcattaacgtaaatgtgggcctctgaaattaccattttcctttctttcagtcattctgtagctatggaaataggacaactggtccacagccttggcaatgtagtgaactttagacagctaaagttaccatattaaaatggaaaaaagaagaaaacttagtcataccggaagccctgggtaatactagttttgaagggcagggatctcacagtgtcctggtaagataggatatttatggcaggcttttatttttttatgtaggcttttaattgccatattatggggtacttggtctggcctacatatactcaaatcaggtactagtgaatcatcttatacccaggttcttctgaacaaaatgattgtgtatctggaaaagtacagctacttgttcctgatggaattttccaattgagtcatttattgcagtaaaaaccatctcatgaaacaattatgggaaactggaaggaaaagaatttaggagaaactcaggattcaactagcataaatgtcactgcttcaccattccagctcagcaacc

SEQ ID NO: 132704 - DNA, 1069 bp, Homo sapiens
accattttagatttgcttacatagcttaagtgattacttcaaggccagtcacttaatctaatagaattagttgcagccacaaagtgttgtgctgagattaatggcataaacatctccactttgtctctaggttgatatggcagcatgagatcattatctttccttcattagtcctgccaagttcactggttaatttgatcattttctgtctccacagttcctactgactatagctacttgcctgaaagcagttttattggagcagctattggcttcttcattacaggaggaaaaaaaggcaagtgagcacatttcttgaattttatcattctatctccatgttgttataagtaaatttgtgtaccctaagcatgcctctgtagaatcaagcaatataaatctgaaggggtgaatattttcgtctgctaaaccatctttgcaatagagatgaccagcagctagctacaataattggtacgtaaatatacacattgtgtggtttcttagaatcactgtctccgaccatgggtggctctgtgaaaatcttaatctcccatttggccctttccaaagtataagcacagattacttttcctatccatttcaagtgagtgtgatctagaaagagaaaatacacctgggtgcagtttctatcccgggatctgtcttgcaagtagatcttctccctgcatcttttataatcattctgtgttgttgaaatcactggctctagttcctatttttagtttgtgttcttttccttgcacacatttgagcctttgtgattctgtattgctgccacccccattaaagtacaagcaacttgaagacagagattgagtgccttttgtttttaactggagccagaacagtgccatgtaacttattgaataaatgctccttaataatacacatatagttttcagggctgtgaggaaaaaatggattagaactgaacatgtcatggctcaggaatcagcttcgttaccgtgatattctttcattgatgggtttgctaattttattcttccttggctaggtcagtcttccttggttaggtcagtctggg

SEQ ID NO: 132705 - DNA, 1490 bp, Homo sapiens
ttctctccctctctctctctgtgttagtgtagactcgtaaattcctatgttatttaactattcagttatctattattttgatctttaacttgtccaataaattgaacaaaatattaaatttgaccaataagaacctctacaagttggctcttgtgtccttttgacatgaccccctcattctttgactgcttcctttgtggcacaagaagatgtcctaggtttattttgtactatccccagccctgtaatagatactccaggtttcttttagtggagcatggtatttagaagctaacatctgtgtgcaaagcatctcattgctgctggggtaatctttgtctctaggccgtttcagtggacagagctgggaaacatatgttcttgttctctctcatgtatttttatttctgtatttagctatatatgtaataaaaagggttcaatctgtctttctttttgtatttgtaactcccttctctgacagtaagaaacttgactctcattatcctcaatatatttactcatttgcccaatcctcctggatgtaagtaatctcctgtccctgctggaccacggtcctaaactgccttcctcactcaggtctccactgggtgccatcctactttgtggccttcctgattttaagaggccttgggatatttttgcttttaataacaaaatgttattgaaatattcggtcttaacatagaaaacctatcaacctttagtgtctgtctgatgtatcagaatcatcaatttattttaaaaactgtcttgattgtagtttctttcagggggctaggcatctcctagttcccactaataggcaatgctgtaattctctctgcctgtgttttctatggacttagtgtagaaaaaaatcgtactcatccttttcatcttgatttaaatattctttccttggtgggggaagataggggcttccgtgatgttcccagattaagttagattacttatgtgatactttcctatatattttcatggtgcgtaatatatgtgtcatcattttcataattatttatacttctttgtttaaactctgtcttttccactaggtgtgatttcctcaatggacaggaagaatagctgtgttttatcgtaaatacttagaacagattggcatgtaatagttttctaatatttgtttatctataactttaaacatacacatatataatatatatatacacacacacatacatacatacatacatacatacatacatacatacactagataattctaagctaagttacctataagcagcatttagctggagaaagtaaagatatgtccaaaccacaaaagcaatatgctagcgatggaaaatatacagactcaggctgttagtctacttgttgccagacttttactctaaggattacacatgtgaattgtggcattgagatctgatcctctgtgtagccaaagtatgtgcgataatgggtcctgttgtaatgcattatgt

SEQ ID NO: 132706 - DNA, 1050 bp, Homo sapiens
gccacaaaaagataaatatcacatatgtggaagctaaaaaagttgatctcatatgcaatgccaaagaaagttgatcttatatagaggtagagagtatagaatagtggttactagaggttaggaagagaaggaggatggggcaataatgagggattggttaaaggaaacaaaatgaggaataagttcaaatacggggaataagttctggtgttctaaagcactgtagggtagtgactatagttaacagtaattgttatttccaaatagctagataaaaagattttgaatgtttcagcataaagaaatgataaatattggagatgatggatatgttatttatcctgatgtgttcattgcacatatgtatggaaatatcactctataccccataaatatatacagttattatatattattgaaaaatttataaaaattttttaaaaagagaagaacagagggagcaagcttttctggcaaatggagttgaaattaagagcacagaattgaagcgttgatcgcaattgaatatgtgatatcagatcctttgatgctagaaggaaagaaggaattgttggcattttccacttccatgatagtatgcaggtgttttactattatttttcactgtctgttataggtcctgaatctgtgcctccttcccttcttaaagtagtgatgaaacccatagcaactgttggagaaagctaccaatatcctcctgtgaactgggctgcacttctctctccacttatgaggctaaattttggtaaatatcatgtgtttttaagtcttcagactttgattttagtatttgacctgaatggaaaaacagattctgtgtcacaatgtgtagtgactggatagacttttcagatcttgaggtttgtcatgttggatggaatggctgggttactttcactcagtcattgagcccctgagggtgaggaagaagaggtctaaagacacaggccagatacacctgccaaaaacaatgcttgactgaggtttgcgcactgctgggaatgtggtacaggttccattaagcttgcc

SEQ ID NO: 132707 - DNA, 1982 bp, Homo sapiens
cccagctgcctgccacttactgagcccttgctgtgcacctggtacctgcaagcactcagtgagtacttacagaaatcagacttaatttctctacagcctgacgggacagttttaaaagtagctttgttgagttataatctatatagcctaaaatatggctgttttaaagtgtaaaatgtgatgaatttgagtacctttacaggtttttcaatcatcaccaagaatatttccatcacctgacaagttccattgtgcttgcttgtagtcattccccactcccagcttcagacccaagccaccaccaatctgctttctatttgtagtattgcctttctaaaataacctttatttatataattttatataaattatatataaatttcatataaatttttgaaattctttagaatggaattatacaatatgaatttttttatgtctgtcttgtttcatgtctgagagatacattttattatttccattttaacagaattataaactgaggcaaatggaggtcaagcaaagtttgcctagctaataaaagagagagctctatctatctgagttcaaagccctgttctattcactccttcttacttttgaatcagacctatttccagcctgttgggttggccttcgaaattttcctaaattttacttatcctttcatttatcttttagatctgtgctactctgtgcatttgtctttgattatttatctttattgttatcttggttaataaattaagtttgtgagttcattttcttaaatatagaatgatctgagatggcatattctttaaaatgaggtcttgagaaaactcatgcaactacactgatctttttagaaatttgcagaaaacattgttcctctgtccctcccctatttttgtgtgctatcttgaaaaaacaaaaatagcacacaaaaaagtttttgccagattttactttttagatcacttattttgccagattttatttttagatcacttattttagacttgctgcccctttagtagcatgtttatgttcctaagaatttttgaagcccacttggttgaagtctgtcatataacagagctgttactaacatgccctttcttggctctcatgaactctaaggtgcctggtcagttctacgtgctcagctggtggttttactttggtcataaatggtcccagcatgtcacttctccttattacttccttattttttctcagaagaagaaattaatagtatcagatgctctgtttagttgattttcagcagttgagcctttcatcttccagagcttttcttgccagagaatgtgaccttttaaaactgaaaagtaactgtcatgtactttcagaagtagcattttattcccgtcactgaaaccttgaaaacatccaaggtttaagctgagtagttcacagatgggttggcagatcccatataaacacatgattcaccctggatcagaagtaactgcagaagccaaaattacatgcattggtggcccattggaccgtgaagctgtgggaaaatgaagggggaaggaagtaacctgaaccttttatctctcagtctaccctcaaacacagtgatgatgtacaggttttgaacattgcaaacccagacttgcctatttacattcaaccccttctgttttacttccagctgaataccaagagatatctcctgatatctgcacctctgtggataaaacacatctctgatgaacagatcctgggttttgttgaaaatttaatggtggcagtttttaaagcagcttccccacttggaagtcctgagctatgcccaagtgctttacacggtctgagccaggccatgaaactgcccagccctgcccaccacctctggagtctgctctctgaagctactgggaaaatttttgacctcctgccaaataagattcgggtgaggaacaaaaatatttacattcctgacaatttatgtttgggatattttaaaggct

SEQ ID NO: 132708 - DNA, 1045 bp, Homo sapiens
agaccatcctggccatcatggtaaaaccctgtctctactaagaaaaaaatacaaaaattagctgggtgtggtggtgtacgcctatagtccccgctgctctggaggctgaggcaggagaatcacttgaacccaggaggcagaggttgcagtgagccgagattgcgctactgcactccagcctggtgacagagcaagactccatctaaaaaaaaaaaaactcctgtatcagctctcaaggtattcagcagggaagtaggtttgactttgccaggtcatttaactaaatgggagctgtatccaactttaccatatcttatgcttggtccctgtctcatctcctccacctggggaaggtattgcctaagaactgtaatcccagctactggggaggctgaggcaggaaaatcacctcatatatataggtccaagggaataactgttcttttgctgatggtaggattctcttctttgacactatttttcatttttaccctagttcattgactggctattcagcatcatggaaagccctaaagaagccctctcagcacagtccagggatcttttgaaaggtattacttccatgttttatgctcaacataggggaaaaaccattattgttgtctgtggagcagaatggcattctagtggttgcaggttgagtatctcttacccgaaatgcttgggaccagaggtgttttggattttggatgtttttggatttgggtatatttgaacatacataaggagatgctttggggatggaacccaagtctaaacacaaagtttatttatgtttcatacataccttacatacatggccggaaggtaattttatataatatttttagtaattttgtacatgaatcaaggtacttggtgttaagtacttatgtgtggaattttctacttgtgttgtcatattgaggctcaaaaagtttcagattttggaggattttggatttttagattagggatgctcagcctatattggtttctgaaagagataatctggagctgtttagtgtggcattttgaaccagaa

SEQ ID NO: 132709 - DNA, 1047 bp, Homo sapiens
tatgtgtacaatgtggaatgattaaatcaagctaattaacatatctaccacctcgcttacttttcgtggtgagatttgaaatgtactcttggctattttgaaatatacattattaagcacagtcaccctgctgtgcactagatctcaaaaatgtattcctcctaacaaactttgtaccctttgaccaacagctcccaatttcctttctatattctctacagtactatgatttaacaaagataatgtatttgatatttcaatgagaggttacttgattcttaaagaatggacaatcaggttcttactgttttcaagacaattattctttagatccacttggcatagtctattccaaaattaataattcttccttttgaatcaaaacaaatttagaaattctaacatgatttacagtaacaagctctttttatctgctcatcagtagatagaaaatatgtgtttttgttttataactggcttttatatactttggttattgttaatgtcgtcatcattttatgttaaacaccatgtccttatgtttttcccttagttaccttaacatgctttcttattttatgtcttcagttttgaaaactttaatcatgtcttacagaatgctccttaccagtctaccaaatccattgcagaagaaagcatatattctccaaatatcctcaagctctgctgactgatgatctgaatgatttgatcttaagttttaggtttatatttaggctatataattagcctactcatactcaataattcattctgtgttcattgagcatgtatactggtgcataaaagagaggaaggaagcaaagaaacagactcagacatcctggtaccccccccccccccagagcttacagtctagtcaaggaaatggacattaatcaaagaatcatacaaatgtgtaattatgctgatataagccctgttaagacagcagtccccaacctttttggcaccagttactggttttgtggaagacagtttttccacagaccagaggaagaaggatggtttcaggatggttcaagc

SEQ ID NO: 132710 - DNA, 1034 bp, Homo sapiens
attttaatggaaagtcagattatttagtctagcaatgcaaataagcacctgcttcatggctaaaaataaattagggtaaaatctggctttttgcctaaaaggcaaaaaggaattcctttgggaattccttcatatttgttctcttaagagtatgtgactgtgaaatctttagagggatttttgacaaacagatccctgcttgccctgatcagaaatagaagtgttactggcaaatacagaaacagtttatgtgatttgggctcataaatggaatctccgtaagcacaatcatttaggagtattagtttttagtgttttggttgagaaattttaaaaattgagtaaaaatgtgtaaaattaatagtgcaggagtgtttattatgacacagagggaaggatgtataattgaatcattttaattcaattacaaatgaaatattggcatttaaagcatttctcaaaaagtgatggagtaatctattaagggtttcctataggggatatcagtctaatgttatgacacaaaggttagtgttggctattttcccctcttcttgagttgaaacatcctaaagcagcatgaataaaaatctcctcctcaggcttctgtacaagcaaactgaacaaagccccttaaaatcaacatttcaggcttgatagtgtttctgtactataaaagtcaagttgttttgattaaatttactgaaatcaactagttttccaattcaacatttttttctaagctaataaagtttgcaagctcatttcggaggaggggattggagaggagaaatacctagttttgatttatattatcatttcttttatgcttcttttggaccattttaacttttccattttgaaaagtaaaagtatcaaagtttactatattttcttatatgatttttattgtcgtgtaattatttcaaaaattggaagtccataaatagctacgctatggttttgcccttttccccaaagcgtataaaaaaataaaatatatgtcagtcaaatgattattgtcttttagtcaa

SEQ ID NO: 132711 - DNA, 1001 bp, Homo sapiens
ttggggtgcttgccctggtgctgttccagtccatgtgcatcctgagctgtgtgatctgcctcgaggctatgatctgagcaagcaggagataacattttcttctgcatcaagtgaggaaaaatgtgcttttggccatgtctcaaagacaggaccaacttcagattcccaaagaagccagctacagagcctctggaacactatggtcttacaagcagtactaaaatcaaccctcagcctcttcaatgccaaaggtatccctattggttgagaaccacatggtaatttttaatgggacttttatcagcaaatggagttacaggaattctctgtaatgagtgattctgaagaggtactttcctggaataattgtctacctgaagaaaaaaaatttatatatacattgtgtgtgtgtgtaatacacacacacaaccccctatacctggaagattgtcagcatgtaaatcaggaacaactttctccttattgacaatcccataataaaactcaggaaccaaggcaaaatgaattggcttctaggggtctgaaccttactgcccatacaagtgttgattcattttaatgctgtttatgatttctgcattggcagaaattttcatactttctatgtttttttaattactcagttttttattactaaaaatagcacatttgagtacatttgaaaagtagaaaaattagaaattattaactttattgaataagcaagaagtgcatcctaatcctttgattattaatgaggttgaatatttgtgtgctatcggtagctgtgtttctttgatcagatgttcctgtccttttgcccttctgttatctgttggagttgctttgtttttcgtatcaagttataggatctctttatataataaatgtaatttaacttgcatttgcttgcatttatttcttccctcaatctgttgtagttttacaaaggcaacgctgttcagttaatttttgagatcaaatttgtctttttttttttt

SEQ ID NO: 132712 - DNA, 1260 bp, Homo sapiens
tgcagccttgtaaggcaggaaccacacgcttttttaccagcaatactcacagttcggtggtattgcaaggctttgatcagcttagaatagaaggattgctttgtgatgtgaccctggtaccaggtgatggagatgaaatcttccctgttcacagagctatgatggcgtctgctagtgattatttcaaagccatgttcacaggtggaatgaaagaacaagatttgatgtgcattaagcttcatggggtgaacaaggttggtctgaagaaaatcattgattttatttatactgcaaaactttctcttaatatggacaatcttcaggacacacttgaagctgctagctttttacaaatattacccgttttggatttctgtaaagtatttcttatatcaggagtctctttggataactgtgttgaggttggacgaattgctaacacctacaatcttatagaagtggataaatatgttaataatttcatcctgaagaactttcctgctttattgagtactggggagtttctaaaactcccttttgaacgacttgcatttgtgctttccagtaatagtcttaagcactgtaccgaacttgaactctttaaggcagcctgtcgctggctaaggttggaagaccctcggatggattatgctgcaaagttaatgaagaatattcgatttccactgatgacaccacaggatctcatcaattacgtgcagacagtagatttcatgagaacagacaatacctgcgtgaatttgcttttggaagctagcaattaccaaatgatgccatatatgcagccagtgatgcagtcagatagaactgccattcgatctgactccactcacttggttacattaggaggagttttgaggcagcagctggttgtcagtaaagaattacggatgtatgatgaaagggcacaagaatggagatctttagccccaatggatgctccccgttaccagcatggtattgctgtcattggaaactttctttatgtagttggtggtcagagtaattatgatacaaaaggaaaaactgctgttgatacagttttcagatttgatcctcggtataataaatggatgcaggttgcatcattaaatgaaaagcgcacattctttcacttgagtgccctcaaaggacatttgtatgcagttggtgggcgcagtgcagctggtgaactggccacagtagaatgttacaacccaagaatgaatgagtggagctatgttgcaaaaatgagtgaacccc

SEQ ID NO: 132713 - DNA, 1032 bp, Homo sapiens
tgatggtgatacgcttccacagagtttttaacttcaatgctttttttctccattggctcatattataattttcaagatgttttcttttcttttctgattgccttgatactgacccaaatcctttacctctaaatattctttctctaggatttttgtcaaattgtaaatgatatatgagctcttttcggctacagactaggtcgaattatgcagaaggaattttcaagatttttaggactcttactgtgataagtctttctgtaaactaaaggatcatatcttgagctatttcttatttttgcagattttaaaaaatttgagatgtcttttcctttatgaggtagtgtagtgtagtagtaggagtgtcagaatgaaatgcacaaagatctgggtcctagtcccatttctgccattttgtaaccatgtacatgagttggggcagatcgtttaatctgttttcttatttgtaaattgggggtaatagtagaagagattatatggtgtattagaaaagagggaaaagcaaaatacagctgtgaaaactatgtaagcaaattggaagacaatttataaaaaaagttgggtttttttagtaattgtatttaaatttatttcagtgttttattgttttatgttgtttttgtctaacttaaatgtgagaaaaaaagcagagttctggatagaaggcagataacctttgttctcatccaacctgaagcacttatttgctaaataattccagtcaaaaacagaagaaacgtggtattttagttttatcttgaggaaaggtcctgcttctcttactctatctaaaagcctagaaataaaatgataattattctatgactcatatacttgctttttatgttattggcttattatgagactcaaatcaggtaaggtatataaaactgctttgagaatggtaagaagctgtacaaataaaagttctaagatatggcttataaattcttttcaaccctccgtttttcctttcactcctacaaaagtttgcttttgaaatgattaaaa

SEQ ID NO: 132714 - DNA, 1084 bp, Homo sapiens
tttctttagttagagacaagggattttatgtgaaatgtgtggaaattctatgccagaacgatagtacatgtagaattctttgtaaagatagaaatcttgagagaccaaggagttaattgtcaaggatctcaagttcttctcctggttagttcacattcctcatcttcctttgtttctggagttactcattatctgtagatctcttttaaaagtggtttttacacattcactttaaagagtaagaatgttcagtaaatacaattgtattttaatgtttaataaatactaatgtttaataaatactgtttgatgtttcatgtttttaagcattgaagttttaataaaaagctttgcttttaataaataaaatttcatgttaattttaatgcttttccaagaaataaagtagcagtcactattctcgattgtcattatttattattactcagggtattaaaacatacagaaagatcacattataccttcatttcatgcctcttggagtatattaaactaagctgctaatttaacaaaaatgtgtagcacaaaagtgaggtagttttagtctacaacttttataagcatctctttatataaggataatttgtttaaagacatcattgtacaagctgatcttgcctatgaaggcttttaagaactcacaaaacagctttagctgaaaattagattcacagtgccttatccattcgttatattaatggtaatttgttgcagggtcaattggccaggacatacagtttattacaagaactggtttatttattttacctataacttagttttaaaaacttgtttcatcagtttatttgggcttcttttgccttttgcagagttccatgtaccctcatctacatcagttacagacatatccagtgcccccttgacctcaatgtagttgatgagctgggttccatgtgtggaaatgaacattgcttgccaagcgccatcctccatagctgaaacgtgttttactctaattactaaacacctgaagcttcttttttgattcgaagtgaacaatgtttgtggggagaaacccaaacccctaaaacttcagatttag

SEQ ID NO: 132715 - DNA, 1021 bp, Homo sapiens
agtccgccagggtaggtagcatataggggagtgtggctcaagaatctaagtttttcacttattttgaattattaagagtttgcgttatagttctcttttttgttttacttctatagagtgcttctacaatttggaagaggggaaaagtacaataaaatggcaaatattaaagtgaccaagaaggcatagcattggttacagaaaagttctttcacttctccttaggtaattctgtgttggattttcttctttgtattttaaatctaggttctttgcttagaggtaattttgattctgaggagggtagcaggaaaggaaaatgaactgcatctaaaaaccagtgtaatccgacaactgacgtcttatttctgccaaatttcaggtggacttgggccacgttagtaaattggatatgtataaaataagataaagaaatcatctcagaaagtcctgctctagaagcttctagtatgtgaggtgagactattttagagtccaaggtttgaatacaagcaaaggattgatttccccaaaagtcaaactggtacgatcttactatctaaaataacttgagatttttgagttatagcacatgttgaagtagaaattccagtcataaagtcattattgaatgattatcctggggagttttgcctcactgatcaaaccttttactgattatctcaacttcattaactaaataaaaaatttcatataagaagcagtggactaaagcactaaaagtgtgagttctctgaagtaaaatccacataaagtaaatgaagccttaaaaattaggatttaagtagcttttaactagagtggtttttgaagtaaaaactggtaatattgtcacttgacattttcttttcatattctgtgccgtgactcaaaactcatttcctttttataggtgagaatggaagtagataaaatttgaaaacaaatacacaaaccccagcttttttgcagctggactttaataattttataacatggctgcatgtttcctagcacgtta

SEQ ID NO: 132716 - DNA, 1036 bp, Homo sapiens
ataaattctgaaaagtgtataacagagacaaagtgtttaacctataatgtggattgttggccctttttggaattttaaacgagaagggaggtatgaaatgctttattctatatttaagcatctttttagaagtggaaataaattggaggatcacttttatgtacagtgtaatggctagatagctattctagaaactacaacaaatgcttgaggaagtaaaattagaaggtagtataaaattgtgtattatatttttacaatttcaaggagattgcatacttataaatttcatatcctcaagtgaagagtgttgaactgaataaaatagaatttttctacataccatgtttttctcagattaaaaaaaatagtcatcttggtttgcctaaaaaactaagctgtagttaaatttggttggtacgtatttgggataattaaaaatactttaattcatgtactttaacagttcttttcttcagtaacaggtttttataagaaatgttttacttgaaacattgacatttaatgacagatgtcattatatttttcatataattgccacagtttttcttcattgtgtgtatctaggtagctttggcatataaacatcgggggggctctaaacaaattttaactgtaaaaaagcaagagatgcaatcccagattattaacatttgaggaatgaaatccagctttaagataaaatggctttttgaagacactttaaaatacatataatgataggattcttagagagtaatgtttttggtagttcttttaatcataaaatgaattaacaaaagaattgatgcttaagtttgaacagcttcttggtttcacaactatttccttagaaataatctcccaagtgattcagaaatttttatggaagtgaggaaaaaaaacagcaacttttgttggatctagggtaggtcaatcttaactaagaaacagcgaaatttgatctttgtgttataaactgtagtttcactgaggacttcttaactatgtcatctttttaaatacaattaagtgt

SEQ ID NO: 132717 - DNA, 1128 bp, Homo sapiens
tagaggctttagaaaatttacggatgaaacagactcatgggtatgtggctcaggggaaataagatatatatacaaataaacaaaatactattgtatgatccaggcaaagatggaattatgtgagttcaaaggaagaataaattctttccagaaaagagaatcagggaagatatctttgtggaaaagggagaatttgagtgtagcattgtgacttggatataatttagacatgttattttattgaaaatgattggatgttcctcaatatccatgcctggaggcagggtccaccttccccggggggaacagcatctttccctacaagtcccttcaagcaccaacttttctgtgtcttttcatcttctggatggactacttacctctgaaatatcttaaaatctaacattcagtccactcaacataatctccaattcatctagggagcttctgctttcatcttcatctttgctttgctgtcattagtatttatagtccttaattgaacaactttggagctgaaagacctgaagtcaagtccaagctctactacctagtagctaaaaaagctgctaagttgcttattcatcctaactctcagcgtcctcattttcaaagtggtatatattaccgatagttcccatctcacaggatggttgaaagtattcaattaggtaacgtacaaaaagatggtagcactctgcctggcttaaataaaagcacaataaatattaacttctgtgttgtatatctcgttattactatttacaagtccattcttgtcgtattttctttcttactcacactgaactatatgattgatcattttcaagtctcttttattagaactatcaaatctcatcctcttgtccttctgacacacaccgtgtaaacatccagacttggatcaatcaaatggctcattcttttctgttcctactcacagcctgctgagtgctgctggatgaaatcacccaatagtgggtttattgcgtttacaatgttatagccttccactatcctgtggcacttaatgccgcaggtcaattctgtgacgtatctctggccaattcttctcctacttaactactaaaagcctttcctattcctttcaagaatgactgaacttgt

SEQ ID NO: 132718 - DNA, 1052 bp, Homo sapiens
ccttggtgaggattctccctcccgcgagaacttctggaatgccgccgggccagattttgcagctgaggcctccgacgccactaatattgggccaagcagggagtgctgctcttccttataaggttttagcgaaagttaagtaagccaattaaagtgcaaaacacacagtctggaacaatacagcgctctataaatggtctccattattatcattatccgttagttataactggggataaaaaaaaaaaaaaaacgacaaaaacctggagaaccggaaaggtctgcaaaaggggcggaacgcgggaacttcgatttggggaaggggtggcgggggagatcccacacaagcagccaatccagctgtcccggggaggaagaggaggagtcaaggcccgcccctggtctccgcactgctcactcccgcgcagtgaggttggcacagccaccgctctgtggctcgcttggttcccttagtcccgagcgctcgcccactgcagattcctttcccgtgcagacatggcctctggcaccaccaccaccgccgtgaaggtgagatgagccctcccagccgcagcggttcgccctgccggatgccttctcgcccccgcgccgggggaccgcgcctccgggggccatgcgcccggcccgtgcgtcccttgccgccgcggggagggactggggcgcggcactcgggactcacttgccgcgcgaggagagggtacgcttgcaaatgatccccctgccgcaccgccaacacacacacacacacacacacacacacacacacacacacacacacacacaccaccttttggcttatctgcacccgcaccctgtagggcgtaggcacccctttagagagagaggtcgtggatgggagaggctgcacccatgccaccaccattcctgagaaccactcttcttccaagaaagacacccggctggagtcaggaggtgtccgggcgcctgcagcttctgtgaccgtctcctggtgccttgcgggactccagcttccgctctctgactctgcttgttgcctgcggcccacgtgg

SEQ ID NO: 132719 - DNA, 1118 bp, Homo sapiens
ctgggaggcggagcttgcagtgagccgagatcgcaccactgcactccagcctgggcgacagagtgagactccgtctcaaaaaaaaaaaaaagaaagaaatttatggtctaggccctagagcaggttgcttagttctgagggcactttagaaccacctgcggagctttaaaaacaaactacgccttgcccaactaatcagaatccctgaggcctgggctttggtattgaaagctagagaaggggaatgtcctagtatccagcagctggttcaggagggtgggtggctcccactgttgctccacaggcaaaggagagctctaacaaagtatgcattagggagagtcctcctctaaaaatatctggccatttcagcaggtgaagtgtgtctttaagagggtgtctgccctttagactgatatctgtacttctcaaggggcatttgctcaaataaaaaccatggatgttttgagcgcttgcatcatccaagcttctctgactaaaatatagagtcactgtattagttcgctaggcctgctataacaaagcactacagaatgggtagcttatgcaacagaagcattatctcctcacagcgctggaggttagaagtccaagatcaaggtgagatcaaggtggatttcttgtaaggtcagtctgcttggcttgtacatggcaatgttctccatttgtcttcacagggtcttccctctgtatgtggttatatcccaatctcttgtaaggacaacagttttcttagtctgttttctgttgctataacagaatacctgagacagggtaatttataaagagaagaggtttatttaaaagaaatgaaagggagacgagggagataggaaaaggaaacaaaaaagagacaaactttgcttcataacaacccactctcactggaactaatccaacccaatgagagcaagaacaccctcccctgggactgcatgaatcccttaattggggtggattattaccatggctcatgactcaaactcctcttaaaggtactacctcccagcatcactatatttggggaccaagcctcaacatgagttttgaagatgaccacattcaaaccataacatgaggtatactgcattagggcc

SEQ ID NO: 132720 - DNA, 1009 bp, Homo sapiens
gaaatcaataccaaatggaatacctaatattttatatcccagcagtcttctgaacattgtttattctatagtccatttgacagagaaacaaaattgatcagaaggtactttccactaccatacttgcctacttttaggtttgattttctaccttgagttggttaaaatacctctctatgctgacttgtaattcagacagtcagaagtaaatgtgatgtagtccaaaaaggtgccctacgttttggttacttatagaatatagaaggccttcaaatgtttgttgatttttatggaaggctttgaaatatttgttgattgatgttcagtaattttcagatttcaaaaaaataactagggcttggcaggaatggagaagagcatatgaataaatgaatttgcttagaatcttatttctaataaaaattaccaaatacaataatcttctctgtctttttctctcttagattggaataattggtggaacaggcctggatgatccagaaattttagaaggaagaactgaaaaatatgtggatactccatttggcaaggttaatatccaacttgtggagacatgttttttagttttttcatttctccttgctggcttgatttttgaattaaaaaaaaaaaaaagaattgcttttgttttggcagcccagggctgtctgctcccagcagagagggccagaagttctgctgttgggttccatcagctgagaaggtgtctgatgggcgcctcacactttgatgttttgagaaaatggctacttagtatgtaaatcacttctcattctgttgctggaaatcagatactcatttcagaccacagactcatttcagactgtacttttcaaatctacattcaaatcttctaatttgtggccaataggtcacaccacactaattaggggacaggctgatgactaataggatgaattattgttacgaagcggcatttgagtggaaagaattgttttggggaattagaacatacctgatgttagtt

SEQ ID NO: 132721 - DNA, 7207 bp, Homo sapiens
gcctcccaaagcgcaaagtgctgggattacaggcgtgagccactgcacccagcctgtgttaagcttttcattgtgagtttttgttttttaattttaattgacaaatgataaatgtatatatgaggtataacattatattttgatatatgtatgcattgtacaatgattagcaaagctaattaacatattaccccacatatcatctttagtggtgagaacatttgatttttactttaacaattttgaaatacataatacgttgtcattagctataatcaccatgcagtataatctcaaaaacttattcctcctgtctaactgaaattttgtgctttgatcaacgtctccccaaaccccagcccctggtaacctttctactctttacttctatgagtttgacttagttagattccacatataggtgagatcatgcagtatttgtctttccatggctggtttatttcacttaacataatgtccaggttcacccatgttgtggcaattgacagagttgcgttctcttttaaggctaaatggtattctgttgtgtatatataccacattttcttttttttttttttaattgtacttttaagttctagggtacatgtgcacaacgtgcaggtttgttacatatgtgtacatgtgccatgttggtgtgctgcacccattaactcgtcatttacattgggtatatctcctgatgctttccctccccactcccccaaccccacaagaggccctggtgtgtgatgttccccttcctatgtccaagtgttctcattgttcagttcccacctatgagtcagaacatgcggagtttggttttttgttcttgggatactttgctgagaatgatggtttccagcttcatccatgtccctacaaaggacaggaactaatccctttttatggctgcgtagtattccatggtgtatatgtgccacattttcttaatccagtctatcattgatggacatttgggttggttccaagtctttgctattgtgaatagtgccgcaataaacatacgtgtgcatgtgcctttatagcagcatgatttataatcctttgggtatatacccagtaatgggatggctgggtcaaatggtatttctagttctagatccatgagaaatcgccacactgtcttccacaatggttgaactagttcaccttcccaccagcagtgtaaaagtgttcctatttctccacatcctctccagcacctgttgtttcctgacattttaatgatcaccattctaactggtgtgagatggtatctcattgtggttttgatttgcatttctctgatggccagtgatgatgagcattttttcatgtgtcttttggctgcataaatgtcttctattgagaagtgtctgttcatatcttttgcccacattttgatggggttgtttgatttttttcttgtaactttgtttgagttctttgtagattctggatattagcccttagtcagatgcgtaggttgcaaaaattttctcccattctgtaggttgcctgttcactctgatggtagtttcttttgctgtgcagaagctctttagtttaattagatcccatttgtcaattttggcttttgttgccattgcttttggtgttttagtcatgaagtccttccccatgcctatgtcctgaatggtattgcctaggttttcttctagggtttttatggttttaggtctaacatttaagtctttaatctatcttgaattaatttttgtataaggtgtaaagaaaggatccagtttcagctttctacacatggctagccagttttcccagcaccatttatgaaatagggaatcctttccccatttcttgtttttgtcaggtttgtcacagatcagatgcttgtagatgtgtggtattatttctgagggctctgttctgttccattggtctatatctgttttggtaccagtaccacgctgttttggtgactgtagccttgtagtgtagtttgaagtcaggtagtgagatgcctccagctttgttcttttggcttaggattgtcttggcaatgttcatggttccatatgaactttaaagtagtttttcccaattctgtgaagaaagccattggtagcttgatggggatggcactgaatctataaattacctatggccattttcatgatattgattctacctatccatgagcatggaatgttcttccatttgtttgtatcctcttttatttcattgagcagtggtttgtagttctccttgaagaggtccttcacaacccttgtaagttggattcctaggtattttattctctttgaagcaattgtgaatgtgagttcactcaagatttggctctctgtttgtctgttattggtgtataagaatgcttgtgatttttgcacattgattttgtgtcctgagactttgctgaagttgcttttcatcttaaggagattttgggctgagacgatggggttttctaaatatacagtcatgtcatctgcaaacaaggacaatttgattactcttttcctaattgaataccctttacatctttctcctgcctgattgccctggccagaacttccagcactgtgttgaataggagtggtgagagagggcatccctgtcttgtgccagttttcaaagggaatgcttccagtttttgcccattcagtatgatattggctgtggggttgtcataaatagctcttattattttgagctacgtcccatcaatacctaacttattgagagtttttagcatgaagggctgttgaattttgtcaaaggcctattctgcatctattgagataatcatgtagtttttgtctttggttctgtttatatgctggattatgtttattgatttgcgtatgttgaaccagccttgcatcccagggatgaagcccacttgatgatggtggataagctttttgatgtgctgctggattcagtttgccagtattttattgaggatttttgcatcgatgttcatcagggatattggtctaaaattgtcttttttggttgtgtctctgccaggctttggtatcaggatgatgctggcctcataaaatgagttagggaggattccctctttttttattgattggaatagtttcagaaggaatggtaccagctcctccttgtacctctggtagaattcggctgtgaatccatctggtcctggactttttttggttggtaggctattaattattgcctcaacttcagagcctgtttgttattggtctattcagggattcaatttcttcctggtttagtcttgggagggtgtgtgtgtccaggaatttatccatttcttctagattttctagtttatttgcatagaagtgtttatagtatgctctgatggtagtttgtatttctgtgggatcggtggtgatatcccctttatcattttttattgcatctatttgattcttctctcttttcttctttattagtcttgctagtggtctatcaattttgttgatcctttcagaaaaccaactcctggattcattgattttttgatgggttttttgtgtctctatctccttcagttcttctctgatcttagttatttcttgtcttctgctagcttttgaatgtgtttgctcttgcttctctagttcttttcattgtgatgttagggtgtcaattttagatctctcttgctttctcttgtgggcatttagtgctataaatttccctctacacactgctttaaatgtgtcccagagattctggtatgttgtgtatttgttctcattggtttcaaagaacatctttatttctgccttcgttttgttatgtacccagtagtcattcaggagcaggttcttcaatttccatgtagttgagcagttttgggtgagtttcttaatcctgagttctagtttgattgcactgtggtctgagagatagtttgttataatttctgttcttttacatttgctgaggagtgctttacttccaactatgtggtcaattttggaataagtgtgatgtggtgccgagaagaatgtatattctgttgatttggggtggagagttctgtagatgtctgttaggtccgcttggtgcagagctgaattcaattcctggatatccttgttaactttctgtctcgttgatctgtctaatgttgacagtggggtgttaaagtctcccattattattgtgtgggagtctaagtctctttgtagatctctaaggacttgctttatgaatctgggctcctgtattgggtgcatatagatttaggatagttggctcttcttgttgaattgatccctttaccattatgtaatggccttctttgtctcttttgatctttgttggtttaaagtctgttttatcagagactaggattgcaacgactgcctttttttgttttccatttgcttggtagatcttcctccatccctttattttgagcctatgtgtgtctctgcacgtgagttgggtctcctgaatacagcacactgatgggtcttgactctttatccaatttgccagtctgtgtcttttaattggagcatttagcccatttacatttaaggttaatattgttatgtgtgaatttgatcctgtcactatgatgttagctggttattttggtcgttagttgatgcagtttcttcctagcatcgatggtctttatattttggcatgtttttgcagtggctggtaccagttgttcctttcctccaggagctcttttagggcaggcatggtggtgacaaaatcctcagcatttgcttgtctgtaaaggattttatttctccttctcttatgaagcttagtttggctggatatgaaattctgggttgaaaattcttttctttaagaatgttgaatattggcccccactctcttctggcttgtagagtttctgccgagagatctgcttttagtctgatgggcttcccttgtgggtaacccgacctttctctctggctgtccttaacattttttccttcatttcaactttggtgaatctgacaattatgtgtcttggagttgctcttctcgaggagtatctttgtggcgttctctgtatttcctgagtttgaatgttggcctgccttgctagattggggaagttctcctggataatatcctgcagactgttttccaacttggttccattctctctgtcactttccggtacaccaatcagatgtagatttggtcttttcacatagtcccatatttcttggaggcttcgttcatttctttttactcttttttctctaaacttctcgcttcatttcattcatctgatcttcaatcactgataccctttcttccagttgatggaatcggctactgaggcttgtgcattcgtcacgtagttctcgtactatggttttcagctccatcaggtcatttaaggacttctctacactggttattctagttagccattcgtctaatcttttttcaaggtttttagcttctttgcattgggttcgaatttccttctttagctcagagaagtttgattgtctgaagccttctctcaactcgtcagtcattctccatccagctttgttccattgctggcgaggagctgtgttcctttggagggggagaggtgctctgatttttagaattttcagcttttctgccctattttttccccatctttgtggttttatctacctttggtctttgatgatggtgacatacagatgtggttttggtgtggatgtcctttctgtttgttagttttccttctaacagtcaggaccctcagctgcaggtctgttggagtttgctggaggtccactccagaccctgtttgcctggatatcagcagtggaggctgcagaacggcgaatgttgctgaacagcaaatgttcctgcctgattgttcctctggaagcttcgtctcagaggggtacccagccgtgtgaggtgtcagtctgccctactggggggtgcctcacagttagcctactcggggttcagggacccacctgaggaggcagtctgtccattctcagatctcaaactctgtgctgggagaaccactactctcttcaaagctgtcagacagggacatttaagtctgcagaggtttctgctgccttttgtttggctatgccctgcccccagagttggagtctacagaggcaggcaggcctccttgagctgtggtgggctccacccagttagagcttcccagccactttgtttacctactcaagcctcagcagtggtgggcgcccatcccccagccttgccgccgccttgcagtttgatctcaggctgctgtgctagcaataagcgaggctctgtgggcgtgggaccctccgagctatgcacgggatataatctcctggtgtgccgtttgctaagacagttggaaaagcacagtattagggtggcagtgacccgattttccaggtgccgtctgtcaccccttccctttgctaggaaagggaattccttgaccccttacgcttcctaggtgaggcgatgcctcaccctgctttggctcacactcgatgggctgcacccgctctccggcacccactgtccgacaagccccagtgagatgaacccggtacctaagttggaaatacagaaatcacctgtcttctgcattgctcatgctgggagctgtagactggagctgttcctattaggccatcttggaaccgcctctcccacattttctttatctgttcatctgttgatggacgtttatgttgcttccatatcttggctattgtgaataatgctgcagggaccatggaagtgctgatgtctttcttgacgtaaaatttcatttccttatacactctgagatgggattcttggatcatgtggtagttgatattttcagttttttggggaattttagtaatggctgtattaatttatattcctaccagcagtatacaagggttctgtttttgtcacatcctcatcaacacttactttgttttgtcattttgataatggccattgtggcctggcacagtggttcacgcctgtaatcctagcactttgagaggttgaagcaagaggattgcttgagcccagaagtttgagaccagcttgggcaacatagtgagaccttgtctctgtaaaaaataaaacaaaaattagccatgtgtgttgatatacagccattgtcccagatacttaagagactgaggtgggagaatcgcttgagcctgggaggtcaagg

SEQ ID NO: 132722 - DNA, 1021 bp, Homo sapiens
cttcaccttccttcaccttccctttccccagttacttgcgtccctgttctttgtcatcctcttgtctgtagctgtccttgaagtggtgtccactattcccctggatgaggttcattcttacgttctgttccataacctagttgtgttattaacttcccatcatacatccttttattaaaaatcctacactaccagtttttgagttcctattaggtgtcacaatcagttaatcccacttacggcatacagcagtcattattccagtttatacttgaagaaacttaggcccttactatgtttctggcactgcttattatcacagctctagaagacatcttctatctaccttatccttcccttttacaaaaggtgagaaaactgaggcccaaagaggttgttgtcaccacctatgtagagtgaggatttttatttttgtgctattgtttagcatgatctcatgaaatataatagaaaataaggggaaactatggtacctgtttattgagcagccttccttgactgggatataaacatccattggttttcctcctttttcatgccaccacaagcactcaggggcactcttgataccagaacagtgggaggatcttagtgatattggtccaaattcataagttttcacttctcttttttttgagacaagatctcactctcgcccaagctggagtacagtggcgccacagctcactgcagcctttacctcccaggctcaggtgatcttgccacctcagccccccaagtagctgggactacaagggtgtgacaccatacccagctaattttttgtatgtttttgtagagacagggtttcactatgttgcctgggctgatcttgaacatctaaactcaagggttccacccaccttggcctcctaaagtgctgggattacatgtgtgagcctcacttccttctggttatagagacagaattgttccacttcttagtctgatgtttctgtcagaattttttctcatgactgcctattcacgctgctgtttg

SEQ ID NO: 132723 - DNA, 1100 bp, Homo sapiens
gtttggagtgtatcgtgggtctcactgaaactagaaaaattgtcagcacggctgcattcctttctggaggcttagggtagaatccctttccctgcctttgccactcaccttggcatatggccctcatccatcttcagagccagcaatggcaatggagtcctcacctctcatcatgctgacattgactcttctgcctccgtcttccacatgtgaggactcatgtgaagacatgccgcacacctagttaatccagaataacctttctattttaaagtcagcttgttagcaaccttaattccatttgctctcttagttcccctttgccatctaaagtaatatattcataggttctaagggttagcatgtggacatcttcggaggggccattatttgaaatctaaaatggagatgttattgcatcgcagtctattgggaggtagccactggaggtttttgcagccttgtttttatatttaagcaagggtgtatatgtgtgtcttagtctgttcaggttgatacaacggaataccatagactgggtagcttctaagcaacagaaatttctcacagtcctggaggctgggaagtccaaaaaaagttgccagcagatttggtgtctggtgagaacctactttctcacagatagcaccttcttattgtgtccttacatggtggtagaagggcgacctagctctctgggatctcttttataaggggtctgatcccaatcatgagagatctgcctaatcacctccaaaaggctccatctcctaataccatcacatcttgtgagtttggatttcagcataggaattttgggaggacacaaaacttcagaccatagcagtagggatgttgctaatacctcacgaagaaagaacttaaagaagctgagtaatttgcccaagaccacacaaaaattcattcgaatccagggacaaaactatatttcctgtgttttctccatgtcactcagaaaattcagcatgagggagaaatatgattcttaatatagaatcatatttctatattgaaatatgatttcaatatagctgttttggctagaacttggaagtgaacaggcaggcttaattgggcaa

SEQ ID NO: 132724 - DNA, 1038 bp, Homo sapiens
agctaatgccactgtttagtgtgtgatgaactagaagtaacaggttaattttggccagtagacttgccagctgtgtaaacggaaccagtgaaactatttctcagtgctgcctcccacccctggaagaggacatcatgttatctacctgcccctgttggcttcccttgacccatctctcccatgctgtcccctcctccctgtgttactcatcagttcaaatttagaataattgaatgcacagagaaagtggcttgttctgaaaacttctgacaagaaatttccaggtgacttggtgctagattaattttagcctctcttatggattcaaaactgttttgtcagaagacttgaactaagacactttagaattaattacggctgggaaaaagaacaatctaaatgaggcagcgaacaaagattcctaaatatggagcaagacaagtggctctttatttcagtgggtcactggcatgaaaaaatatagttggggttacaggcaggaattactcttagagacatgggaattaaatgcaaggtaagtaccttgtttggaccctgaaactaacaaagcaactgtttaaaaacaaatttttttaagacattggggaaatttgcatctgctctgagtcaaagcctgggatttgtgtttgtgaaaaagctaatagaggaagcaagttggacacaatttaagaaattgttgaatctgggtgatgtgtatatggtgttaagtatatgattttccacgtctgtgatgatgaaacatttttgtattgacttcttaagtgtcttacctggcctttctgagcccacagttgagttgcacctgcaatccaaagtggttaccccgtcacggctgccagaccacagacactttaattcttgttgtgcggtgtgttgctgccagcccagagccaaaaaagcggaataccaccctgaagcttttgtaaacaattgtctttagcttatccagaggaattgagtctggagtaaagacccaaatattgacctagataaagttgactcaccagccctcggagg

SEQ ID NO: 132725 - DNA, 2208 bp, Homo sapiens
tcagtgttctcctttcctggagcttctgaaattgtaaaattgtgtgattttatttgtatgcatttttaaagaggcttagtttacgtagctttcatcggattttcaaaggaggattttatatatatgtgtatatatatacacacatacatacatatacacacacacacatataaaacctaaagagagaaaatgaggaattcctgctctagacaaaactgagaatcttggtcttcatgctacagcattaaggaacaccatactaataatccctttttctggggtagtattgttagcactgaaatgtgtatcattcattccctcactaagtcatttcagaaacacttagcacctgctatacgtcaaggtctggtttgcaaagataaagagttgtgatgatgatcctatggtgtttggagatatagacacataaaaatttcaatgatttcttacagtggggtaaggataagggatagaggttgcataaacaataatccaggctgggggctggtatggcaataagtgattatcagaacaatgctctgagataagcattattaacctcactttacaggaaagggaggtgaggaaccaagagtttagagtacccgaagttccacatctggttagtgaacttgaaaattttctgtagaatttatttaaagtgtatgtttcctgcgtcctcactttgatctagaaaatcaaaatctgtttttttttttaacaaacatctcagtaattacgccaacatgtgaatatcactgcctcctttcttcctttcagaatatggcccagttttctgttttattaccaagacattaaagtagcatggctgcccaggagaaaagaagacattctaattccagtcattttgggaattcctgcttaacttgaaaaaaatatgggaaagacatgcagctttcatgcccttgcctatcaaagagtatgttgtaagaaagacaagacattgtgtgtattagagactcctgaatgatttagacaacttcaaaatacagaagaaaagcaaatgactagtaaacatgtgggaaaaaatattacattttaagggggaaaaaaaaacccaccattctcttctccccctattaaatttgcaacaataaagggtggagggtaatctctactttcctatactgccaaagaatgtgaggaagaaatgggactctttggttatttattgatgcgactgtaaattggtacagtatttctggagggcaatttggtaaaatgcatcaaaagacttaaaaatacggacgtactttgtgctgggaactctacatctagcaatttctctttaaaaccatatcagagatgcatacaaagaattatatataaagaagggtgtttaataatgatagttataataataaataattgaaacaatctgaatcccttgcaattggaggtaaattatgtcttagttataattagattgtgaatcagccaactgaaaatcctttttgcatatttcaatgtcctaaaaagacacggttgctctatatatgaagtgaaaaaaggatatggtagcattttatagtactagttttgctttaaaatgctatgtaaatatacaaaaaaactagaaagaaatatatataaccttgttattgtatttgggggagggatactgggataatttttattttctttgaatctttctgtgtcttcacatttttctacagtgaatttaatcaaatagtaaagttgttgtaaaaataaaagtggatttagaaagatccagttcttgaaaacactgtttctggtaatgaagcagaatttaagttggtaatattaaggtgaatgtcatttaagggagttacatctttattctgctaaagaagaggatcattgatttctgtacagtcagaacagtacttgggtttgcaacagctttctgagaaaagctaggtgtttaatagtttaactgaaagtttaactatttaaaagactaaatgcacattttatggtatctgatattttaaaaagtaatgtttgattctcctttttatgagttaaattattttatacgagttggtaatttttgctttttaataaagtggaagcttgcttttttaactctttttttattgttattttatagaaatgctttttgttggccgggcacagttgctcatccatgtaatcccagcactgtgggaggccgagacgggtggatcacaaggtcaggagatc

SEQ ID NO: 132726 - DNA, 1038 bp, Homo sapiens
tactaaaaatacaaaaaattagctgggcgtggtggtgggcacctgtagtcccagctactcaggaggctgaggcaggagaatggtgtgaacctgggaggtggagcttgcagtgagcagagcttgcagtgagacgagcttgtgccactgcactccagcctgggcaacagagtaagactcagtctcaaaaaaaaaaaaaagagtgaaatgctttttgtttgcttcagttttttatcatggggagatctttttcctcagaattgttttcttttcactgtaggctattacaggatacttcaggatcaagatacagaaccttttatttaaagagtttgtaaagtcaatgtgtttgtttgtgtctctgagattgacttcaagataataagctgctaattgtaaacaaaacagttaccctccagtattaatatgactcattagtgtgagccatttgggtcaagtatgattatgacccttggacttcctgatgtagtattaaatttcaactctggttatccattagcaatctgtagagaacttaatgaacctgaacccaggcttctctagctctggtaacgtgtgattgttttcactacaatatgatacatagatggtaccttacttttcctcattcttaataggtgtctaagaatgtcagggcaaaagtatgggcatttttcttgctatgttcagaaagtacagttctctccaacttgcagaggtacttttcttgattaaatagccttctctagcaacatcattttcagactaactaaatgaatgcagtatactcttttctttgttctcaatcattcactccttatgcaaagccaatataattttcctcataccttatgcttgaggatattgttgaagaacacttcctggaacacttctcacttgtgatgctgtactaattttttttttttaatttaagctagtatactaagtgaacaccatggtcagttgtgagcattttggtttccgcaaaggatggatggtgagcatcatgggaaagctgtagtttagtgacttagcccttag

SEQ ID NO: 132727 - DNA, 1034 bp, Homo sapiens
ctgccccgcgcccagacaccccgactccccttgatcccgccgcctgactcctcggcgtacgttctctctccggtctccccctccatgtcccctcctccccttttcttccacatcaccgatcctttctggactctctcccttcctcctttccagctgggagacaggaaaagcggtcctgtttgggaacagtaaaagcagggcaaggaaaggaaggagcggcagaaaggaggggtgagtcgaggacacaggggcagccggagaatgcggaggagccgggtcctgagcgcggtctaagcgaggctcggctctcgtccaggaactcggacgcgggctcgccggctctccgcgcgcgggaagtcgagcccaggacgccgccttcaggccggcgcgctgacccggtgccccgacccggagcctgcggtctgcctggatccgtcctaaacctcgcgggctggacccgcggcctgagtgggtgggtgtgtgccagaggattcgggactaggcccagctccgggaacctggaaatgtggcccgcttctcagtggcttcctgttcatgcgcttgggcctagtggcctagttgaagaagtggaaccacagcgtgagccgacagggccttacagatcagacgtcaagccccccagaccttacaggggaggaaagtgaggcctgcactggccgagccacccacttaaggcggtgcggtagcctagaggagcggcagacttctctttccccatcccccgccccatcacttgacgttgctgccggacctcggtacaaacccaagacaaaacggggccctttggaaaaagtgagatttagcgatcactcttacgtagccactctaaatatctatctagatatttacaaatgcacctccccggtaggtagatttcactcagaatttacccaacaccgtgctttgtgctggggccacatgccacctttctgtctagtatggctgctctttctccctcttcgcaaatatagctctttttccttcaggtctcttctgaagtaagtagcccttcc

SEQ ID NO: 132728 - DNA, 1076 bp, Homo sapiens
ttgaggataatctgctttttcaagtctactgacttaaatgttaatcatatctaaaaaatacctccacagcaatatttagactggtgtttgactcaaacactgggtaccacagcctagccaagttgacataccaaattaactgtcacattatcccgtcatgcctgaggggttctctgaccctcagttttctgaggatcaaatttaaattgagggatctatctttgtttattggagccatatagctcaaagtataatcattttctctccacaggaactagacctagggataagggtaattgcttatttcagaggaatgccatctgaataaaaggataattatatagtaagctctctgttcaaaaaatgtaaatattaaagtttgaacatctaaattccatcttggtttcccccactgccgctgcccaatacctgttctctttcagttgcagtatgcaggggaattctaagtttaatattagtctcagcaaaatacaatggtgaagatgactctttctagcataacaatgggtatgtggtattccaaatacttttggaatgcggagtgactattggctatgtgctcttcaaaaaattaataatgaagaactgagcatgtaatttcacttatattacttattttatcctcacagtggcctttcaaaattgggattattactcctgttttacaggtggaaagaatgaggcctagaaaggctcaaatcttgaacacttcatggccagcaagagccagggctggaatcatcaggcaggcctttgggttacaagccttgtgccttttctgttgtcccaaaggccagggtcaatagggagtgagttatctgtgggtcacttatgcagacagaatcactgaatattggaagtttttggggttctcttccactggcctaaaaacctgagttaattgagttttttttaacaggggtaaataattttctgttttagatcagcaaattcattccataggcagggataggggagaaaaatcttactgaatatcccttgtcttgttctcctcctccccaaacttaatgtcctatgacactagctttatccct

SEQ ID NO: 132729 - DNA, 2697 bp, Homo sapiens
ctcctttaaaaatccctcatttgttataccattattctaagaattcaaaagaaatgaacacttctttaaaatctatactattaacaagatcccttaatattagcttagttttagagggtgatagtgaggtgagtactgaatatgaccactagccaacggtaaagtacaaaagagttgtccgagattgtaaaagaaataaaaaatatcagtactaattaaagcaggattcgtacttaaacattgaataagtgtattttaacaatgaagataaagatgcattatttatgaagatcctttgccattcaaaaaggacctaacagttgctgcaggaatatttttgtaatctgggcactgagtatgataattaaagaatgagaaacctatagaactatatattttttctcttatgcatcactcataagacactgctaacataaaaggaactaagtactgtggttgaggaatcccgtctcattctcaattaacctctatgagaaaacaatacaacagatttcatatagtagcttagaagtttacattgattttttccatgtactatgattttgtagaattccttaaatccaatctagaatgcgtaacttatactttacttatctttatcgttgaaagcagacagacaagataatcttcttccctaaataagctttccttttctccttttctccccaattcagtctattccttgcatctctgatcatgagatggcagaacaaaaaccactaaaaaaagcttaaacagtgggtttttcaatgtctctctttaggatttttgctgggtaaaagcctgttttacgcgtggaatgcacacctccggccaacggagactcctgtacaaatctacatcggcgatctaggttccagccccgatccgccgaggccgcgccccgcgttcgcgcgccccctgccggcgaggccctggggccccagctacctggatcgcgcgcctcccgaaacggttgactccgttgggatccgcgccggcttccaggagctgtcgcaccttctccactagtccccgcgccgcggcgctggccagaccctcatcgctgccgcccccactgggcatgcccttgttctcctcgcgcattccgcagcccccagacgcgcagcggcccggataatccaccgttggccgtaaacttaacgacactcttcccttctttcccacgctgctccggcgcactctctccttcctaggagacctgggctcagcttcattaccctcccgtcgtccttctgcggcttggggccccgtgcagtggccgagcggccggtcgttagctccgggcttttcctggcgctcaagaaccagcgggcgcgcctggattgcttctgggaaaaagcgcctagcgcggacgcagccgagctcaaagccgctctggccgcagggtgcggacgcgtcgcggagtcctcactgccccgcctcgctctggcagagtggggagccagccggcaaagaattccgttttcagctgggccaaggggccggcgtctccccacccccttaggctccgccccctgtccgctgtgatcgccgggaggccaggcccgggccgacgcgtcacgagggcggggaagcctgcccaaagatgctaggacgcatgcgccagagactgggccagggagccgccaggaatgctggctgcactgctcgctggatgtccagtaaagccaaggctaatattttgggaatgttcaccactgccctcagctcctaatccccagtaggcggagcagaggatttctgttccttcagccagccagttggtttcactgtggagacgttggtggctcccttgtgaccgagagaaagtcattcaaaataactccgtgtttcttaagatgtctgaaagcgacagctctgcacctgtcatacaagttaaattcatccccaggcagtacttgggcttcacaagtttcataacttgtatcaaacttagcaattttctcttggatgtgtctttctgtttgaattagtcaaccataaaaatagagaaaaatcccgagaatcatgttttgcgtgtgctttttaattctttccatttttgcattatggatacaacccttaaaagagaaaaaaactagttcgagattgagagtggcaacctggcacacataagacaaaaaaaaattatactttaagaatctgagatcccagtttcatcatatttgtacagtaaatctttgtttgcactcttacctatttaaacccactttgtcaggtatcttatttttatttatcatgagtaataaaggaaatttatgcagtaataatgaaacatcataagagaggggtgtggtgctgggcttgtcattaaacaggctgaacctgtcattaaattctcttctgaagatttaaatgccaagtgctttttttccccttcctaatcttcctaggtgagtttgaatcaacatttattacttaaaatatttaaaacatttcagcggatgctacattggataggaagagaaccgcaagttatggatttgttgcctaaaaactttggtgaggaactgcataagtggacctctcctaaaagtgaacaatttttgtttacagaatcattttggttcggagtgctgaggaagacaaagtcttaacaggagggcaattgcttgtgtattgcaaaatgagagtcttcacatgttttttttaggataccttagctctgactcc

SEQ ID NO: 132730 - DNA, 1188 bp, Homo sapiens
tttgctaacctgtggtatagtgaaaggagttcaactagagtttgattatggctgtgccattctagttgggtagttttaggaaagttatttaatttagatttgatgtagttttctcatatgtaaaatggggataataaaacctgcttcacaagactactatgaggagtaagctatgtagctaaatatagcaaaatatctggcatctaatagatgcctaataaatggtgactataatgattcttatcattactgtattattttaaacatttatcttttttttttaggttgttgtctaactaaggtatttagagaaaataagtgctgctgagggcagctggaactgttttgctggttcatcactgaaattctagttcttgttggtgcttatttcataattatgaaactaattcttttgaaaagaacttgaagtagagcaacaagaactaagatagaactaataccattctctctcagttcttattgctttacttcaagttcttttgaaaagaattacatagatatgggtgcatgtgtttgtttattttccttgttgggtaatcgtgaatatgttgattggcgtcaaacatgggtctcacctatacccatggcagtaagcttctattgatttgaattcagactagccctggtggccctgtgagtgggaaagtctaggtgtgcctagcttggtctgtggttccacgaggggttggatgcatctgttctacttgtggaatgttggcaccaatatattggctgcttctccgagtatttgcctttgtcttctttgtgaaaggtcactggctggtttgagctattgggctgtttatgccacatcctgtgcatgccacactggctttctttctgtggtgtttccagagataagtttgcctgatagaagtcagactctgtggctttttatcattatagatttttctagaaggagaagaggccatgatcacatctgaggatcctgagtcattgtagacatgtactgaattaaagagaattttttgactaaaggagaattgcatcaatcacggtgaaggagatgccacaggacagggcctgaggtgttggcttagccacagatgtaagggctacagttaacagacaactttcagtttccactattggaagggatgatcagtccttccctcctctattttcttgagccccgtttttcacctt

SEQ ID NO: 132731 - DNA, 1299 bp, Homo sapiens
ggagcctcatagaaattaaatgacaagttcaaggtgtcatggctatttcattatagtgccagtgtttgaacacaaatcaatttgactccaaaacatcattactctactcaattctagttcaatccagatgttcacaaacaaccagactatagtggagatgtgggtggtgggttgagaaggagatcataaccaacatcagactgtcagtgaagcagactgggagaagttttatgaagccaagcagctgtgcaaggtacagtagagatggtcagattgttcatgtgtatggattccatcttctgaggaatgaactccttgatattcctgagttagtccagtttaggcaggagtaaacagaaggtaaacagaagattggagactgtgtgtgtgcacgaatgcctcctttgtagctggatgtctaacatcatgatagccacactcacatgaatacagagatacacaatttacaaattaatgtaacataaaactcccatgcagtctgatttcatcttactgacatttctgtcagtcagtgttagcatcttaattatataaatgtggaaactgaaatactcaagaggttccctgacttcccaggccacacagtaagctttggtgccagaatgtatctctaggctttctcatctcaacccagcattcattatactattgctcactgcgtgtagaatcagatttgatttctctgacttttcttagtcacttctgtggttttgtaccactccctctctcactaaataactgcctgcaaaagtaaaaatttccatgaaaacagaaaacaaatgtaccagaaatgttgatggtgtaagagataaaactgggataaagagaaaatgtgttggaaagtggtgtcctttaatgcaacagaaaagtatattgggagaaaaagaaaagagagaaaaatagacaatctgaagtgatgagaagagcaaatgctacagatgtacctgaacctcttcagtaggtgtgatcctgaagagttgtgtataacaacaatgaacaaaaataaaatgtactgtggaaattgtctagctgttgagatcctcctgtgcgatatttttcaaagtgaaaactccaatcaaccctagcttatttatggagaagactttgccccacagtacccagaaagtttcttgacaatatcatatatgcataataaccctgagacaatttttgtttaccaggaaaacatataaaagggaacattaaactttgtctagttctactgcataaacatgtgataatgtgcatggtgaccttctgttgtaaatggaaagagtt

SEQ ID NO: 132732 - DNA, 1090 bp, Homo sapiens
acaaaactttttgctcttctctttcacataactcccgtggaataatttccattgaattgcatggaagaggctgttcatggggttagtctggcagataagaggtctccactggattttttcattttgcaatcagtttcatacatatacgtacatacttttcttggagtcatagttcattctcaggtcttttagagttaaatatctttcatttcttcttttaaggtcttaatttcttgtttttcgagtttcatgggagatatccagtcaccaatccaatccatatcggggaaaagtacaacaaatgagtgaaatttgtaaccaaccttggatgatggaataagacatttgggagaacacaggagaagtggggaggttaaggagggatagctctgtgaaaattttgcattactcttgcctgaggtctactcttccttgtcatgttggtggctgttttgacaatgagaaatatttaatggcaaacttagtcttctaatttgaaaatggaaatcataacagttcttgcctcttagggatagtgtgagacaagtgaaataatccatgtaagaggtatagtactatgcttgccattctttaagagctcaacaaatattcactttttacctattagtatcaatcttaattctaaaattctattatttaatattttccagtggtgtttctaaataatatctaatgactaggctaatacactatgtggttcttctagggttcaagcatcactgttaggtgtgctggaatcctttcccgagtcagtactgctttctagaagaaaaccggggagatctatttggaatgtatctaactccaaagaaaccatcagaggtaacaggtaggagatatgaaacgaccttttagatatgaaccctaattgaataaaagttgccaaacaactgttcccaaacatctaaagaagagttttagtctaagtggaatggctggagagtatgggaagagttctttcctactctgtccaaacacaagcctctgtgacatttatcaaagaaatgcagccctttaaatctgggtataagtccgaaaggtgctttccttgtgaagcttcttttgtcct

SEQ ID NO: 132733 - DNA, 1037 bp, Homo sapiens
atcagatctcgtgagacttacttcactatcaggagaatagcacgagaaagatcggccctcgggattcagttacctcaccctggatacctcccacaaaatgtgggaattctgggagatacaattcaagttgagatttggtagggacacaggcaaaccatatcactataccacaagtttttttaaaaaaacaaacttttgagaatcttgtactgataattaatatctggtctggaagtgaagcacatttctttttcttgcaactgattggccagaaccagctagatggccccaccaagccaacattgggggagaactgaaatatttggcaaacagcaaccatgaccatcacagctggaagttctcagtctggaactccttccccaggcctcccatttctggaactctgagaacaacaatccaggaatctgatgacatcttttcctttactagccaaaatctgatgacattttttcctttactagccaaaagggagaacaataagcaaataaattcaattttctcccatttatacttttaaatctgagaacgaattgtgtgtttataagaaagtgagggttgagcatcatgaagaaaaatataaagatctttaaaaagtatatattgggcctattagctacaaacatggatcattattaatatgtgtctgactgacatttaaaatgcataatcaaaatcaagcctgttagatacaaaattcatccattaatagcaactaaatttcattaggtaagtagtagtgctatgtttaaaagagtaatctatttggaaacaggaattaatactcagaatattattattaatatatttgaaaattacttgtgtttatttgtcccagcccttacaaggtgtgtggtaatggttaaggtatttctcctctatatgcctgagttttcttctttacaaaaggggggagggaataatagcacctgattttacttttgttgtgaagattaaatttgtacatatataaatctatatatctatatatacacttatatatgtatgtaaaatatgta

SEQ ID NO: 132734 - DNA, 1139 bp, Homo sapiens
gaactttgctatttagtgtcctcatagaggggatggaggattcttcacaaaaagttcagttttgtgacaccacattcccctgattttactcttacctcttgagacaccaattttttaatgaagaagaaaattatgttgcctgcttaaagtaaggaaagcaggtgttggtgggattccttaatagaaatatagaggtttaaaatacctacaagagtaggagatagaattgatcaagtaaaaaaattgaagagattaattgaggacttaacatcagagaccatatgtttgttgtgacaataatccaaattattgtaataatgtgtttaggagtatttagccttgtaggtaccaagattgcattgatcctgtgttaggagtttgccaggtgtgtgcaatagtgagaaagacatgaagggatttgaggttgctgatgagtgaccagtttagatgacaactactgtttcttcaactctttcttcaacttcaactgtctgttttgggaaaggctagtggcctgtgaggaaacgaagaccccggagctggaggactcaaagagtttggagagcagacgtgtgcaagtgagggttttgtgagcactggaggacaggcagctggggaagagagtgtgttatttgcagttatgatattgggtgtggagctatttttggtggcagcaaagctcaggatgtatttttttattattcccataggtgatggaggctttttattttgccacaaaaccactggtgacgttgcctgtggccaccttggagaagacactggaggtacacaggatgtatccctggaagtggcagggggtataagtttagtaggagatttgttactgagtatttaaggtctaggaacagattgagggtgttgggtggattgcccactaagacactgggttttctagcatgatgacagaaattggagtttggggggagaagagttctattgtgtcttgaagaatgtgatcaggaggtatttctaatgacacaaacatagaagtatacacactggtatagtcagatggcatgagtaccaaggtggaagtgtggtggtcctaaagtggcattaaggagccaataaattgtcattcctaccttagctctgtgtcagatgaaatacacagcata

SEQ ID NO: 132735 - DNA, 1075 bp, Homo sapiens
ccagttcagcaaaacacaaatttgaaggcaatctgtacgttagggttcaggtgaagaaggcaaaggaatcaatgaaattgtaaaagctttccaaatttgccttttctcttaagattgtctttctctcattctcttctccctatttcaggaatgcaaatatcctgtttcatcaatcttttgttttctgactcaagataacaacaataatttattgagcacaaaccatgacttttgggtctgtgtagccccgaagcttcatagttcaatatctgacacataagaggggcttactctacacttaaatgttagttttgtcctcacttttttctctttctcagagatctcccttttcccctacttgtataagcatgaagaaatctttcttttcattctctccaagtttaatcagacaactccacatacatacatctttgttcacaactatgaacaagacagaaaagttgctggacctcaaggactttacaatcaatctgggaaggcaaacattgaacatataatgtccagtctgataagtgttagggaaggaaagctcagaatgcaagggaatataatctaatctaggagatcgtgggaaatatcactggggaatttggaactgaaagaaaaataagatttgattaggggaaattgaaggatcagggagtcaggcggagaagaatgtcccggcagatgagacactatgtaccaagcccgagtttgacagagagcgtggtttacagaaggaatctaaaaggtgtagtttctgtagcagaagtgtaagggtgttactcgtaggaggcctctattgaactcttttccagtgacgtagtgtgtggtctttaagtggctttgcaatgatagtaagatcagcattgcattactgaatgagctcctttagtaaacgtggatatgtgctttctgaatctatttgtttgtttttcccaagtcataaacagtgaatcaagcaaatgaaacataatcaagcttggatagtatcttccactaatttccttggtcttaagtaagactgacagtaaactgatggtcaacctgttcaatgggctttaacaagtag

SEQ ID NO: 132736 - DNA, 1010 bp, Homo sapiens
ccaccataagcagactgaaaaagtcaatctagttgaattgttttactttataatgcttttataagatactcagtctgaaactgaaagataggtagctctagaaatgtgataaatggccacagaagtaacaacttttaataaattaaattatggatgttatgtcaattttaagtaatgtctcagttttatatcttgttacctgacctaaatatcattccctttagtaaaatatctattaaagctttgtggcaaaataagaacagaaaaatggtttttgattttcagctttctctggtgaataatttgttttcttttatttttccttctaaaataatcacacgtttcattgcaaccctaaccctcttcaacacacacacacacacacacacacacacacacacacatggcttctagattctacatgtacaagagtgcaaatcaaactaccatagaaaaactaagaagagaggcctagaagcaagaggctgatacactatctcaggcttcaacaaaatatttatctctgactataccaaggatgggcagagcttgcatgtaagtggcttgggctagcagactgggttttgaaggaggacaacatggccatgttcttggttcggtcatgaactgtctatggcacataccttaaatactgttggaaggatccgttagctccagagactgcaaccaactgcctatggtcataactcagctctcagacacattttgttgtgcccacagagtgctgtttgcctgtttggtttttaaaccaacacttaaaatgcagggaatttaagataaaaatttgataaaaatgggaagatttggccgtattgggctcatggtaactgagatgcatctgaatgacaggcattcctttgaattgcacatttgctcttgtttttactataggccactctcactttctgtttttttccccggctttgaaacgatcagttttagtactgaaaaattatctaggatactaaaaccagaatttctctgctaga

SEQ ID NO: 132737 - DNA, 1702 bp, Homo sapiens
cctgtctagtttctagctcagaaaagcaaagatattctactttcatatgtatgataattggagctgagctgactttaaaaacagataatttttcttttttatccctaataaataatggtgcttacagcaatgagtgttgctggtaacagattccaccaatgggtgtggtgtgaagtttagcatttgtggattttgcagcttctgctattgtctacagcatttcctctcttgtctcggaggttcatactttctcaggcaaggacacttttaactccagataaatgtctgggttttctcactccaaggataagaaggtgggggtgatggagtggtggtggtagttgtggagttgtcttcctggcagggatttcattgtgggggaaagtctgtctttagaaaagaaatgtaaactgggcaagtagtctcatcagttaaatgatttccttgttgacataaggtgaggaaaagaagaacaacttttgggaaaagtaactgtgagaatacaagggaagaagaaaaataaggggttgaacattgaggaagacttatgagacagataaagtataaaggcaggtaatttgttctttcaatttggcatggggacagtaaaaattttttcttactaaacaaataaagcccatgtatttcttctgctctgggagcaccaattatattgagcctctaaataaagaaagtcaacatccacaagtgttctaaattccatctcgtagtgagagtcctgaaaattgcaatagctagagtcaatacttggagtatatgcataagacgtggtgtctcaaataggattaaggcctactcttggcatcttctgttattggtgttgtttctctgtattgattggtataacgttagacaaaactgcaggtcatctttgagaaaaactcagtataaacaatgaaaaaaatgtgtagctgcacatgtaatttgcatgtaacaaaaccaaaggatgctttagatagtaacagcagcctgtactttactccaacccattagttttatgataaatgtggtctggggaagtgctcgatctaggttgttcactttgtgtttttgtttctttctatcattcgggtgttgagtcacctgtttgtctgtgtcagtgtcagagcactgggtcacatcctgcattgtccaggttttattggtccctttcttaaattaaagctgattttccacttaaagagaattctgtctccttctgcaattgttcaaagtctagcatctcaagtgcagactctaaactgtatgtatatgtattgtgcaggctatctatcttcttagctttgaattctctagaaatattccagaggtgtgattcctctgttattcaagagtgatttccaaattgcctcagccaatgtgcctgcacaagttgtttgtaactcagggtgtaatgggaaatgctttagagccacatttgtggcttttgatgggaaaaaaaaaaaatcagtgtcctcctaagacttatacagtccttgaagccttttaggctattcctgcatctcatgttgcatccatacggactatttagccatattcaacaccatcctcttgctattttgttaagatttgactgttgttgttgttgtttttaaatataaatgtgtgatcacatgcacatacacagacaatgatgtgtaactcataaacatgaaaagtaaaaatttgaattttaactgaa

SEQ ID NO: 132738 - DNA, 1211 bp, Homo sapiens
ttagcaagtcgtttgctaaagtactctagaaatttaatttgatttaaaagtttaaaagtttgagggtccttgtataccatgcaaaataatttggagaacacttagtaatctttaaagattaatagtaatattaatttttaaaaacgaatgacaaagttttagtttgagcagttgagtgaataccagcagcaagaaaacgagaccccttgttctctttagtggggactgatattaggggctaaaatctgggcaccaagtgtgttcaatgctactgtggtatttctgcctctaggtctttttgtggtctgagataagaaatatatacaggtatatagacatataaacacctaaatatatacttactacatgtatttttatatacacataaattagatacatatacatgtacacatatatacatgcatataaatgtatacgtgtgtgtgtgtatatatgtatctatttagaaatcttgagtccatgctgataccactgattctgatccagcctcactaagtgcttgctttctctgtttcatgtttattagcccccttttccacagcaagaaaacaagtagctcccaacaacttcgatacatttactaatttgtttactcttataatagatctaaaataatttcagaattgctttgcccatacctctgaaacccttcaggatttgtctggtgttctctaccctgtacatgtaacttgcccaaagctaagggtttatagtcaaatactgtgatcataagctactcagggttgtcctttcattgccacaccgtccctgtaatatgctacatttttctttagaaataacattgggttcatgtttgcgtttgctttcattttctttcctttcttatcctttttcaaattatgtttattctttcagtatgtagaatattaagataacttcatgtcaaaccgtaaaaacaggaattgtcagggaagtgtcacactttgcatatatgttccatacgcttcccctgaaaacttcatagttttcacttttcctctttctttttgtaaagatatgcctgatttcttacttcctaatcttttttacacaaaaggtggcatactatatgtattcttctgcaccgtgcttttggtcatttaacaatatgtctgggaaattgctgcacattagttcataagtatcttattctttttttttttacagcttcatggaacttagagagcaac

SEQ ID NO: 132739 - DNA, 1046 bp, Homo sapiens
tgtcctctggaaattgggatttcgaggctagtcatagacagggagatttcgcaatagggtaatagagactgcaaaataagctgagtcagcagagccacggaatccgcatgaaataaacatttcattgacagcctgggatccacagggttagatgtagacatcagagctcggttattgtgcccaaatctgagaactggagatgaaaggaggcccaaacatttcaagaataaacagggagggactcaggatgatcttccagctagaacaagcacgcttttcacagcttcttttgaagttctgcttgggtgtggtgggtcagctgagtttaacagatctaagacacaaacacgtagaaatccaaggcctggaatagaatggcatagaaaaggtccagagaaggagttaaagtgagtaaaatataagcatgaagggaacatatttgaatttgacttctatattttggaaagagatctaggatgagatgtaatgaaggagccttattaaacaaatcctagaatacccaaactcaagttcttgagtagatatgtctgaaaattaagttatattttaaatatcaggtagtaaatataagtaatttacttccttactaggctgagaatatgcctcgccgccagtataaattcttaggtgagtaatttagaattaactgaaagaaagtagacacattcaagtaattatttttctttttggtaagacaggatgtaagagcttatagtgtgatcaattgcagaacacctttcccacttcttctttctctgtttactcctttcctctttcattattgaatttgtgacaaacatctataataaaacctgaaggccaagagaaaaatatacttggttaaatttgttgaatgggctgtatttaagggttttcttagaattaaaaaataaaagggaaattaaatttgatttaaatttttagatagtcataacattttttctgagcttaaatttttttttttaaataaacaaataattgtatctacttatgggcaacagcgcagtgttttgatatatgtattc

SEQ ID NO: 132740 - DNA, 1035 bp, Homo sapiens
gaagtcaagaccacttgcctacttgcgactggggtattgcattggttttctatggcttctgtaacaaattaccacaaacttggtggcttaaaacaactgaaattaattccctcacagttctggaggccagaattgtgaagtggttccactgggctaaaatcagtgctttcacagaaccacacctccccctggaagccattcttctcacagtctctaagggagaatctgttccttccctcttccagcttctggtggctgcccaagttcttggcttgtggctgcatcactccagtctctgtgaccacaggccttctcttgtgtcaccacgttgccttctgcttccctattataagaacacacctgactatatctagagttcacccagataatccaagataatctccccatctcatgatccttaatcgtatcttcagaatcctttttaacatataaggtaagattcactgactccagaaattaagacatggatatcgtgtgtgtgtgtgtgtgtgtgtgtgtgtgtgtgtgtgtgtgtgtgttttggggccagggatggggagggggggttgttgtaattgttatccagcctaccacagatattagaaactgttccataaatgactgttctgaaagtaaattattggctataatgctaatggttttcttttttttcctcatccaagttctagttaggtgaaaacatagctctctagtagtttgctgcacatttcctgtgaaagtgaagattctcctttcttaatgaagagcagctcatatatgatgacaaaacagaggcaaggttagcacttttgggacatgtttcatattttagttttaatttctgatctaggttttctgtattctctggttggttatgacgataaaaatcatggcattgtaactatttatgttatgaaatatcccctaagaaaatatattagactaccttttaaaatgatacttatatttattttctgattagaaaagttatagctcatttcagggaatttacaaaatgcagaacagcgtgaagaa

SEQ ID NO: 132741 - DNA, 1158 bp, Homo sapiens
gcctgcagttacggctcccctgcctgtacatggagccccgtcccttacttcttgccaccactgcatccccacagggcccacaatcatcggacaccttgcggcttttgcgtgagcttattcctgtgtttggaaacgcccctgccttgtctgtacttcaagaatcaacttaagctagcttcattctcccatttccacaaaaacttccagaactctgtacacatttcattcgtaggactcaggactgtgcatcattggatttttgtctagttacattgtttcctttacttgctgaattttcagggtgagtcacttgtttgttttctgtcatgttttgagtacccaatgtgtttttgttttaactgaatcaatacataagttaacaaataaagcaaaaccaatgtatagtaaagctaatgctagctactgcaagaaatcagtgccaatcaaatatatttattcctccaggctccttccattttgtggctctgccggtcttcttgaacacatggctcctgaggctggggtagagaaaggtaaggaatgtggagaattgtttctttgggggcatatgggccagaccaggaaacaatgcacattattatacttgcatttgattggccacagtcttagttcaacgctaactgtaagtgaggctgggaaatctagtctagctgtgcacccatgaataagacaaaacgggttttgaacagctagcaagtctctgccacaacctttatttgaaattaatcgacattgagatttgaattcccattactttacactgagatagtaatatactttttaatttaatttttttttttgttagatgtgtgctcttgctctgtcacccaggctggagtgcagtggcacgatcatactgcagccttgacctcctgggcttaagcagtccccctgcctcagcctcccaagtagttgggaccacaagtacatgccaccatgcctggctaatttttaaattttttatagaaacggggtctccccggtggctcacgcctgtaatcccagcactttgggaggccgaggtgggcggatcacgaggtcaggagatcgagaccatcctggctaacacagtgaaaccccgtctctactaaaaatacaaaaaaaattagccaggtgtggtggcagacgcctgtagtc

SEQ ID NO: 132742 - DNA, 1080 bp, Homo sapiens
ctgtgagaggtagttgatacatgctgcctattgaaattctataagggatgaggtaatacatgctttttaaaaaaatgttattgaagcacagtatacatatataccccaaaaacccagaaaagtgcacataagtgtatatagcttgatgagttttcacactggaaattcccatgtcccgggcctccagatcaggaacagagtaagaccagcatcccagaagctttcctccattaactcactctgtaattttttaaatttcttacagatacaagaatattgacattggtggacagatagggcctttaaaataaaggtagtagaagcgtgttctaaaactttaagtttctcaaagacaacaaaaggttttattgaatgactaaatccatactctctaggtcaggaggcagcaacccttttctgtctaaagagccagattgtaaattccttgggctttgcaagccattggcctctgttgtaactactcagctctcttatagtgctgaaacagacagataatacataaacaagtgggtgtggcagtgctccagaaaaacttcatttacaattagcagccagatttggactgacaccctggtttgccaatgcctactctattattgttgaaaatgtggcctgtgtattgaaatgtgaatattcacaataattgcacagttcagagtatgggatgtggtattaacttttagctgtttttcacaaaggatctggtggggtacaccattcccttcaggccagtctacttgcccctttgatgttctgctgattgtcccgtgtgtcctgaactattttgttcctcccctcaagtctgtcctggaatctgttaccttctttgcatgggtttctcagtctcttctaatgaaagtggccaaaattttcttcaagtacagagtctgtttagttgctcactagtgatttgcatccagttttcttcacaaatgcatgcacctcatcactgattgtcagcaaattgctgtcttggtgttgtatcgcagctctgcctgccctctgctctgatttcctgtccatgcttcagcctccctacagtagtgtgagaagttatat

SEQ ID NO: 132743 - DNA, 1061 bp, Homo sapiens
ttttttttttttgaagcaggttctcactctgttgcccgcccaggctggggtgcagtggcacaatcttggctcactgcaacccccgcctcctggggattcaagggattctcctgcctcagcctcccaagtagctgggactacaggcatgcgccaccacacccagctaatttttgtatttttaatagagacagggtttcaccgtgttggccaggctggtctcgaactccttgcctcaagtgatccacctgccttggcctcacaaagtgctgggattacagatgtgagccactgtgcctggccttgtcacgcttcttataaatggcaaatcccagattcaaactgaggcagccagagccaggagccgcctcagttggaaccactgcactctcctgctgaaggtctgttttacaactaaccgctaggaccctgtttccctcgtcctgcaccttcagctttccccttctttgctgcccccaccccctcaaccctgcccttaggctggagcttgtggagctctcactcctcagggccttttcctgtgccgatctgtctttgtagaataccgttctcctggttgcttggctaactccttcttcaggtctcagtccaaatcttaacgtcatttggagagtccttcctaacatatttgtccttgggccctaggtgttctgtcacatcatcctttattctccagatgctttgcctgcttccctccctggcagcatttatcaggttctgcaactgtattgtgctttctctttgtttatgtgtttgtctgcttctgcccagtggaatataaactcctcaagggtaggatcagggctttgtccttttcattgatacattcctaggtccagaacagcgtctggaacatagtaagtgcttagtaaatatttgacaaacgccttaatttgcttgccaactgtcgttgtttttcagaaatcagcttaaatttttcagcgttggctttcctgatcccaaatccaggtagatttattatagtacccccattattttccttggtacctataaaagccacctaaaatttggtaaactcagca

SEQ ID NO: 132744 - DNA, 1034 bp, Homo sapiens
aagctctgctgattcacttttagtgacatgagagtgtgagagtcctgctgtcagagaaatgccattatagcttttgatagctgagatagtgtaagtaggacccaggctttcacttttgaagccagaaatgggaggtttcccagtgcagctcttgacgttggcgcatgcaaagattctctcttgggctcagtgaaatttctagagcagtgtcacatcttcagtaaagagtatttaatgttccttttttgtctctgtttactttctgtttccatcttcttgacctgagattccattttgcctttgcttatacctcatggaggaatctgaaaataataccgagcaggaagcgttcttaaaaaatggaaaaaaaaaaatctgctgttccagcattattttttcatactatgctaatcatttttgaatacattgtacagatggtaggttgtattttagcggagggtttttttttcaagccaagttcatagacatgatcttgaatttgtaatgctgtattcctaagtgtcttttttggctgtcaaaatagtgctgtctttaaaaagtacaatgtagctactctgggtaaggctgattatttctgctttctttctttataaaaataagtattttctcttattaccaaagtaacatttactagagaatattgggggaataaaagcaaaaagagggacagtaaattggtttaagtaccaccctcaatatcagctacacccttttcttatccccaatcctctctttgctttggtcatacaatgagcactgtgatacaaattcattcagtttcatcttgactgtctttcactgagcccaagagagaatctttgcatgcgccaacgttaagagctgcactgggaaacctcccatttctggcttcaaaagtggcttcagaagtgaaagcctgggtcctacttacactatctcagctatcaaaagctataatggcatcagatacacaggggataacaatacctagcttggaggacgaattaatagagggcttaactgtgtgattttca

SEQ ID NO: 132745 - DNA, 1471 bp, Homo sapiens
ctcatcagcttcacgaactgaccacagaccaatcagtgaattcctgtcctgctttcactttgctttccgtgctatgtggaaataagagctctcctcatgggtccagtgtgaggaacagatagcaagcactgattgggtggaaccagccaaaggtagctatgaataatagtacaaaaataatttttattagggaaaggtgaagccgattagccctcaaatcctccatttctaagcatagactcttgttaaaggttgtacccattaatgtttatccccaccactgatccaccattgttacccagggttattctgatttaggtgccgcagaggaactggaatggataagtcagttcattgagcaaacccatgagacttatcatagtacccagagcttcaagctgcatgtagcctggtgttggtggtggggaaaagtccctgctgtgcgtcacatgaggtggtgacttaactgttaacctgaatcaccagtgtgaatacccagttaagtagtaaggcacagcccctgtgagagtaagtcctcatttcagtgatgagtccagagagtaagaatagcataaagatggcagaggacttcacagtggtataggggagcaagcatcactttactgggggagggtacaggggggtctttatcatcaccagcatcatcttgttcatgcaaaggtcattatctgataaagtggatggaagttccaaagaagaggacagggactgtaaactctgggctattctttattctgcaacattgattaaaagttgctgtgacaggctctgccctagggctccaggatacagtgaataacacagatgtggtgcctaccctcatgaaggttaccttccattcagggaagacaggcatgagtaagtaataaaaataattatagatttgataagggttttgaagggaacaaaaataagaggctgaggtagagaatcattggtgaagggtgagaggaagccatttttcaaagaatattagggcaggagatattgaaattgagacttgaatgagaaggtaacaacatagtaataaacatttgtgaaaaaggaaacatacaaaggccctaatgtgtttgaagaagtttgagaaaaatgatgtgacagttcatggttgtgttagggttacacagagaaatagaaccaataggagatacatatctatctagatatataccatatatataaaacatttttgtgtttttatgtataaaggactttattataaggaattggttcacacgattatggaggtgggcaaatctcaagatctgcaaggtgagtctgcaagctccagaccccggacagccaatggtgtattaataatatgagtccaaaggcttgagaagcatgagagcttgagacccagaaggagccaatgttcatgtctgaagggaggaaaaagtcaatgtcgtagttcaaaggcagtcaggcaggcggagtcaggcagaaggag

SEQ ID NO: 132746 - DNA, 1035 bp, Homo sapiens
cttcatttctagcacttaccacatattgtggaaataaagctttaggagatgcacaattaatgccctccttccctttgtgactttttagcaatatcttacaaatatgtactttgaatcaaataaagaagtattatataaaaactgcaataccagctgaactacattgcctggtaaaaatgcagggctggaaaatgtatttctaatgaatcaaaagcagctgtggcttcactggccagcatttgatcactttagagcgtgactcatgtaattggttttcttgctgtcatatgacagacatatcaacccaacattatattagaaagctgaaaaataaacagcctagatagggatgtctggagctaggaaagaagaatgcctgcagtttagcactggttgctcttttaaagtttgttccgcaaggtgtggccttgtgaagagaattatagtcaacgggaaagtgcgcagatgtcagtcattgttaaatcaaggatcttttacgagagatgttggcgagatttcaccactgatagtcctgttcacctgtgtgaacagaaagttgggcaggtataaaacaactgctttgtttttccaaaacttggcccattacagcatgaaattcacattggcgaagtgaaaaggattaagcctttttcagtagagcaggtatgaggggactttttacttggtaagaaaaactgttgtacaggaaatgaacatagttcacactccagtcacattttatgcagtcaggaactgggtgagcagagtatcatcccaggcatatacagtctgaagatcttttaaggttctacatagtttcctgtgatacagcagatatagtcaagaaagatttcccaggacccagttccctggcttgctggcaggtttcagataactgtgattggcctcatttggggactttgaggtatatagagacaaattcacgtaactagtgctgacaggttattttatcttcaattaggtggtggcatgcaccaagatcagattgttctacctgagttaaagatgttcctc

SEQ ID NO: 132747 - DNA, 1049 bp, Homo sapiens
caagtaggtagggaaaattcatgtatgaactgggtctctagtcctgatttttctcatcttccccatggatacttttatgtggctcatagtctgtagatacttttcacatcatggaaatttagcatctcacacaatcatcttgaagtgaaatctgtttgtgtttttaatccacacaggcagtttcccattataatgaagctttcacagttgagtaccactgatctcttgtgttcttgaaagtgattggtgatcaaaatcaccctttttgcaagcagctacctactattactctccacagagaataatgaatcactacacacagaaatattaagataccacttagagtattagaattttaaccacttcatgtggctgaggcacaggggccttttcagccccaacgctagttttctcaaaattggtcctgcggcccagctttgctcttatgctctcctgggcccaggctgcctcctgcagtgtggtgtgaaacttaactgtaatttgttgtgactgatccctaatgcaagtgttaacagtggctacttgccatgagtaggagagtgagagtaagtgttgtttatccagacaagaagtgataccaaaatgagactggaggtgtgattctaatttgcacctccgtttcatttgcccagaggaactacatttttttgtcattatttctgaatatatatagtgacaggggaaggcttaccaaatgcactgctaacagatgtggcaatcacacttctgtgtatcccctctttttgttcactcatgctttggttaaatcaccttgtgttttgaagaaaaaggcccttaccagaattgcctgaaatatcatccaggtaggaaacatagtaattatgccaaaaagcattgtgaaacatgctcattgtgctttactatgttgtaatatacatagaagcatataaaatacatggcattatataaaatatccatatgataggtggaatagtgtgtgtatgagtgtcagagagaggtaggaaagacagtaaaatatttcagacacttttaagtggcctattccg

SEQ ID NO: 132748 - DNA, 1041 bp, Homo sapiens
tgtttcttggttgagtttgaattctttacatccagactgatggttaactgtctaggcaagtgaattagaaattgtttgcaagctagaatgtgaataccagttaagtgtttctgcattattttgcatcatttcccctctctctattctcccttgggagggtgctaattgtgcccacctgaaagttctgcttttatctgcccagtttaaagaggcgcatgccttgtttgatatgtctagtatttgcctttggatttgtgttcaggaatatgtggcagggagaggcactaacctctttaccaggtgattggagggcaatattaacattataaatgttttatcagttaattttctttgattggatgagtcaacaactgggtgactagttgcgtccccacttaaacctctcattgttggagatatgtggaagcatcaaacacactcgagagcttgtcttcactgggagaatttagtctcaaacaacagagaagactgaatgaataacagagaatgtgaggaaatgcagtgacatagagggatgaatactgacttattttctcccatattagtccagtggactgtgtgcttctcggtaccaactgaggttaatgaaatttatgtaatagtctcatgaaaatggtccatggagcagtcgctcgtcgtacttatttgtatattaagttgactcacttattgcactctcatactgatggatgtttattaagccctcgaaggggccaatatctaaggtgtaggtatctctaagaagaggaaataaatggaagagaggggaaaaaattatgtgaagatacagttttcatctttagtatttttcttcagaatttgaagaagagttgtgaaaaatgagtaatatatgagtgaattcagtagtattggcctgttatggaaaatagttcattttttcatgtgtgagattgcaggatttaatgacgctcagtagctcagtagctgcttaagataataagtgagaaagacaagtagaaaagcatttgcaatactgaatggtgagtatgagtagatcag

SEQ ID NO: 132749 - DNA, 1340 bp, Homo sapiens
tttattggctcaaccagaaacagaaaccaagaacccacggctgtattcctctcccttggacacccccggcagagcgttaggaatgaaatggggggaaatgcgttaagatcagagtcctaattaactttgcaaatttatggtttgttccgcggggaaatattctttagaataacaaggtctgaatatcaaagatgagttaaggtggttaatgagaaggagaaacattgttatatctagaggagagctactcttgttagcagttcagaaagtattgttcttcctgctttctgtacatagcagaatatcagggtattatctttttcatctaagggaaaatttactgccaagggaaattgaagaaattctctgaaaaggagtccctgaatgagtagtcagctatccttgtcttcatccttataatcatcttctgtcataattatttgagacttcttgtctaaagggctttacttaacattttgatagagagcaaatacctgaggttctagccttggagcttaggattcccctcctgaatgttcagcaaacccgaatagcaaaggtactcctaaggaatcctctttggccagatggatcagggatacatttccaaaattagtgctgcacagagaattctctctcatggactaattcttctccccctctctgaggaccatctgtctcatgggcagaagaaaaataggcatctgttcagatttgcagggttgccacctggacctgttcctatagtgtttccaagcagagggttgggatgtctgtgggccaacccaaggccttaagtactaggatcttcagtgaggaattacagcatcaagacaaaataattttgacctagaaccaggttttgcagagcaagaattagtgaatgctccaccattctagaccagggattggcaaaatttttctgtaaagagccaggtaatattttaagctttgcggaccatatgatctctatacaactacccagctcttccactgtagcacaaaagcagcagtagataatatttaaatgagttattgtggctgtgttccagtaaaactttatttacaaaaaaagtggctggcaggaattggcctgcaggccgtagtttgctgaccctttctctggattacaagaactcaatctgtataggagattttcccatccaaggatttggattcatgcgatgcagttgacaaggctgctgttgtgaagtctgcaccctttggttttgtaagtttggtttaagatagtttagccctgcacctacacagtgttcagtctctattcgcagttgtagtgatttagcagtaacgttatcaacgcaagatgacaccaaaag

SEQ ID NO: 132750 - DNA, 1040 bp, Homo sapiens
tgcgcctttactttcactcccccgtcatcctttctaagctgactccagcaggaagctgtgtggagctgagcaccacctggatgaagtgtgttaatagttaggttctgatctaatgatattcagtaacccatatcttcagagtttaattttcttagggaaaaaaaaatgaatgccctgcttatttgaacattaattattcttttcagtggattgatcctacttactgtaaagctttgttgatcttttggcttatgtcaccatgtaatgtttatgtgattaatttttgtttgcatgaaaaggaggttttacttaccacaagaacatttttaacctctttgctctagagacatttggagttcgatggaagtatcctgtgtgaatacctgtggttttgatagtgattgtcgcagggtgggttttcttctttctggaggccaactttgcttttatgatgacctattatccctgcgtgtctggctctgtctagtcatatgtatggatctgttcttcctgtctggtccacccaggcttgggaagtaacttgtcaaccctgccctcagagcctgcttgagagggttggcaaactctactggtcctgctgtgaatctctcaggcttgcgagggacgacagatggttgagctaaactgggagccacccctctacgtaatgatgaaaaatgaccagcctcctggtaagtggaaatcaggaccatgcaccttttaattctaataaacaggactttgaaacaaacagagtgaagaaggaagaggaaacccttccataagtaacctgtctttgttagtactctttgtacttattagtaggaaagatcttcacgtatgtatatactattgtatccatgtagtcactacacatagactgctgggactgaaaagtaatcccgtgtgcccttttggatataaacaatctctgtaaaagccaaaaaatgtgaggcagattacaaacatggatgcagaattgctttctgtactacatgagcagcatggggcccactgttcttatggctccttccataggt

SEQ ID NO: 132751 - DNA, 1059 bp, Homo sapiens
tctggaactcactcctgtgataacggcattaattcattcatgagggcagagctgtcaatgcctaatcactccctaatgggtctacctattatattgtcacaatggcaattgagtttcaacatgagatttggaggggacattcaaactgtagcagatcctttgcaaccaattctggttacttttactaagggctggaggtggagtctacagtagttccacatttatttgttaaaagttactctgcaaaggactatggttgatggaaaaaactgttctgtggttactagaggtgaaaatctgtgtagagagaaataggccagaggaataatatgcgaactgtttccagttaaccatttaatgggttggctaggggctttactgtctttgtccatggaaaagaaaaaacaaattgcacatctctgcttttctaaatgctacttctttctaagaattttgataacttccatcatttctctagccaagtacagccaacacatatcagaacccggcggttgacatggccatttcgtttttccttttaaaattgatttagggcagttcttgagcagccaaggcttggccacctcctactttgccttaaggtgtttttatgtgtttatacgctgagagcacgggtacctttgaggggttgcaaacagttcggttgatcagtgtggtcaggaagtactggccctcaccgttgtaagactgctaaatctgtaagactgaggaaacaggaggatttggatattggatgagtttcaataggtatgtttgtgttcttgtcaaaatgaaaattcttttgagttgatacgtattcttgtttgtgttgtaaagtcttaatatagcagtggcacaggaaaaataccccaaaagtaagtttttctaaaggatctttttcctgtaatgtttaaaccattatttatcttctctggatggcatcaagtacttggtatgtcttaatagaagggaaaaaagttgcttcattacttgtggtgggtgcaatccttagcaaactctactttttagaattttgggtaaagcctgggtatgtgaagt

SEQ ID NO: 132752 - DNA, 1080 bp, Homo sapiens
cacagacctctatgtaccaagctattatttagaaactgagtagtatcatatgagtgaaataatacctaaaagtattcaaatacattttacagtagcacttgctatctaaattgacgtgcataaacatgaaggatatggacttgcctgaaataaaatgtgcagtatttcacacagtgttccaactacttaccaccatatcaccttcaacatgacataatcttggttgccaaagtagattgctaataaattattatagtacatagaataagacctggactctgttctcaaggtcttgttgttctaattatggcccatggatcagcagcattgatgtcttttggaaatttgtaagaaatgcaaacttactttataatagcttctacccctaaacgactgagccataatctgcatcttaacagaagtcccaggttgatccattcgcatatttaagtttgagaagaagtgatgtaaggcagtgtttcttgaacttgagcattcttaagattgacccagagggcttgttgaaacatgtatacatagattcctgggcccaaaaagtgatttcataggcctggggtatgtgcattgggagttgtcttttccctggacatcttgcagctttggttggatgtcttccagggctgggatattccaagtgtcgtttaggtggttgaactcaattagtttaagattgtgtcttagtccattttgtgctgctataactgagtaccacagactgggcaacttctttttaaattttattttaagctctgggatacatatccaggatatacaggtttgttacacaggtaaacgtgtcccacgatgatttgctgtacctatctaagcccagcatgcattagctatttttcctgatactctccctccccctacacaggccccagtgtgtgttgttcccctccctgtgtatatttgttcacattgctcagctcccacttacaagtgagaatgtgcaatgtttagttttctgttcctgcattaatttgttgtggataatgccttccagttccatccttgtccctacaaaggatatgatctcattcctttttatggctgcat

SEQ ID NO: 132753 - DNA, 1044 bp, Homo sapiens
tttcatggtgtactccttttgagaatgctcctcgtcctgttgaatgcatgcttcagaaacaacccgcccatctgcggattttcttgcagacatgatgagaccagcagccattctcagggtgactcactctttggaatgaaacacagttggcaaggtagttttgttatctggattgcgggtttttaattgcagtgtggcaaaggtgcagcagctggccatgagaatgggggagggaggtcatgacccataaatctatgtaggcatccaaaagatgcagtgcttcattccttggaccttgaagaaaaaaagcagcccatcaggaagtaccattgagcaccttgttgaaagaaaatccccgtacttttacatccatgttgtagatcatctatttctttaaaaatgttttgttatgccttaggtgtagtagtaattataagaaataatgcagattttcacaccaagaaaaaaaaaacctgggtgactatcagaaaggttaagcagatattactagaaatgctgaagcagaaattgcagttgttactttatgaaatgttctttagtagaaatttcatctcttgagaatggttgctgcagtgtgttttctgtatgtagagaactatatgttgaatgtattctgtttttcaggggttactcttaaagaagtacctgtgttctattcatacattgcataaagaagtcctctttgcttaagtaaactgctacttatgttttctgtcttaagatggcctgaggaccagatgataagccaagcattcggtctttcctacataaagggtggtaagaacttttcataaatttagtctgaaacttatcctcatcctaataatgaaaatttattttattttttgctgaaatagtagtacattttaaaagttgtgcttcccaagctcgtttatgtcatgagtgcctgtcctgagggggaacctttatctccacacacgtacaaccacttctaggccaagcagcacaccagggcttatgtgtgggaagctctgatttaaatagtttacttttttaaaattt

SEQ ID NO: 132754 - DNA, 5479 bp, Homo sapiens
ttgtttcctacctggcctttgaaaactgagtaggacgacacttcctgtagcgtaatttgaatacagcatccagatcaggatctgaactcttggctttgttgcacactggagtgatggatttttcttttttccttctctagacctcagctgagcacatttgagaaatgggagggttagcttgggttgtccataaggttttttctacctgtaattatacctccttgattctaaaagatgaaagcccttcaaagttgggaaatgaaaggaaaatgtatagaattctgtaacctgcagagtttgagtatcaatgccataatttactagccctgtggtcttgagcaagccacttaaaccctgtgtgccttaggtatctgcaggcaccaacagagttgtgaaaatcaaaagtagtataaagaacatgtagctatacattgatcactttgaagctacctgatgagaaccctaaagttaactatcccagagctttcgcacttcctctctgaaaggtatcctcagatgaccgtcactgtgtcccatgtactgacccttgtagagagaaaccattcattggaagaactgtcctgtggcagtcggtgcccattagcttaaaaacgtaaaaagacccagcattctgagtcttcacatataatcagtgtacagatatcccctcggaagatggcagtaatgagcccaactttcttgaacatcaaggggaaaaattaaaaactgaagtttgctaaatgtgtgttttgcaggttggacaatctgctcaatatggcttatggagtaaagaggtaatgatagaggttcatgatactcataatccctttccacagttgattggtttctttgattttgggagtgctattcacacccctcataagtttttgttgggttttattttgcatgtgcaacctaatgaaaagctgctctttgaagcacaattgactcaagaaatttttataccaccggatgccacctggtcttttaaaaacccatcatttgtttcgtattgcgttacgacgttacagcatgtttacgtatgtgttgatcccttcccctgccaatcctgcttaattcatgaagccagttctaaatatatttctttgctattgtggatgatattcagtacagtgaataatggtcatttcataacttattaatatctcagtagtctagcatgtcactgcaaagccacacacagaccttggtcaaaacatgaaatagtttatatatttgttgggggaggagagttactaaaattcttggggatggaaaaggtatacgttcattgctataaccaacctctgtttttattttttgtgtgtatgtgtgtatttcctattctgtttagcaggttttctccaatgaccattgacggaatgaccagtttggctggaattaatatccctgggcaccctggaacagggtggtgtatatttgtgtacaacctggctcctgacgcagatgagagtatcctgtggcaaatgtttgggccttttggagctgtcaccaatgtgaaggtcatccgtgactttaacaccaataaatgcaaaggttttggatttgtgactatgacaaactatgatgaggctgccatggcgatagctagcctcaatggataccgtctgggagacagagtactgcaggtctcctttaagacaaacaaaacgcacaaagcctaatgagctcttgtcctcagtccatttatatatgaaaactatacaacaaaggcaagttaagagaaactttatacattagtaaatgtctttgtaagtcagtgttgagatggggataaaatgactacttagcatcctaagaaatatgtgagattttttattgctagtatttgaattaaaacttcttaaatatcttttatgtttgaatatggacaagaggtacagggtttttacctgtcacattgcattctattgccttctttgaagaaggtggaccttttaaagtgtttcagctaagggaagacatttcttttctttttacataactgccttgaacctgtgagtaaatattgaggctttgtgttgtaattcttcagttggttgtgtcttttttttcccccctttttttcctttttctgattagctttgtgtttggtttacatttaaagcattgctgttatgtctgtttaagaaaagtattttgaagtttacatttttatttatgaagtttaaaacagtatttattttgtaattatgatttgggttggggaagggggggctacattataaacgcttattgtaagaatactggagaacttttcgtaaagcagtaccttgccaaagagataagagcctctttgatgtgggtttaaaaaaagcatctatttttataaaaaagaaaatttggagaaactttttactggtcctggaacaaatattttgacttgaatactttgagaaatctcttcatatgacacctagtgagcttttaaaatttaccaggaaatttgcagcggttggaaaatttagaaagatttatggtgtagaaaatacttttgagatctttgtatgaaaggagtagaatcaatggggggaaacactgctggtttcatttttgtaatcaccagtggagcgtctgatcatcctggttattatgtgataggtggctcacattgatttgtgattttgaaacaaataaaaaaaatttacaaaagaatatataagagcaggcaagaaatttaaattaccgagagatgggggaaaaaatctgttcttcctaaagaaatcccttcagatagagctcatggtgtttagtgatgtacttgcagtattgtttgaagaattgttttgtcttaaggaaaaaagacgttgcacatgatttgtactgcagcaaatcagcaaaagtgatctgagttggatatatttgaaggtattttgaaagttacgttcaaggctaacacctgagctttgtgtaatgtaaataagaccttgtgtttatgaacctttcagctaatttaattttttttcccttacatgccaagtgatgttcaggttttgaatgtttttgtatcagttttttcctttgtaaatggcattaacattgttacttgaggtcttgcttaatcacttttgttgtcctgaggacttgaatttacagtgcatcagatttgttgcaaattttgtctgtagatagtctagcttcagctgtttatggtgatgctacattttggtttataaatatgtttgtggtataaaaaaatgagtataaccataggttttgaacaaatttccttacatttttcatacaaaaatcataaatatctgtatgctattgaaatttaactttgtatgatgcttaaaaaccactatttggggaaataataaaataagtctttaccatgtatgaaagaaattttaaaaaatacaaaatattttctgattagcatctagcttataataaattttcaaaaaagctgaaggcaaaaatgccttcatcaggatgcactgagaactatatagttacgtcctgctttttgtataaactgagatgctcacatgcttccccttagaacaggcaatgtgctatgcataacatagttgtacattatctttgcggttgctttgagttttattttttattatttaaaattgtagttataaaatttttcagtatagtacagtacatatactgtgaggcgcgtgctaaagtgaataagcgagttttcatgctgacccactcaatgctattcagaaatcaattggcttagcactttctcatatccttaggtgcatttagattgccagagttaaccttctgcgtttaaaaaaagaaaaacactaaaaaataaaatacatgtatatacttaaaaaaaaataataaggtttccctcaagggaaaacagcagctacatgcttctttcctatactactgtagcaaaccaaggcattgatgagagggcatgcaaattgtgcttcactttacagtgttttatcagagcacttaataaaatgtaaggctggtatttatttgaagttgtacagtatgacttaattcacatctgttggaatagaaaatatattctgttgagtatttaagaggctgtacatgttttcttttgtgtttggattctttgtactttttcatgttcagtacatcaataaacaaagttgaagggaaagaacagtgtggtgagtaggtctttatacacaattcgggggcacctgtgctcagtctaataagcagacttgctttcttgaattaaaagaagttccctgagagttttagtggaaagcagtgttacctcttagaattccaaaaggcaagttaattgaagtagaacgtgcagaaaatttttggactgaatgacaccttctgattagttttcaaatactgctaaatgagtaattctcacaggagaacatactctcatctgctagttgtaaagtttgggaaatcggatatcgacaccattttatggctgggattcaaccttcagctttttgcacagataatcacccttacacgtcagttaaaaaccaaacaggaggaaagtagcttactcggcttccactggcaatctttaattccctcatgggattaagtgttgctgtgtgaaagttacttttttgcacaaatgctagattgtcaagagattgttccctaaaatcagaaattcagtttctgttaagttagtgttgttgtgtgtcacacacgttacaaaccatgaactctgccaaccccgtatttcgcatagaagttcagttcttgtatacacccttaacagatctgtgaaggttaaaaggatttcctgctgatcttttgtgaaaggattctacttctatagaacttcagacaaatgagtataataatgaaacactttttttttaaacaaagtatactaaatgacttattttaattttattgtatctgtcggcttttttggtaaaagccattctaaaagtaattgtcttgaattcacaacctactagtcaagagcgtagttgagtgacaagacacttccttttttcaacatgcaattagtcttaaatctccatactccctcttcttattatatgaatttaatactctaattttgtgatgttggaacatcctcccctcacctctctcctcttgcatgttttatcggtattttgattggtttgcatgtcagcagttcttttataattgagcagatagtggaaaaattctcagcaaaggaagttggtatagtaactactggtatatttgaggagaaatttcgtctttctcccttttttttttttttttttttaacctgtgcttggaaattatctgaacaatattgaaattcagttttagagcggcctacgtgaaattcttaatgttaacatcattttacattattataatctgagaaaaaaatgttagcaatttaaccattctgtttttttaagataaacagattgcaagatttctactttttataagaggtttacaaatgaattgtagtggaaactgacaactgcttgcttacagcgtt

SEQ ID NO: 132755 - DNA, 1741 bp, Homo sapiens
gcagtggacagacccagcagacatatttctaggggcttgttgtagtagtccttgtgtttgagctgctgcactattttctcttacaactgcctgtgttacagtttgccaactgctactggatttggagtgaatggtgcccatgtagagcacccgttgccttttctgagctcccatgggaaacatgaatctatggcaccgagaaagctaggaaatacttctgggctcagatgcatacagtcagggggcttcagcagtgcctgggcactgttttctaggttccatgcttctccctacactcgttggtgatggaggagaagaaagattagagtggataacttggcttagttccaaaggaccaatttttttctaaaatgagagagaagtgaaggaatcagtgaagatcatggtatcatgtaaaacttcacagatagggtaaaaaagatgccctatcataatttggagggtcctcggagatcctgttataaaaaattcgaaacctcctgtctggggatgccagagatggaagtgagggagatggaggatggaaaacgaaatgtttctccctcactgcatgtacagtcatgcatcacataacgtttcagttaatcacatgtacgaccgtggtaccataatatagtagactgcaaaaaattcctattgtctagtgatatcatagtcatcctaatattgtgcaatgcattaccttttctatgtttagatatggttaaatacacaatacttagcattgtgttagaattacctacagtattcagtacagtgacatgttatacaggtttgtagactgggagccatagcccataccatataactaggtgtgtggtaggctattaccatctaggtttgtataagtgcattctatgatcgtacaacaacgagatcacctagtgacacattttcagaacatatccccattgttaaaaaaggcctgacggtaattcacttcaggggcagatttggtttctaccctgtttgaaaattctgaaaactcatctgtctctgggccgtatgcttggtgtcctgagtgggtggtagcaaagcatgacctgtccctacatggatgcaattaatgggcatagatgatgtaacttttgagtgaattgataaggtgcctctgcattctgggtcttctagcactttggttggagacctcagtatgcggttctcttctacaggtagcatatgccaaatgcattctgtgttgatcattccagcaatttgataaaattgtattgttactttatgattggtggtgctaatatgtgtttgtctttattgctggtagttgtgatccttattcttgactataaaggcatggcatctttgactgtactcacctctgcaaaaaataaaaccccacatctttttacttatgtgcagacaaggtcatccaaccaatcctcttactagttttcattctggactaagttgaccataattttggtaacctcattgtctttatttggtcatcacatatttattataaactatcagtgaccctggcttgtgctcagtggtgcaatgagagggtggtgggtcaaggcacgcacacacacacacgcaccacgcacacagagacacactcacacacgaagatcttttgtcattgtgatctgttctgtttccttacactttgcataagctcagttcttctcatctttacaaaacagaattttcagtggagactgagggcagggatgtgggaggctatatatttccccat

SEQ ID NO: 132756 - DNA, 1223 bp, Homo sapiens
agttatgttttctagcttaaatctatgcatttatttttttcattggaatatttgcagtgctgaagagagtggagataaaatcagttaaaaatagctccttttaaaaaaatactaaattatgttgcttgagatatgagaaggaaatttgttatgaatgccacattaaatttcaacttaagttggcctttgccgtgggagaagaggtggtactgtcaaaagcattgagccttgtacttcatgctctgctgtgaggaaaaggcattggtattaaaaaaaaaaaaaaaaaaaaaaaaaaaaaaaaaaaaaaaacctttgccacctttgacttcccatggtagtggtgatcagactagtgtgggagatgcgtggggctgcctgatgcttgcctttgtggagaaagaagtctcacaaagaaagccctttttcagctctgcacataggtttcctctgtgacatcttaagtgaataatatatgtataaatatacttttttaaattgcaaacgtaggatgaacaagcctgaaggaattttacaggtatttcctaggcagcttgtccagttaatttcagagctctttggggccttgaaaatgatctcgagtttagatagaacaaagttcttcataatgtattggttgatttttaacattgtgaagttataaaatgtttgctgttagtggaaagctatattagctactttttttttccagattgaagcaatgattttgtttgatagttattaagtaaaacaaagttcttggaatcaagattgaattcttaggaagattgagaagacaggatttgggagagtgcctgattattgaaatggcaaggcttgtaggtgactcaggtgctaggttgttgatgggtgtcagcccttaggtttacctagcctccatccctgcaggctctgtgctttttatttttggttgagtaaagctttacaggatgttcttatggtcaaatttaattatctttttctggcccattctgtgtttttatcttttagtaccatatgttatcattaacttgaaaattctttttccttcactcctatagaaagacattttggaagaagagaataagagattgtcagttgtaagggaaacttggtttcagaaaatgggagaaattgttattctctcttcagatttttaactgttgtcccattcaccccatttctcattcctcccatgatccctgtccagataataaaatatgaac

SEQ ID NO: 132757 - DNA, 1027 bp, Homo sapiens
gctactaaactgaaagagaatactcaggtttactgtccagtacttttattgacaggatctctggtttgcttttgtcagtgttgttggttttattactattaatttttcatctccatgggcacagagagaatctacttgaggaatagtgtcttttgctaatattgaaggtggggaccaaaggacagtaacctacagcagtgattcttaaccaagggtgatttttgcctcccagggaacatttggcaatgtctagaggtattcatgttggcacaacctgtgggggtgctactagcatgtaatgctagaggtcggggatgctgctaagctcctacagtgtacagcatagccccagcaaccagaagttacctggtccaaagcaccaataatgctgtggttgagaaattctaatctgtagctttctggggttatctgaattgtttccagggcttcagatttccttttttttttttcttaaaggattttattctcatgtgtcaatttttaggtcaagctgtttctgttacttcactttatagtatgtgcaccattaagggtatataacctatgtgactacgtgaagtttctacaaatgagttcctctcttccttttcaaaattgtttacaaacaggttggcagactttctctgtacagtaccagatagtaaatatttaactttatgggttatggtcactgttgcatctgtcttgtttttgtttttaaacaacctgttaaaaatgtaaaagccattcttagcttatagcccatacagcaacaggtgggaggcagtctccatttggcctgtcggttgtaatttactgacctctctgtagttcatagaatgaccgtggctttagcccaaagaagacactctatctcactgacaggtgtacatatgctaactgtttaagttttattctgatcctgggataacaaaccaggagtcattcaaaaaatctctaatctgcatgtgagaagaacagtgactttaagaagttaagcagagcagagagtttttggtttcataag

SEQ ID NO: 132758 - DNA, 1116 bp, Homo sapiens
cctgtaatcccaggtactcaggaggctgaggcaggagaatcacttgaaccccagaggcggaggtcacggtgagctgagatcatgccattgcactccagcctgggcaatgggcaacaagagcaaaactccatttcaaaaaataagtaaaaaataaaatgaaagcaatacttgttctttaggaaacagttaaaaaatagagaaacattgtgaggaggaaatattagctgtagtaccatagactgaagcagccacatgaagatttgtgaggttgtttttgtttgtttttttaaggtagcttttctcctcactgtttgtttctctccccgccacccgtataataataataccttggaggcatgttgtatattacaatgtctaattcttttaaagcagtgacttcagaagaaaattgagccagatttttcattcatcaagtgaagatccatttagttgatctgaatctaatcagaggagcccatattacctgcctctgtgttgttaattggcttcataggaagcaccacctttagagttctgagtagagagagctagcactacatgcatgcctgggagaatagcctacagattttgctgtcatgagactatttagtcaagtgagagtatataaaatacagcctccttaattgtgttagttaattcataatacttatacattgccaccctgtgttgttatcacatagactaataatggtgttaaatagaaatccaggcctagaaataaagatgaatttgttcaaagcaacaaaaatattttttatttcatttgtgctttctaattcattcattctgagatcttgtgaattgagagtaggtttcacctatgacacaaagtgcgtctcatcttttacctgctagtccatcacaggtggacctagcttgttttagtcagcggttctcaagtatgtcccgcacctgcagtatcagcagtcttctggaaccctgctaaaaatgcaaattattgggcttcattcagaacctactgaataaatctctgagggtgagccacaggttgttcttaggtatgcttaagtaggaggaccaccgatttaggtgactctagctgtgtagaggctgttttttttttttttttttttt

SEQ ID NO: 132759 - DNA, 1050 bp, Homo sapiens
agtcacatgatctggaacagagtaacagctgacttgttgggtgctccctcctgtggaaaaaaaagccatagaatcctagatagggatgcacgtcccagctggtgaggtttcaccttttctggataattgagaatcttacacgagaaaagaaattaagttttcattgattcatattactgaatgcatatataattcattggccttgtttcatcagtttatagcaatcccaagatttgattccatctaagttacattaatcacttgaaattggccacttgttcttcacttacatttaagttccccagtcttcattgttcttaagtatttaggcatagagaaaacaaatagcgtatgaatagttatgtatgttttctccaccactattccaaattccttgtttcttctgtagaacaggacagtgctaatataacttccaaacatagcctttggaacaacaggtatattttcacttgttaatgagcaaacggtttgaataaagaagagtattaaatgttaacaccattggggcaggggtgtgaaagataacgaggtctttataaagtagtataaaatgtggcttatatttttttctggaaagccaagaaaaagtggcaacagagagctgtgggcacaattcaaattatggggaaaatgtttggtgcttcatactaaaagttatttaagtattagtgtaaattgggaaagtttgttgttaactggattaaaggtgggtaccaataataaaatgagcaggcagtagttatcactttacctcagcaaatcaatcccagacacattgaccatttttagtaataatctgaggatggcgtatattgtgaaatttctgtcccttgaagtaggctagtccagaatattacagctaaaccaaagggaatgcgatcaggaatagctcatgagactaaatgttggcaaagataggttataggcagagagtcatcaattacaattggggcaggagatctggatgacttgaactgacccttaaatgctctggttcagtaagccgttgtggatctgcatgatcaatgg

SEQ ID NO: 132760 - DNA, 1045 bp, Homo sapiens
aaatggcattgcttactcctgagaattagaaagtaacaaaaattaatttaaaaattctaatgatgatgtgtagtttctttggttaattgtaattagtggccacttctcttttcttagaaaaaattactcttaaaaatattaatggagccgggcgtggtggctcatgcctgtaatcccagcactttgggaggccgaggtgggctgatcacctgaggtcaggcattcgagaccaggctgaccaacatggtgaaaccctgtctctaaaaaatacaaaaaaagccagtgtggtggtacatgcctgtaatcccagctacttggaaggctgaggcaggagaatagcttgaacccgggaggcagaggttacagtgagccgagatcacccactgcactccagcctgagcaacagagtgagactccgtctcaaaataataaaaagtggaataacttttaactaatttctagcaacatcctgttttctgtctgtggccagtttctctgtgtatgcctttaagaaacagccaggattcatttaatttttcccaactcagaacaagtgaactgaaacactcacttaccatagtattattgaaggaaaactggatgaggagaccaggacacagaaagagaaagatcagagtttgaacccagaattcaacactagttgtgtataaccttaggcatgttatttaccttgtctgtgcctgtttccccagctataaaatactaatatgtatgctgcctacctcatggggttgttgtgaggcacagacaaaatattgtagtttgtgaaaatgccttgtaaatggtgaagtctcataatgccctaaatgtaagtttaacattaaacattgttaccgacgtaagtttatatataatctaatcactcctgtcctgcctgtggtagtggaaaatggttctttgacaatgtcactgaaagatactgtttttgagaaggtttgtcttggagcctttttaatgtggctgggaactaaagatacaatataaactgaagagtggacattggggaaaaaaaaaatcacataac

SEQ ID NO: 132761 - DNA, 1029 bp, Homo sapiens
cccccttcttctgtgtactatacttctgagctcattttggaaggtccgatgtagccacctgtccaaatatccatgatgctgtcacaagacctttgctactgcttacttagagcctagagctaacttttattgagttatagtgtcatttttcagatagtcccacgaagactccatctttaaaaaatatgaacagcaattaactgtccgtttaaataggcataactgtgacctttcagctggagagattgaaaggagctttttgaaaaaagtctaaagtggcaagtgtctaattttcaggtttaatgtttgtagtcctgggtcagtaattgacaagtgataaaagttgttcagtggtgatcttagcagtgggtgacttctcaaatgtttttagtttaaaaaagagggaacttctttgttcatttatagaccttatcactttaatctattggtattaatgtccactgtcactgatctttccattgatgaatcagagaaacgagagcagttgtgtgtttggacgaaagcatttagagggacttctgatagtgatgcactgggattttaaacattgctatgtacatttaataaagtactaattcataagatggttttgtttctttgtataattttgatcaacttgtgtttgatagcccactcttagtgtatgtgttactcatctttgtatgtttaatgtatcattagttttagctgctgatgaagaaatgagcttttaattacaagtaatacactatatttcaaacggttccattttcaagacataattcaataaatatattctatctttattttgtctagtctagtcttgtttgtgaagaacagtttgagaagccatgggccatttacttacctgtagtagcaagtacttactgcctccccgtccctccccttccctcatataatctcagtattgcttgtctttgtttattatatcactcgtagcttttgtgagaaattccagaataaacctgagttttaaattgctatctttggagtagattggtgttcagt

SEQ ID NO: 132762 - DNA, 1091 bp, Homo sapiens
aatggaaaatcccgtgatgaagagctaagaccgcgagtcctacacccaactctttttctttgtgtctttggaaaagttgcttcacctttctgtgcctcagtcttcctatttcccagatacaaagaaattggactaaatgatcactgtattttctttttgctccaaaattaagactccccccgccccacagcctcctatcagcaccatattactttgttgaagattgtgtcgcctctggggacttgaatccccaatttgagaaatgaaatttcatttttgaaatgattaatagaattttcattgtagtctgtacacaaagtaccaatgcgtataatgttgggtatatgacaaagattgtggcttctgttagcttttaaacagtatttcagaaataaactctcaatttaatatgtgattataaatcatcttcattacagtgagtgtgtggtagttaccaggatgtacaaagtaggatgatgacaaggtttcttatttcaaggggttaagtcagtcacaagaaagggttaagagataagtacattttggttaagtcagtatttaagaaaacaaggcatataatgcagtgtgggtgcaggtaagaggcacccaactcagactgtagtggagaggactgattagtgttgactttagggactaggtgatacccatgaggtgtctgaaatgactgaaatttagctgattggaaggagggcagcttatttttaacacagagaagtgagagcaggaagcttggaatactaccgaaggttttgtatacttgtatggaagaggtagccagtgctctgaccataaaggaataagaattctaaaatttatctgaaagtcttagggagccctttaggtaatttaagttgaggatgacattatcaaatatattccgtggtatctctgaacttctcacttgaattaaagcaattgtttagtcttaaaacattcaacaaatccagtcacgataaaatttaaggttctgtgtgtattttccactgatagttttctaaatcctatattttggaatatccgttaaagataactgccctaacctttaataccttttataaaatttcctgttt

SEQ ID NO: 132763 - DNA, 1106 bp, Homo sapiens
aaacccctcttccttccctacccagtgtcttgatatttgagctttctagccagggcctcaataaatgggaatttgctctattataagagcttccacacattttatgctataattttttaaaggaaaaaattttttgctatatgcaaacttaatttagaaacccttttgacctgtaaaccaaatgttgccccaaagctatgtgaaagcagtgcatactcttgccaaaaggcttacagtgttttccccctgctcagagttgcaaaaatgaattaataagaaaccaaggatttttcttcatgttcttcattaagcaatgtctgaggggaattgtaaaatatgcattgtctacagtatatgtatatcctggtgcacaaagtcagatgaactgtgaaggtgaggggtaaaaacacccctctcacctttgtactttgttctttggagtattaaagaacatttatctgccaagtggcaaaggggatactatttggcggtttaattacagccagtgagtgttattgatgctatcagtcagcaagacccagggaaagggcctggtaccaaatcattcagtgtaattaaatatctcaggacgggattctcaaggtgcttctggagatctgaagcaggagaacactttgtcttagaacaaagataaaggtggtagttcccctcctcgctgcccctctttaaatttctgcaggtgttgcatagatggcaatgatatggtctctttattgcgtacagtgaaggttgtccatgttttccttaaaaactctttcttttaaaatcttcacaactgtcacacaaagggttttgggaatacagtaattattttttgttaaagctgttagggggaatatacagctcaggtgtctaatagatacttggagaatgaaggattgtctttgaatgagactattagtcttgcaaatcagttcatttaaaaaaagctttccctatggttattctctaatgtctaatcatgttgtgagagaaatatcttggtagacttaaagtcataaaacaacactcactaatgtttcaggggttatccccttatgtattgaataaatttttcatagttgcataacttatgtcagccccac

SEQ ID NO: 132764 - DNA, 1081 bp, Homo sapiens
tttctagttttggttgttaaatgtctatctagaaatttgtgcttgccttaaccaaataaccatattcatattcctagaaagagtcattgagagaagctcctaacttcatagaatcaagcacagtggcctttttgaagaggctaacccagttgagccacatccagccagtctgggttcttggaaatatctttggatgagtttcatgggctttattttacgtctgcatttttgcatttgcaggtgatttatattcctaaatgctttgctttcaagctacctggcatttgtcttatttagaaactaacgatcagtggatggcaaggaaaagggcttggcatccgtggttgttatgagctatctaggaaaccctaatatgcccagagttttgaggattatttcaaatgcctttacacaagagactgccaacactttaatgtttatcaggatcagtggggtggggtggttgattaaaaatgcagatttctacaccccaaccaggacttactgaatctgattatctgcagagagagactgaggaaattgtatttcaacagccaccacaggtgattcttaagcagatggtggcctgacctgagaaacactgttcagtggatcttaatgatttgcacttgggtaggtctgtggtgcttattttaaaacaagtctacttgtaaaaaataggattttcatttgtcggttacatcaagatatgttgaatggctgggattcactaatgtgtttttaatgaatatagtgctggatttacctaagaaataatgcacgttctcacacacaatttgctcattttcagggcatttgtgtgtcattaaatacttcaacattacaattatgctagcataatttatttgcttctgagggtatttggagaattttcagtatggttctttagggcctatccatttaaaatgggtgtcttggccaggcacagtggttcatacctgtaatcccagcactttgggaggctgaggtgggcagtcagaagttcaggatcagcttggccgccaacatgacgaaaccccatctctactaaaaagtacaaaaattagccgaacatggtggc

SEQ ID NO: 132765 - DNA, 1154 bp, Homo sapiens
gaatatgtgtagacttcctccctcctctgcataaagaactctggataggtgattatcacataacacagtgaaatggatacgtggctcccagcatctctctcagcttttccctcctctacaatgggcctaggatgctttatttttcctgaaactggggttgatttatctggaaagaaggagctgttatctcagggaatagaatgttttattgttattggtaagttctgacccctcaaaagaaaaaaaaattctgtctagaattaactaccatagaaaaactgcccgattttggtcttgattaaagaaatattttccttaatcattcagctatagaccaggctaaaatttacctttgcttaaaagttattaattggtatacaatcatgaaatttcttatactgaaataaaccacaatttaaccacatttggaaaattctattataaaaatgagaatattataaatagtattatctattttttgtgttcagtttgagagtgattaagcaaacctaagaaacctgtattctaagctactgtattgccattaactttttgttaaatttatacctttttctaactagcttatcctttcctcattagtaaatgtcatatttatacttttttttttctgttcagcatgagcttgacccttaacataggaatatagaactacatttctgaaatcttactctgtctaaattaccttactaaaatgatttaactggctgcttaatcttggacagagcttttaaccatttaagtttccatttatatcgttaaaataatttattcatcactgagaattttcattacctgctttttaggagaggaaaaaaagcttttcatggtctgctaagttgcatattaagaagaaatgttaactttttaaacaaattcatgtttattgcataaaatgatttgatgaaaagcagcaacctctcctgaagagagaataattttaattgccttcttctttcactcttgaaagtttaatagccactgtaaactttatatggggatttgagtttctagttcaacctccttttgcgacaggattattgggattgggttggtttttctttatcattataatttgttcttttataaaagttaatactggccagaaggaaatattcttagatgctgtgtaaacc

SEQ ID NO: 132766 - DNA, 1036 bp, Homo sapiens
attcacagctttaagaatgttttggaagttgagttaagccttttcatttcctgggatactattccataaataagtctttttccctcgtctaatctatactggtgatggctgtcagcaccactttcttacacagcaccactttactcgtgttactgctcactcaaaactctatggtgtttctctactgttttaccctatcatctggctgagttttgtaggagtgatgccagtgctattgccgttctccactgttctcagactggctctttacttgtaagctgatcttactcccagcgtccatgcatatgcttttgcagctccgactttttggtataccctttcacactcatttttagtttaactgtggtcatctcatcttttggagcccatctaaaggaattctgtccttcagcttctgtctttccaggttgttccagctcctgctgagttcccccttctttgaagtctatattctttacccttgaggaaccacagaagttttggaattacagggggacccatatgtaatttaggcttaagcactgttctctgtccacagtcagagtggagatcttggtggtcatacaatttagccaagaccaggcagttgaagaaagagctgcgactcaaacaaatccttgtcttctgatcgttatatcaaaactcttgccaggacactgtgctttactttagaaaggtacagaagattggttagtatatacaagtgtttgtgtactccaagccacttagaatttagtatgcgtttggtaaaattcctggttattgggatattgaaacagtgaatcaagtgctgtgaaaggtggtttatttagcagtttctcctggggctccctaatagcattagctcagtagggttttgtgcagtagttggtgtgttgaataaatgacagatgttcagtatttccatggtgagtgaagtgaagtccctcaggctctgtgaggacctaaagcatttgttcccaaactttggttgcatcttaatcccaagggaagtgagttagaaatacagtttctg

SEQ ID NO: 132767 - DNA, 1045 bp, Homo sapiens
cgacattattgtacttggtaaaggctgtaaatatgtcagggtacaatttactgaacactgacagattcttggttgatgttttctgtcttcccatttttatggctaaggaaactgaagctgaaaaggtattgcctgttaagccctctccatagcacagagatttatccccacagtttatgaagctgaccttgtcttgctgatggtatactctggctcaggcagggcatggatggtggaatcctttggggatgtgtgttttttttttcctaaacagcactgcttgctgagttctaaaacttgaaaatgtagtagacaggagacataaagacttcatgtatatttctagaattaatagagagttctttttactgttgaggaaatatgctggtgttaatgacaagaccatatgccaaaatgaaagttgatctctgtcaacagtatagaactaatatatgcctttttccccttccttttcattagggcagagcttgggatatggctttgtgaactacattgaccccaaggatgcagagaaagctatcaacaccctgaatggattgagacttcaaaccaaaacaataaaagtatgtttaaagtttttttatatctacttgcggaacagaagtttaaaaaaattaagatttatttgtagttctttcctttcttccttttgggcccatataaacagttacctgggagacatagtggaattttggtgtttgttgcaagatggaagaaactgtttgttcaagagtgctatgtataatcattcatgtattcgcaaagggggacagagcaacaactctcttagataaatgttataggaagcctacggaatcaagtctccttcccttatagagaattacttgccctataacttgaggaaaccttagacttgttcttctataaaggtctgggtagtgaataagcaaggttttgcgagccatgcattctgtcacaacttctcaactctgcctttatagtatgaaagcagtaatagccactacataaacaaatggatgcagccgttatccaataaaacttt

SEQ ID NO: 132768 - DNA, 1020 bp, Homo sapiens
aataggtaacttgaagattttagaagaaacacatccacgtgtacctaaacaacgcaactgtgaaacagcagtcatccctgcaagacctttcttagacctcccagcagccccgttgtagccccagctaggttctcaccattaaggcagtgatttctcaacatggtggttgtacgttagtcaccaggattttaaaaagctagtaccaatgcttcatgacagactgataaaatcagagcccaaggtgggaggatcgcttgagtccaggagttcaagcatggcccagccaatgtagtgagatctcatctcatatacacatatatatacagacacaaacacacatatatgtatatatatctatctatttttgggagtgggattcggggatcaggtttttttgttttagttttttttttttttttttttaagctttctagatgattccattgcagtcaagtttgagaatgcactggggttagaagctgctaagatgcaggaggaggagtatctatcagtagaaagggcaattagactatgctgatacaattgatttattttgtcatagaatagcagtatgacaaaactatatttgtattgcccttttctttttctgttatatttgtggcatcttttttatttaactttaaatgaatatacttaaaatctttaacagtaagcatgttattttttctcatgttatcttttgactagggtgacgatccactttcatcattaatgaatattttcatcattgcatcagcaacctagttgggtaggaattaccctcgttttagagagaaggaagctgtggttcagagaggtgttaagtagcttcttcaaagttgcacagctaactgcgagccagtaaacaccagagccggtattggaagtctgtctttccactataagctggttccttgagcagattttgttacattcagccaatttaattctactcaatgacaataggactgcaacacattttcataagaggggcacaatgcatgcagtaaacacatgata

SEQ ID NO: 132769 - DNA, 1021 bp, Homo sapiens
gcagtttgtctgctgtaaaccttcacatgggccagtcttgcttccaggatggggggtcggtttgcttacctctacatagatgccttacgttcagcgtagtatgcttttggcttgtctcttttatacttctttacaaatttgttcttctccatgttcctattaccttaatttgtttgtcaggaaacacctgaatttcatcttctctgttttgacacactaaagagttctctttttcaagctggtcctggttaagcctgaaacccctgcgatgcactttatgtatttcatgttcattaggtgcctgcctctctcccttgtttactgtgttgggcttaaaatttttgagcatcttagagggcagagaccatgtggtattgatcccatcttttttccaccgctatgaaatcatgctatgcgtatgaaagcattttaatgcaatctgctgaggagagaaatgtcttgtgtgggagaccgttttggcagtagcaaacatgtttggctttagccataagaactgctttctgagtttggaaaaggagtatgtaaatcaaggcccattttaaatggatctttttataatgcagatacctctcatctatctgttttgtaatgatggatttgttttgggggcttaagtggtttgtgcacctgcaggatgtccttccttttctttcaggtcattttttttttctttcacagatagtctcttggatggattaagaaagaattgaagttccagtcaatttatttcatgacaaagaacaagaaaaaaatacagatgtatttggagattataaatattctgattggaaagttgtaaactttggatgtacaggattctgccacaaagtaatttccacacatggccaaaggcaacaaagtgtacacttttgaaagactgagtttggaaaggttgattgtagtgtggaaacccagctgctcctttgagctagctgtgtgtgcccttgagcaagttaacttagcatctttgaacctccaactttatgtccgtaaaatggat

SEQ ID NO: 132770 - DNA, 1051 bp, Homo sapiens
tcattcggcaggataatgcgtttactataccatgctgatgtggatggtgccacattacttttgtgtcctaatgaatcattgtctaggtaaaatctttttagcaaaatcttcctcaaagtatccgtgaattttaaatttggaggattacaatagctaatcacttcaacttttggatgaggtgatttgggaagaaatgcttatgtgtgatatgaatgtggcaatcgtaggagctgcaccattttgtacttctctttaggagccatctgttaattggtgggcaagttgccctgtggtctcagagtggtttgctgtagcataagctgtccctgagcaaaaacaaaattgatacttatttctgtcagggtacctctttgacttaattcgtagccatggttcccatctgacccatagcctttacaactttaaccatgtacagctcaatttcctctggggactgtgttccattaggattccttttctttattgcttcagagagagtgttcttgaggtttgtgaagctgtgtctgtagtatttaaataggtttcctttatactcagcatttatacccccaccagcccaaacaccatcagtctgttttggaatttttcctaagcatgtaaaaatcagtgctgtgtgtgactattttaagtttagaggaaagaaagaaaaatgttcctcctaccctcttgattaactacctcttcattaactataaactaagcaacatgtcctgtacaaagagaagaaaaatcacgttatttatacttaatccttgtgtcgactggggacgatggatgtcctttggaaatttacttcctttgtctttgctaaaaatacctctaatttaattctgctctttctttttgatataaaaggaattacagtggacattttccccccggtggaagggttgtacatatcggtctatagcagatactttatgatcagtacacataaggtgaaatatgtttttattgaaacacctgatcatgtgatgctacccaatattcccttcttaatgactcagcttccctccctctttcactcctt

SEQ ID NO: 132771 - DNA, 1045 bp, Homo sapiens
gggagacagatgctgatgtatgttgaagctagagaggcaggtggtttgtggcctatttctgcctttgcattatttcagattctgttactgagtagaacagtcctttttttaaaaaaaaaaatttaggtcttatatcttggcctcctgccttctctgttggcatcagccaaatgcatgttggctgcaagtacatcattccacacttagtgactggatttattttcagacgttggctattgacaactgaaaagcaatttcctgtgttggggcttaacagaaagcctcccctgggttgtaagagtttaaaataatgaaaaaggtgaatacttcatgggtaagtcttaatgcaagctttgtgtagacttatccccactgcctactttgcactcatgtttgtagggagtttccaaaagcctctgattgagatgaggaaggtcttctacctctggagctgtaaggtcttgtcttgattaaagatgactcaagcttaaccagttgttcagtagtctttgtctgagctttgggtgtgctggagaatatcagccagtgttaagttcttgatttcaagtggtgactatctgttgaagagagcctgtgccatgaaataccgtagtcctcccattatcaacagtttcgctttctgcagtttagttaactggtggtcaaccatagtgttaaaatattaaatggaaaatcccagaaataaacaatccataagttttgagttgctcaccattcagagtatcgtgattaaattttgcaccttcctgcccaggatgtgaatcatccctttgtccacattatccatggctggtacatgttccctgtcctttaatcacttagaatccatcttaacagatcggaaaaaaaaaagtagtgtatattatgttggattcagtactatctgtggtttcagttatccactgagggtcttgtaacccccaaggataaggtagggggtggaggactactgtactcggctagtggaacttcttgtggtatacctcatggttcaagggaggtagagaaggagggaattgtcata

SEQ ID NO: 132772 - DNA, 1037 bp, Homo sapiens
agttttatttcctcacattttaatgctttaaatccagtcttaaggagttgcctccaagggtactgtcgtacgaatcctttttcctaaccctggtactaagtaagccatgggagcttttttcattccatttaaatgaattgtagtttgctcttattctactttaaatgtatctaaacattttgaatataaatgagagactgatggtgtatcaaatcaattgacatcttctcatgtagacaagggctctcctaaatgacttcccaaatcctgcctctaaaattgtcttttttttcttttgtgaacctgagtattaggttagctctttttaaacatggtgccaagtgattttgccattatatggtgcagacagtgtactaccttctcaagtagaatgatttgggatctaatatcttaaaatctaacaatgttataccaggtttgtttttagacctttatattctttattatttgttgtcctttttttatgggggtaagcccttttatacatattggaataggattaaaatacagaattgttaataccgatttgttactgtgttttatatcaatatgtgtatttttttaagtgctggaaattgggagcctttgcaaaaaggcgtgataacattccattatatccccagctctagaacatacaaagctagtcctgatgtgctacttaaaagtagaatatggaatcttctggggttagtttcttactctatttgatattttagttctctgaatgcttatagaaaacaatatatttggatatagccatcaaagtaaggaggatgtctaatattctttcctagcctttatagttggacaaccgacttttaaagagtcttttttttttttttccttttttaagacagtacccttggaggccactgtgttcatgaccagtgactccttgagactgggtttattaaatggacctgttagtatagtgaataacagctcttaggtaattttgcgtagttgttagtaggcaccaaaggaggaagggtgagcgttagttgctctatagatta

SEQ ID NO: 132773 - DNA, 1029 bp, Homo sapiens
cagcctagccactcaatttgtgttgtgtcctgtgtgtgctttttgactctgaacgtcagtttctttcataaagtacctagcacacaggggtactgtctctctttcctgtcctcttcttaccagttaatacccattcagttacgtgacagttgcagacttttgtttttccccccataggtaaaaagtagtttttgaaaaacatcttgaagtagatctgttgtcctagatttcttggagtttgtcatgatgtgggaagaatgcaaagctcatcctccatcctttgctttctaggtgatttgaccaacataattgattttccaggggtggaacaaagtaagaatagaaagtgcgaggcaggacttgggagcccagaatgatgattaatgatattacaccagcctttatgaactagagcaccggagtgtggaattattgctctatgtggtattgtgtgaatgtttcagaatgaattagcttgacttaaaatatgaaggtgctctcaagtgagctttccagtgagctattactgggctttcgaaggtcagcaagttgttaaattgagccatgaagtgttggttagataaaaaccaactgcggcttatttttacttttattgacatcatcttccttaagatgagtatccgtttaatataaaacgtaaatactatactaaatagtctcattttatcaaagatgatgttcaagtctagatatacagagacctgtgttttgggatgttcaaaaacctaatattcctgcagtgttagcagatcagaaggctgaggaaaaaaattactatccctttgttttcttttccattgaaatattcattgaaaacatctaaagcatttcttcattcagtcatcacagactttacagatttcagtttgtgtgtatgggggagggggcagtttccatgagggtatggttaacttagcagatgcaattttacatcttgttttccttttttgttaaatccttatgcatattgtgaattagagtttatttttagctcttaatgagttcttt

SEQ ID NO: 132774 - DNA, 1043 bp, Homo sapiens
cttctcttaatgtctttctgatattttggggaaagagtgcttttatgcaaaccaatcacttaggaattgcatgatgactttttcccactataaaatttcattcacatttcctcccttctcccacatccttaagagataagacagcctgcagtattttgctttattttactttattttttaaatttttgaggtgtggtttacattagttcttcagaatagatgccaagataactagttaatactgttttaaaatcaggctcttaattaaaaatgcttatatttgtgcaagaaaactacatgttgaaatgaatttggaaagattagattggaattgcctcaatttcaattaagccacactgcatggacgtgctgggaatatcaatacaatcactgtaaattttgtacaaactgatttgttgcattatcttgctcatctaacatacggtactttttgtgtccatattgcagacggcaactccaaactaacatggcagtcagactgtgtgatgtggcttctctgcttagaagtggttcgtgggcagcagagccttggaccggggtctgtgggatttttcttaaattctgtaggctacttttttttagcatgttggaggagtgctgaggccataccaaacacttgaatctttcatttggcatactaattattcttacatttaacctattgtggtatggccatcattaggacttaaagcacattgcaattttaactgtagtggtgtatgtagcatcagaaccatgctctcgtatgtaatttttttacaatctaaattaggatttagcgcagactcaaaagagtgacaagcttttttaaaaaaacaaaaaaagttttggtatggtctgaatactaagttaccgtaattctatacattctgtttactatgtatttttttggttactaaattttgaagttatttacaattctttatgctccaaaaaaaaagttgaaattgtaaatctggctgaaaattatttgcccagtaactgttgaaagagtttgcattctgtgaacagttgtgttgagc

SEQ ID NO: 132775 - DNA, 1030 bp, Homo sapiens
agtggttttcttggtatgggatggaacgtacgctaattgtcttcaggctaaatcttagttcatggttgcagctctttaaaatggcttaagctcttgcatggttttttgttttggtttggtttcttttcgtttgtttgtttgttttttggagacagtcttgctctgtcacccagtctggagtgtggtggcaggatcttggctcattgcaacctctgcctcccagattcaagtgattctcctgcctcagcctcctgagtagctgggattacaggtgtgcactaccacacgcctgtaatttttttttttgtatttttaattttttgtatttttaatttttgtatttttagtagagctggggtttcaccatgttggccaggctggtcttgcatgtttttgagaatgctaagactctgcgttaagcactatgctagcctctgagcaaatgcttacgatgtactttgattttgaatttttcaggaatagctatagcgtgtgattcttaaattgccaactaaaacatcaccgtctgctgttcagtaataaaagtgttttgacttggttatctgcttggacatttttatgttaaagaaacttcttggtcgggcatggtggctcacgcctgtaattctagcactttgagaggctgaggtgggaggatcctttgaacctaggagtttgagaccagcctgagcaacatggcaaaacctcgtctccacaaaagattttaaaaaattagccaggcgcggtggctcacgcctgtaatcccagcactttgggaggccgaggcgggcggctcacgaggtcaggagatcgagaccatcctgactaacacgctgaaaccccgtctctactaaaaatacaaaaaattagccgggcgtggtggcggttgccggctactcaggaggctgaggcaggagaatggtgtgaacccgggaggcagagtttgcggtgagcagagaatcccgccactgcactccagcctgggttgcagagcaagactccatctcaaaaaacaaacaaaaaaagattt

SEQ ID NO: 132776 - DNA, 1021 bp, Homo sapiens
ttatttgaacctatgacaacagagagcctagtgcacatggcttttctctgttctgagcctgatttttttttttcatctgtcatccagatacaatctctccttctcacacttaccagattgcgtcctgtgttgtggttctgcatgtgttcccttctttgcttagacagtaagtgggaactccttatctgagtcatcttggttatccagcacagtgccctgcacataggatttgcatgttagaatgaatgcagatgtctgtccttcaaatgtgttgatatttgaggcatatctgttttcttctgtgtccttttagtggtgactaaagccttatttgaaagctccatctccaagaattcctgatgcctttattcaataatgaacctcgttgttttcaggttagtgcatggccactttgtagttgtgcagaattgtaccagtttttcatgctctctgaagttacatgtttttcttcagtttaactttcggttttccttggagttactccatttaagtggcttcagactgtgagctgagtgagatcttgctgtcttccagtcttggcaccttgaatatttacttttgtttacaagctagtttctctttggctgtttttaatttggaggactaaagtgtaacaaatgaggtaaggataattctgcttattaatgtcttatctggaagtatgatgacttcacgcctccggagagtagagtttggctacctttcacaggtattggagtaaattccaggtatgcttattgcccttttgagataagagtttgttggatgcatagaaaatgaagtgggctctcactctagccaaatagttaccagttagtatcttgggatatctgcagactcagctgagctctcaaatgggagaggggatgaaggcacaatgagcaactgagatgggaagctgggattggaaagagaagaggctatcaaagaaatttgtcttccttcctggtttcacttcagctcacttcttgtgccccggggtctccatccttagctatgc

SEQ ID NO: 132777 - DNA, 1729 bp, Homo sapiens
acatgttaattttgggagatacacttcagttctctaacaggggtaagggtatttaatttctcgaggcatgaacagaaatgattcttttcccctgaatttctgatctacagttttagtttttcattccagaagggaaatgctttctcatctttacgattggtcaagactccttgctcccacccctgcgattagcatttgccgttttcaacctggagatttcttttccatttaccctgtctgtacagtagtttgtgaccacctctgccttttaaagttgagttttgacaattgatatacaattgatttcttctctaacctcttcagttttatagtttgacctcttgttacaaactgcttttaaaggcaccatgcttatgctttaaaagccacttaaacagaacatatatttagaagacaggatgtttttgccacagatgtcaagagggtcttggcagtgttttcacagaatgtctgctggtgtctgtgcagctctgagactctaggcactctgtacttagagaacatgtagaggttaagtgttcatcaggagacctgcgatgtttgtgttggaaatactaagagatgtgaggtttaggatgttttgtgttgtgttgctctgtgtgctcgtccagagcagacatcctcaagtcagaacttaatgaggtatgcggaaaatcaccaggggaaccgtaatatataaaacataaaattaaagctctgggatgaatggctaatgcctagttacattagatagtcagtttatagttatttgctccagcctaatttggctgtctattcaaggtaatcagcagagagtcaaacctttaactttttcttgagggactgcagtgagccttttagctttctttacgttgagctttatggtgacagatgagatgaaggatactatttcacttccttcaagtttttagtgtggcctcattatatttgaaagtgaattcccagagcagccgatatgcctgtaactaatcctaagtagaaaatctattccaaagcagaaaatatattttggctttacctgtgcagtcacagactgggaaagcgggtattggggtgtctaataatgtggatttaaatggtttggttagaatatctactctcctttcatccaaccaggcatttccatatatttttgtattccctctctttttttctaccacagaagtttaatttcaagattttctgtctcatctctctctggtattcattacacctgttacatctgttttgtttccagtacaaaacagcactcggacctgcctcttttacattggtcctctaaccaaagaatgatttaggagaaaatttgtcatttgttgaaaggttgttttttttttttccccttttttaccatcaacctgtcattttgtgtatcttaatggattattcaagcatttatagccctttgaaaactttggtttcaggcattagaaattaatgtaatttaggaacatggttaccccttaccttacctctgagtgtcctacctgtatacattcaggaaagggtttaaaaagcatagaacacttaaaaacttcaaatatgttttctcatttataagtgacatttagtaaagtcttgaaagatataagaagctaactgttttgcaaccatactgttttcctctgggctgtctttaagaatgtttatttacttttctggggaagggagatatgtgatagcttgtataatacgatacattatttag

SEQ ID NO: 132778 - DNA, 1130 bp, Homo sapiens
cagtcctattttttgagacattttatatatcaatgactatggacgtagtattttccagtacttacaatgttgttttccccatttattttttatttttatttttttgagatggagtcttgctctgtctcgctcaggctggacagcagtggcgtgatctcggctcactgcagcctccgcctcccaggttcaagcgattctcctgtcacagcctcgcgagtagctgggactacagccatgtaccaccacacgaagctaattttgtatttttagtagagatgggattttaccatgttggccacgctgttctcgaactcctgacctcaggtgacccacccacctcagcctcccaaagtgctgggattacaggcatgagccaccacgcccaacattttctccatttcttaaatagacactggcaggatcttaggttcttagggaatcttatataaaatataaacaaactacccacttaattataatgagcctgtggtctataaagataaggacttaatttttcaaagttgttgactttgaaaatattgcttagaaatgtgttttttaatgtctgaagagcagtaatattattttactcctttagtttgttttgatagcagttgatcaaaagctattataaggcatgtatacagatgttttgtaggtgtgcataagataaaataaggtgggaaatttggttaaagaagtgttcatcttctttagctttagttaaattttatttttctaggagctgtatatacctaatttgtatggtcctggctctctacttattattaaaacaagagaagatggaaggattaatgcatactctgccatattttatctgtattccattggtcaggaaatcttcccagattgtagggagcattgccaagtggttggtgtactggatctgaaaagattagactggtttccccacacaaattttttcatgattttcctaaacattaaggattgatttgtacaagctttgtgtaattttaataattagtctggtttgactaatgtagttatttgatgtaaaaatggttgatactttggaattctcaaattctaggaatgtttaaaactgaatgtatcttattcagccttgaatttgaaaaatgggggctgtc

SEQ ID NO: 132779 - DNA, 1198 bp, Homo sapiens
aagcagttttttaagataatgaatttaattacacgtgtgcctgggaaccattttaaaccatcgagaagggaaaaatggacaaggcctattggaaatggaaagtgttcacctaggtgtatagcttttagcttgtggttttgaaggataggaacagaaaaatctgactcctccctcgtctcccttcccacacacaccccctacaaaggcagaatccatattctgatactttatatgaaatgttacagtaacatttatcagatgtcaaagggtatggcatagaagtggttgtgtcagcataatttgaaggctgcttctctgtgccaggcactgttctcagcagtctacatggattcactcacttgagttcttacaaaactctgagatgtaggtggtataattatctccccacccccgccattttataggtaaggaaatggcacgtagagtgatttaagttacaggcccaaagatgcagtaaatgacagagctggaattagaactcacgcagtctggcttcagagtgcacagtaacatctatactggaattctctctgcccaggtgttagaactaaattatttaatcaaataaagggtcctgttttgctgttgcgacctttttgcactaatattatgaactgtctcctcagataaataaccttgcagaatttaggcacatttgagttagaatcttgtaagagacagttaaaggacagctttggctctgtcatcctgcctgaaggtttcagtggctccctattgcttacagaacagatttcaaacactttcaggcattcagagttctcccttctttgccggatgcaatgtttacttcatgaactagccaaataactttttctcttgatcatgacccatgaattcttatcccatactttttttttcttttcttttctttttttttcttttgagacagagtttcactcttgttgcgcaagctggagtgcaatggcgtgatttcagcttaccgcaacctccgcttcccaggttcaagagattctcctgcctcagccacccgagtagctcggattacaggcatgcgccaccacgcccacctaattttgtatttttagcagaggcggggttttctccatgttggtcagattggtctcaaactccagacctcagatgatccacctgcctcagcctcccaaagtactgggattacaggcgtaagccacca

SEQ ID NO: 132780 - DNA, 1974 bp, Homo sapiens
aatttctttgagtttaaaagaaataaagcagcagttaagttttaaatgttattttaaaacatattgagcctatttccagtaatgtttttgtattttgttctaggctcttaatatttatttcatacttcagtattcctgggtgcgtgtacctacttccaaacagaaagttttgagaaatagtctggagggcttctgtgtctgttaggtagctccaaattgaaataaaatataaaaatggaagacgaaggacagttgctgtacagttcacaattagccttaatttgtagatctctgctgggcccagctgtaaagtttattggtataaaatgtgttcttgatctggaaagccctcaaataaggtgccttgctttccaacaagcaggaaggaaatgttaatgccagttttcctgtggcttctgtttaatgtgaataggatcctctgaggagatttaaaaagcggctcattgcccttgaaggcacccgtatcagatgaagatagatctaaattcgtatttgaataaaaaatttcatacgtcatctgttttcccaaactaaatttaaagtttagttttaaacttttactgtaagttattttaagtaagtcaaattttctaattttgtagattcatttgcttgagaagcattctatactgattctctactccccaaaaccaagtaatctgaagtagttttccaaagttggggataatgacctatgttctttgaaagaattcttaaaatttccatctgatatcttaagcatatagggctgtagtgcatttcacttcatccttgaataagagggaagggggctaggctggacatgttctgcagcttgtgaggtccttctcctcatgtaagcatggtgccatttgctcattctggcttagtagagctgctcttgggcactaccatcccgggttgtgaagggtgcacttaggcccctgcatgagcagataccctgggttacacatttggtgttaaaataagctgagaagaggaataggaactctactgttttaggacttgattgttacacctccagttcagaatttggggtccctattcaaagtcactccacctatccaagccttcgatgtctgacctacagaatgggaataatgaaaggttgattgtgatgctttatggtgaagccctcattattagctactttcttttctcatttttgaattgggattctttggaagaccaaagaaaacttgccttaatgaggttattttaggagaaatattggactttaaggcttttgtttctttaatgctttgtttctctaatactcttcaaatcttgcatagggaaagattaggtctgtcccctgcacccacccacagagtccttggacagctgtgtttaaaagtgagggcttggtttaggtttgctgggagacctcttaaagcttttgggaaaggaaagagaatgggaaactacaaagggcttaagatttttcttttcagtggtaaatagagccctttcagggttttctaattcttaatagatttcttgcccaactgtggtctcttatttggtgtgttaggtctgtaaagaagcttagtctagcaggaagcaccttgggtgtggtaaggcaattaggggctctcaatagaagatgcactggtgacctgcatgtctttcaaactagggtgttggctgctgggagtagcaagagttactattgagcatcagtgacaaagaattaatcttattaagttggaaatggggctggatattgtaattagatgtgagagacccagtgatcagacttgaggattgtaggccctcaaaactctgcttttccccactcacgtggtggggtggagtaagagtacaaaatcttgttttttatggagggacatctaggttctagtccaggtttcaccctgagtgccttaggaaaatactcacttttcaggtcctgggtttcttatctcttaaaatgcgggatgggaaacaagg

SEQ ID NO: 132781 - DNA, 1025 bp, Homo sapiens
tgttaacctctcaggtgtagatttgaagaaattaaatatttctgtcttttattgcttgaacccaggaggtggaggttgctgtgagccgagatcatgccattgcactcctgcctgggcgacagagcgagacgccgtctcaaaaaaaaaataaataaataaataaataataaatccatcttttaaacagttctgtggttatctttttgcatcaaatatatattttttaatttgcacaaattattataatagaattactaattacttcaaaagctgatcccccttgggcttttcagagcattttaatagatttgcacttttcctacatatgagctgtttgttagcattcagtgcctgccttgagctgagcgttgtgcatggtcgttgggtgctcagaaacactaggatgtggatgccactctcaagttctccaagtctggttgacagtccagaggaagaaaacgtgagtttatgggagtttggtgaggtctgctgcaaacattgggaaaaggttcctgaaaccaggtagatgtagtagcacttgtgaagctcttttatacagatagggggacttgtccccccaccccacccgcaaccccccaggagaagaggattaagtgtggtgtactcctagcatgtaaggaaaaagttttgattattggaacatgggtgggtttctagaggacactgaaatccatacaggaacatttctcttattttgtttgagagagccagccttgggacaattttacaggatggcttagtgtgaggaaaactgaagcaaaagacatgggctgatgtggctaaaggggccttgaggaggaacgcaccagggctttgagaggaagatggagcatgcatggcttcctgactagggtgtaaacccccaaatgaaagtgaaaaactgcttctggcatgctttgtattgtgtaggagagactcataagatactcaagcatttttctaaaccagtgtaagtatgcaacatgaaacatgtaatagcttgttatgctttataaagcatcttt

SEQ ID NO: 132782 - DNA, 1227 bp, Homo sapiens
ataacttacatatttaaccaattggagttaataaaaattgttaatatttaaactatagcaaacatttctatgttttttagatatcactactatatgatggtaattaagtgctggatactgaataatattttaagatgactttattaaagtgctatttcttttcatccatacctgtgaataattaagaatttatggtatctgtttgcagtctagttggtgagtttaatttacttggaccacccagaaaaaaatatacaatgatgcttctgtaaccactttgactaagctgaaactatgctttttacatgtatttatgacctgttaataccgcttcaaagtgtgctgtattgaaaagatattggctgcttcaaggttggactgaaatgactgtgtttgccaggaataaggaggggtctccatggatgaccactgggccagtcatttaatagccatgtggaaccctcttcggctatcagaagaatgttttctgctctacactgagtatctttggaagcagatagagaagttgaggtctaaggtagatgctctaatcatggatggctaactttaagaagcgttattgggccaggttctcctgtggtatatgccaagctcatgctcgtgcatgggtacacacacaagcccaaggtacagtagcagctccatctgttttgtatgttgtaggcctgccttgacatagaactgttcgttctaaagcaactcattttaaagctgcagtatgttaaatgggcaacccttcattgaagaccttgggtatgttggcagtttatcagcagcagggttgtgatcctgtcacttcttgttaatgaaggcttttatttagcttagcaaatcatatctcttgttagtatccactctctcaaatggtagacttgaaagggatgtttgtaccgttttatttattagtagccatgagggtgctttggcccttacttgttatagccatttagccatatttcttttacggagatgtggtttgttttaaactaggaaaatccccaaatgattaacgtctttcttttgtttatcatttttgaaatggctttttatatttcctattaggtggtctttttcttcagtctcaatttcacttccattttgaaattcctagcaggggtttgtcagagcatttatgttcccagtgttgcagctgactttcccagcatttatttgttgtccttgggtagtccaagaggataagcattc

SEQ ID NO: 132783 - DNA, 1119 bp, Homo sapiens
ggaaaagacacggaaaaaaggttaaggaaaatgaggaagtgaattttccatctggctagtttcctcattcacacagatcaccagacctaaacagtacagtgaatgcatggcaaggatatgatattttaaaatagtgtctttctgaccaccttattagattattaagcttacttgactaggctcttagtttcctcagagaggtggactctggcaaacagttttatttttaatataagctggtctttaggaagataataaaaactttgcatgccttttagcttataccatttataattgtttgatttaacatggatatagcatttttttgtaggtggatattatttcatcacagcttttagatttcagccccttttccttaggtgcagaaggaagctactgaaaatatagacagtaacctctactcttgatggaatttggagagaagtaaaccaagttttagttcaggagaggagaattttaattttacttctggcattacagggacagcaggtatgagagttaaggagctgttacggaatgggcacttggggtaacaacttcccattgcctttggtgtctggtctctccttaatagctttttatattggtttaaattttcagggcacaacttaaatgttactttcaactacattggaagctctttgatgtcagtgattcttataactttgttttctgaatatagtgggtcttattgtcttattactgatttttttttttaagagatttagtctcactgcagtggcatgatcatagttaactgtaactttgaattcctgggcttttagggatcctccagcatcagcctcctgagtagttgggtctataggcatgctttactgcaactggctaatttttaaatttttttgtagagatggggtctcaccatcttacccaggcttgtcttgaaatcctgggctcaagggatccttctgctttggacttccaaagtgctgggattacagacctgagccacctcacctggctagtctgatttcttgaatctaataggtcctatgtctttaaaatgaagattaaaattatatatgctgaaggtaaatgttacatgcaagtttttttcttttaattgtgtattcggcc

SEQ ID NO: 132784 - DNA, 1394 bp, Homo sapiens
gcaggtgcctctggtataaaattggccaacaggctatgcacaaagcagtcaggtgggatcctgacaaggctgctccgtactggttagctgtaatttagaatatcacaggatgaagcagaagttaattgttgagggtgaaagctcaatagcattttactcatcatcacattttataggacatagtaaccttaaactttgaccttaatacgtatcatttctctttaatttttgttgtgtttccttaaatttggcgaagactaccagagattttgttgggtaaaatgctttgtagctccccagttccctatggaattcagaagcattaagagatccagggactttgttaagttttgggtgttatagttcagactccttaaggaattttctggaactttacccataaggaatttttcattatggctaacatttctttctctctctcattccctgtgattattctctgttatcgtctcaaagaaatgtggcaatttgatgacagtttattaaatagcctatgaatatttgaaatgtttacatctaaagtttttattagtagccactttaaaactttaaacttatctctcttttcctagcatttaacattttattattttattgtgtctggcctcctgacatgaatggcattttgctctttttgattgtccttctattcagtttttgatttgctgatccagccttttctgccccccagtactttaaaagcaattattttgccagtttacatgtgaacatttcttggtttcctgtgcagattttcatttgtttagtaaatatttgtgatcttgctatatgccacatatactaccttaggtattaagactatagtagtgaatacagtatactccctgctgatatgaaacttagagtttattggaggagatattatgttaaagttctacaaattattacatataattgtgatttgtgctgtgaaggaaaataacctttaaggcttataacacagtgtgggaggtgattagtgaagatcatttgttgatttccttcctagctaccttatttttactgtacataaaaacagactagtttttaattttataggcataaggatagacagaggtcctaaaattaaactctattctccttgataaattgatggtgaactttgagtcctagagctgattcctgccacccagcttctatcccaccatggatctggctttttatattttttacgagaaaccgattttaatgttctttgcaggacaacgtaatttggcaacttttactctgaaagctatgtggtgaatgcaaagcccagcagtgagatctgcattgtctaaatcctttattctctttacccatggctttgaaaatgtgttggattttgaaatattatcagtatttgtttaaat

SEQ ID NO: 132785 - DNA, 1773 bp, Homo sapiens
tagaaaatgtcagtgtggagccttccttttggtgactttaagcacttacatttctagttaacttttgttcagcctggtaaatagatatgaagatctgttgtatcaacccagcattaatgtagcttcttaggatggaacaatgcccataaaaccctgctctcctggcagccacttcagctaggccagttataacgatgaatcagaatgtgcccctgtattgaacatcttagcaaaacccttcagaataatagcttaatgttggcagttttaagcattggcttactctacaacccagccaattttttttttttttttgatatttggagtgttagtataagtgtatgctcacttaaaaacttaattttgaattaactgtgtatgattttaaaaaatcattgtaggtacatttggaacttatttttcagaggcacttaaaaattcttggtaccaagcatcttctattctatgattatatgattcttttaggtgaacgtgttgcttgtttttgatgctccctgcagcatctcattgcggcacctcagggtggcttagttactgggttggggtggggaattgaatatcagtaaaaacaagcatgttttatccccctaaagattgggagtcattcccgtggagcttctactgtgcaataagaatgactttgatatatgtgggctgctagttaacttgaagcttagggcttttccaaattaatctaattttgtttttgagtttgttgaaggatcaataaaaatattcttctaggttttgtgttgagattatgttcagaagccaggaagattgtgtaatacttattgtttcatcacaaattactgagtgctggatactgagaacgttgagacttgtataaagtgccctttacctcatattccttggtctctacctaaggagatgaggcagaaaatgataacttaaaaaaaaatcacacactccccactcttgcatttaatagtagaaactgagtgcttgaggaattaagcaaagagatatatccctgttgtctgggaatcaagggatcaggccaggttgttgcttattgctttagggacaggactgtgtcttttcttggtccattttgtctattttttgctttttatgtcttatttccctcccccgttcctcccatattgtttttgttacctttgattttcttttatggtatgagtaactatttcctagtttgccaggagctcagtcacaggtgaaaagtatttctgcaaaacctactcaagtttgagggtgtggctagagagagacaagctgtgactgtcttaattccactgttgtcccagaagagtagatctgaggcacgttgtgtttcaaactacatgaagctgggtgtttcccccagagttttattctgttgacaacattatgtgccagcagcctcctctgggtataacatttatttttcaaaacacctaggaaaaagtcaaaataattacaacttttttgacttcctcccttttgggaatatagttgcaggagcaagaagcaagtaacaggacagaagctggggtgcttttcagagcattgatctatgccttctccttgcgtcatcttcatggctaaggccatgtcttccaggagcatgtgttgtctgggctgctgactatggctttctcatgccagtgcttggtgttctgaggcctggccactgcttttctcccttaatggcatttgcattactgtttcgtgggtttttttttttttccttgaaaggtgatcgaacagcttgtacgctgcgttacc

SEQ ID NO: 132786 - DNA, 1045 bp, Homo sapiens
aattcaaaatatagtttctcctaaacgtgtgttacttttatatcaccatacagttgaaaaatcgtaagtttgaaccatcataaattggggaccatctgtagtgatagatttaatccttgggtttttcctttgacttaaaaagtttatcatgaaagggaaatttatattctaaatgttcttttcttccagcattttgtttttgtgggttgttcattattggagattatttcagcaactttaaagactatgttaataggatatcacaaaaatcttttataaatatcaaagcaataaactattccttcaagatggatttttatcccctttttttttttttttttttttttttttttactgaaagcttttagtacacactttcttgactaatttcatctctttatgggactagggaatgatagttgttttgagattcttagctttcctgcatttctttagagtcattgtaaaattggaagttcttgttaatattgaggggctagaatctctttaagcatttgaagaaagctgtagctgtctcttcctagagaaatatatacaaataagaaatttccatacagtttttagtattttgcactttggaagaaagcgtgttaaaatgaggttccatttgggaaataggactttggcaattagagttgtcttcttatactagtgagaactgggtgaagtcattcagaggttcttgtctgctgttgagttagtgatgtgggcctttagcattctttgaaggatgactgactctaagctttcctgtctcatagtttgttttaaaatccattctgtttttgtaaacaaataatcacacacataaggtcttgtgatcaccgtgcccgtgcggccaatttgctgagttgtctcagtaggttttgtcacttaggttgaaattcttaatttagcacagccaggtggaaaatagtaggctagaagtctgaagttttcagcatctggtttggtttaattacttatatccttggtttcttaacctttgattgtgtataaaatcttaccctccccatctcaagga

SEQ ID NO: 132787 - DNA, 1471 bp, Homo sapiens
gcttgtaaccggtatggttgcacatcctacccaatcttgaaattcttaagaatttttggacaaggttaccctgcattttcatcttgcactgggacccacagattacgtagcttttcctggttagttgccttcccacttgttagtatttagctgtcagtattgctgctttgttgatatattatagaactgtttgaaggctttatgtctagtgatgccacacctgactatcaaattcactatggaggacataaaatgcataaaattttttcttgctttggccattttcattttacaggtgtagaagtcttcaccggttctggttacgcacagagcccacatattgtagttcagtgccaaatccacacttttgtatgttctaatttgggaagaacatttattgtatatttatttggttcgagatactagacggtttatagtgctagttaattatttaaggatttcacataacgtaaatttgccaagtggaaacagaagacacttaagcttgaaaggcagtgcttattttaaggcttttacatattaaaagataagtgttttattatgatttaaatgataacttttggagtctgaattaaaagtcaaagtttgcgtaataaaatcttagatttttgtggggtacttaggacatttttcactagtaaatttaacagatttggctttcagcttgtgtgatgtgtatcatatgtttcattttagtaaggctagaagaattttttatttcaagggaagaattttttttatctctaagcttgtattccattgtgcaaaacaaaacaaaaggtaactcttgtgtgagcaacgctgtgctaaatgcattctcatagacatcttcatctttaatatcaatgttaagtttctagagattggtcttaataaaaataactatttttgcaacgagcattcttttctcagagctttgagttaggctctcaatgcgtgaactgaattgatatgcttaatgacatggtacctttttgaatattgctgaatagttctgtgtgacaacagatacaggttttcgttgtaagaaatctttatgaagagaaggatgggggctttgaggagtaaaataggtaaaataacccagaaagtcataagaataggtggaatggggataaaactaaaccagtttatagaatgccttacagtgtcttttttttaaataaacttgcagtttcttagtatatatttatattactgatatctattacatcagtttctgactgaaaatgaataggagataaggtctgacatgcaaaatcccctttcccacttttaaaaatgtattttaaaaaacttgacaaatttaaaattatacttactgtaagacagtaacagtaaaatgataggtttttttttttaagacacagtgaaggttttgctttagcactggtatattttgaaccaggtatgttatctacagtttgatgtacctgtatatttttccgtt

SEQ ID NO: 132788 - DNA, 1020 bp, Homo sapiens
catgcctctagatgcgagctatgagcatgcagttgtagctgcccagatggtcatttagaattgtgtgcatttttaaagaccatctttatgacaaagattttcaagtcctatcgtctctacattttctgaaaacatgggaaaaggatttgctacgagttgtccactctcctttattccctccctcaaagaacggttcttagaagtgccaaaatgtaataccttcggcaaggacaaaagcgcttttaaaacttaattttctagtggccctattcctaataattcttcataaaaatttagctcagcctcaaaacttacggcgaatcagtccatttaaaaccattcgaatatcaattgctgtgtaatgtccccattccctcaagtaaaatctgtttgtttgaaatattgttttgttgcccttgaagagttttctcaagaatcgtttcgccagagtcgcttgaatttcccatttcttgtggaagctgacctggagtttccattttggtgagcgggtggaaaagctgtcctgcatctaccttgtcttagtaacctttgggtatatataaatggtgactgtattgctgagtggacccgaatgttactgcatttgtggtaggggccttctttataggaggtttgtagggatgctaaggtaacaacacttaaggttgtggggaggatatacttacgggaagttcgcttgcaaactatggggagagaaagaagaggaagaaaacatctggaagataaaggccagaatggggtaggaaaaattagaatatgaagaaacatgttacattaaattttctgtgattcctcctttgtaattttcctttttgagagagtatttttatttttgtgtggttaaaaccagccccttgttgcctgttatttgggtaactttgtgctgccacctttcagggagttagttgtttttttcttcctttgaaagacaactttaggtgttaagcccctccctcttccttatctgtaggtgtttccttcattgtgtagtgtcttctt

SEQ ID NO: 132789 - DNA, 1034 bp, Homo sapiens
agataccaaatacttttcttggaatacatcatcttgattgaaaactactaggatatttttgaaaaaatagctcattagctggctgggtaagtttgtttgtttacaatggacttttcaatgatggtggtaggcatcctggaagatagccactgtactaagttcatttttctctgttcttggctgctcctctaaccttgaactttatttagtcagggaaaatggaaggaatgggaatgctaactaatggaagaaagatattttctttgacctttgaaaaacagacttaagtaattgaaccataaatttagaaaccgggcttttaacaaatgaaaattttaagatgtataaaaacagctcccataagtatatgcaccaaatgtattaaccttgtgatatataagattgcacctaggaaaagttaacaccgttggagattattaagacttaccaactcattcagctttaataagcagaacttgagccaagtgcggaacacacttgtaccaaattggcaagaattatacacttaaatgtaaatacatttttttctgcgaggtaaagctattaagccccccaaaacaccttagatatattttttgaaaactgtcctgcaaaaatgtttgtcctaccaaaagtttctagcctatttcacaataacctatatgacagttagtacgacttggaaaagatgtttaatatctgaacaaggtaatatgttctatttcctatttttgttaatgggattgtagatgtgatgtatttcaggctctgtgttatctatggcaggaaaaaattgagggcaaaagagtttctttggcatacatcaagaactacattgtaatcaatacaagcaaaccaagtctggaaaatatataagcaaggtattaaataagtaattcactgtctataaatctcctaccagtgggtgaatgttgagagtcatataagggcttcagtgactaatggaatacagttgctcatcccaagcaaccttggctatccttttagaaacttctcaacaagttctgctgcat

SEQ ID NO: 132790 - DNA, 1047 bp, Homo sapiens
ataaagagcaaaagggcatcttacatggcagcaggcaagagagagcatgtgcgggggaactctgctgtataaaaccatcagatctcgtgagacttattcactatcacaagcacagcatggaaaagaccgacccgcatgatttaattacctcccactgggtccctcccatgacacatgggaaatatgggagctaccattcaagatgacatttgggtggggacacagccaaaccatatcatatcacgttgtccgagtgcttgagacagggtactacaaccagactcctcggagaaggttgtgtttggtctaaggctcgtcaagctcacccttttaaaaagaattgttcaggaatataggcctagccaggcagcctgaatcagttcctccgtcaggcagggatatgggatatatatggggttggtgaatgcaatggagcagggttgtttggaactttaaggaattagttttctgacccagaagagatctgggtcttcttttagatttcaagttgtgtgaaataaagctgaaaaatgtcatagccatttttttctgtcaccaaggaagctattttgaaccaactcagaggagggaatagtgaaggggagtccagagaaataaaactgaaatactgggttcagcctaacctgaggcctaacgtgcctcatggcttgcacttaagagagcctaagccttgttatttcagtcagtttgagtcagggtttgtaatatatgcatctaaaagcttcttaacatgatatacaattttaaaactgaggtttttccctagagataaaaatgtgatctagatcagtactgtccaatactactttctgagatgatataaatgttccgtataagtgtagacactattcaaatgtagctatagaacaattaaaaagtggctagtacaattcaggaactaaatttctaattttatttagttcttcccattttattaattttattttttgttgatacataatagatgtacatatttttggatacatgtgaatatttaatacattcatgtagtttgtaaagatcaaa

SEQ ID NO: 132791 - DNA, 1103 bp, Homo sapiens
aatcagagaaaattactgaagaaagtgctgccttagtctccatttgttaatgtatagatgatggctgtcttctaagaaatgatataatcttgatgatgtgaactttcactccattccagatactttcagattttagtgacagttctgggtgctttcatgtctccaggatggatgaaaaacagtcagttctctagaaggatagcataaaagttttttttttaaaaaaagagagggtttgcctatgtaaatattggatctcactgatctcttccagtaatgttttcattttttccatctcttggaccctaaatgacacctacagccaattcccagttctatgtcaatccaaaatattccttttctattctttacctgggctgctgagctttactggagagaaatcacatggttatgcaacttggcaccactccacatttttattttccagcctcaggaactttggtttggtttgcttcattcacctacctccctgttctctgcatggctgtctccttctgatcctttgagtctcaccttaaatgtatataactgcctcagggaaccctccttggatctccctatgtaagcaggttccccctcattcagtgccctgttcgtttatttcatgacactttgcactctttctaattgtttactcaatgcttgcctgacttattgtttgtctccgtaactaatttcttgtgcatagggatacatctgcttgattagttactatagtactgtgctttctggcacacagtaagcactcaggaaaaattttttatataaacaaataaattgtgagattgcatttgagaaagaaaaacattcccttattttttaaaaaaagtattaaaaacactactgcaagtcaatgttgccataagcccaagatatattcttacagatggcagattgcattaccttcaacttatgtgtggttaaacagttaaacagactcttgtgttctgaattatgaactcgtagcagttggtgatcatttataatagtggtttgcggccgggcgcggtggctcacacttgtaattccagtactttgggaggccgaggtgggtggatcatgaggtcagaagatggagacca

SEQ ID NO: 132792 - DNA, 1029 bp, Homo sapiens
cctcagtctcccaagtagctgggattacaggaacccgccaccaggtccagctaatttttgtatttttagtagagacagggtttcaccatgttggccaagctggtcttgaactcctgacctcaggtgattcgcctgcctcagcctcccaaaatgctgggattacaggcatgagccaccacacccagccagtttatcatatttttaaataagtttttgctactgtaaaacatttagattatttccattttatactgagataaattatgttatagtaatgatatttatgcactttaaaaagattaatggttaatatgttggcttttaaataactttttaattgtggaaatattgaaatattctcaagagactggaaggaaactatatgtacctgtaactcagtttcaacaatgatcaacattttcccatcttgtttcattgaatcccctacttttttttgaaaacattaaagaaaatttcaaatttcttgaaatttcacttttaaatacttcagaatagacttgtaatggataaggactttctcctaaagtcatctcatactctgtgatctccctgtactctctaggttcaaatttcctgatcatcactagacctttttcacatttggtttgtgtaaattaggatctaaatatggtccacacattgcagtcagctgttatgtcattaaagtttcattcattctaaagagcacacacacacccacacacactttttttaatgccatgactggtggaagaaaccatatcataagtcttgcagaatgttccacattctgaggttgatttttcctcaaggtattgtttaacttgtttctctagctactgtattttattaataattggtagttagatgttgtcttggtccattttgtgttactgcaaaggaatacttgaggctgggtaattgataaagaaaatagattcacttagctcacagttctgctggctggagtcttcaagattaggcatgtggtgagggcctcgggctgctgccactcatggctgaagggaa

SEQ ID NO: 132793 - DNA, 1027 bp, Homo sapiens
ttaaagccctaatgaaagctggtgatataaaaaagccagcctaggtatttaacttgattttgaattttaggtatgtttgaacaaagccacatcatttaattttgtatctaaaatttatttggggtcttatatgttatttctcatgtaacccttattaggactcattttagccctaaattacctgtggctgtttctttttatttttttgactacttttatattataaatgtgtgttactgtcttatgaattcatggcaatatagttggatagcctggatactttgttagatgagtatttagctgtgtctgcaaatcttaaaagccattagcaaagagtcgtggtatttttttctttatttttaaatgtttgggcaccaaacctaaaagcaaaagattgacgaagcatgtttctcttaaggctacttgtattttacaatacaatattaaattatttaatttgagaaatttagttttgcttatatgcactttttaaatatatactattttgaagattccttatgtaaatgcaaatttcctagttaaaaccgaataacagagatctgaaatgactgagaaaaacttttttattaaaggaaggaattaatttaaggcaatttttaactatgtagaactaattgcccatgtttaattatagcagacacgccattctaacaggtatttgataccattggatgcattattctaggttttttctttaataaaaatggaacaagttttcatttacattccaagctgtcaggaaatgaagaatattttattatctaggattttatctgatgtagttgcttaaagatctgatgtgctataattccatgaatcagaaataataaaatgctatcattctggatctgaagacttttgatactttttcaaaagcaaaattaatttcaggaacctttgataagttgttgttataattaatctaattttgtatagtttttgtaaataaattaccatccttccacaattagggatgcttttatccccccatcactaattgcagttg

SEQ ID NO: 132794 - DNA, 1123 bp, Homo sapiens
ggtgtaaggattgaatgaattaatacatgcaaaatgctttagagcagtgcttagtagatattaaatgctcaaaagtatcagcccttgtaattatttctgttatcattgttgttttctgtctcatcacctcagtatcaacctggcagtttctaattggtaaaagggtctctatatattgaatcataatatgcctttacgtaacttgtactcattggtttctctgtgccctttggtttgaagaaaaagagtttaatacatcttctaaataatagctcttcaaattttgaagttcaccccttcatccagcaaacctactgttttgttctaggcactagggatagaaagataaatatgtctggatctggaaagaacttgtctaataaaggaaaacagatatgtaaataaattttttcatatctatctgtatctgaacctgtatactccccttatctcctgttaaaatggatgaactctttgtgctgccgagaccagaccctctgtttgagtactgatcctgctaccttttggtacctgcgaatacttcatttctccacctaattaatgttcccctctctagtgaattattgccagcagccatttcactcgtcattgctcagtgctcatcttgacccatcagcggcatttgacagcattggttattttctctttcttgacactggctttcctggctttttatgacttctaaaggatgagtgccccaggactgacttttttctacactgtctaactgatgatcttatgtagttttaagactggcaactactaacttatttctacaattcagacttctaacacttgtgtatccagtttacttattaaatgtccaataagcattttaagttagcatgtgcctgaataaattctagatccctctgtgactccccacccaccctaaaaacaagaaacataaaaacagcaataccttgctgcttctaccatccatctcgtcttaataaatagcagttacattcttctcagtgtccaggccaagaaccttggaatcattccttagtcctttccttcatctccatcctgatcccactgtttctatccatgctcccgggagtctctttcacacagcagtctgattattttgtactgt

SEQ ID NO: 132795 - DNA, 1915 bp, Homo sapiens
atttatatatcatcagctgcaagacattggagatatgttaactgggtagctttgggttgtatgtgggaaaaaaccagtaagttttatagcataacttttttccccctgaggtattttgtccttgtttacttactttcttcatcatttattgctttctttaaatcagtagtttttgacattaccagctagcagaaataaagtggtaattttaatttattcaagccaagtacatttgtagggctaatcttttaaatgccttttttacttctttttatctttagtaggaagaattgaaagtaaaataagtttttattagttactcaaatgccagctcacatttgtttctgataaaattaattcagaacagtaaaaatttgttgcatccaagaagattaagttatctatcatgtaatcacctaatctttgatggcttagaatagtttctcttaaatatgagtcatatgaacttatttggtagagagaaacaagtcattatttaggcagaatttgtttaaaaactggtcttttattactgcttaatttaaaaagtggaaaaaaaggttagacagcgaatttagtgatttgttcaatttatatgtagagagagcaaaatctagattttctgtaattctgatttatttactgtaggatttatgaatatttctgattgtttcaaaaattcccattgcttttcaaaagtcctgttgtgataacctcatataaagccagacaaaattacgtctttgtactctgacttcttctgagcaccgccataaactcagattcatagtttaattgacatttatttgtcacatataaatacatgctaaacacatattatttttatataatataatcataatcatattaccttacacctcatgtataattagattacacctcatgtataattagactacactgctactgtttcttctttgtttctgctctttgtatcaaatgaacaggcagtatggaggatatgctattacatcatctgaggagaagagaatgttctataaaggataagaaaagctagaatgggcaggttgatttccagttcctaggaaaaaggaatggagaccacaaattagccaatgttaccttgtaagagaagatgtttttctgttcccatgttcacacactcagaattgtttagaactcccttcctagtgtcaacaggctgttgtactgtgatttctttatgagaacttcagtcatgtgaaaaaccagtcatgaaggtgcagagagggagagaagaagacctccaatgagccagatgtcaaaagtccaggccttttatgcttaggagcctgtaaccacactcaggttctcaaggaggtatgagacattaggaacacactgatggcatcaagcagagttgagaagacataagatcaaagtgtagcagtaccattgtacaatacagttcatgctcatgttgtgactaaatgattagcaaatagttaaattaagttttaaccttttttttttttttttttttgagacagtctctcgctctattgcccaggctggagtgcatggcgcaatatcggctcactgccagctccgcctcccaggttcacaccattctcctgcctcagcctcctgagtagctgggactacaggcacctgccaccattcctagctaatttctttttcttttttttttttttttgagatggagcctccctctgtcgcccaggctggagtgcagtggtgcaatatcagctcactgcaagctccacctcccaggttcacaccattcccctgcctcagcctcccaagtagctgggactacaggcgctccccaccacgcccggctaattttttgtattttttagtagagacggggtttcaccgtgttaaccaggatggtcttgatctcctgacctcgtgatctgcctgccttagc

SEQ ID NO: 132796 - DNA, 2026 bp, Homo sapiens
taacattgataaaatacttttatccagttccccatcagtatttcagtttgtcttttgactcagtaatgtccttcataacgttttccctaccagttcagcagtctcaggtcagttataacatttaattgtcttggctctttagcaaccctttaacctggagtagatccacagcctttgtattttataacaatgacattcaactttccttaacagaacattactcatttccattttgagtttgtctggtgattcttcataatacaggttatatattctcagctagaatattatataaatgatgttgtgtcttccttagagtattacatatatccatcctcctcttattggtgatgttacattatattttgaagtctttttttttttgtaaatttagatgtgtatgtttagaagaataattaaatgcaattctaggatgtgtgaaagcaaacgttttctctaaaggaagatacttaagactaatgctcccagtaggtaaaatctaatttgactggaaggtttgaggtagcacattttaactttaaaccttgcaaagctcttaatgtagtatactggcatttaatctttccctggattgccaaggagaattgttgatatcctccttgggacctgccagtcattctggtgaacgaataaaatctgagtaggtgactttggacagaagtataaaacactgagatctcaattataaatttctgatgtcataattaacagcaaagccaaataattttgtattctctgagtttgggcttgtattagtgcagttttaatacaaaacacatttaagtgccagaggtgctgactggaaagaatattgtaaacttctcaaagaaatgatcacaagtcttttttaatccttcggttatttgacagatttgttactgttaatgaacagacacaactttctgagtaggaagatttcctaaatatttctagtatgttagctttaggatatgtataagaattctcagaaggcaacagagatacctattttgaagaaaattgtcacatagctcatttgaacatttataatttcttgacctttttgctgaaaagtatattaatattaagatggtataatgctaagaaagcacattattttgcagctgtattccagaacatagtgaattgaaagttttttgcatgatcttacatttaatccttttactttgattacatatgtatattacatataaaatatgtattttccacatactgtagacattaaagcatttgaggtatgaaattaaatgaatataaagtaatttgagtgccaaaatgctcattaaatttaacagttgaacttgaaaaattattggatactgctgtgagttgtgatttctcctatcagctaccctgcagagtattgtaagggagaaaaaattacttccatgttcctttcaggtttgccccttgattttacaaagaagtatactgcttaaattgctagtagtttgtagctgctgcttctgacacttgaatacttgtttctgagcttccagagtacactgaatgataccctgggagcttagaagaatgtagcctgtcttccctagtgcctaacttaattctgggaacctgggtagtaaatattatgtgattaaatatagttttaaaggttgatcttattttcatttcccaggcaagacatctgtatagattctgcttcatccgtgagagagaataagcaacctgaaggtttggaattaaaacaaggtatgaaccaagtacttgattattgtataaaatttacctgaagaatagaagcattttaccaaaaataaattttcagtgtctaactcaccccattttacagatagaggaagagagcaatttatttggtcaaaaatcagtcacttcatgattcttttagctactgaaatgattatattttatgatgtttagttagttacagaagccaccagaattatcatcttgaatagttttatttcagtaatttattaaattaaatttatttatttatttattttgagacagagtcttgccc

SEQ ID NO: 132797 - DNA, 1046 bp, Homo sapiens
aaattatcaagcatatagaaaagtagaaacaatagtgtatcaactcccatatacctgtcatctagatctaacaattattatagttttccacatttgcttcatctattttcttatagtattttcagtatattagacattttaaatctaattttttaattttaatatttgtctctgcagtcatatctttataacacttaacgtaattagcaataattctctaatatgtgatattcatttcatattcagattttcccggatgttccgtaaaggtcttttacatgtggtttctctgaagcagagtacaagcaagagtacacattgcatttagttgttctctctcttaagtcttttttaatgtaaaactgcgtccaccttcctattgtctcttgtttgcttttttattaataaatgaacgtgttgaagaaagtaggtaagttgtcctgtacacctgttggctttatctgattgtatcttcatggtgttatttgacttgttcctatatcctctgagttttcttgtaagctgggatttattaactttttaaaattataagtgtgttagtttcctattgctgctataacaaattaccacaaacttagtggtttaaagcaacacatatttattttcttatagttctggaggtcagaagtgaaaatcagtttttctgggctgaggtcaaggtgtcagcagggctggttatttctggaagctctgaggggagaattcattttcttgcccttttcagcttccagttactgcttatattctctgtcttgtggccctttccttcatcttcagagcatatcacatcattctctgcttccagggtgatattgccatttcttctaactctgacttctcttacatccttataaaatgattactgtgaccacattgggctcatcagaataatgcaagataatctccccatttcaagatccttaatcacaatcacaaagttttttgccgtatgaggtaacattcactagttctggggaattagaatgtgggcatatttggggggctgttattcagcctagcataat

SEQ ID NO: 132798 - DNA, 1002 bp, Homo sapiens
atgatgatagctcctggtacgtatgttacttttctgtataatatttgtgatttgtaacatctttacttcaatttatttatatgaatttaagtacagtgataatgcatacatagagcttttgggtgaatggccttttaggggaaaatcctaattcttcaaaagtctaaaattttaagaaattattcaatatttactatacttttgtttgtgtatcctaaatatctcttcccttatagctactccttgagttaattgcagtgtggagagaaaaatcaagtaatattaaacagatattctctcctatggttttgataaataattatgcaaagaatttgggaatttttgatgaagaagaatttattaaatgaaaacgtatgatgtcatgtacgtattctttatattttaagtagtattgtttaatggttctttattcttttaactttaggaaactaaatatattttgccaactttggaaaaagaattattcttggcagagcacagtgaccttgaagaaggtggactggacctgactgtgtcattgaaaccagttagtttctatatatcagacaaaaaagaaatgcttcagcagtgcttctgtattataggagagaaaaagttacagaagatgcttcctgatgtgttaaaggtacttcattacacatcagactagatacatatgtagaaatacagccttctttgtagcaattttttgttttacttaatgcggttttgtttgtttgtttttttgagacggagtcttgctctgtcgcccaggctggagtgtggtggcgtgatcttggctcactgcaacctccgcctcccgggttcaagcaattctcttgcctcagcctcctgagtagctgggactacaggcatgaaccaccatgcccggctaatttttggatttttaagagacggggtttcaccgtgttggccaggctggtctcgaactcctgacctcgtgatctgcccaccttggcctcccaaggtgttggaattaca

SEQ ID NO: 132799 - DNA, 1623 bp, Homo sapiens
cccgcgttggccagcggcagcagtggaagcactagcggctgcgggagcgccgggggctgcgggagcgtcagctgctgtgggaacgccaattttagtggaagtgtcaccggcggtgggagcggcggcagctgttggggcgggagcagcgtggagcgcagcgagcgccggaagcggaggagtaccgactcttccagcgtctcgggctccttgcagcaggtgcgtgcgcgcccctctggccgcttcctggagctgctgctttttcggaagaagtcgggcttccagagggatggggcgcaggctggagctcactgctagcgcggcaatctcaaggtcgtccgtccttgaggttcatgttcctacctaagtcctggtgagccccacactcccatccgtgtcttgaatcttgaacttcaagtttctggatttcctgatcactttttttttaatttattttttaaactcttggctccttccactcctatggtttcactctgccggaagaatacgagttggaagctagccttcatttcccttgcgagccaaacacttctcccttcgtcttcaccttttcgtagatatggttaactccgcattagagataagaaaattgaggcccaaagaagttaaactttacccacggtcacagagtttgttaatagctcctaggtttgaatccaaatatctgactacaaaagccatgttctttatacgccaccagtctgccaagagaacgccgttttaaaaaagttcataatttgtttgaaaacaaatgaatgaataggtactttaaattcattcaatgaggaaataaagggaaagcgtcaagtcccttttcttgcccctccattagtattttgatacgcggcctcttttaatcactcctcgtgagatacgtgtttttaagttcctacacttaagctgtattgtgttattcccgctgttgaatacctgcattgttgtgataggcttctttatatacgtggtttgttatttttactgactgcctggtattgtattatatttttctgatatttgggtgtgcaggtttttttgtattgttgtgactacaatacaaacacctttatgtatatatctcctacaagagttatgttgggagagagtgtgagaactgaaattcctgggtcaaagtttatgctattaaaaacttatgaatgccaccaaatgctttccaaatgagactttacagatttatagtccaaacagtatatatataagaatacctatttctgagattcttaactagcttttgatgacattttgatggcattttttaaaaaaattgccagactagtgggtcaaattaatagtttgttttaatttttattttccttattagtgagattgaacattttaatatttttatttgccatttgatttcttcttatgtaattttctgtacatatcctctgctcattattctctttggtagagtagaaacagtttatgtagagattttatcaggtggttttctggcattctgttgagatgatcacatactttttctcctttagtcagataatgtaatttgttgataagttagttgatgttgaacagtctttggagtcttgggacaagtgctgtttggtttgttgagtttgttgt

SEQ ID NO: 132800 - DNA, 1309 bp, Homo sapiens
tgtatcagttcagacagacgaggtctcaatttaactccaggcttagatccagtttcttttgcccttcactatttgaggtaacttcatttttcattctagttttgatatttggctgtttatttttgtcattttccattatttcaaagggaatttggaacatgttgaattttatcaggtggttacataagcaagagtacatcaaactgtattatttgaaagtctagaacctgtcatgtgaaattactatttttgagccctctatgtggtccaggcagaatagtagacacactgatatttaatccttaaaacccctttaaatgagggccagtattatctctgctttcagaagtagacataataggatgaatcatataacagaaaaaaaaaagtgaagccaagagggagttaactacttaaagtacatgctatgctatactttctagagagatcacagatgtgtgtgaacatcctagcaattaacacaaagaaggaaccatcacattaattacacaatttattgtgtctgaggtaacccagtttcttgagagaagcgtaactattttcaaaagtgggaaagatcttttcataaagacgttgccagaaatagcaacattctcaatactcgtggtgtaaaaaccatgaatcccctggcttaatgccaaattatagccttagaagaataattgttccccaaatgggcaagaaaggttctaattgtcaagagtaacccaagtaagaacttttggaatatcaaaaggaaatgagcaaaatgtaaatagaggggatatgtactttgctgagtattaaattggaactacctggtgtgtacctggactaaatattctgttcactggctcagttgagtacctatacttttcgttttttgattgggtttaggtggttatgtcaaagttaaatggcaaaattaggaatttaacccaggtctggctggttcctttacaatacactgctttcttaagtacaaataatttaattgcaatatttaggaaaagtaggtacctttgaataatgataagaaacagtcttggttaagaatatgagttccctcttcaaaatgtaaggggtggcaaaatgtaaacactgcttcctattactgtgcaagtttttttatgtcaactttactatttcatgtttgttgtggagattacaaaatatagcttagcaaaaggaaacaatctcacttgaaggatatgttaaataatttaatgatattttaaagattttcttttttagttaaactttcctatgattctcttaatgttttttctgaatacaaaagtaataaata

SEQ ID NO: 132801 - DNA, 1499 bp, Homo sapiens
cagtgagccgagatcatgccattgcaatccagcctgggcaacaggagtgaaactgtctcaaaaaaaaaaaaaaaaaaaaaaagaactttccctgtttaattgttcggtcttacagaattttttaaaagcaaagtctgcaccccattctttccattcatttttgaatactcacagtgtgtaggctgtttgagagagttaccttatttttaaagcgaatatgatcttacagcaataaatctagtttatataaatatgaaaaattaacaaaagtttcagaaatatatgcattttttttaaagcagacacatgatttttcacattttctaaaatggttagttttgcagtgggaaaataaaatccttcaaagtcgatagtcaaaagaaattttctttattttcataagcattaatgactttttttttttaatagatattgtctttcctgcacttgacattcttcggttgtcaattaaacaccccagtgtgaatgagaacttctgcaatgaaaaggaaggggctcagttcagcagtcatcttatcaatcttctgaaccctaaaggaaagccagcaaaccagctgcttgctctcaggactttttgcaattgttttgttggccaggcaggacaaaaactcatgatgtcccagagggaatcactgatgtcccatgcaatagaactgaaatcagggagcaataagaacattcacattgctctggctacattggccctgaactattctgtttgttttcataaagaccataacattgaagggaaagcccaatgtttgtcactaattagcacaatcttggaagtagtacaagacctagaagccacttttagacttcttgtggctcttggaacacttatcagtgatgattcaaatgctgtacaattagccaagtctttaggtgttgattctcaaataaaaaagtattcctcagtatcagaaccagctaaagtaagtgaatgctgtagatttatcctaaatttgctgtagcagtggggaagagggacggatatttttaattgattagtgtttttttcctcacatttgacatgactgataacagataattaaaaaaagagaatacggtggattaagtaaaattttacatcttgtaaagtggtggggaggggaaacagaaataaaatttttgcactgctgaactgtgagattttcctgtgtaatttgggtagattttcaagagtgtgaacacaaatttaaaataagctataatcagcaacaacacaatgacaatgacatcttccccttaccttagccactaagaagacaagggctgttactcatataacttgcttttattacttaatgtacaccaaactgttgttgtcaattatcttttatttaacttctccaccttcattgctagatccttcgaacagcactgatacatttcaaggtcttgttttaggataactactttaaaattttttaaattatattaaatttataaaataatttataaattcatatattaaa

SEQ ID NO: 132802 - DNA, 1065 bp, Homo sapiens
aataaggccaggcgtggtggctcacacctgtaatcacagcacttcgggaggctaaggagggtggaccacgaggtcaggagattgagaccatcctggctaatgtggtgaaaccccgtctctactaaaaacacaaaaaattagccaggcatggtggcaggcgcctatagtcccagctactcaggaggctgaggcaggagaattgcttgaacctggggggcgagcttgcagtgagccaagatggcgccactgcactccagcctgggcgactgagcaggactccatctcaaaaaaaaaaaaaaaaaagacaaagctcataagccttatccttactttatggtgtttgataattgctgagtaaagtcttaactccccatggtgtacactagagtacttttattgaaagtcttggcatttatatattatctggccaattacagttagagaattttgaaagtttggttttgggttctaggtaaactgaaggaacttaatggaactgcacctgaagagaagaagttaactgaggatgacttgatacttcttgagaagatactgtctctaatatgtaatagttcttcagaaaaacccacagtccagcaacttcagattttgtggaaagctattaactgtcctgaaggtaaataaacactcttcaaaaatgtaaccagaaagcaagaagttttatcttcatttctatcaatattactggtatttgtggattaaatgaaagttaacttcggtagttctaaatcactatggaaaatcttcacgaaaagggttcactacactactggaattgatgatcttgtttccgttacatgccttttgagaatctgaaggtaatatatgatccccatatatgcaccagtttgtttttttgttgttgttgtttgttttctttgtttttttgttttgttttgtttttgtttttgaaatggagtcttgctctgtcgcccaggctggagtgcagtggcgtgatctcggctcactgcaagctcactgcaagctccgcctcccgggttcacgccgttctcctgcctcagcctccttagtagctgggactat

SEQ ID NO: 132803 - DNA, 1536 bp, Homo sapiens
ccaaagtgctgggtttacaggcgtgagccaccatgcccagcgatcttattttttaaagttccccaagtgtttctaaagtggagccagtttggagtaaccctgggttatgggtggactctgggaatctgtgtattgaatctgtgattcattcaggtggtcagaaaaccatatttagaaaagtgtgagagtgtactttaccttttaacagcttaatgccttgggcaagttattcaaccttctgcttctaaaatattgtgaattataatggtatctatataatactttaatgaatatatgcatagaagatgattaactggcatatggttaaatttcaacaaatccatttattctgtgtttctcattattttaattaatcttacttttttttttttggttttgcttttttaattttctttggcatttctgtatgttttgcgccggttgtaacaactcctagagtataaattgagagaggctagaacagtagctcatttttcttcttcccataaaggctgatccattattctgaatatctccaaatcctgctgattctctctctatacttactctttaagtttccttctttctattttcaataggacagccacaagtattatctataataaaatgtgactgggctgttgtcatagtatctctaactcttacctgagtcttttccaattgtcttatgtgctagttagtcccacccctttacttcaatagaatagtgttcacattttattctggaaacttttatttctctccaatccacttacatttttgtagtttactaaacttctacaattataatatataaggcatgtaatgtttactttgtagctaacacttatgatatgctcaggcactgttctaagcacttttctgtattaaatttgtggcatatttattatgtatataatgacgccattgtgaagtgtgcttaatactggaaataagcgaaggagcagtttgaactttataatttacagtcacctttgcttactaggagtattattgtattgtaggtgctggtcgttatgtaccaggttctgcaagtatgggaactaccatggccggagttgatccatttacaggtacatactttttatttctttttcttttttttagattttaaaaattcgttggaactttaataaaaagagtaagaaaatttgtgtcattttcttgcttgagaactttttatatagtaaatcgagaccaaacttgtctggctttttgagttttctcagaattgtctgattactacattttagaatcatctggggagctttgcaaacgtacttcagccttatccccagagatgcttacttggtctaattctgctctgagatgggggcttggcaaagggtagttttataatcttccaatgtgattctaatatgcatctaggatcggaaactactgttttactgtcgtaaatctgctttcctcactactcttacaaagtctgtgtttattctcatctcttcattcttaatgtgttgagaatgttattcactggattatacattgttc

SEQ ID NO: 132804 - DNA, 1050 bp, Homo sapiens
tggatggagcagtacaatcaagaagtctccccaggcatattttgacttaacatggaaggagacattccacccaactacccaggagtagtcttcctaatctaagttattaatgtccttcttgaagcccttgaagtgttggtgtatctcttcaaaatgaatttatttaccaaggtatgcatgcctcagcatcaacactactggaaaaagtgccagagttggactttaaggcagctgaagaagtctctattttcagaatggcttttgatatcttgtataatgctgttgttggatcttcagacagagttcctcgacagtatactcagtttgggaagagatcatagcgtttaggtatccactggccttgcagactggtactgtgagctataaaaatgacaacctacagtcctctctaagtcatagagattggacaaacatacaacgttaggtcagcatcatgaagttgtggattgctgtccgtgagcttcctttttcctgtgaatttattgatggcccagatggaaatggttgtaccatgtgcattgataacaagtaaatgaaaataattaactatcacactaaatgctgttatggcacagtggctgttaaggaagtctttgataacataatgtgatttcaaatggtagtaaggatctgaagagtagataagatggctttctctctatcagcagttcagaaacagtgatgccctgaaacttaataccaagtgagaatccaaatcactttggcggctttttttctggaacagaaagaacatatcaagcttcaactaataccagcaaaatcaagaaaactcctggggccattataaccagagcatatctcactgttccataatgtcagtaactcagaagatgcagtaattatgtagatatgcaagatagcatacacaatgtccaagagaattagggtatcaggataattgaatacacttttgtataaatatataacagcatctaccatattgaggtatgaaaataaaatagcataatatgtgtaagtgttaagcaaaatgcctggagtatatttaag

SEQ ID NO: 132805 - DNA, 1007 bp, Homo sapiens
gagaaaagaggttaaggacggccatctaatccaaacattaggccattttttttccttgattgaagttacattgctagttactggcatagtaaaggatgaccatatttgtctactgaacatctgctaattttaagccctacattgggtctttgagccctttataaactaaactagcccactacccttctctatatggtaataactaaaaaatattgactttaaaagtacatactatagctctagattcttatgatggtaaatatttaacttggaaattgtataaaatacatgtttctctgttctttgtcaataacttctctattaaatagttgacataatagagtagcatgtgctgaagtcagcacagtgctgtaatcagcaattaataacatgctaatatttctcatattcacaaacacagattatttttactatggatcattcaggtgtgataatgttaatgtattatggcaatgacttctaaaatcagtttatttttccttacagtgatggcattattagagtgtttacagaatcagaagatcgaacagcaagtgctgaagaaatcaaggcttttgaaaaagaactgtctcacgcaaccattgattctaaaactggcgatttaggggacatcaatgctgagcagcttcctgggagggaacatcttaatgaacctggtaagtattttattgtacctagtagaaaaaattcaccatatttggcttttggaacaattagaagaaaaataaatgttgttttgcttgtgtttttcattgctagatgctgatttttgaggatttttactattacatataatcactatgagaaaccatgttcttgcctctgtctcacagaagactttgaattaagcttctcataaacaggaattaaaaaataaatctcccaacacttagatcatttacagtagacactcaaaaggcactcatttaatactttttggttgattggattctctgagaggggttacaaactgaatattaaaatga

SEQ ID NO: 132806 - DNA, 1619 bp, Homo sapiens
agtcattattaatctgtgatagctactcttaagtcaacagatactgaacataggaaatctgacttcacaagcttcagagaatgttttgttcttaaatttatgggctactctttgttatatatttcttttatatttgaatattatatattttataaattactcttgttggggaagaaaaattaaaaatgaattttcaggtgaaaacaaattattggggtcaaaatactatttctggaggtttttggagaaggtaggatgaatgtaaaataacttctgaagactggtgataaaaaaatattgctaaaccttaaatacaaattttggttatcaggctttcaacaaaaaaaaagatttctctaacttgaaaattaatttttactactcactgatatgttttataatgttagtaaaatgtatagagccatcagccaaattatcagttttattgatttgcattattgttttttaatgcagggcatgaagactgtgtaagaggtttggcaattttgagtgaaacagaatttctttcctgtgcaaatgatgctagtattagaaggtggcaaatcactggcgagtgtcttgaagtatattatggacatacaaattatatttatagcatatccgtttttccaaattgtagaggtaagattattttatgctatttatttaatgttttgtattgagcattattccatcccatttgtgagatggagggaggagagctgattacttaatttactatctatgacttgaataatttagtaaatttatttcattaagtatctttctcctgtttacaaagaagaaaattgtatggccatctttatattaattcagatttatgttgtgctgtaaaaagttcttgggtatctgaagaaacactttgtaagatgtgacatgaataaaaaatgtgattttgaagttgtatatgttgtaagtgacaaacatatgaaatttaaaactgtaattttgaaagtctctgggtttcaaaaagtcagtgtatctagaaagatggtatgtataaatgtacttaattttattcaaactaatacttcctatattcattaattttagactttgtgacaacagcagaggacagatctctgagaatctggaaacatggggaatgtgctcaaactatccgacttccagctcagtctatatggtgctgctgtgtgctcgacaatggtgacattgtggttggtgcgaggtatttatattctagtcaatcattaaatgttatatgtctaggccttcagtaggaactagagtgtacagagataagccataaggaatttcacgtgacttgaggagactatatggacacttcaattactaaacaaaacagtagtagatattatagctttcatactaagggatgcatgatataccagtattgtactgcaattgtgcagtcaatgatgcatgatataccagtattgtactgcaattgtgcagtcaagatattgactacaaaagaagttagagaaggtagagattggtgtgggaaaactttctgtagaagaagaaatttgaactggattttgaaagattatgagtgagaaaagatacgcaaatttttgtcaaagctaagagtataagtttccttcatgagaatg

SEQ ID NO: 132807 - DNA, 1312 bp, Homo sapiens
tttcatatttgtaatttttagcctgcataatttcacatcaagaaagtaagacatttaattaaccacttcattacttttggacattgagcttggctgcaggttttatggtcactgtcatgaaagcagccttaaatatttatataaacagtgtttcaaaatcatttacattatctccctattatgatttgttaaagctggaaggattgtgtagctcacttaagttccgctccctcgtttcacagacaaggaatctgattttgagtaatatttctgcagttacgtggcttgtaagtggcacagctaggccttgcgcccaggcagtctggcaccagagtctgctcttgaccactgtactcttatgcgtctctgctgaattgagccttagttagctaagatactgccacttcaaagagtgtttttaaaattggaatgctttagtaactttcaatgttgagcatttttctgtatgaaaatgtgttatccaatgatgttttttccttagtttgtagtctatcatctggaaaatttgggacattacttagtggttcatgggacaccactgctaaagtctggctgaatgacaagtgcatgatgaccttgcaggtacagtagttctgtgtaaatattctaaagaataattaagttgaatgattctgtggcaacttaaattgatactcattttactcacagggtcatacagctgcagtgtgggcggtaaagatcttacctgaacagggcttaatgttgactggatcagcagacaagactgttaaactgtggaaggctggaagatgtgagaggactttttcaggtaagatcagggtagacaagttttataatatcattgctttttatttgctcagattttttttctcagaagtttacaagcatgaaaatatttgaaaaacattagtatatttaagctattaatttgagttaatgtaatttttctgatgagttaatatctaatacatttaaaaagataatgaaacctctcataaaacagccaaatgtagactgataaatagctgtctgataagctatatataatatgcatatgtgcttctgcatatatgtatgtaatttttggtatatagttatatttttggttgtcattttaatacttttagcctgaaacttctaaacataagccttactgatggtcagtcagcagtgttatcttcatatatggaagaaatcattattagtgtctttatattgaagcacattgtttataacgaatttcaagctttgtttatgttgtggtttatggtgagtattctttttaaaccccagctattaaataatgcca

SEQ ID NO: 132808 - DNA, 1018 bp, Homo sapiens
gggaaggaagtgaaaatagatgagtttgtttagtctttatctgggagtcttacctctttatgtacacttatcttcttcaactagactgcaaactctttgatttagctgagtcagggatataattctttttatccctctcagcaggtaatttattgctttccacatagtaaatcataatctgctggttgaacttgttaagtaaggcagtgatgctaagtgattgatacatgtcacaaactggtaatcattttaatcccagtgcaattattaatgtactgtgttcattgatatatataattatatataacattatatattatataatattactctagccatttatatatttctgtattaggtggggtttttttgtttatttgttttagcttatcagttatcattagtgttagtatattttatgcgtggctcaagacaattcttcttcttcagtgtggcccagggaaggcaaaagatttgacacccctgttctagctatgtagaaacacatgctgtactatactactgggctctaagtcaatgcttcataatgtgaaaaagtcctcagtatatttaggtcttcttaataataaatttcattatcttaattgcatgtatgtttcgtttaaccagggatttcttagggtaacagtcactaatgtgtagaagtgaagatggagattgagaaaaaacccagtcatgattatttattgccctttcttttttccttgttctctatgttaacgtattcttatcaaagaaacactaaacaaacttctctttatctcatgtaattctctatagtagttcatatgaattatgtaaggttcaattttaaaacaatagattcttaagatagtatatactctaaagtttgtctagacactaaatgaaaatgagtgctttgacagtttatgtcctaggctaagtcagggtacgaatatgtatctattaattatcttgtctttccagtccaaacaggagctttacagaaatgcactgtatgagtggccattccaat

SEQ ID NO: 132809 - DNA, 1498 bp, Homo sapiens
tgcacaactaatcctaggatttcccttcattgttgtttccaaaacaacttttttgaacctcatatgttggatttttattgtcagtatcctttagctttctcttggttggttttcttccttgttgccttattggaacataacctctaagagcttcctgaaatgtagtgcatcagtaataaatgttttaagaccttgcaagtctgaaagttattttattttgccttgttactggcatgataatttgaatggttgtagcattctaattttaaaataattttctttcagaattgtgatggaatccattgtatttcatcttctagtgttactgttgagaagtctgaagccattctgatttttgaactattttttttttctttctggaaggcagtctacttctatccattgttccaggccattggcgggcccttttaatatgaaaactcatgtccataaattctgggaaatgttcttcaattaattctttggctgctttctctttattttttctgtcttcttttttctggaactgtttttattcagatattgaacttgctttctaaatttctctcttttttttttttcttggctgtaatctctagcaggttgccttgactttgtgaaattatgtccttgtttcatggttgcaatatcttatacctctaaggatgataatgacaatttaaaaaaatgttttaaggtatttcctccttaatggtctgttttcctccatattggtttttttctcatctctatttgttttgatcactgtatttcatgctggaggctttccccagatgtctggtaatctttattgtgtgctcagtgttatgggtagagaattaagaagctcctgggagatctgtgctcctggatggggcttgctggttgtgagttttactgttgagttatctggtagggccattatattgggctgatctgctgcctagaggatgagggtatggtttccagggttttcttttggtggtcttgggctccagtaggaatatacacattcttcacactcccaagactcaactatccttatgtccccccattcaaagattttctttttaaagaaaaagcttcagacttttgctgagtactagcaggacagttgtctggctgggttgtctagctgcacatccctcccccaccccccgtgttttgtttttgtttttttttttgtcttaataccttaagtattttttaaaatcagtttaagaaatacttaatgctaaccatttaaaacattgtgctagggacttgggaagacacaaagaacctaatctggattctgccattaagaacttcacagaccactaccgaagatgcacacaaacatctatgctttgaagtgttaagggttacacatagtgggtagatttagtggtttacataatacagattttaaaacatgttctatcttttgacttcctctgggcttattgataaaatggtttcaaaagcattaaaaaacaaaaacaacaccccctaaaat

SEQ ID NO: 132810 - DNA, 1061 bp, Homo sapiens
gtccacgccagctggcgcggcattatgggaattgtagtcccggcccgcttcccgatttaccacaaactgttgggcccggagtcggaagagacccgggtttgggaaggaccccagggtcaggcgtcctggtggaagggcgggcctctttctctcttgctcagcagggagtccagagccctggaggaaagccagctcagctccgcatcggcgtcggcggttgggacgcacacactctgcgtcatggagggctgaggccgatgatgaattccggagtgcctgtcaggcttgctgtgtcactcggcccgctcggcgcgccccttcccagccgcccttccgtaccggctctcgggctcttccggtctccggccgccccttacctgcaggctcttctcccgccgcggcccggcgctctccgagtcgcccctgcggactggtctcgcacagtgcctgggcaccgggcgccagacagacactggccatgacgagcggcgcaaccaggtaccggctgagctgctcgctccggggccacgagctggacgtacggggcctggtgtgctgcgcctatccgccgggagcctttgtgtccgtgtcccgagaccgcaccacccgcctctgggccccagacaggtgagcgctgggagtcgggttgccccggctgtgttgcacgcttcccggagagtggaaggagagtgacccttccctgtcagtcctgccgtctctctctccccccagccttccctctgctctccgctcccttccaattctcagactattagaactctgtaagaaaccatcgggatttaagtggaaagagcacagggttgggggaccaaagacctgccttgttgtgctaacttgaccacagacgagtctcctaccttttgggccttcagtttttggacgatgatctcccaagtttcttttagacttgaaaatttactgattgcagttgcaccctccgaagtgaggtagtttgaaggcatctgaaatgtcctctttttttttttttttcgaagaagatgctctgtagtcttctgtaaaatttaatttttgaagacttt

SEQ ID NO: 132811 - DNA, 1025 bp, Homo sapiens
ctaacctagattagttgcccttgctgtgtgctcctatagcatcttttatttttcctatgatagcagttagtaccttttaattttaattaattgttcaatctttagagtataaactctgtgagtgaagttactctgctgtcttgctggtgatctttcaaagatggaatggactttcttgggaacttatgtttctcagcacccatagtgttcatgtataggttgaatagccccaggttgggaatggaaagcctttaagtcctttccaatcatattgtttgttccacatattcaagttacatgcatatgtctacttgaaaagtctctataagtcattgtaaaagaatttcacctaatcgaacacgtcgaatagtcaatgactaatggcatagagagaaccaaagagagatttttaatttagagccctgtatgtgcaatttttgaaattcatgttgtattttatatctctcataggtgaaatgaaccagaaatacaaggagctaaagaaaagggaggaacatatggacagtaagtgatattcttgtagatataaaaatataatattttcagattgctgttcatttataccaaatcagagacctcattttgggcagatataatggctaataaatgcagaagtgtggacattcaaagcattttgccttgaagaatagtttctagcataatttagagatgggtagaaaattctaaaaagatatgtgatgagtgtctatacgttggggctagattctaaagctagtacttacattcgtagtctgtacagaggaaacctatagaccaggggtccccaatccccaggctgcagaccggtaggaaccaggccgcacaccaggaggtgagccactggcaagcgagcattaccgtctgagctctgcctcctgttagatcagcagcagcattagattctcatatgagtgtgaaccctatcgcgtatgagggatctaggttgtactcttgttatgagaatctaacccctgatgatctcaggtagaacagtttcatcccaa

SEQ ID NO: 132812 - DNA, 1014 bp, Homo sapiens
acttatatcaaggtcacaggatttaggcagtttgaaagtatataaagttcttattgaataataattacctttgggttaataacaaattaaacagtggcagcttaaaatttctaaaaattgggccaggtgccgtggctcaagcttataatcccagcactttgggaggccgaggcgggtggatcacgtggttaagagatcgagaccatcctggccaacatggtgaaaccctgtctctggtaaaaatacaaaaattagctgggcgtgatggtgcatgcctgtagtcccagctactcaggaggctgaggcaggagaatcccttgaacccagaggtggaggttgcagtgagccgagatcgtgccactgcactccagcctggcaacagagtgagactctgtctcaaaaaaagaaaattctaaaaagcactcttaagaactgcaaatcagagtttatatagtgttaactctatcagcagtaatctctcttatgttttccaattgtcagcttttattgagacttttgaggaaacaaagaatcaggaactgaaacgaaaggcacagatagaagccaacattgttgcactcttggagcactgcagtcgagtgagtaccatgtgcctgtcttggtgtcctctttatttttgccgtgattaactttccaaatacaactcaaaaaatagaacggctcactattgtatcttctcatttaactgcttcctttcaattcccttacttgttactatttatttcagctattaacttttttatcactctagcaaaatgtcaggtaattagggcaatagagaaaaaggatgacatgtataatatcaatattcagcagtaaatgaagcactaattcagagtaattattatgatcttcttccattgttaatctatctgaacttttgaaagtaacatttgcacagataatttcaaaatctagacatgttagaaaatgttaatgtatttttatactgtaaatttattgtaaataaaaagattcttgtatgtatatgta

SEQ ID NO: 132813 - DNA, 1029 bp, Homo sapiens
ctgtctctcttttatttatttatttatttttattacactttaagttcttggatacatgtgcagaacgtgcaggtctgttacataggtatacacatgccatggtggcttgctgcacccatcaacctgtcatctacattaggtatttctcctaaggctatccctccctgacctcaggtgatccgcctgcctcaatctcccaaagtgctggaattacaggcatgagccaccgcgcccagcctccagctgcccctttttaagaaatgggccataacacttttttttacgtttaatttttatgtgtgaataatagtcaaattgttcaaaagccagtacacacaagcatatagggaaaagtcttccttttaccattgtgccccaactacccagttcccccgaataggtcatcgttgttcttctttttatgtgtcaccttctagaaattctttaggcagatactagcaaatacaactatagattctcattttaagaaaactaagcaggtgattttcaagactcatcctaggaagctggtaggtatgtcttcttatacccaaagctcacatagaagatccttctggtactgtaaatggggttacaaaggacagagtactggctggtggaagaggtcttccttaaccggcatgctgaacaagggtagcgaagtatagtcaagtccagactcccagaggccacaatttccttttccgtcactgaaagtaaagggagatctctgaaaggagcaagaggaaaaagaaactagatacatacctagaaataatttatacatagcttggttgtcttttcaaatcaactgcattttgtattatttcctaaagctattaaataaaccacggccactgccaccgctgggagctcagagcagatcctgtggttttggcaagactcttgactggccctagaaatggggctggattgaactggagttgaaagaattacagtgtttccttcctcttgatgactctttctggaacatgcctggaatgtgtgagtgtgagagatgaagtggtg

SEQ ID NO: 132814 - DNA, 1100 bp, Homo sapiens
tgcgcccagccaccacaattattcttgagcctctatttttgccacatgttttcctgaatacttgtatgcctgacattcccctagcaacttcatatgtattactaacttagtctttatcaaatatatatcagatgaggacttttaagaccccactaataatagatgaggcttggctattgtaacttaacgtgcatttactagctagtgagtgttggatctgggaaggtgaagtcaggcccgattctagaagcctggctttaaccatcaccctgtgctacctttcaaaacagatgtgatcttgccctcctggaacacccaatctagtaggggatatataccatgagtggggctataatgaaaaaatgcagggtatttagggagtagctatgagggcatctaacctgtgttccaggtgttgtgtgaggtctctgaaaattcctaaatggaaactgatgaatgagcaggagctggtgaggctgaggagaaaaggaggagaaaagaagaaagaaaactcatgacttggacatgagtgatgagatctggctgaggaactgaatacagttcaaagtggctggaattgagagctaaggatgtggacctggagaatgataagtctggagaactaggggtggaggtcttgagtttgtgtctcaacttccacatttattcactgttgataggccttgggtaagggacttagtcttccttaactccatctcccatatggataaactgtagctatactgtcttcacaggactgtggtgaaattgcacaaaataatcacagatatgaaactacattatttcctgtagtacttacacaacaattaaattgaaaggagatgactgaaattgagctcacttgtttttcatctgtgttttcacttgtgtataacttttactaccacctactttcttctccagaccttatggaataaggaattatatttttagttaagttctgcccatgaattagcccatccaaatgatcttaagcaagttatcttccaacctaggcctcagcagtatcaaatttaaaatgaggtggttggaccttaaagccttctgagtgctaacattacataatctatgaaagcatc

SEQ ID NO: 132815 - DNA, 1020 bp, Homo sapiens
tagtttccaaaccagaactgaacgcttgctcatttcacaacactgtagggaactcacgtacaactaacgcaaggatggcaaacacatggaatatgtactgttactccttcctccgtcaccctttacagacattgctaatcaacaggcttttctggggaggcccagaattgtgcccgtgcagccctgtgggcagctggtttatcagggcagtcctgtgtgatgaaaacctatttccctttccagtctagaattaaatacagtatttcttttttcatctggtgtggatgccaaccagaagacattatgccccttagaattatgaaaaatcctgacacaaaatgatgaaataattatttttccagagggaagaaccagctgtgcagttcaactcagggactctggccctaaacaggaaggtcaaaaacaacccagatcctacaatttatccagtgcttgactggaatgacatcaaatttcaagatgtgattggggagggcaattttggccaagttcttaaggcgcgcatcaagaaggatgggttacggatggatgctgccatcaaaagaatgaaaggtcagtggttgaccagatagagtcagcattgcgtgagggtgtggagaaaacttgatttcctgctcattctttcctctatggtcttacaaaaaattggcatggtatcagacatagctgttatttgcaactgaaggttatgcttcctttgaagttgagcctgtgatagtcaggatatcaatacaaaggcaggagccatttaaacatcactgtcttgattcattgggatgagatactatagattcttggtcatatatggctaacttttgcggagcatcattgtttctcttaaagcagtgcttctccaaattgagtgtgcatcagaatcacctggaaggcttgtttaaaaacaggctgttgggccctaccccacaatttctgactcagtctagggcagggccagagaatctgcatttttcattagttttccagtgatgctatcttgtgggt

SEQ ID NO: 132816 - DNA, 1052 bp, Homo sapiens
attttaaaatcagattttcaattctcattgtacttcaaagcatctgcattttttaaagatccccagatgattgagtcctatcctgtggatattctgattcaattggtctagggtgagaaccctgcattagggtttttttttttttttttaagttacccagggtgattttaatactggaagtattactgcaaactactatactaagcaatttggggtttcactatcatagattaatatatccatcccgtcatcatggatttgttagtacaatgtttcatgcttgtgctagattttggggtaacataagtcagacacagtctccaccttcaaagagctcgtagacatatgactcaggattgtaacagctgataaatgcaaagagcaaggaaagcatagatgctacgggaacacaaagaaggtgcactgaaccaagctgaaaggaagttaaggagggcttcctggaggaggtcaaatcctgagtttcatagtaaatgttagataggcagtgaggatgtgagaataagttggatgagctggaggacacagtacatacagaacccctagaggaaaaggaaagcatgaaacctttaggagatgtttaagtaattcactatggctgggggtgtattgcagagaggaagggagagttaaacttcagggttggaagaggaagcaaggataaagtcctgaagggccttgaattccagctaaggatttgggatcttggaaccatagggacattaaagaattttaaggaatagaactacatggtcaaatttgccatttagcatgatcatcctgactacagggtagagaacagacaattagggagggagatcagttaggcagagagaccaggagagattgttgtcatcaggtgtggtatgatggtggactgaactgaggtgatacagtagacagaagtgacgagatccaaaagaagtcaaataaaaaaataaatgaaaaagtgcacaaggaacttaacaattaggaggtgtgaggttggaagccagcaggctgggagtgaatgagggcaaaaagaaaacagataa

SEQ ID NO: 132817 - DNA, 1026 bp, Homo sapiens
acttccctttggctgactaaagctttgatgctaagctttgcttgcctgaccatcttttccctgaggataaatcttcccaatttccttcctcctcctatgcaattagactcctggtgaatctatctccagttcaccaggtgtgttcagtagggagtcacaagttggacttaatttgtgagcattcattaccctaaaaagattatcaagtctttttaaagtcatgcttttttttcttgaagtaatatgtcatcttgactatggatattctctaatgttgagaagctgtcatcaacaataattacatttgagagtggggaagttaggtgatcctatcaggaagagaaatgctgcctatttgatttgtctttatttcttattacttgagttattgtataactaataatggataatattgcctatacttaagtcctcttctaactaattaaatattagattattttctccacttgtatgtaaagtaaaagatgagtttcatgataaaaatattttaaacaaaaaaagttttatattttatgaaaaaaataggttttatggccaaaaaccatgaaaaaatgctcaacatcactaatcatcagggaactgcaaattaaagccacatgagataccaccttatcccagccagaatggccattactaaaaatttaaaaaaaaaatagatgttgccatggatattggtgaaaagggaatgcttatacactgttggtgggaataaaaattagtacaacacctatagaaagcagtatggagatttcttaaagaattaaaagtagatctaccctttgcaatcccactactgggtatctacccaaaggaaaaaaagtaattatatcaaaaagacacctacacacatatgtttatcccagcacaattcacaattgcaaagatatggaaccaacttaagtgcccattaactgatgggtggagaaagaaaatatggtatatatacaccatggaatactattcagccataaaaaagaaaaaaataatgtcttttgcagcaaattg

SEQ ID NO: 132818 - DNA, 2084 bp, Homo sapiens
tctgattttgttttatcaatcataatgtgttaaagccctctgtggctgccacaaaagactagaatcatgaaatctttgtccaagctaagaaagggctgtctctgtgggtacagtggcattctctgttgacctaaccaagcagcctgaaccttgctttgtgtctcgtaaaggtcatctcacggaatccaattgctgctacctcaccatgttgctgtgccctggtcaacaataaacatacttttgtcccccttcctaagtaactttgagaggacaagataggcaaagttttttccctacatctcttttggccaaaagaatatctgaccatcacagagatccagagaacagaaacaagagcccctaagtcccagcctctgcaatacacagttaccagatgggaatgcagcacagtggcacagagaggtaactacggagcccatgccctggaggaactctgtagctgtgcatcatggaacgccacaggatttttacattaaaaagttgaatatgttcctgcatttcagcagtgcataatcgagcaggaggctggaatctggagacctttgttattcattctttttaaggttattttttattaactgtgcatatgaaatttccactcaatttaaaaatccaaatctttttaagcttcttggaagaatttcctcctgcttatattgttaattgcactaatgaactcttctagggtaaattctggcaaactaccctttttttttttttaatcacagaatattcctgttcccacagaactttggcacattctgaagaaaatctctgcagtcaatttttatctcctctgcttgactgcatctaactgttcatctctgttataaatggagcttcagccctctgggtcagagactgacaaccctccttcttcttcctaacctgtcctactctccttctttttctgctttcattttaattttgggaaattttaaagtaaaagtttcaaagttgaaagattatagtgagtacccttatgtcctttagtgcatcagttgttaatgttttgccttgttttcttttcttccttttttttttttaagagaaggggtctctccctattttacccaagctggccttgaaccccttgcctcaagtgagcttcaaccttagcctcctgagtagccaggactatggcatgtaccaccgcacctgcctcacattttctttctcactgtaaatacacattcttattcttgaaccttctgaaaataagttgcagacatcatgaaaatgtaaaatacttcatcatattctttcttttaataagagcattgtcctataaatctgcaatattttcacgcccatgaaactgaacactgatactgcataaatctaatatatgatccatattcaaaattctccagttgtccccaaaatatcctttatagctgtttatttttaaatccaggatccaatcaagaattatacgttatatgtagttgtcattctcttttgtttcctttaattgattagagttgcccttttgtgtgtgtctgagtggtgggtggtggggtggtgtttgtgtatgatgtgcagtgtgtgtgtgtgtggtgtgtctttcatgacactgacattattaaagagttcaggcaagtttgtggaatgtcccacaatctagacttttttactgattgtttcctcattacgagatacaggttacattttttttcccaagactgctacatgtgtgatgttgtttccttactactgcctcacctcaggaagcacataatgtctacttgtctcttttctgatattaggactgatcaggtgttgtctgcctgatccaatcattatcaagttccataattcattattaagctctgaaattcaggacacatacatttatagagtgtgaggctgtgcatacgtacattcatcccttaatgttctcaaggaggcccaggatccccaaaatattataagcattgcagtcagatgatatagcactagcaaagcattcatccctttccatataacaggagggaggggaagaaggaagtttccatgtgcaggcaatacgtgagagcatgggcaagtgaggatttgtatgc

SEQ ID NO: 132819 - DNA, 1049 bp, Homo sapiens
tccctccacaaagagctgccagatgtgttcacattgtctccatgctgccacatgaggcatttccgttcattgtttaagccccctagtatggttgcttctctttgctaagccacttctctcctactttattgataggaataaataaaactcagtaccttctgctcaacatttctccctagatttcccatcagaacctccacctcaggaagctgctcagtatcttaggggagctgttggtcagagacaccaaatagtaattgtacttttttatttttttaatgttctctgcagtgttggaaattgctgcaggatgtcagtcacagcagggattaattcgtcttcatgagcatttacatgaaaatgtaaatagtcagtatggcttgatgcccatatataagcctgccaaattttggctgctatgtgtggtctagactagtttaaatttcccggccagataagattagattctttggctccaaaaatgtcaagcgagtattaacttggggtttgaatgaaggaaggttttatttattgaaacataacattatattttctcccaccacccacctgtcccaccacaataaaggcatgaagataaggcaggttacaggcagtacctagcctagggacttgtgtggtcacttgtgtggtctcaggagcacttcctcctatgaaacaattttatacataaaggtcagatatacaaaccaccagcaaagccagttaagctataatgtggtactggaacataatactaattagtattaattccaagatgttggtgctaatagagtcctattacattgtgcatctaagtgtaaatggaccaatagacaagaataatgcctggaggcagatctggaagaagaaagagatatgcagatagctccatagggaacttcccagagttctttgaatgggccatgtcctctcacccccaggccattgtatgtacaactcctttggcttccatgtcctcagcttaagtcctgctcatcctgcaagtctaggcctaattgtccgcttctcagagacaaacacctttcatt

SEQ ID NO: 132820 - DNA, 1034 bp, Homo sapiens
aacaattgataaagttaatttcagaaaatgtcaaggacagagaggaaagatggacaagggccacgtaaatgaagacccagaagaaaccactgcaatctcctggatggtttcagttcagttctcttctatagtcatgttcaggtcaatggaaaataacttctccaaaggcccacaagaaggaagaggctgtggaagcactcacacttttggtttcacagagctaagggatcagaaacaccacgacagagctgaaagtcaatttctcctttatgcctgaaagcataaagacaacattgtaggaaaaagctgagtgtaagttatcaagtagagaaaggctttctttgctatcagaaaactcagttattttctataattgaagaaagggctccaaggcagtgccaggaactaacttgaagtctcagagtcacagaatggcctcaaacatgtcaatatcctagacaagggcctctttgggggcctgggagaaaattaggttaaccagacatttttaacagtttaattgagcaagaaaggtaccaggtttttttccccagaagtttatatttctttaaatcttgcttgcaatagtatacttcctacatttatgtgttaattataattatagggaaattcattttaatgcttgtaaatattcatactttttaaatgcttaattgtctgaacatatatatttgttttacactaaccaaaccctataaaggaacagaaatagatattaagaatgtttctgaggcgaatcatataatatcaggctctggatacttagcacatgcagtgtccattaagagtagattgtttatggcttgtggattgctattgccgaaatgaccatttcaacagttgacagtgctaggatgcctaactgctaatactgttgcaatgcacctattcaaatcaggcataacatgtcaagtcaacacatttttatttgatttgcatatattgatactctatatatacaactcaagttgctcagatattctatgtgcataaaaaatctatgctctcgaggc

SEQ ID NO: 132821 - DNA, 1082 bp, Homo sapiens
gagaagatcccccaacagttttattcctatctcaggttcatttcagaagggtcactgttccctttggctctgcaaagccccgctcaagttgggttccaattgttctttctgggttcccccaactgtacaaagaggatcaatgacattgctatcttctcccttgcccccacctcctcccattatgtgtctcagcatgatttgccaaccaaatctggcttattgcaaactttaataactctggaaaactacctgtttgactttatttagatgaaaataaccacatcaatgcaaatgtacaatacaattcgaagagggagatacttcttcctcggtatcagtaaaaatctgatagatgcgtttctctccgagatctgcaaggtgtgaagagataactgtgtattaatgttcacggtagcgttactccttagacgtgacttggttaaacgtgggcctatagcaattccatggagatctttctaccaagcagtggttttcagattgtgactcaagggccagtgcttggagttgggaaaagtaaggggaacccaagcaggggaagctcttcaccactcccgcacaactcaggtttctatggttatttgtttattcactggcctagtccattcaagctgctacaacaaaaataccacaaacagagtggcttataaacaacaaatgtttatttctcacagttcaggaggctgggaagtccaagatcaaggcactgacagattcagtgtctggtgggttcagtgtctggtgaggccttgcttcctgtttcacagatggcagtttttgctataacttcacatggagaaagaaaaaggaccctctttttttcttttttttttttctgagatggagtttcactcttgttgcccagtctggagtgcaatggtacaatattggctcaccgcaacctctgccttccaagttcaagtgattctcctgcctcagcctccctagtagctgggattacaagcatgcaccaccatgcccggctaattttgtatttttagtacagacggggtttctccatgttggtcaggccggtcttgaattcccgacctcaggtgatctgc

SEQ ID NO: 132822 - DNA, 1058 bp, Homo sapiens
tgggggtggggaggggccagaagctggaccacctccactcctcccaccatttggcccagagtcatcgttaatgagagttagttgaataaggcatttattcaacctggaaaatgcccagtggcttcagcccttatagtatggaattcctatctcttggcggggcgtggtggctcacacctgtgatcccagcactttgggaggccgaggcgggtggatcacgaggtcaagagatcgagaccatcctggccaacatggtgaaaacctgtctctactaaaaatacaaaaattagctgggtgtcatggcgggcgtctgtagtcccagctactcgggaggctgaggcggaggttgcagtgagccaagatcatgccactgcactccagcctggcgacagagtgagattctgtctaaaaaaaaaaaaaaaaaaaaaatcctatctctttttctgcacttggcccctccccagaactttgtgattggtcccaagagggaaaataaaacatatttggtggagaatgggtatgcactaaagttgcactgctagtgggggcccatagacctcgtggtgggtgaggatttagacacaacttgcaagatacaggggttgatccagcttttcccagaaaggcgtgggtgggttctgctgaactggcacatcaggagtttcactggggttaatgttttaaccgttgtgtcaatatacttaatgacactttgtttgaatattctataactgaatggaagcacttttaacgaacaagttttgttttatttttaggtgagcgaatagcagtaagatttacctaggtacactttgtactatattgaaaagtttacattttgaaaaaccaaatatgatatatttagaccaaagaaatagttagactttatgccttgagagctttgcaactctttcagtgcttataatcttttcaagatctgagggtctgtttcactctcctggtgcttcctggactgtgtagtttttatttgggagattaaccactgggggcttttgttcagaacctgccttggactgaatggctttggaccaggtctc

SEQ ID NO: 132823 - DNA, 1121 bp, Homo sapiens
gggtttttattatgccttgggagggcaaggtccactgaattcttggtctggtcttttctcagcctaggtaggagccacggacctgtttgtctgaatcatggtgaaggaactcacaacatgcccggattgattaggtgcatttttccaccctcagccatgggggtgaagggggttggagaaggattggccctgatcttctaaacagcacacatctttctagcttctggatgaaagagtgagtcagggcaccaggaataactaggaacagttgatcctactcagtgtgttaaggggaacctggggctttaggcagagaaggctgtgtagaaagagaatcgatctgatatctgaagcagtggttgttccacacagctgggtgtctttgagccccttaacttttttgcttttttcagtactcatcacatattaaagctgtcgaggaattgacctagtacaaagtggtggcaataataacaataacatttacagtgcccgacactatgccaagctgtcaacacatacaaatgtcatttcatcgctcatttgaactatggaaaagctgacacttagacgaaataatgtgctcaaagacacagagcagactgaggggatgtcagaattatgaacccaaggctttctgactccaaggcccgaagctagagaatgcccactcgtatcaggttaatgtccacccctcatcaatttaatgttactttttccagacttagctcacacttgtaatcctaacgctttgagatgccaaggctggaggattgcttgaaccccgtagtttgataccagcctaggcaacatagcgagacgtcatctctacataaaataaaaatttagctggatgtggtggtgcgttcttatagttctagctactcaagaggctgaggcaggaggattgcttaagcccaggaggttgaggatacaatgagctacgatggcgcctctgcacaccagcctggacaacagagtgagaccctgtctcttaaacgaaaaaaaagttctagggctacctgtaaggaaaacatctttaattccatcacaaaatcaggcagtgccacaaagggcccagcctagagtgcgatgactggtgttgccgttacacccagttc

SEQ ID NO: 132824 - DNA, 1005 bp, Homo sapiens
cttctgtgcctggacctctcatcagcagtgaatggaaatctcaatgattaatacaatattttcaatctaatagagctgctggctcacagccacttgtcttgagacatctcactgtcaaagcatgactctcaatacatgaaatatacagtgggcatcaaactatattcccagcttttaagataacatgattttctccttttctatgttttactaatttttattaaaaagtatgtttacttttacaatagaaaaaaaaaagtcagttaagaagaatgcctgctatgctgtggttaatctaaagttaattacttctctgccacctactcctttgtttataaaggactctattgtaggtgctggaagcataagtaggtgtgaccgtcaggttcctatacactaaatctaaatttgctgcctactcactggcattttgtggcttttgtaccttttcttcaagcctccttctggacacagtttatccaatggctggtatcatgtgggtttgtcagtctttatagctcatttgggattgcttcttttggtagttctgtgttttggaactctaggcctctgcttttgttttcttttccttcaaatagtcattgaagtccagagtgttggcagtgacctttgaaaatgtttttacagcttacagagacttcctgacatgttttattagctcttggtggtagctaataaagtgagtcttagcaaagccgtgtaacatgacagattagagccacttccaaaataaccactcaccagagttatcttgaaggaggcttgacgacaggatatttggctaccgctttctgtccagttcagcagggcatgtgtgattacctcttgaagaagggaggtcattcctttaggaaatacagtgaccaacttatgatgaaagaaccacaaacactgagagccccctgcaccagtaaaacagagatgtgattgctgtagggattgattaatgagttattccacaaaacttttgcctcctaccttcac

SEQ ID NO: 132825 - DNA, 1032 bp, Homo sapiens
tttgtgggagtcagaaatgaatcaaagaccatgagaggctgccggagagcaccatccctgcagcacaggaaagaaaagcctggggctcggttgccaatcccttgtggcctcagcagttcctctaagcttccctaattgtactaaaaaggtgtgcctggcagaggatgtggagaatgaaagtaccaggtcaaggagtagtgatgtcaccttaaatccagagagattgatcagacagggtgaaatgtttaagcaacagctctgggaagcccttagaaggcaagtggcaccctcagcagaccatcagggaactctgttggagcaaagggcctccatagaacttcgttgcattcgctcctgagctgcaggcactgatctgtctgcctcagacactaacttagatcttctaaccctcagcacatccttgctcctcctctctgatacctagtttcagagtaaccattagagacaccatctgtgcttttacctggtgatagtgcttatcctttgaggggcaaccttgaaactcagtattatggaacttccaagttcgtgaccttgaatggtaactttgaaactaggcaatcttccaccagcaccactggtgggctggcccaagctctccgtctatgcaacagccacagcatccatctgagtactccttttcccagattctcagtctccagtgcccagcccagcttcctcctcctgccactaactgacacagtgaactaagacacagtaagacaatgagccattgtcttagttctagtttctctgtttgtttcctctgtttaattgttttagaatctatttttctcttagctatttatcattttgaattgctctgagtgtgattagaatatttttaggatggttttgtcccctttcttttcctttctatgacttctgagatcagatttcagctgttgtctgtgtgagacactattattgctcattctgcatatactacctccctgatggagatatttccaaatatcacacttttccatgtggggctatgcagctggctgg

SEQ ID NO: 132826 - DNA, 1048 bp, Homo sapiens
agtgaaaagagactactaaaaataaaagctttactactatgacaatactgaatagaacttttacatttgcagattattccagtatctcaaatggcaataaccctgtgattgaattattactgcctctacaacacagggaaagaaattcagcacatagagaaaaaaaaaagaaatcttacagaattgtaaaagaagagggagcttctatctggttgaatgatcaaaataggttttatggaaatgactggaagtgaaaccttggatctactactcttttctgtgaccattttaataatagatagccttcttccctttaattaaacttttatttagcagtgcaagtttctggtttatttttctgaacatggtagttgatcgtctgatgtcttttgcttctgtgaagcacactgcctaatggatgttggactgtttctaaagttacttttcttcccaggccaatattcatttattccagcatatgctagaggtgttgggggagtttgtaacatgccttgggtctcttgctacacagagttgtgtttatccgtcatgttgatcagttgtatacaatttttaatgggaaaagcatgactttactgaccttttctgaacaaataaatttacttaagtctgcttgtgtcatttggaaaagaatgttctttctcttcttctctgggactgcctccagtgttttgcatttcagaatcccagaagttcccagcttcacacatccccagtcacctgactccacaactttaaaagcagactggaaggggacctgaaagaagatagagtggagacacagagttctgtggctgtcagtcatcagtgttgtaccttggtctcaaggaatatttacatcactggtcctcatgttatctccatagtagttgattcttgctgccacttaaggtcaagctctccctcccaagaaaggctttgtctttctagaagatgcctaaggctgtcctttttgtgggattggactccctctgaatcttgtgaagaaatatccaagaagattcatctgtctccttccctgtctcca

SEQ ID NO: 132827 - DNA, 2172 bp, Homo sapiens
acatttatcagctgttccctttttggatttttttaatgtccatcagctagattatattcgtcatattcatcaatgaccagtaataaatggattgcttataaataaataaatgtgctaacagagctatggccccttgattagcacaatgtccaataaagataggaaagttgtcattagtaggacttgaaaattaccaaaaaggacgaaattcaatgaatacctttataattatataatagtcccaaataggtcagagtttagaacattagaactattttactttttcctctagtggtctctgagattctaagaggtcttaatgccaagaagggcacaactgtagcccatttcccacagagcaaataatttattttcttaaaaaacatagatcatattaactatctactttctaaagtgcagtatcttcccactacaaccagaataaaatcttaaatccttaccttggcctactggaccctttgtgaggaggcccctggctacttttgccatctcctctttcaggatttccccttgcctgctggacttcagccaccctaggcttttttatgcttctcaaaacacactccccccacccccaggtcttccccccactcccagctcttccccctactccctttccccgagcctttgcgcgttctgttccttgtgtctggaaagcttggccctggatttttgcatagctggctgctctttcttcatattcagatccccgctcaaatttctccttcctttgggaggactcctctaaccatccaatataatgtgacctagatcccttctgtttctattagataacccgcctaatttccttaatattattttcactctgaagttgtttgtcatgtatatttattcatttatattaatcataacagagataagaagatcaataattccttactaaaaagtcaaataaaatgcaaatcatcataacaagtctgaagcattgccattttctgtggacacaattgcctgcaagcagttgtctaattcaacttgtatttacttactatgtacccaacagtacagtagtaacttcgggaggccaatcagacagtcagcaaatatttgttgactgtttcacacatgccagacagtgagctaatgtgcgaaacactggaacacagtgggaaacaaaacgtgcatgaccttgtcctcatgaacttaaaagcaaatagtagagtaagacctacagaggatggaagctccatgagtgtaggaatctcttccactcagtgttgcaacccagtgcctagatagtgccaggcacatgaaagtgctttgtataagttgatgaatgaacaagtgaaagaaataattacaagtgtgaaaagtttaacagaggaaaatgcagtgtgccaatatacaaagtacaagctcacatacaaatattaccaaacatacacaaagtctctaataggagccccttagaaatgatactttaggtgagaccagaagggtaaatgggactcagcaaggtagaaaggataggatggtggtacggggtctgggtagcggggtagaacaacagctacaaaggtcctgacgtgagaaaactgaggcatccctgaaggactaaaagaaggaaagtgtgagtactgtgcaatgagtgaggctggagtgacatgtgaggaagtcacagagggagcagggccttggaagtcttagaaagaactctggtcttggctgggtatggtggctcacacctttaatcccagcactttgggaggccaagtcaggtggatcacttgaggtcaggagttcaagaccagcctggccaacatggtgaaaccctgtctctactaaaaaatacaaaaattagctgggcacggtagtgggtgcctgtaatttcagctactggggaggctgaggcagaagaatcacttgaactcaggaggtggaggtggcagtgagtagagatagcgccactgcactccagcctgggagataagagtgaaactccttctcaaaaataaataaataaacaaacaaataaataaaagaactctgttctttattctagggttataggaagcctctgaaggcagatgagtgacatgttaagacttgaatgttaaaagaattgctctggccacagactggggaggggcaaggatggatgcccagtgtcatggagaaaaaataattttt

SEQ ID NO: 132828 - DNA, 1074 bp, Homo sapiens
tatcaaaaccctgatggtgagtcttgaaatcagagtgcccagcccttggggcaactcaaggtgggtgtatgagaatagaagacggtccagggtatggtctctaagatgattaagaaattgaaaagtaggggttcctgattggactaacttgaattcttcaggaagagggaaaaagtgaaaagctgtaaaatcataaagggaagatggcaaatatggttgggtattttccccaactaaatcctgatatttaagaatacctttcgcagtttgagaaggttcagtgatagaccagtaaaagaaaggaagaaatcgtttatgtatgtttggaaacttaaaaacttgttactttcagtgtggtatagactacaaataatagagtacaggatgaataatgtaatagagatctggactacagtcccagagtgagctattgggagagttgatgtatatttggtggcacgttcctgactgttgagcttggtgtcaaatacccttaagcttcaagatgcagtgggaagactagacataaggactggccctgctgcttttcagttgtgtcacgcagggcagtagttctcaaagtgggtcctagaccagcagcatcaggatcccttgggaacttattagaaatgcagttataggcttcaccctatatttagtgaatcaaaaattctggaagtggcccagaaatctgtgttttaaagctctgtaggtaattctgattcaagctagagtttgagacccacttgtctggggcgagcaaattctgcctgagccttatttttcagatatataaaataatgatactaacacttatcccacagggctgttactttgaaaaaattatttacttgagacattgtggttatggtagcagatgagacaggcccagacctcatggaacttacatttcagtcaggaaaacaggccccatgccagatggtgcaatgaaaggagctaacgtggagaactagcacaaaagtgctgagagagctcaaagtcaaactgggctggcaaagcaacaatataatattataacaagagccggaagccactgccaccttaggcttgcat

SEQ ID NO: 132829 - DNA, 1028 bp, Homo sapiens
tatggaccacttacatttattttgtggactccagtggtacacataccacatgctggggaacactgacttggtgaaatattaggtgtgattgtgttggctttcttaggactagatgtcagactcactcacttatcttgataagattattattttttggttaactgactaaagttacatggactctgatgcagttactggtatttatatctgaggattaagaaattccagtgtgagaattcatagatttgtttggggatcaaacaaactgggggttcaaattctgaggagaaagagatcctgaaattctcctccctcttctaatcataggttgttaattccaggctgtgctgtttactttaacccttgcgtatcttctggatacactgggacacttgaaatgcaaattagtttgtttgctttgtgctacaggctaaaacacttcaaaaggaaggaccagtcagtcttctctgcctcttacatttcttcatgatgctggtcattagatttttccatgcactttcagactgaatttagaatttagtgttttatgccgtaggctgaataggaatccgcaatctcctatgtccactgttgtagctccagtgcctaacataatgccctgccaccttgtagacactcaggaaatatttgtggaatgatggaataaatacttgtgctattagaaagtatgatttaaaagccctgagatggttggagtacaaaaaacgtatttgaaacacactgttgaaatcacctctagattggggtaggatgtgtccccacatagcacctggaaagttgagaagggcgtgtatggaagtaattaagtttataccagaaaaaaaatgtatacattgattgacgcagtatgtacatcttgaaatattcggcacacaaaccagtttgtcaggatcttggtgttgctttggcttgtccagttccctcatacttctctctctcctaccccttcttaacaggaaggaggtaggttgtatgtcagggcaaatcccccagttcacagcatagga

SEQ ID NO: 132830 - DNA, 1126 bp, Homo sapiens
ctttatttcagaaaacattttttaaaactctgtcttttgttccatggactgtcagtaggtaatgtttcaaaccataccaaacaaatcccactcttttcttttactctttccattctttctcaccactaagtgtcctcttctgaatgatgatgaatcattataggtttttgctgaaaacacctgtgcattcatctattgtagctgttgctgctgctacagtgtataaggttacaggtaatgctttcattttggcactatttacttacacatttgatgctagaatgtctgcactgatgaccaaaacaataagcctgtgaaacagcaagaatgcaattcaaacgaccattgaagagctagaagatgagcagaatagtcctgtgacagacttctgtacggttacacctatttgtactaacttcatctgtgttcagaaataatgtgagcattctaagctctgaaaccatgcatatctttgaagattaaaatgaggcagcaaggtttctcccaactaatgtaacaaaatgcagtgatatgacagctcaaagttgaggagttgaattcgttggggaaaaaaatagcaaagctgcttctcaggcaggaatctcttccattctggggttgtcctgtgggcaaagatggcacctactaagtaggcataaggtaaacagtgcataagggctgatggaattgcatcttaggcacatcctttattggatcctggaaaggtcagacgatgttcattttatgatacacacatacatacacccctctaaaataaaaacccaatctactttaattcaatatttgggaagtgggaggacgattccaaggactattccagctataaagagaacaatatagtgggaaaatgagaaatcagactggtcattctttgattctgaagaggtggaatttcagataacacagaggaatggagcagctcatttgaaagaaaagttgagctgaagtcttgtcctttcaggaggcagacttgttacttcagggtatcccagcggcctcagtgagttggcagtgagcttacagattgacatagagtccccaaataactgaagacaggagatccactttggttcctcttttgtggtttcactgtgatgtaaaatgt

SEQ ID NO: 132831 - DNA, 1027 bp, Homo sapiens
tcattagggtagagccctcataaccaaactatcttccaaaggtcccaccttttaatgccatcacattggaggttagaatttgaacacatgtagtctattgcactgtggctgctatcaggttagatgccccatttgaaagattagactgtcttggcagcttcccaaatgaatgccaaggtgccttctttccccttctgcttgtgagcaaggtggggtgtgtgtggaactggggagagtgcatgacctctgatgaagctgagggaatgtcttgatggggtccatcaccaacatcccctgtttggggctgacctcttggttggagaaggtgctagattccttcccacactgccccttgctttctattgtcaggtccctgtgttgccccagaggcccatggccctccttgatgtggattagtttagcgactagctctcagggcaacaggtccctctctgcttgtccagcttggacagcttctctttcctgggcaccgtgaaggccaggatcctgcctcctgcctgtgccctcctgtgagcctggtgctctaggagcgtggctctccaaacagggagtgactcctctgtgtcccagcacgaccccaccctccccctttgcctccctcagacactgggcagattgtactcacatttcacaagattactccgctagatgagaaaaacgtgtactttattcaggacagcgagctcagctctctggattgcattccttgcagaaatgagaatccaagtgtagtggcctttcaaagctgaaataaatcagggctccttggccatactacccttgtctgtcagtttttgtctttttctagaagccatgcaaggttagggaaaattaagggagagcaaatgaggaccagttcattgtgtaatcacttaaaatctctgagttggaatagctatctgtgatttaaaacataaatgtttgcaaatggtttgtatcttgatcagttatgtaaagacgtgcatttgagatgcaccaaagtgacttttagatgcttctttttaaa

SEQ ID NO: 132832 - DNA, 1064 bp, Homo sapiens
aataaatttctgttctgtgtaaattagtctgtgttattctgttatagcagcgtaaaacaggttaaaatacccccatttttgagcagcaacttaattaggtatagaatattagtttgacaggtttttttattaccactttgaatgtcatttcattatcatctggcctctgtattattgatgaaaagtccaccaccaatctaattgccattattaagtttgtaatttatctttttctctctggttgcttgtatgactttctctttggtgctagtgttctgccatttaccgctgtgtgtgtgtgtgtgtgtgtgtgtgtgtgtgtgtgtgtgtgtctttttaatcctgcttgggacttgtaattttctaaatcaagaacatatgtattgctttaatgctattaaattctcagcttttatcatttcagtattgccactctcacataacctactccttctccagaacttcaattaaatgtgttttatttccccaatttactctctgtgtttataacctctctttcacattttttgatcccttttttctttctctgctccattcagaacacttctttagacccatctttcatgatggtaattctcttttcagctgtatctaatatgcaatttaacatgtttttctcatctttaagaattcaaattagttctttttttcaaagttgccctttgttcataaaggatggttcttttattatggtttttattccttcttttatgttaaaaaaaacttttaaacgtaattagcttatagatcctgtcagattattctcttactgtaagttcttagaggtgctaattcttctgctcattgtgtacgtggcttctccttctgactggcttcattctttgtgggtttattcagcaggaattgtttattctgagggagtcttgtaggtcctgagttatgaaaatatttctacagaacaatttgagtttgcttcttccctggttctgggaacatttttatagtgatctattagttcaagatacttacacagcctaaacaatgtaaatttgtgcaacacacttgtgcatgacataggcttg

SEQ ID NO: 132833 - DNA, 1039 bp, Homo sapiens
ttatgaaatgcaggtaacaattctcacttggggcatccctgcccctcaaagatgcaggaagaacttggcctgaaccccaatgcttggcatcataagctcgttatgggccctcaccctgccctggcactccttagtggctctgtcacctggactcaaacccttatcccctacaagaaatccagtggaaagcagcattttccagagtctgtagcttttttgaagatttcattcatgaagggcgagcagcagcaaatggaccactcagctgtgacacaccctctgccatttccccctacgtcgcttcacatcctattaataccagctctctttgcaccctcctgctgtacatgggaccaggtcttttaagattttctgaggccttagttcctcttctgcccacgagcataccaaacataacaacgtgcacccacacctcacattaaatataatctgtgcagcaagcgatgaaaagcacctttataattgggcctttgaaatcatttgactgtaagtatgtcattcaatttatgattagctctgttttctcaggagctatgcagtcaagaattcttaaaaagaaagtcagcttaacttactaattgttttcatgcacaagaaaatatttttaaaatattttgaaacaaaatgttattgaaatttgttagatttaacaatgaaagaagtaccatatattggccgggcgcggtggctcacgcctgtaatcccagcactttgggaggccgaggcgggcggatcacaaagtcaggagatcaagatcattctggctaacacggtgaaaccccgtttctattaaaaatacaaaaaattagccaggtgtggcagcgggcgcctgtagtcccagctactcgggaggctgaggcgggagaatggcgtgaacccgggaggcggagcttgcagtgagccaagatggcgccactacactccagcctgggcgacagagcaagactccgtctcaaaaaaaaaaaaaaaaaaaaaaaaagtaccgtatatttgtagacatttacttaaacatttggta

SEQ ID NO: 132834 - DNA, 1023 bp, Homo sapiens
gggctgacaccatgttttagaattgctgatcttaacacttaggctaaaacctggataaaaagagattcctgcctactttcctgtgacattctctttagaaagactgaagatactcccatctgtaagaatttagtttgggcatcctggtggattgagggcttggaggccacatgacaaaagcttttcatctggaggaccaagtctgacccttcagtagtggctgcctggagaggctgtgttaagaaagattctgaagccagaaaagcttctgtctccttagctgatggctgccctggccgtgttcctggggaggaaagggacacctgatgtgtacttggccatctcaggacattagtcttcacacaacagtcctcagttggctgatgggtgtttttgtgcttaaacactatatccaatgcatacctttaatctggtttggggtatactgtagtttgtgagttattcagaggtaaaatgctaagtacaggatgacaagttgaagaggtagctgtccagtccctagacttcacagaaagagtgaaagataaattaaatcctaaaataagtatatgaatagggaagaggtatttggaattagtattaagtattatttggtttgatattgtgtgggagacctagatcaatgactccaggtcctaaagtgctggacctgaggatataaagattgctgtggttttgaaatggagaattcgctcattgtctcttttgatctgaaaacaggcagtgaagtatgtaagtagagcatgcagcactatgcttagcaaatcatgactagaaactggagatctgtcacatttgtagggagaaggatcgtgtatatatggaagaaataagagaggcaaattgatggcaaaaaaagggaaggacaaacagggtcagattctagtctttgccctttttgttgagagtgagtgtttttttcctgaaagagcatcaaggactacacaggtaaaacttgaactgtaatatttaaaattccttttgcctaataacttctctttt

SEQ ID NO: 132835 - DNA, 1041 bp, Homo sapiens
aatgagcattaagaaaactaaaagcatctgtattagtcactcaacaattttgctggcttttctgtagacttagacggtggcatggtacactggagagtggcagatctgtggcatgtggatgatcattctttccataatgccacggcagacatcgccaactgacgacagcactcagtcttgctctgcccataccttgctttctccagttgttccagacagatcaactggaactggagctgtttgctttcccaggagtagtggaaggattagcattttaggagaccttggttctattctaatgaagtgtttgaccttggaaaacagcctcaatgggccctattttcttcaatatttagactgggtgatttactgtattgttttaagcataacattaatgttgtttctctgtctacaaatcgctgtctggggacaaacttaatttaaagtcagcatagtcttttgcctgcctgtctgagactccctttgatttcccacttgcatttattaggggtatctgacaccttatctcactcgtttttttgtgtgtgagttaatattttaatatacttcaatttattttatttagttttagaaaaatagccttcaaaatgaaaaaaattagttttaatttcttgcctttggtgatgtaggccccctgagtttattttttctggaagtgcttcagccatgttcccagggaaactgcctcttcactcttctccaaatcctgccaggacttcttgaatggtccctacacgtggattcctcagcttctggagaagcttctgtcttaatggatgaaaaagactctgaacaacccttgcgtttttttaatgtgatactttataaaaccttttcagtttagatcttgttatggtttattatttgtggagtatcagtatttagtacagagatttcaagaaactcagtcaaaagacagtatgttttagcccaaaggcattattctcatatcagtggaatactttcttcaggaacttgtccataggattttgatatcctgagtacgtatcacagagaaag

SEQ ID NO: 132836 - DNA, 1079 bp, Homo sapiens
ctagcctttcttgtgtcacagaaaaactaaataaatgaaatgaattttctatactttaaggttgaaacatagaaaattcaaccttcagcaatatttttattaaacttttggcatctctgatggtttacttagagtagaacctagtttataatgataccttagttttagattatttagttattttatgagttagtgcctgagtctcggacttggcacacagtaattcgatttattatttttataaataatctcataatgttctgcaaaaatctcaggacttccagatgcttcagacaccagctactgtaaaaaacatccaaaattataggatggcctaaacatgatagaagcattcctcatgtgtacccagctcaaaaccagggtacttgagctgcagttgggtctcttataagcagtggtcagggacatagaccctttccctcttgtggccccgccatcttccatgtggtttcctttatcaggcttgcaggatttatctttgtcaggctggagcaaaggggcaggagcatggaggagtgtgcatgggaaggttatatggttaggcttagagggacacacaacactgtcagtcccattccattggctggaacttagtcacatggccacagctaagtgcgagggatgccaggaaatgtagtcaggtgcccaggaaggagagggaatagtttggtgaacagttagcccatctctgatctatttagaaaaacaatctagcaatcaaaatgcattgagactggtataagttagatcagggggttgggctggcataatggggcacattatagatgcccaatagagattaaaagaaaaaaaatccttctggagaggattggagttgtcagccataggcagctttctagtgatttcttttctgaaagagtagaagtactgttgaaatgaaggatttaaattcttttcaaggctacataaataagaagctaaatgattaatttgctattttttttaaaaaaaacatactttccttggaagaaatctatttggtaggatggtaccgtcatttgctttctttaaaaagcagagcccatggagcttctttc

SEQ ID NO: 132837 - DNA, 1037 bp, Homo sapiens
cctctagaggaatagttccagatataggaatctaaggaagcaacttgtggtctttttttttttttttttttttttgagcttgtggtcttattctgcgttgagttgactttattttctctgaaagagcttcttcataaattggatgtcttaaaattaaaaaccaggatagccttatgcctccaaatattatagctaattaaatactgggctatcctcttggaattatcaattttgcataattgagtatttttcctttaagagtagaactcaccatgtggaaagagccatatgaatggtcccagagttaaagcttctttatattcccaggagagatgtacttcaggagaaactgggattgccctatatacatccctgccagaatcactcattgctaaatgtgataatacggtttctcatggatggttccagttgttgggtcaaataattcagaaagtatctactgcatgtttattccatccatccacccacccaccatccatccatccatccatccatccatccatccatccatccatctgtttatccatcctttcatctccaaggagatgatgcctgacacaggtagtaaaaaagaatagggaaacttcatgtcctcatagtgtgtcccagtcttcaaacaataacaaaattaccaggctttataagtgctatgaaggaaataaacagggcaagaaggtaactcggggaggtgatggatgagctaagacctgaagggtgaagagcagtcaactgtgtacaaagctggaagggagcattttggacagagggaacagcaagttcacaggccctgatgggaagagctcgggatatttaagggatacaaaggagattagttgggctggagtgaagggaatggagaggttggtactaggataggttgggactggcagggcacagcaagccatgatagagttccagttttattctaagaccagttaaaacgtatgaaagagtttcaaacaagagagtggtatgatatgatgtgtgcttgaaggagatccctttgggggccttgt

SEQ ID NO: 132838 - DNA, 1048 bp, Homo sapiens
tatggagaggacaaagtcagatgtcggggaaaattaagggaattaacagagtggtagatggcaacttaggtgtccatttaatgtcctatactacttctggtgcattctccttgggattccccgaggctggtcagatcatgagcactttcgtacctctactctagtgatgtcacacagttttgtatttcttggttgattcatatgtcttcccctccagaagaaaaatgtgtctttcttagttttgtatctgtggcacttcttacacagtaaatgttagtttaatcaaaaactgccgtgtgacttcttatagttctcaaatctgattcagtaataacctgtataggcaaaactgctgagaagttctaagaccattcctctccaccacccccttttgctgcttttttgtacatgatgctccctgtagctgtcatttaattttatcaaccttagaggggctctttggacaaactaatatccagttgtcttttccagcccaactgaagattatgcacgtagtaacttcccacccagaaataatttgagctgttggaaaagaatccctgataaaaagaaatgtagcatgatggaataagtatctcagtaaataaacgtgtaccatcagtaaaacctactctctgttttaggatgaccagaacagcctccatccatatcctcatttcagtgttgatttccctgggtccttttgagcccgaatggggcttttacttctgaggatgttagtaagaatttcagatggcaggcatgaaaaatggatgtcacctaccagaataatccttctctttactcagtgaatagatgtggatttttttcctagatcacatccaagagtggctgtaattgggaagaaatgatgagcgtgcagtgggtgatggacagaaatgtcctcttgtcttgggtaaacattttaaaaggagttggcgttgtggagatgaagacagtgtcttcttttaattaccatcagcttgcatgtggtcataaggtttcttgacatttctgaagaacaaagaaaggtattatgatagaaaaa

SEQ ID NO: 132839 - DNA, 1008 bp, Homo sapiens
ttcattgtttttctgaaattcagatttaactgggtgtctttattttatctgacaaccctatccaccatgcaagctcccactgacctctcacagcagagctcagacgtgacatcccctgcagagagccattcctctgctactcttcctcctcctgcagagttacatttgattgcatttctctatgctggctttacatgtgcacatacccgtaacaagtgtacatggcaaagaggtcacctgtcatactaaaacaaaataatactgacacacacaaacatacacacacttgtacactcacatataatcactctgattagaagcattattgaatgatcagtcactggtcatacctctgttctgtaaagccagaggtattgaatgtatctcaaaaatataatcagaaaattgaaaacaatgacagtgtaaggaaacattttgactcctaaattcgtctggcataactgctgagtttgtcatcagtaggctatgcactgacatgctaacatggtttccatgatatctgttcttatttccctggcatggcttgagatcgtttatacatgttcaggctttcctcagagggagggctggttagcaggggctgctctgttgtttatggaattgtgtggtgtctatgtggattatgagattaactgtaatggacaaggcagaatttggcaaaatggagatgagacatttcagtctagacgatatagctgtgattcagctgaggggcatttggcatctactgataagatttattgctctccatgaaaagacaagtttcgaatcaggacgagagtaacacattgatcatccatattactcaattcttgaaagtacattgttccatttgtagggtcattaggcgattgagcccagtagagagcccaggaaaaggaagccttgtgtccaggcctagcggtacttcccatggggcatgcagaggatggtcatcacaaggttgtgtgcagctattttatcctcagacaaacgcagtcacctctg

SEQ ID NO: 132840 - DNA, 1051 bp, Homo sapiens
tggtgcagtttaggcagtatttttaaacttttgcttgattgcttgattattatatcttcttgcctggtggttctggattctgtaaaggcttttgtttgctcctgtgtttgttgtgcactgaggaggtatgtgagtaggaagtcacccatttagctaagtgaattcctagctggaccaatgttactgtggtaatgatggctatctattgtttatggtttttactttgtttgaccaaataaccttcctctgattatggttaaagcaaatggattcttttctccaggaaaataaaatggattgtcattttaaaaaggtagcttattatatcttctcaagaaaaaaaagatatacattaatttgcaattaagtcattgtaaaatggtaaatagccacagttccacaaacatggcagactttgattgaaaagttggcttaaaaagttcttgtctaaatcagttgactgcaccaaaggctaattgtgggtaagtgggatttcttaaaatcctggcttttaggaaaggtttcttacggaaaaaaatatatatatatatattattctatttgttccatctacataaattcttatttcatgggcagatttcttgggctgaccaaatttggaaaacattaagaaaacaagcccttttatatagcgttataaattgacacaaccttcctagagaggaaagtggtgatatggatcaaaagccttaaaaatgtacataatatttgactcagcgattgatcctctaggaactgattccccagaaataatgatgatgcccttaaagacttagctgtaaggaagtttgtcacagcaaaaaatggaaaacaattttaatgttcagcaataaatacttagttaagtaagccatcagtagaaaacatatatgtaagcactaaaaattatgtgtgggaatatatttggtcacttggatagatacactttgtagtttaaaaaacaagcttatatttgcatatagaggctgataccacttttgttaaatatagacatatgcatatatatatatatatatatatatatgaaaaa

SEQ ID NO: 132841 - DNA, 1053 bp, Homo sapiens
agatgttatcctttttcttttgattagatgtgatctttaaaaaagcatactgttctgacttctacccctgccacacattcagaaaatgtatattaactgaaagctcagctcggctttctcagccattctctttcctccaggatagcaaacacttggcaggactgcaaccataaatgactaaagtaattgacctcattccagtaaagttattagagagaacaggcaaagactttattagagaaagtcatgaaaaatagcaagtatatattttatgctcagtagcttgcatgtcctaactcctttacaagcttgtagtactatttttaatctggaacaactctgctgatagttatttttactaaatggtttgcactaactcattttattgtctgatccttctgctgatagcctgcatataccatgatccacaatttgttcttgttcttttaaacatctcttctaacttcttggctgaaatttgcctcacttttatcataagactttctttggctataacatttgggccctgcgcttggaataatcttgaatctgaacagtttggcagcatgctgttagtggcatgagcaggaaatggcttccaagggcagaaccaggtacatttcagatatatttcacccttttttggtgcatttgcgtagccacaatctctgttaattcttgcttgaaggtagatgattctgaaatggggtagatagaggtgcgagaggaagagaaaatccatgtcagctaggtggtgaattaatatagatgaagggccgtgctagaaaagtaaataatctaggtagtctggctgcaaagtaacttttaaaaagataaaagatattaaagtattatgtattattggaatagctagttaaattaactcacagaatgtagtcttctaactaggaaaatctaatgtaaaattgttccatattatgactctggacattttatttcaggcacatgaaaaacagtaaaagacagattctgtaccatacttttccacagcattttccatgcctttagatgtaggaatcaaacaatatacat

SEQ ID NO: 132842 - DNA, 1119 bp, Homo sapiens
ccgggcgggcggcgaggtttggggcgcacctgggcgcgggtgcaagaaggtgcgggaggcggcggaccggtcttctgcccgccggccacgggcttccggggctggagtcctcttcagacccctgccggcgcctgggtttctggccggctcctcgtgtgcacttcccggcaggaacaagggtcgcccactttccaccccgggatcttgatttgtccttgatttgaaaagatataaatcaataagatcgtccttctttcggggtgcaagactccgagcccatccccagccgcggacgcctgcagggtgcgtgttgggctgtgggtggcgggaagacaaacttttacaaaagtgcgcctgggctgggggacaacgcttgggcgtcctgatcctgagggaggagtctcggcttggggcagcgtaggggaagtccgcaccgtcagccaggtcgcccccggggctgacgatgcctcacggaggtggggagcgtgtaaaggccgtacaaatcgcgcttaactttggggccaacaactgtcaaacatctggaatcccagcccctccctttccctgaactggggaagaaggtgaaaacccttcaagttttctttgattgccccttcccaccttcagacccctgctgggagggtaaagcgccgacccctggtgcctggcaagtaccagagactctaaatctctcgggatcccccccctcgcgctctttcctgaccctctcccctaaccctccccacagagatctctctacgcagccgactgagatcgtggcgaatggccttttgtttctccgcgtttcccctattgtttgcctttccaacatctggcggggcttggggagagaaggaagcccctctggtccccctccccggcccccacgccagctccggcaggggatcccagctgggaaagtggaggagcccgaccccagcgaggccgccccaccccgcccttgtggttagagggcggagggaaagttgttccttccccgcctccgctgctgcctgtggcccagggcgcatttctcagatctcagcccaggcgcgccgcaaaggctcaaatccgagaaggtgctgctttcgagacagtggaagcgcgttccgccccaat

SEQ ID NO: 132843 - DNA, 1068 bp, Homo sapiens
cagctcctgaactctgacctttttatgccttagttccactttcacaaaaagggattgatgtaatgtgcatttcagaggaaacgactatagacatttagtgtcattataaatgttgagaagtatgctggcagaaattatgccttaagatcatatatggattcttgtatggtttgaaattgcttaaaagatatatatgatctctaaaatgtgtgtgtatatatatatgatgtcttcttatatatctatatgtgatatatttatatatatataaatctgtgtatatcacatatataaatttgctgttatttgaattgccattacctcagtgcttaggggaagccatgcacgtttgtttcttttcagtacccagagttaattaacataagttatcacagaagctcccataagcattgagacaatttctctatacctgtgactatttaaggttttgaaaacaaaacagaagcaggtaaggaggaagtacgctttactattgaagatttattaggtacacatttagatttgtgaactcacattgcttaggatgaaagggactcttgaggatgtctgctgtttgttagtgaactgcctgtaacaattacaattagcacacacatgagcacaatgaactgggtagtcagactcagccaaaatgaatagaaatagcctcttaccaaatttactttgagtagcccttggactctgagcactgctgcccagagcaatatgactgtaggtccaagtttgtcaatgactatgcaaatgtgctttcttcgcttttactctattgtcatctgtctattacaatgttgctatggtgacacctttccaatatccctgtgcttctttggtatcctctaaggggaagctgtaatgaagtggcttggcaaaagaatcctcttggaattttttttttttcatatgctactgaaaaccagcatgattttcctcttatgggaaatgtataaagtatgagttggaaatgatggaaattaatctgtactgacttgggcaaggaatgtgaatgttattcattctgttccaaactacctgaaaatattctctttc

SEQ ID NO: 132844 - DNA, 1105 bp, Homo sapiens
ctgcactttagcctggtgacagagctagactccgtctcaaaaaaaaaaaaaaatatcagattgttcctacacctagtgcttctataccacactcctgttagggggcatcagtggaaatggttaaggagatgtttagtgtgtattgtctgccaagcactgtcaacactgtcatagaaacttctgtacgagtagaatgtgagcaaattatgtgttgaaatggttcctctccctgcaggtctttcagctgaaacctggcttatctctcagaagtactttccttgcacagtttctacttgtccttcacagaaaagccttgacactaataaaatatatagaagacgatacgtgagtaaaactcctacacggaagaaaaacctttgtacattgtttttttgttttgtttcctttgtacattttctatatcataatttttgcgcttcttttttttttttttttttttttttttccattatttttaggcagaagggaaaaaagccctttaaatctcttcggaacctgaagatagaccttgatttaacagcagagggcgatcttaacataataatggctctggctgagaaaattaaaccaggcctacactcttttatctttggaagacctttctacactagtgtgcaagaacgagatgttctaatgactttttaaatgtgtaacttaataagcctattccatcacaatcatgatcgctggtaaagtagctcagtggtgtggggaaacgttcccctggatcatactccagaattctgctctcagcaattgcagttaagtaagttacactacagttctcacaagagcctgtgaggggatgtcaggtgcatcattacattgggtgtctcttttcctagatttatgcttttgggatacagacctatgtttacaatataataaatattattgctatcttttaaagatataataataggatgtaaacttgaccacaactactgtttttttgaaatacatgattcatggtttacatgtgtcaaggtgaaatctgagttggcttttacagatagttgactttctatcttttggcattctttggtgtgtagaattactgtaatacttctgcaatcaactgaaa

SEQ ID NO: 132845 - DNA, 1136 bp, Homo sapiens
ataaaatacctaggaatccagctaaccagggaggtgaaagatctctatgagaattacaaaacactgctgaaagaaatcagagatgacacaaacaaatggaaatgttcttttttaacaccttgctttatctaattcacttatgatgaagatactcattcagtggaacaggtataataagtccactcgattaaatataagccttattctctttccagagcccaagaaggggcactatcagtgcccagtcaataatgacgaaatgctaatatttttcccctttacggtttctttcttctgtagtgtggtacactcgtttcttaagataaggaaacttgaactaccttcctgtttgcttctacacatacccattctctttttttgccactctggtcaggtataggatgatccctaccactttcagttaaaaactcctcctcttactaaatgttctcttaccctctggcctgagtagaacctagggaaaatggaagagaaaaagatgaaagggaggtggggcctgggaagggaataagtagtcctgtttgtttgtgtgtttgctttagcacctgctatatcctaggtgctgtgttaggcacacattattttaagtggccattatattactactactcactctggtcgttgccaaggtaggtagtactttcttggatagttggttcatgttacttacagatggtgggcttgttgaggcaaacccagtggataatcatcggagtgtgttctctaatctcactcaaatttttcttcacattttttggtttgttttggtttttgatggtagtggcttatttttgttgctggtttgttttttgtttttttttgagatggcaagaattggtagttttatttattaattgcctaagggtctctactttttttaaaagatgagagtagtaaaatagattgatagatacatacatacccttactggggactgcttatattctttagagaaaaaattacatattagcctgacaaacaccagtaaaatgtaaatatatccttgagtaaataaatgaatgtatattttgtgtctccaaatatatatatctatattcttacaaatgtgtttatatgtaatatcaatttataagaacttaaaatgttggctcaag

SEQ ID NO: 132846 - DNA, 1032 bp, Homo sapiens
gaagctataaaagttgcatggtcaaataagtctgagaaagtctgcagatgatataattcacctgaagagtcacagtatgtagccaaatgttaaaggttttgagatgccatacagtaaatttaccaagcattttctaaatttatttgaccacagaatccctattttaagcaacaactgttacatcccatggattccaggtgactaaagaatacttatttcttaggatatgttttattgataataacaattaaaatttcagatatctttcataagcaaatcagtggtctttttacttcatgttttaatgctaaaatattttcttttatagatagtcagaacattatgcctttttctgactccagcagagagaaaatgctccaggttatgtgaagcagaatcatcatttaaatatgagtcagggctctttgtacaaggcctgctaaaggtatagtttctagttatcacaagtgaaaccacttttctaaaatcatttttgagactctttatagacaaatcttaaatattagcatttaatgtatctcatattgacatgcccagagactgacttcctttacacagttctgcacatagactatatgtcttatggatttatagttagtatcatcagtgaaacaccatagaataccctttgtgttccaggtgggtccctgttcctacatgtctagcctcaggacttttttttttttaacacatgcttaaatcaggttgcacatcaaaaataagatcatttctttttaactaaatagatttgaattttattgaaaaaaaattttaaacatctttaagaagcttataggatttaagcaattcctatgtatgtgtactaaaatatatatatttctatatataatatatattagaaaaaaattgtatttttcttttatttgagtctactgtcaaggagcaaaacagagaaatgtaaattagcaattatttataatacttaaagggaagaaagttgttcaccttgttgaatctattattgttatttcaattatagtcccaagacgt

SEQ ID NO: 132847 - DNA, 1010 bp, Homo sapiens
acaattcaacccacaagtgtcagtctctagctgagcctttcccttcctgtttttctcctttttagttgctatgggttaggggccaaatctccagtcatactagaattgcacatggactggatatttgggaatactgcgggtctattctatgagctttagtatgtaacatttaatatcagtgtaaagaagcccttttttaagttatttctttgaatttctaaatgtatgccctgaatataagtaacaagttaccatgtcttgtaaaatgatcatatcaacaaacatttaatgtgcacctactgtgctagttgaatgtctttatcctgataggagataacaggattccacatctttgacttaagaggacaaaccaaatatgtctaaatcatttggggttttgatggatatctttaaattgctgaacctaatcattggtttcatatgtcattgtttagatatctccggagcatttggataatgtgacagttggaatgcagtgatgtcgactctttgcccaccgccatctccagctgttgccaagacagagattgctttaagtggcaaatcacctttattagcagctacttttgcttactgggacaatattcttggtcctagagtaaggcacatttgggctccaaagacagaacaggtacttctcagtgatggagaaataacttttcttgccaaccacactctaaatggagaaatccttcgaaatgcagagagtggtgctatagatgtaaagttttttgtcttgtctgaaaagggagtgattattgtttcattaatctttgatggaaactggaatggggatcgcagcacatatggactatcaattatacttccacagacagaacttagtttctacctcccacttcatagagtgtgtgttgatagattaacacatataatccggaaaggaagaatatggatgcataaggtaagtgatttttcagcttattaatcatgttaacctatctgttgaaagcttattttctggtacatat

SEQ ID NO: 132848 - DNA, 1089 bp, Homo sapiens
tggcctcactcgagatatggaaatccagacacatatggtccatgtttcctggctccacatttcccacagaaggtccactcctctcgcctgcattcactctggcttcctgcctacagttgatcttcatcccatctgtgatttttttctatcaggagaacaaatggagagaggttaagaatcgaaaagaagaaaggaaaaagaggagagattgattttccttaaagaagacctggtcctatttctgaaatgtctcctactttgaaaaccagtgtacatcagctagcatcctaaaggaacctcagttctcaggacctcaaatcaagagagagagtctacaggatcatgagccagactgcctgggccaccgtctttctgcaccatgagatagggacatttgtttatcacttccagttccatttgcccagtacctgagctgtcaatatttcagtcttttatgctcccagtagaggccaatgccttggcacactcacccccattcaccacattcccaattctctctcactcgttcttttccctgggccatttcctgtctcttatgcctctattgtccttcatcctcagataatacagatctccacagtctcattctgtccaaaaccctggccgaatcatattccactacattaaacctctgcctatcttccctaagtcagaaaacataactagagatgccagttcctgctggtggctgtcaggctggcagcaagttctggccagaggcaagcaactgctgggccaggaggtagggactggcttgtctaagaaccgttctctgttcacaaagcaacactgtaagagcttctatttcttttttcatcagaatgactttattttctgatttaaataaaaaagacaagaagaaatgaaaaacaaagagggtgtggagaaagaaattctcttaaaaagtgaaggtgttataactagatagtctcaaatttcccttcctctttgttccttgatggccacagtgaagcatataaaggggaaggaatccactaaaataaatgtatccctctatttctgtttctagcactgtaagtgcaggctgtggacaggtaagaatgtctg

SEQ ID NO: 132849 - DNA, 1050 bp, Homo sapiens
tcattcagtctctagtatgcaatgtatttcttccgatttgtatggtattgtcatcattactttgtagaagcacttcagattttaaaattgggctgctcattgtaaaattataagagcactcatttgataaataggaaaatattgagaaaataaattaaaggatcattaaatttgtattcctttgtagggtactatttttgtgtcaataaatggcaagtgtctaagactgaaaggaaatacatattatccaagggaggaaaatgttttatgtaaatatcagataaaataatacgtttctactaatagtgataaatataattgtataatacattgaacttttacaataatttatttttctagctctctccggtccgtgcctcgaagatgacaaagaaaagaaggaacaacggtcgtgccaaaaagggccgcggccacgtgcagcctattcgctgcactaactgtgcccgatgtgtgcccaaggacaaggccattaagaaattggtcattcgaaacatagtggaggccacagcagtcagggacatttctgaagcaagcgtcttcgatgcctacgtgcttcccaagctgtatgtgaagctgcattactgtgtgagttgtgcaatccacagcaaagtagtcaggaatcgatctcatgaagcccgcaaggaccgaacacccccaccccgatttagacctgctggtgctgccccacgtcccccaccaaagcccttgtaaggagctgagttcttaaagactgaaggcagactattctctggagaaaaataaaatggaaattgtacttaatattgcatgttaagtgtatctgtgccagatagggtggggattttgtgtgttagaccaagtataaagtgacacatattattttcatggggaagaaagcttattcatgtaatttcatttttttcttttttgttttctttttttttttttttttttgagacggagtctctgtcgccccggctgaagtgcagtggcgtgatctcagctcactgcaacctccgtctcccggattcaagtgattcttctgcctca

SEQ ID NO: 132850 - DNA, 1173 bp, Homo sapiens
tctctgggtctcagtgtctttgactttaaaatgaggagttaggccattgatagtaagtgtcccaaggagccagtggtttcagagctggtttatactagcatttgtgcatatctcttcctaactccgtgttcagtggcaacacattttttagattgaaataagccatggtgggaataataacaccatggaaattggcaaatgctacatcagagcttttttttcctcttggagttcaagttgttaaacctttgccagctgacactgctattgtctgagccaaggtgcttttggtttgtttttttagtagaaaacagactctttagcctagacaaagatcctagatatagggtgtatgattcaagtcctctaaaatttttgataaggaaaaaaatctgttttcatcatattctaaaatatagatcagcaaactttttgtgtaaagggacaggtagtgaaatattttaggctttttgggttatggttatacagtttctattgcagctactcagctctggtgttgaagcacgaaagcggcaatagacaacatgcaaacaaacaagcatggctgtgttccagtcaaacttgatttacaaaaacaagggccagccatagtttgcagactcctgacctagactatcagaacaagaaccatgtttcaaagagagagttttatggaaaaggagattcttcaggactttatgcgtgaataccagaaacttgagtctccaagatggacgtagcgggcagtagtaactgtagaggatttggaatcaatcatggaagactccatagtaggttgtttaaaggaaggccaagtgtgttgaagttttgaggacagagccacatatgggtcttattcccaactccctccctggagccatctcagatgttatgctagaatggatgtacctgcagtctaacccgttgtgtgaattttgcatattattatgcaaaaactagtagtgtctctaagagctgtcttgattccaggggcagagacaaaggaaatgttaaaaaggatggaaaggcccaggcaccgtggcttacgcctgtaatcccagcactttgagagtccagatcgcttgagcccaggagttcaagaccaacctgggcaacatgacaaaaccccatctctaccaaaaatacagaaaaaaattaaagccaggtgtgatg

SEQ ID NO: 132851 - DNA, 1054 bp, Homo sapiens
aaagcctttcttgaatcccacttgtagctgtctctttcctttgacttttcttataaccctcatcctattgtatttgtgtgcttatcttagtctccttgtcagattgcagtcttcaaataagagaaggaatgtgtgcctatcttcttttcctctatggtatttagcaatgcgtaatacaaagaagatactcaagaaatacatgctaaaataatttgaattgattaagttcactggagaaaaattttgagtataaaagaaatccatcacattaaaagaaaaattttcaaatatgacctaggaccaagaacattttctttcatctgtttggattttaaaagattttaaagaatcatggtgaaaagagtcttaaatttgagccatgaaaagagtcttaaattcgagccaatataaaaacgtagctttctaaaaagaaaatgtttttaatgatcttttgtcattttttcacaaatatatctggagcctgtgggtcttctctaatcatacaatgcatcccctcacctccccccaccaggcgaaagacctgaaaaaatacaactgaataatattgggtcacttgtattggataagagtgattcttgactatattttaaatacttgttttagaatgtatatttaaatcttcagtaaaagaaacaggctacatttagagcttaccataggtaagtcaatagcaatctcatgaattatggtagctcacggggatatagttcccagaatatgcagtgctttcgtgtgttacctcatttaattatcctagcagcccttgtcatctgggcagagcagtgcagacagacattgttacctaaaatctgcaaagaagtaaactaaggtttaagaatatagaagaaatcttgtcctcagcagcaagtggcagagactgactttaagaatcaattggaaaccaagagtctttgggattagatgttgcaaatatgtgaagacgcaaaagcatctaagcatgtctttgggagacggaacaggttcttgtgccccttaatgccatagacctattgaaacaatatcacactctctg

SEQ ID NO: 132852 - DNA, 1071 bp, Homo sapiens
tatgaatgaatccacaccagtcccttcccatagacaacatagaaaggcccaggtcccagaagtatcaaggtctaatgctgctttagtatttgtcactccttcaacccagtgaaatagagcagctgtgccattgtgggagtcactgggatggaaccagctgcttcagagctgggctctggagtctgatggacttgggtttgcgttccagttccctctctcagcacgcctgcatctggcttcagatttgtagcttctaacatccttctatcctgctgcggggaaggaatgtgctgatcagaaataggagcatcaggtcctcctgacagttgcctttcttaggtaaaatcagtaaatatatgggtttgcatattgagctctgagaattttattagcatgagtcataatccccgagttcagtcagccctgatgagaccaggttggtgaggtggctgggtatagttggcctcagacacttggcgaattcacagaggtaaagatggcccagaagacctctgacagccagacacccaatctcttgtggtgatggcctttctttctaattcctaattcctaaagtttgagttagaaaagttcattgccacaatctgcgaaatgagttcaggagcctgaggaaatcatgctgctttcttaaagattggatctcaactggacctgctttgtaatacttttttttgaaagtacagctgtcttcacccactacttctcctcctcttaaaacataaatgcaggctgggtgtggtggctcacacctataaccccagcaatttgggaggccgagatgggcggatcacttgaggtcagaagtttgagaccagcctggccaacatggggaaaccccgtctctactaaaaatacaaaaattagccaggcgtggtggtgggcacctgtaatcccagcgactccagaggctgaggccagagaatcacttgaacctggggggcagaggttgcagtgagccgagattacgccactgcattccagcctgggtgacagagtgagaccctgtctcaaaaaacaaaccaaaaaaccaaaaaacttagatgcagtagg

SEQ ID NO: 132853 - DNA, 1119 bp, Homo sapiens
agaatttacttccttcatatagtgaaactagacagttatctagcttccaaggaaaaagggaggcaaatggtagtgcactttaaaacaagccattttctccaagagccaccatattggtcactatatccatcccaaaaataccaactgactttgtagggtggtgggagtagcaggaatcatgtgaggcttcttgtgttatgccccagacatttgtagctacagggaagtaaattgacacatttggtccccactgcataatggcagataataagtacaagttaacaactggtttaatccaaaaattttgggagacttggggcatctggctcctttaggattcgacacagagataaggatgattcagacacttaaggccattgaaagaggtgaatgacccatcttgctcagtcccgtgagcgtttcccaccacttcccctgcctgcagagactctggcctctgttgagatagtcttctgtttttccaggcaggcaaaacagcagttttattgttgcagttgctactgtttgagggtgaaaaaggtaagtctggggagtatagcatgggtgacaaatgaaagggagagtagcactgttgcctttttaaatatattcagaatttcagccagtggaattattagtttcattttctgagcccacagatttgtaaacttctccttctgcagataagctagcaggtttcttatttatagggctttcccctctcctgattggctgctcattgagttagaattagtcacaaatctcttgaatttgtgtggcactttatcctatatgcactctcacctcaaaaactaaagccaccatcttccctccaaaagcagtcctaatagccttcaattctccatgcctggagttaaaccttatttcttctccccatagatttccccccattcacccagcagccattttctctaaattttgcctcttcagcttttaatccctccgccccttttttccatttcagtttctgccatgcacttgcccgcctggttacctgccacctctggtcgaatagggcccacaggtgtgtttggttttgccatcatgccacagatccacacagtttagaaaaaattagttgccaacttttataagcca

SEQ ID NO: 132854 - DNA, 1493 bp, Homo sapiens
gtcagagatgctttccttttttaaaaaaattaaatccatttagcagatctattatgtgccagtatttattccagaaacagattatagtttagaaggggagagaaattagtgaacacacagctttcatgcagttgataagtgtagtcaccacagagaaggggcaaatcatcctgacctggggagtctgtgggtttttcaaggagcgtcacctgatctggatcctgagcctgtttaccaaggagagaagagctgaaaaagaccttccactcagagcaaatagagcatgcaaaggcacgaggaaagtgggggtgggaagagcatgctggctacagtgtagctgaagctgagagcttggactggaggctaggagagggcttataaaggatggctgaggtcaggttgaaggacttaggtttttaagacaaggaatttttactttataagaaaatgggaagccattggtagattcagactggtgcatgatgatttatattttagaaatgattgaggtgaccataccaaaggtagattgaatggcctcacagggcagctggttgggaggctatttctggaataaatatcttgatagctataggtactaagtggtgggaaaagagctcattagatatggacagacagggaagaggaacagatttaggaaagaaagcccagcatcagggtttgacccattgagttgatggtgcctgaagtattcttggtgcgcatgcccgaaacacactggaaacatagatctggacgtagagacaggtgggaactggagtgatggagccctcagcatactattaagaaggtcgagatgagtaccttgaggagcagctgtgtctcgtccagagggtccacagagtctgctgatgccggtgtcggtgcaggtgtcctgccttgttctgctatcccggggtccctcctttctctccctcttttgctcttctcgaacatgtacacacacaaatagacactcattcactcaggcagggatcagcagactttttctagaaagggccaatagcaaatactttaggctttgctggccacatgctgtctctgtcacatattcttccccccaacaccccagcctttaaaaatgtaaaaatcatccttcatttgagggccaagcatatatgggcattgggtcacatttggcccatgggctgggttgtagaccccagcccatgttaggcagtctcaggaattgatcctacctattaaagcaaccaacacttgtcttggagaatattcatatcaagagaaaaaaaatctgtgtggtaaccaaatatgttttctttttttttttttttgagatggcgtcttgctttgtcgcccaagttggagtgcagtggcgcgatcttggctcactgcaacctccacctcccaggttcaagtgattctcctgcctcagcctctcgagtagctgggattacaggcgcctgccaccatgcccggctaatttttatatttttagcagagatggggtt

SEQ ID NO: 132855 - DNA, 1081 bp, Homo sapiens
acttcctaagacagagcacccagtgttccagtagcagtctctgtatctgccaaagtccagcagatcctccacttcaagatatatctgaacactcgatttttacttcttggctgaccgttccttgccagccagcacacagctgatatagtttcagaaagggctccttcaatgatgattttcatccaaataaaacataattagaaagatgattttccctctaaaaaaaaaattaaaaactcattttgtaatatattcctaaatggttttacatttatctctttaaaaaaaaagtaagcaaatctctttcttcatttccttgcctagctttgagtttactgcatatatctaaatgaccgttggccagggagcctttagatttctgtttggcagcagaaacagcagatagcgccaacatgaagggagcgtggtcaggtggtggcaggaaatgcagactgaagaaaatcaggctcttttctgaagtgtgcctggcacctagagcaggcagcctcccacactgcatctgtgtttaccatttcacaggattgttagcaaagaaagctgtggatgctggcctgaacgtgatgccttacatcaaaactagcctgtctcctgggagtggcgtggtcacctactacctacaagaaagcggagtcatgccttatctgtctcagcttgggtgagggagagttttcttttgcaccattgcttttgttgaattgtatccctcatgtatcttgctgtgtcaccttgtaacagatgtgagattatctgatgatatctaattgcatagtcgtttatcagttggtagttagacttaaacccttacattccatctaaagagagccctcttgccctctagggcacctaccatgaatggagtttgcaggactggaagttgctttggttgagtcagtgaatgagtggagagtgaatgtgaaggcctaggacattaccacacactactgttgactttataaacactggacacttaggccacactaacttaataaaaaaaagtttctttcttcaataatgtaaaccgtagcttacttttattttacaaacttttaagtttattgaa

SEQ ID NO: 132856 - DNA, 1035 bp, Homo sapiens
acacagccaccctagtaatcacctggacttaaacctagtagagtctgagggactgtcccaggagaccatccccagagcccaccatagtgaaccttatacccataaaaaccagggacattgtccctgaaactgatgatctagaagttggtgctctcctgggtgggtcactgtgggaagggatgcagtagaagtgaggattccagttgtccttagcatctgaggagttctagggatgtgaagagagagaatgtcatttgcagctgcgttactgttgcttttgaggggatattgccagtattttaccttttcttcaagagtaagatatgaatgttttgagtaaattcaccttacttttcttggcctctttgataaaaactagaacactagaattttctgtgcattggtgtggaactgtcctctgattcaggtccatgggccaccatcgtagagactgatctggtaacttgtttgggaaaacctgggccaatgctgactttttgtattctttgctagactttggatcttcagccccctaaatctatagtggatgcctatgtgctgctaaatttgggagattcggtaacaactgaccacatctccccagctggaaatattgcaagaaacagtcctgctgctcgctacttaactaacagagggtaagtatgaatgaggcaggaaggactaaaggcaaaaatggaggaatggagttaatgaggccagcatttctcttttcacctggccctttggaatgagactctttggttgtgcactgaggcttaaccctggggtaaaaaccaattgcattttctgtttgctgcttaacagcttccatgggagaaacgatcaacatgtgaatcctaacaaggggaaggggagagggaccttcatttgagcaagtgtatatattaggcccaactgtcatccctgcccccggcttggctgatctttaaagtacaaggctctgctcttaacctggggcagaggcagaacctgacacgcattgccaggtcctggttgagaaacctaacgtttaca

SEQ ID NO: 132857 - DNA, 1016 bp, Homo sapiens
caagctcgagcatcccaggtcaacctcagactgctgtgctagcagcaagaatttcaagccagtggatcttagctttctgggctccttgtgggtgggacccaccaagccaggcactggagggaatctcctggtctgctggttgtgaaggccatgggaaaagcgcagtatctgggccagagtgcactgttcctcctggtacagtctctcatggcttcccttggctaggagaggaagtttcctgaccctttgtgcttcccaggtgaggtgacgccccaccccacttgagcgcatcctccatgggctgcacccactgtccaaccagtcccaatgagatgaaccgggtacctcagttggaaatgcagaaatcactcgccttctgtgtcagtctcactgggagctgcagactggagctgttcctattcggccatcatgccagctctctcacaaagtcttttgtaaacctgtgtatccaaagaaaagattggaagtatgtctaaactactgtctttattcatcagggaatcaaagccgtcctggccgagagctacgagcgcattcaccgcagtaacctggttgggatgggtgtgatcccacttgaatatctccctggtgagaatgcagatgccctggggctcacagggcaagaacgatacactatcattattccagaaaacctcaaaccacaaatgaaagtccaggtcaaggtaagctggagcctctctatgccaggccctgtcgaaaggggccccctcgtttgtaaccagtcttgttagaaggaaattagtgaggtttagaaggcaaaaaatatcactcaggaggactgcattagacttaggaggcctactagcatcttttctacctgccttcatagcataggatgatgcctatggatttaatttctctgtttattcacagagttatcctcagttccattcttacctcccaccccctactgtaccctgttcccggtctctcgtgatgagagctcagggatgtgacatttcacattacctaaa

SEQ ID NO: 132858 - DNA, 1008 bp, Homo sapiens
gaagtggaaggactttcattttgagaagataccatttgatccagcagaaatgtccaaatgatatcaggtcctcaatcttcagctacagggaatgagtaactttgagtggagaagaaacaaacatagtgggtataatcatggatcgcttgtacccctgtgaaaatatattttttaaaaatatctttagcagtttgtactatattatatatgcaaagcacaaatgagtgaatcacagcactgagtattttgtaggccaacagagctcatagtacttgggaaaaattaaaaagcctcatttctagccttctttttagagtcaactgccaacaaacacacagtaatcactctgtacacactgggatagatgaatgaatggaatgttgggaatttttatctccctttgtctccttaacctactgtaaactggcttttgcccttaacaatctactgaaattgttcttttgaaggttaccagtgactctggttgccaaatccactgggcacttcttaaccttctatttgacctctgcgcatttggccctgttgagcactcttcttgaagctctccctgggcttctctctcttctagttctattctagtctttttttattgagtcctcctctttgctgatcccttccaagggttcaatatatatacatgtatatactgtacatatgtatatgtaactaatatacatacatacaggtatgtatatgtaatggttatatgtactcatgttcctggtgtagcaacgtgtggtatggctacacagagaacatgagaacataaagccatttttatgcttactactaaaagctgtccactgtagagttgctgtatgtagcaatgtgtatccactctacagtggtcagcttttagtagagagcataaaaatgataaaatacttcttgaaaacttagtttactatacatcttgccctattaatatgttctcttaacgtgtgccattgttctctttgaccattttcctataatgatgttgatgtt

SEQ ID NO: 132859 - DNA, 1815 bp, Homo sapiens
ggtggctacagttttgttcactaacataaactctactttgattcttacaatgatgctgctcacttgcctggcattgactgatatatttatggaagaataattccaacttggattgaagctttgccagtcaacatgtaaacctttcatggtggtgctggtgggctgaagggccccctgtattcaagaagggatactccagagttgttctgccccacctggacttgactagtctcctaactattctttcctcctttttccttttcttcttaaaattccataagtacagctatcatattacttttcctgaaaaacagctcgatcgtgtcacttccttgtattgaaacaccagtggttccccaatttacttgatgctaaagagtttccaaaatccaacacctatttcattccaactttatttcccattcttcccttttgtgcattatccacttccgccaacctgacttcctcacttattgcttgttgacggaactgctcagatactgctactcttcattttacctcttcccctgcctccatatcacctgaccctaatcctcccagctggcaaaaatctctcttttgaacatataaagcctataaccttttatatctgtctttgtaatagcacttaaaattttccacctatgttttgctggttatgaagagatcttatttcctcattgtctagaaggttcttgaaggagggcctgtttactgctcatcttagagccatcacagtgtcatactgggggttcatgtaggtatctttaaagcagtgtttctgacagtacggctgtctaatcaccctgcattgttgagaccctgagaaagccagcctaaggtgggctcctagtttttccacatatttaacatgcaggtgcacacctgcatttgagtctttttttttttttttttttttttttttgagataggtcttgctctgtcacccaggctagagtgcagtggtgtaatcctagctcactgcagcttcaaactcctgggttcaagcaatcctgcctcatgagttcactctttaacagctcaactttcctgggaagtgggattcagtgaaccaaagttgaattttaggagtacctctatttgtttacctatttgcagattatatcagagctttaagtcaaaaacaccaactaaaatatttattttctaataggcagaggaagagcaagaggtagcaagtgcttccttctgactagtaatgctggtgtaattgaaaaagaacaaataaacatgtacaaagaaaaaatgatgaatgactctattttacgccttcagacatgggacgaagcagtatttagggaaaaggtaagtctacgttattcttccagcatctgaccataaataactatcagggaatgtgaggaggatggttggtatcttttatcatattgcttagagtgttatattacaacaaaaagtttatacttagtgaatattaaattcattctgtttttaaatgtcaatgaggttaaattatatttaatagtgctaataactgaagttatgttttcagatctaaaaggcaaattgagctaggatttctctagttgacagttcatctcgaggactatatcctaatactggaaaaaacagctgttcttagtctcttccttaaatctctctccaaagagtcctcagagaaaagctcctaggtcactgtgcaggtattggaatgtctttttatagctgtggacaatgatatacaccttggaatgggatgcctattcagatcaacctcttagtgtaatgaccttcatttcattgtaatttccgtaacacagaaacatgaaatca

SEQ ID NO: 132860 - DNA, 1039 bp, Homo sapiens
actagatgacttaagactatttcaggaggaatatcctgtttgcagagagtaagaaagaaaattaggccaggtgcagtggctcacgcctgtaatcccagcactttgggagaccgaggcaggcggatcacctgaggtcaggagtttgaaaccagcttgacaacatggtgaaaccctgtctctactaaaaatacaaaaattagccaggcgtgatggcacacgcctgtagtctcagctacttagcaggctgaggcaggagaatcgcttgaatccgggaggtggaggttgcggtgagccaagatcgtgccattgtactacagcctgggcatcagagcgagactctgcctcgaggaaaaaaaaaaagaaaaagaaaattagagggtgaggcctgtttataaccctaaatgactgaccatatgagacagtgaaaaacttttttttttttttttaacagaaaacttatctcaaattcaaaatagggaatttggaacacagaaatatgaacaatggattgttacagttcagaaagcatgcatggtgttccagatgccagacaaagatgaagagagcaggatttgtaaagccctgtttttatacacttcacatttgcgggtacgttcctctttttaagagtcgtattctggtcacagcacctactgggagtggcaccgtggaagccaagataacatcaacttctcatcctgtcctcaagagctcacttaggaacctttccagaaagttcttatgaagcaaactccaaaagttgtcccattcaacatcatctcgatttcctttctgaaatttcatactgcaggcaacaggactgaaataaaggctcagattctatgccatgcctctagcattaactgacatggttggaaaaaattgggtgattgtgagagaacattattccagatacaagaccagtccagtgacagcatcttgaaagctcagcaagtggaaagttctgttgctatgtcctgaagcacacatttcttcacctttggtgacgccccatgctcagaaatccaggttctctggc

SEQ ID NO: 132861 - DNA, 1033 bp, Homo sapiens
aataaatttgatgtttacgtggcacatttaacttctttagtgattttataatttatttgatattattcttttacgtactcttttctctcttagtgacttaaaataatatatagtactataaattacaactagcttggatttattgatctcttactatgtgtcaggctctgtgctaaggacttgcctacagctattcttcttttggactcagggagaatttaatcagttgatgttctgatctagcatttcatctttgtggttccttatccacatcgtggttagtaatatggaatttctgtcatttcccaggtatagagttacaggcatttctggagcaacagctgagaatgtcccagtggaacagattgttgagaacaatgacatcatcattttaactccacagattcttgtgaacaaccttaaaaagggaacgattccatcactatccatctttactttgatgatatttgatgaatgccacaacactagtaaacaacacccgtacaatatgatcatgtttaattatctagatcagaaacttggaggatcttcaggcccactgccccaggtatctccaaagtcagacgaatgcttcagaagagctataatcttcctaactcctattttcttactcttatggccacactgaagatgtccttctcaggtcccaagtccatattgtacaactcattatgaattttgtttcctttattcatttgttcacttagtaaatatgcattatgtgcctccatgtgccatacactgtgtgttagtaaaaacaaaaaaacgccctaccccagcaggaaagagttatatgaggggttgtggaaacattgtaccatttctcagacatctaatgattttgaatgctccttacaggtcattgggctgactgcctcggttggtgttggggatgccaaaaacacagatgaagccttggattatatctgcaagctgtgtgcttctcttgatgcgtcagtgatagcaacagtcaaacacaatctggaggaactggagcaagttgtttataagc

SEQ ID NO: 132862 - DNA, 4405 bp, Homo sapiens
tatttgagagctttactatgtagcaggtgccttttctaagggctttttacatcttcacaaaccctgtaaggcagattctgttatcactgacctgcagatgaaattaaagcacagagatactaactggcacatagtcacgctggtagtgtggaaccaggattcagtcttaggaaatctgacttcagagcttatgctttaagcactatattactatgctacagtgcccctttataaaataaaacaaaagtaatgggtcacttaagtattttcaccaaaataagtttcaaggtctttatttgcatttttgttgagactatttagtcattcctctattatcaggttactgatatatttctttcccttttacagataatggcatcagctgctaaggaatttaaaatggacaacttttcacctaaagctggcactagcaaattgcaacagacagtaccagctgatgcatctcctgattctaagtgtcctatatgcttggatagatttgataatgtgtcttacttagatcgctgcttacataagttctgttttcgctgtgtacaggagtggtcaaaaaacaaagctgaatgcccactatgtaaacagccctttgattctattttccattctgtgagggcagaagatgacttcaaggagtatgtcctaaggccttcgtataatggttcttttgtcacccctgatcgacgatttcgctaccgtacaactctgacaagggaacgaaatgcttctgtgtattcacctagtggtcctgtgaacagaagaacaacaactccaccggatagtggagtactgtttgaagggttaggcatttcaacaagacctagagatgttgaaattcctcagtttatgagacagattgcagtaaggaggccaactacggcagatgaaagatctttgcggaaaattcaagaacaagatattattaattttagacgaactctttatcgtgctggtgctcgagttagaaatattgaagatggtggccgctacagggatatttcagctgaatttttccgtagaaatccagcttgccttcacagattagtcccctggttaaaacgtgaacttacagttctttttggagctcatggatctttagtgaatattgtccagcatattatcatgagtaatgttactcgctatgacttggagagtcaggcatttgtgtctgatttaagaccatttttacttaatcgaactgagcattttatacatgaatttatcagttttgcccgatctccttttaacatggcagcctttgaccagcatgccaattatgattgccctgctccttcatacgaagaaggcagccattctgattcttcagtcataacaatatctccagatgaggctgagacccaagagctggatattaatgtagccactgttagtcaggcaccatgggatgatgaaactccaggaccatcttactcaagctcagagcaggtacacgttactatgtcttctcttttaaatacttctgacagttcagatgaagaacttgtcacaggaggagccacgtctcagatacaaggagtacaaaccaatgacgacctaaataatgacagtgatgattcttcagataattgtgtcattgttgggtttgttaaaccactagctgagaggaccccagaacttgttgaactgtcctctgattctgaggacttaggttcttatgagaaaatggagacagtgaagacacaagaacaggagcaatcttacagttctggtgatagcgatgttagtagatgctcatctccacactctgtccttggaaaggatgaacaaataaataaaggtcattgtgattctagtacaagaatcaaatcaaagaaggaagagaaacgatctacatcattgtcatctcccagaaacctgaactcatctgtaagaggagacagagtatattctccatataaccatagacacagaaagaggggaagatcaagaagttcagattcacgttctcagagtagaagtgggcatgatcagaagaatcatagaaagcatcatgggaagaaaagaatgaaaagtaaacgatccagaagcagggaaagtagcagacctagagggagaagagacaaaaagagatcaagaactagagatagcagttggtccagaagaagccaaactctgtctctaagtagtgaaagcacaagcagatcaaggtctcgtagcagtgatcatggtaaaagaagatcacggagcagaaatagagatcgttattatttaagaaataattatggaagcagatacaaatgggagtatacttattacagtagaaacaaggacagggatgggtacgaatcatcttacaggaggaggactctgtccagagctcattattctagacagtcttcaagtccagaatttagagttcagtccttttctgaaagaacaaatgctaggaaaaaaaataatcacagtgagaggaagtattactactatgaaaggcacagatcaaggagcctgtctagtaacagatcaaggactgcatctaccgggactgaccgggtgagaaatgaaaagcctggagggaaacgaaaatacaaaacacggcatttggagggtactaacgaagtggctcagccatctcgtgaatttgcttctaaagcaaaggacagtcattaccaaaaatcttcatcaaaattggatggaaactacaaaaatgagagtgataccttttcagacagccgatcatcagacagagagacaaaacacaaaaggagaaaaaggaagacccggagcctaagtgtagagatagtttatgaaggaaaagctactgatacaactaaacaccataaaaagaaaaagaagaaacataagaagaagcataagaaacaccatggagataatgcttcacgttccccagttgtaattaccattgacagtgacagtgataaggattctgaagtaaaggaggatacagaatgtgacaatagtggtcctcaagaccctctacaaaatgagtttttggctccttccttggaaccatttgaaactaaagatgtagttacaatagaagctgaatttggtgtgctggacaaggaatgtgatattgccacacttagtaacaacttgaataatgccaacaaaactgtagataatattccacctctggcagcttcagttgaacaaactctcgatgtaagagaagagagcacctttgtttctgatttggagaaccagcccagtaacattgtgtctcttcaaactgagccatcaaggcaattgccatcgccacggacatcattaatgtcagtatgtcttggtagagactgtgatatgtcttaaaactgccaaagcatttcattgagaattatgatgttataaaaaggaaaaaggaagaatgtcgtctactgcagtctatttaaagatgacatttggtgaaaactctcttcctccttacaatattttaaatgattttttttttggtgttaatttgtaaaaatcattatttgttcaaaatgtatgtcccaccctcaaagatatgcacttttaagtgaagaaaatgatactgctagcagcttatttaaaacttggggtcctttttaaataagaaaaattatataaattttagaagttatttcataaagccatacggtattgacatatttttaaggtagtcaatgagtatttttgaattttttttttttgagagttattctggaaatgtgttataagctaggagaatccctttggacagtctttatttttcttcttaaaaatttatatgattcaaaaccatttcttcaggttaaattgaggcattttaatctgcacagtttatcttctgccaaaataaaaatttactatttcctttatatacttgtttatctggactgccagtaaaacaaatgtgtattcaacaaaagaaaaaaaataaaacagtaacactttaaaacaagaatcagacattttcctatgcagtatttttttttaaagtttattttagtaaagttaaaatcttgaaagtagctaagggcataattatgtcataaatactgaacttcaggtgaacaaatactttatagttttaattattttctttgattttgaggagtatcttatttgctttctatcatcagtaaaaacagcatttaacttgctaaataaacatgaaaaacccttgtcatacttcttttacattggtagttctttcatataaagtggttatgttttatcttgttttagggatgataaaattacatctatgctgatgtaggattgccactgaacagtggagcttgagttaaatcttaattcagccttcagtttgcctttgccttgctactgtattcattctttattcagtagaaattgcagtgcctactatgtggcaggttctgcactaagttttggggtttttttttttgttgttgttgttgtt

SEQ ID NO: 132863 - DNA, 1387 bp, Homo sapiens
tgacttgttcatccatccatttactgcagctttcctcatgggttgctgattgtaggctggaagggggcagtgctgagatgagccacatagtgatttaagaggaaaacggagtagaccttttgataggtaattttcaagattatttaagataaattaagaaacagctgcccaagatttaagttaatagtggtgagagctttctgggttttgtccatgaaatgcaaagaaagctatacaatcagctaaaatcaatcatacttgtctggaatgagtggttttagaggcgaacggttcccagccaattctttttgctggaattggattaaatttgataggatctggataaatttgataggatctactgagatcctgtgacttttgtatcttcttttggagttgattaaatgcagttcagagaggtacagtgatttctttaaggtggcaagaggtaggaaccagtttatttttaatacttgggtgatctttctatttcatctattcgtgaaccctttttagtcactttgcctagaaatattaagtataataattatattaagtatgatgattattttgttgttataaactatcctctgtctggacccatataatcagttatgggtgatgagctaccgaaattcacttcgtgttcacgtaacatagagaacattgttgagttcttactgtgcatcaagcactgtgctaagggtttttatgaaatatgtcccgtcacacaaccaccttttcaattccattttagaattgagaaaacgtgagattttgagaaaaaacttcctccaggttacacacctactaagtggtggcgattctcagccttggctctgcagcaaaattaacatcactcccgcaaatgtaatcagcagatgattaaattttatatacagtgtatgccatagatgacttttgatttttattgatttattttttttgagacggagtcttgctctttcgcccaggctggagtgcagtggcgcagtctcggctcactgcaagctccgcctgccaggttcacgccattcccctgcctcagtctcccgactagctgggactacaggcgcccgtcgctacgcccagctaattttttgtatttttagtagagacggtttcaccgtgttagccaggatggtctcgatctcctgaccttgtgatccgctcacctcggcctcccaaagtgctgggattacaggcatgagccaccacgcccggccatagatgacttttgtagtaagtctaactttaattctacagagcagttatacttcgtttatatcattgtgcagtttttcaaatatccagtctcctgaaatgtagattcgagcttcctgattctttatctcccccatccattttccctagacgtgtgtccata

SEQ ID NO: 132864 - DNA, 1050 bp, Homo sapiens
ggagataggcgtacctccactggttttctttctagttgcaatgcaatattaatgcaggataaggtgctgtcgtgtccatttaaaagttaatttgaaaaacaatccacgttttaaatattacgtctggctctaaagctggaagaattaacgctttctcccccgctccctcccccacgcctccccgcatctgataccacacgatttagatggacgttcgcctgttcatctttgacgtaaaaataccacccactcttttatatgtgacaaatcgttgtgggaacccctgtaaatcgagccattcttcagaaacgtatagcgtaatgtatatctctaagaagaaatacgtgggacgcgttacccgccataatgtatcagtcaagcaacaagtgtttgttgagcgtgtctgatgttcttgaactgccgcgcgtgagatactaagccccgagcacggcagtttggtgggcgagcgtaccaggttcagctctagaatgtttggggcgctcacatttgaggcctgaggagtagaatctggcaacgggccgcttaggctctagacgttctttatacctcgcagttatcttaaaagagttttagtctagatttcagggagtgggaaggggaagagcggagaaaaacgtggtctgtttagggaggagtccaggccctgttttgttaggttgtcctgtttctccccagcctggaggggatccctctctgaagactttataggatactggttgggctctggtttgggatcccgttggactcctggtgttgcttccgggaggcgtacaacaggaggtgagagacttcaagtccatctaacaattcccctatctagacactaaagataatttcctaagtttccgcagagtttggtaaggttgaaacgacatcgaactagttctcgtgttttccgggtaagttaggggcgaacattcagtcagtgtccccagtggctgagtaccagtaacaagatggggagggtcgcgctgccctcctccggggtctggagcggcgggggaggggccgcatttgggccggtgcgct

SEQ ID NO: 132865 - DNA, 1042 bp, Homo sapiens
caaagcatatctttgtcatcacccaatttctgttcccttcattttatctgattcttcacaatttttatttatttagaactcaggatgtccagatgcctgcactttttcactgatacagatcttgcatgggctgatggaactgagccagttgtggtattttaaaggcttggtctggtgcagggtgttggatcccaggcagaatgagaagggcatgcattttgggaagtggcgtggcagagggagcagtggtgactgcgtagcctgaagtgttggagcacaaaagagtgaggagggcattcgtataccaagagaggggtgttagatcctcagtgggttgcaggggaggagggtgagcacatctgtttggggagcaacagtggcaacagcctagtataggatattggtacctgagcagagggaggaggacatctggaagaaggatggtatgaggcagtgaggcaagtggtaactcagagcaagatgtcagaacctgaatgaggtgaggcaggtattaatgctgggatgtggttgtggtgacaggagatgggttatatatagggagattggccaaatacaggcatacctcagagatatttcagaattggttgtagaacaatgcagttccaaaagtattctttggttctagaccaccaaaacgagttacacaaattttttggcttcctagtgcatataaaagttatgtttacactgtgctgtggtataagtgtgtaatagcagtgtaaaagaacgatgtatatgctttaatttaaaaatactttattgctgggccatgtgtggtggctcccacctgtagccctagcactttgagaggccaaggtaggaagattgcttgaggccagaagttcgaccggcttgggcaacatagtgagactccatgtttccaaaaaaaaagaaaaaaaaatagctggatgtagtggtccacacctataatcccagctactcaagaggctgagatgggaggattgcttgagcccaggatttcgaggctgcaataaactgtgattgtgccactgcactctgg

SEQ ID NO: 132866 - DNA, 1343 bp, Homo sapiens
gtcattccaaggtgggagaggcaagcaaataattttgaatctggccagcatattcactgaaacatttatgcttatccttcctcctcccagcatacaagttcttccttagcaaaacctccagtcctctaatttagcatactttcgtctaatctgtcactttcctcaggccccacaactacgagtactccttgtccccacccggtcctaatttggtcgggtatagcggaggtgggcgtagagagaactggaggtggagacctttgtgcatgcccacacactgctttcctcgcgaggaatctggggcccttgcagaggcggaaccaggatgtgacgtaataaccgcgcgcggcgctcggcgttcccgcaaggtcgctttgcagagcgggagcgcgcttaagtaactagtccgtagttcgagggtgcgccgtgtccttttgcgttggtaccagcggcgacatgacggggtacactccggatgagaaactgcggctgcagcagctgcgagagctgagaaggcgatggctgaaggaccaggagctgagccctcgggagccggtgctgcccccacagaagatggggcctatggagaaattctggaataaatttttggagaataaatccccttggaggaaaatggtgagtgacagacctctccggtcccccccaacacatcccactgctgccggcagcctgaacactgaacgtccgctccctgcagccacaccaaggactgataacgctcagtgctctgggacactggccagtcccgagagtcctcctggagtctcgggaggcaggagtccaggaatatgtatggctttgagagaatcatgccttttactgtcaagtacagtggacgggggcgaattttaatacttaggttttccaggacgctgcacgtttggttctcttttgactgtagaaatcttccctcagaataataaccaaggactcgctagaattaaaattctgtgatttaagtatttgaggacacttgtctgacttttaagtgtgaggttctagagaccaagtaacacagtatccaaccaccagagggcacagccagcccctagctgatagtacagccccatgtgatccccgtaaaagacagggtcctgttggtatgccttgtgagtcacattcaagagctacctttctaaactaccgttctgtacttttaacacagtgtttcattaaaaaaatcgcattttgggctttgaagaaaatcactcattcaagaactttattttcaaggcctctgggtattttcttgaggactgttatggatgataaacatctcagaattgctttcagttacctgcaacacttactgatgacaggat

SEQ ID NO: 132867 - DNA, 1083 bp, Homo sapiens
ctgtattgatggagggcagaaagggtagttcttattatcctgcatctgccagccatgctctctgctgctcactggattcctctcttgccctgctctcaaaatctgttctcttctggcttctcttattgtcagtatgagtagtcagtcaccacatatttcccaatgcctagtgaagacatatttcacttctcagtctgttacctgctcattcatctgtttccagcaagtgcaaacagatgccccttggaacgcatagcatttaaaagtgggacctgcccataacaccatcatcatttgaggctccaggtttaggattttagatttatagctgactcttcgtgcacctgcatcagctccttcacagagacttgctgaactgcctttttgacctctctggctcacgttatattaacagcctcctcactaatctctgactctggatttctccatgctagactgcctacacacagctgttaagtgttctttggatgctgttgttttatcttactgtgaagctcaaaacctggcagttgtctcctcttgattatggtaaatgtaaacttttcagcctagtattctttcaacacctctgtctttttttgtgactctccgaggcagctcctctggttcagccaactaagtctgcttttaccccgacctatggcttgccattgccgaaatctgtgttgtcacttgtgctttttaaaatggaatggcccctcccactccatttcttctttatcagtccccttggctcctagccatctctaaccaggaggtttctggaagcctgtactggctaatacaggactttttacctccttagtactcatatactcgcactaatcttattcatttgaatttgcatctcctcagctgtcatttgctcactttgccttgcattgtcttgtctttgcagatggtaatgaaactgatttttaaaaatcgggtttcttttttctttgcttatggacatgaaacttgtgcagagggcatatgtgctgccttgactataggcaggtttccgggagaggcatgttagaggcttgagcactgataagagtctggagtctagagaggcaa

SEQ ID NO: 132868 - DNA, 1988 bp, Homo sapiens
aacccaaatgaaggagagaaggtgaatagtatctactcttaaacgtatctgaatagttctttgccagacgtatagtatttctattatggcctgaaatcgagtatctaatatagtaactatgatcacttctcggcctttttagctaagatcaagtgtaatgtagctaggtaacacttgttttttaaaaaatgaaattcactcctcttttctcaaacagtttaaacagatttctcaagcttacgaagttctctctgatgcaaagaaaagggaattatatgacaaaggaggagaacaggcaattaaagagggtggagcaggtggcggttttggctcccccatggacatctttgatatgttttttggaggaggaggaaggatgcagagagaaaggagaggtaagaagaatctagtctttgtgcagctaactaaagttagctgttggtcagagcagatctttgagaaatcacccattttaaatgcttgtttacatgttggtataatgttgcaaactgaccacaaattgcctctgatttatggtgtcgtgtttttttgttgtggttttttttttttttttcttgagacggagtttccctcttattgcccaggctggagagccatggcgtggtctcagctcacagcaacctccacctcccgggttcaagcgattctcctgcctcagcctcccaagtagctgggattacaggcatgtgccaccaaacccggctaattttgtatttttagtagagatggggtttcaccatgttggtcacgctggtcttgaactgcaaacctcaggtggtgatccacctgccttggcctcccagagtgctgggattacaggtgtgagccaccatgcccagccagtggtgtcgctttttttaaaatgagatttaaggggcctaaaaaatagccaacagagtggtagcaaatgactgcttccaaaaatcttagatattatcaaacaaattatgagaacaggccgcgtgctgtggctcattctgtaatcccagcactttgggaggccgaggtgggtggatcactgaggtcagggttcgagaccagcctggccaagatggtgaaaccccatctctacaaaactacagaattagctgggcgtggtggtgggcatctgcaatcccagctcctctggaggctgaggcaggagaatcgcttgaaccctggaggcagaggttgcagcgaacggaggtcacgccactgcactccagcctgggcaacaagagtgaatctctgtcacaaaaaacccaaaaaaatccaaaaattagccaggcatggtggtgcgtgcctgtaatcccagttactcaggagggctgaagcaggagagtcgcttgaacccgggaggtggaggttgcagtgagctgagatcgcccaattacactccagcctgagcaacacagcgagactcttgtctcaaaaaaaaaaaaaaaaaaaaaaaaagacaaagtatatagcaatataattttccaagccctttttacagatcttatttggtgttccctcactccccaaaggaatttgatggtaggtacagtggcctttttcaaatgggagtaagttaaagttcagaaacctaaaacttcttcaagctcatatagcaagccaacagagccagggctgaaaactggttcgttgcctgccatctatctattcttgtttcagctttattgtgtcaaaattatgtatttaatatgtttatcaggaaagtggcctatgggctctagaaatactgcttataggagtaaaatgttcaagagaaatcagtctcactttatttccagtatagtgtatacaaataagggctgatgagcagaaccagttttagaatgaatggccaagccattaaatttcactttgagcttcttaaggttcagaaagatttgggaaattgtttattcagtttttctttaaagatcttcaaggaaaggattatgtttttattaagatacttaaactccttaaaaagaaagtcc

SEQ ID NO: 132869 - DNA, 1035 bp, Homo sapiens
tcaagcaatccacctgtcttggcctcccaaagcactgggattataggtgtgtgccagtggcacgtggccagatccatatatttcttgctgtggaaaaatgtaagtttcaggttctgaggcattcagaaattttaatttttttttttttttgtttttttaaagagacagggtttcactatgttgcccaggctgttctcaaaactccagggctcaagggatcctcctgcctcagcctctcaaaatgcggggattacaggcatgagctacttgcacctggctgaaattttacttttttatcagattttagtaagccaattgttctcaagtattcttaaagtacattacagcttaccttaaattcgatgattaggcgacccttttcatatggtctacgataaattggcatgccttcatttagtacacacttgatatctccatgcttgacaatctgacctaaaaacattgaagccaagttcttccttaagtatggtcacatttttatgaggcagggaatataaagaacagagcactgtcctagctcattggcaggagtaaaacttacgtggcaaagcaatcctgttacctttcacttatgggttttccaagggctgacaagagagccaagaccttataacttcatctaagcccagagaaggatatgtaaccgagaaagaaaaacaatgggtttccctcagtgcctatactacactttgttaacaggagacaaggaaaatactagaatagaaaagagaagtttaagcttgcctagttcccatacctggatgagaggtgatgacgatggttcggttgtcaagagtagatattggcttctggaagccacacagtgcttcaacgagctgtatgtccatacacatgaaaaggtcttctcctcgtctgcataaaatatgacacatatttatatttttcaaatcacgaatcagtagatgtaccaaagcaggctgtttttttgtttaataaaagcaaagggtcttttacaaagacacccttttcttcccccattgtaaaaatcaagca

SEQ ID NO: 132870 - DNA, 1043 bp, Homo sapiens
atataaatatgtgtcatattttatgcagacgaggagaagaccttttcatgtgtatggacatacagctcgttgaagcactgtgtggcttccagaagccaatatctactcttgacaaccgaaccatcgtcatcacctctcatccaggtatgggaactaggcaagcttaaacttctcttttctattctagtattttccttgtctcctgttaacaaagtgtagtataggcactgagggaaacccattgtttttctttctcggttacatatccttctctgggcttagatgaagttataaggtcttggctctcttgtcagcccttggaaaacccataagtgaaaggtaacaggattgctttgccacgtaagttttactcctgccaatgagctaggacagtgctctgttctttatattccctgcctcataaaaatgtgaccatacttaaggaagaacttggcttcaatgtttttaggtcagattgtcaagcatggagatatcaagtgtgtactaaatgaaggcatgccaatttatcgtagaccatatgaaaagggtcgcctaatcatcgaatttaaggtaagctgtaatgtactttaagaatacttgagaacaattggcttactaaaatctgataaaaaagtaaaatttcagccaggtgcaagtagctcatgcctgtaatccccgcattttgagaggctgaggcaggaggatcccttgagccctggagttttgagaacagcctgggcaacatagtgaaaccctgtctctttaaaaaaacaaaaaaaaaaaaaaattaaaatttctgaatgcctcagaacctgaaacttacatttttccacagcaagaaatatatggatctggccacgtgccactggcacacacctataatcccagtgctttgggaggccaagacaggtggattgcttgagctcaggagttaaaggccagcctgggcaacatggcaaaaccccatctctacaaaaagtacaaaaattagccaggcatggtggcacacacctgtagtcccagctactcgggaggctgaggtg

SEQ ID NO: 132871 - DNA, 1480 bp, Homo sapiens
ctttgtttaaatatgtcgtaagaagggttaggctgttgcaggatgggttttggtattaaaaagtcagtttgctggatagaacaatggttgttaaagtgcagttttatttaatacaatcatttttaataaagcctgacttctggtcataatccttgaactctagttcagagtgtgctatgcactgtgcctttttagagcctgttctaacctgagattggcagattcacctaaatattacgtgtttacatgtgtttttctggggaaaatgggtccatgatactctaagggagctaatgatgaaatcagattgaacagtgaaagtttcttttgaaggtaaactttcctgagaatggctttctctctcctgataaactgtctttgctggaaaaactcctacccgagaggaaggaagtggaagagactgatgagatggaccaagtagaactggtggactttgatccaaatcaggaaagacggcgccactacaatggagaagcatatgaggatgatgaacatcatcccagaggtggtgttcagtgtcagacctcttaatgggccagtgaataacactcactgctggcatttaatgtgcagtagtgaatgagtgaaggactgtaatcataatatgctcactacttgctcttgtttttgttttaataaactatagtagtgttttaaaaagttaaatgaagaataaacgcaaatataaaagctctgattttgccctgtatgtatgatgacttcagtgtgcaagatgaagtttaatacctgtaaaaactacaaagaagttcccctagcatttctaggccaaaccttgtaattgacttcagctatgtacgtggacaagcttagactgaaatgctaggtatatgtattggcttcagtgtatgacccttcattgttaagctatgaaagtaaaactctgtatttaactggcaatgaggaaaaaaaaattttgtagagaagtgttggtctgtatagttctttatattaagtgggattcattgtaatgcctctgcatttattctgttgcctcagctgttacttgaagatggcgtaatatataatttatcctgtggtatcagtgataaaaatgatacctttctgtaggaggggtttatcataatatgctgcttcttgaaggcttgcacttccagaattgtgtttccttctgctgtgccattcatatatatatacatatatatatataatcttgaccagtcctggtcatttgctcccctccttgtctgtggaccatgataagcccaagtagtgacttcagagctgggtaacagaaattaaagtgaaaagacctttacgtggagaatttgcatgcgtaatataggaaggtgttctttaggtatgttacaggattactttaaaccatttgactttcgctccaaagttatgttggtagtatagcaaattatgatgaatagctttaattgtatgtttaaaagtctcatatgttcacatgctt

SEQ ID NO: 132872 - DNA, 1050 bp, Homo sapiens
ttcagattggtttctctcagcttggtttatgatgattttaatgtatcaatagagcaagcaaagtcttagagactgagtgtcatcctgtatggggaaagcttctcattctgttagaggaaactggagagcagacatccagaaagctttgagaaatactggtatattgatttagaaaattgttttttgtatggcaatgaaatttgcttaagggtaatatgtctctttagggcatgattggtgacgtgggatgtatgaattctaaatttttgtctgccacttagtttagattacttatctattgaatatttcccaggcaaggggagttagcacatgatgaacaggactggagatctaattacaaatgatagtaaaccaaagtgcaaaataacaacgtaaaaatgtcagtttaaaatgctgcacatggttgagctgctactaatcctgatgtttttttcttggggtgtggtgtgatctagattgtcagaagcttcagttctggtaaaagagaaggtggggactttgtttgctgtgccctctctccccgtggtgaatggatctactgtgtaggggaggactttgtgctctactgtttcagtacagtcactggcaaactggagagaactttgacagtgagtattacttactaagttcatctaaagaaatatggtaggacttgtgtctttctgaactctgaagtatgtgccttttccagagctatcgatgtgaccctcagtataaaatatgttgttttaaaacatttagctccatgtcaaattcaagaagtaaaattaatgtcagctgctatgatgatccccaaatctcggtggcttaacactatataagtttgtttatttttattttattttattttattttgagagggagtctcactctgtcacccaggctggagtgcagtggtgtgatctcggctcactacaacctctgcctcctggtttcaagtgattctcctgcctcagcctcccaagtaactgggactacaggcacatgccaccactcctggctaattttttgtatctttagtggagacgg

SEQ ID NO: 132873 - DNA, 1165 bp, Homo sapiens
atgccaagtactacattgaatccttacaaaggaagtggtgtgcgggcattgtattagatattataagtaatctagagatgatttaaagcatacaggaggatgtgcataggttatatgcaaatacatcattttatgtgtgggacttgagtatccttggattttggtatctaaaggggatcctggaaccaattcctcacagataccgaaggaaaactgtatatggcagtgctgggtatttgattggacctaaaatcaagtaagaaacttttttcccctgaatcatttctattcttttttagtaaactgttaatattttaaaccctaaaactttagaaatttttatacctaaaaaaggtttataacttaaatttctgtgtggtagatctggaatatgaagaccacagaatgttcaaatacctttaaatccctgggcagcaccgcagggacagatattaccgtcaacagtgtgattctacttcctaaaaaccctgagcactttgtggtgtgcaacagatcaaacacggtggtcatcatgaacatgcaggggcaggtgagtgttcagaacgtacccttgcacaggaactgtgggccattcccaaatcagcacttcctggtccaggcccaccctcccaataaccaaatttgggttcatttctctgtaaaccgtttaagctgtatttgtttttcagatttatttatagctccataaaacatctgtttggtatttcaaaagtgatctcctttcccctggatgtttgtatattaagcactttcatccttcggataaaggaagctcctatctgtctttaagcctccttcagaacctcactgaagattttaagataacagtgtttgtctgagttagggggatacagtgtagtatggattaccaactcaggacatctcccagctaccacgatctaaagtggaacactaataggagaaaggcagcagcagtgtcctcggtgtatttttaatcagaaaacctgcaaggttctcaaggaatctcacttttgtggactgtgaagtagcactgggggtgtcagaagcatcaagtttgaggacccaagccctaggtatgtatggtagtgctattggattattggcctggacacttggggatcttgctgaccatagagaagacccaggggctggtgtgtagtac

SEQ ID NO: 132874 - DNA, 1037 bp, Homo sapiens
tgtaatcttagcaactctgtctgggtgatccaataacatatttaaggtcacatacttggtaagtgatagatctgggactttagttcatatctgcttatgccctttctattgtaccaccctggcttgctgtataaaaatcaaaataactaactttttttttaaggggatggtctaatagccaatttgttgtggtttgtatttaatgctagaaatacatcctgggctacagaaattgcagaaatggtctctgctaagtgaacttagagtctatatttttgttttaataatttacaaggaaagagttttaagtttcaaaggattcagttaccattgtactatgtgaactagacatcatattcagctattagcgtgcatttttaatgctgtttcagtacattagtgagcattgcatcttgcttggctctgtgggctattaatagtaggacacttaacaaggtttttttaattcttttttttttttcaaataaaggtgtggaagattcagagtggacaatgtttaaggagatttgagagggcacacagtaagggtgtcacctgtctaagcttttctaaggatagcagtcagatccttagtgcttcttttgaccagacaattaggtaagtaaaaatcccaaaactgctctcacttgagtttgatataatgaggccatggagggaggtactagtgattccttacgcttttaccatgatgcttttaccatgatgatgtgatatggagagggaaggtatgtgagaccttatgtccccaaagtacaactgacacttgttgttgtgtcatttgagtttttacccagaagagacatttgaaagggggtagcagtgcttcatgtttctcagagtatggtcttatggacctacctgcatcataatcactttagagggtctgttatactctaaaggacccagctgagacccactgatctcaatctcctgctaacttgttttttagaggtctgtccctgaacagaagcttgtggtattactggcatattttcttccagcctctttctttgcaa

SEQ ID NO: 132875 - DNA, 1097 bp, Homo sapiens
tacacattatcacttcattaaatgaaggttgtgaaacactgatagaaagtttatttacaaaataatatagggaaacatacatttagtttgaaaaaatgagttttttccccctgagatacacaacaggaacatattaggccatactgagtgtgaaagtcacgctaacagtggctgattctagcaaaacattacagtctgagctaacaggattacttgttctaagtcccatgttaaaatagcttttgtcctttcctttggaaatatcaatctcacattcaaaaaactagcttcaacttagtgcctggacttaaaactaagtcagagaaaaatacatccacccagctccctgcgtccaggtacagaaatacccctccaatactctataatatgggccagctatgactttatgctagggcagggtttctcaaaaggttaaaaaaggaattgttttaagtccactagataaaaatgcatctgtttcattgtttcatttgaaacagtttggtcagaaatcacatgtggagtgtgctcgattttctccagatggtcagtatttggtcactgggtctgttgatggattcattgaagtatggaactttactactggaaaaatcagaaaggtaaagtattttaaatgtgttaaccttcctagtggaaaaattacctgctttgaattacttacctatggcctctaaatcagattagttgaaaaaggatctgtatgtaatgaacatgtattacttttgtaattaaaaaactcatttaaagctagggacagtggtgcacacctgtggtcctagctactgaggaggctgaggcaggaggatcacttagttgaacccaggagttcaacccagccggggcagcatagtgagaccgcgtctctaccaaaaaaaatttttttttaaattaaccatgcatgcttgtgtgcacctatagttttagctgcctgggaggctgaagtgggaggatccctcaagccaggagtttgaggttgcagtgagccatgattatgctactgcattctagcctgggcagcaacactgtctcaaaaacaaaaagcaaaaaacggtatgtttaattaaattccaatttta

SEQ ID NO: 132876 - DNA, 1156 bp, Homo sapiens
ggtgtgtttgagtgttagaactatgggagatctttgttttccaagttttgtttataacaaaagagccactcctgtaagaaaataggtggatgatagacttgttggctctcaggtccccttcacccttagatcagcctgtgttcttggacacacaggggagcacagattactttatgtttggatggccaaaaatagttggggtttagatggctcacagctttctctgaacctcatcctttcgggcttggtttctgagcacttatgaccagatcttaaaagcacctgaacagattgctatatttttttttttcctcataggcactgaagtggcagcagcatcagggattgcttcctcctggtatgaccatagatttgtttcgaggcaaggcagctgtcaaagatgtggaagaagaaaagtttcctacacaactgagcaggcatattaaggtaggatcctaagacattcagccagtcagtaatcatttgttgaggacttgtcatgggctcagccaggccctgtgccaggggcttggataattgagggggagaactcattctccagctctgacaatattcaaggttgctgcaggtgtccactgggatactgctgtggcctgggagtggtacacctcagatgtgtcatctaatggatggacatctagcttgacatctagcccaccatctgcccttgcacttcttcccaagaagcctgcatttggaagaatggttagttcttttttggttacacctgggactgtgaactttgtatgtacttcttctgtttaccatttttattttgcctgctatgtgtcaggcagagtgccagtgagggattacaaagtgggcttatgtgatgtttgaggaaaatgattttatcttcctatggtgtggttttttaaaattttttatttatttttatttttttaaatctgagagttttctaggaaaaagtgttctaggtaattcccagaattacaagtgtatttgctactttagcatctctatattacagtttctctggatttgtgctctaaattcctggattttaaaatatttcatattcctcaaatctttgactttgggttaacattttgggtttgccttttctggattatatattctaacttgcagataaagatatttttaagcagcacct

SEQ ID NO: 132877 - DNA, 1044 bp, Homo sapiens
ggaaatgatgctacaccctctcctttttcaggcatacccagatggaagtagcaaagaaaagagaagagcagcaattgcccaggccttagctggcgaagtcagtgtggtgcctccatctcgtctcatggcattgctgggacaggtaattcaattcctgtagaggccaggtgtggtggctcacacctgtcatccttgcactttgggaggctgaggcaggagaatcacttgagcctagtagttggagaccagcctaagcaacattgtgagactctgtctctacaaaaagtaaaaaaattagcgggttatggtggggtgtgcctgtggtctcagttacttgggaggctgaggtgggacaatcactggagcccagaagattgagatgacagctatgatcatgccattatactccagcttgggcaacagagtgagaccctgtctccaaaaataaaaataaatttaaaaagtgaactcctggtacaatttcctaatttcctatgtataaactatgtcttagctgaagaaattgtacaccctaagaattggggactacctacagagttgcttattccagtaactgtgctgttccactctccctctttcctgggagaggcaatatagattagtggttaagaacaagctctggagtcagttagaattagggttaccatagaatttatcatcctgtctggaatatcgttgagagtacagttgatccctatgccagaacaccaagtgcaaatagtaactgtcctggaaagattggaacaaatgcccatcctagttagaatccaggctttctcatttaccagctatatagtcttggcaaattacttaacttttctggtcccatttactcgtcacagtattgagagtaaggattaagagaaataatgttcataaacactttatacatttcctggcaccttgtaaatagtaaatggtagctgctggtgatgattttttaaaaaattactaatagtgttgccagcatggtcattattataaagctacttagagtaatagatatattataaataacaaagg

SEQ ID NO: 132878 - DNA, 1158 bp, Homo sapiens
cccatctttagctttctttggcatctacattctgagcaagaagcctgagaggaggggagattggtagataaaaatgaaggatagagtttgaaggattgaaattattatttatttatttattgagacagatctcgctctgtcgcccaggccagagtacagtagcatgagcttggctcactgcactctccgcctctcgggttcaagcaattctcctgcctcagcctcccaagtagctggaattacaggcatataccaccacacccagctaattttttttgtatttttagtagagagtctgtttcaccacgttggccaggctggtttcgaactgctgacctcaagtgatccgcccatcttggcctcccacagtgttaggattataggcatgagccaccaagcccaccaagtccacctgaaattgctagtgaaaatggaaaggggcacttcctggtattggaaatcctttgacaggccatatctgtgttagatattttaccgaaaaatattaataagacggtgtgttgaaacatctggggttttttttgtttttttttaattgtccaggttgttctggaattgatagagctccgtgaattgggtgctgccaggtcacttttgagacagactgatcccatgatcatgttaaaacaaacacagccagagcgatatattcatctggagaaccttttggccaggtcttactttgatcctcgtgaggtatgactgtggtaatgaaaaggaactttttgttaactttggaaatgaaataacatgatcttttttttttttttttaccattttattgtatactctttgtgattttgatttaatttttgagaatgatgcttctctgtttatatatgttggctgaaatttgcgtatgttaaagagaataattttgttcagttttctgattatttgagtcttctatacacctcagtttagaggattgcgtgttggttagtaaaaaaagcagaacattttattctgatgtcatttccacattagccctccccgaagtgctgcctgactgctggtatgttcactgatcatttgtgtgtcttgcccctaacaattgtagtttccttctagcctttttagtccctagaagcttttgtttcttcgcggattatgcttaccagtagagcatgatgatag

SEQ ID NO: 132879 - DNA, 1080 bp, Homo sapiens
gggtctcacagctgcctgatctggtctcaaacctcctggtttccagccaatcctcctgcctcagcctcccaaattactgagattacagtcatgagccagcatgcccaacctcatttagattattttgtataaataactagtctagtcatttaaagtatttcagtgaagtgtgctacaatataattacaagaatgaataggaaactaggctctggattaggaaataagatagtcaccttgacaccaactccctttctagctgactgagacattaggcaaatgatttcctttccttgaaccccagttctgtctctatggttagggggggtccccttataatttagattctgtgattttggaaaattttactcacatgataaagaaatagtagtgaaaggaagatgattgagtaggagcttgataggctttatttttgacctctggtgagtgagaatccctgagctgaacgatttgttttctttcagtgtgatccgccttattatgcagtacttgaaggagaacagtttacatcgggcgttagccaccttgcaggaggagactactgtgtctctgaatactgtggacagcattgagagttttgtggctgacattaacagtggccattgggatactgtgttgcaggctatacagtctctgaaattgccagacaaaaccctcattgacctctatgaacaggtaagagtggtggtgatgctgatccccatgggttggttcgttgtgggccagctccccaactaaaaagcgtcagtgagcattccttcaagcacggtagggctgcatcagcccatacaacaatggcaaggcttgacattgtattttttctcccttcttggaaaatccaggatttcccaaattaaaattctttcctttttttgagactggatcttgttctgttacccactctggagtgcagtggcaagatcacagcttgctgcatcctccatttccaggatcaatccttcctcctgcctcagcctcctgagtagctaggaacacaggcacgcaccaccacgcctgcctaatttttgcatttttctgtagagacaggatctcaccataa

SEQ ID NO: 132880 - DNA, 3648 bp, Homo sapiens
tcggaatgtgagttttaaccagggtcatgctgggctgggttctggcatgatgctgggttgtgggctgagtgagaacagcaagggtgatggtggatggagcaacagtcttgcagccggggctctcaggccaagtgtatggcagctctgtgataatgactttccctttactctttgcagattagtttttagaggcatgtctatatctcgcccaaatgctgtggtcgggaggtgtcgcatgatccgccactcaagagacaagaaaaatgaacccaatcctcagaggtgcattctttgtttattcatactccttccccctttaggatgaggtaggctgcaggtccgaggctctgggcctagagggaaattgaggtggtcaggttacagtggagagggaggaggaagtacgtgtgatgatttcttcttaagatttttgttttaagacaatctccttgtgctcttttccttgtaggtttgaccgaattgcacacacaaaggagacaatgctctctgatggtttgaactcactcacctaccaggtgctggatgtacagagatacccattgtatacccaaatcacagtggacatcgggacaccgagctagcgttttggtacacggataagagacctgaaattagccagggacctctgctgtgtgtctctgccaatctgctgggctggtccctctcatttttaccagtctgagtgacaggtccccttcgctcatcattcagatggctttccagatgaccaggacgagtgggatattttgcccccaacttggctcggcatgtgaattcttagctctgcaaggtgtttatgcctttgcgggtttcttgatgtgttcgcagtgtcaccccagagtcagaactgtacacatcccaaaatttggtggccgtggaacacattcccggtgatagaattgctaaattgtcgtgaaataggttagaatttttctttaaattatggttttcttattcgtgaaaattcggagagtgctgctaaaattggattggtgtgatctttttggtagttgtaatttaacagaaaaacacaaaatttcaaccattcttaatgttacgtcctccccccacccccttctttcagtggtatgcaaccactgcaatcactgtgcatatgtcttttcttagcaaaaggattttaaaacttgagccctggaccttttgtcctatgtgtgtggattccagggcaactctagcatcagagcaaaagccttgggtttctcgcattcagtggcctatctccagattgtctgatttctgaatgtaaagttgttgtgtttttttttaaatagtagtttgtagtattttaaagaaagaacagatcgagttctaattatgatctagcttgattttgtgttgatccaaatttgcatagctgtttaatgttaagtcatgacaatttatttttcttggcatgctatgtaaacttgaatttcctatgtatttttattgtggtgttttaaatatggggaggggtattgagcattttttagggagaaaaataaatatatgctgtagtggccacaaataggcctatgatttagctggcaggccaggttttctcaagagcaaaatcaccctctggccccttggcaggtaaggcctcccggtcagcattatcctgccagacctcggggaggatacctgggagacagaagcctctgcacctactgtgcagaactctccacttccccaaccctccccaggtgggcagggcggagggagcctcagcctccttagactgacccctcaggcccctaggctggggggttgtaaataacagcagtcaggttgtttaccagccctttgcacctccccaggcagagggagcctctgttctggtgggggccacctccctcagaggctctgctagccacactccgtggcccaccctttgttaccagttcttcctccttcctcttttcccctgcctttctcattccttccttcgtctccctttttgttcctttgcctcttgcctgtcccctaaaacttgactgtggcactcagggtcaaacagactatccattccccagcatgaatgtgccttttaattagtgatctagaaagaagttcagccgaacccacaccccaactccctcccaagaacttcggtgcctaaagcctcctgttccacctcaggttttcacaggtgctcccaccccagttgaggctcccacccacagggctgtctgtcacaaacccacctctgttgggagctattgagccacctgggatgagatgacacaaggcactcctaccactgagcgcctttgccaggtccagcctgggctcaggttccaagactcagctgcctaatcccagggttgagccttgtgctcgtggcggaccccaaaccactgccctcctgggtaccagccctcagtgtggaggctgagctggtgcctggccccagtcttatctgtgcctttactgctttgcgcatctcagatgctaacttggttctttttccagaagcctttgtattggttaaaaattattttccattgcagaagcagctggactatgcaaaaagtatttctctgtcagttccccactctataccaaggatattattaaaactagaaatgactgcattgagagggagttgtgggaaataagaagaatgaaagcctctctttctgtccgcagatcctgacttttccaaagtgccttaaaagaaatcagacaaatgccctgagtggtaacttctgtgttattttactcttaaaaccaaactctaccttttcttgttgttttttttttttttttttttttttttttggttaccttctcattcatgtcaagtatgtggttcattcttagaaccaagggaaatactgctccccccatttgctgacgtagtgctctcatgggctcacctgggcccaaggcacagccagggcacagttaggcctggatgtttgcctggtccgtgagatgccgcgggtcctgtttccttactggggatttcagggctgggggttcagggagcatttccttttcctgggagttatgaccgcgaagttgtcatgtgccgtgcccttttctgtttctgtgtatcctattgctggtgactctgtgtgaactggcctttgggaaagatcagagagggcagaggtggcacaggacagtaaaggagatgctgtgctggccttcagcctggacagggtctctgctgactgccaggggcgggggctctgcatagccaggatgacggctttcatgtcccagagacctgttgtgctgtgtattttgatttcctgtgtatgcaaatgtgtgtatttaccattgtgtagggggctgtgtctgatcttggtgttcaaaacagaactgtatttttgcctttaaaattaaataatataacgtgaataaatgaccctatctttgtaactgcaggtggtttctgtttgccaggtgtaagggttgtcatggctgtgggatggggtggggacagggtcattccctggtctgtgacccatacaaatacacatgcctccctggaatcagacatttccccatctgaacttcattctcttatctgtaaaatgggaataataacacatagggacttttttgaggcttaaaagtgacgatatatgtaaaacaatgactaatgcctcacaa

SEQ ID NO: 132881 - DNA, 1044 bp, Homo sapiens
gggcacagaaaagcatacagagggtgtttcagcaaacattgccactggctgcagacctgcccccggatctgtcctgttgagagcttagtgctgcgttcttgcatggtggggaggggtgtggctctgtgatgagccagggcatgtgtataggagcaacagtgtctctcttatcacgtagaagttctgactcattgcgagtcttggctttgggttaatggttccagccatgttgctgctgtgtcttttggtgcaggagaggctgggcacagttggtccctaagccattatggataagggatgtgtctgctgatatacacacatggacctgacatccagggaaggcagggtgattggacagaacagttcttccagaagctgttggaacttggacaagagtggcccttggctttctgtagttggtcatctgtcccctgttgcaatcaggggaaggccacacttgccttccttaaccacagttaggattttcttggggattagaccagattctagcacctgtcctgaacctctcgccccgcccctacaaaggctgcttgcaagtgtagtgcacatacacagggagcaggtggggcatggaagtggaagtggagcccctgcctttggcccttgggggaggcactgtctgcttacccacggttgttgcctcataggaatcatacaacagcttcctaactggtctccttgccttcagttggattggggcacaaatccctccttgacatataaaccatggtttaaggctccctgtggcctaaataaagataaagcttaagtatcttaacaagcacctaacccttctccccagcctcggtgatttggctcatcgctgccttcatgtttcattctggcttcactcattcggaatttcttgtagttccttggctgttctcttttccttaccgcctttacaaatgctctcaccatgcatgcttttctctgctcctacagatgccttctctcccagcaccgcctccagagtctatgtctggtcgattctgtctgctgtctccagtccccatcttgtgg

SEQ ID NO: 132882 - DNA, 1122 bp, Homo sapiens
tcagggcatcagtgacactcctcatggccagggtgcccccagtgttgctcacagtctggtatccagggctgagagtgtgctgtgtgctcagactgcctgggttcagtcctggcactgccactttacagtcagtgacctcaggcaggttacttaagctctgcaggcctcagtttcctccttggtggggagggttatgaggcatccttctcatggtaaaccttcagtaaataccagccgttactaggagggtccactcctgcctctccactctccattcatcctgcctgtttcctctgcctgcttcctctgcctgcttctgtggtggtgaattcttcatggctcccaccgcctcctgctgcacccccactcagggcccgcatcaggacccttcctcctattggtttgaactccttggagtcagagggtaatggatagtggagtgagccaggtggcagaatctcagaggccatcccgggcctataagcctcttcaaaatagggccacgtatcaagctttacacacaggagtgaactttcacaagttgttatgactcatactctgtctatagtaagctgttaaccactcccatttggcttatgcctctgtaattattgtactaacttatatcttaaaataaggatattgaaggaatgagccgggagaggctttcctggttgagatatagaagaacaagagttgctctttttccttaaggtctctcctcccacccctgaccttagctcaccagcatgggagaatactatttgactccttgtactctgagacgtggatttcaagatatagcattccaacttcaacggcagcaagaaaagaagcaacagaaggagaagacatcatagcaaacagggatgcatgctgcatttcctaatactcaaacccggaaacgagacttcactcaaggtgaagggagggcaggtcaccacctggtagcactagccctaaattaaggaatgcagaatgtttgtgggattgcccatcataaaaattacaaaatgagtaaggaatgcaggcacagctggccaggtgggtttgtcacaaccatggcagccctttgccccacagccagtacacagaactggtctctccaattccgattgcata

SEQ ID NO: 132883 - DNA, 1038 bp, Homo sapiens
tggatgtggtgcctgatgctgggcaggagggccctctccgtggccacgttgcctcccaggaggagacatttcctctgcagctgcagctgcagcctggccatctgatgcagcctgtggagcggtggcgagtcctgtggcctgctaacttctccctccctccacctctctagtgggccccatgctgattgagtttaacatgcctgtggacctggagctcgtggcaaagcagaacccaaatgtgaagatgggcggccgctatgcccccagggactgcgtctctcctcacaaggtggccatcatcattccattccgcaaccggcaggagcacctcaagtactggctatattatttgcacccagtcctgcagcgccagcagctggactatggcatctatgttatcaaccaggtgaggcctgggaaggtggaatgagagagggtgtgtgtgcatgcagatgtgtatcagatgtgtgtgtaatgagggcaggggaaggggagtgatttcacagacacctggcacttacagcgaggaaccagccccccagccaccaccagtgcagatgaggtaaacgccaaacagtgtgcttgcctattgctgtcaactctatagccaagggaaatgctggagtgttttcgttgttctgtttttgttttctggaagtagccttccagcaagattgggaaaaaagacaaccctaattattccaaagtacacactgattattccctggctttgtgtagctgtgtattttccttttaaaaataaaaccaccatttagatgtcagacttttaggtaacttcaaagtttatccagtcagtcagagcgtgtctcctggggcacctggagacagtgcccttagttcaggtcacatgcctacatgccagcccctggtgaaatatctggagaagtctgattcgtgggccatctgagagttatgtggactgggccgagtctgagaaaaagtttctcactgctcgtctgatccatatgtgttgggctttagccctgcttaggaaagtaatgctaaggataggtcaac

SEQ ID NO: 132884 - DNA, 1167 bp, Homo sapiens
atatttttttttctttttctttttgagacagggtttttgctctgtcacccaggctggagtgcagtgatcacggctcactgcagcctcgacctctcgggctaagcgattctcccacttcagtctcccgagttgctgggaccacaggtgcacaccgccatgcctgactaatttttgtattttttgtagagatggggttttgccatgttgcctaggctggtctcgaactccagagctcaagtgattcacctgccttggcctcccaaagcgctgggattataggtgtcagtcaccacacccagtgttatagctgttgtctttatagatgaacagatagattgacatagattcatgtagatagcctggtgttcagcatttttcatttaagattctgtcacagacttgaccctatacctttaaaaatcacaaaggcagtatcatagtctgtcagctgaatatgccataacttaaaaaaatcattcaactgttgctgaacacacacatatacatatatagtttttgttttttcttagtgatgtagtgatgcttgtgcagaaagctttatgtactttttggatggtttctgtaggagagctttctaaaaaaggaaaaaaagtgttgaatgttttttgagaagggctagattttcaagccagtcttacaaaaggatagactcattggaaattccagatttgcttagtgctggcagatgagtatcacttattgctgaacaatgtgtctagaattctgattaaaaaagaaactaggtccaggaagtgcctgggggcaggggcaaagggccaggctgcaggataggctcttaggatctggctgagcagaaatctgctgtgaacagaatcggtgggggtgatgctttctcagtaacttctccatttgtttctttagcagctaagtccctgtgctggacttctgtggactactgtggctctggggctgtggttgtgggtgaacaacagctagctaaaccagtgctgttgacatcattgagatgtgacgcacaggaaggtgggagcaagcttgcaaatcagattctgaaacatatagcacagctctcccacctccaggtggtcctgagatctagggaggagccatagtgagaaactttaggtttctaggaattctcttagggagaagctctcttagggagag

SEQ ID NO: 132885 - DNA, 1083 bp, Homo sapiens
tatgggttgggaattatggggcagttaatagcaaggcagtccaagctttccacagattccaccctagggaccatccagacttaaggaacagggccggcaggctcatcccctttgcactcagctgggctatgggtgtgtgtttgtgaaagaggtttattcagtagtcatacctgctgatttccctgctatctgtttacccagtgcctcctgtaccttgtttcttactctttgttctctgctcttactatgaagaagcagagactggaattctgcttgaacccacatctacctggaaattccagtttttcttgtccagtggagcagcaatccagttgttttaggacaaatggtctgcccttgaagcttaaatcctttgagggcctggcatggtgacagttttacatttggctttggtatagactggtgtggtccctgggcagtgaggtcactgtaaggccagccagccagaccctggctcctaggggaattaacaaggcatgggattagactcacagggtccctcctgtccctaaacttggtaggggttcctgggagccagactgcgattaagattgtagagacctgagacctgagttgtaggggcctctgtgttgatctgggccattgccgggtgagctgaggcggtcactagctcaaggagtgatctcaggatattgttctgtaagtcagagacctccaggttggagagtggggcttgggggtgggggacagggtttagtggggagctggttctgggtgaatgtggcctaaagggatttgtccttagaagacagaggggtgagtcacacactcagtgcttcaggttccactttgcggcttggcctcagcccgccccttccctgcacaaatgaaggccaggggctatataattggctgttgctgaattctttggcagtgattttaaagtctggtctgggtgtgttatgtagctgcttctctatccactccccacacccgctgcttctccagagcccctcacaaagcccaggcagagagagagagagagagagagagaatgacttgcctcacagagatgttggggatagggataggggtatgggt

SEQ ID NO: 132886 - DNA, 1142 bp, Homo sapiens
ctggtagggacctcgagtaatccactcccttttggggactgacgtgaggctcccggtggggaaggagactgacctctcggttcacgtgtcttgccatagagccactctcctgagtgggtttttctcctgatcgtttgggccaagtgacttctctctgaacctcatatttctcttctgggataataaatggtcaccctttcaaggggttgttttggaagatattgtgaacaatggtaaataagggcttaattaatgagggtaagccctcagtaaattgtcactgtgtgttcatttcttcctctgtgtggatcgtgaccgagagcccttccccctagcctcctcctggtatgggtacccaaaacctaggtgagcagggatctctcccaggggcagagagcttgtgtactctgggtgttagagggctaaaatataaccagtcaacaccacgttgcccatttctggtacttccggtagcagcctgagtctcaattatcttgcccagatgatctgaactctgacctctagcctgtttcagcataggcagagagcttgagtaggtgagtttgcattcctcatagcagctggctgagcctagtctggacttctctttgacctgtaacctacaggcccacaggcccaaggcaaccacaggttgcttccagggttaccacacaggtggtttctcatttctaatgctaggttttagataattgttgtaagtgaggggccctggcaggcaggatgacatcctgccaataggagttttctgtcactttcccacagagccctggctactacatactcttgctcaatttcgccagtaattgcgtcaatgtgttcatatcaagtttgggaagaacatcttggaattggtcagacgtgaactgtggtaataatgggggcttgtttttttaagcagataattaaattcctttgcatttgatgattattctgggaagcagactagtcccataaaatgaaatggactctgccttgctgctaagtgtctgacttgagacatgctatcgagtttctcaaaatctcttccttgtgtaaaatgtggttgtcgatgattaccttacaggggtttttttaagactaaatgagatcgtgtacattaaatacaggcactcaggctgggc

SEQ ID NO: 132887 - DNA, 1747 bp, Homo sapiens
cttctgttggccagggtgggtgtaaagaagcagcagcaggcacttttcctgtcacaatgagcccatggtgtggccagggcagagtatccatacataggaaacaataaaagaacaaagtctgtgttaaagatcagttcctatggcccagacattgagaacacagggagcttttatagggacaagagccatggaaaggccatacaggatacagacccagggaaagggttcctgaaaatggatatcacatttacattggtgacctgtgacctgttttgtgtactgtgggtgtttcttatgtgctctcatgtcattttcactgaggattatttgttacatgtttactatttactaacttgtattatcaacttactcttccatagatcctgccagaaaatttcaaagacagtagattgaaaaggaaaggcttggtaaaaaaggttcaggtgagttgtgtaatagtgcacgacaaggtgtaatatgttaatgtgtaggtatgtgtgtttatctgttcaaaatcaggtagtgtaggagcgtggtgtgtggtatgggcttgttttggttatatttatcagcaggaaccccaaacgtcagagaagagccacctgtgtccctgtaattatatttgaatttaaactatttagggagggaactcactggagagcaggtagggctgacacattacacaattccaggaggcagtattcatgcacacagtgcttcctgcgattgtgcagttgctgtgcagtggccctgaggcaaagctccctgcctttaccaccttttaggggattgctggcctagagcatggtcagaatgctggtcctatgctccctccctccccttaccttggaacccaggccagtggcccatctccattcatgcacaatctgttttgagtctcagccatgggttccccagaatgggtaagcaaggagccttgtgtgggcagtggtcggctacccctggatgggcccttactgccccgtgtgtattttctaggcattcctagccgagtgtgacacagtggagcagaacatctgccaggagactgagcggctgcagtctacaaactttgccctggccgagtgaggtgtagcagaaaaaggctgtgctgccctgaagaatggcgccaccagctctgccgtctctggagcggaatttacctgatttcttcagggctgctgggggcaactggccatttgccaattttcctactctcacactggttctcaatgaaaaatagtgtctttgtgattttgagtaaagctcctatctgttttctccttctgtctctgtggttgtactgtccagcaatccaccttttctggagagggccacctctgcccaaattttcccagctgtttggacctctgggtgctttctttgggctggtgagagctctaatttgccttgggccagtttcaggtttataggccccctcagtcttcagatacatgagggcttctttgctcttgtgatcgtgtagtcccatagctgtaaaaccagaatcaccaggaggttgcacctagtcaggaatattgggaatggcctagaacaaggtgtttggcacataagtagaccacttatccctcattgtgacctaattccagagcatctggctgggttgttgggttctagactttgtcctcacctcccagtgaccctgactagccacaggccatgagataccagggggccgttccttggatggagcctgtggttgatgcaaggcttccttgtccccaag

SEQ ID NO: 132888 - DNA, 1041 bp, Homo sapiens
atagagatggggtttcaccatgttggccagactggtctcaaactcctgacctcaagtgatctgcccgcctcggcctcccaaagtgctgggattacaggcatgagccactgcgcccggcctatatgtttgtgttttaattacagaatacatgctgactgtacaaaagttttaagtacatgtataggcactaatatggaaaataaaaattacccatggggcaccaactcagagatgacgattaccaaagcctgaaatatatttttcatcttaaaaaaatttgatataatgttatttacactttataaactattcttttattggataaaaaattaaacattttcctgtgatggtatttttcaaagctcgcatgcatttcatcttgtataaatgtattatttacctagccaactctgtattgttcatttaatattatttttaccattatgtgtaatgcttctttgactgtccttggacgtaaatcttttttgaccattcctggtttttttggtagaataaattctttgagttggaattgctgggtgatgtttaaagctcttgctacgtgttgtgaaatctgtgtctgtagctcgtggctgtgataaacatcctcagagatccctgctatccaactcttgtcaccagctaactggtcattaggccaagctgtgtgagtgaaccattagacaatttgataaaaataagcactgctgccattctttagcatgcgtctgtgccacaagttagtgacacatgtacatatattccctttacctcacagtaaccatctagggtgtgggcatcataatcttcatttttaaaatgagggtactgaggcatgaataggctaaataatttgctcaagatcacaagttagtaaatggcagtcagttttcaggcgtaggctttgaagactctaaacctgtgcttttaacatctgcctcttcttgtgactgggggcttcactggagccaagcctcaggaggcatttgcagccacagtgggtcatgcgaggtagagcagactgcaacctgatagaattct

SEQ ID NO: 132889 - DNA, 1047 bp, Homo sapiens
ggatctcagtaacacaaaactcagaaccctagcccctcagattaagccaccatccccgatttagggaatggcattagatctacaatcagctggtttcacttggcactggcccatttcatgtgcctcttggaggaactctcagcctggctagtctctgattctagggaaattccaactcaactcagtgattctcaaattattttctgccccaacccacttgaaggctacctggtatatcagaatcggggcagtgtggcggggggtaagagaataatttataaagcccagggtttctggttgggaatacccttctttgtgaaccactgtttttcacccttccccttaagctcctcttttcttcctctgtattccttcctctctacctgccccttctggaataagtgtattgcagtaactaccagtgcatttgatattttcccctaaggtggacagtagagcagaatccattgacaagaagatttctcgattggatgctgagctagtgaagtataaggatcagatcaagaagatgagagagggtcctgcaaaggtaaggtgggcagcaactgctgcacaaggtgctggcagagcctagttttagcacctatagaaatagggcctagttcggctgggcgcagtggctcatgcatgtaatcccagcactttgggaggctgaggcgggtggatcacgaggtcaggcatttgagactagcctggccaacatagcgaaaccctgtctctactgaaaatacaaaaacttagctgggcatggtggcaggcgcctgtaatcccagctactcaggaggctgaggcaggagaatcgcttgaacctgggaggcggaggttgcagtgagcagagaccacaccatagcactctagcccaagtgacagtgtgagactccgtctcaaaaaataagtgaaataggacctagtgcaggggctgtgagcatccctacagaagagatgcttacagtctggtaaggagaaaacatgtgagggtgtatcctttagggaggagagtttgcaatcaaatatggaagggaggct

SEQ ID NO: 132890 - DNA, 1169 bp, Homo sapiens
gaactaccttgttttttccagatccataacttattaaccatgtgagcctgggtatcactgaacctctctttccccatctgtaaaacagagataatacccaccttacagtatgaggattaaatgaggtaattgatgtgacctgtgtaccactatgtctaggataaagtagtactcagtaaatatgagttatgatcatctgtgaagtaataatacctgtttttccttcctcactggagaagacaaataaaatgatctacagaattctatagaaaaggaaggcttttcccagccatcttagtggatggtgtggaatgaagagcaaccagaggtaggaaagcccatttagatttgagacaatgaaagcccaaaccatggtggtaggaaaccaaagaatcagtttgaaagtgagttctgaaatcagctaacaggatgactgtgcatgaagaaacaacagaaagaggaaagataaggttgataaaaaggttttcaacctagagaggtgagagattggtgggccattgttacttatttcaaaggtgagataaggttcaggagtttggaattgttgaggttaagttgatgggctgtacaagtgaagaatctccctaaggcaactggatatacagactcagcacttttggggctagaggcagagataatatgcattaggaaaagagaaagtagttgaggactctgggatgtgggatgcaaagacagataggagcaaaggcttaaagactggaccttagagatacctgtttttgggaggggaagtacagaatccaggagccattatgcctactactttgaagaagagaggaagtaggcatgtgagtttgaggctatgggaaatttcttttaccgtatatgtgttttccaccttatttttattaaatctgtttttctctccagaatatggtcaagcagaaagccttgcgagttttaaagcaaaagaggatgtaagttacacacacaatttctacctctagcaggtttaactaaaagagaaatggtcttccattccttcaggttttcatactattttctaagcactcttgatttaattacaaattttcattgacgtgtaattaaatacagttagctgggttgttatctgttgtaacaacttccatctaaatagaactttttgccatgatggagatgctcta

SEQ ID NO: 132891 - DNA, 1024 bp, Homo sapiens
gagagatcatcaattctattctttaagttcacattttgccaccaaaaataggcaagggattatgtgggtcagtaacattcataattattgttagaggaggtctttgggcttatggtttttaattctttaagcattctctcatacttttaattagaagggatgttttaagagttacttgaacctgtcctttagaggagtgtctgctcagttgttaacattaaaaaattgctagccaaagactgggataggggaggtgaactaacagttgttgagaactgtttatgtgcttggcattttatatacattatctttttaaaaattgctcatgtctagattcaaaggagaatgtaggggaaaagggtagttaaaagaaaatggtaaatgagagaaaatcctctcatatatatttccgtaggatttacaagaccagctagaggatatgatggaagatgcaaatgaaatccaagaagcactgagtcgcagttatggcaccccagaactggatgaagatgatttagaagcaggtaagttatgagaaaagtaatgtatatttagttttggagtccaaaagcaacagctgcctgggaccttttctcaaatgctagtgaaaatttctatcaggatttcctgaaggttagtttatggtactgtccctgggcaaagagcttgtgaggcagccacatcagattgcatactccaccaacaacagtgggatggatcaactctgaaggaagtccaggtacaggctgacctggtgcttggtatctgtaagtgtcctccacgtggcctttccttgctgtattccttttgattttgttctcactattttcctagttggagtcctctccctcagaacagcaaaaccaattaagaaacaataattagggccaggtgccctaatcccagcactttggaaggccaaggtaggcggatccactcaagcccaggagttcgagacctggctgagcaatatggcgtcaccccgtctctataaaaaatacaaaaattacccaggcatggtggt

SEQ ID NO: 132892 - DNA, 1050 bp, Homo sapiens
gtggacagattgaagacatcttagaaaattgagtggacaagacttaatgattgacaggatgtggaagaagtgggaggtgtcaagggtggctgtcagtttctagcatgagtaactgggtagatgacagaaccattccacactggatttctattgtgtgattcccctgttacattactactgctgctttcccgctctctccatggtctatttttgcctagaacctttcattttttttccacttatttctttattttttaatttcccatcttcaattgcccctgataagtctctacctgctattgtcattcctcttggccacttccaactcattttaccacagacttatttttggagtctgatttcacgtaatggtcacacagcatacaacaatctcatgccctcttcactgccttctttcaagtccatcgataaatgagagaaattattagctgccagttttcttggttacattttttttaaatgttgactgtttcaatctcagagttggatgcactaggtgatgagcttctggctgatgaagacagttcttatttggatgaggcagcatctgcacctgcaattccagaaggtgttcccactgatacaaaaaacaaggtgaaagctttttctgtttatatttcaatgcaaaatagcaaaggctttatgcttgaccataagtctgggaatctaaaaggtagtcttaacattagaacaaagaaagacagtcctggtcattattttgtgaacccttgaaggtccggtttttctgcattggatgatgaactgactgcataaacactgtcactgaggctcaggaatatttttatagaatgacaatttgtgtaacatacatgatcacccttgttgtgagctggcactgggtaccattgatgggtcttagacatttcctgtaaaagcgtaagcaacacatgcatgagacttgctaggcagcagtgaaaaagtctcactcttcatacacaccagttaattactggctggatttttaattttattttcctttctttttcttttttttttttcctgtacaca

SEQ ID NO: 132893 - DNA, 1627 bp, Homo sapiens
atagtgatgtcgctgcctatgattatagtaaagcatgatatggaagtgactgcctatccacgggcactgctccttcaaggatttgggaggctaagaaaggtattggtccagagtgaaaatgcaaatctggaggcaaggacccactcctcaacctttcctttttgactctcccagcctccttttcccctttccaggtttactcttagatttctctttctccctctttcactctctttcccctgtggaggagcccccttttggccctttctagttctcttcttgattcatcacttcctcctttacctttcatgaaaaagcttgttctcatcttatgactgcgattttggttttgattgattaaatacttggaaatgagttttaactattaaatgtttgtaatcctttttttttttatcaaatagaaaaatagtggcactaaacattgcttcctttttacaggatggagttctggtggatgaatttggattgccacagatccctgcttcatagatttgcatcattcaagcatatcttgtaaaacaaacacatattatgggactaggaaatatttatctttccaaatttgccataacagatttaggtttctttcctttctttgaaggaaagtttaattacattgctcttttattttttccattaagagactcattgcttgggaaatgctttcttcgtactaaaatttgattcctttttttcttatgaaaaacgaactcagtttaaaagtatttttagctcgtatgacttgttttcattcattaataataatttgaaataaaactaaggaaatggaatcttaaaagtctatgacagtgtaactctacagtctcaaaatgacctgataaattgataagacaaagatgagattattggggctgttcatattatgattcagaatcattttctattgtggtattataggttggttaaagtgatggcctttttgatgggttttgttgtgtcttgtgaacaagtcgttactgtgtccattattggaatggaattatcactactgtatcatgagtgggtattttgattctatggttccctcagtattacatcttgacttgtaatcaattatgaatatttcttgatatttaatgtataggacatttatttatactcaataaatatttttcaaaaggatataattttaataatatcacttcagcttaaaacctctactgcggaaaccaaatttaatagaattttaatgtcatttcagcctataactccactacagaaaccaaattaaccagtagcattgtgaggaaagagcaaggaacaatctgggcttgggccctgggtctaccatttactaactactgagtagtctattcaacctctctaaccttctgtttccttattagtaaaatcatgcttaactcacagagcttttgtgaggaataattgaggtaatggtcataagtaccttgttaactgcaaggggctattcttatatgagggattgttaacaataaaaaagaaactgcttcattcttttcttggaaggtgcctggagtactacagcaagttcaaactcctgcccaatttcagggtctttaatgatcctgtcctcccttcctcattcaacttgttgccaacagca

SEQ ID NO: 132894 - DNA, 2568 bp, Homo sapiens
caagcaccttgaacccatcaccttcactggaaacatagttcttacttaacagcatgttttatacaaagttctaaggaaagtaatttttagatttggcttggagtctatgagtttcatggatgaagtttaatctctttactggcatgtctattttttatgtcctaggtacttttaaattcaatacagatgctgctgaattcattcctcaggagaaaaaaaattctggtctaaattgtgggactcaaaggagactagactctaataggattggtagaagaaattacagttcaccacctccctgtcacctttccaggcaggtcccttatgatgaaatctctgctgttcatcagcatagttatcatccgtcaggaagcaaacctaagagtcagcagacgtctttccagtcctctccttgtaataaatcgcccaagagccatggccttcagaatcaaccttggcagaaattgaggaatgagaagcaccatatcagagtcaagaaagcacagagtcttgctgagcagacctcagatacagctggattagagagctcgaccagatcagagagtgggacagacctcagagagcatagtccttctgagagtgagaaggaagttgtgggtgcagatcccaggggagcaaaacccaaaaaagcaacacagtttgtatacagctatggtagaggaccaaaagtcaaggggaaactcaaatgtgaatggagtaaccgaacaactccaaaaccggaggatgctggacccgaaagtaccaaacctgtgggggttttccaccctgactcttcagaggcatcctctagaaaaggagtattggatgggtatggagccagacgaaatgagcagagaagatacccacagaaaaggcctccctgggaagtggagggggccaggccacgaccaggcagaaatccaccaaaacaggagggccaccgacatacaaacgcaggacacagaaacaacatgggccccattccaaaggatgacctcaatgaaagaccagcaaaatctacctgtgacagtgagaacttggcagtcatcaacaagtcttccaggagggttgaccaagagaaatgcactgtacggaggcaggatcctcaagtagtatctcctttctcccgaggcaaacagaaccatgtgctaaagaatgtggaaacgcacacaggtaaacctacctagataggaaatattttgttgtctttttaatttaaatttttaaataagtcatatattcacataatttagaaagcagaaagtatggaaagttacactgtaaaaagtctcaatctttattcactgtctgcctaagttctaccaccactcgctgctccctgccccaataggtaaccacttagttttatgcatatcacaagcaaatacaaataagaattctttttcttttccaaatgaggaattttgtaagggttttcaaaaatgcaaatacgggtggtgtagatgtctggttacaagattttttttgagttgtgaaaacaagtggtgggtggtaacatctctgctgcctcttttggtttcatcctgcatcatctaatctgcctcatctggtctgcttagttgcagcagttcctaactggtcttatcatctcttaatttctctctttcagttcacctcttaaaccagcatcagagagcaatctttataaaacacatattttatttatttgtttttttgagaggagtctcactgttgcccaggctagagtgcagtggtgcgatcccagctcactgcaactcctcctgggttcagatgattctcctgcatcagcctcccgagtagctgggattacaggcgcccgccaccatgcttggctgatttttgtatttttagtagaaatggggtttcaccatgttggccaggctagtctcaaacttctgacctcgggtgatccgcctcggcttcccaaagtgctgagattacaggcgtgagccactgcgccctgcctaaaacacacattaaactgtgtcactcctctgcttaattccgtttactgcttctgccttactcaacagtcccatcttctgctgcctcaatatctaccacattttattccctggattctacacttttttgtctttgcatggtgttgcatgtggctccctctctttagaatttctgtcactcagttcgctgacgaagtcttactcatttttcaaaagctactttaggccaggcatggtggctcacacctgtaattcctgcacttggggaggctgaggtgagaggatcacttgaacacaggtgttcaagaccagcctgggcaacataaggagaccctgtcactacaaaagaattaaaataaaaaaattagccaggcatgttagcacatgcctgtagtcccagacactcaggaagctgaagtgagaggatcacttgagcccaggagatcgaggctgcagtgagctattgtactccagcctggataacagagcaagaccctgttttgcggggggaaaaaagttactttagtcacatgtccagggaaccttttctcacctttatagatagcgttaatctcttacagccctcacgcttatgtctttc

SEQ ID NO: 132895 - DNA, 1424 bp, Homo sapiens
tttttcctttcctgccttttaatgactaacttccctctagttgttgatttttcagattttgtttctttactgtctgtctccctccctgaagcattgcatttttgcttctgtcttgttgcctcactgaaaccgtattcagaaattaccaatgggccgggcttagtggctcacgcctgtaatcccagcactttgggaggccaaggtaggtggatcacctgagatcaggagttcgacaccagcctggccaacatggtgaaaccccgtctctactaaaataagttagctgggcatagtgttgcatgtctgtaatcccagctacttgggaggctgaggcaggagaatcgcttgaacctgggaggcagaggttgcaatgatccaagatcatgccattgcactccagcctgggcgacagagtgagactccatctcaaaaaaataaataaataaaataaaaacaaagaaatcaccaatgactcctttccagccatatctagggctgattttataagctcataatctttttggtagagtgatagcccttgacacctttgaccattcccttcttgaaataagtagctcttcctgtttgtttctgcatgctctccttatttttctaaccaatttgctcatatttctcctttcccattacttagctagcagctttcacaaagagtcaagtcatttaccatcaactctgaatcttctagatgcaataccttggtgaactctttgacttccccttcttttctttcaattcttaaccacagtatcatttaagatctgaccccaaacaccctcttacaaaggaagctttcctttgttattctctgtctcactttggcctctgttttatttggaattttccggtcttacatgttttattgacagaatctcagccttaatagatactaaattggtattagatgagggaataaatattcttgaatatactaccagaaaggcagcatgaaactggaagtaagagatcagtggaaatttgggcaaataggacaataccaatacttaataccttattttgaaggattacataaagtaccacaatggaattaaaaatcttgttaaagcctctactggcaaattagatgagagactctaaggcagtataagaatgtggagtgaaggtcaagatgatctgaaagtggtaaaatgatgtgagaatgcacataaaggccttatttgcagatgactttgccccacactgttcttccaggggaccattaatttaacatgtttttattgagaacttattaatgttcaaggcactgtgaagaaacagaggcgaataaaacggttaacttaccagagcttacagtctaagagttaaaacacaattagcctgatactctgctagaagtacaaagtactatgggagatctttggggtagttacgacttacagctggat

SEQ ID NO: 132896 - DNA, 1511 bp, Homo sapiens
aagattcagggcaagagagaaaatgtggatttggggatcaatggcctttaggtggattgcacctctcaacatgaataaaatttctgaaagagatagtatagagagaaaagcagaggccatggactggggatggctgcaatttagtgtgcaaattgcccaagtgaggatgaattcctcaagggcaaggaggaatcctgtgccttcgttttactcttccctgtctctgctgagtccatggaagatgtgccatgaagatttgcagtgacattgattataaaagtataaggtcttttatgccgactttatagttctggaataggtgagttcctgctactcgggatttatgtcctttccatttcttactgcctcccccctttccccacggtgctcttctcttattccctctctctgatccttccagcagcaattcgcatatcagttcagaagtccagttatagacgacttgtcttataggtatttatcttaaattaaacgtttccattagtcaagatagtattttcgtaagtaaaagtgactttttatttatctttcccaggtaatccaagatttaagatttatcatactcagtgaaactttttatgaatagcattatatttatctttttattttaagatatgggataatacatttgttgaaataataaaaaccacactaaagttgcatgctgcctagctatactttactgtttcattaaagttgagaatgtggttgaagtttgtaccattgactctctgatctgatatgttctaggcaaggtaaagaatcctgagtggagcagaaatgaaattccacatagctgtggtgaggtttgtagaaagaaacagcctggccaggactgcccacattcctgtaacctgtaagttggaatgctaattccgttgggattgctggtggacatgctttgctggtggctctaagtaaacatacctggttagcatgtaatggtttgggatgaagggtgatatgggacctcagtaaatggtctcaaatcaccctgtgccaggcactctacatcagttaacttgttgaatccttaccacagcccagtaatagatatttaccatctctgctttacagatgaggctcagaaaggccaagcctcttgcccagcatcacagtggcagggcgtggatggtggagctagggtttccaaagccagtgctgcttccattacattacactgcttgcttctaagaagaaatgtgactcatatgttttatcccgcattgatatccaggtccaagagaatgtatgggagaaccttctgtctggggaaagacaattgtttagggtcccggtcggacagtatttccaagatgtcaagatgtcaatctttttctttctttctttctttttttttttttttttttttgagacagggtctcgctttgtcacccaggctggagtgtgagtgtggtggtgtgatcacagctcactgcaaccgccgcctcttgtgctcaagccatcctcccacctcatcctcctgagta

SEQ ID NO: 132897 - DNA, 1327 bp, Homo sapiens
cctagaatatacccctcctactccaaaaacagttgtcgtagaagttcccaaaatgttttaagtagtggtatttctgtaccactgtgtaatttgccaaagtgtctgctttgaagagggcagtatatatttgaatatacaaattccgtattgtaacttttttctattggtctctataatatagctcctaaaatagcatttttcagagggctaattctgacctatagcatatcactcagcccagttctttccatgacccccttccctttcattctctccatgttactcactagcatgcctcccctcatgtcagccttcttttcactgttccattgtttgcccagtgcctgattattacttcactagctgatagtatgtctgtacttcttacggaccaggtagatttgagttctattactttgcttagactctgatcttctacaggaccctattagccattctgccttttacctgagtagcaaactatttttatccccacacactgctgtaagtgggccaagactgtatttgaaaatgtcatctttgactctcagacccaaatataaccagtattttgacttgggatttacttctgtggttaaatagtctgtggtgataatgatgtcgattttttgcacataaaagtacagttgatatctttgttcaaatagtttaatcaactttaaacaaatacaaagacatgtcatagtagatgtatttgttgccatattcacaataagacccagctgggacagctttgttcgggtttggatacatggctgtggtttattcagtgaaacctttctctttcagtctctgccatccaggaccctgcccaccctgccctgcctttatgacaaaaacatgtgaatgtggacgaaccaggtaaagttaaaattacaccctaaagaagacctcagttttcacatgcatgattgacttgtgaatttctgaaataaaagaatagtaggtagatacaaataaatggtaggcatgaatagtactttttttttttcaggagtgaaagtttattaaaaagctttagaacaggaaggaaaggacagaaggaaagtacaacttggaagagagccaagtgggcaacttgagagaccaaatgtgccatggatagtacttttctgtaactagtagttccctgtgctgcccatgaccctattttgtaatcttataagtgattaagaagttatatgcacaatgagattgtgagactacccattatttcgggtaaaataccaaagtgacaaggatttttttttttttgagacggagtctcggtctgtcacccatgctggagtgcagtggtgcgatctcg

SEQ ID NO: 132898 - DNA, 1049 bp, Homo sapiens
ggtacatgatagctgtcctcccgtctgtaaagtactgtggaagctccaggcagagctaggaccagaacccagatcttctaactcctcaccccagcattctttctccttacgcatgctgcttcatggaactcagagatgaaatcacataaagcaaatactcaggaatagccttcagttcctcaccactcagaaaataggaaagaaagacaggatggaaaagaaaaagaaaaaggaggagaaagaagaaagagtgggccgggcgtggtggctcaagcctgtaatcccaacactttgggagcctgaggcaggaggatcgcttaagcctaggagtttaagattagtctgggcaatatagtgagaccctgtctctatttaaaaaaaaaaacaaaaacaaaaacagaagaagaaaaagagtggagaaagggagagtaattgagaaaataagaattggaggagggagacataggaaaaagtgagggaaatgaagttagagaaaggcttagtgggttttgaggggagagttaggggccgcagtgttagtttggttgtccaacaggaacttttacactgatgctgtctttacatctattgtctttacaggcacacagttcgctgtggtcaggctgtctcagtccactgttctaacccatgtgagaatattttgaactgtggtcagcaccagtgtgctgagctgtgccatgggggtcagtgccagccttgccagatcattttgaaccagggtaagtggtgggcacaccagctagcaatgcttgtgttcttttctggaaccttattaatgattgtcttgataaactttgattggtgtcagacttttagtcacaaagaccttgagtagagagaactggagatacgatgcttagacggtttttattattttacctgcataccagtataggtcattgtcctatataattttttttttctttttgagataagtctcactctgccgcccaggctggagtgcagtggcgtgatcctagctcactgcaacctccacctcccaagttcaagcaattctcctgtctcag

SEQ ID NO: 132899 - DNA, 1595 bp, Homo sapiens
gggaggctgaggcaagagaattgcatgaaccggggaggtggaggttgcagtgagccaagatcatgccattgcactccagcctgggcaagagtgagactctgtctcaaaaaaaaaaaaaaaaaaaaaaaaaaaatcttcattatagtgaaaccttttggttctgtttaatgtacgattttattttatgagtattatttttaataccttattagaaggtttctattttatttttattgtatatgtgattttaaaaatgtgatgtttttataatactgcatttattctgatcattagatcttatactctcatgccaatttttaaatttctttttggcaacggggacctttttacaagtgttttatgtaaaacctgacataaagtatgaaacctgtgcttcttgggttgaagtgaggatgggaaatccagatgtcaactcctccaccactactaccagcttagcttgtctatctcctgtaacatcaccagaggacccgcaggagcctcacagtgaatggtgttcagccacggccttatggaccagatagtgttctcttaatttagaggttgcttcactctgatgctgttcttggaatgtgctgcagaggcactatgagatattaatagtttaacaaggcttttttaatttcttcctatggtaaagctcttaggcgggtcttagagctgctgtatgaactatactcatttctgcataggtctgatcagtactctatttggcctcccagattacaggcatgagcgactgtgccaggcccgcattttgtattttcttatagattatttgtgacattttaagaacccatacatgttactaacgttttgtttttgaaattttctcttcaagtatgctattgcggcagcacctcccgagatgtgttatgtggaaccgatgtaggaaagtctgatggatttggggatttcagctgtttaaagatatgtggcaagtaaggttttacgttttcttcagttgaactaaagctgcactttatgcaacaattatgtaatagtgtgttttcttaacagggacttgaaatgcggtaaccatacatgttcgcaagtgtgccaccctcagccctgccagcaatgcccacggctcccccagctggtgcgctgttgcccctgtggccaaactcctctcagccaattgctagaacttggaagtagtagtcggaaaacatgcatggaccctgtgccttcatgtggaaaagtgtgcggcaagcctctgccttgtggttccttaggtaactagtaagcgtaaagttggctttaaaaatattattgtaaatggttggcagcagtgagtgtttaagcaatgtagaagtaagtgctagttacaatatcagaggtttctaaatattatgatcatatttatgtaggtacgttttctttcctcctcaacatatacttgtgaaaacccatacatttgcccaaatgatctctctgattcaggtattttattgttaactctggacaactgtggtgagttactgttccataggggttatgatttctcttaggagcctgtactgtaatgaacactatatgtatttataccaatccagggttcagcaagtgtt

SEQ ID NO: 132900 - DNA, 1065 bp, Homo sapiens
ttcagcttggggaacacactgagtgttgatttatcctgctctttgacctacttagtcattttagtgtatatcaacatttgtcccagtagagtacaagccagggtggagacagaattgtgaaccgttggttctgttaaacacaatgcagggtctggcagcatctgacttgcgaataattctgaggatatagtccataaatgggaagctagtttaataggaaaacttcagaaaaaagggaaaagtagtataatttacatgttacaaaagttgtgtaatcatatatgggttttttcctgaaagaaattacaatatacataggataacagaggcatttttgaatgtcaggtatgggaccacttttgtactttgtaaatactgtattaaagactgagatgctgtgatttggcaatcataaatttagtaatgcccagagatgctctttgtgatctgtgtgactgaaaattgtaagcagggttgggacatgtaagctggaagtggctgctgtcagttttcttcattctcccacaatccctctttctatctctacgttttcttgcttctcattgactctttgtcctcactccctctaatagtggactccatggcagtgagtgtattcttgaaaagctatgtgtaagttgaatttttgcaagtagaagtccttaaattgcaggaggagctcactgtcaatacaaactctgttaaacctgtttgacaaagtaaaaaaaaaactcttcaaaaagctgataattggctgggtgtggtggctcacgcctgtaatcccagcactttgggaggctgaggtgggcggatcatgaggtcaggagattgagaccatggtgaaaccccgtctctactaaaaatacaaaaaattagccaggcacggtggtgggcgcctgtagtcccagctactcgggaggctgaggcaggagaatggtgtgaacccaggaagtggagcttgcagtgaaccgagattgcaccactgcgctccagccagggcaacagagcaagactgtctcaaaaaaaaaataaaaaaaataagctgataattatcacctcattgtt

SEQ ID NO: 132901 - DNA, 1051 bp, Homo sapiens
actttgctgtagttttgtgatattatcaggtgtgctctgaagtgtgtagagccgtttgtccctgcattaaatggtacagattgtcatctgttttcaattcttatatctgctttttatggctttttctgtctgtacccttgtttggtgatgacttctctttcctttgcatgcctttagcagccctctttctatttagattttgtaattattagtctactgtgaatttggagaccagaccacaaaaattgttagaattgtattttcatgaaaagtctgtaagcctggagtcctcttgtgagtaaagctcattcatatagggattaggctcgctccagacatggcaagtgaagttggtgaataagtgactatcagagaagtatgggatatttgggatattcttgttacctatggcattatattatagttgtattattttagttattcctaaagtagttaccatttctttttctttttccataggagcttccatgtaccagtctcaaaagtgaaggtatgactggggtggggcatgagggaatttctggggtgaaagtgtcgtcactctgaatcttgttagggagttgggttatgtatttgtcaaaattcagtgaaggcatacttaagatttgtggtataactttcacctcaaaaggaaaaaaatataaattgaattctaattgatgaaatgctgaaaaatataagctaagtgcactcatgtctacagcttgctttgaaatgcattaaaaaagaaaattagtgggtaggtagaagaatggatatgtatatgaaaaaatatgttaatggtagaatctagatatgggcatatggatgttcactgtaaaatactttgaactttttttctttttccttttgagacggagtctcgctctgtttcgcaggccagagtgcagtggcgcgatctcggctcactgcaacctccacctcccaggttcaagtgattcccctgcctcagcctcccaagtagctgggattacaggtgtccaccactacacctggctgatttttgtatttttggtagagacggggtttc

SEQ ID NO: 132902 - DNA, 1243 bp, Homo sapiens
ctgtcttacattttttcttcttctctattttatctttctttttcttttttttttttttttttttgagacggagttttgctcttgttgcccaggctggagtgcagtggcgcaatctcagcttactgcaacctccacctcctgggctcaagcaattctcctgtcttagcctcctgagtagctggaattacaggcacccaccaccatgcctggctaatttttttgtatttttagtagagacggggtttcaccatgttgcccaggctggtctcgaactcctggcctcatgtaatccgcctgcctcagcctcccaaagtgctgggattacagtcatgagccaccgtgcccaacctttttttaaattttattttaaaaatatgttgagacagggtctcactttgttgaccaggctggtcttgaatgcttggtctcaagtgatcctcccatgttggcctcccaaagtgctggggaaaaacattttcgtcaccctgaaaggaagccctgtattaattaagcatttactccccactcagtcctcccccaggtaaccactgatctgctttctatctgtatggatttactattttcgaatacttcatctaaatggagtcacaatatatattcttttgtgccctgcttctttcacttagcatgttttctaagtttatcatactgtagtatatatcagcacttcattcctttttatgattgaataataattcattttatgaatatacattttatccattcactggttgatggatattagaattgtttctactttttggctattgtgaatagtgctgttatgaacatttgtatacaagtttttgttccaatacctattttcatttctttggggtatatacctaggagtagaattgctggatccaatggtaatcttgtgtttaatttttttgaaaaactgccattctgttttccacagtggctacaccattttatattcctaccatcagtgtatgagggtttcattttctccacatccttgccaatacttgttattttctgggtttttttggtttttgtttttttgagatggagtcccactctgttgcccaggctggagtgctgtggcgctatctcagctcactgcaaactccacctcccaggttcgagtgattcacctgcctcagcctcccgagtagctgggattacaggtgcccgccaccgcgcccggctaatttttgtatttttagtagagatggggttttaccatgttggtcag

SEQ ID NO: 132903 - DNA, 1336 bp, Homo sapiens
ccagctactcgggaggctgaggcaggagaatcgcttgaacctgggaggtggaggttgcagtgagccaagattgcgccattgcactccagcctgggcagcagagtgagaccctgtctcagaaaaaaaaaaagaaagcaaaaaggccaggcgtgttggctcacacctgtaatctcagcactttgggaggccatgggaggtggatcacctgagatcaggagttaaagaccagtttggacaacatggtgaaaccctgcctctactaaaaatacaaaaattagctgggtgtggtggcaggcacctgtaagcccagctacttgggaggctgaggcatgagaatcacttgaacctgagaggtggatgttgcagtgagccgagatcacaccactgcactccagcctgggcgacagagaaagactccatctcaaaaaacaaaacaaaacaaaaaaaactgcatttacattattacaattgtattattactattgtattctttgagcctatagttactcaaatatttgttgtatgaatgttcatatcctttgtctggttttttttttctttttaatttgccacagcagatgctacatttatgtgtgacaagcggtgtaacaagaaacggttgtgtggacggcataaatgtaatgagatatgctgtgtggtaagtggacttattaggcataatcagattccattcatccaggtgctgggcttctggaagcctgagccatgtggagaatgcagcccggatttaaaagtcactgggacaggcccctaagcagcagtcagagagctctcatagtccccataacctctctgcaaagagacagactgggcctttttagcctcacccaggttaagaagtcagccagtggcatctggtagcaacacagaggaagagaaagagataagagaaggtctcacaccccagagcccaagacccctagatgagcacacagtcttcggcagaagattgtgtgttgtcccaacacaaactggcctggacttagcaacttgggcttcaggtttcatgtactgcttaggtcaggtcagtaggaaaaattattaggacattttttaaaaagattttttaaaataaaatatttatttaaaatatttgcttttatggaactaattaaatcactagctggctatttgtactctgttatctcatatactcttttatatataaaaaatataacgtatgctatatatgacataacatgtatatataaatgtgtatgtatgtattagtccattttcacactgtcagtaaagacatacccaagactagggaagttacaaaagaaagaggattaatggatctacagttccaagt

SEQ ID NO: 132904 - DNA, 1018 bp, Homo sapiens
gtaccagtttactgtattagtctgttttcacactgctgatagagacatatccaagactgggcaagttacaaaagaaagagttttaatggacttacagttccaagtggctggggaggcctcacaatcatggtgggaggcaaggaggagcaagtcacattttaacatggatggcagcaggcagagggagagagcttgtgcagggaaactcggccttataaagccattagatctcatgagacttattcactatcatgagaacagcacgggaaagacctcccccaccatgatttagttaactcctaccaggtccttcctacaacatgtgggaattcaagataagatttgggtggagacacagccaaactgtatcagtgtatatatatatacataaacaaggtaacacagtaccaatagcaaggtagtacgtgtgtatgtatgtatatagcatacataattattttttaaatttatatatttaagtgaagagtgatgaattgtgcaagtattataaactagtgttagaaggcttaaagacttcctcttattataaaaaaatttgcagccaggcattgtggctcacacctgtaattccactttttgaggccgaggtgggtggatcttgcttgatccaaggaattcaaggccagccttggcaacatggtaaaaccccatctctgccaaaaatacaaaaattagccagtttcataacccggtctctaaataaatagatttaaatgtaaaaataaggctggatgcggtggctcatgcctgtaatcccagcactttgggaggcaaaggcaggcagatcacttgaggtcaggagttccagaccagcctggccaacatggtgaaccctgtctctactagaaatacaaaacttacctggacattgttgtgggcacctgtaatcccagctactcaggaggctgaggtaggagaattgcttgaacccaggaggtggaggttgcagtgagccaagatcgcaccaccacactccagcctgggcaacagagtgaga

SEQ ID NO: 132905 - DNA, 1026 bp, Homo sapiens
gtggatgcctgtagtcccagctactcaggaggctgaggcaggagaacggtgtgaacctgggaggcggaacttgcagtgagccaagattgctccactgcactccagcctgggcgacagagcgagactccatctcaaaaaatatatatgtatgtatcaaatatatgcagaagcagagagactactagtatagagagtcccatatacacaacatccagtttcagtattgatcacctcatgacgaattttgttttatcttcatccccacctactctcccttctgtggctattttgaaggtatttccagatatcattttatccataaatgtgtagagctttgtttttattaatcttgttgttatttatggaaaatataaaatgaagaccattttatgaacaaatataaatctcttttcccaggataaggagcacaagtgtcctttgatttgtgggaggaaactccgttgtggccttcataggtgtgaagaaccttgtcatcgtggaaactgccagacatgctggcaagccagtgagtgtctttactgtatagtttattagaagagttttttagaaattcagacataatatactttgagagattgatttacttagaattgtatggattcttgaactaagccttcgtatttccaatatgttgagactttttttaaagttacttctaatgctgtgttgtagtccctgaatgtgcaaaacttgggatatgaacagtgatcctgagatggggcctagttcgttaatagattccttctctgctacatgcctcatatgtgttattgacctaggttctgtcctcaacaatcttctttctctatattattagcagcagtttgcaaactttttggttgtagggctcatttacattaccaaaaactatcctaaagagtcatttttatgtgaattgtatttatctttatctaccatattagaaattaaaactgagaaatttaaaaaataattgattagtatatttaagaataataatatacctcattgcatgtaatcacaaaa

SEQ ID NO: 132906 - DNA, 1277 bp, Homo sapiens
accaaaattcaacctcattttagaaaggacttgactcggtgtttttattctctgtcacaaaaatttattggactttcttgtactttgaatggatctttttacccgtgcatgattttataatagcccacattgatcatttggaaaataattcttcactgagttatgtgatctttgaaatgttgataaatttcctattataatattaaaaactcagtcattaatataatctccagtctagaaatatgttgggaaaagtattgggaagttgtcagggtcatagtaataaatgaaacttcatatctgttcatgcctttttcaccagcttagctttaataaaataaaagtttaataaaataaaaacctcttttgaaaaaagtagcacccccataaattctcctctaaaaatacaagcaaaaatgtgtgtgtttgtgtgtgttagtatgtacttgcacatcccaaactcagaaaggattcttttgttttacctgctgctccaccaggttttgatgaattaacctgccattgtggtgcatcagtgatttaccctccagttccctgtggtactaggccccctgaatgtacccaaacctgcgctagagtccatgagtgtgaccatccaggtgagtaccaacttgtcttcacacttcagcctgctcacaccatgtcatttaggatcctgctgtgttactgtcttcactgctctagagtcatgctgtgatggctgccccttgctcccggctcaggggctggttctctgaaggtgggtctgtgatctgggccacagcttggaatcacagtgccctccattggtttactctagggatgtcaaacacacctaaaaacgttggaagactccccagctgatcttatctctcaagaacttttctttctttgtggtctccactttggtgcatgttttgaaatttagcatctttttacaaaattaaaagtgacttttttgttgttatagaagcaatatatatttatcgtattaaaattaagaaaatagaggccagggccaggcgcagtggctcatgcctgtaatcccagcactttgggagagcaaggaggggcagatcatgaggtcaaaagattgagaccatcctgcccaacatggtgaaaccccgtctctactaaaaatacaaaaattagctgggcatggtggtgcacgcctgtagtcccagctactcgggaggctgaggcaggagaatcacttgaacccgggaggcagaggttgcagtaagctgagatcgcaccactgcactccagcctggcga

SEQ ID NO: 132907 - DNA, 1031 bp, Homo sapiens
tggaggtggaggttgcagtgagccccgagattggcgccactgtactccagcctgggcaacagagtgagacttcgtctcaaaataaataaataaatacaaactgttattgccagatgcagtggttcacacctgtaatttcggcactttgggaggcctaggcgggtggatcgcttccactcaagagttcgagaccagcctgggcaacatggtgaaaccccatctcttaaaaaaaaattcaaaaattagctgggcgtggtggcatgcacctgcaatcccagctacttgggagactgagatgggaggatcacctgagccccaggaaagtcataatcacactgttgcactccagcctgggcaacagtgaaaccctatatccgaaaacaaaacaaaaccaaaccctgccataagcttagaaatgtttaaagagaaagttaaaactcaccccaaatcccacatggagatgagaatctggctacttctgtctctcctagtttcggagcaacatcccctgtcacctggttgatatctcttgcggattaccctgcagtgccacgctaccatgtgggatgcacaaatgtcagagactctgtcacaaaggggagtgtcttgtggatgagccctgcaagcagccctgcaccacccccagagctgactgtggtcacccgtgtatggcaccctgccataccagctcaccctgccctgtgactgcttgtaaagctaaggtgggtatttctggccacagatgcagcattgactgtagttctgaggctactagtgaatccagaactgtctacagtggcccctgggcatgcatcttaattaagggtcattggttgcaaataaccacaagttagagaaaggtagagtaagtcatacaagtttctgcctgcccaacttggtatggccttttgattcagcaggtacccactgccaccggaccacagtctgtgtctcccttgggtgagattctcaatagtcactgattgtttactccatttatttaataaatgtataaatgtcttttgtgcaag

SEQ ID NO: 132908 - DNA, 1059 bp, Homo sapiens
tcgaactcctggcctcaagtgatccatctaccttggcctcccagagtcctaggattactggtgtgagccaccgcacccagccaagaaatgtataaaaatgaagtgtatatgttaatggaattctttacttttcagatttctatattaattttaacatttgtatgtctattttatgtaccttatctttaaacaaagcctcagagaaagtcatcccccattgaccattctcagtgatcccacacccccaaactcctcttccccaaataatctaagtccccagtgttcagcctatgacttgctcagatccttatagatctgtttattttcttttatgaagacaataccacctcatgtcccaagttgttgttattctctccttaataatccagtttaccaaaatagagataaataatgtgtaaagaatttaggatatagtaggcactcggggttactgcaagatagtttccctcccactccttttatttgcatacctctctctctctttcaggagattagcagaggcatttcatatcagtgaggattctgatcctttcaatatacgttcttcagggtcaaaattcagtgatagtttgaaagaagatgccaggtatgtaacttgttacctgctttcttaattgtggcttgtcagggtgtttggtcttttgagatgtcataactaatatgtactcctcctgtgattaagccagttcaagtttgtttgtttatctattgtaagagattatgtgctgtttaataaatatccttctcttggtttctcgaaactgtccccttaaagaactgaacttggggtagggttgagataagagtttgggtggggtggtggtaagagtttgggcctcccaagggctggactagactaaattggaggatctctgggcttcattccacttctgtccaccccagtctcacattcacatgcgttctcagttggagctataacagctcttatttttctcctggagtccctggcctttcagtggctacttctcctttcatcttctcatttcttatatttttctcttttgttcttccgtcagt

SEQ ID NO: 132909 - DNA, 1043 bp, Homo sapiens
attggtataccatatccggaatcacacatgttatcttaaacccagccatcatacctaagtcttttgccaaaacctctcataggtatatctagctgaacttattttggcattttcaatgtgatcagttctagacctagaagggggtcaggctgctttacagaattctatttccttaagtccctggcacttctcataccacatcactgaacctgttcagtaacaatcagtttggccgtcccccatgatggtaggaaatatagagagcaagttcttctgccagggtcacactgtggtctctgaactgaccagtatatccctaactcctctttgatagagaaagagtctcaaatggacaactgtcctgtgttgctttccctaggccttcagcagcctattggctctccctgcctctgagctctggactctgtttgaatattccaagtagtatatggacagtccagggcttatgcccagcagcccactggaggcattcttcaggctcctttaaggcaggtgcattgatagttccattagtgtgacccttgcattggcacccctccagcctggaggccaggcttccagcaacttccttctgccctagagcaagccatgagccccagagcagtagcaggagacttgagaagtagagtgacaaaaacaagcacttaattaaattataaaatttaactttatagggctgccttttggtgttttcatttttttatttcttttcattttttttcctcaatcctcctcctcctgtagcagggctgtcctttggtccttacccagtctgcttcaaaagggatcaggtacagcagcaggaacaggtgactggagggaagtgacacaaaacaaaaccacctctctctggacccatgtagtgcaggtcagtggccccacacacaacaggaagcccatgagcatctgttacctctttcaagcagtgggttcagtgggtgaatagtacgtgtgagagtatctcagaatcagcaaaaggcaggagacctgacttcagattctagctgtgccacataatttgc

SEQ ID NO: 132910 - DNA, 1135 bp, Homo sapiens
ggccacagccctagatcctgtcttggagaggccagagaaggtggcaggggaggaggaggaggaggagtgtcagtcttgagggagggggaagggcaaagactcgctcactgagtcctatagattaaggtttgggggagaatccctcctgtgtagtgctggccttccttctttatgcctgaaagcctggagaccttgttccctaaggagaacctgctgatgtgcctcctcttctaaaatcggggagggacggccaggccagctccttcaccatggcagacctgccttcctcattagccttcctcacacacaaatattggaaagttcagcctccctaacttcccacatggcctcaacacagatgtcccgtaccatctcccatggctcaaggatagccaggggcttctctaggccatgtcagtccctcagcctacaaaggccaagcccagaaggaacaggttccctggggtcacactgccacactagaaacatcctgtaccaggagggggctgagtcctcaggacaaggggagctgtttttcttcctggcttccccaaacacagctcagtgggaagtccttgccagtgtcccaggctcccctcagcccaggctttgcaaggtcattcttcataatgcacagccttctgggagagctgtctgcagagaatccagctggacagctaggatgtctgtgttgctgcctcagctcactctgtccctgggcagtttgggcatcagtttctgcatctgtcaggtgagataatggttcctgatcatgtgcttcccagagccgtcctgagggtggtgggtagacaatgagggtcagagatcaggagagtctcccagtgccacgtggcatctcagcacagtcaaacctctggagcccatacctggtacagctctcagagaatagctcttggggaagagggaaaggaacagagccgtagtcaagctgcttagacaagggccaaggttttggtcacccccactgacactcccctcactagcttcaagcttgacacatcagtgagggagttgaaagtcctcatctgctcacattttcccaagaaccttttttaacagtacgtaacggctattgagcgcttaatatgtgctgagcaccacagccatctcttac

SEQ ID NO: 132911 - DNA, 3554 bp, Homo sapiens
tcctgacctcaggtgatccacccacctcggcctaccaaagtgctgggattacagtgtgagccactgcaccgggcctacatgagcttttctttggggcagctgggggatgagtgagaggcttcccacctttatggtccaggcctgaagggctgtggagaaacttgtgctaaggtgaaagctgttcccctacacctacgcctgctgaaattcaaggaaaatcagtgaagatggttcagtcatcttctaggatcccagtcgcagaccctgcttccagccctttccatagggccctctcatattagagttgggacagtggggtgggaaggcatgtgtcctttttctggaaagtgcaattacagcagaaggggtttgggctgggttccaggaagcgcctctagtcctcccagtggtggcgagtgggcatgttgctggcttcaccccttccttctggagtgagagttgctggtcctcaccctccctgcctgttcttcttcctgacagatgtttggctgtggctccgtggcccaggttgtgctcagccggggcacccacggtggtttcctcaccatcaacctggcctttggctttgctgtcactctgggcatcctcatcgctggccaggtctctggtaaggccttaaccctgcccccagcccttggccctcaatagcattcccactaggtgtcctggcattcctaagggcaggtcacagctgtggcctctgctttggccccttgggaaaggagggtggagaagaaacttgacacttagaactttcgactctcaccttggaatcagagattatcagctgacctgttacatagaccaaccgccatcctgtgcaagaaacccctctctgcaccccttctcaggggaccctagcctgccgactgtggcaggctgcagctaataggtcccttgtcccctctgcccaggggcccacctgaaccctgccgtgacctttgccatgtgcttcctggctcgtgagccctggatcaagctgcccatctacaccctggcacagacgctgggagccttcttgggtgctggaatagtttttgggctgtattatggtaagcattccccaccctgtcctcctccactacccccgtccctctgttcaggacctgctggcaccaggccttttgatgacagacggctaggacctgcccaggccccgggctcatgactcactcattcacgcacagggtcaaggtagggggcacgaagggaaagaaacaagttgggcaataacagagtctcaggccctccaccccaccccacgccaccccctctgcctgctgcaatacagcagtattgctacttacccataactcatgggagggtggggagggcacacctgagagggaagtctgggctcaggcctctcccccgactcactgtgtgtctaatctgtcaccagatgcaatctggcacttcgccgacaaccagctttttgtttcgggccccaatggcacagccggcatctttgctacctacccctctggacacttggatatgatcaatggcttctttgaccaggtatgggctggggacgtgtgaggggaacgcagggaggggaccgagttgccttggtagctcatgggctggttgggggacaggactcctcgactgtagcagggtttctccaatctgtggggtaacccgcatcagaacatggtggcaagtacttacaaaacatgcggctctccagcgggttcttgtcacgcagacattctagcaccattgctttcaggagaagagcatgggcgggcgctgacaagagtttaagagctagagggaagacgggggatggaaggaggggtcagagaaagggagggagctgcagctcaccctgttctccccactccccagttcataggcacagcctcccttatcgtgtgtgtgctggccattgttgacccctacaacaaccccgtcccccgaggcctggaggccttcaccgtgggcctggtggtcctggtcattggcacctccatgggcttcaactccggctatgccgtcaaccctgcccgggactttggcccccgcctttttacagcccttgcgggctggggctctgcagtcttcacgtgagtacagcccccacccagctcaccccagcctgcctctcctctgccctgccccccatgtccctgactatgagtgtctgtccccccaggaccggccagcattggtggtgggtgcccatcgtgtccccactcctgggctccattgcgggtgtcttcgtgtaccagctgatgatcggctgccacctggagcagcccccaccctccaacgaggaagagaatgtgaagctggcccatgtgaagcacaaggagcagatctgagtgggcaggggccatctccccactccgctgccctggccttgagcatccactgactgtccaagggccactcccaagaagcccccttcacgatccaccctttcaggctaaggagctccctatctaccctcaccccacgagacagccccttcaggatttccactggaccttgcccaaatagcaccttaggccactgcccctaagctggggtggaaccggaatttgggtcaatacatccttttgtctcccaagggaagagaatgggcagcaggtatgtgtgtgtgtgcatgtgtgtgcatgtgtgtgcatgtgtgtgcaggggtgtgtgtgtgtggggggggttcccagatattcagggcaagggaccagtcggaagggattctggctattgggggagcccagagacaggggaaggcagcctgtccatctgtgcataaggagaggaaagttccagggtgtgtatgtttcaggggcttcacatggaggagctgcagatagatatgtgtttctgtgtatgtgtatgtctgcctttttttctaagtgggggcttctacaggcttttgggaagtagggtggatgtgggtagggctgggaggagggggccacagcttaggtttggagctctggatgtacatacataagtaggagcagtgggacgtgtttctgtcataatgcaggcatgaagggtggagtgaagtcaggtcataagtttcatgtttgcttttgttttgttttgtttttaatgtatgtagcagatgttacagtcttagggatccgggatgggagaccccactttagaaagggtcgtcactcctttaatcctctactcaacaatgtactcttttacttttatattaaaaaaaataaaataaatatgtgcctaaaacctccagttgtgcaaatatctttctgcttgctctgctgcttttctggggccagttaaggagcttccgcatgcccacactgacccagggtgcccggctgagtgtctgatctggtcaggttaccctgggggtcatacagagaggttagagagcctcttcaccaaggctctcagtttgaactcagtggtcccaaactttcccccaagtttccgtcctcatgggtacccccagcataatgaatggaatcttcttcccaatccctgtacccacacatcaccccagaaaggcttgagccctatgcagggaagatcttgctgcagag

SEQ ID NO: 132912 - DNA, 1058 bp, Homo sapiens
ccactgagccccaggatcatcaggcttatcccagaccacaaaagaagagtgttaaattttaggggaagggttgcagactcagatggatgtgaggtattggatatcagtgagaagcagaacttcaaggactgcatgaactggaggggcaggcctggggatccctttgtagtgggtgagtgcctgcctgcctacctgcgtgttgggagcctaggcctgcagtggcagaatcagggttggctttggggtgaggaaagcccctttctctgagatacctggtgtgagggcagggggcggtgctggccgagaactcagggcaggggttgggggaggaagaggaagattagccccaaggtggtggaactggctctgacagctcctccctccaaggcgtcctgggatggagccaggtctgagcctttggcaggcaaggagctgctgccagggcctcccaagcagggcagggcgcctcagaccctcacgtgcctgtctcccaccacccctcctcacacatacacctgcaatctctgatctttgctctcacctgcctgcacacctttgccccatgtcattgccgctggcttctccgttatctcttggtctttctgggatgataatcaaaatgcttaactatccagtacaacaggcactgacccgtcagaataaacaaggtctgtagcacaggtcctggaaactgcctgctctgtgggcataaaacctttagttatgggcaggtgggagaggagaccagggcaaggcattggagcagctttgagggacactcagggggctcagggcaacaatgctttacagctgctgcagaagtattttcaggcttgaacaaggggaacagacatagtacgttctttttcttttttaaatagagacaaagtctcactatgttgcccaggctgttctcaaactcctgggttcaagatcctcccatctcagcctccaaagtgctgggattacaggtgtgagccaccacagctggctccagtatgttctatatttgtagaacaccagggctcttagtctcttttagttcccccatttttggc

SEQ ID NO: 132913 - DNA, 1793 bp, Homo sapiens
tgggaggctgaggcgggtggataacttgtggtcaggagttcgaaatcagcctggtcaacatggtgaatccccatctccactaaaaaaacaaaaattagctgggcatggtggtgtgcacctgtaatcccagctaatcgggaggctgaagcaggagaatcacttgaacctgggaggtggaggttgcagggagccgagatcacgccattgcactccacctaggcgacagagagagactccgtctaaaaaaaaaaaagagacagactcttccttggctgggggtaagtcagatgggagaggagagggttaaaaacagctgggactcagcctgctggcaaacatgtggcatgtggcatgtcggggcaactgcagctcagcctctggagccatgtgagcaatgcacgcaggtacacgtgtgacaagctaggtcacctagccatgttcaacaggcatgtgcacagccacgaggaatgcccagccgtacaattaggcacacaggacatccgccatgtgtagacacagctgtggacatagctggccaggacatgcgacacacgacgtgctcatagcacagggagaagggcccatgaagtctggttggaactcagcacgtgtgtctgtgtgcccacctgagtctggactgctgcccctctgacactagctgtccccttgaagggtcggtgccttatctgtcctgacagaagagacagtgttgcttctcacttggggctcgcagcctcctcctcctgcctcgaactgaggatctgttgggtccagtcatcctggagagatgcggccagtttctttctgacaggtctcctcctgcccgcaaggaagtggggtgatcacagggcgcaggtggtctctatgacagctgcatcctctccagccatggccctgaaccctgcctataatcccaccattggctctcagatctgcctaagcctctcagcccccttgacgtcccctcccttaagcgccctccgaaggccacccgtccctcaaagctcctcacactccatgcccgcagctccctccacccggcgtccgcaccagcctcccagccgaggtggggcgggggcgagggggcgcgcactcctcggcgctccgggactgcagggcggggctgcagggcgggcggggcccgtgtctccagcgctcctataaagggagccaccagcgctggaggccgctgctcgctgcgccaccgcctcccgccacccctgcccgcccgacagcgccgccgcctgccccgccatgggtcgacagaaggagctggtgtcccgctgcggggagatgctccacatccgctaccggctgctccgacaggcgctggccgagtgcctggggaccctcatcctggtggtgagtggagggagccggggaagcccttctctctccagcccttgcactccccaaactctcacttccccgaaggggctgtgttttccaaggtagcctggacccacctccccagctgtgacccccacgcttaaccgcggaggatcaagctgacttccaaagtcctcttccccacggttctaaccccctctctgacagctccgactcttgccagaatgacagctgttactccccagtgatagtgccgatcgtttaccctcccacaagtgactcagccaacaggctgggggcagcggtcacgcttgcagtctgggacagccagccacttcccctgcctcccacacccctccagattcccagaatcccagcccccagatgtaggggagggggcggaggcaaatgagccattattaggttatttgggtcctgggtgt

SEQ ID NO: 132914 - DNA, 1023 bp, Homo sapiens
tatggcatctgacaacctcctctacccccgaatcctgttagctgaagaccctattttcctctgcccagctccatactttgggggaggaaagcaagaaccccaagcctaaggggtccatatggcatgttatatcaatgaaatcctcagggctgctcagtccctgacctattaagtcagatttaggctagccagcccccctcccccaagtttacatgtaacccccccaacatccggtacttgctttatgagtcacagattaatccaggtgagtgataagggcgaggggaagcctggggcacgtgagtcacccgtacccttcacaggaaaggccaatctgctcatctacccctgagagggagaaggaggaggcatctcacactgccccagggaaccaaggaggaccaagaagaagggtgtttcaaaccagagggagacttcctcttctacttcagaaatgaatggggagtataattttctggtttatatcaggccaagatgtgtaggaacttgtctagggtcacacaggaacttgtggggtacagctactgagaatctaggtgtcctggctccaggcaagccacctgcttgaacttggctttcctggggccaaggggtggagtgtggaggaagaaaggactagaaacgcctgagctgcagacctctccagtggggcaggggagtagggaaaagccaggagcctcacctgttttgggccacttgccagcctaaccccttctccttcttcccaagccttttatttatttattattattatttttttttttatttgagacgcccaggctggagtgcagtggcccgatctcggctcactgtaacctccgcctcccaggttcaagcgattcccctgtctcagtctcccaagtagctgggattacagacactcgccatcatgcctggctaatttttgtagttttgtagagacagggtggggggcggtttcaccatgttgcctaggccggtcttggaactcctgacctcaggtgatccacacacctcagcttc

SEQ ID NO: 132915 - DNA, 1053 bp, Homo sapiens
ggacattggacctctagagcaagatgtcagtaggatgacctccaccctccttggacatgaatcctccatggagggcctgctggctgaacatgctgaatcatctccaacaaaacccagccccaactttctctctgatgctccagcattggggcaggggcatggtggcccatgtagtctcctgggcctcaccatcccagaagaggagtgggagccagctcagagaaggaactgaacccaggagatccatccacctattagccctgggcctggacctccctgcgatttcccactcctttcttagtcttcttccagaaacagagaaggggatgtgtgcctgggagaggctctgtctccttcctgctgccaggacctgtgcctagacttagcatgcccttcactgcagtgtcaggcctttagatgggacccagcgaaaatgtggcccttctgagtcacatcaccgacactgagcagtggaaaggggctatatgtgtatgaatagaccacattgaaggagcacaatgccctcctgtgttgatgccacttcccagggtggagacagtggaaaagaaccgaggacaggaaaggattgggtaggtgaaggggtcaggggactggtagtcacccaatcttggagaggtgcaaaaagcactgggggctacccgttagctgcatctgccctggctgtttgcccgttcatgtcacaaactgccactactatgtacctgcagtggggttgcagagatgggggagactcaagtcttactccccaggagctcccagggcccaaggaggagaatgctgcctcctttcagtctggtctacacccactttctggtagcctctctgcttcctgtaattctggctgtttttccagactcagctcaaatagtgcccctccttaagcccatccctcgcccccagcctgaggtgatctttccctcctctgaactattagagcagttactgtctgttcagttcgtttggcaggcacacacagtggcataaattctattgttttgaactctgatttaaaattaaattgcagctgggcgt

SEQ ID NO: 132916 - DNA, 1820 bp, Homo sapiens
ctaattatttttgtagagacggggtttcaccgtgttagccaggatggtctcgatcttctgacctcgtgatccgcccacctcggcctcccaaagtgctgggattacaggcgtgagccaccacgcccggctcgtaaaatgggtattcttaacagagctaagttaaggtgatttaagtggttttggcttgagcaactcatatggagttgtcttagcaaggaagacatagttatgggaagattgggagtttggtttcaaacatatcgatgtgttaaaatgtcttctagacataaagggtacatgtgaggaaggcagttgaatcagtatgtgtccctgtctctgcccccacagctcactgaccaggcatggctcccagctggggttcgagtgcccctccaccaagtgccctatgccgtgaagggctgtttccgcttcctgcccccagcccaggttactgttgtgggcagctaccttctgggcacctgcatccgaccagacatcaatgtggatgtggcactgaccatgcccagggtaaggtccagggtttaggggatagaggcccaccacctgactacctacaaatcctggatccctctttcttatctgccgcttgccaggggattgaagtcagaattctaaatcagaagagcagaccattgcaggcatcctgaaggcagcttagatccctcgggccagttgctgtccttttggagctttgctctccagatatgagaactgggcctagtgttgctaaccgtggctcaggcacttctgtcagcagaggagccctggctctctcaccttggtttcaccttggcccacagctccacaagcacttatgtgcctggccttctcttctcccctggcccctccaggaaatcctacaggacaaggacgggctgaaccagcgctacttccgcaagcgtgccctctacctggcccacttggctcaccacctggcccaggaccccctctttggcagtgtttgcttctcctacacaaatggctgccacctgaaaccctcactgttgctgcggccgcgtggtgagaggcacacattgggctgagggcatagcatgggatggtaaatctggaggagaaggcacagaggcacggaggcctcaagtatggggggacaggatggggagccctctggctccaagggctcctgcagagtctcagcactcactgtctctggcaggaaaggatgagcgcctggtcactgtacgtctgcatccgtgccctccacctgacttcttccgcccgtgccgcttgctgccaaccaagaacaatgtgcgctctgcctggtaccgagggcagagtcctgcaggggatggtgagcaggccctggtgttgaggtggagctggagggaagaggtgtggggacttttcctctcatggcttcccttttcatcccacaggtagcccagagcctcctaccccccgctataacacatgggtcctgcaagatacagttctcgagtcccatttgcagctgctgtcaaccattctgagttcagcccagggcctgaaggatggcgtggcacttctgaaggtctggctgcggcagcgggagctggacaaggtgagttgggggtggcgcagcctccctacctgagcgcctgtgtgatgggcaggctctgacctcagcctctccctgtctctttcagggccagggtgggtttactgggttccttgtctccatgctggttgtcttccttgtgtctacacgcaagatccataccaccatgagtggctaccaggtcctgagaagtgtcttgcagtttctgggtgaggcaactaggtggggaaaggccaggggc

SEQ ID NO: 132917 - DNA, 1202 bp, Homo sapiens
ttcataatcatacttctcattaatacttcttaaacattttggccttccaggccttttcttgcttgttggtatgcatatgtgtattaatttctttttacttccattcccacttctattcccctctgaatccttaggcaaacattgtagtatgtttgttcgtatcctttggtaggcactctttttaaaaacaattaaaataaaaatttttaaacaaccacaaacttacaaattcaaagaactattttcctgaaccatttgagggtgagttgccaacctctgatagtttcaccattcctctgaatattttaaagtgtatttcctacagacaagtgcattccacatcattataattattatcaacaattatgaagttaataattctcagcccccatttagttttgtcagttataataatgttcttcatagcagaaggatctggttcagagccaagtatttgcttttagttatcctgtttgtgtagtctctttcagcctgtaattgttccttagtcatgtcctagactttcatgacctttatagtttcggcagtacaggtcacttactttgtggaatctccttcaatttgggtaaattttccctatgttctttatattctttttaggtggtacatgattttgatttgtctcatttctggtgatgtccacttgggtcacttagaagatgtttgccaagcttctccactatcaagttactttttccttgtaattcatgagtattttgtgaggaggtgctttgaaactacataaacatcctattgctattgaacttctaatttattcatttatttatatctcaatggactcatctcctatttcattaaatgggtagtaatggtatacattcacataaagtgtgttttacatgcatgcatattacattggcataaatagtattattttaatatataactatataaaagtattaaaatattatctacatcgagaaagtcatatctagaagggtcaggataattatctgattggtagtaagactccaccgtaatgagataggtggggttcaacatatttaattaggccgggtgcagtggctcaggcctgtaatcccagcactttgggagggtgagggtgaggactgctgagaccaggagttcgacatcagcctaggcaacatagtgagaccctgtctctacaaaaaataaaaaacattaaccaggtggggtgg

SEQ ID NO: 132918 - DNA, 1014 bp, Homo sapiens
aatagcatcatttttaccagctcccacatcaagattgccttgaaactaaatattttaagctttttcccccatgccatttaatttgtaatttttaaaataaacagtatttgaaagcttctaagacatctgctttctgtaggttggaacatgtgaccagttgaaacagggccttctatcaagttcatttttatgctttgtgcattacccttatactagaatcacttgtgcattacccttatactagaatcacagatttcctctgctttgcctgccagttagcagcttgtttcttagtgctgaaaaaaatttttttttatttttcttaaatgccttttatgaaaactatcaataaaaaatttatatctctattcccccaaggtcttaaatttaattgtatcagaaaaattttaagggagggagaatttgaaatctgattgtactatcttaaaaagcagaatacttttaaatactgtaaatatgggtattcatagctgatccttttttcctgtttctaggactatcctattaagtgtaatctcactgcttaatgagcccaacaccttctccccagccaatgtcgatgcttcagttatgttcaggaaatggagagacagtaaaggaaaagacaaagaatatgctgaaattattaggtaaggtttttttttttattacctcaagttatacaaaaccaaaatatattctggaaccaagggtttaaatcaaacttaaatatcctgtccattccaggataattttcctctattagatttatagtgtgggaagagaagatttctgcctgagcctaaagaactttgctgtttaccgagagaacagccactagaagataaggcagtagcagacctgattttctaggaaccagaacttctaggttctggccaggcatggtggctcatgcctgtaatcccagcactttgggaggctgaggcaggcggatcacctgaggtcaggagttcgagaccggctggccaacatggtgaaaccctgtctctacta

SEQ ID NO: 132919 - DNA, 1433 bp, Homo sapiens
catgcaaacaacaaagcatgacattccgcccactaagtcaatacctgttctgattcttaagtcgccgacctattggcccttacatgaatcggaggacagccagttgacgaggtgattctggctataattgatccactgctttaaactcccttgatattaacagtgtatttcccctcctaaaaagtcaaagtttacttcaaaattgtacccagtgggttgaaagcatttggtgtagtacagggtatctgtcagatgctttcaggcaggtactgaagtttggagagctgagtcataagtaatattgattatttaaggccaattataaatctgtcttaaaaaaagacttaccgtaaaccatttctgtgtcaacctcccttcaggaaacaagtttcagccactaaggccgaagcagaaaaggatggagtgaaggtccccacaaccctggcggaatactgcatcaaaactaaagtgccttccaatgacaacagctcagatttgctttacgacgacttgtatgatgacgacattgatgatgaagatgaggaggaggaagatgccgactgttatgatgatgatgattctgggaatgaggagtcgtgacgtgctccttcagtgcccctgtactgccctgccatctcaggccaaagggaggggagcaagtggggacctggccatggcccctcagcaaaaacctattcacagcgggtggggaaacacacacagctcctgctgactccccttatggatctcagtttgctcctttttatggacctttaatggagagagagtaaccctccacagaatgtctgaattcttgcattctttacccttccatcactatattgattctttttttaaaaaatatgaacccaaactcccgcctcacttcgtctctacagaatgttcacagcaaaacacgtttggtctgtttttagattcttgaagaattcaatagtctttcaagatgtttaatgtgtttaaagctgggaacctgttgggagttcacaagtgctgcatatactgggtagcaaaagaaaatggaaaaaaacccacaaaacaaactttaaaaaaaaaaaaaaacaaatttgccaaggtttagctgctcatttacattagtgtgtgtgcattcgttcagccccatggtggtgaattctgtttctttcctttcctaaggctgggacatggtgggcatcagggactttgtgctaagcctgatgaaatgtgctccttcaatctccatgaaaccatcgtaacatggaggcctcagctgctctgaggagagaaatcagactttgttttttgaaatcgattgggatcgaaagcctgaaataaatattcatactttccatagaactgagcacttggttgctatttattttaaaggcagggttatttccccccagggagtggggcaagcggggaagttgggatga

SEQ ID NO: 132920 - DNA, 1202 bp, Homo sapiens
aagggctgctgggaagaagtcatgtgtttgggagtttgaagagtgaaaaccctgagatcagaatggaaggaggagctaaggaagtaagcgtcacctactctggccatcctaggatccctcctgccccgtccctaatctgccctttggttctttctgagttacgagccaaaggaggagttgacactagtgcccaggggtctgaaataggactacagtcagtccttgctgcattttccttctgaaatctgattttacattatagcggtttcctccaaataatgccctcctatgatctggtgcacccccataacaaccaaaaattaccttcaagttctgaagtctcctggatggtgaaggctgctggatctcaatattgattgaagcaacacgattgagatctggaaaatcaaagctgcagcaagtgcattgcaggaagatctagccttatctggcctaaaaactgcctgcagtcaactccctcagccctgccacaatttctatgcataattctgcttgcactccacagcctaagtatgttgaaaggagaaaaaaagttcagatcacatccaatgaagaaggcggtaactcgtctcacacacatccaagtttttcactatcagtataagcagctcgatgaaaaccgaaatcttaacacatgcacctaggattaatactgagtaattaaaagtggctacttaaaaaacaaaaacaaaacgtcatggtacgagtgtatttttgatgggaaggccatgctaaatctataaaacagatgtttcctctcccaacagtggtcaccagtagtttcaactttttccccccagtagcatcaaccaaacttagcatagtgatttttaactctttgctcccacacgcactcatcccaacttccccgcttgccccactccctggggggaaataaccctgcctttaaaataaatagcaaccaagtgctcagttctatggaaagtatgaatatttatttcaggctttcgatcccaatcgatttcaaaaaacaaagtctgatttctctcctcagagcagctgaggcctccatgttacgatggtttcatggagattgaaggagcacatttcatcaggcttagcacaaagtccctgatgcccaccatgtcccagccttaggaaaggaaagaaacagaattcaccaccatggggctgaacgaatgcacacacactaatgtaaa

SEQ ID NO: 132921 - DNA, 1086 bp, Homo sapiens
tttccccttccaatcagtttcttacaacatgtgccccaaacgtaaggaaaccagcaagtaaagaagcaatttgccagggtaagggaaagaaggttctacaaaaaagtttgactaatagaaaataactctggaatgattgataaaaggagaaggggggaagactgaaagaatcaacagcagaatcatatacttctccacccagcctcaaaatacacagaactgaagagcatctagtgaggcctcaattagaactaaaaggaatctaaaaatgcaggattttgagttcatgtcacatcaaataataagcaaaactgtacgtacatggttccggattgagcctgagacctccactcccagaagggggaaaaaaaattacaaactcaagtattttccacagggatgtgttctcagggacagagctctggaaccagcctctgggtttcgttcagtcagtctaaaataccagaatgtccacctgctagcaagagacttacccagtcttctggaactgattgtactcatcagaggcaaacccagcccttgacacttttaacaccccaaagggctgaaaggtacaacctccacttggcgctccggctccctgagtcaatgtctaacagaggccaatagggcctgatggaacagctgtgcagcagagcacctcccgcaatgccagggtgctggggctgccctgggagtgagatgctttagcaaaggggaatgaaaggcttaattttagggctccaagagaataagaccaagctactggctgtaaacttgcatgggggtttgggggcattttgggggaggtaaatcagcactgtgagaggctttggctccacaagatttgcaggttaatctggaagcattacttacaaagtatggggagtaaaaaggtagttccaacatctatgagagtttgtaatcaggtaacttgacaatgtattacgaagctgctctgttccatggatctgactaaaatcactagattctgggtgcaagtagcaaccctggccctgtggagatcacagattctgggaccaggctcaacagtgtcccctaagagccttgcttgttaaacagtcc

SEQ ID NO: 132922 - DNA, 1261 bp, Homo sapiens
agtaatgcttccagattaacctgcaaatcttgtggagccaaagcctctcacagtgctgatttacctcccccaaaatgcccccaaacccccatgcaagtttacagccagtagcttggtcttattctcttggagccctaaaattaagcctttcattcccctttgctaaagcatctcactcccagggcagccccagcaccctggcattgcgggaggtgctctgctgcacagctgttccatcaggccctattggcctctgttagacattgactcagggagccggagcgccaagtggaggttgtacctttcagccctttggggtgttaaaagtgtcaagggctgggtttgcctctgatgagtacaatcagttccagaagactgggtaagtctcttgctagcaggtggacattctggtattttagactgactgaacgaaacccagaggctggttccagagctctgtccctgagaacacatccctgtggaaaatacttgagtttgtaattttttttcccccttctgggagtggaggtctcaggctcaatccggaaccatgtacgtacagttttgcttattatttgatgtgacatgaactcaaaatcctgcatttttagattccttttagttctaattgaggcctcactagatgctcttcagttctgtgtattttgaggctgggtggagaagtatatgattctgctgttgattctttcagtcttccccccttctccttttatcaatcattccagagttattttctattagtcaaacttttttgtagaaccttctttcccttaccctggcaaattgcttctttacttgctggtttccttacgtttggggcacatgttgtaagaaactgattggaaggggaaatgtgcagctctccactggaaaggaactctccacccctcccatcctgataaaacaaacaaggtttacatttacaactaaaaggattcagatgcaattttcaactattctgaaaccagcaggacacacctgactttaatagttttagctgaaattgtagatgttttgcttcagtttaacttatgagaaaagattatctgacggattttgtgttgacttcccctttagtggtttattttgtctttttctgcccatctgtctactaataaaatgtgaaataaaatacctgtattgctacttccccatgaaatgaccctcttctttttttaccttgtgttaaagaaaactaaaaggtggtctcattatcactgttaagtttgcagattacgct

SEQ ID NO: 132923 - DNA, 3671 bp, Homo sapiens
ggctttgcctttcctcaggggccaggtgtgtccaggagtgcgaggccctggatggtgagtgagggtcaggtcagacctcccctcctccacgaagctccactgtgctttgccgtctctgtctccacactttgttgtatctgccatacttcccccaagtcctgggccaggggtgtccaatgttttggcttccttgggccacattgaaagaataattgtcttgggccacacataaaatacactaacattaaagatagctgatgagcttaaaaaaattgcaaacaaatttcatgttttaagaaagacgaatttgtgttgggccacattcaaagctgtcatgggccgtgggttggacaagcttgtcctaggccatgtcagtgttttgagagcagtgtaggtggtgacaggccagttctgggcttcacctggggtcctgcttattcccgtgcctacctggcactgccccctgtccccccttaaacctttcaggcccctgcacttctgttgcctcctttttcaggtctgctctgtttagtcagctttcctagctgctctagtctctcacacagaaaagccagcgaagttggttcagcccgaggcattcacacaagcacctgcctgtggtgtcaaatggatgtgtgaggcttggtctccagcagctctgcctggtgaagctgcagggttggccggtctgtgtgcttatgtgttaggcaggccgcctagttgcacactcttccgaggggcaccatttacttggcgttccctgggactgctggctctcaggcatggagtctgtttcaggagtgtggcgtcaccacttccatgtgctggttctgctctcctgggagtcaagcagggccagtcgctgatcaagcctccctggtctctcctaggactactatggaattccctttgctgcacccacagcgcttgccagccgagatgggagcctagctaataatccatatccaggtgagtttgctcaatggatgaggagtagcccggggccggcctagcgcgaactccaggagctgggaagcagcaacagcaagctgagagaggcctcttagtagcctgtgctgagctggcagccagacctgttcctgtttgcagaagccagtgtggcctttctctggttggaggaagggcagtggctggagtcagtgctctttcctaggtgatgtcacaaagtttggccgtggggactctgcatcccctgcacccgctaccacaccagctcagccacagcagagccaatcacagacccaccacacagcccagcagcccttcgtgaatcctgcactgccacctggctatagctacactggtcttccctactacacaggcatgcccagtgccttccagtatggccccaccatgtttgtgagtatttcagagggtgtgactgtgtctcctggccttgggttgctggcaggtggaaacctgggacctatcttccagcagggagggagggttgtgattccactccgtcttacctggtcttcagaaactgttcaggctggggacaaggtcacttttcccctgctgtgtttagatccagcatgtgttgcactaatgaaaacacaggtcccctgtggttgtgggtatgtcacctgctgccttaggctctggcaggggtacctgaccagcctcagcttgcctcttcctacactaatacctcatctgcttgcccccccaggtccctccagcctcagccaagcaacatggggtgaacctcagcactcccacacctcccttccagcaggccagtggttatggccagcacggctacagtacaggtgaggggtacttcccagacagagacacatggggttagacaggcttgcctggctcacacttgcctcttgtaccctgccacgctaggttatgacgacctgacccaggggacagcagcaggagactactccaaaggtggctatgctggatcatcgcaggcaccaaacaagtctgcaggttctgggcctggcaaaggtagtgtttacctctcctttccaggataaggcctggagtggtgggctcctgcctgatcccctctcaggcagggcaacccctgagtgatcctggaggtggggagcctggagctgggaacaactgctgtggggaacaactgcttttcctcctaggagtatcagtgtcttcaagcaccactggtctacctgatatgactggttctgtctacaataagacacaggtgagggacaaaggtgggttgggtgtataggtttttgagaggttacagcccaacctgaccttcaccattgtcttctttgccctgtagacttttgacaagcagggatttcatgcagggacgcctccacctttcagcctgccctcggtcttgggctccactgggcccctggcctcgggagcggcccctggctatgcacccccaccattcctacacatcttgccagcccaccagcagccccactcacagctgctgcaccaccaccttccgcaggatgcacaggtgagtacagtgatggaggcagccaccctactctgggccaggggttctgctccagccttgacagccttcccttctcctcttcctcagagtggctcgggtcagcgcagccagcccagctccctgcagcccaagtctcaagcctccaaacctgcctacggcaactctccatactggacaaactaaacccagaagagaggggtgggctggggcaaggcttatcctgggcaggagagaacacacgagcacgtatttgggagcccagtgccctttcctagaattcccgacatgtgtcagccatgcctctgtggggagtctgcctcccagactggctactgtatgtaatgtatttatgtatgtatttgtaaatgtgatagaagtctgggggggagttgggggatggcggcagatgttagccaggtctgccctccccattcaagccccttctccactgtagcaaaataagcacccccaccccatctgccttcaggtcttcttcacagcctgcactgcccagtgggccactaggggcagtctctggaagggctggttcaaggctgtttgggtataggggtcaggtaccaatgaagaatcacgacttgtctcactcctttggaaattgttttctttcctgtgtaattacttcatacctctgtttttgagaaactgttccgtttgtcatctgtcatggtctccttccaccaaatcttcatctgggaatagcagcggtatccctccacccaagtatggccacctgtttgtcttcatatagaacaggggcttctggtctggtcatgtccctagagacttactagagactggctgaccatgaaaaaaaaaaaaataatctgagttattcagccagtcagctcccctttaaaaatctaaggtatctccaagcaacacatctccattctagttgtcttgaaccacgtgggcaactgtttcaggggttttctcttgcccaatccccacctaataaagttctgagagcatgcatggtctctgtgtggtgtgactgaagggcagctcagggcagaagccctggacttcacagggctaaaggagatcccacatggtcatagtcttctgacacaggctataaaggcttgaaatggttttcctttttactggaccctcttggcccaaatcacaatggctgtaaggacagctaaacctccttaca

SEQ ID NO: 132924 - DNA, 1081 bp, Homo sapiens
cctcagtgtggtggccgggctttctgtctccccttcactgctttgtagaatgaccctctgcctcattcggccactgcccttctttgaacccatctggggtagctcagtgactgtgcctcctcctgaagcagctgaggactctcactctttgtggtgaccatttcactccatttgatttttccctctatacaggcaaagcacccccaaacttacctcagggggtgcctcccctgctgcacaaccagtacctcgtaggtcccggaggactgcttcctgcctacccggtgagtgtatggcggaactcctggcctgcccagctcccctggcctcgggggctggcacctggcaggaacctggcgttgggcccaggttgcccaccttgagctgcccttccatccctgagcacccccgtctctgccccactgagccctggtggtcttcttccatctagactccgtgaaggcaggatctgttcccgtaacagctaatccagatcccattcccgggtgtgttagagccccccaaccttgttttgactcctagatggacctgggcttcccagggtgtggtatgtggttcctaaaatacactttctggttctcacacagatctatggctatgacgagctccagatgctgcagtcacggctgccagtggtgagtggggtatggactggtcggagcagagggttcagaatcttttacatgtcccccctcttatggtcttggctgccacactctctggcccttaggatcctctgcctgaggaacctctcagcaccactactgagaaagctgttttcatctggcggttgtgccaggcgtgaccatagctttagcacagagtatccagtgctcatccctgggaaacatgaaggcctttgggacctggggccctggtaggccatgtcccctgttaaatgttggtccttatcttccctcctccatcttgttttctctctcttttttaaaaagaaaaaccatatgacacaagacatggaggttgcttacgtggccctggagttttatactgtcttcctcttcctcagagtaccatatagtgtctttggtctgagatggcc

SEQ ID NO: 132925 - DNA, 1096 bp, Homo sapiens
aggggtaccttgtcaaacaggcataagtggcaggccatgcccttttaggtgggcactggtgaggcattggtggactgaaaggtgtcaccaggttttggagcaaaggcctctctcagcctcctgtttccagaccacagtggctgagaatcccaatagaagggaaatctccaaaagattgagacttacgctgggcttcctgtggcctgtgctcgcctcttctcagactgtttgctttgctctgaggtaggtacttgtcccatattcagatagtctgtgttcatttatgatccgaagttatcttgggatttctatgccctcattttggatgccaagcatgagcaacttgaaggatttttacagagagttgtggtcattaaagcttaatgttaatagttttgatgttcagtttatgtattgtatcctgatggctggaaccagctgctatgtgaggggccgcagtgagcactgagcacagagcctctcaccttaagggagcctgggtggttacatcattgcctgcctgctcagccttgagacttgggcccaagcgccaggccaggctctccccagcaccctcctcctctgcctccagatccatgtgtcctggcttttcttttgccagcatgccagtgtggagagcgcctcttcccaccagtcctcagccaccttctccacggcagcgacctccgtctcaagttccgcatcctcaggcgccagcctgtccagtagcatgaacaccgcgaacagcctctgtctgggtgggacccccgcgagtgcatccagcagcagtagcagggccgcgcccttggtgacctcaggtatttgctccagaggcctttcctgcccacccctgagcccctcaaaggtgcctgcttggcgtcccaggaaggcagtgcaggtgtcaggagagtctcaggcccgccgagtgcgctgcgtgttccactgaccttgaggcccaatctccccacccctgatggggatgaattcttccttgcaggattcctggcctctgcgtgcttctagcttttcagtctttcctctttgttctttcctggagccgagttgacattgtgacttggaggggccagggatgact

SEQ ID NO: 132926 - DNA, 2739 bp, Homo sapiens
tgacagaggaacttttgactctagcagtggtagtggcaggtttcttttgtctaggcatgggtcgagaactaaagtatctgggaagcagtgtacattaacctacttttcatttcccatactctcttctccctcacttcctcctccccttccctccccattttgtttgtttgtttgagagaggcttcctgtgaagctgttagcatcataatacaaggcccagggcggtatgttttggggtcttagttttaggtgaggtgtatctgtggtgtctttatacagtttatctatgaacaaggtttatatatggaagagactgccaataaaaagaaggcctctgtaagaactgacctaggtgtaagttgaccctttcattgcttatgtttgtttttgacctgcccttcctttagagactcaagtgctttccctgggttttagaagggtcaaggttgctcctctttcctaactggaaaagacaatgatgttttatttccaagcacatatctgagttgtatgtgtggacagcactgagactgagtctttccacagctaggactgagtgtctccacatcctttctgaagcctacgaagctcatttatgtgctctgagatacatctattcaagcacataccaaggaaatgctcactgtgcatttggaagtaggtgttggacagttggactgcagatgttaggtgtctgtgtctctccacaacataggcatcaaccccaatctgccttacgttggccgtgagcattggtagagtcagcctgacttggcggaagcacgtgtaggtggtcttgcctgttagcttcttactcccccttgctgtgccctttgaggagtttgcctcacgttataattctacatattaggctcagcacctgtttttctttctggatgcatctacagcttaggttcctttaggtgtgaaaagtatgtccccatataggataggttgggttataaaggtgtcatttcctattctttgctgcatcttgaacagctgaccatggtgtggtgtcctttgatagtgttgtttgacagacaaagggctatctggcgatatgcttggcattttcctggggaatgtaactttatggacgtctcaactgaggctgacatgtcacaagatattgagcatattttcaggcacttaggattggttttagaaataaacagatctgcttcttacagctacttcatctgttccagctccaaagacaacaggccctccctctgccctcccgtctgtgagctccctgcccagcaccacctcctgcactgcacttctgccgtccacatcccagcacactggcgacctgactagcagccctctctctcagcttagcaggtatggggaaggtgtgggcccaaagtgagaagtaccttggggcaagtcctggagctcctgtagaaggttgctttcatgaacagagcacacttgttgtctctgacgtgatgtcctgggcttttgcattacgactgtagcttaggttttggccaggttgttccttaaaaccaccagatatggaaaccttgcctgcttgtaccgcctctgctggcacagagcactgggtcccctgggagtagggtgaggccagcagctccctcctacctgtcttcaccctccagagggtgcctgagcctagcctctctgggcatcgctgggcccatgtcactgaggtggaatgagaatgatggatttctgagcaggtgtctgacttgaactttccatggctgaagaaacgatgttattagaacaaggtgtaggaaaatgggtggcgttgctacctgtgtcttctgaggagtgttctccatcactctttagctaggagcaaaagtggatttgatgggaattggcatgtggagttgagcataggaactttgatccctcgttcacagattgaatgggattgtcaaggatgaccgtgttcttagtgcaactctgtcttcacttttcgcatctgaggagcaaatggatgtcgttgagggaagctggctctggagttttccagacctcatggcgagtcattcccgtccaccaggaccccatcactgggctctgtggggataaggaatgaggatgggtctgaagccggtcctgtgctagggactatgataagtttgaatctagctcactgacccacgtgcgtcttgttcatctggagtcacttgttcaggtggacatacggcgctctgttttgtcttctagttcgctctccagccaccagagcagcctctctgcacatgcagccctctcctcgagcacgtcacacacagtaagtgtctgcgcggcttcctcttcctccgccatgcttggggagcctggagcttagtcacatgcagctggggcttcagtctgatttttagtgtctgataatctagagttgcttggctgaaatgtcttgatggcatgatctggttcgagcttctgatttcctgggcaccatctggggacatcttgctttctaagtttgtagcgcctgggaagaatcattgctccagaccttatctgtcattggcaggagtgtcaggtggtgaccttgctcccaggaatttgctgtttgatctttcctcgtgccttctttcctgactcagacgcagagattgcaagaaggtcaatgttggagaagggagtctagatggtggagggcaggagtggaagcaaacatgcactgccgagaagccaggcaggagggctggagtcggcgcgccagctttaattttcctcatatgccaa

SEQ ID NO: 132927 - DNA, 1132 bp, Homo sapiens
gaatcttcttattttttttctttttttctagacagagtcttgctctgtcgccaggctggagtgcagtggcgcgatcttggttcactgcaacctctgcctcccgagttcaagtgattctcctttctcagcctccagagtggctgggattacaggtgcccactgccacgccctgctaatttttgtatttttagtagagacggggtttcaccatgttggcaaggatggtctcgatctcctgacctccggatccgcccacctctgcctctcaaagtgctgggattacaggcgtgagccaccgcacgcagcctaagtattcttaaagatgtccccctatctctcagttaaattaggtgggtctcatttgggataataaattgatgcagtagttgcatctcgtgaagctgtttatgtttttttttttttatgaagctatttaaagtaacaaaattatgttgaatatttttgactcttttcagtgagcctttgaatacatctttatcaatgaccagtgcagtacagaactccacatatacaacttccgtcattacctcctgcagtctgacaagctcatcactgaattctgctagtccagtagcaatgtcttcctcttatgaccagagttctgtgcataacaggatcccataccaaagccctgtgagttcatcagagtcagctccaggaaccatcatggtaagtggtattttagtttttttctcagaagatgtccgtcttatttggaaattaatgtttggttaaattatgcttcttggatatgattttattttacaaattgactaaccttttgagtagaatccttatagttcattgagtttgtttatagtgggcatctctagcacccatgctcttgagtgtgtggatagatctgcaggttcatacactttgtggagaaaaccaagcatgcgtgtagtatgagcactttggctgtagtactgggtacttctacattgtctgaaatatctctgaatatttcatgtactgctttctctctgattgccccatttgctttgaatgtatttgcttcttcatcactgttaggtatttttgtgttaaaattatgtattttctacctagtttttgttaataatactggactatagataaaggaaccaga

SEQ ID NO: 132928 - DNA, 1221 bp, Homo sapiens
cagactagtattagagggaatgggtttgtgctgagagccacagatccttatttcaagtacagatttgaagatctggctcagagaactgttgttcttgagggttttgctgtatcccatagttggaggatgcatggttccttgaccaggtgatactttcatcattggtgagtccccaaaaatagagtagtcagctcagtgttcacttcccacccaccatcacaactcccccgcattgctcttagatgcaggtggtgatattaatgccaaccattcctgtttaacttttaatttctcctttttttttttaaatgagacagggtctcgccgtgttgtccaggctggtcttgaactcctgggtgcaaatgatcctcctgtcttggcctcccaaagtcctgggattacaggcatgagccaccatgcccagccaacttttaatttttcttagcttgttttttttctttctctttttagaaaagtcttagcctattttctccttgtttctcactccttcttcttgccagtattgcctgggaacctaaatgcttgtttggctctgttataggcctttgtgacctggaatctgtgacctctgttcctgacacgacagctttgctttttcagatcccagcttctgcagtggaaatgcctggttcagcagatgtcacaggattaaatgtgcagtttggggctctggaatttgggtcagaaccttctctctctgaatttggatcagctccaagcagtgaaaatagtaatcagattcccatcagcttgtattcgaagtctttaaggtactgaatttagtcctttgttatgaagcaaaatagaccctaagagagatcaactggtggaaaagaatacatcctgtggtaatagctatcctcagtgtttatccagaccttccatcatctccataagaaaccccatacctgtagcagacagtctcagtttcttcattgccctgccccttagcaaccaataatctgtctctggatttgcctacctggacatttcatataactggaatcttggaatatgtggccttttatgtctgatctttcacttagtgtaagttttcgaggtacacccatgtttaatgtatcatttttattgccaaatatttcattgtgttgataataccacattttattcattcattagttggtggacatttgggttgtttgctctttttgactatagtgaatgatgctgctatggaca

SEQ ID NO: 132929 - DNA, 1099 bp, Homo sapiens
tttctaagttatattttagtaattcatatgttttagattataggttttaacatacttgtgaaaatacttgatatgttttaaagccttgggcagaaattctgtattgttgaggatttgttcttttatcccccttttaaagtcatccgtccttggctcaggatttggagagcttgcaccaccaaaaatggcaaacatcaccagctcccagattttggaccagttgaaagctccgagtttgggccagtttaccaccaccccaagtacacagcagaatagtacaagtcaccctacaactactacttcttgggacctcaagcccccaacatcccagtcctcagtcctcagtcatcttggtaggtatacattgtttgtgggtttgcccctactgaggacgtttcaagctttggcagagtgtgttgacttgtgaagactaatgtggaatttgtccagagatgtttctttttagtagaactcttgcagtttctcagttaaatcagtcttcctttgttatacaatacttgcatttatttgtttttgttgttgttcttgatagtttcattattgttggtagtaattgtggtggtagtacatgccttgaaaagtatggtaaaagcatgcaaatatgaacatctaacactttgtgtaaatgcatggacagaattttctgagctctcttagaagagggtggtgatagaacatagaatgtggaaaacattttaagacttttttttttttttttttttttgagatggggtcttcctgtgctgcgtaggctgatctccacctcctggcctcaagcagtcttttaatctcagccttctgagtaactgggattatagatgtgcaccactgtatccagcctagacaatattttactctattattttattttttttttttttgagtcaggatcttgctctgttgcacaggctggagtacagtggcacagtaacgcgtcactgccatcttgacctcccaggctcagtccatcctcccacctcagcctctctagtaggtgggactataggcacatgccgtcactcctggctgatttttttgtatttttttaatgtgacaggggtttgccatgttgcccagg

SEQ ID NO: 132930 - DNA, 1066 bp, Homo sapiens
gcagctccactgccgtcaactcctgttctcctcagagcctggtaactcacttttatttcagtgtgggattttaagaaatatacccattagcaaatgtattctagaatatgatacatgctttataattactttctaaatataaaaatatctacagtaaggccgggcatgatggctcatgcctgtaatcccagcactttgggagctggggcatgaggattacttgaacccaggagtttgaaaccagactgggcaaaactctgtctctacgaaaaaagcaaactaacaaaaattagctgagtgtggtgttgtgtgcctgtagtctcagttacttgggaggctgaggttggagggtcacttgtgcccaggagtttgaggttgcagtgagccatgatcatgcctctgtactccaggctgggtgacagagcgagaccctgtctctaaaacaaaacatcaaaaaattctacagtagatcttagtccagaaaacaatgatgtggtaatttccaagcacatatctgatgattccatgtggaatttaactacctgagtttcctggacaaagataaaaatttttttatggtttgtcaaattctttgaactgatgatcactcttgagattgaaagtacccctttcttctgaatgatgttttccttgtgttttgtttcatattatgtctctatagttagtatattcaatttcttgttttccaattaaatgcgaaagtttatcagaattgacttgctataaaatcatgtaaaaacagtctgagtctgcctaggcgcttacattttttgcttttttttccccctaagaccgtaaaataagctacattttcttaaaatgccaaatgattaacagaggcccttatagtttggatgtgtttttattgaaacagtgtcatttagtactgtatgactgacttccaatgtgtgttaagctcccatccagaaggaacttcagaaactgttagtgaaggctgtgaagataggcttatggaagtataagcttagatcatagcttatacaagaatgttgctttagaatggtgaactgaagttcctacccaa

SEQ ID NO: 132931 - DNA, 1019 bp, Homo sapiens
aaaattaccttcacttgcagccgggcgccatggcttatacttgtaatcccaacactttgggaggtcaaggtgggtgcatcacttgaggccaggaattggagattatcctgggcaacatggcaaaaccctgtttctactaaaaatacaaaaattagctcggtgtggtggcgcatgctggtgcgtgcctggaggcccagctactcaggaggctgaggcgagatgatcgcttgaacccaggaggcacagattgcagtgagccgagatcacgtcactgcactccttcctgggcaacagcgccagaccctgtctcaaaaaaaaaaaaaaaaaaattgcattcacttgaaaattacttgtcatggtcacttgtatatttcattttctttagaatagctgttatgcgaagtgtaagagactactgatgactacaaatgatcaggaagtcagtgttttgggtttagtagtatgtagaataagattaaatttttcaactttccatacagctttctgaaacaaaggtcttcactgcctcatctgctccagcagagaatcacatcttacctgggcaaaggtaaatactttttgccatcttatatttgttattcaaagcattacagaaatcttttgcctcaggaaaagtattttcatttttgggtctctttctattttttccctttttatccaaggctaacttttattttaccactacttggtaaatctgacagagcttcaatcattttctaattgatgtatccactgatgaatttgttagcagttgttgcagacatcatgttaaactttttttttttttttttctattttgagacgtagttttgctcttgttgcccaggctagagtgcagtggcgctatctcggctcactgcaacctccgcctctcgggttcaagtgattctcctgcctcaagcctcccaggtagctgggattacaggcatgcgcccccacgcccagctaattttgtatttttagtagagacagtttttccatgttggtcaggctggtct

SEQ ID NO: 132932 - DNA, 1209 bp, Homo sapiens
caacacttttgaaagtacttagatgtgttatggatgagtattctgtaagaactgtttgagcgcatcctgtgtactgactccagaacttaaagcagcagacttgatatgagcaagagtaatgttgaactttgctggagacctattaggaagccatgtagtagagctaatattttattaaaaggatgcttctctaaatttgataattcagtaatccacctgaaatagggtccaagacagatttgccttaaaatgaaatttgttgttttgaagactatatcggaagaaatcaaaccattgttaaatgtctatatttgtgctacatccatacttttcttactcatggcagaattgcttggatgtgacctatattgaagcaaaatccatttgaaacactgatttgaggttatgtagatagtgactactagtcaagttgcatttgtaaacattatttcaaagagaaggggagaaaagaaatattactgattttaccgagaatagattaagaacgtcatgtttcttgggttgtaaactaaattgctagtgaggcgtatgtatcttttttccccgcatagtacacaaaaaggaatcatttggactgagactgtatttgactttgtggtataaactttgattgctgttgtttcccaacaggggcttggaagaattctgtggaagagtggacaacagaagactggactgaagatgtaagtgtttgctgtcagatgagacctttctttttttttttttttgaaatggaatttcacttttgttgcccaggctggaatgcaatggcgtgatcttggctcattgcaacctctgcctcccagattcaagcagttcttctgcctcagcctcccaaatagctgggattacagatgtgcgccaccatgcctggctaattttgtattttttttttagtagagacgatgtttcaccattttggtcagggtggtctcaaactcctgacctcaggtgatacacccgcctcaacctcccaaagtgctgggattataggcgtgagacactgcgcctggccgatacctgtctttctttcggtgtttggtggggactttggtgcttggaagaaagagcctgagacatcttatctcatcttggcttcttttctggcatgtatcgtagccagggtttttgagggttggcttttttagcagatgcttcttaaaaggaacttagattttcagattttta

SEQ ID NO: 132933 - DNA, 1042 bp, Homo sapiens
acaaaatgttttcttctttatctaatgtttctgtaaaggagcatataaatctaagctgtaaaagccaaacttggattctgacttgggaagaaaatacctgttgcctatttatgccttatttttcagcaggactctcataagagctcttattctgccttgaaagattatacgtctccttgtctgctttaggatgcagaggaccgtgtttcaggaaaataaggctattataccagaatgtgtggaaggtccctaggcaacttctggttttcacatctgcatctccatggctggcagaattagttatatttaaataggggaaggagaggtgatgtcttttacagtggctgtgagaaggcactgggcttgtttggtggaagatcatgtatggttaatattttggcttaggtgtttgcttcttttgcctttattatttctttatttcaaaccccaggacatttaatcctgcagactattcagattctacatctacagatgtgtgtgggacaaagctagtagtttgggaagctgctcagaatggtgcagatgagggaactggtaagtgttctgtttttgccagagatgagttttaaatgtttgagctattaagagttgtatgttctcatacaaagatgaagtctaaatgtgctgatggaaaagaatgaaaaacaggctactgtcctacctctgaaactattcttagttggttcttaccacccaaagtctgtcacatacaaatctcatgatgacaaggaatttgattttcccttctgcaagctaagaaagaggctatataaggtaattggcataaatcagcacaaacccacactctgatcaaagtatgtcacagatatatagaatttctgaggagaagattttttactggaagtacttcccatttctaatggtggattctttggccagataatgtatgataatgtggtagatgatagatgggtttgtagcaacgttgcctctgcaggtttttctgtatcatgctgtttctggattatttattttctgaaattcttggggtaaatattgg

SEQ ID NO: 132934 - DNA, 1073 bp, Homo sapiens
ggagtgcagtgaggagatctcggctcactgcaacctccgcctgttgggtccaagcaattctcctgccttagcctctcgagtagctgggactataggtgcgcgccaccacacttggctaatttttatattttttggtagagacagggtttccgtgtgttagccaggctggtcttgaactcctggcctcaagtgatccacccgcctcagcctcccaaagtgctggaattataggtgtgagccactgtgcctggccaatttttgtatttttttgtatgttgcccaggctggtctcaagctcttgggctcaagagatctgcccccctcagctggaaattacaagtgctggaattacaagtgtaagccactgtgcctgacctcattcagtttttaagtcacttttgtttttgtttttcctgtttttgaacccgttgtttaaattgtagcctgtttgtcattccttctttgcctttaataggtgcttgataaggttatgtacaagaggtttggaaatggaaatttgatttttctgctcttttccccctagttagaggtgaagaaaatggaattgattgcaatcaagtggacaaaccttcagatcgtggcaagcgagcccggggtagaggtaagctagagtaagagggaagaaaatgctttcaattagggggaagaagcaggcagttgcgttgctggactgtgactagggatggcagtgtgttctgaaagaatagcaggtcatctaaaatctgatcatttgtttactgatgcctgtaaatgaactattttgggttatgtagttttgaagaaaccaaagggttgtttttggatgagctgagaaagccctatgaataatttaaaacttaaagctctaaccaaaagcattgacaaattataattgtattacgtttggaatacaatgcaatagggttttttaaaccttattttaaaaatactttattgctaaaaaaggctatgatcatttgagctttcagtgagttgtagtctttttgctctagtcctcacttctagctattttgaagtgtataatacgtaattgttaagtagtcatcttactc

SEQ ID NO: 132935 - DNA, 1020 bp, Homo sapiens
agctgtgggtagttaggtttgaaagatacgtgcatgtgccgggcgcggtggctcacgcctgtaatcccagcactttgggaggccaaggcgggcagatcacgaggtcaggagatcgagaccatcatggctaacacgatgaaaccccatctccactaaaaatacaaaaaattagttgggcgtggtggcaggcgcctgtagtcccagctactcaggagactgaggcaggagaatgttgtgaacctgggaggcggagcttgcagtgagctgagagggcgccatgcactccagcctgggcgacagagcgagactccgtctcaaaaaaaaaaaaaaaaagaaagatacatgcatgtgcctttgataattgtacacactttgaatgataaatgattaacagccgttctctctgatagacttcatgggagactgtagggtgtaagaaaaagaattttgcaaaagaaaattcagaaaacaaagagaatagagagaagaaaagcgagaaagaatcgagtcgtggacgtggaaacaacaaccggaaaggaagaggcggcaatcgtggcagagaatgtaagtacagactttctcctcagttttttctcttctttcatctcaagtgaccctcccgcctcagcctcccaaagttttgggattacaggcatgagtcactgcgctcagctttctcaaattttttcttagtttccatacattctgaacgactgaaagattagtccatagtatgctcataaattcgtttcctcaatgcagaatttgttctaatagttaacactagaaatgagtggcacctgagtagtttcataagcgcctcccatgtggtttcgtatcagcattgacctgggctgtaggcaggtggttgtgtagtgtgatgactcccttctgttatgagtcagacacatttgttaattttagaatggtgtgtgtgtggcaaagaaggggccaggggccatttagttacaggtagataaagctgttttatattctccatttatagacactcatggtata

SEQ ID NO: 132936 - DNA, 1050 bp, Homo sapiens
atagttgtgagccactgcggctggcctttgaagtgttctaatccaaatggtgaaagccagcatatggaatattgtccctgacaaaaaatttgtattggattttccatgaatgatgaccgtgtactcatatagttccacctcatatttaagtttaggaatcctgtgtgcttgaattaaatttgattattcagatacttgatcttgggtattctgagaatgttggtacgtatgtgtgtgctgctgattaatgatctgctccttggtcaacttggaggaagattgatttgtagttagattctaccagtgttagtgaaaagacatgcatggaatggccacaaaaaaataagtaaacatgtcctcattgtaaactcaagagtctagaagaggccatcttcatgtagaaggattatgtaattctgtatttgtatagaagaatcttaatatcaagtgccagttttttgtttgcctctaaccattttctgatatgttcactagcttatggaagtgacagggaaaaatcaggatgaatgcatagtggccctacatgattgtaatggagatgtgaacaaagctatcaatatattgctggaagggaattcagacacagtaagtattattaattgatttgcattgtttacatttgtctccaattccgtagcacattttcaacttcaccttgtttgggggtagggatggaatggattatggtgccattccatatttgttttaagttccagaaagaacgattacctgaaaagactgtttttgttatgtatggtttcttcatgaagtcgtagaatctgatgacttgaaagagaacttggtgatctactccagccttacagtttccaaaaatctctgtgcctgtgtatattttcaccacccccacctgaaaagcatctcttggctctgttgcttatgtttcttcatctcagtcctcacctctgattacttcttacatctctattataacagaaaaccaggatttgctggtatatgtatttgcttatgtggaatattaagttttcttttttttttttaatattgggt

SEQ ID NO: 132937 - DNA, 1036 bp, Homo sapiens
cacaaagttctaagcctgtgtctgggcagttgtttgcattaccttttattttttcttttattattttttgcctaccaactacctctaaagatttcattactttttaagccttttttttttttaatctttttaaaaattaaatagagacagggtctctctatgttgcccaggctaatttcgaactcctgggctcaagcagtgcttctaccttggcttcccaaaggcatgagccaccatgccccgccaagattttattattttttgttcttctgctttctcttgagctgatttcccccactctaccaagggaaagaagattcaagtaagtcattggccagttaagatgaacaatagctttaggtcgtttggtcaaaggaatgggtcctttatgttacttaatttgatgcttatttttcctatgggaacaggttatatatggttgagaggcctaaattcactgtcttttatttgttgttacttagtatttctagtgcttgagagccttatctgtttgacccagattttggaatctaacttatgcttttggtgttcaaatccttaacaattgtatgtactttccaggcaacagctgaacagatgcgtctcgctcaagtgatctttgataagaatgattcagattttgaagctaaagttaagcaggtatgtttctggcaaaggatatcatcatttttataatctattttgattgtgcttaaaaagataatttcagtaaagatttttgttttaaagtattacttctagcttctagtctcacctgaaatctgtatattggattttggacttgtgattaaaaatacctttattggtgggcaagtgaaggaattgaatacgttcacctgccttacaatataatctttctgagttactagtgtttacatgtgaacattgaaccagacatttctgtaagcacactgaggttttccgatacctgtgcatagaaagtatatctaacatttggcacagtctctgggaattgtgtttaatgttagagatgaactgaattacctttaaaaaa

SEQ ID NO: 132938 - DNA, 1038 bp, Homo sapiens
ttccagctctttgggaggcagaagtaggaggattgcttgagttcaggagtttgagaccagcatgggcaacacagtgagaccttgtctttatgaaaataacaacaacaaattagccaggcatggtggctgccatggttgctactcaggaggctgaggtcagaggagtgcttgagcctgggaggtcgaggccatggtgagctgtgattgtgccactgcattccaacacagagtgaaaccctgtttttttgttttttttttttaatgaaaaaatataaataccaaatacataaatagttttggtgttagatggtcactttatggatttttcaatttttcttgtgtttgacttgtaaagcttataatttaagaaactgtaatgatgggaagggatgagcatcagtggtgcttggattggaacaaggctacctgaatctgctggtatggtacattttttaggtttgaaacacagggagcagaaaataatagtgttagggaaaacaggcaaactcttcatacaggcttcttgcaacagggacactaacagtctactttcattttgtgaaaattgattatatgaattggagttatcttgtcatacccaactaaatttagagtcagtggaccaagggttacggtaaaaaagtgcttggggcacaaaccgcttgcccagggattatattgcaggccagctgccacaatgacatgctgtaaccttaaatccagttttacctactagctgttgagatgaactcttgtgactctaagtctagttttaccaaccgtgttcactcaccaatcagagcttaccagctcccaaaagctttagtagttccagtgagttttctttcaaaacaataggtcacatttctttttctaataaaactcccaaccttctttgtgttctttggacacactaggaggctaccctagtatgtgtatgtatgtatgtcctggattgcaatcctacttatatattctttctaaataaaaccttttttacttagagatttgtttctctctatatttttgactttaaca

SEQ ID NO: 132939 - DNA, 1082 bp, Homo sapiens
ccttgtttaacttaagaattaccagttgatcctgatttttcctcttttttcccaagctgtaccgacctcttgacacttcctagagctcagcctggtaacttccctattatactcttatgtttggtgctttgtttatcaaatatttattgaattgtttatcaaagaaaattatttttttcttgactcagggtattttataaagttaaaaaaaatacttaaagttctcattaaaatttattttcataaatatgctagcactagtgttactatattgttattgttaaatgactattatgtgtattggctatgctttcagaagtagtctgtctatcccttttatgaataaaaaagatattactgaagagaaatacagtatttgtgtcatataatacttaagctgaaaaagctaagtctgaataaatcagtcattggcatttaccttacatatggcaatgaatagtgactttatagttagaaatgtatgggtgaaacagtatcagaatgataatgtagaaacatatataagccccagactgccccctacagcaaaatgcgattattaataactattctgcttgaaatatttggtgagattctttcacccatcaagtgcttgtttgttaatattttaatcgggtcggtgtttctttggttttgtaaattgtgcacgtttacaaagcactggctgttctcaggcagttttcaagtttaaatattcttgcctttagggtcattatttgttcctggttcccccactctgccattactttttcatactttttccacaaagatttcagccatactccctgactttggtttatcttctactctgacatatctgcatgaagtagtttctgtctgaaatgtcttgaaaccagggatgttcttataataatacttactgtgcagtgagtggatagccacaagtaatccataattttactttttaaaaaaaaatgtttgttgtagctcctgtttaacacatctaccaccccaagccgccgcctgtactccttttctgtctgccaaaatccctccccacaatgctttattatgaaaatggtcacagatgaagaaaagtt

SEQ ID NO: 132940 - DNA, 1083 bp, Homo sapiens
ctcgtgaattgctgggattacaggcgtgagccaccgcacccggccacacaattgtttctttaagatttattatttacagctgacttttgcttttaggcatagcctgtttcttgacacattttaaattgggctattggcaggtaaaatcttggctgggtgcaatgttgttttggggttcaaatagcaactgcaagtagtaagaggcagatagcacttcatgtacagtgactacatgtagtgataaaatggttgctggttaaaattggtggtacttgagatttttgtttagaattgctaagctcgtaaaccatagacttagattgcagtagtcgaattggtttaacagataccagcaaaatgtaaaatcctcaagggctacttcttgagaatttgtattccagagagcttttatcttttattgtaagtgtccttgttttctctgaagtacatgcttatcttttactatgattgttttgcttaccatccctactttcttgcagattttctattttgtacatacattattttgtatatactgtatatgatgacttcagtgagcagtgaccattgtcgaggtgctcgggaaaaaccacagatttcagcagcacaatcaacgcaaccacagaaacaagtggtacaggtaagtttttgtggaactctttttttttttttccttttttttcttttattattatacttgaagttttagggtatgtggaactcttgtttgccttgtttagaattaaggaaattaagggagagcatatgatttaatgttttcctttgtaggaaactttaggattttggaccctttgtttaaacagtaggtgatggccgggtgcggtggctcacgcctgtaatcccagcactttgggaggccgaggtgggtggatcacttgaggtcaggagtttgagactagcctggccaacattgtgaaaccctgcctctattaagaaaatacaaaaattagctgggcgtggtggtgtgcgcctgtaatcctagcttctcgggaggctaaggcaggagaatcgcttgaactcaggaggcagaggttgcagtgagcccagatcacgccactgccc

SEQ ID NO: 132941 - DNA, 1043 bp, Homo sapiens
ctgtttcactgaggtatcttatcttcagaaaggtccttgaaaaaaacagcagttaaaccgggcatggtagctcaggcctgtaatcctagttctttgggaggccaaggtgggaggatcacctgagcccaggagtttgagaccagcctaggcaaatatgggaagatcgtatgtctatgaaaaagaaaacaaaaacggaaacaaaactttttaggcagttaaaacttttttccaaaactattcctttcatagagaatatctttgtagttttatcaggttggtttattcggccggagactttctttcctcattacatttagacaattttttcactttaatcgttaataggaagctttatattatattttgctgattttgtttctaaagaagttaaaaatgtagcagcagttctttacctgtgttaaaatctatcacatctttaattcactttgaggtgagataaatacgggtttcaaaatttggttggatagattgaagtaagcctggtgcttcctgcccctcaagaacttgagataggtatgtttgagtttctactggattatttttagaatcttttgctcttgtctgtttctattctgagaattctcttggaacctgttccagtgtagtagaactcttgggagtggaaagtgatagatgatggaacacaagtgtacactgaattcctatggtctggcaactgggtacttgttgtagaagcattcctatttactacacacagctccatttcccagaaaaggaggacatagaagttcctcctaacagtatgttagttgaaggtgttgatttttacggtctagtttccatgtctcagtcatttttacagttcagtggtggtaacaatttttaagggtcttgaagaatattttggtaacttacgcttttaccttgatttaatggattcacaattatcagaagttttttttttttggggagacagagtcttgttctgtcgccccgattggagtgtagtggcatgatctcggttcactgcaacctccgcctctcgggttcaagtgattctc

SEQ ID NO: 132942 - DNA, 1057 bp, Homo sapiens
tatgccaggccagattcttttgtttattttttaataaataaattcaagtggattctcctgcctcagcctcccgatttgctgggattacaggcatgcgccaccacacctggcttattttttgtatttttagtagggtagggtttcactatgttggccaggctcatctcaaactcctgacctcaagtaatcctcccgcctcagcctcccaaagtgccgggattacaggtgtgagccaccgtacctggccttggcctcagattcttaatctgagctttgtcttctgcaggtatgaataaatgaatttcctctgcagagaaggttgagaatattgactgttttcttagtagaaaatgcgggaacacagattagaaattaaacaaaaataatagtagtggtcacagaaatataccagtatagaacatatgggtatctgaaaggctgagaagctaggtgagatctgatctagaccagatctttgtcatcaggcacaagctttgcaggtgatgccaacaatagttatgctgttgtatagaagaagaagctgaattgggaactattatttatctgtgactgaacagttagccttacaacatagcataatagttaagtgcacacactgtagagccaaatgtcctgggtttgaatactgccttcaccacttactagctgtgattctctgtgtatcttagtttcctctctgtaaaatgggagtaaagtaatgtgtactctagagtgttggaaagattagtgacttaatactgtacatataaagtgcttagaatggtgtctggcacatagtgaatggtatgtgctttctgctagtattgtcattaccattggttttagattttgggaatgagtggacatatatagatgaaggacctgagacccatccttgccagtttgagatagaccctgcaccactggtctcatgactcagtgaacagcatctctggacattcttgatgaagacttgcttctttaacataaattgtgtatcctgtttttagtagttgaacccttagcccattatgtaattcatgtcatctgaattata

SEQ ID NO: 132943 - DNA, 1037 bp, Homo sapiens
tctgagccactacgcctggccctatgtacacatttttaggtgaacgtgttttcagttctcttgggtgcatacccaggagtaggattgcttggtctttatcataactgtttaatttctttaggaactgttaagagttttttttattttttaggagatgtggtcttactctattgcccagtctggagtgcggtgacatgatcatagcacactgcagccttgatctcctaagctcaaggattcctaccacctcaacctcctgaatgggtgggattccaggtgtgcgccaccaagcgtggctaattaaaaaaaaatttattgtatagacgaggacttgccacgccgcccaggtttgctcacctcctgctgtgcggcccagttcctaattaccccagtctgcagcctgggagttggggattggggatccctgctttatagtataggcttttttgcttttttttttcctttttgtaggagagagagaactgttataagtagtggtgaagactggttatgaataattacatgcttttcaagagattccagggtgaagagtcctggttacctgctgggcaaaagacaaggtttaaggctggtcgcagtggctcgtgtctgtaatcccagcactttaagagcctgaggtaggcggatcacttaaggtcaggagtttgagaccagcctggccaacatggtgaaccccatctctaccaaaaatacaaaaaattagccgggcgtggtggcgggtgcctgtaatcccagctacttgggaggctgaggcaggctaatcgcttgaacccaagaggcagaggttgcagtgagccagtgttgcgccactgcactccagcctgggtgacaacagtgaaactccatctcaaaataaataaataaataaataaataaataaataagacagggtttacagctgaattagcaggataggaataggacagatgtgtgcaaacagctatgggcaattaattcccttcgtggccttaggtaacctgaaagagaattgtgacgatatcaaataaattttgatg

SEQ ID NO: 132944 - DNA, 1086 bp, Homo sapiens
aaagattatcttttatttgaagggcatataatttcttgggtgaacccagttcttatattcctcttccgttgtgacagcacttttttcaacaaggggtatgcgactagttattgcattcctcacttttcactgtgaattgtgtatccgttttagtgccagtttgtgaaaggtggaaggaagttgaacatgatacctaagctctcccgtatcctacattggtgtgttccccttttacctcaggaaagggaatgtattccactccctggagatgatagtttccttcaatacactcacctgtggagccccttcgctagggttgtccttccattgctttgaaggcttctcttatcattaggcagaagtgattagtttcccaaactgcccttttgcttgctgccagcatactcctgattttcctacttatggctagttgatacgtgtgacgagagattttcccacagcgctgatttcccccatttgcttccctgttgcctctcaccctcaataattatgaaacctttcagagaaggaaggtttttgttgtgattgaaatatgcccgaaagtggtggcatgggagagaatgaggccatgggaaagggttgtggtaattgcctctcttgcctgtttcctgctgctctggtttcctctgtcctccctttaaatgtgggctggatcagcagtagtcacatggagttgcctttagaactatattggaacaacaataacacctctgcttccctttcctggttactagtgcagtctatgtagtgatcaccaggagtgtctctcttagtattagcctgagtgacttttattgtatggggagaaatggtgtgatggtgtgagaacatgtagactaataggtttatttcaatatgtacttgtattgtgatgggaactggtcccggtatctaccctcttaagtataaaatatgtgtagaaagtacaaacctttcttgaaggtttggagtggtctgaagtgaagccttctttttttttttttttttttttttttttttgagatggagtcttgttctgtcgcccaggctggagtgcagtggcctgatctcggctcactgcaagct

SEQ ID NO: 132945 - DNA, 1705 bp, Homo sapiens
gtctctagggggttcgtctagaagcccgctggagaaaggctgcggtaggggtcgccttggctgtgcagcatgttgggagtcgtggtcccctcgtgcaacatttgggaggccaggcttgccctgagtggttggaccacatcacgtgatgagcacagggcggccacaggggagtaacctgtggtgctttgtgaggtcatcacggcgcgacgacgagctgcagttgtgggcaccttgtatgcggtgggtaatactctcctgatgactccgagtacaatacatattatcaagtctcccttatttgttcctttctgtggtccccacctccacgcggttggcttcgcggggttggggtggaggtggtggctggaagaggccgcgcgccgcctaggctgactctgaagccgcgcacgagcgacgtgttgtggctcctccttcgcccgtgacgcgaggtcacgtgacgggttgggcagcctgtgccgccgccgccgctttgtaagaggcacattggcaggtaacgagcggcggcggcggcagcgggtcttgggtcctccgagagcagcagcggtaattgccatcctctccctctccttccctcttccagggccctgagcgctgcagcgtgtgctttctaattctgggttcagctcgtctgaaaccccaccgcctgcagactgccccggcgcccacccgtgaggaccgggccgagcttcactcgccaggtccacggtccctctacgtccaggcccgggctccctccttcctcttcccctcacgttgccctgtgcttcttcctactttcccccgtccaggtcggctgggccccacccagccccaggggtgcctcccctcccccctttcgggtttctgccctggagggtgtggttttctctcccacctcggtgcctgccagtagactggagcttccccgccacgctgtcggtcccatctcatcacctttccgctttcacgcccgtagctagtcttgggactggccctgttatagccccaacttatgcgctctctaacctttcctggcttacccggagtcacagttcagttctacttcttttcaattctgtagggcattggtctcaattgggactcagttttcctccacacccgccgttcctgtagtctggttatatcacagttcattatttaatgtaggtttttgagcgctttgtaaacggcaaagctctctctgttaataatacatactcaaaatgttattctttcattggtgcattacaactcagttgtttgcctctgaatcactttcccactcggcttttccacattttcccctgagtttttagtctaattagttgcccacgcatctcaactgtcaccactctggtctctaatgcttgctcgctttaggggttgatcccatcattattactgttatttcctgtttgatgtaatccagtcatttactaccacttctattggatattgtttttacctcacattcaaggaaggtatatggtttgccagtatttaggcttattgtctttctacagcaccagtgtatcctaacagttgagagattttaaaaaattactattaattttagagatatggtctccatatgttgcccaggctggcctccagctcctgggtttaagcgattctttcacctcagcctcctgagtatctgggattacagtgtgcaccacggtgctcagctagttgagggtttttt

SEQ ID NO: 132946 - DNA, 2557 bp, Homo sapiens
cagacattgacttcttccccaatgctgtttacacccactgctacgactcgtctggaacgaaactctttgtggcaggaggtcccctcccttcagggctccatggaaactatgctgggctctggagttaatgacaactccccaaatgcagagatttacactaacttccattctcagtttccttgtttcttttgattttttttttcctaattgtgtgaggctcttgtgttttagtgggaacaccaaagtttgcctatagtttaggcacttaataggaagaagctctgtacagaaatctgaaagttgttttgctttttgttttcccctttggtaatcaaaattttactatcttttattatttctggcttttcaaccaaacattgttgctaatccctatttttctttaagtgacacacattctcctgtctctggcttcttcaggctgaaatgacatagctcacccttacttcactcttgagaggtagggctcctttataattacatggttgctctcagactttctgtgaaagtttgggagctgtgtgtgtctgtgtgtgtgtgagagagagatcttgtctgcgtgtgtgtgtgtgatcttgtgtgcctgtaggtactgtgtgtcactgaaattacctggagtgaggattacttgtaattaaaatatttataaaagaaacaactttattcacagagtccagctttgggactagtctgtatcttgttttttaagtctaacaacactgataataggaagtaaaaacagaaaggaaaagaaattaccactgggaaaatctttttagttagattgtaggcttcctggggcctcccatgccaggactgcaaagtgatccagccctacctgtcttcccacctgtgtgtcccccgtgtgggaagttggtgtcacttccccttcccaccctcacatctgcttagccagtagccacacccctaaaacatcagactcaccatccaggtgcagctccagaggctacaaaaggcttcatgggacttgaatccccatcctagcttctctctccttcccctcaagacctgatctggttttaaggggcctggagctgggagtctcaagtctgctaagattcacatccatagcccccatggctttgaggagaatcctctctgccattcttccaatctccccagtgggttttgctattattttctaaattgggttaagtctaagaaggtgggggtgagcagggggtttatctgtgtgtagtgagtgcttcatgtgtggaatattcattttcttactgcagtgggacttggggttgaagccacccctcctactctgttggcttagccctgagatggtgacaggctggcctgcagtcagcatcattgtgcatgtgacagcatcaatgtgattagtaatttgtctgttcctcccttgaactgtctgtttagtctgaggtttttaaacttgcaggcagctgactgtgatgtccacttgttccctgatttttacacatcatgtcaaagataacagctgttcccacccaccagttcctctaagcacatactctgcttttctgtcaacatcccattttggggaaaggaaaagtcatatttattcctgcaccccagttttttaacttgttctcccagttgtccccctcttctctgggtgtaagaagggaaattggaaaaaaaattatatatatattctccttttaatggtggggggctactggagaggagagacagcaagtccaccctaacttgttacacagcacataccacaggttctggaattctcatcttcgaacctagagaaataggtgctataaacagggaattaagcaaaatgctggatgctatagatcttttaattgtcttaattttttttctattattaaactacaggctgtagatttcttagttctcacagaacttctatcattttaaactgacttgtatatttaaaaaaaaaatcttcagtaggatgttttgtactattgctagaccctcttctgtaatgggtaatgcgtttgattgtttgagattttctgtttttaaaaatgtagcacttgactttttgccaaggaaaaaaataaaaattattccagtgcacaatggtgtgagtgagtattgtgtagccaggagcctgccaaaaaggccccacatgactagttggaaggttggcttgagctgttgggattgcttgtggcagaaggggaacacaagccattacctccaggttagaggcaggtcaagtgcaggcacaaatactaagacctgcttgctctgggtccccaactctagcccaagatgagttgctctgaggtccagctgagggtggatatgcccagggtactgaagtagtgtgacgttacttctgttacataagtaagggttggtaataggccctgtctgcttggatggtgccctgagaatgacgctgaaagtgcttgcatagtactctgggaataggatattaatttttgttttttgtagttggaaccatagaccttcactgccctttgtaaggggaagacacagtgaccacagtgagtgatgctcttctagagcctatttg

SEQ ID NO: 132947 - DNA, 1061 bp, Homo sapiens
taagtcataggcctcaaaggaaagatttaagaaataatgatgcttagagcatcattcaggatacataatagtgaaaacagcctaagaacgtatgtcgaagtatttaaaatagcacacttggctgttttttagtgaacagaatctaaaaatgtataaactgaaatatgagaaatacatgaactgtttcctataaggaaggcagggaatgtgtgtctggtagtatatttcagggtataagcattagctctttggaaagtagcctttttaagagtgaatagaaagacagttataaatgaatgaagtgaaaaatttctcagtaagctttgtaaccaacccaattataggccaggataaaataagtcaaagagcagaaacgtttggaatagagtccacgaatagcatgatgtcacaagactggcaaatgaaaagaggcagggcctagggcctaggggtgggaaatgattacgcccagccctccctcggttttcacctcccctgtgtgaatggacaagtaatgtcataatgtgtgagtaaattgaccctggaatgaaacacattttggatcattaaaagagagaagattgctctagatcaagaaagtcttaagtactaggagaagtgtctgtttataaaggacataggcaaaaatttaaacagttttaaggaaggaaataataccatggtggttggtctgtttataaaggacataggcaaaaatttaaacagttttgaggaaggaaataataccatggtggttggggccaacctttcgtttcctcttctgttgaggagtcgcttgtcttacccagaagcctttcaaaactaagtggtggcaacgggcctccacagaacttccttttcttggtctctccagctgcccactcgtggttaagaactgtcatccttgtcacttggagtagaaaaagagtctcctgcttggaagagttcattccactccccgcacgtgcatcatagtgtttagcctagcaaatattactgaattgtaaactgaattaatcatcatagcctcttgcttgttgaatttattgacactattttga

SEQ ID NO: 132948 - DNA, 1047 bp, Homo sapiens
gatcatgccactgcactccagcctggctgacagaacgcatctctgtctcaaaaaaagaaaaacaaacaaacaaacacattcagttctcacacttgaattaggtaggtaggttgtgttatgcgtgctttttatgtattgaggaaacaggatcacagaggttgtgtaacttaactaaggttacaactaggtagactgaatttgaactgaaatctgtccaacctcaatgcctatgctgcattcttttatgccattttgcccctcttaggtggtcacaggaccattccaattcctataaggtataagcactagttttaaagtaataccattgtgaactgcttgttctcattgaaataatagtgtaactggaatgataaatagttcattaaaattttagtcacattatgtcatcagaattctaggaggaaatgaatacctgattattttgtacttcacaaaataaactggataaactggataaatgactgaaagtttcttttttatattgctgagtcagattggatccggttcattaagggccaaaatttgtatttggcagtaatcctcatgtgttctcagaatgcttgattggtcattatcagttgcttaatgcttaccaaacacttccagtgttttgagtcactgaattggctcatggtaattgttaatcttgtggttactgagtcaagagccagcagtgtgtgttttggctgcttcacttcctcctcaacacttgatattgtcagattttaaattaattttttttttctaatctggtgggtttgaaattgtatctatagtgttttttatcagcatttcctgaagctgggcatcttttcatgtattttcgttggtcatttgtgcttctgcgaagtgtatattcaatttcgttgcctatttttttggtcttttctctttttctgatttatttttaagagttctttatatattctggatactaattatttgttaatttataggttgcaaatatcctttcccaatttgtgacttgtcttttcatctcttcatagtcttctggtgagaaaagct

SEQ ID NO: 132949 - DNA, 1145 bp, Homo sapiens
tcaaggagtaactcagtacatttctatataactgagccttaaagatgggaggactgagaaagaagccctcgaagagatagcatttacacgcaatctagaatagatttgaacggagttttcagtatagtgagaaaaagaatattccaggtggagataacggctcatgagcagaagcaacatatagagagataacgtacaaggtctaacagactactagtaacgtggtttggagggaacatggaggaggtgatgagctcaattgctttgtcataaccttatgtctagactatactcaataaggactggttagtcattgaacccttttgaacagttatgaaaagggatgtgacaatttaaaactttaagatcattctagaaactatgtaaaaaatagaaggaaaacaccgcaagcagaagggccaattaaagaggctactgcaacagcccaggtgaaaaatgaggtcaggctgaactgcaatgtgagacacagcaaatctaacttgagtgactgaaaagagaatgaggacattagcagagaaagggaaagaggtgaaaaagctagttaaatgggcaatgggaatttggtctgtgtgaggtacagggccccaggaatatacaatctaacagaggacacaaaatctgtatgtgtgtataacaatgtgagccaggcaacaataggagctataagaaacaaaaataagataatacagtcataatgacaaggatacgctctaaaaaatgcatgttaggtgatttcatcggtgagggcagagtgtatttacacaaacctagatggtacagcctgctatacacctaggctatacggtattgctatggtacagtattgctcctaggctataaacctgtatagcatgttactatgctgaatactgtaggcaattgtagcataatggcaagtatttatgtatctaaacctatctaaacatagaaaaggtacagtaaaaatatggtataaaagattaaaaataggctgggtgcagtggctcacgcttgtaatcccagcattttgggaggtcgaggtgggcggatcaactgaagtcaggagctcgagaccagcctgactaacatggtgaaaccctgactccactaaaaatacaaaattagccgggcatggtagtgcacac

SEQ ID NO: 132950 - DNA, 1054 bp, Homo sapiens
cctgtacctcacacagaccaaattcccattgcccatttaactagctttttcacctctttccctttctctgctaatgtcctcattctcttttcagtcactcaagttagatttgctgtgtctcacattgcagttcagcctgacctcatttttcacctgggctgttgcagtagcctctttaattggcccttctgcttgcggtgttttccttctattttttacatagtttctagaatgatcttaaagttttaaattgtcacatcccttttcataactgttcaaaagggttcaatgactaaccagtccttattgagtatagtctagacataaggttatgacaaagcaattgagctcatcacctcctccatgttccctccaaaccacgttactagtagtctgttagaccttgtacgttatctctctatatgttgcttctgctcatgagccgttatctccacctggaatattctttttctcactatactgaaaactccgttcaaatctattctagattgcgtgtaaatgctatctcttcgagggcttctttctcagtcctcccatctttaaggctcagttatatagaaatgtactgagttactccttgaaagcaacaaatagccctgtgttacttacttactgcagtacacatttactaaacgcatgtttatgagaggtggtctactgggcactgcaggtagagataaatgccttaatcactgccctcaaggtacttacagttgagagaagttacctagagcaacagaaaaatatggtactttaactcttcttcctgtgacttaagaagatttttaaaaatgcagctttcaggaaaagaagttttgtttttctggaattcactaaggcatcaccattttattctaaaaggtattactttttttatcttccaaagtctatatgcagtaagtaatcataatgagggaacttcagttacttttgggagaaaaaaaatatttattgagatataattcacataccatgaaatttacctttttttaaaaaaaaactttttttggtttatttgtagacacagtctcac

SEQ ID NO: 132951 - DNA, 1097 bp, Homo sapiens
atgcgtgcctaactgccccctaggatcctctcctgggacagcatgaccgtttttcacagtgctggtcacctggattgggccgtctgcactgacttctctcagaggtgtggtgactgtgtctctttggtctggggatccaggaactgcaacgtgggacaatgagatagtgaaaccatcttcctctggggatggcaagttgccctcattctccccagaaacctcactttgggaggcatcctttctgagatcaaaggaagagcctccacctctttcctgtctatatatgaaatctacctgtgaacagtatggcttctctgccaggctgtctctgggagaaggccctgaggaagtagagttctctctgctccagtccacgggccccttacttgggctgcagctgtgatcgagtgctgctcttctgtggtttatggggtccctggagtccacccagcttttagttagatctttcttgtcacctgtcctggggctagaaaacagactctgctgtctttctgccacctgcttctcaggaccctgtccccacgtctggtgcaggaagaatgagtcttcgctattctccagggtgttcctttgctttgtggccctctgactagagatgtgtgaaaaagaatcttcactgaaatcactgtcatcaagttcctctacttgggctccatcatggttttcagagtaagagtggaacagaggcggagtctcattcgtgagctgaccctctgggggcctgtactggcgtaaagaccttttcagtggttggtattttaacttctgttggaggagaggtggctgttggaactgctggtgatagaaacgcagatgttcctccctctccttctgatgtggcgggatgtttgtccaagcttcagaggcaggcctagcaggcgtgcccctctggctgtcttgactgtactcagccctgtggtgggcgttgccaaaggagagctcaactcgagacacaagctgcttctgtactggctgcactgtctgcactttcttgcacttggtggacagcttaccacgcactaggccttctcctgggcctgaggccctgctttcccacccaaggacagttttgttgc

SEQ ID NO: 132952 - DNA, 1015 bp, Homo sapiens
agaataagaggaaaagggaacattctgtttcagcatgagatatccctctgtacctgaatgaaaaagagcagtgttggctggttgtagtggctcacatctgtaatctcagcactttgggaggttgaggcaggaggactgtttgagcccaggaattcaagaccaacctgggcaacagagcaagacctcatctctactagaaataaaaaaattagccagacatggtgatgcgtgtctgtaggcccagctacttgggaggctgaggcggggaatattgcttgagccctggagttcaaggctgcagtgagccatgatcacactattacactccagcctgggtgacagggtgagactctgtctttaaaaaacaaacgagaaagaacagtgtcttctctgaggatgtaagcatgcacccaacattccatgatcagaagaagccttttggaaatcaccacagccccatgtaagggacaggccagagacgccagtctcagaagtgcactgtgtttatgcagggcccacactgcttcctggagagaggccaactcaggagttcgtgtccaccacttacctgcaattccacagagtcctctttttctgcaaaccaccccctttcaggcttctctaggaagatgagttccctcaaacctgctgggacctcaggaagcaaaacctccagaaatacacaggcttgtgctcattccatgaaaggaaaaatgacttgtctattcccagggtttctcaaccttagcactattgacattttgtaccagataattatttcttgaaggatgtttagcagcatccttggcctctgctcactagatgccagtagcacttcttcccagtcatggcaatcaaaaacatcttacctactaggagagcacatgtgaccacagggtgagagatggaagggatcccagcagataccacagtcacccacaaagaggcctggccaggcagtcaagagttgctggctctgacaccaactcctagtgagcctttggaaagatcctac

SEQ ID NO: 132953 - DNA, 1624 bp, Homo sapiens
gtgagactccatctcagaaaaaaaatcaatgaacaaaatatatattactattatatacgtatagttgggctatatgtatataagaatatatatgtatgtatatttttatatatgtgtgtatatatactatatatacgagctaccaacataagaatgatatatattcatacatatatatatgtagttgtacctaccaacatggtaagcccctaaattatggaaataattacagctgctgaattaatgcttttcagacccaatgtaatggggtcttttttctgtctttttccaaattactgtgatttttcatttggaagtcgtcttggacccctttctctccccagctccccacctctagtcagttatcaaatttcttctgtatccatctctttatttccatggttgtcaaataatttagatgctttttacctcaccactgaattactagtgtctctgttctcaaaccattcatagtgtgaagccagattaatcttccagtaaagactgaaatcatccttcttgcctataaagttagtttttcattgtttccccactatttactgaattaaatatgagcatcctgccccccagttaagactggtgtcccaagacccctacaacacagtcctaactcattattctagtattctgtctcttttttttttttttgagatggagttttgctcgttgcccaggctggagtgcaatggtgcgatctcagctcactgcaacctctgcctcccgggttccagcgattttcctgccttagcctcccaagtagctgggattacaggcgcccaccaccacgcctggctaattttttgtaatttaagtagagatgggtttcaccatgttggccaggctggtctcaaactcctgacctcaggtgatccacctgcctcggcctcccaaagtgctgagattacaggtgtggagccactgcgcccggcctctgtttcacttttctacttactgtgatactgtatttcaatcacattgaatccttgctattccctaaacattaattaattaaacagttaattccttgtgcttctatgctttgactctgttcatacttcccctgtgcctggaataccttccccccttccatcactccctttcaaattcctcttcttcccctgtggtccattctcagtatagtctttttcataatcagagagaatatgttttcctttgaaatcgacacgtactttatcttaagattcttctaccttccagtcatttgcatacttgtgtagattaacatttttaggaggtaagatagggaaatgctagggtaatgtctatatccttgggccccttcaagtgcctactgcaatgtatgtgctaccagctgagcataaatatttatggaattaaaagttaagctgtgtaatctacagaattgagatcttcccctagaattcctccaaaattctttttttttttttttaaatggaatctcgctctgtcactcaggctggagtgcagtggtgccatctcggctcactgcaagctccacctcctgggttcacgccattctcctgcctcagcctcccgagtagctgggattacaagtgcccaccaccatgcccggctaaatttttgtatttttagtagagat

SEQ ID NO: 132954 - DNA, 1001 bp, Homo sapiens
gattctcagctgtcttgggcttatacttaattggcgaaaattgggctctgagcagaccactttatacagggtagattgcagtgggtaaataaaatccagagatatgatttcacatctaacatataagggtttaaataaaacactaataactcagccatgtaaataatgttcactgcctgctagagtgattatgaagagtccaaggagaaagagtttggtattgaaagaaacttattccaagctgaaggtaccttgcaataattctttagtctcatagggaaacagcaaactccacagatggaaagaatcatcatttaggtactcctaaaattgtgaaaaattgtgagtaatctaaaaccagataatccattggatgttaagatttgagagtacacagtttctcttactctgaatctacttccctaaacattcatattatatttattctttctctctctcttgttctcttgcctcaaaacccagtgactggtaggaagaaaaaaaaatctggtatgctagcaattcaccttagtcagctgagatcttacattagtggaataaatcctttaatgctgaagtgatttgttaacactttcaccctttttcaaacttgtattgttcttctttttctttggttaccaaaattgtgtttcacagagatattcagagtaatccactgagtctttctactggtactaaattactaggccactgtaaaaccaacccaatcactttaacagccttatcgattgctgatcaatgcacggtctattagttctcagtgggagatatttattttgaaaatggactaaatgaccaattagttgtaatgctatctagttccatggctacttatagccatcgtaatagccctatccaatcactgtctacctaagacttccttaatgatgcttctgtcacagtaattccatcaaggaggcatcatcttatctttcgtatttttctgttatccccaaacacaataaccttactttttttgt

SEQ ID NO: 132955 - DNA, 1059 bp, Homo sapiens
ccaatactttttttttttttgagacagaatctggctctgtcgcccaggctggagtgcagtggcgcaatctcggctcactgcaagctctgcctcccgggttcacgccattctcctgcctcagcctcccaagtagctgggattacaggcgcacgccactatgcctggctaattttttgtatttttagtagagatggggtttcaccgtgttagccaggatggtcttgatctcctgacatcgtgatccgcccacctcggcctctcaaagtgctgggattacaggcgtaagccaccgcgcccggctaaaaggtaccaatactttgacctgttaagtaatcttgtcctattattaaaaattaaaagcctgtttataaacatattagacagaacacttcagagaaacagaatccttggactgagatggagaaaatcagagtttgtgttcgaaaacgccccctgggcatgagggaggtacgtcgtggagaaattaatattattactgtagaagacaaagaaactctacttgtgcatgagaagaaagaagcagttgacctcactcaatatattctgcaggtatgatgttttcgttttatgtttggaactaatattatcaagtatgtcatttttttttgctttttgtttgagtggtggcatacaagtttctgttagaacactgaaaatcaagtttctggttcgggtgttgacattcattcctgatgtgacactgtattaagtcattgatatccagggccttcattttttcaaaagacggtgcaataggggatacaaaaacaatttctcttgtgcagtggagctacatcatatattcacttaacatgctttgtgtgaatttaattatacatattcagcaaaaaaaaggaggaatgaaggaataaaaataatttaaataatgaagtggggccaggtgtggtggctcacgcctataatcccagtgctttgggaggctgcagtgggaggatcacttgagcccaagagtttgagaccaccctgggcaccatagcgagatcctgtctctccagaaaagatcttaaaactagccca

SEQ ID NO: 132956 - DNA, 2207 bp, Homo sapiens
ttcacaaaacaaatctaccagccagtgtggtggctcacgcctgtaatcccagcactttgcgaggctgaggtgggtggatcacctgaggtcaggagttcgagaccagcctggccaacatggcgaaactccttctctactaaaaatacaaaaattagccgggtgtggtggcacgcacctgtgaatcctagctactcaggaggctgagacaggagaattgcttgaacctggaggcggaagttgcagtgagccaagataccaccactgcactccagcctgggcaacagagtgaaactccatctcaaaaaaaacaaatctaccacaaatagaaggccaggattagtttaggatgtgttactcagcccatttagccttttagcctaagtagtatttcccccaaagctaattattcaacgttctttggttatctttattaccttgccctcacctctttctctgtttctgctagaaagaagatgaaatagaaattaaaacgaaaacaggaaagttgtaccactagttacctaactgaatttttgaaaactctgaattatgaaaccattttaaaaaagaaaatgtactgtatttacttttggatattctcatgaacttgattaacagtgatatagagagctcaggatcctgacttttaataatagaccaggattatgtgttattaccacattatttgttagtatttaattaaatatcttgatattaaaattttttaaaagatacaactatttaaaatcttgaccttagtattaatttcctgggcaaattatttgattcatattctgtacaggtagagatcgatgaccaccttttggaatgatctgaaatcctgaattggctgatgctgaattgatgatgtctttacttctatttaactaacttttgccagtactcagcaaatgcaaatgctatcttcctttgagttacattagtttataatcctctgtggtatgccatttaattctgcttttcattctgaaagagttcttagcccctgttcattattcatgggaaacagttgtgcagcatgccttgacattaagttgagcatctaaaattagtcctgctacaatcagttgttgggaacaaggtttcaatagttgtggcatgtgttaagtagacattgcaaggttggaaggaactccctagaaataagtaagttatgtgttatgtatgtgttcatttgtgtatctatgtgtatatatatatgtgtgtgtatatatatgtgtatatatatgtatatatacacatatatacgtatatatgtatatatatacgtgtatatacatatatacgtatatatgtacatatatacgtatatatatacatatacacgtatatatgtatatacacgtatatatacacatatgtaaaatggaatgtctctttttattaagcaaattaacaaattatatgttaccacaaattcttcatatgcaatacaaagcatctttgttcatgcactatgctatttaatcaataatttcagaagaaaaatatgttattgagaacttgacagataaaacattttttgcatgtttgttttgtggttttgtggttttcaatttttaaaataaataattgtattacatgtactctatttcaagcgaatggcttttctttctctcttcagagtttatagaaacctattcaccaaaatggcatcctggttatatgaatgtctttgtgaagctgaacttgcacagtattattctcatttcactgcccttggccttcagaaaatagatgaattagccaagattacaatgaaggactactccaaattaggagtccatgacatgaacgaccgcaaacgtctcttccaacttatcaaaattattaagattatgcaagaagaagataaagcagtcagtatcccagagcgtcatcttcagacaagcagcctgcgcatcaaatctcaggaattaagatctggccctcgcagacagctgaattttgattctcctgctgacaataaagacagaaatgccagcaatgatgggtttgaaatgtgcagtttatcagatttctctgcaaatgaacagaagtccacttacctaaaagtgctagaacacatgctaccagatgattcccagtaccatacaaaaacaggaattctgaatgccacagctggtgattcctatgtgcaaacagaaatcagcacttcactcttttcaccaaattacctttctgca

SEQ ID NO: 132957 - DNA, 1079 bp, Homo sapiens
aggtgaaattagaaatatatataattttttatttagaaatatatgtttaaaataaataatacagtcacatagtttcaaaatttaaaaaataaactgttttaggtcttgccctgggtgatagagacaccagtgacatagaaatgacaataggaaaggtaataataactaccagcatttaaaagtatacagtagtttccttcccataatcaccctctaccacctacttcccctcacctcctcaagaccactattattgtgcatcctgcaagtgacgttttttgtctgataagcaaagatatagatttattatagatcatttatctctctcttttacaaactgttctgtaccttgctttattaacaatatattggacagctttcttttttaaataacattttacagtttacttactctttgtaattgtctcatagcattatttcattaaatggactatcataatttatttcaccagtctctattccatgactttgctattacaagctgtgctgtaatgaataacattatagttaacgtcattttgtacttgtacgtattatctgaaggataaggataggttcctagaggtagaattgctggatcagtgcatttgcatttgtaattttgatagatataaatcagtggcatgcaatcataatcacctagggaacttttctgaagttgttatgtctgcctttcctaaaacctgggagttatttcttgttgttttttggttttctatagatctgggatggggctcaggtatctatatattttaaagtgtctaaactgggctgggcatggtggctcatgcctgtaaccccagcgctttgggagtctgaggtgggtggatcactcgaggtcaggagttcgagaccaacctggccaacatggtgaaacctcctctctactaaacatacaaaaaaattagccgggcgtggtggcgcgcgcctgtactcccagctatttgggaggctgaggcatgggaattgcttgaactcgggaggcggaggttgcagtgagccaagattgcaccactgcactccagcctgagcaacagagcgagactgtctcaaaaaac

SEQ ID NO: 132958 - DNA, 1045 bp, Homo sapiens
ctgtagtgcactagcatgataatagctcaccgcagccttgaacgcctgaatctagcccctttagacctcattttttccatctggaaaatcaaagaattgaattagattaaaattcctgtggctctactctcaagtcaagtagttgatgtcaggtagaccacacactctcagccttccaaagaccatacagactttttttttagctgctgaaagtagtagttaccatttattgagtgttcaccccgtacaaagcactgtatccagggctttatatgcatattacatttttcttagtgtagcacattactgctaagatagcattttatttaaaatttgtggttttatattgttaatgaaaatctttagttattcagagtgtgtccttggggcaacctaaggtatgagcctctcagtttttagtttagggagaaccacagtttctttctctgggctgctcttttgtcgtaaagtgaggggctgaactcttctagatcccttccagatctagtattctatgatgcctgatatattaatccagtttccctatgctggctcagcaaaccagtttataatttgcacagtgtagatcctcaacacattttgttaaataaataatagagttctacttcttaaaccttgagtgtatggtcattgtatacctcccaagttactgtctcaagggttttgatgttcatatcgtgttgaataagaagagttttctgtaggtataaactaataataatagtataatatattgttgagtgtttatatatcagacactgaatgtagcagttaatttacattattctaattaaccctcatgaaaggaaacattttttccaagtcagcatttttttttgtcagttcagtgcagtagcttcctaaatgatctccctgtttccacttttgcccacctgctgtgatccatttcctcacagaactgggagagtgaactttgaagacgaatcatagcatatactttctccacttaagatcctctaatgacttcctacttcacttaaaagtaaaattcagacacttttat

SEQ ID NO: 132959 - DNA, 1329 bp, Homo sapiens
tgccagaggcagattcccatcgctccaaggctcatttcctccactgagaactaaaatcaagtgggcccttaagggtactcacccgaagcagaaggaggtaggaggcggaccttggacggaaactgaagtacaccggccaatcagaagagcctggttacgcttgggcccatcaatagaattcggcagaaggatcttcgacccgcctcaaaggtgcgcgtctcacactgaaacgtcgcgagatcttccctcaagcggaacgattggctgaaggtcggaaattgagagttacgcccacggtttcttcagacctctgattggtcttccagaggagaagtcaacgaacgtcaaccgattccttggatgcccattggtgggcggtgcgggactggcgacgcgcgggccacagcgcgggcgttcgaactggcgcttggcggcgttgccatggagatgcggcctggccgccgccggtggctcccgggttgacgggactgttaggttgcgggctttggggctcactcccgacggcattgtcttctcctcttctcagacagggcagaccgaggagtttggaccgaggtgagaaagggcggggagaatagaggaggggtaggtctggtccggaaccgtggcgcctgcccgcggacacgggtgcgcgtgacgtcggctgagcgcgggaggaaactggcagttgtgagggaaccgagagttggcccctcttggctcttcctaaagttcacctactttcctatctttcatccccatatctctgccttttcttcagcaattatcttgaacgccacttctctcactttgggagactaaactcttgagtcccaaagccttcttgcttttgaaccgataagcctgaccggcacctcttttagggcatttctattcgcccttgggttgtttacttccgggaagcccgttcgcttcccttttcccataaaattttgaagcctttgaggtaaggcaagcatcgttcacaatgtcttgcacatagtagattttcaggaaatatttgttgagttgaatttaatttacaagaaatagattggattcctcttcatgccctgccttgttgtctctctgcttcagagacgattttttatttcgaggctagggggaggccaccctaatcttcaatgcaaaaggacctaaaagtccacacacagtccacagctggcctttctactctttgtgaaaggctaaacttttttggattggttgctgcaactcttcctgcatctgtggcttttagccttggtctcccaataattttattagactccttttagtctttgcttaaaataaaccattctgttgctg

SEQ ID NO: 132960 - DNA, 1041 bp, Homo sapiens
caaggaaatcttcgtgaaattcaatcatgtcatttagaaaaaaatcaaagctttggtgttcaaggcatctatgatgtggcttcttttcactcctctgtctctgcttctgtgagggagacacacacacacaaacacacacacacacacacaccccatcatattttgaaaggcatttgaagaaatactaccttctattctggaaacagctataccaccatcccttccaggaaaggtctgcacagactcagccttgaagaaaaatgcagtggcaactgcgtggtttcctttcctgccattgttcgactcagtggggcttctgctgataccctaccctctccagacacacccctgctcccaaggaagcagcctgctttttatcttaaggctagtcctgcccaaggatctttccagcagcttgaggagagggtagaatactcggccttatgcggcgagccctgggttgcatggctccagggttgcggggaggtatgggagaaaacagaagaggaggccccgttctggggagctctcagtctagagaacaggaaaaggttgtgcctcttgtgctctgtattcttgtgctgtttttccctctcaggccccttttccctccccagggagtctagttgagaacttcctattacataatcctgagcaggatggcggcgggaggggacggaaagtggatttggtagggattggggaaaggcagacaatcggtctcaccgagactgggcccccgtagcacagcttcaagagagcagcagcagggggaagggggaatggcacttctagaaaagaaagaacgagttgggccaaaggatggatggctagaggtcagagcctctactccccaaacataggggcctcacttggggtcacatatctgcacaggaatttcaattgaaatcctaccattataacttcattccttaaagtcttcaattcagcaaacaagcactttcagtagaggtgtaaggcattgttttttaaggtcaaaagggtattttggttttctactgcccctgtgaaatgccccta

SEQ ID NO: 132961 - DNA, 1047 bp, Homo sapiens
cctttccacccccacactcacaccaatctgcagaaacctcttccctggggtggaagccagagagcttagaggaaaaaggtcagctctcttcctgttatacatggttatacatggttggggtttaaaagcacaaagagaaacctccccctcctggctttcgtggccatctttgtccatcttaggtggggacttgatcttatttaaggtctccaaatagcccccaccacacttagaacgtgtgttttcttagtgttagaagccaggccctgagtccccagcactcacctgaactgtggctgatttggtcccagtccagctggggaggtgtttggctgacaaggaggcaagagatcccctcccagggaacaggaggactgggcttagcacagagccatcatcatgttcccaatttgtgaagagactcctaacactgcactaacccatttgtgtacatacatgggctcagccctgggccaaatgtgcctgatgggaacagacttgcagggccatgcaggccagacttcgtgccttaactgaagagtgtgcgtgtgtgtgtgtgagagagagagagagagagaaacacgcatcatgggtccctgatctatgaaatgaacacaacctctctgaggctggatgatctggaggaagggggcatggagcaaatttgaggctctgattgctgagccagcctcctcccaggcggtttccccaggactctcgtaggaaataaatagccctttcaagattcctcagctgcctcaccccctgcacatgtgcctggggtgtggcctagaagggagtgatgttcttactctggtggtctgtgcttctgaacacaggctacatgcacacactgacaactaccaataaacagacaggggaaggtctttcatctcagccattttctcttccccccgcccccccttagatggagtcttgctctgtcacccaggttggagtgcagtggcacaatcagctcactgcaacccctcctcctaggttcaagcgattgagtagctgagattacaggcatgcatcactatgcct

SEQ ID NO: 132962 - DNA, 1046 bp, Homo sapiens
ggggttgaagagaggtggcagagagaggaaaggggggcctgcgttgtctgctgtcatcctgggacaactgatccaatggttgtccctaattggcctgtgatgttgtctctggacagcagaatatgatgcttaatgccccatcccctcaggaaggagccctactccctggaaaacacctggctagacttggactttgggaatatcctacaagtcagggtgatttgagtctacaaaaaaaaaaaaaaagatgagaagggggtgaaaggagtaactgctatatttagaaggaggttaaggatagcaattgattttaagggtggggctagggaacttgtctttaaaatcctgcatttgcacagcaagcacagttcgtattgagattttgctatttggaactgtaagggaggtataggatgctgcctaatgggaggtgggattgcagagagttttctatgtaatttcttggtatcactttccctctctttcctccatggccagcgatgatgactttgacatgtctagatactcctcctccggctactcctctgctgaggtgagcccctaccccttctcaccctagacaccaccgggcaggatcactgccatcccgggggagggctggggccaatgcccaagtacaaggaaaaagagggctgggcaaggctgggtggtgccctgcacagggtgggcctgggataggatggaagagaagtggttactggcctcaagtgcatggagcccagggttaggagtggggctttagattgcagcaggccatttaaatagaatgggtgtaaaatacaggtgatatcctctagtagccggcctgagataggggcaaaacccgaataggagcaggaccagaggtgtgaagttgaccatagaatggggaggggtgactagaaagagaggccagaggcgaaggagggcgcctaggcaggagcggggcctgggggtacagacagacccgggacagggcggggctgatatccagggcactggctggactggggcgcagacggcctggagtggccgcagagctgtgg

SEQ ID NO: 132963 - DNA, 1580 bp, Homo sapiens
tacaaatagtcatttaaataaaatttgctaagtgcatgaaagaaatgtatgggggagcaggggctgtgagactacattatagaaggatctaactgagcctggcatttatgggaagcttcttttaagaggtgatgtgtcccagcctgggcaacgtagactccatgtcaacaaaaatatgtatgtatacaaaaattagccaggtgtggtggcgtgcacctgtagtcccagctacttgggaggctgaggtaggtggatcacttgagcccaggaggctgaggctgcagtgagccgagattgcgccactgcactccagcctgggcaactgagtaaggcactgtctcaaaaaaacaagaggtgatgtgtgtcagctgaggcctgaaggatgtagtaaaatttaaccagaaggggagcatgaggttaaaaaggatattgataccccatcaggagtaaagaagaccagtgtgcaaactagtaagcctggggaagagtggcacaagatgaggttggggagatagaagtaaaggcaagtgactactcctttgccatcattcttagcctggtctggagaaaaaaaaaaaaagtgctggttgagaccacccaaactgctgttccatcttcctagcagcaggggcctcacaggaatgctcagggagaggtgcttctagccccaacctggggatcacacaaatggaatggtcctcacctggcagcccagttcagaggagggaggaggaagaaagactaggcactcactttccctgcaatcctctctctatttttccattgctctgaactgtttattaatacatgacagaagccatttccctatttagatggttctgctgggaattccacaccaccaccatccctcctgaggcagattttaaagtcagctttcaagattttatacttggatttcagaaactaaattacattactacgtccagtgaaacggcgccattgcctgttcctatctgcatgctccaggcactgtgaggccgataacatcagcatgtcaaagcagctcgatccagacaatttgcagctagctagagctgggctattggtggggaaggggaggatgaaaaattatctcagaatccaaaacagcccagggtgtactatagactaggatctgggatttttgggttctttctatataccatcatttctcctatctataaagatacaactcatcttagccccacctggacataacaaggagctgaaaattcctctcctaaacataggaacaggacaaaatcactgatgtttcaacattcgggatgttttcattggagtgtaaaatagaagggagtggtggaaagagtgaaagtcattatataaaaaattcaggatcctactgcctgtgaaattaggtgtccatataaaagccaaaatactccttgaatggctattctgtgcttctgtgaagcccagatgtgaaggccttataactaaccctctgacagccacaaggttgcagagtaggtgaagacaaactattgctcccctgataggaacaaaggaattttggagtttctaattctaaccaaatttaattgtacagaacaagcatt

SEQ ID NO: 132964 - DNA, 1069 bp, Homo sapiens
agctctgttgcccaggctggagtgcagtggcgcgatcttggctcactgcaagctccgcctcccgggttcacgccattctcctgcctcagcctcccgagtagctgggactacagacgcccgccaccacacccagctaattttttgtatttttagtagagacggggtttcaccgtgttagccaggatggtcttgatctcctgaccttgtgatccgcccgcctcggcctcccaaagtgctgggattacaggcatgagccaccgcgcccggccgaggccacttcattcttaaaaccaacctgagcaacggggagggcagaggagagtcggaggcttatttcctacttgattcacttctgtattgtgttactttccccattgaatatgcattacctttataagttaaggaaaccaatacagattttttttaatggcttaaaatgatacagtcagtctggatatagaaattggaagtcatctgcatagagggctgacagttagggcaaagagatcaaaggatttagaaagatggcagttggaggagcagccagattggcaaactggggtcatgtttttaaaacttattggatgtcaggttgaggagtttttaagtggtaggagctatcagaaggtcttgagcaaaggagtactgcaataagagcagtgtttaattctcagaagagtcttttaacagtaatatacaagatgagttggaggaagaggagacaaggtggggagatgagtgggttactactgcagtgatcctggaatatgctgagaagggcctgaagcaggttgttggctgataattttttttaaagataaacattagatattctgcagaaccttctaggttcatgattagtttcccatagagataaaggaggaagaagtagatcaaaatgagcccacagggaggttaaaacaggagccaacctgaaagtgttctcaatggccaaagctggaaacatttgagcaacaaaacaaatatgataatattggattataacctcccaaaataagtatacattaatccatactgatataaatacatgattgaataaataagtaaa

SEQ ID NO: 132965 - DNA, 1049 bp, Homo sapiens
ataatagtgagaaaaaggtgagaaaagagcaatctaggctgggcacggcagctcatgcctgtaatcccagcacattgggaggccaaggcaggtagatcacctgaggtcaggagattgagaccagcctgatcaacatggtgaaaccctatctctactaaaaatacaaaatgagccaggtgtggtggtgggcacttgtaatcccagcaacttgggagtctgaggcaggagaatcgcttgaacccagaaggcaggggttgcagtgagccgagatcatgccattgcactccagcctgggtgatacagtgagactccatctcaaaaaaaaaagcaatctaaacctccatcagggaggactgatttaataaatcatggtacctccatcccatagcatacatatgggcagccttttaaaaggaggatgtaaatctaatatgaattgacataaaaagatattcatgatagatgcatttcattgtggtaaagcgcacataacacaaaagttactgagtaaaatacatatggaagatggatcatctgattccatgtatgtttaaattggtatatatgattacatatctttaaagtctggaagtataaaataaactggcaacagtaatgaattataggagaactttcatgttctgtattcacctttttgcatttgaatttgttatgacaaaacagcatcacctttttctttgaatttttttctatttggggaaacaaatggtcaaaaatcatgatctttgactctatcattttttcccaggtgatagagctcatgctttccatatttttaaattgggtatgcataccaaaagggggtaagatgaattgagtgtggaaatgctgccagagacctgtgtgtcacttgtctaaacaatcttgttcctgctatgcaccccagctttgacatgccacacttgactcacatcttcccaattccttctcaagttctacagagccctgtagcttctaggaggcagggcatttctttggaaacagaaaatcatcaacactggccaggcacagtggctcaggcctgtaat

SEQ ID NO: 132966 - DNA, 1092 bp, Homo sapiens
cagctgaccacccagtacaggattcctgataagagcctcacagccttggataccctgcccacactcctccttatgtctagttcttcctgaggctatgagaatccagagggcctcattctgttttgggaagggacctgttgctgattacttctttgctcccttctcctgggcggtcacagaagggactgtgtgaagccctatcccttttatccacatgaaagtaaacatcagaggaaagtgtcatcaagtagcaggagtgccccgtgtagccccttacacttcaacggcttccactcgttcttattataaagactcaaatccttagtataaccctaacatgtgatctggctcctgccttcctcttcagcttatctcatatcacattacccccagtcactacattcagcatcactggcttttcctccacttctctaatgtcccaggctcccttctgcttgagggcctttgcgcataatgttcttgctgcctggaatgcttttgctgcaccttctaccttttttttgttgttgactcctactcatctttcagttcttagttcagctatagtttcatcacagaggacaatccctagacttggtcagtagtcttccccttattgcacttttcacatttataattttacgtaagtatgtaaaattagtctattaacgtgggtccttttgaaggatgttgcatgaaaccagattcatttttacttaccatttgtctcctgtgccttcacataatggacattcactaaatagcttttggttgaatgaatgaatgactgaatgaattgtcttctagtctcatttacttggtaaccccatgtcgtatctgacattcaaccatataccctgcagacgtgtgtcctactgtttagaagtgtgtccggaattggtgggttcttggtctcactgacttcaagaataaagccgcggaccctcgcggtgagtgttacagttcttaaaggcggcgtgtccggagtgtgttccttctgacgttcagatgtgttcggagtttcttccttctggtgggttcgtggtctcgctggctcaggagtgaagctgcagaccttcgcggtgagtgtta

SEQ ID NO: 132967 - DNA, 1166 bp, Homo sapiens
ggaacccaattaagttcttctacatcaggcttgaacttctccactggcttttgaggcatctacactaggcttttacccctcaaagctggccatacttgctaccattcaagccaactttctttctagtaagtccagccatgtccttcaccttctttcacctattggcaccttgaggcctcctctcctcttaacaattctcttctgcccatttcactcatacacattcttcagagatcaatataaactcccattcttcagagagctttccctgaatattctagtgagctcttaaccaatccctaagcctctataacctctagcacataattttatacaaatgatattctggtttagggtgtccactttaatgtgctgtgagtcttgtcaccccaactcccctttgatctccttgacaagatagcttctacctctagaacttacagactggtgaagaagatacttgctcttatgaaacagaactacagaagaatacagctggctcctttaaagatgagtaagagtggaaaggagaggaggttgggaggttattctaaggaggggaacagcaaagacctagagggggatgagtaggtgagaattagtagagtggaagccacatgttggggaattaagggagattcaggggaatacagggatgggacattcattcattattcaaataacatcttttgagcatctgctatatgcaagacactgagccaaacataggaagtaaaatgatgaataaagcaaacatggtacctaccttcataagctggcaatccagtaggagagacagatactaaacaaagtgcacaaacacaattaccaactatgacaagtgatagaaaaggcaagaaatgcagtaggaaaagagagaataataaattattctcttgtggatgtcaggtaaggctgctatgagaaagtgatgtttgaactcagaccacaggatgagaaggattttgttcttacaaggagtgacgtgctcctggctccccagtgggcaggggtccctagctgagttagcaatctgagttccttacaaattggccttttcccatcttctccctttgcagcattaggtacattttcagaagtaagggacgtagaataatgtaagaaggccaatccagcccctctcccattggtagcagagctgataa

SEQ ID NO: 132968 - DNA, 1105 bp, Homo sapiens
tctgtctgctcagcttgttggtgcagccgcacagtctatgtcttctcttcggctgcaattggagaggaagagatttgttttaagaacaaatggagcttttaagcacttaattgtgtcaggcaacaccctgcctcctgtgctctcagggaccaaagagacttaaagaatggcaaatggcaccagatagggtctctgcacagctgaaagaaatgttactgtagcgtcactgaaaccaggttatcagttaactcatttgtttagttcacgagcatctactcagatcaggtactttaaggatacagggacaagtaagatctctccagtgggtggccaagagaaggatgggctcagatggctataggaaggtttttagatatatgtcaaaaagagtagagatcaatgaagtgtcatgagaaagagtgacaccctgctttgggagagggtgaggaatgctgagattctgactctgactacatgagcttgggaaggagtttcagactcctactgcttcctgacactcagggatggatggggatggtcaggacgggacattaattcagtgggtaggctacagcggctcctgaaagtggcggagagaacattataaagatagcaagtagccactgtggaaaactgacctatatatattctatgttctgggcaccttaagttgcctccttgtggtcagatgacttttcagtttaagggtggattctcctagtggatccatgtggctcatgacccagcagtatttctcaggctcctgggcagaggcacccttctttcctgccctatattacaaactgaggatcaggtttgttcaagcctgcagctccttactactcatctcctcatcaaacaaacaccaagtaagaacctattctctgctagatgttgttctgggctcaatagcacagaattttgctccagggagatgcacagtctagaactcagattgaggcactatagaatagtgagcactgcaagagaagaaccaggcccaggagcaccaaatgaaagcaggaagggctctcatcgagtggtcagggaaggcttcatagaggccctaggaactggccataggaagagtactagaagcttggca

SEQ ID NO: 132969 - DNA, 1071 bp, Homo sapiens
aactgaaactatgggagatgcttacctccctggatcagagtgggcagggcaggctcccacccatgtctaccaccctcatggtgtcatggctgtactcctcccccaaagaatgaccatcatccctcctggagggttgtccaactctgccagcttcaacctgggtctctctcctcagaaaattaagaacacattttatctattccacaaattatgcttcctccttcctcctccttgaggccaactagctgggctcagcaaagagattcagaccacgcccgactccctccctcccctcaagcccaccacagcctctgggccacagctgcaggcgcttagcagccttttgagtatttatagccaagtccaccctctcccccagctggctacaattacagggccagccacactcccagcccttgcctccctggccatggtggggaacaggccaagccagcaccagagggatggtgccgcagtcccttccttggtaggagcacagtgcagggaagacagtagtcgaaagacacaggcccctgccactgcctcaaactgcagtaaatgcctcaaattgccaggagggatggtcattagggcaagctggcccagtcctgatcctggcccagaacctggcagaaagcaaagagccatctctactcttagcacacaaatgggcaggactgggctctgggttcttgggctcaggattccaaggcccgggctgcaaagcctgggttcataagtctggatctggactcagatctagactttaaggtcatcgctctgggctccagacctgtatttggggcccttggcctctgggcagggtctcctgatcattggagaccctagaaacaggaaccagagctcagaaggagggctgcatagctgctgacctagttactctccttgcggctcatttccttcctctctgtgtagacccacagctcccagctcagggaccactggggctgaagccctgtgaaagcccagtcaatgaggcagtggctcagccccaggccccctgcctgggtgacctgtcctacccacagcatttccactgggaagaaatca

SEQ ID NO: 132970 - DNA, 1056 bp, Homo sapiens
atgcctgccagggcctccacaaagttccctctgtgcaagctggcgcctctggaggtctcctggtcgggctggctggagtcctgggagagaggaggcgcccaggccacaccagagctgcttacaacccccatccttttgggctgggggcttcctggatcccacccaccaacagagggcttttgagggctgcaagcttggtgggcaggaccagggcatgcccaccaggtctaaggagaatgagatgacggctgcctactgcagcttccccacggtggctacacactcattcaggtggccagaaccaagcctgtggatgggggtgatggctctgtggggtattcgagcctgttgggacccaaggtctttcaccagggaggccagaaatgtgggagggaggctctcttccctacctctctcctcctaggcctcaccccacccttcctcctcaccaccctctcctttactgtatacccccaacaggctcaggactgcaggtagacatctccactgcccaggaatcactgagcgtgcagacagcacagcctcctctgaaggccggccataccagagtcctgcctcggcatgggcctcaccattgaggcagctccactgtctgtgctggtctgagggtgctgcctgtcatgggggcagccatctcccagggggccctcatcgccatcgtctgcaacggtctcgtgggcttcttgctgctgctgctctgggtcatcctctgctgggcctgccattctcgctctgccgacgttgactctctctctgaatccagtcccaactccagccctggcccctgtcctgagaaggccccaccaccccagaagcccagccatgaaggcagctacctgctgcagccctgaaggcccctggcctagcctggagcccaggacctaagtccacctcacctagagcctggaattaggatcccagagttcagccagcctggggtccagaactcaagagtccgcctgcttggagctggacccagcggcccagagtctagccagcttggctccaataggagctcagtggccctaaggagat

SEQ ID NO: 132971 - DNA, 1071 bp, Homo sapiens
gaggactggggcctctatctctctgcccccagccctaagagagaacctgctctgcctcaagcccagggtggctggaggggcagcatcattgcctctgactagacaactggcctgggcctgcgggtggtcaccttccttgtgggtcttgggcccttggcctcacagaggctgtttgccttggagggtctcagttgctgactgttgcctctctatagtactgtcccttcacatccagttcccatggtggttctggggagccaggcataagtgcagacatcggtcattggagttaaaacagaatctggagaattaaaacaaccctgaggcgtggggggaaggggaggctgggatcccagaccccaggtgcattgcacaggggcccagccttccagccccctacttctctttgctccccgacaatacactgtggctgggccccgctctgtgtcctggcctatcagccccctgcccacttgatctcttccagtgtggctctgctccattcttacaactctagacctgtctctgtgcaccctgcccctctcttcttgctgaacccattctcatttctatgttgtttgtctcttctttatttatttattttttttttttttgagacggagtctcactctgtctcccaggctggagtgcaatggtgagatctaggctcactgcaaccgctgcctgccaggttcaagcgattctcctgcctcagcctcccgggtagctgggttacaggcgcccgccaccatgcccggctaatttttgtatttttagtagagacggggttttgccatgttggccagactggtccaaactcctgacctcaggtgatccgcccaccttggcctcccaaagtgctgagattacaggcgtgagccactgtgcccagcctatatttatctctttctgtcccattcctatctctgaatctgtctttgtcctggttcctatctgcatttctttctgtatgtctctgttccatccctgtctctctgtatgtctccatcttgtgtctcttctcctgtctcttcttccctcgtttctatattcatccctctccatgcttgt

SEQ ID NO: 132972 - DNA, 1045 bp, Homo sapiens
gtggactgtcttttacccttgacccaggtcttagtttggaactggaaaagttgaagtgaaaaaccaggcttgggggaatgtgtgatgctggtgtaggagggggtagtccaggtgacagtgggggtgacagtggtaactatggaggcatcatattgtcttagttactgggatgcaggtcagtatgaggatagggttgggatgatgggatgatgagatgaaatttggaatgttgatattaagagttggtgacagtgactgtagtgacagtcattagtgatgatggggatatcagacttggaactaatgagatagttgtctatggtagttatcagaattgacaacagagaagaggcacgctgactatgatgttgatgacaatggttggcaatatgagagggtcaacatggtggctggagttgacaaagtgggttgttgccagtgattagtgtagtaatgaagctatgtctcctgaacagtgaagcctgatcctccagaaaatgtggtagcccggccagtgcccagcaaccctcgccggctggaggtgacgtggcagaccccctcgacctggcctgaccctgagtcttttcctctcaagttctttctgcgctaccgacccctcatcctggaccagtggcagcatgtgagtgccctgcccggccaagatcctgggtgcctgagttagaatcatgtgcagtgagtggcacccatatcccacgtggcagcagctccagtgtgagacctgatgcatcaggctctctgcggggaaaagggacaggtgggcctgggagaatggatggagctgaggcaggtgtccttaggggttcccagtgacccctgttagtgcagcgggaacacatatgtctttctgtggctccctggggtcgtggagagaaatgcagggagggagatggtgagggagggagatggcgggggagggagatggtgggggagggagatggcgggggagggagatggcaggggagggagatggcgggggagggagatggcgggcaggacaggcaaggctccctttccttacctcgct

SEQ ID NO: 132973 - DNA, 1077 bp, Homo sapiens
tcctcgtgtctctgtctctactgagggaagtctggggtgtctcttctctaggaagtgcacccgatactccagcagtcggaggacccattcaagactcccctcgtctctgcagcacagtcttcctctgggagtggacacaaagtggcaggagatgtggggctggggccgattcccccagacatcacctccatcctgtgattgatgagttgaggcccgcagccccctgctccccacggttcctgcctccattgagcaggtggagggggggttccgtgtccgcacagcccttgtttttctttaattaaacatctggctcttgtggcctgggaagcctcagaccctcgctgacagcctccccgccacaactttggcatcaatgatgggttgaggggggagagctggggctctggggcccacctgtccccatacagtgcaggggactgggagctccaagaatgccctgaccatactgtcctcacccccagtgccgccgcgggagcctgtgctcagctgccgctccaacacttaccccaagggcttctactgcagctggcatctgcccacccccacctacattcccaacaccttcaatgtgactgtgctgtgagtagctgcgcctgtgacccgggtccagccctgacctctgacctctcccccatcccaccaccatgccctctgtccataccccagccctgccttgggcttgacctttcctcaacctctgccccacctgacccttgatgttcgtaacagtgcctgggtctcacctctccccaggcatggctccaaaattatggtctgtgagaaggacccagccctcaagaaccgctgccacattcgctacatgcacctgttctccaccatcaagtacaaggtctccataagtgtcagcaatgccctgggccacaatgccacagctatcacctttgacgagttcaccattggtacgtgtggcggttggggggacctgctgcctactccagtgggaatgtaagtggatgtgtgccattggtggggatgtccacatgcatgcacatgtatacatggcatgtacatgcctctgcacaggtatgtaca

SEQ ID NO: 132974 - DNA, 1012 bp, Homo sapiens
atcttaagctaaaacaaaccagagattaaaatgatttttaaatggacagttccttctccagttttttaaaacttttatttgattggttaggatggaagctctgggtcccctggttcagcactgctttccctgcagccctgtttggctggaaaggaaagagtgaggagagggctatggtcaaagaagacgtctggggagaaatcacaagtgggaggtcgccggggcatttgggagtccagaagttggaatgcctcaagggatgccacgagataaggctgagccaggcctgagccttgagtgccaggcaggaggcggcgtgtgggtggggcgtgggtagggctggagtggaagggtcaccctgccccaccctgcctgatctggcctggcctagggtgtgggcagcttgcccctcctcctgtctgggccggcgggcaggcctcatgcgtgccgggggctccagcccaggcaggctggcgagatgagaggaaaaacatgcggtttggtgggctggacatggaaaaacaagccaattaggaggaaaacaaacaaaccctgggccagtgggggcacacgcacacatacacacgcgcacacagccccgcgtgggacccagggacaccctgccacaggctgacagtcacttgggtgtctcaagagcccccacaaggggcaacccagatgccgtgtatgcccagagcctgatactgtgacctgtgtgcataagagcatttgctcacacactctctttaacatgcactcacacggtgttcagttcatacgtgtgaacatgctgtgaattctgggcaccctcccacatgcacagtttgcaaaatacattcagcctcactatgctccatcacatatgcactgcctcatgtatgagctctagctgtcactgtgttcagacacaatggcacacttacaggcactctaacagagtaccttggccacacagcctagcacatagagacagtctcgagattgaacagcctcaccctgagtcacgtgcaaa

SEQ ID NO: 132975 - DNA, 1040 bp, Homo sapiens
gtctcctgggctctgtccatcacgcctgggttgctgaaggcagggctggggtttgcttttggctctgacaggccgctcctgggggtaggagaggaatggtcagagtgctcactccatcccagcagcaccgcaccccccaagcccccaacctgccctaagtagttcctgccttgtgaacttgacagctgccaggagttccctagggttccctgctgcccattctcccttctcctgctgctgcctgagccctggatggctgaggggcgggttgttgtggggtggcaggctgggaaggcagaggaaagggagagagacaggaagagagatgggggaggtggggggtagagacaggacagaaagagacaaggatggggtggggaagagaaagagataaggagaccgaaaaaggagtccaggagtggggcccctcaatgccagcttgcctgggtaataatggacgtcagtaactgggctgggcctgtgggtggcaagagatccgggtcatgggggtcaggaaactttaaaaaacccagggactggagaggaactgggttttctctgagaactgacccctctcagcactatgcaaactctctgtcacatgcaaacacacacacacagaagatcgcccattcacatacctagcccctgtacatgctcactcacattcacatttggagacattcatatacccacacacttgcacaggcatagaggagctttgaacactcttcatctccccaaacactcacacagacaccgagcctctcgtcctcactcatccatcctcacaggctcttgtctgagcacgctcgcctgcgggtgctgggccgggctgtgacctgtgacttttgccctgtgcccccaccccccacagaggcaccccatgtgcagtacgagcgcctgggctctgacgtgacactgccatgtgggacagcaaactgggatgctgcggtgacgtggcgggtaaatgggacagacctggcccctgacctgctcaacggctctcagctggtgctccatggcctggaactgggcca

SEQ ID NO: 132976 - DNA, 1062 bp, Homo sapiens
tctctgttatgctatgtctgcactgtctggagctgagtctctggcactttctcggggtatatctggcactgcgtctctgtcagtttttctggctgtgtgtctggctgtttctctggcagtctttataacggtgtctctggcagtgtgtctgactgtgtgtctgacagtgtctctggcagtgtttggagtggtgtggatacttcctgactgagcatctggctgtggctctggctcttctctcaagctgtttttctgggtgtacgcctgtttgcgtctatcagtttctctggtatttctctgcttgtgtgtcagacggtttctctggcactgtttctgacagtgtcttagctctctggctttgtcgccgacggcttcactgcctgtgctccttgctcgtccttcggcagtgtatctgcctgggtctagctgagtcctttacagtgtttctggtgggtcctttgattgtgtcgctgttctctgaccacctctctggctggttatctggtttcatctacctgtctctttggctttgtctgatggtccttctaacagtctctggtgtatcttccactgtgtgtggagctgtttctttggggttctgtctggtggtttggggcagtgtccccggccagcatctttgctgtgtggctggctggaatctcggagagtggccctggttgagtgtctggtagcatccctcagtatttctctggatctttgcttctgtgtggttgatagttctctctcttcagactgaaggtcagggggtttgttacatttgcagcccattctgcaggaaataattatttccctgccatcaagtgtaggtgtgtgctgggggagggggagagaatagttggactcatctcaggaagcaggacaccaggttggggggcactggatccatcctggcttctggggccatgtcctgagtgcatcctgtgtacttgcatgggtgcatgtggacactgatgcacgcctactgggctgggggtcccaggctcctaggggcacatggctggggtcaagggtgggccggggttcctgacaaggacttacata

SEQ ID NO: 132977 - DNA, 1066 bp, Homo sapiens
agtaaccttgcttcgaggtcacttgccttgaggcccccctgatccttcattgtccaggccagactgagcctacctgagcctcggcgtgcccacagcaacccaaaccctgaagtgcgcaacacactattacagatcaacccgcacacacaattacagctgagacgcagttagtggtgctcattatcccccaccctgacctgatggcggcagggcttccccagggttggccttctacaatctaaactgctgtaattctgcagggataaatagaggctttccaaaactcacacctccttcccccaggttctgccctcagctgggcatggggtgaggggaggggtacagggcaacccggaacattgctgggactggcaagacggttcttgggtcttgggtcctaagccagattcttaaactgggtaacaggggttcctgacctggagcctgtcgctgtgtctgtttgttaccgacggcggctgtcagacttcagggctgccagtattgctgtggactagtatcattctgtgagactgttactgagtctatcaacattgctgtgtcactgtgttgatgtcaccgtcagtgtgactcgatgtgactgagtctcattgcatctttgattctgaggttaccatcactgtgactgtgtcagtgtcaactggtatcattgccccgtttgttggtgtcaatgtatgtgactgtcactcactgcattattgtcatcgtggtgactgtcaacatccctgtgtgtcattgtcaacggtacaactgtgtcattttcaatgggtgttgttatcattgtgtaatggtatctttatgccacagtgggacaatggcagtaagttggggccccagaatttgactcttaatgtgttacctgtgtgggagtaatgatgacactagggttctgtgctgggagaggtgcagggacccttgtgctgacaaggggctcaggggcttttgggcgctaggctccttccttgcttatggggtaccccctctgttccctcctcattctggggctgacctctttgaggggctgagaggaatcctgggctaatttgca

SEQ ID NO: 132978 - DNA, 1083 bp, Homo sapiens
ggatggagcactaccggaaagctggctctgtagagctcccagcgccttccccaatgccccagctacctcctgatacccttgagatgcgggtccgagatggcagcaaaattcgcaacctgctggggttggctctgggtcggttggagggcggcagtgctcggcatgtagtgttctcaggttctggcagggctgcaggaaaggctgtcagctgcgctgagattgtcaagcggcgggtcccaggcctgcaccagctcaccaagctacgtttccttcagactgaggacagctgggtcccagcctcacctgacacagggctagaccccctcacagtgcgccgccatgtgcctgcagtgtgggtgctgctcagccgggaccccctggaccccaatgagtgtggttaccaacccccaggagcaccccctggcctgggttccatgcccagctccagctgtggccctcgttcccgaagaagggctcgagacacccgatcgtgaagacctgctgagccagcctgttctccgggcctgaatgtctggggtgcttgtgccttttctgagaagcgttgtgactgctcaacatccccatcaaggtttgagtccacaaaagtggacctccctatcatgcttccccttccctctagcatgtgggaagggactgctgtgaagaatgacagatgtggggcctctgccaagttctgcattgctaaataagggcttcctctgccttctacctacagtgcatttgaactgccttctgaaagaggtccagggagggatttaggaaataaagtttctacctatttgatgagcctctactcagcctgctatgtggagtgggattaaagaaatgggagtccccgcccttaccccggggggctgatcgggtgaagacagaggaagagtagtaggctcaggccggtgctgggagaatatagtgtctacaagaagcctcagtcagtactgaatatatctaattccctggatagttatttgcccctgctttggcctggtttaggaacactgccaggtcagacatttctctccatctgcagcatacagtatagtatagtggttgtgagcatgg

SEQ ID NO: 132979 - DNA, 1048 bp, Homo sapiens
tattcagatgtggactagcactgctttataccagtgacagaattttgacaactacgaagctcaggtgccctctcctcccctttctactatgggaagatcttttattgaagaacttctgatggcgtgtcaggcatgtcctggagctaagtgcgtccaaggtaatgatgtctgtttgtacactaaatgaggaattagttgtcactagcagactgtgctcccatttcagaactaacttctcaaacattctcttcctttgggatctatgacgctgaccctcctggttttccttctacctcttacggctgcttctcagtgttatttgcctcccccctggcattcctcatcctctaccctaaaaactgggtgagtgcagtcacttccttagtctcctcctctatttgaccctttaatattgggattctttacattctacccctaaactttaggtaggctcactcgcttccatggtgtcaattactatttacatgtcaatatgtctcaaatgtatatctctggtccagatttctgttctgagaaccagacttttatgtctagttgtctactggacttttccacttggatatccaatagtcatttcaaactcaatctgtatgcccttaactgtactctttctctcccctaacctgattctcttctgtattccctaattcagtgattgcaccatcattgggatcccagttgtttggactcttccatctcccacaccaaatttgatgtggaggggatagggctagaggtaggccagccaatctagaggtcatgaaggcttgaatgaggatgcttgtgtttctcatgcccaaacccaggacttaggaaccagaaaatatattgtgtatactctatattccatagactctaaaatagttcgttatcttccccatcagacttgaaactccccaaggagtacatgattctctctctccactttaaggattcctggaaggtggggctgcatctcctttaatattagagaagggaggccaacctagattactgggattcaggtttgagagtctgggagaatgag

SEQ ID NO: 132980 - DNA, 2100 bp, Homo sapiens
tttttttttttttttttttaatagtgaaacaatttacttaagaaatagagcactggacttcccagtatatttgaggttgggtgtatgcatcgcaggcatggtggttgaacagctacacttttcagataaagcctcacaagtcctggaactacccctttcctagctacaagcccagcccaggtttagctaaatttctgcttgattcgagtgaggcttgggagtgcagacttccatacagtgggtccatggccaagcgaggtagccgtccatggcttctccaaagagaggacgtgggtcagatgatgccacagaacatttaggagtggccatctgggccagcccagtgaggtagggctttttgtttttctgaagctccctctccattccccacccctagttagtccatgggccagggaagcagcagccatggaagggcagggcagagctggcttttcacttgggtgctccctgtcccccaggggagacggtagtacacgggcctggtgaggcaacagctgtggagtgggggccaaacacatggatggtggagtacggccggggcgtcatcccatccaccctggccttcgcgctggccgacactgtcttcagcacccaggacttcctcaccctcttctatactcttcgctcctatgctcggggcctccggcttgagctcaccacctacctctttggccaggacccttgaccagccaggcctgaaggaagacctgcggatagacaggagcgggcaggcccgcacatatccacttgctggagcccatgtttacagacagggacatacaccatgcagatcctgagttcctgctgtatgagcagggatatccatgcttatgtatccaaacacagagacccatgggaacaaatgagacacatatagatactgagacctgtgtgtacagtaggaccatgcactcacacccatctggagagggagcccccggtataccaagggagccagttgtgttcagacacacacatcacagcttgactcactaactgaggcctttccatagctccacagcttcccacctcctccccaccaaaccggggttctagagttaaggatgggggagggtattatactgcctcagtctgactcctcaacccagcagcaatttgaggggatgagggggaagaggagctgccttttggaggcccccttcacctgcagctatgatgcccttccccttctcccctgtcctcaccatatgccttatccccattctactcccctgctatgcaagtgcccctgtggcttgtccccaaccccctcagcaacaaagctcagctggggaacgagagtaatttgaagaatgcttgaagtcagcgtcttccattccagaaagacccccattcttcctttgggggtatgatgtggaagctggtttcagcccaggacccaccactgaggagaggatctagacaggtgggcctaattccaaggggcccttcctggcctggagaaggccttttacacacacacaacacatacacacacacacacacacacacatatcacagttttcacacagcccctgctgcattctctgtccatctgtctgtttctattaataaagatttgttgatctgttccatctttttgtgtgtctgagcagccggaaaaagcctctgacccctggggacctcaggaagatctctctcttgctgtgtgattcatggtagattttttttttttttttttaagagatggggtctcctctgttgcccaggctggagtgcagtggcacagtgacatgatcatagctccctgcagccttgaactcatggtcccaaacaattttcctgccttagccttatgagtagctgggaccttatgagtagcaaatgccaccatgcctggttagctttttaaattttttttagaaatggggtcttgctatgttgccccggctgatctccagctcctggcctcaagtgatccttcctcagtctccagagtagctgagataacagaaacaagccaccatgcctgacaagacagtggcttttgactagtagggactatatacttgagtgtgccttagaatcacctaagacactctttgagtcagtaactca

SEQ ID NO: 132981 - DNA, 1709 bp, Homo sapiens
ttgctctaggggctggtccctgtgggctggcatgccccttctgcgagctcttaaagacactgctcaggtgtcaccgcctctggaatgcccaccctggggctcccagcttgaactgcctcctctccgcttcagtcctggtaaaggcgggccttaacaatcgttgagtcccagaaggcttcacttccgggctcgtctgcttcaccagccagtgagctcgggcgagcccgtccattctgggtctcactatccccacacctatccgtatgtagagtggcgctagctaggtcagacctcgcctgaagaccctgacatctgccgctgggcgacttggccccgcccccttgcctcccttgcgcggcaccgccccactcctccgtgctccccccgaggaaatggttcaaccgaagggcggtgccaaggtgcccgggccgctccgattggtcagggcgagccgtaccacggcggtggcgggggagcgcttcgtgggcagccggcgggctccgaggccgtgagcgcaaagcctcaggccccggctccctcctgagctgcgccgtgccaggccgcccgccgggatgcagtgggccgtgggccggcggtgggcgtgggccgcgctgctcctggctgtcgcagcggtgctgacccaggtcgtctggctctggctgggtacgcagagcttcgtcttccagcgcgaagagatagcgcagttggcgcggcagtacgctggtgagcgggcagagggcagggaggggagcggccggcctgggagcggagcctagggttccgaaggcgccatccccggacctaggaccggtgccagccctgactccgccgcccctctgcctccgccagggctggaccacgagctggccttctctcgtctgatcgtggagctgcggcggctgcacccaggccacgtgctgcccgacgaggagctgcagtgggtgttcgtgaatgcgggtggctggatgggcgccatgtgccttctgcacgcctcgctgtccgagtatgtgctgctcttcggcaccgccttgggctcccgcggccactcgggtcagtgctagcggcgggccagactgggaggctggggttgtaaaggggcccatgccctcctttctgatgtttggctgggccatgcaatggcgcgaataccctgatagtgtcatgtgcgattgtcactcagggcgctactgggctgagatctcggataccatcatctctggcaccttccaccagtggagagagggcaccaccaaaagtgaggtcttctacccaggtgggtaagaaggctctgtcagagaagtgggtcccttcacgcggggggtgcccacaattgcggggagcatggcatggaaaaggagtgtgttgggggggccctcctcatggttcccttcctccaccctcccataagccacaggtgattggttggggcagagctgagggactcttgctttcctctgtcaaggggaaacaaaacataacaacttcctattaaacatgtctgatttttatctgcccaggcacaattttgcccagacagtattccaacaactgttggggagacaatgggtaatcagaaatgctctcaataccccaaaagacaagacagacagttatctttttatttgtttgttttttgagatggagtcttgctcagtcgcccaggctggcgtgcagtggcgcgatctcggctcactgcaagctccgcttcc

SEQ ID NO: 132982 - DNA, 1054 bp, Homo sapiens
gcaggggatcctgggagatgtagttttcagatacctggttgggtttgggagtaggtgctaacctggataactgtaaaagggctctctctccccactgtctctcttctttctgtcaggggctcccacaggatcagaggctggggccaactggaaccattggcagctgcacgctcattactaccctccgctcctgcgctctgccactgtccggaaattcatggttggctacgaaatgcttgctcaggctcagagggacctcacccctgagcaggtcaggactcagaacagtctggcgtctccagactctcacatgcagtatgtgcaggcacctgatacttctgttgcccttgtgctccagtcattgcacaaggcagaaaacagctctggcaggaagggactgccaaagttaggagccctagggcctggaaggagagtatggtcctcagatcccccttctctcctgcttcctccagggaacccaacagtcatgaccctgatagtttcccataacaacctgggcattccttgggactcaggagctgctaaactctttcatcccctggtggcttcagcagtccttatcaccagcctcacaatcccacaggcccacccccagtgggcctgtggcattcatatttcatattcatatttcaaaccacaatatccagcaaaatgtctcctgagcacccagaactccataccatcggccgggtgtggtggctcatgccttaatcccagcactttgggaggtcaagatgggaggattgcttgagcccagaagttcgagactagcctgggaaacataggaagccctcgtctctacaaaaaaaatttaaaaagttagccaggtatggtggcatatacttgtggtcccagatacttgggaggctgagataggatcacttgggcccaggagtttgaggctgcagtgagccatcatcatggcatcattgcattccagcctgggcaacagagcaagacctcgtctcaaaaaaaaaaaaaaaatgaagtccatgccaccattcttggcagcccagcccttatcctccttaat

SEQ ID NO: 132983 - DNA, 1398 bp, Homo sapiens
gtggggttttgcagttttcaaaccacaatatccagcaaagtttgagaaccactgccctacacagccctccttcttctttatcttatctggagtcaggggcaccttcagcttctccaatcacctggccagtggctcttgtttccagtcctgctgttccagggtggataggccttcaggcggagacccaggaatccagctccagactctgtcccaagcagcctcttcagtccgggacgggacaggaagtgtccggcggaggtgggggtggaggtgattggcagttggagtctccaatgggccaggagcccccctatttcactcctctccttccattggcgcctgggcggagccacccccgctgcgggggcccagggcgggagggagtagaggccggggcagagggcgagggcgagggcagagggcgctggcggcagcggccgcggaaggtgaggcctggtgtagacgccaaagtcttgtcaggagtgggcggggcagggtgatgtatgatctgaaaggccgggagtgactaacgactgtcagtgtgtatgtgcctgtgaggctgtgtctgtgtgacagtatcattgtgtgcgattctgagtgtcacttggtgcagctgtcagctaatgtgactgcgtgtgtcagtgtgcatggagctggaggtgcatgtggctgtgcaagtgtgggattatgtgtgtatctgtcaatgcacatttttggtgggactgggttgtgtgtttgtgtgagagggactgtgaccacatgagggaatgtgttttgggaaggtctctgtggggtttgagaccatgtctgccagcgtgagagtgggtggctggctttgtgtgtgccaatgtgtgacttcagcagtagcagagcaaaagtgaggtttgtgactatgtgtgtgtcctgggtcctaacttaaaccgtgtgggagtacagctgtattcatgtattgggggacctacctcaagagcccatgggactgacctttctcttaagtgtccagcattgacagacacacccacaacacacgtggcttcccctccttcctctgctcaagaatccccagcatcaggtctactgctccttattttctgtttccctgcttggctcagtttcccttacgtgccgttttctgtccctattgctgtcttactagagatacctctgtgtgtttcttcacagctttgttcccctggtctctctgtgtgggtgcatttccagttttgcctttcctttctctctgtctctctctgtgcccctatgcctgccttccctgctgatcttgatctctggctagttgggggcctgtaacagtgatgagatgcgggtctgccccggctaagagctccctgagagagggggcttagaccatgatgaagagttgcttttaggcggtgc

SEQ ID NO: 132984 - DNA, 1054 bp, Homo sapiens
ggtggacttcccttcagggtattagtattagtactaatactcttccagggtattagactcagagctggatattcatccttttttttcaaggtgtcttggatcagtgctaggtcccctccttcattcttaatgtgcctgggcccagagctaggtccactcccgtatcttcagtgtgttgaagaggctccctcagagctgggctcctctactcatcttcagagtgttaagcttagaactgagtcacctccctcattctcagggtgtctgggccaagatccggtcttactgtctctcctgatttgcctcctgcttcttctaggagctccaaacctgtagaggacccaggagggcttcggcagattccacctataattctgtcttgctggtgtggatagaaaccaggcaggacagtagatccctatggttggatctcagctggaagttctgtttggagcccatttctgtgagaccctgtatttcaaatttgcagctgaaaggtgcttgtacctctgatttcaccccagagttggagttctgctcaaggaacgtgtgtaatgtgtacatctgtgtccatgtgtgaccatgtgtctgtgaggcagggaacatgtattctctgcatgcatgtatgtaggtgcctggggagtgtgtgtgggtccttggctcttggcctttccccttgcaggggttgtgcaggtgtgaataaagagaataaggaagttcttggagattatactcagaaattattatccaatgctgctttattatttggctattgggggcttcagcccattttccttagcatcccaaaattcagcttgggcagagtcccatggagctttctctcttggtgctcaaaccactgtgacaggctggggttctgggggtggatgcagatgctgcgttgagccaggtgaagcctgggtagagaaaggtccaaagctatgaccatagcttggggatgagattagggtcatccccaatgaccctaattaggggttaggagcaaggaccagatgaaaacctgagttggcaacagaattagcagttagggctg

SEQ ID NO: 132985 - DNA, 1067 bp, Homo sapiens
agtaaaaaacttagaaactcttgaatactagaatattcaaaagtgtgaacacaaatcatgagggagagtcaagagtgggtgaagagcggagcgtgtgagcagcacagaggcctcctctcctctcctctcctcacctcgctctcgcggcctacctttaccggcccgtctgctcggcacccagaacaccttccaccatgaccacctcagcatgttcccacttaaataaaggcatcaagcaggtgtacatatccctgcctcagggtgagaaagtccgggtcatgtatatctggatcgatggtactggaaaaggactgcactgcaagacctggaccctggacagtgagcccaagtgtgtggaagagttgcctgaggggaattttgatggctctatagtactttacagtctgaaggctccaacagtgacatgtatctcgttcctgctgctatgtttaaggaccctttccgtaaggatcctaacaagctggtattgtgtgaagttttcaagtacaatcgaaagcctgcagagaccaatttgaggcacacctgtaaacggataatcgacgtgatgagcaaccagcacccctggtttggcatggagcaggaatataccctcatggggacaaatggccacccctttggttggccttccagtggcttcccggggcctcagactccatattactgcagtgtgggagcagacagaacctatggcagggacatcgtggaggctcattacagcgcctgcttgtatgctggagtcaggattgtggggactaatgccaatcatgcctccccagtgagaatttcaaattggaccctgtgaaggaatcagcatgggagatcatctctgggtggctcgtttcatcttgcatcgtgtgtgtgaagactttggagtgatagcaacctttgatcctaagcccattcctgggaactggaatggtgcaggctgccataccaactttagcaccaaggccatgtgggaggagaatggtctgaaatacactggggaggccatcaagaaattaagcaagcgacaccagtaccacatctgtgcctgtgatcccaaa

SEQ ID NO: 132986 - DNA, 1055 bp, Homo sapiens
ccgttccactggccctctgcctggaagctgctctcgttctctaggggcaccctcttggtgtgctagggttctttcccagtcccaggggaaagaaggtgtgggttgaggcagaaatggcagaccacccccccccgctccctctcagacggcttttgctgccatttccgaaaacggttgcccccccccccaacgaggtgctctttcttctctgcctctcccaaccccaccccccaccccatctcccccacagacgtgacatgctggtggggggcaatgggggagtacccgcctttgtggagccttttcttcgtcagagaaaggtgactcccagaaccatgagtcaacccagccacctgcagcagggcctgtgggggcagcagtgagggccattgtccctgcccacctagggccttgggcgcctcccccttacccggttacaggcctcactcctggaaggacaccctgtacacctccctgctgtgaagcagtcagaggcagaaaggcaggtctcagctgtggctgccagcctaggacattgctagaaagactctggttctcctggctttggcaggggttggccaagtctcagaagggctgagaatggcttctggccatcccccagagagctctagctacaggaaagtcccccttcccctgatatccaccacagacacaccgatagagggagactggaatggaagaattcgggttgtacgtttctcttataacaaatgctcctgcacccaccttaaaagggactcagaggaatatgggtctgatgatgggccggatcctaaaccacagggtggactgggggcgtagggtgaggctaggagaggtattaaggaaatggtggttggttagtgcccaattgtctcctaacagctggggttgaaaaagtcctgtccccaggatgcttttgttcactcacactggtgcttaggcggcacagccctcacagttttgtgtgtagacgctggcaaatgagtaaagggaactgttgccctggttgggggaaggatagtgtcgccccccctgctaatgagggagttgga

SEQ ID NO: 132987 - DNA, 1059 bp, Homo sapiens
cgcaggcccacagaacaggcatgacctgctgaaggttacccagggagtcatttagggattgcaagatcatcaggaacagggctggggcagaagagaaggcatcaagtcttggccctgggtttctttcagaaacaaggagaccagtgctggtccagtggctgtgatgggaaaagattattacaagattcttgggatcccatcgggggccaacgaggatgagatcaagaaagcctaccggaagatggccttgaagtaccacccagacaagaataaagaacccaacgctgaggagaagtttaaggagattgcagaggcctatgatgtgctaagtgaccccaagaaacggggcctgtatgaccagtatggggaggaaggtaagagggcagcactccagcccaatcccggacccctccgcttggtaggggtcccaggtgcaccagtttgtgtagcggggaactggaggctgtggagggggtgagggcagcaagggtttccagcactgtcacccagagaagagagaagcccacccactacccagctcagctcaccctagttctccccgcctctctctgccccctccctcctcgggttcaggccttagagaggtctgaagcaagagccagaggccttccccgcccttctttccttcccagccttattagtcctgcctgaagtctccgctgcttcattggctgatgaggaaggttggggagagggagtgtgtggctctctgaggacagagcatttacattcatcagcataaaagtctggcccttaagcagcctgggaattaactaccagagctctgagcagaaatggttttccccttctctcccccggccctgcctgcttctggccagcagaacagaggtggagctttgcctcccagaggaagtggcagggatccaagggtggacggggaactgctgctggcatcttcccccttccctggggtagctggtggccatggggtgggaggcaggaaaggcccaaataaagcctctgagagggaggcccctcccagcacatcccacggccatgatgtagctgctaattctg

SEQ ID NO: 132988 - DNA, 1032 bp, Homo sapiens
ttcctcccgggttggatccctagcctatttgcgactgttcacttaccagccccctctgtggtcacatcctgtctgatggccccttgtcctatatgtctttggagataagcaaagatttgggaaccaagtatcacttgtaatgtgacaccaggctagtcattcaaggctttttgagacatctttggaccatgagtatgtggaaaagattacaggactggaagtcacatcctctaagtcctctagtcctggcttttccacctattgggtaagcaagcctctttgaatctcaagttgtgcatcgttattaaatatataattaggaatggaagataatcttgccagaagcctttcttactctattagcctggccctctctgtgggatttaaaggttgcttctttctttaagcctgtgaactgggagctagagggcagggggaagacactgggattggggccagaataagccacactgcccctaacttctcctcccctctaggcctgaagaccggcggtggcacatcaggtggctccagtggctcctttcactacacctttcatggggacccccatgccacctttgcctccttctttggtggctccaaccccttcgatatcttctttgccagcagccgctccactcggcccttcagtggctttgacccagatgacatggatgtggatgaagatgaggacccatttggcgctttcggccgttttggcttcaatgggctgagtaggggtccaaggcgagccccagaaccactgtaccctcggcgcaaggtgcaggaccccccagtggtgcacgagctgcgggtgtccctggaggagatctaccatggctccaccaagcgcatgaagatcacaaggcgtcgcctcaaccctgatgggcgaactgtgcgcaccgaggacaagatcctgcacatagtcatcaagcgtggctggaaggaaggcaccaagatcaccttccccaaagaaggcgacgccacacctgacaacatccctgctgacatcgtctttgtgctcaaagacaa

SEQ ID NO: 132989 - DNA, 1053 bp, Homo sapiens
ggctctggtagaggagtagagagtgagctgggggctgggagctcagtggcccagtggttctttctttgctccactgcctccccgtcaggcttatagttgctttggtctgcgataggctcacttacgtgggactttgaaacagagtttgaggatgggctggagcccctacctgggaacacaggaacacagttttctttttgctccatttcccctacaatagactgagaatcagacaagactcccagagggctggctccatgcaggtcttggggtaagttacaagctgggtgcttagaggcccaggagttttttgtcttttgtatgtccccacatctagcttcagaatcagacaggacccccatggatctaactctgagcagctccggtgcaagagctgggggtgggctgagggccagagatggagacctagaagccgaggaattcctggaatgctcagtatccttccatgtagcttctgatgtagcgaggcattccccaggattgattctgtgtggttccataagggtggttggaggtgtgctatgaacagggtctggggaatcagatgcccagaggttctctttctgccccatggtctcccacaaagctttggattcagacaggactccctgggggcccattactagagactccaggagagggactgagggaaggctgggaggtgaaactgggtctgcagggacccaaatattttctctactttgcatgcccttccatggtgtctcagatgctggtgggacacattcagggctggttccagagagctctgggttgaggtccaagactggagactcaaaagcccagaggtttcctgagttttctctgcattcccactggggcttatatctggatggatcttccagggaactctctctctggagttctggcagggagtctaggggagggcaagggactggcattgaagactcagaggcctgaggtttctctctgtatcccacggttccccagaagtccttagatatagcaagtcctccttcagggctaacttttctgggttctgacagagaagct

SEQ ID NO: 132990 - DNA, 1041 bp, Homo sapiens
accttttgcaaacccctggtaagggaagccttgagggtagggaaggagagatacttctccatgtgggcccaaggacagtgcttacagtggcgaggggtcaggatgtcacttgctcttcgccctgcctctggctgatcctggggacccgaagctttggggagaagcagctggggaagagcagtgtgttgagagctctggcccctgtgttgagacctttggggaaatgtgcttacaggggcctctactaggcttctggcctgggcagggtggttcttccctgtgactgtggataaccccaaccttgcagtccctcttctatggtctcctgctttgggtttcctagggtgctctctctttttggctgaggatgaggctgaagccttgtcctttctcttgcctgagaccagaaccttagagtttgagggttctcctgggcctggagatagatagtccacaccagcctccatgtgtacacatggcccttgggatgggacctggctcaccatcttccccttcattttctcccctctctgagacccttgttccgccctgccagactcctgtggctgaagctgggaagaggattggaagtgatgacagtgggaggactggacaggctgaggtactgtgcgctgaacttcttgaggatgacaacttgaagagtgggggcatggattggggggataaatctgctgtggtgggcaggaagggagtccccagaagtctggaattgtggagctcagaataggggagctgcaaaatgattgacttgggccaggggctctggaggcagggctctgccgcagtttcttcagcctgagtttcagctctctactccactgccaggcatggatcccaggatgggtgagcaactctgggacagtccatctctgggagagtggggcctctgccttaacccctgggcacgttactcccttgggtagaccaggatgagtgcgttcaatcttcacagcttcagctagggtgggaggctggggtactgggtgtaggggatccactgccagagggctggggccttgg

SEQ ID NO: 132991 - DNA, 1067 bp, Homo sapiens
cccaagcgacccaaatatcattcacagctatttggaccaaaccaatatctaacctaggtccacaagttggcatctgttagattcctttattcaaactttgaaaaataagagacagggtttcgttctgttgctcaggctaagagtgtagtggctatttacgggtgctatatcgctactgatctgtgcaggaattttatctgctgtgtttcccacctgggccagttcaccccttcttaggcactggtggtcccccacttctggaaggtcaccattattgatgccaaacttagcatcattcggttcccaatcgtcatggcacactacatcctgggctcaagggattctcctgcctcagcctcccaagtagctgggcttataagtatgtaccaccacccctagccttttactcaaacttttatgacacttgttgaagagatcggggcagttgatctccagagaattgtagccatgtgcaggatggattagaaggaatagagcaaccaatttagtgagaaataatgactaagacaatagtgatggtggaaatggagaggggaagatggatttgaaatacatttcataggtataattgacaagttttgttttgttttgttttgtttttttgagatggagtcttgctctattgcccaggctggagtgcagtggcatgatctcagctcactgcaacctccgcctcctggttcaaacaattcttctgcctcagcctcccaagtagctgggattacaggtgcacaccaccacacccggctaatttttgtgtttttagtagagatggggtaccacccaggctggtatcgatctcctgacctcaaatgatcctcctacctcggcctgccaaagtgctgggattacacgcatgagccactgagcctggctgacaagatttggtgatggcttagatcagggaggaaggaagagtcaaagcttaagtatttaggtggatgtcatgcattttgataggaatgggcgtgttggaggaaaaagttaaagggaaaatacgtttttggacaagtcaaatatgagataatgtctggtatgctgttgaa

SEQ ID NO: 132992 - DNA, 2637 bp, Homo sapiens
cctgccatcctcagacctggccgtcttgatcagctcatctacatcccacttcctgatgagaagtcccgtgttgccatcctcaaggctaacctgcgcaagtccccagttgccaaggcaggtgcaagatcatgggctgtgggagacttgcatgagtcctcaggctggtacggagtgctctttagtttctggacaagattccactggggttagggttggtctaaagggaaggtagaatttttgaggatatcaagataatctagaatcaggaataaaatggggtggccaaagaaggggcaaactgtagttgggagtgctcgggtagcccaaagatctgcgtatctcgagaggagaggctaaatgctaaggtacctctgctgctgcttttaggatgtggacttggagttcctggctaaaatgactaatggcttctctggagctgacctgacagagatttgccagcgtgcttgcaagctggccatccgtgaatccatcgagagtgagattaggcgagaacgagagaggcagacaaacccatcagccatggtgagtctgcatcctttccccagatgtgccaatcatggagagccaggcagcagccaccaccatgccctggagttgagagtagaagctgttggaaagatcatctaactgagaagaattttaatagggcatcaaagataaagaatgctgaggtgaatccattcaatttggaataaggccgagaagagatggtcaggctccattctcagtctgaaccaagctccatgagggaaatcaaagtatgagagtgcagcaaacacagcaaggttttttttgttttttgttttttgttttttttttgagacgaagtctcactctgttgcccagactggagtgcagtggcacgatcttggctcactgcaacttctgcctcccaggttcaagcgattctcctgcctcagcctcccgagtagctgggactacaggcacatgccaccatgtccggctagttttttgtattttttttttagtagaaacgtggtttcaccacgttagccaggatggtctcgatctcctgaccttgtgatgtgcccacctcggcctcccaaagtgctgggattacaggcgtgaaccacagagcaaggttttgagctgagatgagactcatatacttatccctgatggttggggaagggatagggtccacagacctcccaaaatgaaaaggcaaattcatgtgtttgtaagttccataaaggtaagatctctgtcatctcacttgttttccactatgtcttgtgttacccttaattaattcattaagttccaaacatgggacttaatgagcaaataaatggctttctttcccttttgaagggtctgtgacatcccttctctctcccataaaagcttaacaactactgatgaactaatcctaggaggtagtcacataagtcacagaaattggcctctcaatggaagagataggttttgagctgggctgtgaagagagtagaatttgaataaagggaataagcagcccaaataatgtgctctagtagtaggattgcaatcattgggaaaccctgggtagatttaagagtatatatgtcactggaagtgagaccgctaggtaggatgtaatccaaatgtggtaagcactgaaagccattggcatttccttttaaagtattaaggtttattaaggtatgatataaatacaataaaattcactctttctatataccatttccatgctttatgacaagtgtgtgtaagttctataactactaccacagttgagacttaaaatttctactatctcaaaaagtttccttagccacttcagtcaacatctcccctccttaagccccatcactgatgtgatttctgtccctacagttttcccttttccagagtgcattgacaagtttttaagcagagcagtgactcaattttaggaagcatggcctagcatcttacctcaggttggattggaagggcaaggagaccaataaactgcagtaatgggaggcctgggatgaaatccaggctgggctttaactagccctagtgatctgtgtttaccaactataggaggtagaagaggatgatccagtgcctgagatccgtcgagatcactttgaagaagccatgcgctttgcgcgccgttctgtcagtgacaatgacattcggaagtatgagatgtttgcccagacccttcagcagagtcggggctttggcagcttcaggtaagttggttgggagcattagacagtgcttaagttactttggggacctacaccaaaagggatgggagtcctaaggaagctagaggggtagttgtggaaatcttacacaggccctgtcctaaccctcttttttggctttgctcttgtacacagattcccttcagggaaccagggtggagctggccccagtcagggcagtggaggcggcacaggtggcagtgtatacacagaagacaatgatgatgacctgtatggctaagtggtggtggccagcgtgcagtgagctggcctgcctggaccttgttccctgggggtgggggcgcttgcccaggagagggaccaggggtgcgcccacagcctgctccattctccagtctgaacagttcagctacagtctgactctgga

SEQ ID NO: 132993 - DNA, 6201 bp, Homo sapiens
tgatccatctgccatggcctcccaaagtgctgggattacaggcatgagccatcaagcctagtctcattttcttttcttttttttttgagacagagtgtcgcgctgtcccccaggctggagcgcagtggtgcaatctcggctcactgcaacctccgcctcctgggttcaagcaattctcctgcctcagcctcccaagtagctgggattacaggcgtctgccaccacgcccggctaatttttgtgtttttagtagagacggggtttcaccatgttggtcaggctcgtctcgaactcttgacctcaggtgagccactgtgcccggccgctagactcattttcatatatttgtatacacacacatgcaaaccctgcacacatattcatatgtcttaccctctttttttcctccatccttcctttgctccatctctccccttctctgttccaggagagtaagctatctttatggatctctgaaggagaaagtggtccattttggctgggtcagggtccagagtgcacagttctaccattggtggttgtagtgaaaacttgggctacctatatggcagaagtcagaacttgatgggcttctgacatgtcaggttttgttcactgacctcttgtcagagggactcttcacagtttacctttctcatcttgcctgctgcttattaagacaggtggggtggagttggggagaggtagggcaatatctaatgaagggcactatctaatgagcttggcattttgaccccagggtctgatgagttctcactttgtcttgtagttgacacctctaactgtgcttgtactgtttgctctcgcaggagacatttttcttgtccgtggtgggatgcgtgctgtggagttcaaagtggtggaaacagatcctagcccttattgcattgttgctccagacacagtgatccactgcgaaggggagcctatcaaacgagaggtgagttttctccctgattccagtatccgattttatgattactcagtgtggcatcatgtggtaactgtcaggactgggtgctcggccggctgcggtggctgacacctgtaatcccagtactttgggagactgagatgggcagatcacttgaggtcaggtgttcaagaccagcctgggcaacatggtgaaatcccatctctactaaaaatacaaaaattagccaggcatggtggtacacatctgtaatcccagctactcaggaggctgaggcaggagaatcggttgaacccaggagtcggaggttgcagtgagctgagattgtgccactgcactccagcctgggtgacagagtgagactctgtctcaaaaaagaaaaagactgggtgttctttggagaactaaccatctttcagggatgagaaacctgccagctattcatttctgggcctaattgtttcttggatttacctaatgccaggaatttcaaaaaactagactgaacccaaaatatataagtgattgaaatcatttttgaagtaaagctgatggtggcttcaggcctctgcccattcccagggtttccagcttcagattttagagaccccttctcagtaagactacgagtaatgtgagaggcaaggactgtgctagaaatctttgccttgggatttttgtagttgttctttgaggccggatccctttagaggagaatcttttttaaatttaatttaatttttaatgagatggagtcttgctgtattgcccaggaactcctggactcaagcattcctcccacctctgcctcccaaagtgctgggattacagatgtgagccaccatgccgggttgagaatcttcttatacggtaggtttttgcacactaggtagtggaatgatttagagaaactcagcttttgctgatataatattcttgccttctcctttctttatctcctccatattcaggatgaggaagagtccttgaatgaagtagggtatgatgacattggtggctgcaggaagcagctagctcagataaaggagatggtggaactgcccctgagacatcctgccctctttaaggcaattggtgtgaaggtgagcatcctgggctctggaatcaagtctaaagtggtgccaatgtctaatcctgtcccaatgtctaatcctgggactgttttcatgcatggctttcattattgccttggattagaggggcaataacgtatcctttagtttacctaaggctctaaattcattagagctgatggtctaaaaccagagtaggctaatcaaattgtctgttgtgtgcgtgtgcgcacaaaacacacacacatatatatatgggtttttctttacaactcttagaatataaaagccattcttgtatcaatggaccctgtaaaaacaaatctcaccatagtttgccagcctgtctagagcaatgtcacccagtagaagtaaggaagttaaggaaattttcagagtgttaaagggttctgagtctaaaacatttgagaactattggtctagagtgtagcttctcaatcttttcctagtgggaaagtgtttccatggaacacactgaagatgaagttactcattttcctagtgggtggcacacaaataatttcattttctatgtggacagtttacatgttctgcttgtggatgaggccatagaaagggtagtgttgaagaagaaaaatgatgattgtaaggaacagcattccagtgtgataaattctggagggcatgattactggagtgagtgatcctctggcaatgaagaaaatagaccctgctctcttaaatggcttagctagtctttggcccttggtctgtctaaaattgagcccttagtgtaatggcctcttgcctttccctagtcatgtatcttcaaacgcatttggactacagtttctctgcccttagtctcctatgcaagttgcaatcataaatgttgcccactttctagcagtattttccctgctagtaatagaaatgagtgtggcctaaagtaattgtcttcttagcatttactgcggagggcttattcttaatattgtcagggttgaagcctgattctcaccctctctggagcgctagtcaagccattttagggtttgggagaaggtgggaacctaatcacactctgcattggtccacagcctcctagaggaatcctgctttacggacctcctggaacaggaaagaccctgattgctcgagctgtagcaaatgagactggagccttcttcttcttgatcaatggtgagatatttggttcatcttatgtctagctagacccaattttgaactgggcttatgagctggagcacttatgaacacatcctttttgcacccatgccctccttcatgtttatagcatatttcttatgctggggtatgttacagacagaagagcaataaagggaagatattttacattggtgctccctgtcctgccccctttgagaaagattgtggacagactgcagagcgggagcaagctagaatgagaaatcaaagggtgaatggttagtgatttgagagggtttggggcaaatgaactttgatcactggctcttggagaatgctgtttagtggtgtgccatctggtgtgccatctctcttgctctagccagaggtcctagagcatttgctgtcacctttacagttcaactgtgagaagagtatagtgagtccctgggcttctctccagccttgcctggtggctgtcctgggataatggctggtagaggatgtgagaagtaggcagaggttaccaccttctcacccaggacctgtctctgggccaaacaagcaagataactgatttttgggaggaattgggaaagactatcattttgttattgtctccattctgtatcctttcaggtcctgagatcatgagcaaattggctggtgagtctgagagcaaccttcgtaaagcctttgaggaggctgagaagaatgctcctgccatcatcttcattgatgagctagatgccatcgctcccaaaagagagaaagtaggagcttacctgaggggatagaggggggttgaaaggccctgacttcacttctgaccagacatcctgttctggcagactcatggcgaggtggagcggcgcattgtatcacagttgttgaccctcatggatggcctaaagcagagggcacatgtgattgttatggcagcaaccaacagacccaacagcattgacccagctctacggcgatttggtaaggactccagatacttttgaccccgtccttgcttaggtcctacttctctccttcatctaagtcacctaatcctcttgaagcccttcacagtgattgggtccaggggtctttttcctttaccctacgtcctgtctagagtgaccaaccaccctggttttcctgagactgaaaggtttcccagagcttgagacttttttagtgctggcattaggacaatcctgtgctggctgagatggttggtcaccctaggcctgtctcttacctctggactagagatgagccctgtttatgtttgtgtactgtcccacaggtcgctttgacagggaggtagatattggaattcctgatgctacaggacgcttagagattcttcagatccataccaagaacatgaagctggcagatgatgtggacctggaacaggtgaagtgatgatgatggctgaccaggcgttacagtgtctctaggcagttgctgggaactggctagagacataaggttaagatgtgaggagatgggttttgatttctggacaggggaaaggaagtaatctgagattgaatccaggaaatgggagttggcatttttcatagttgacgctgcatttagagtaaatcagaattgttggagcagccttatttctaggtcccaagtccagaattaagtacttaaaacccagcccataaaggtattgatagtatatattcaaggaaatgagaggacccagggatagcagtcaggggaaggattctattgtctctgagcctcctgcagcagctgggtctttgaggcagcatagtaagtagatctttctctgcaggtagccaatgagactcacgggcatgtgggtgctgacttagcagccctgtgctcagaggctgctctgcaagccatccgcaagaagatggatctcattgacctagaggatgagaccattgatgccgaggtcatgaactctctagcagttactatggatgacttccgggtaaggaccacacccgtgcctcaggtacacacatacgtgctttgacccctcccttgataagtctcatccccagttttccctccttttctagtgggccttgagccagagtaacccatcagcactgcgggaaaccgtggtagaggtgccacaggtaacctgggaagacatcgggggcctagaggatgtcaaacgtgagctacaggagctggtccaggtagggcaacttggtccagggtgagtcactgtctcagtacattgtaattgatctgggtgatctcagggtgtcaacacatttgctgcaagagttgtgagagcacgacttaggaacctactgttcttaggtttgaggcactaaggagtcttcttctagagaacctggatctgataccattgggtacaccatgaaataatggaggggatgcttctgtttagttaggtttctttcaaaatgtggaggtagccttgaaccctctttccttttcctcctagtatcctgtggagcacccagacaaattcctgaagtttggcatgacaccttccaagggagttctgttctatggacctcctggctgtgggaaaactttgttggccaaagccattgctaatgaatgccaggccaacttcatctccatcaagggtcctgagctgctcaccatgtggtttggggagtctgaggccaatgtcagagaaatctttgacaaggtgagctacaataggctgaactatgtattgatttgcctgagggcaaggaatagaggctgtttttctttaagagggttgaaatattcttagtgctggctgctcaactgcacagtaagtcacttgattttctttctgaggtctgagagacctagtgttattttttttttctctctctctctcttgagacagggtctggctctgttgcccaggttggagggcagtggtacagtcatggctcactgtaaccttgaaacctgggcttaagcaattctcctacttcagcctcctgagtagctgggact

SEQ ID NO: 132994 - DNA, 1090 bp, Homo sapiens
agggatttggatttgccccatgtctcagcatttcttggttttgattttttgagccaactttatggaattgtgtacttttgcagatattactgtgaagttccttttgaccttgagcctctttctggcggtttgatgtctgttagtgttttttccaaatatgatggtctttatgcttggcattcctttggtactatggaatgccctggcatcagtaggtttagcctataaggagggtagcaccaatgattctgcttcgttgtccccaggcttgcttggtagaacttaaggcctccctgagcctcaagggaggttgtctggcttacttaattccctggaaagttagcttatgctttactctatactgttaatcatggtgaccattaataccatgtgccaggtattatgttaagcattttacattcattatctcccttaagacaataagcctctgagataagtattatattccttcttttatagaggaggacatcaaagttcagaggttaggtaacttgcccaagatcacaattaagcagtggcataattggaattcagacccaatgggtctgactatagagttcctgctcttaaccactcttctgtaagtctaagactatttttatttctctaacaactattcagcctccatttctattatgtcttcttcttaggccattattttctgaccctggggcaggatcactcacttggggccttatagctgggacactgacgctcaaaataccaggagctgctggaatgggtattgtaatatgtatggtagatactgctcctcgtgaccttggctgcctttccttcatctgagctttctggtctagggacagcttcatctattcactgtttctttcctaagtatgagttttagagactggcgaggcgcttggggcaggagtatctactgactccatttcctccttctagttcaaaaggtgatgacctatcaacagccattctcaaacagaagaaccgtcccaatcggttaattgttgatgaagccatcaatgaggacaacagtgtggtgtccttgtcccaggtaagctgtggccacagactagtctttccttactgc

SEQ ID NO: 132995 - DNA, 1750 bp, Homo sapiens
gagccaatgaactggagccaagtgggagagtccgcctctaagggattaaagggtctcctttcactaatcgatctcgccctattcctttcgttgattggctgagaattccaatccgtcgaggaagcgtagcgttgcggccaattgacgtggcgttactaggcgtgtcgcatcactgaggcgggagccaggccgcaagcgaatttcctgattggctgtgatctgcgggttgctggggagaggcgcggagaggcgggcgagagtccgcagggcaggcgctgattggctgaggtgggagcagcttcccttccgatgattcggctcttctcggctcagtctcagcgaagcgtctgcgaccgtcgtttgagtcgtcgctgccgctgccgctgccactgccactgccacctcgcggatcaggagccagcgttgttcgcccgacgcctcgctgccggtgggaggaagcgagagggaagccgcttgcgggtttgtcgccgctgctcgcccaccgcctggaagagccgagccccggcccagtcggtcgcttgccaccgctcgtagccgttacccgcgggccgccacagccgccggccgggagaggcgcgcgccatggcttctggagccgagtgagtgtgcgcgcgccgttcgcttgctgcggcggcgcgcaccgggaccagccgcgcagggtaggcccggcggggcctggccgtgggcgcgtcagagaggtggagaccaggaaagagggaagggaagctagggggcgagtgaggggccgtggacccggcaggcccggctggggccagctgcgcacccgcgcgccccctaggcggggcttgcgttgggtccgggtcggagcctgggccggatcgtgctgtgtcatgcaggccccggcccgcccgattggctcccttagaacggacgtctgggcctggccaggtcttccggcccactccgccggcgcggcgccccggggctttggggcgccagtctgccgtccggcctaccacccgccgaaagcctttggtccccggagagagcaggccccgcgagcccgaggccccagccgggcccggtgggcgtggactttgcgccatgtgaaggcctcaggagctctgccaccgaggcggagcccggggtcggggaaggcccgccgagctcagggaagctcacagccgcctttttggagccgggtcggcggggccggaggtgggcatcctctgtgtgtgacctgagtcgtgaaggactgttagggagagggcgagccctacctttcgcttctggtcttcttactttaggcctgttgttcatactagaaagtttgagccagttttccttaatgttatgactcgtgggtggggagaaaggaatttttctttaacattttaggttcttgctaaagttggaatctcagttcgtgttttgtgcgcctttccagatttccaggtttcgtggtgtgcagtttagagttgcactaactcttcaaaaacacaaacgtgcgcgcactcctttccccaaccagctatattgagaaattacccgggctctggggctttctgaccccacctccatccttaggaaagcgttagataaaacttggctacctcagcccattcaatttagaatagagagcttttagaggcaaaaaaaaaaaaaaaaaaaaaaaaaaaaacacagccagcccaaggaaactctatgcaaattaccttccttccttgaagagattagttttttgaggtgtgttcctttttctcaagtt

SEQ ID NO: 132996 - DNA, 1068 bp, Homo sapiens
caaagccttacaggacttcctcctcagtgtgcagatgtgcccaggtatgtatacttgcatgacgtcggctatgcatagatgtgcaaggacagagaggcccatgggaaatacttgggcgtaagtgtaagagtggtgttctcagacaggaggggtgattggggttgtgctatatatacctagggatatatccaggtgttcaaatatacacagtgtgtatgcagggctcccaagagttccctggtttccccgatatcctcagacacaaagaccatgactctgctgttgtgggttgcacaggagtagggggcagatgatggacactgggatgggaatggttgtgaatgatctgcccccgcttccatatgtgagtgtaggcaagatacttcctctctctaggcctcagtttccctttttataaaacaatgcctaagactatgtcaagttctaagactctgtactctgggctggggctacaggtaatcgagacacttactttcacctgcttcagactctgaagaggctagatcggagggatgaggccactgcactctggtggaggctggaggcccaaactaaggggtcacatgaagatgctctgtggtgaggctcaggcctgctggcttggggctgaggggcagttggtgtcctagagtccttggacctattgtgggtggtgaacactgaaagcgggggtatggctgcccagctttctgccaatctttcacccttaggcatcatccttctttctctccaggtctctccccctgtacctagaaagctatttgagctggatccgtccctctgatcgtgacgccttccttgaagaatttcggacatctctgccaaagtcttgtgacctgtagctgccacgttttgaagagcttgagctgggtccccagtgggctgtctctctgtggggagggctttctgcttcaccatcattaggaatgtgaccattcctatataattcctggactggtgagattggtggtaggcctgtgaaatttgccctagttactaccattctcgttttggaggaaacaatctctgccaccaccaagtcattga

SEQ ID NO: 132997 - DNA, 1004 bp, Homo sapiens
ctcctggttcaggcagctatttctggcccagcagaggtagcctagtctgtgattactggcacttggctacagagagtgcttgagaacagtgtagcctggcctgtacaggtactggatgatctgcaagacaggctcagccatactcttactatcatgcagccaggggccgctgacatctaggacttcattattctataattcaggaccacagtggagtatgatccctaactcctgatttggatgcatctgagggacaaggggggcggtctccgaagtggaataaaataggccgggcgtggtgacttgcacctataatcccagcactttgggaggcagaggtgggaggattgcttggtcccaggagttcaagaccagcctgtggaacataacaagaccccgtctctactatttaaaaaaaagtgtaataaaatgataatataattatgtgtgtctgagatgtgggggagccccactgttctataggggttgtgaggaggatcagtctctcctgccaccaggcacagatgagatcagtcatcttaggaaagcctggctgcacctgagaacctttatgaagtggttggagttgtctgaattcactgcctccacctcttcccaaatcaatcctattatcccaccgctattttcctttgccatgcaacacattttgttaagttcctgttctttgtctgataaagagagaagactgagaagacaagcccaggcatcatgcagcaccgactttaactgtctgaagccccaaatagtgctatgcccccgctccactgggccttttcactatagaacaccctttgcccttcccttctgtggaagcctcccttgtttcccaacctgtgccactctttatcagatctacatgcccatcttatgtagcattccaccttgtcccattcattattcctgacttgaagccaaaattgtgtgaatccactggttcttttctcatgtgtatgttttgtgccctctgttcaccccagcactcc

SEQ ID NO: 132998 - DNA, 2029 bp, Homo sapiens
tatgtctctgacctgttccccttggcctctgaccttttctctgccaggtgtcccgatttcttcatacctactcagctgctactcaggaccttcaagctaaggagcttcatcagctgcagaacctcttctccaaggcctctgctgactaccagtggcttctccagagccccaagggggctgaggcgacactgccgactgtgattgctgagctgcagcagttcctgcggggagctcgggccatgtgcatcgagtcttgggctcgtttctctctggtccgcatggcggggggtactgctctcttggctgcttcctgctttatctgcctgctggcatctcagtgggcaatatccccaggctttccattctgccctctactcctgacacctgtggcctggggcctggttggggccatagcgtatgctggactcctgggaactattgagctgaagctagatctagtgcttctaggggctgtggctgcagtgagctcattcctcccttttctgtggaaagcctgggctggctgggggtccaagaggcccctggcaaccctgtttcccatccctgggcccgtcctgttactcctgctgtttcgcttggctgtgttcttctctgatagttttgttgtagctgaggccagggccacccccttccttttgggctcattcatcctgctcctggttgtccagcttcactgggagggccagctgcttccacctaagctactcacaatgccccgccttggcacttcagccacaacaaaccccccacggcacaatggtgcatatgccctgaggcttggaattgggttgcttttatgtacaaggctagctgggctttttcatcgttgccctgaagagacacctgtttgccactcctctccctggctgagtcctctggcatccatggtgggtggtcgagccaagaatttgtggtatggagcttgtgtggcggcgctggtggccctgttagctgccgtgcgcttgtggcttcgccgctatggtaatctcaagagccccgagccacccatgctctttgtgcgctggggactgcccctaatggcattgggtactgctgcctactgggcattggcgtcgggggcagatgaggctcccccccgtctccgggtcctggtctctggggcatccatggtgctgcctcgggctgtagcagggctggctgcttcagggctcgcgctgctgctctggaagcctgtgacagtgctggtgaaggctggggcaggcgctccaaggaccaggactgtcctcactcccttctcaggcccccccacttctcaagctgacttggattatgtggtccctcaaatctaccgacacatgcaggaggagttccggggccggttagagaggaccaaatctcagggtcccctgactgtggctgcttatcagttggggagtgtctactcagctgctatggtcacagccctcaccctgttggccttcccacttctgctgttgcatgcggagcgcatcagccttgtgttcctgcttctgtttctgcagagcttccttctcctacatctgcttgctgctgggatacccgtcaccacccctggtaaatatctcagctctgattcacttaaagacaatagtgatgtgagttcggcccctcttgttttcaaggaggtgttgctcctcatgttcctgagcttgacagagggtcccatgccccacacaactaggaaggtcttcttggtgtcctctctcttacctgccatagccaagcaaattgatccctcctgttggttcccagggttcatggagaggagagacaaggagtcctctaagactccctgtggaaatgctgcatcctcatgagcacatttcttgattttccagtgatggaagtagtaaattgtgaatatataatggcactgagctgtatgtgtttgagagaaagaaagagattggccatagcaggattcagataagcctgatggcgcttttgtaccacagagagaattagaataacagaatgttgactgtaaggaggttgggctgataggcat

SEQ ID NO: 132999 - DNA, 1022 bp, Homo sapiens
cagtttccatggcaacgggattggggtcagtccccagtgggagtcctgggcacaacacagcgggactaccagagaatatcactatggcaaccatggcaacgagtcagctccaatccactagtcgctatggtgacagatgggggcgatactacgctctggtgggcaaactgagtctcgggtgaggacgaataattcagtgcgtggtgtctgagtgataatgcccgcgaaaaatagcctccattttggccatcaggccggggatcttcggcgtgaacagctaaacccagaacaaccacagccttcgcccttctctagaaggtctgcgtttcccagggaacaacttgacgcgccgttcgaccaagtaacgctgattgggtgagtgttgaagcgggggagggagctgccggaagtacatccgggggagcggaactgcaagaggaaaggctcgggtaggcttctgggagcgaccgctccgctcgtctcgttggttccggaggtcgctgcggcggtgggaaatgctggcgcgcgcggcgcggggcactggggcccttttgctgagggtgagagcgaggcaacctttccagagggtcaggacagagattacctgggttctccgctggaaaagagcgaaattccaacttttggagaggactggggtcagaggtcatggtccccatgtgattctccgaggatcctgagggtcgtggtttatggagatgccttcaggaccgaggggcggcgtgtctggccagatgggatctctgctcaccctcttctttccttcagggctctctactggcttctggccgcgctccgcgccgcgcctcctctggattgccccgaaacaccgtggtactgttcgtgccgcagcaggaggcctgggtggtggagcgaatgggccgattccaccggatcctggagcctgtgagaaacctcttctgcccaccctgggccagccagatgaccaatccctcacgacatgcaatgtcgggaggacttcctttgggcctgcccgcactgtt

SEQ ID NO: 133000 - DNA, 1035 bp, Homo sapiens
ccctgaccaccttttcttctcttctcttacacagatgtccccaggccccccagcccaggcccagcataaaggccgtgttggggggcccccctgacccaaggggggcttcatgcgccacgtgcaggcggagccgtctccatcctcagagccggaggctggcccttcacagcctccagtcaggcagggggccctccagggtggcctgctcatgggctacagcccagcagggggggcgacatcccccggggtctaccaggtatccatcttttcccctccggctggtacctctgagcctcatagggccctgaaacgacaagccccatccactgagggtccccgggagctgaagagaggccctgggctgggggccagagagggactaccccctgaagaaccatctactgtggggctcttaggcccagagggaccggggctgggactaggtgtggccagccagcatttctcccaccgtggcctctgtgttgtggaacagagaagtagtgtcacctcatcttggacttcgggggcctggagtcccccctgccccccatcaaatgcttcctgcaatactttgcacaccagagactgggcctccccagatccagggggacaggggtccctgggggagtccccagggccagcccctccaggccagctgcacacacttgacactgatttgcacagtcttgcacaaatagggggtaagagcccagtggctggggtgggcaatgggggtagcctctggcctagggagtcccctggcactgccaatgggcacagtcccgagcacacaccccctggccctggacccccaggcccctgccccaccaagcgaaggctgcttcctgctggagaagccccagatgtcagctctgaggaagaggggccagcccctcggaggcgccggggatccctgggccaccctactgctgccaacagttctgatgccaaagccacacccttctggagccacctgctgcctgggcccaaagagcctgttttggtaagccaataaaggacctcatttactctttt

SEQ ID NO: 133001 - DNA, 1030 bp, Homo sapiens
gcctcccaggtcccttctcactcctctcctccccacagcctgggacaggccccatactatactggagcttcggagatttgctctttccctctagcacactcaccccgctcccaaattggctccgcggaggtggccgctgctccgggcccttccgtcccgtcccgtcccggtccctccccttggttccccggtcctccctgccacgggcccccaacccagacaaagggtggctcaggctgagccctgctctgctaggctcttcgctgttcagcttcgtgtgcaacactagcgggccctggcgcccgcagccccccagccgctgccgcgcccctccctgcgacggtccctccccggggccgccccggctccgcgccgccgactccactgcccctctgactcacaggccatttcctaccagctgatggggccgcccgccccgcccagtgccccaccacccgcgccgcggcggccacggccgccacgcccccctcaggctacgccctccctggaaagcgaccatgctcattggtccataggaagccagcctccccgcgacctcaagtgcgaggcacgccccctccaagaggcacacgcctattggtccataagggggtaggcttacccaaggtcgctccgcccttctccttaacccgacagctgccggagtccaaagcaacaccctgccctgccatttaaccctttcaaaggcgtaggccttccacatcttacccctccgccctactcccccgcccttcctccttccaggacggttaataggaagcccgagggctttaaagatacggtttgacaaccctcaaagtctgcctgctgtctataccagaccccagaccccaaatacctcactcccatttgtctttccccaccttccaaaccaaagcttcagagctggagaactagtgaagcccaggaagcttcctccatgccagagaagaaaaaggcctgaggtgggaccctatctccttccatgttaagaagtggtacttttccctctgttactcttaaattgatg

SEQ ID NO: 133002 - DNA, 1027 bp, Homo sapiens
tctacagattagaagcattgttgttgtttgtgatttctccaataacgatgtttcccccagctactggcagatgaaactgctttgctctgttctcttccactattttgttgaatctgcattaaccaaaatggatttggccatttcccgggattatgagatatacagtttttcttctttcatggttgatttttcattaatgagaattttgctttgcttttagtaagacattttctctcagcagctgggaatctatttattcctttagatccctgctgctgagtagcaggatttgggagaggttggactttgctgtgtctcttggacagtttaattctctacggccacactgtattacagagctggtccttatgaaagactctttaggcaggagcactcgtgaatcagaaattcctatttaactgaatttatataactactggtgttttcatttgttttaatagcaggcaggtttcattgtctagaaattctgctatttagctaacttctttcctttttaatgttactttagtgaagtttcttcttttttgaatctggagaaacgagatcagcaggccattgtctttttgaatagagatctagaagattttaaatactgaaacaaacaggtaccttatatgcagatattcatattgaatggcaaagtattcattttgggaaaacttacagaaatgaattgaaatacatctttatttttatttctttttctttttttgagacagagtctcattctgtcacccaggctggagtgcagtgctgcgatcttggctcactgcaacctccacctcctgggttcaagtgattctcatgcctcagcctcccgagcagctggaattacaggagtgaaccaccaggcccggctaatttttgtattttttgtagagacagagtttcactgtgttggctaggctggtcttgaacttctgacctcaagtgatccatctgccttggccttccaaagtgctgggattagaggcataatccactgcacccagcacaaaatacatct

SEQ ID NO: 133003 - DNA, 1022 bp, Homo sapiens
ctgaatgttattgtcatctgcctcagctaactcctttttgctgggcttccatcgatcgtggttctagtagtccctgcccttagagcagagctgtggctgtgttcctttcacttagggcctcaggaagttgattgtgctttgtgtgagccaggcagtgatgggggaaaggaccaatttgctctgctatgctattgttataaactgttctgttccttataagtagcgtattctgtaatttagtttctaaaaatggggtttctgaaagttgggctctttaggccaataagcttaatttttatcctatttacctgtgctgtgtatttcagactttgagtttgtttaaagtttgggctgtgtatcattagtaaatatttgttggatactttctctgtgcatgtttatgacacaaatctgtattgtagataagaggccacggaatctagataggttttaaaatgtctgttatacagtgttcttatataaactcaaataatccattaggattattaggtctgatttggaataagcagaataaattaagttcttccttgagtagggaaataactgcactgtcttgttttaacatttattttcacattgttattattactgttttttttttgttttgtttttgagatggagtctcgttctgttgcccaggttggagtgcagtggtgcaatctcagcttactgcaacctctgcctcccaggttcaagcgattctcctgactcagtctcctgagtagctgggactacaggtgtccaccaccacgcctagctaatttttgtatttttagtagagatggggtttcaccatgttggccaggctggtctctaactcctgacctcaagtgatctgcccactgcggcctcccaaagtgttgggattacagatgtgagccaccacgcccagccttattttatgattagttttttgagactggatcttgctctgttgcccaggctggagtgcaatggtgcgaacatggctctctgcagcctcgacctcctgggatcaagtg

SEQ ID NO: 133004 - DNA, 1111 bp, Homo sapiens
attatagtagctgatgagtatttgggcagtaaagaagtggaatgagcaagtgtaggctacacattcagaagttctgcagtgaagagtagggttaagagtagtcttaaaggccaggcgtggtggctcacgcctgtaatcccagcactttgggaggccaaggtgggtggatcacttgaggtcaggagttcgagaccagtctggccaacatggtgaaaccccgtctctactaaaaatatataaaaaaaaaaaattagccagacattgtgctgcatgcctataatcccacttatttgggaggccaaggcaggagaaatgcttgaacccagaaagcagaggttgcggtgagctgagatcacaccattgcactccagcctggttgacaaagtaagactctgtctcaaaaaaaaaaaaaaaaaaaagagtagtcttaagaagaaatttgagtattttgtagcttgaagggaaggaatctgtaagaaggggaaagtcaagatgagatggggaagggagagatgataactgatttcttttgtaaagtaggatgcaaaattatcagctgatagtgaggtggtggggatgatttagagagcttgaggagagtgcaaagggttcattcatttattctttcaacaactattgggccgggtgtggtggctcatgtctataatcccagcattttgggaggctgaggcgggtagatcacttgagatcaggagtttgagaccagcctggccaacatgacaaaaccccgtctctactaaaaataaaaaaattagctgggcgtggtggcaggcgcctgtaatcccagctactcgggactctgaggcatgagaatcgcttgaacccaggaggcagagattgcagtgagctgaaatcgcaccactgcactccagcctgggagacagagcaagagtttgtctcaaacaaacaaaccaacaaacaaaaacaaaaaaaccccacaactgttgtgctaggcacttggggaggaatggtgaggaaaaaacccctttccttcttggaagtttatatagactagtaggactacggaggagttagacattaaacaaggaagaatcatacaaattaatataaaattacgagtaggaaaaaa

SEQ ID NO: 133005 - DNA, 1017 bp, Homo sapiens
cagctttgttagagttgttttttttcctccccctccttcacaaacatcttgctagccagtcagaacagctgagtcaactgtggtcagttggctgagagatgtcacggtccatctttatgtccaaatatttgacaaatgtaaaaatatagctgaatatgcaaattaattattgtaaccatgctaatacacatacacatatacatgcatacatatatatacagggcagtgggattatatactattcctatcttttgttttttcatttctatcatttaaaatgttaagttttaaataagaaatggtggttattgtatttttgtttttcatgtctatcttttaaaatgttaagttttaaataagaaatggtggttattgtatttttgtttttcatgtctatcttttaaaatgttaagttttaaataagaaatggtggttattgtatttgggaggtgatacacctttttacttctagattctgaaatagatgggttacaaacaagggaactagtgccacaatgtttggaaattgttccatgcatagaactggctagaacaaggcaagttagccattccctgtgcctgaggaaccaggtcactggctgcagagtcagtgtgaataggattatttcccataatcccttgtggctttggttctatatcaaggtcagagagactcaggagcggaagttacatgtttttttgagggttaggtacagttcttatatattctcctatttctgcctttacttgtaaagatcttggggaggatgctctgcccaggcattttctctttatcccggacttccagggttttcatattggctggagttttataagaacctcagtgttttgtaatgaatatttcttttccacacatcttttctgtttttacatattgtagtagtaatatggatgaggcaggaattgtgtgctgaagtacctcccagctttgactctgaaaatactactttttaaaaatctatttatttatttattttctttttttgaggcatggtc

SEQ ID NO: 133006 - DNA, 1040 bp, Homo sapiens
tcgagcttgaaatctattttctttgtgaagatttttccttaatttttgtccctgttaacagctcagctctgcagttctttatcactttttcttttttccttctggtatgtatctctttctacattttattaaatttacgtaccttatctttcctagtaggtcaattagatttggatttttccccccagatggcaagtgggctatataattaacatagtaggttaggattaacattgtaatagattaaataaattagaacaggaaatatcaatgtatcatatcttggcattcatgaatctgtttcagtttgagtgtgtgtgtatgcatatctgttgggtcatatataaaatttcttaaaattaaaaaaatagtattttagattatgctcttgaagatagcacgtagttttataatttcggcaactctgctatgtcttgaatgaggctatgttgtacaatatagcttaattttttcctgcacatgtaatactttaatttctatattgcttaattccaagggctttgtgagatgggtaacaatctgagcactaagtattatgtctccattttgtattttttcaaagataaatttaacacatatgtgaccctgaaagtacagaatgtgaagagcacaactgtagcagttcgtggtgatcagccttcctgggaacaggatttcatgttgtaagtattttgcagcagcagtgtgcctacatattttataatctttttaagggaattgcattggatgaaacaattagaagattttgtgtatttttgagatttataaaatgtactggcactgttaaatactgttttgaaaactgtggagttatagaaataagtgaggttcatggtacatgaagcacaactgcagttttgttttctcatggattcgtaatttgttcttagagatgaatgataatgcaggtaaactcccaattgatttgtgttggtgaaaaactacataggcagattttctcagtggtcagaattagaatacagtacaacagacttagcatgacattaaacataacttca

SEQ ID NO: 133007 - DNA, 1052 bp, Homo sapiens
ccccccctccccactgaggtttaattgggatataagaaactgtacataattaatgtatacaatttagacatttatatacttgtgttaccatcaccataatcaaggtagtaaatatatttatcacctctaaaagtttacttgtgtctccttttttttgttgtatgtgtgtgttaagagcatttaatatgaaatctaccctcttaaattttgaggtgcacaataccttattgctaactggaggcactatgtggtatagcagcaggtctctggaacttatttaactgtaacaaaggcagttttctatggatacctattataggtttcttggagcctaaaaatggtcgtggcattctgggaaattttgatttttcctgaagacaggatcctggtgagaaagcattcaaagtttagcaaaacaggagatgtagttgtttctttcatattgtctagctttcctcaaagggctttcctctttcccttagtgagattagtcgcctggacctgggtctaagtgtggaggtatggaacaaaggactgatctgggacaccatggtggggactgtgtggattgcgctgaagactattcgtcagtcggatgaggtcagtcattgcattttctgtttggaagtatggttcccagcccatgcttctccccatgctagctccactttagctaatattcatccatgcatcttggattattcttccccctttctaattagagggcatgcaacctgcctgttcctaacttcacctgaaggttcagatgattttatttatgtctggcctaccctgtgtcctgtgacaactcacaggctccagagcacctcttcagccttatcaggtagatagccccttctgaggtatgtgtgtgtcggtgtgtgtgtttacttagggtacttgtggtttctgtgttctcttctaagtcactgccctgggaggagtcccattaaacttccttagccagctggctggctattctctgctttgtttctttgagttaccaatctccaaggaactagttttcagtgcccttcttctgcatgtaagcc

SEQ ID NO: 133008 - DNA, 1089 bp, Homo sapiens
gagcatctcaatatctcagcatataacttttcttttaagctaatcctttggatggttttggtcttgctgaggggaaggtagtatggttacatagaaagaatgtagtttttggaatcatacaaaccatggtttgaatcatggctcatctctttataaactgtgaccctgaccagattattttagctctctgagcttcagcttcttcatctacaaaataacaatgggaataacagtacattgtattggtttttgtgaagagtaaagataatgttcatgacaagaaccaaaccatcagttaaaacttgtgcatcactaccaccttctgacttcagtcattagacagagtaaagtgttatctgctgatgatttattacctgctgatgtgatttcttttctttttcttcttttttttatggtagatatcccagaggaggaagccagatattggacctacaaatgggagcaaatcaatgccttgggagctgacaatgaggtaggagcagccttatttgcagtatagagagatgggggaaaatctccaatgctctttataggttgcccagggaggggcccaagagcatgttgtcctgagaatgaaatcacttaaattgcattgaagaaaaaaggcagctagaagattgcctgaaatgtcactagaaggttccatctccaatttattctgttcttcccactctcccatactgtggtactagtctggctgtagactcttagagagggagcttgtaccagggaatctgtcctcttttgttacacctgtgagttggaggcatttcttttgcttctactgtctctcagttttttggatattattcttatttgtgtcctgtttttgaggatgtttagactattgcattgtttgttcttgctggtcctaacttacctccagagatgaggctggtgtgtataagagaatgcattcagctcaacctggggcatcaggattggagaatgtttttgttattgctgatggagggaaaagatgataaatttgtttattttggacatgtgggctactaaaaaatgggtctgattataagatatactttgagtgccagaggatatttcagc

SEQ ID NO: 133009 - DNA, 1047 bp, Homo sapiens
tgaagatgatggtaatgattgtagcatttgttgttgtaatattagtaataataagaactgtaggctgggcatggttcccagcactttggaaggctgaggcaggaggatttcttgagcccaggagtctgagaccagtttgggcaacaaacagatacctcatttctacaaaaaaaaaaaaaaaaaaaaaaaaaaccaagtgtgatggcatgtgcctgtagtcccagatacttgggaggctgaggtgggaggatggcttgagcctgggaaatcgaggctgtagtgagctatgattgtgccactgcactgcagcctgggcaacagagcaagaccctgtttcaaaacaaacaaacaaacaaacaaacaaaccatagcagctaacactattgaggtcttacagtatgccagatgccattctgagactttaagtattctaatttatttaaacttcacaacaaccctaagacagattttactgttgttcccatttttgagagcaggaaactgaagcataaatagattgagtaattcgccacaaatcacatagctagtaactggtgaagtaaatattcaaacacagaaaatctgacttagtagctcctacctctgtgtgaaccactgtgttatattgattccttcatattgtttctgaaaaggaaaacctttgtccatggtttgtgaatctgttggttgccttcaatttggtacattctataggcccactttcctgataaaagtaaaggccaatggtagaggtgaacttttttttctttatttaaagaaaacctatttttcatatgatttattactaacttttgttttttgctgtttaggaccgaacatttaaggtcataggaggtcagaagaatctgaatccaaaaccaggttttcaggtttacaggtccttttcaaaactcattgtaatgagttcattgtgattgatttaatcttttaaacctttttccacgactgctaatgagaagcaaaatgtaaagattgagattttacttcctactccttcctggtctcattgatgaaatataattgaag

SEQ ID NO: 133010 - DNA, 1032 bp, Homo sapiens
tttttttgtttttttttgtttttgttttttttttttgagatggagtctcactctgtcgtccaggctggagtgcagtggcagaatcttgggtcactgcaacctttgcctcctaggttcaagcaattctcctgcctcagcctctcgagtagctgggattacaggcacctaccaccacacgtggctaatttttgtatttttagtagagacagggtttcaccatgttggccaggctggcctcgaactcctgacctcaagtgatctacccacctcggcctcccaaagtgttgggattacaggcgtgagccaccacgcccggcctgttttattttttctttatactttattgtactttccagatttcctccaaagaacatgcatttgttttataataattttaaaagggataaatattttaaaataacccaagcctgacaatacagaagcaagttattgtagattcacttttttagtttgaatttgagacttagttgaatgataatttattgttgagattgacatagtttagttcaacaataccagtgattccttcactgaaaattccacgtagcttttagagttgcagtgtaccttttattaatgatatccctaaagcctcccttaactacttaccgtgtctgaaacaaaaagcttctggggtctatgttatttctatatgtattatgatctaaaagatagcttgaacttttgcttgagatatagcccaccttggagtttcaaagagatttttctggttatctattaagggtttgtttcactggttttcttacagtattgcctataattagtgatctatacaaatcataaaccaaaatgtcctgagtacgaatcattcttttaaattagtaaaacggcataacccaacatattgtttaaaaattttcttgaagaatgaatcagttcagaacagttggatgtgagtcatatcatgaataacaagtgaccaaacattcagaagcattgtcagtaatatactgcttagttgctgggttgtgacaaattatttgaccacca

SEQ ID NO: 133011 - DNA, 1032 bp, Homo sapiens
tttacattctaaacaagagcctcaagtaattattaaaattaaaagatggccaggcacatggttcactcctgtaatcccagcactttgggagcctgaggcaggtggattgcttgagcttgggagtttgagaccagcctgggcaacatggtgagaccccatctctacagaaaacaaaaattagtcgagtgtgatggcacgtgcctgtagtcccagcttctcaggaggctagggtaggaggattggttgaggcagcaatgagccatgattgtcactgcactccagcatgggtgacagggcaagacctggtttctaaaaacaaatttttaaaaagtccagtcaaatatctgtaataattcagaataattctgtaatctctaataattcataaggtaataagtttcttgataaggatagttaaatcttcaaggaaagcacaaaaggaaggagatttcagcagaattaactactaagtttgttgactgattggacatgggaaataaagaggaattttaagaatggtcctgtggtttctgatttcaaagtattgggagtttggtggttttggacatgaggtgtacttgctatactcccgtatttctagagaatttttaacactgtaaatacaatgccattaccactgggggctgtgatactgtgattttataataagaaacatatattttggtctttgtccctggttcctgacacagagctcctaatctcttagaattttatggatactaggaatgtctgttgttctaatgagggactcttgatgggcttccacataggaaccagttatcagacagaccaagccatgtttggaagcttggaactttttttttttttttttttttttgagatggagtttcactctgtcacccaggctggagtgcagtggctgtgatcttggctcactgcaacctccacctcccaagttcaagtgattctcctgccttagcctcccaagtagctgggattacaggtgcctgccaccatgcttggctaatttttgtatttttagtagagaag

SEQ ID NO: 133012 - DNA, 1063 bp, Homo sapiens
catgccactgcttttatccaaattctagaagatatttcccttctgcctccaatcttcacctattaaaaatgaaccaattcttcaaagccatctcctccttaaagcttccttagttaccctatcaggaagtgattttacttttaattcatagcacttggtttgtactaactgccttgcatagcaattcaatatttgtgtctatatattctgtctcctattagactgactctatattctgagtcttctgtgttgtttagctttggatatgtaggcagtcagtgaatatttgagtgagtaggtgttcccagccttttaattttccatctttcaaatagactttaccaggggcttttcaactgttaccctcaaactggctctctagttccttcttaggctgagccaaccaaacctgcactcagtttctctctgcaaagccagggcttttctcgtctagccgacatggtgctgtgggatagattatggaggcagtaagagatcgtcagtgacacattaaaaacacagttatttaattcaaattgaagtgttacatattttcctgaatttccctttttagtttctaatcaggcttggtgccaggaggtttactttttaggaaaactggaggtgattgcctctcactacttttttctgtttctctcctttgtctcactttattccttagtatattctctctcttgccctctcctgcttttcatattctcttctactcccaacctcttctttccatggatgctttgtttcttaatatttgccctttatttctttagtgtagaaatgttgttagcctttagtaaagttgtagagtatctctgtttagcctagcaaaataaacaaaaagcagactattatttaggagtaataggtcacatgcagggagaaagtaaaacctgtggatttgggttgtgggcttctaactctggctgagctgccctctctggcctcaaaagtgataggattgtctgtcgcagttgcctccttggagactgaatcttgtttctctgggttatgtgctaatacttttcctgccagagtttagtagacc

SEQ ID NO: 133013 - DNA, 1027 bp, Homo sapiens
aactcttttctgtttccgctgtatagatgcaggtccttatctcctgcctgagcaattgtaaaagcctaatcttacggtcttcaggaggtttccactgcccacattgctacaagattatctttttttttttttgagacggagccttgctctgtcgcccaggctggaatgcaatggcatgatcttagctcactgcaacttccaccctctgggttcaagcgattcttccgcctaagcctccctagtagctaggattacaggcatctgccatcatgcccggctaatttttgtatttttatagagatggggttccaccatgttggccaggctggtcttgaactcctgacctcaggtgatccacctgccttggactcccaaagtgctgggattacaggtgggagccaccgcgcctggccccaagataatcttttaaaattactaacatgagttcattttgtgctaaaagtatctccattttgggatggtgaacattccttttcctcattgtaagccaaataggaacttgtcaagaaaggacacgtggaaccctgttaatcatacacataagggtatggtgtcagatacgacttcctctctgtaaaacaggcttcaaagcactcttaggttgagctccctttccaagcacagcgatgatttgtaagtgtggtctttttagttaactttaacaaaaaaactgtagccagtcaggtgctggtctgaaggacaaataattctacgaaattgtagtcactgctgttggataaacttggctgcattgtcagcaagatcccattggcagtgcataagttttttcttctctcagcccatcctctggatgggaattctgagcctagggtgtaggtgcttgacaggaattgttaggaaaagctaacactgcagcagcacagtaagagtgctgctgttctcagctgcatctagagcctttgacttgatttccaggccttggctttgaccttcctgatttccaggaccagcttctgatgttagacctgcttatttggttcaatcc

SEQ ID NO: 133014 - DNA, 1006 bp, Homo sapiens
ttctaatactgaaaattgtaccctttgccatactgaaaagaaacaaaatatggggtacccagttttgtacccctacaaaaatggatttgtggttaagagtggcatgcagcgcattaagttggaaagtcatgattatgatctgtccagttgtttaaggcactgtgaaaagtcatctggctcaaaccagcatgtcactaattttacctcattagatattcttgaagattctactagtagtacttctgatgaacttctgggttcccccatttctgataagcaggaaaatttacagtcaccaacatggcattcatccaatgtccaccatattggagattttcctgaggaatattatgtagcaaattcagcattgccattacaaaggatgaattgtgatgcaaaaacacttggagatctgtctgagtgctctatagaagagataaccccttcctctattgaggagcccaaggaggaccgtattgatacaatggatgagcttcagtgtttggtagaaacggtgtcagaatatttagcagagaaggaagaggagattaatagatttggttcactttcaaaaactaaaaaatcacataaacaaaatagtactcttgatgcagaacagagaacgcctggggatcaaataccacctttaactattgtcaagaatgacaaggacacggccatctctttccctgagttgactggagtacaatgtgctgttggttctttgtttagttcactcacagaaaaagtgggttcaggcacaaagcatctaacaaactctgtggaaaagttggtttccttagttccagaaaaaacagaaactcttaatcaaatagaggcaattaatttgggatctaaacccagagccatggcagtattggggaaggatctttccatgcaatctccattatcctctcaaaaagatgataatgtgaatatagacagacatagaaaaacctctgaaaatgagcacatgggtaataaaactgggagtttatactttcag

SEQ ID NO: 133015 - DNA, 1164 bp, Homo sapiens
aggaaagtttgtcagaacctgtgaaaattcgccaggtggaggaagatggtttagaaaggggctctaagaaagatggtcattccttttcctttagtggaaaactaaatcttccattttttagaagtcttggtcattctgaaaagcaacaggagttaaaagagaaaggaagcatttttcctttgtttaaattttctttcactgacagcaaggttactgttaatgaccagagtttacgtggctcagcagtaaccactgatgaggagagcaaaaaaaattgccatgaagataccaaacatagttcaataaaatctagttctgttccaaatattcatagtgatctaggaaaatttgacagtacagaggaatttaaaaagaatgaccagataaattgtcctgaagatgccaaacttaattcaataaaatctagttcagttccaaatattcatgatgatctagagaagtttgacagtataaaggaatttaataagaatgaccaagtaaattgtcctgaagatgccaaacttagttcaataaaatctggttcagctccaaatactcaggataatctagggaaatttgacagtacagaggaatttaatcagaatgaccaaataaatagtcctgaagatgccaaatttaatataataaagtctgattcagttacaaatattaataatgatctggggaaatttgggaatatagaggaattaaatccaagtgaccacacagcaggacagaattttgaaagggatggcttagccatccctggagttgtgcccaaagaacatataacttcagatcctttaggagaagataagaatcttatacaagcagcatcttcagtagcatcagactcttcattagagtgtatttctaccacttccaaatccactttggttaatgaaattaatgaagatgaggttatagataagacttccaagaaaaatacccaaggaagcttcctttctggcctgtttaataggttttcttctgctgaaaatttgtctagtcaagaattaaatttgaaaaatgatgactcccatcacaagaataataccccaggtttaatctctggaatatttaacctgctatcaaatagcggtatgattgatcataaaccagaggaagcaaagttcatgtctttaggcaacatgaagagtttga

SEQ ID NO: 133016 - DNA, 1028 bp, Homo sapiens
gagataaccatttatccttggatgaggtccctgctacttcatgtgtgacttctgagaacccgaagaaccatgttgaaaaacatgaaacttctagcttcatagaagcctccttattacctaaagaaaacataccattatctgatgctggggatgataatcattattgttcccctacagagaaaaaccagcaaagtgaaaagcatcacccctcctctgagaacattgtacttcactgtgctccaagtgctcagctaggttttttggagaaatctatggctaagaggcaaatgccaaaccatgttcttgaggcaaaactacatgaaaattcaaacaagttaaattcacctgtactaaataccaacattctcaataaatcaaacaactatcaggcttttgaagagatgaacagtcctttctgttttgaatgggactctgacataaaagatttgtctaaaaattccagaaaacttcagccagtttattatatgttaaatcaaaatagatttctatcagccgatgcttgcttgtggcttgactcagaaaactcagtgataaatttttgccaaaaagatcaaaatgcaaacatcttggagtggagaacaaatccaaacagtgtcatttggtgtgacttaccatatgaatcattcaatcagttagcatttaatgaagattacttattaagaggtgatgtgtgggcagctaactcattatatggaaactctggtcctcttccaattaatgaggctaataattcactagaagaattacccattgacttaagttcttcatcagatcatgaaaagactacatgccccgtagttgatcaagaatcattaagaatggatgaaaactttgttttttcaagttttggttatgagtaccaggaatggttgtcatgtcttgaacatggagtgtggtggccatcagaggatggggattatggatattatatgtttcatgatggtcaatatatctattctcttctcactgattctactgggcagtatgcatatttatttatacctgat

SEQ ID NO: 133017 - DNA, 1927 bp, Homo sapiens
ataaaaaccagcctctagctgaagattcatcagttcacctttccagtttccattggcttcagtcttctgttgaagaagttaccactttggttcatcctgaaaatatgactaaaggctcacaacaagcagaagagacatcattagtgaacaaagtggcttcagtattttctgttttgggtgcctcagttggtagtactttgaagtttgataagagtgaatccttagaggctttggccatgcagaaagtgaatcagcagtcagatttagcagagctcacaaatgatggctttcagtcattaatcatgagtaagcaattagagggtaactccccaaatgtggaaaaaagtcttcttaaggattcagaaagacagatagtatccaatgttcagcatccagaattgatcaaaaatataaggcaagaattctctttaaataaaaacaaccatgtgaaaaagcaaagtttgttaaaatctggtttccaggtaagccaaacaactcctcaggctaaatcaggtgtaaaagatgatgaaatcattacaacagactctatttcagtttctcctgcacctcagcatagtggggatgagcgtgagaattatgagcttccccagggccagtcatccaaagagtctgataaaacattatttaaaagttcattgaaactcttcagtcaagaagaatcgtcagttagtatgacagcaaatgaaaaacagtcatctggatttttgaatctttttaagactcaggtgaataaagaaggatcaccaaacttagaaaagattggtgatacaaatgtcaagataccacctcaagaaaagaaagaatcttctggtgtttcaaatttttggggtacccttggggatttctttaaagccaatgtatctcctatacagacaactgaaaatacgtctgtttcttcaatgactattaaggatgaggtcaggtcaagtcctactcctatggagctagctagccagggtgctgggaactttcctgctgcaccaatttcctctaaagggaaggctagagttagaagactgaacaaacagactactatcgatgacagtaggttagaggaatcaactagagggatccagggtaatgatttgactgaaaaagaggtaccattcagagaccatctaatccagcagtcacctaattcatctttttcaacaagtagtctcaaagagtcttccagggagtcttcagtagaaactagtggtgtgactacagtgacagaagtttcaaaaagtaatgaaatatcctttgataccctgagcaagagaaattcaaatgaacaagatcatttttctgacaaagactggagtttctctatggctgcaacatcttcatctcaaccagagttatcaaccaaaaagagtatattttcttttctcactggatctgaaaaatctgagaacagagcctctgctactctaccaagagccaaatctcaggcagaagggctattcacacttccttcatttttttccactgctagctcaagcattaagaaggatgcctctcatagtagttctacttttagtttcttcagcttgtcctttttggatcaaaaaaaggagacctctggggaaaaacaaagcatttcaactgttgttccagtgacctcccagccctgtaagaagacaaatgtttttgtagagagtggtagcacaatgaccagagaaagttccagtggtcatagagatagcatagcccaagaagtagttcatgaacagcaaatggcaccttgtatttccattaacaacaccattgaggttacctcccttgcagatgagctcagtgtagacaaggactgtcaggaaaaactgagttccaatattgtaccagggacatcagtggatttccagatgaatgaattgcaaaaagacattattcctccttcaccagaatttcaggcacaggc

SEQ ID NO: 133018 - DNA, 1034 bp, Homo sapiens
gaggaagaaccctccactgtctctgagatatttcaccagctagaaaaacaagaagaggaggcagtacctgccagtactgactctgatttgaatgtacagcagccagtcactctgaatgacatcaaggagcccatgaccaacaaaaggcctgttcttaactcaagcatcataaatggctttaaggaattgaccatttatgatgcaagtgacttagtggtagattaatcatagcttgctttttatccttcttgtgtctttcctagtacccgagcttcatgttaattaggggttaaataacaagaactcagtgtgtgggtattttcatcctccccttctctctctgccaaatgtaattcatttactggaacaaggagcttcctgcttaaagcaaaagctgggcccccgatatttactcactctggtttgctctgccttgtataatgtgaaatggagaaaggagggcaggaagaggtagtaagtagttggtggtatatattaactacaactacatgataggctaggatgcttccttgggccttaggcacttatatcttgtaggagatggggatagatctattttgctttgttttttcaagtcttctaagatgctttctccagtggcaatgagtgtattaagcaaaatacaaagtgcaaaggatgccttgggatagtctgtattcccatatcctattccatacagatttgcatagtttcttccatggtatcatctctgccttttactaccctcaaggctgatgtctgataaatgctttgagtaaaatctcacaggaactcagagctgtcctttgctgtagttcttcagtctcgagcagtgtacaggatctatctgcagagggtactgttatttcccctaagaagcagtaccatacagtacagattaagaatgctaccttgacctctggcccaaacttgttcaaaggggttggtcagggtcagtgtgtgtgtgtgtgtgtgtgtgtgtgtgtgtgtgtgtgtgtatacttatgtacaagtatatgtgtttgtgtgttgaa

SEQ ID NO: 133019 - DNA, 1110 bp, Homo sapiens
agtgatttctcttctttgaccaagggtaaacacaagccctttagttaaaggcttgactctgtggtaagaaaattcttcaaaagaactgaagcccttagatgacagggccataaaactcaaggaagtaacttctagatactgctcttctttccaccactctgcccttcttgccactgtcacattctctgctataactgctttctctcatgactttctggatatgggaatacaggtgattgagaaaagattggcttgctggtcttcagatatagagatgcatgaatacggctctgacccagatcctggagttggactttgtccactctttccaaaactgagccttgccctgaaagaagctcagttacagatgttcatctttgggacgcttcctatgctgccagggatatcattgtagcatttatgttgatgagaccattcgtttgtgtattctcttggtcctggcctctatcttccaatgggttctattaactcatcttgcagatgaggaaactgagatgataactgaaagaacatgtctgctctcctttgctcatcctaaggtacaggcgtacacatttacaattgtagaggaagaaatgatgacctcaatgtaataagtaatagaaaaagagtggagttcattcattccattttactgtgtggaaattaaagaaagattaatcacagccactggacaagcttctttagaagactgaataaagaattttaggaataagtaacaggccattttaataatttttaatcctactcacaaatagcctattaagataaaatatacttcaaagtcaagtgcagaactgaggttaagtgtcgttggagaacccagcatgttgtgttgttttcctgttgtgttttcgctgaatagagactaattcttctagattatgaagtttggtcctctcttcccaggaacctcctatttgattcttgctactaatgtagtcattatttcctggatgtctcctttcttttgtcctggtccctgattgcatttatttacttatctgtctttctgtcattctcacagccccaccagcagcagtaggtatggctcctcctgtaatgtgagtcaaggaagctctcagctaa

SEQ ID NO: 133020 - DNA, 1048 bp, Homo sapiens
attatatatacacgaaaccaaccaaccaaccaacttagagcttgtctcagtagaagggaagactccctttgtattgtgctccagcagttccacggctggcatgctgtgttccggcttccctctgagactaggagctcctgaaagtataggtctccatctgtgtctgtttatatcctatagcccagatgtgagagaggtggataggggaaaagaaagcagggaggagaagaacgagggaaggaaatggaggaggggagagagtaagatctatatttagcaaaagggagagacacttaccaagggtgtgtgagtgagcttgctggcaagggttgtgtgtgcgtgagtgtgctgggaagggggtgtgtgcgccaggaacgtgtgaggagggctggtgccctatgggaggttgcaggcaggaagcagctggagaggaggaggagcagcagcaggagcaggagctgccctgctttctgcctcagtctcaaagcccagaatcgattgagttagaattccacatccagttgaagtttggctgctgttgccttcagcaggctgatctcagaatcccccttgccagagaggtgtggaccaggttagatttctacgtttgcagccagtgagactcctgccaagcccttcactgaggggtttttttgcagggcattgtttctgtcatcaactttgtgccgtggagccagccagctgggtgcaactgagaatattagctccttgggtctgtttgtcggttgggcaagcagtggtgctttggctcagaaagttcgtcctgtggcttctctgtcaaaccaaggagtgctcctggatggatttcctcttaaagacagcatttgccttctaaaacttgagaattcatggttttaatttttttttttaatttccttaacccttattttggttgcagcagcaaggtaagtggtaccgagtgtgtatgactgactgaacaacaagcagggcaaaaggaaagcatttgtgggtggaatatggagcagctacattaattacgtaattgcttgagtcaacttgctggtga

SEQ ID NO: 133021 - DNA, 1049 bp, Homo sapiens
tgaaaacagtgaagcagagtgtactggatggcacctccaaatggtcagccaagatcaccattactggtgagcaggccacagtttgaggggacaggaaggcctgggctatggggaggagactggggaagaaacatcctgagcgtgagggagcaagggattagggagaaagaaaaaggaaatcactgggaaggaaaggcctctttattaatcacttctccttacctagaccctggtgccggagaggcaagattgctatctgcaaacaacatgaaccataatacaaggatttgctaacaacctaacgctgtagacttggctaacagtttgatattataagaggtggggggagggggaaggggaagggcaggggaccagggagtagctaaccagtggtttgctaactgggtggggctgaagcatgtatatatcagagggtgtaaagatcaatatagagataagtggtcagttagggcttgggtagggagatgggatgcttgggctttaagggaaaggctggtggcccaggacaaagaataaatatggaggaatgggattacggtatctgtgcaaggagcatagactgctctaagatggaaagcatatgagtagtgttgtggggggcttctgaacgactctgaagcctcctatacatgcttgggttgcagtggtgtgtgcccagggcctacaagccaaggacaaaacaggatccagtgacccttacgtgactgtgcaagtcagcaaaactaagaagcgtaccaagaccatttttggaaacttgaatcctgtttgggaggagaagttccatttgtaagtcacagagagctttgtcttacctgggactgtgtgtattgggggagcaggatcacatcctgccattctgggcttgagcttgaagattgggcaaaggcaggggagaaaactcatttctcgcatgcttcgttcagacatcagccattctttctctggttttcttctcatgagctgttgtgtcaggattactgtgcccatgccctgtcttcaccagggctattaaaggggccctagggcac

SEQ ID NO: 133022 - DNA, 1054 bp, Homo sapiens
tttggcagggaaggttttcatagtcctctgttcctttcttacatttgcttgatttgcaacagaataatttccctgctgggagtcctgaacggcttcaggacttaaaatccacagtggatttgctgaccagcattactttcttcagaatgaaggtaagaaatggactggggcttgggtggtgctgggctggagacctggctacaggaacgtgaagaatgagaatcattgggcagagtctgaggctacaggattcatcacctctaagcttacatttctgtgtacctgttccctgggttacttctgagagagcacatagactatggatccatgaggatggggtggaagttttccctgtcaactatcctggcaatttcatcacagggaaaagtctagggacccagacagggatgaaagaatctagagtaggtttggggtagtgctaggagaatatcccacccaggtgagcaggtccttgggcccatatttcttcttttaattggcaggtacaagaactgcaaagccctccaagagccagccaggtggtaaaggattgtgtgaaggcctgtttgaactccacatatgaatatatcttcaacaactgccacgacttatacagccgccagtaccagctggtaagaggttcaggatcaggtggggccagctgtcagtggctctttggagcctcagttttccttcatgatggtggtggaaaagcactcaggacaaagtacttgatgttctcaagggtgagtgagttgtggagtatgaaccatgtggaccatgtgagatatgtggatggaaagagacccctgggcaagatgagacatacctgaattgaacagaaatggcaacaataatgatgttgaagaaagtaaacctaaattcatgcacagttcaggggttgagtaggggaattctcagtccatcccagagtctttttttctccctcaagtttaactttattctgactcttgcagactcttgtaagttctgggcttccttcctctgagatctgaagtggtctctgagctgctggctcctggaagctttactt

SEQ ID NO: 133023 - DNA, 1036 bp, Homo sapiens
aggagttcatgaccagcctggccaacatggtgaaaccccaactctactaaaaatacaaacattagccaggtgtgctggcacatgtctgtaatcccagctactcaggagcctgaggcaggagaattgcttgaacccaggaggcagaggttgcagtgagcagagatagcaccactgcactccaccctgggtgacagagcgagactccatctcaaaaaaaataagaagtttatatagacgttaccagaaccaaagagagattagggggagataccagcaaactgggtagttgaaatcatgaggttggaagagctctccaggaggaaaggagggagttaggtggaagtcaggggcaggaggttatggattggcctttctgacagattaccccacctcaaacaactttactggagcatgactccatgggacttgttagaatagtttaaagtgtgaccggtgtttcagaacttgtcagttagtttttataccagagaagttaatacagaaattagggataggggccagagtgcagataataaattgacagagaaagtgaaaattatatgtagaaacagtaacttgaaggtccctaaaagaaagagttagggagttatggagtgatgggcagtcctgcttgaaaaggaaggaggagggccctcctgatgtttctaggttcttagactggttccagaacagcaggggatgggggtggaggagaggggctctcttttgatgtccctgagggtctctctgatgtccctgattttttcactctctttgttgctcattggtgtctgctctgtcacaagcaaccactgtcattcatatacgaaaagtcctctttctgggtggtaagaacatttagttgtccttttgcctctagtcttacaccttttccctcttctcctgctcactgcttcatagaagagactgcaaatgcaactttaggttgagacagtgctgcctgcagtgccagggaatgaaattcctgggacttgaagccctttgaggcagaatcccgggcttccatttcctcctt

SEQ ID NO: 133024 - DNA, 1049 bp, Homo sapiens
tagagagcaaaagaagagctgtgagtctcacttaagtggacaggtagaacttttacagagctgggtacatgttcaggcatacaccatcaaggaagatctgagttaatccagaaaggctttttagaagcattgagctttaagcttgataaaagatgaggagagcctggaatgagcacacatatgatgagagcagggttggcaactgcgggaagaatccatgtgtatgcgtgtgcattttctacccgttgctttatcatttaagggtctaggaaattaaagcctacagcctgtctcttgtcctgcttgtctcagatacctcctctctgtatttttctactgtttctgcccatgatttggttggtctctgacccatgaagtctaatttggagcattcacacactgactgcagctctttcacttctttctccactctgccccacctctgtgctccctcagaatatgtgtagagctgctttgaatggctgttaactccttagactgctaacggattcttctttctctgttctgctgctgctactacctctgacttgcctgtcctcattcagtgcatgatgggaaaggtattagatttactgctaatgaggacattcgtccggaaaagggtatgttgtacaccgtgcagatatggatctaacatgggctaacactgacccctgggagctagaatgagcaactcgtgctgggggtgggggaacaagctgtcaaggtttaggagctctatctcaagtcttagagatgggtaatgccttcatatagcccaggaaggggttctgttgttgatctctgtcgtattctcagcattctcccacccctccacctcaggacaaagaaggattttctctggggtgtaagattgtggtggtgttttctttttttctttttttttttttttttgagacggagtctcgctctgtcgcccaggctggagtccagtggagcgatctctgcccactgcaagctccgcctcccaggttcacaccattgttctgcctcagcctccctagtagctgggactacaggcgcctgcc

SEQ ID NO: 133025 - DNA, 1068 bp, Homo sapiens
aggcacaagaattgcttgagcctgggaggcagaggttgcagtgagccaagatcgtgccactgaactcctgcctgggtgacagagtgaggctccatctcaaaagaaatgtcactgatacagatatttcttctactgagttatgactccaaggtagaaagagataaagataaatggttgggtttgggatatatatagtcttcaactgaccatgcaccagtagcagccaaccatggttcgagagacatgtaaccaaaatatgtgctgcatacatacagtctccaaattcctatgtgaaatccttagccttaattaatttaatgagtttcatggaaccagaaatgaattatagatccttttttcctcctttagtttaggacctatgctagtttttttaatccactctagtcctgagtcaagatattttttctagccatgctttctagtttataatatgaaaacaatagttgtttttagaatatttaataatgtttatacttctaaaaaatatacactgaacattgagggctctgcacctctttccctttgagtactgttggtctctttgtccaatacttctacacatgtgcttctcaaacttgatggaaaaaaaaatcacccggatcacccctgaaattctgattcagtacatctggcatggggcccaagtatttatctgtgcttaataagttcacacatgaagctgattctgctgatctgcagaccacactttgagtagcatgactcttagatctaaactctgttctcagcctcttacttagtggttctcaaaatgtaaaggctttccccaaaccccaccccctaagaaaaagccctggtgcaccagacccaaaaattgaaagtcaaatagtgccactgtctaagagtgtgggatatatcaccatgggttttcttcctctagagattaggtttataaatctctcactccctcaagattaagggattgtgaagaagagttctaaggaaatacttttagctgtccagactttaacctcgaaaatccttaaactgaagttcctttttatggagaaagattaaaagtgtacattt

SEQ ID NO: 133026 - DNA, 1242 bp, Homo sapiens
cacacctgtaatcccagcactttgagaggctgggatgggaggatcacttgagcctaggagttgagaccagcctgggcaacatggtgaaaccctgtctctacaaaaaatttaaaaattagccaggcattgtggtgtgcacctgtagtcccagctactaaggaggctgggtgggaggatcacttgagcccaggagttcaaggtgcagtgagctatgatcgcatcactgcactgtagcctaagcaacaaagctagactctgtctgtaaaaaataattgtaaaaaaattcccatttctaataaccaccttggtagagggttcaaaaacataggataataggagacagtagtgccatgttgtgcaactatatggttaaggaatatgctggatagttatgggagtgtatttgttcccaggaagtgtctaggaatgtgaaccacaagagcagggaataatgagccttgagaccatgaatggggcagggagatgagggctgggaactggggcaggaggtgggattggcaagtgttatcatagcctggggacagtatgaaagggactgtaggttcatagaatagagaggccggtagacataacctgtgtaaatggaggctgaaatgtgggtctacccaggacaggtaggaagcagatgctctgggagcagagtaattgcaaggactttaggaagagggtgtggccccaatcattttctttggaaggccgttgtagtggaaataattacaaattgggcagacctgggattgaatcccatctcagatgtgtaaatgtggacaaactacttacacactctaagctttggttttctcatctttacaatgggaaggattatgcctacttaaaaatgttacagtacatttagagatgatatatataaattaatggcacataagtgtttaataaatgatcacttatagtattataataggacaagagacacccatttgggacaagggccaggaaaagggctctcatagaaagcttttcctgattttggagagcatgacctcataactttatactggctgagcccaccattccactctacctggtaggcatagctagagggctcatcttctgaaagagctgtcttctactttcttcttattctggatcctctgtttctcccccatcctcatcttccatgtctctccatttagtcagggcagaaaaagtctgaaatgagctcttccagctcactgttttctcttcaccttcattagaggg

SEQ ID NO: 133027 - DNA, 1058 bp, Homo sapiens
agtttttggttcttatggagtccaatttatgttttttcttttgtcacttgtgcctttggtgtcatatctaagaaaccatcacctaatccaagataacaaagatttactcctatgttttcttctgtaacccttaatcttgtagctcagactctcttaatatctgcccttctacatctctacccattagcccattaaacacacaaaggcttggaagttcaacagaggagcctgccttcctctcagaaaggggaggaggaagcaagattgtaaataattgctgcttaaatttaacacaattatattttaataccttgtcccttatacgtatacttattagccatattttttatgcattgtttgttcatgtccttgagcatatgtgacttgcctcagactttaccacattccacatgacgagctatgaccctatggtctacatgagttaaattttaagaaattgattgtgtcaaggattcagttaaatgatgaataagagaaaggcaatgagggatttagactcagggtgagtgaaaaggaaatgataggaataaaaagagaaaggaaatgaatgaattttggaacattacatgtgaggagtcgaagggaatgaagactgttgcgacctgaacgtggaaacacaggagactagaacttgagcaggccacactgccacggtgcagccaagagaccagagaagctcaggatgggttctgtgtccttggcaccaggagaccttgaacaagagagaactttgctttagcctataagaggtaaaactgggaagagaagactttctagtggatcccagtagtgaaggttctaagctaaaactgggcagcatttgggcacttcaggatgtctgtatcctgagctagacgcatgttaagaatgtattatgcctttcacgtttatcttgtgtgatgtgttagaatgatacaaaagacataaaactaggtccccccacccccattgaggaggaagaggttgacatcagtcatacttgcagtcaccctaatgcccaactcagtgtctgcattcaagaagttctagtatagtag

SEQ ID NO: 133028 - DNA, 1312 bp, Homo sapiens
aatgcagaaagcatggttacgtccccacctgcctattgggctgtgtggtcaagctccatcttgactcaagccttttctcttcctgggctcttctccatctgaaaatgatgtagggaagggcatgcccctgacttccagggaggtgacattaggttccctttctttccctctctctccaggtgccaagctctcctgatgaaatgtgttctgccccactgggctccagggacagtgtctggtgctgttgaagcccttattcgaactttccagaatggatagtcccccaaagctgactggagagaccctcatcgttcatcacatccccctggtgcactgccaagtcccagacaggcagtgctgtggaggggcaggtggaggtggtgggagcacaagacctaatcccttctgcccacctgagctgggcatcacccagcccgatcaagacctaggacaagctgactccctgctattcagcagcctgcactctactccaggaggaactgcacggtctatagacagcaccaagagtaggagtcgggatggaagaggccctggagcccccaaacgacacaaccccttcttgctgcaggagggtgtgggtgagccaggacttggtgacctgtatgatgacagcattggtgacagtgccacccagcagtccttccacctgcatggcactggccagcccaactttcatctatcctctttccagctgccaccatctggccccagagtgggcaggccatgggggacaacacgcagtcgggctggagtggtggaagggcaggaacaggagccagtgatgaccttggatactcagcagtgcggcaccagccactgctgccggccagagctggaagcagagactatggagctggatgagtgtgggggacctggtgggagtggcagtgggggtggagccagcgatacctctggcttttcctttgaccaggaatggaagctcagttcagatgaatccccaaggaaccctggatgctccggctcaggggaccagcactgccgctgcagtagcacatccagtcagtccgaggcagctgaccagtccatgggctatgtgagcgactcctcctgcaacagttcagatggtgtgctggtcaccttcagcaccctctacaacaagatgcatggcaccccccgtgccaatctcaactctgccccacagtcctgcagcgactcttccttctgcagccactcagaccctggcgccttctatctggatctgcagccctccccatttgagtctaagatgtcttatgagtcccatcaccctgaaagtggaggaagggaaggg

SEQ ID NO: 133029 - DNA, 1101 bp, Homo sapiens
agcctgggcagacagagtgagattctgtctcaaaaaaaaaaaataaataaatacactgaggagataaaatcagcaggacttagaggctgacatattgggaaatgaaggattcagaagactgattctgaacctggatgatgggaaagatgaggccatggataggggctgtaatcacaggagatttcctggaagaaaagttcaggttcagacctttaggagtttgcagtgcctaaggggcaaccaagggatatgtctaacaacaacaacacacacacactgggcgtcagtgaagtttttttttttttctttttgagacggagtcttgctctttcgcccaggctggagtgcagtggcctccctaggccagctctttccctatttattttgttacattttaaataaatattttataccagtgtgttaaggtggtgctagtgacagagagatgagagggatgactctgttttcaaggattccagctaaggacagaaacagaaaacgtagttgatcattaaaatgcagagatggcagtgttccgtactggccagtgaaaggggtatgtaaatcagactgaaacgtcagggaggaactgctaatgcagttacatttaagcccaatctagaaagatgattaggattgggctttgtgacgacttgtaagaagaatgttctaggctcacaggattgtctgtacaaaaccacaaaggcacagaatagcttgaccctttctaggaactgcatataatttggtgaagccatagtggaacacaggtggaaccactgaaaaattttagagaaatggcttttggcatttgtttgtttttgtttggtttggtttttctgtctgcttaattatatgttttgatttgcatttagaaagatcactggttggttgttccttcaggccttgtttaaaaaaaaagtaattgggctgggcacagtggcttacacctgtaatcccagcactttgggaggccaaggcgggcggatcacctcaggtcaggttttcaagaccagcctggccaacatggtaaaaccccatctctactaataatacaaaaattagctaggcatggtggcgcatgcctgtaatcccagctac

SEQ ID NO: 133030 - DNA, 1160 bp, Homo sapiens
gggagggggaccacacaagcgttcatcctcagagcctcaggcttccacccaaggccttccccagcctctgcttgagttaaaaccttgggccaggcatggtggctcatgcctgtaatcccagcactttgggaggccgaggcacgtgggtcacctgaggtcaagagtttgagactagcctgggcaacatggtgaaaccccgtctctactaaaaattcaaaaattagccggctgtggtggcgcatgcctgtagtcccagctactcgggaggctgaggcacgagaattgcttgaacctgagaggcagaggttgcagtgagccgagatcatgccactgcactccagcttgggcaacagagtgagactcagtctcaaaaaacaaaacaaaaaaccttggagccagcaggatactctagcaatctgggagttagggtggccaggaatccctgcatctcactcctctaaactcagggccaccgcctggggttggagagtttaggcactgcacagctgtgggcagcagcgtttatacttagtacatgcaagttgactagtgcacagcctgcaccgctgtctgcagcagctctgcccagactgtctttcaaagtcccacttgggccaggctctggttctctgtgtggatcagtccctctctcttttcccctagacatcatccagacccactaccagccctggggcttcctgagtgcagctcataccgtgtgtcccggcctctttgaagagctgctgctgctgctacagcccctggccctgctgcccttcagcctcgacttgctgttccagcaccggctgctgcaaagtgggcagcagcagcggcagcacaaggaactgctgcgggtgtcccaggacctgctgctgtctgcccactccacgctgcagctggcccgggcccggggccaggagggccctggagacgtggacagggcagcccaaggggagcgggtgaagggtgtgggtgcctcagaaggtggagaagaggaagaggaagaagaggagacagaagaggtggcagaggcagccgggggctcagggcgtgccaggtgggcccgaggtgggcaggccggctggtggtaccagctcatgcagagctcccaggtctacatcgatggctccattgagggttccaggttccctcgtggtagc

SEQ ID NO: 133031 - DNA, 1074 bp, Homo sapiens
cagctgctgtccctaggctcccctcggactggctgagcctggacaagtccatgttccaactagtggcgcagacagtgggttcccgccgggagccagagcccaaggagagcctgcaggagccacactccccagccctgccctccagtcctccgtggtaagcctggggaaacggaagggctgaggggggcggggggcttttgagggggtttctctgacctccatgtgctgtttccccagtgaggtgcaggcactgtgccaccacctggccaccggccctggacagctgagcttccacaaaggagacatcctacgagtgctggggcgagctggaggagactggctgcgctgcagccgtggccccgactctggcctggtgcccctggcctacgtgacattgaccccaactccaagtccaacccctggaagcagccaaaactgaggccctgtgcatgctggtggcctcagggaccctcataacccccagactcagagcccgagagcccttcccaagccattggcttggctgcagagtagactgagagctggggccacgtatccctgtgctggcacctgctccctgtgctcagtattaattacgcccccttaactgtcccagtgaccttgtccagacctccacccaggagagggatgggacacagcactgggctgccaggattcccctggcccgtctgggccaacccttccatgggtgaagacaagcaagtccccctggaggcgggtggcccagaaagccatctacagggttccctaggccaggtggagatgaggatgggtaacagtattggggccagatccctaagccccccagctgtaaataggctgtggccagtgcctggtcatcagaagagggaggaggagcccaggcgtctgtttatgtatttatttatttatttattatacctattaataaaaaaggtgctcagcctccaaaccattttctctttgtgttcccccaccctcccaccctcccacccacctctctcccttccaaaaggatggctgggataggatgaaaagggaagggaacttgatgtccagtggcctaagccaaga

SEQ ID NO: 133032 - DNA, 1012 bp, Homo sapiens
tatgaatggggggacattggaacagctgctcagctcccctgaacccctgtcctggccggtcaggctccacctggccctggacattgcccgaggcctgcggtacctgcactccaaaggtgtatttcaccgcgacctcacatccaaggtaggctagcagggtgggtggagacatgaaagagggtttgaggctattaggttgtaactggcctgtggatgttggaatatggataacagatatattaggatgttggagtggcaaggcattggagaatattgggggaccagggtgaggggagtgctcggagggactgagtagcaccctgtgtttggagtgttggatgatgttgcaatattgaagtgccttgaaaaactgggagagcagagagggttggagttatgctggagtgacagggctttgggttatacattgggaggccagacagcagaaggtgatgagtgcgtggggatactatgtgtgtgtgtgtcagaactgtctagtccgacgggaagatcgaggcttcaccgctgtcgtgggtgacttcgggctggccgaaaagattcctgtgtataggtgagatgaatgtccctgttccccccaaatctcccagagtgcccctatctgatgtccccagagccccagggatgtttcccttggggaacggagggagttcacctcatccccttttgcctgggggggatgcctgaataggatgcttctgaccactctgcccctgcccctgcagggagggggcaaggaaggagccattggccgtggtgggctccccatactggatggctccagaggtgttacggggtgagctgtatgatgagaaggtgagacatcaacccttcagatccccaaggccttccgagacccttgaggtattctcataaagccccatccatccccaaaacaaccctaccagatcttcaggagtccccaagatccctttgcccctcacaggcacccttctaacacatgaaaactgtcaagatcccccaccctcaacca

SEQ ID NO: 133033 - DNA, 1007 bp, Homo sapiens
agagagagagagagagagagagagagagagagattgccaggtgaggaaggtgatgagctgaaaccaacttggagctatgctgtattatgatgatgaggatttgggttggggggtgttacaggctctaaccagaaatctggaagatgtgataggtggggcctttaaaaaaaaaaaaaaccctaaacatctctttgtaatccatccctcctctgcatccctaccgctactgccgccatcccctctcactcaaatcttgcaatagcctttgaaaggcgccgcctgactccagactgctgaccactagatcagcacagcagccagtggagttagagcctttaactcactgtgttcatccctcgcttaaaactttcagtgactccctttcacctcccctgcaggataaagcccaagctccttggcatgacttatgggcgcagtgtgatctggctctgtctgcccctccagcctcatcttaccattgcccccatctcactctaccctccgctgtgcctaatgcacttctgccaggtcctctgaataagcctctcctttgcctgtggttccctttgccttggagcattttctgtccttcgcttctcctggcagattcctactatgtgtcatgtctctacctagaagtcacttcacctatgagctcccatagaggatcctgtatttctcttattttaataatgcctagcattattgagcatttattgtctaagtgctttacaaatggtaactcattcagcctcacaaccacctttttttgaagtaaacaccgttaatatcctctcaatcttacagattcagaaaccgaggcacagttgcccaagaacacacagctggtaagtggtagacatggaatttgaatgcaggcagtccggctcctgagcccagagtcctaatctctgtgccaactggctgatgtagcatgctatatggggtaggaggctggggttaagaatcagcaggtgatgggtggacaggcaggacaaattagatgg

SEQ ID NO: 133034 - DNA, 1280 bp, Homo sapiens
tgcgcagtcccagccctcctccagcagccctagctggtacctgggtgtgcccggaggtcgggattggcgcggtctcctaggaccccggacagcgcagacacaagcagcagccccaccacacccaagagcgaaactgcgcccgccattgccggcccacgggtggagggatcgggcgggcggtgccgaagcggtccggcattggccggccgccccaacgcgcacgcgcacgcgagcaggccggccggctccggggaggccacgcccactccccgtagggcggggccagaccatatttgcataagatagtgtcattctagctttcctgtatttgttcatttcgtgtctattagctattctgctagccacaatgcctctgaaagcctatagtcttagaaagttatgcccgaaaacggtttttttaatctcacgccaccaactttctcaccctaatcataaaacacaatttctttagggctataaaatactactctgtgaagctgaggacgtggttcgtgctgaaggcctgtatcctaggctacacactgaggactctgttcctcccctttccgcctaggggaaagtccccggacctcgggcagagagtgccacgtgcatacgcacgtagacattccccgcttcccactccaaagtccgccaagaagcgtatcccgctgagcggcgtggcgcgggggcgtcatccgtcagctccctctagttacgcaggcagtgcgtgtccgcgcaccaaccacacggggctcattctcagcgcggctgttttttgttcccgagaccacggctcactgcagcctcgacctccccgggctcacgcgatgcctcacctcaggctcccaagtagttgggaccgcaggcgcacgccatcatgcctggctaatttttgtattttttgtagagacggattttcacctgttgcccaggctggtctcgaacgcctggtgtcaagcgatcagtccacctcgccctcccaaagtgctgggattacaggcgtgacaccgcgcccggtcaacgcggctgcttttcatgcgcgggcagctttacgctgttcttggccttgctatgaagtccttgtgctcattactccaaatatggagcattcctgaaacagcctcctcttctacctccctctccctttggcaaacgccatagtagccaccattcactgtgtagctggtacacaacatatggactctgcttgggctagaatcctgcctcctgtactcaagagcggtgaccttgtgaaacttagttctctctccgtgcct

SEQ ID NO: 133035 - DNA, 1058 bp, Homo sapiens
aggtacggggcggccgggggtaggggtgcccctgcaggtgcgggaccgccgggcgtggggatcccctgagcccgaatctcccatgggggtgccagggtaccaagaacaagacacagcttccctgtctgtaaaataaagacagtagtccgttggccttccaatattatgaggttattttgaggatccagggaggtaacggatgtgaagagcgtgtggtgaactgtaaataatgactatcacatttagttctcctacaatccagtgaggagtagtcacttgctcgaggtcacccagcgctggcaactgctggagctgggatttgaacccagctagcagtgtccatgctacaagagtggggccagccttggcacaggaggttgattgctgcagccagtgtttctagagttccagatatgaagtggtctcatgttctccttgggaggaggccctgaaatgtaagttgacagtacattttgaaaaacagtaccttccagggctgtgtctttagccgtgaccctattacgtacttgcattataaaatagaaccgatggaaccagtttagatatatgaaactagaagagatagctaataatgaccccaggtagatgtgacaggctaggatgaatgactgaatttaatgatgaactttgagaaggatagactagtaaattctgttcttggacctgagtacagtctgggagaaacataatgtagcaggaggtcttatgaaagagagttaggcattccagttgactgagttcactgtgggatgtgacaagccacttcccaaatcagtgctgggaacatggcactgtgcttcacctgccaatcagaatgcccctggagaattgtattctcctcagggcattgctttaagagcactacgtgttcaggaaacaaccagagaaaaccaccgtcaatgagcactgactgtaaagactgacgttaataaaccagaaaaaactcaggaaagtgggtgagggtgtgaccattgccttcaaattcctgaggggctgtcaccttgaggagacattattttggaaggctccagtaagca

SEQ ID NO: 133036 - DNA, 1405 bp, Homo sapiens
aggtgatccacccaccttggcttcccgaagtgctgggattacaggtgtgagccacagcactcagccaccagagcttttttcaaaccggagggagttgctcattcctggaggtgtttcagcaaactgaccatgtgtgggacataggacgtcgcttcatatgctgggtgaggagctagatagactaggattgtgattctctgaggtaaaaacccaatcactgtctccatctcaaattgcactctctcttggctggctctggagactgaggtgatggagcagaaccttgttgcttcagtactgccctttccttcttccacaacaggggaaagatgaaactgcggttctccacgaggaggcaagcaagcagcagccactgcagtcaggtgggtttagcagaagtctgtgctgggtcgggggagtttaggggacagcagaagatacataaccacttctgcccccttttttcccttatccccagagcaacagctggcccagttgacacaacagctggcccagacagagcagcacctgaacaacctgatggcccagctggaccccctttttgagcggtgaggagagcaatgattctgtgaatttttggggaatttgtggcaggagggaggaatggggacataggttgggagccactgagtggacatttcttcagtgtgactactctggctggagcccagcaggagcttctgaacatgaagctatggaccatccacgagctgctgcaagatagcaagccggacaaggatatggaggcttcagaaccaggtgaaggctcgggaggcgagtctgctggaggtggagacaaagtctctgaaactggaacattcctgatctctccccacacagaggccagcagacctcttcctgaggacttctgtttaaaggaggacgaggaggagattggtgacagtcaggcctgggaggagcccacaaactggagcacagagacatggaacctagctacttcctgggaggtggggcggggactacggagaaggtgcagccaggctgtggcaaagggccccagtcacagccttggctgggaaggagggacgacagctgaaggtcgactaaaacaaagtctgttttcatgatggagtgctcctgtgtgttttttcgatcctagttggttgtacacacccatactaggtgcctaaggacaactgggccttcttgaagagctgtccttattaggacaaaaagaggctgccttccagtgtgacagcagagaagatagagggagctccagctcttttcctcgtattcctgaggccaccagcatgcccgcgttcagggcccaaaaatcccttttctcatagcaaaactgagacagaagggtctttcccaaaaaaaagaaaaaaaactttactcaaatccagtggaaaaataa

SEQ ID NO: 133037 - DNA, 1590 bp, Homo sapiens
gagcctgtctctgctggtcctgaccctacgctcaccctctccctgcctttcagaggaatgaaggtcatcgaaaaccgggccatgaaggatgaggagaagatggaactgcaggagatgcagctgaaggaggccaagcacatcgctgaggattcagaccgcaaatatgaagaggtgacagccttgcccctctgcctgctcgctgcccagcctgcaacatgcccagtccttctccactgatctaccctctctttctcactccccacaggtggccaggaagctggtgatcctggaaggagagctggagcgctcggaggagagggctgaggtggccgagaggtaaagatacccgggggtgacaagtgagcccattggccctggggccttccacacagtgggaaggtagcatcctaggcttggggctgtagggacaggccctgttctctgacccctgcccgctgcccccagccgagccagacagctggaggaggaacttcgaaccatggaccaggccctcaagtccctgatggcctcagaggaggaggtagtgacccctctgaacctttctgggcaatggcgccttctctcagctcaccttccctccgtctcagcaccgcaggctgctctttctcagctgctggggatcaggaagggcctggggcttctgagccctgcctgctgtcactctcacaactttgctcttctcttctctcctccacccgtcccctgctgtgccatctccactgtctggcttcgctgtgccctcacaccctgccccccccgccacacaccccctgcagtaaatgtggggacctagaggaggagctgaaaattgttaccaacaacttgaaatccctggaggcccaggcggacaaggtagaggggagcagaggggcagtgaggatggggtcccacaggggagggaggtgaggggcccaaggcagggaggggctgggtgttcaacggaggcaagatgaccaggagcctacggggtacaatggagaaatgaaggatctgtggtagcgctgtactgatggcgtgtgtgtgtccccaaaagtattccaccaaagaagataaatatgaagaggagatcaaactgttggaggagaagctgaaggaggtgagagtcctcttccagttcccagtctcccctcaagccaccctaatccttgccagagacggcctgtggcaggacacttgagggttgggatggacaagaagcttgacttaggcagtagtctgtgggagggcctaattctttgccatttctcccatcctgcctttacccccaggctgagacccgagcagagtttgccgagaggtctgtggcaaagttggagaaaaccatcgatgacctagaaggtaaaagaagcctttataagtaggtccacacctgccgtgattatcagtctgtcctgtaccttctcatcccattttatttgccaccaataaactagggttgggccacctaggaccctaccaactccccaactctgtgggccatgtctacaattcaagtaattgtagctgcccacggcgcaacaactccagtgcttctcaaacttcagcatgcatgagaatcactgggagagt

SEQ ID NO: 133038 - DNA, 1035 bp, Homo sapiens
cgggcaggggtcagagaacagggcctgtccctacagccccaagcctaggatgctaccttcccactgtgtggaaggccccagggccaatgggctcacttgtcacccccgggtatctttacctctcggccacctcagccctctcctccgagcgctccagctctccttccaggatcaccagcttcctggccacctgtggggagtgagaaagagagggtagatcagtggagaaggactgggcatgttgcaggctgggcagcgagcaggcagaggggcaaggctgtcacctcttcatatttgcggtctgaatcctcagcgatgtgcttggcctccttcagctgcatctcctgcagttccatcttctcctcatccttcatggcccggttttcgatgaccttcattcctctgaaaggcagggagagggtgagcgtagggtcaggaccagcagagacaggctcccttctccctcccggaccatcctccccgaggcccctgaccacctctcgctctcatcagccgccttctcggcctcctccagcttctgcagggctgtagccaggcgctcctgggcccggtccagctcctcctcaaccagctgaatgcggcggttcagggaggccacatctgcctcagcctgtgggtcagaggtcaggggtcaaaaaggccttgttagccttggataaggatcagagaggctccagaggatggcgagattcttctcagaaagaactgaggcttcctggtttctagacattctatgtgatttttccccaaccaatcatcttctgcccagactgtgctccagtaaaaaatgtgcattcaggccgggcatggtggctcacgcctgtaatccccgcactctgggaggccgaggcgggtggatcacctgaggtgaggagtttgagagcagcctggccaacatggtgaaactctgtctctattaaaaataaaaaattagccaggcatggtggcgcatgcctgtaatcccagctacttgggaggctgaggcacaagaatcacttgaacccaggaggcgga

SEQ ID NO: 133039 - DNA, 1056 bp, Homo sapiens
tgcctgcgctggtcccaactaccctatgcccctgctgtgcatcctcactgaactaagtccccgatctccaccctcagatcatcgcagcacaggaagaaatgcttcggaaggaacgagagctggaagaggcgcggaagaaactggcccagatccggcagcagcagtacaagtttctgccttcagagcttcgagatgagcactaaagaagcctcttctatttaatgcagacccggcccagagactgtgcgtgccactaccaaagccttctgggctgtcggggcccaacctgcccaaccccagcactccccaaagtgcctgccaaaccccagggcctggccccgcccagtcccgcagtacatcccctgtcccctccccaaccccaagtgccttcatgccctagggccccccaagtgcctgcccctccccagagtattaacgctccaagagtattattaacgctgctgtacctcgatctgaatctgccggggccccagcccactccaccctgccagcagcttccggccagtccccacagcctcatcagctctcttcaccgttttttgatactatcttcccccacccccagctacccataggggctgcagagttataagccccaaacaggtcatgctccaataaaaatgattctacctacaacctctgcctggcttcaagggagatacaagttttctcccagggcagtaggagagacagtggggttgaattctgtcacccagcttgatccagcttgaaatgggagaggggaagactggcagtctgcacctgaggtcccttcctccttgcacccggaccctaaagttatccaatggggaagttgtgcctgagaagtcatactcctgttatcctcacctccctggccagcacctaagcctcacaaagtgtcgttctgctgctgctgggacagcagctaccacagttccttgtggctaccaggacattctgttcttcatagctactcagggtatgtcaacaaatccagtccttgaccaaattcaaattttcaaaagaagctttgctaaaaataatatgcctgta

SEQ ID NO: 133040 - DNA, 1239 bp, Homo sapiens
ggctctgaaccgctgtgtcagctgcctacctggccagcgcgatgtggataatgccctgagggcagttggagatgccagcaagcgactcctgagtgactcggtaggaggacggtagggggtgggggaacgtaggagtcaaagaatgccaggcctctccttcctccctctcggttgtcctttgaccctgacttcccagatctgtcccctttcattactcccaggctatgtgcccaccttttcagccctcctttaccagacttctccctgcatcattccccactcttctgtctgacttcccctctcaccttgcagcttcctcctagcactgggacatttcaagaagctcagagccggttgaatgaagctgctgctgggctgaatcaggcagccacagaactggtgcaggcctctcggggaacccctcaggacctggctcgagcctcaggccgatttggacaggacttcagcaccttcctggaagctggtgtggagatggcaggccaggctccggtatgaagaggcagagggtctggttgaatggttcccactaagggttagataggaggcagttgagtgaccagtcctgacttgctcctggctcccttccctccccagtctctagcactacttgagtgtctgggaaagaagatcccttttagagacagataagaaaggacaggacaatgcattgaccttgtcaccttcaacagagccaggaggaccgagcccaagttgtgtccaacttgaagggcatctccatgtcttcaagcaaacttcttctggctgccaaggccctgtccacggaccctgctgcccctaacctcaagagtcagctggctgcagctgccaggtaagtagttgctgagaagcccagccctggactgtgtgagagagactggggagcaggcagttcatgagagcttcttggcttaggaatggttataggcaaaagataaatacttacataggacccaggaatgatgacctattcaccttttcactcaactttctgtcactcccagggcagtaactgacagcatcaatcagctcatcactatgtgcacccagcaggcacccggccagaaggagtgtgataacgccctgcgggaattggaggtagacacatggcaggctgatggcattgaggttgagggaagtgttctggttttgggcctgagggaggtgtcttggatctcactttgccctccccctacacagacggtccgggaactcctggag

SEQ ID NO: 133041 - DNA, 1075 bp, Homo sapiens
tccattccagtccctgtttctccccacttgtctttagacttcagcccagcaggcactcactggaaccattaactccagcatgcaggccgtgcaggctgcccaggccaccctggatgactttgacactctgccgcctcttggccaggatgctgtaagtatgggatggaggagaggccggtggtactgaagctgagactccaagggatagggatgaggtgaaccaaaccagggcagatcctgaaggcttttcctctctctttcaggcctctaaggcctggcgtaaaaacaagatggatgaatcaaagcatgagatccactctcaggtagatgccatcacagctggtactgcgtctgtggtgaacctgacagcaggtaggccggatgctagcttccgggtgtgtgatggggagagggggtgcaagtgtgcacaggcatgcatgtgactggcttcatgtgtgactgtgccttgactcactgtggaagggactgtgtgtgtgcgtctttctgtggacatgtgtgtgactaactgggtgtgactttgctccctccccagcccttcgtctggcctgccctgtctctcatgttcctctttctccttttccccttaggggaccctgctgagacagactataccgcagtgggctgtgcagtcaccacaatctcctccaacctgacggagatgtcccgtggggtgaagctgctggctgccttgctggaggacgaaggcggcagtggtcggcccctgttgcaggcagcaaagggccttgcgggagcagtgtcagaactgctgcgcagtgcccaaccagccagtgctgaggtcaggggccacaggtttgggttagggtggagacagggttcaagcccaaggagaaggggcagtccaagccacaggatggaagcctgggtcccgtgggcctgtgatatgcacaggcatgtgggcagggattgggcagcttctgactggtgttcactctccacagccccgtcagaacctgctgcaagcagctgggaacgtgggccaggccagtggggagctgttgcaacaaattggggaaagtgatactgacccccactt

SEQ ID NO: 133042 - DNA, 1052 bp, Homo sapiens
ccttaattccttagctgtgatatgaaactctttgctaaattcttccccattttatgcacaggcacacaagaattgtgggcagatgagtgagattgaggccaaggtccgctacgtgaagctagcccgttctctcaagacttacggtgtctccttcttcctggtgaaggtaggttatgggcccttttcactgccctccttgtttcccactcttgcccttttctgtctctgaaagtctctggccttgccctcagtcacatctcccaccattccctaagattcccattctcttccttgctctgacctcatgaaaacctgcctgtcatcagccctacaccaccacttccctccctaccctgcattttcccttgtccgttagccctcccggccacctcaacatcccctatggctgcaagctgatctgatcattcacctctcatttgacctctgacctgtaacaccaacaccaacctctgcctcataggaaaaaatgaaagggaagaacaagctagtgcccaggcttctgggcatcaccaaggagtgtgtgatgcgagtggatgagaagaccaaggaagtgatccaggagtggaacctcaccaacatcaaacgctgggctgcgtctcccaaaagcttcaccctggtaagtctggggactataacaagaaagtgctttgggagtttcattaaaggggcagctgcagaggtctcttccctctcttggggtaagtatactgagtattactccagaaaaaaaggaggttagagtagatggagaatcttcctctgggagagtgtgaggcttaaatgaaacggatgatggacttattctttaaaatcagcagaacaaaaatctcatcagcaagctgagatcacaggaattcttgtaggtgtggtgaaaggaaaaatgtgataacctccctgtttcagcagcagctatatacagtgaatttttgactttatattatagggttatgaattgaaaactgatatcaacttgataaagtaccctaatgacacaaatacaaattataggaaatgctgttttttcccttttg

SEQ ID NO: 133043 - DNA, 2005 bp, Homo sapiens
tctcccaccagaagagtgtattctaatgccctgatgccatgggtcaggtatagccaggctggagaaaagaagctgccaccatggttgcactttcactgaagatcagcattgggaatgtggtgaagacgatgcagtttgagccgtctaccatggtgtacgacgcctgccgcatcattcgtgagcggatcccagaggccccagctggtcctcgtgagtctgactcccccggtggctggagtgggagtcttcagtcccttcttgttcccaggctctcggccttgagagttgacccctttgtcccctaagactactcacccctcaggtctgtgttccatggttccctcgttctttaggcccaaggtcatgggagaaatagtcaggggcaacatggtacaagctgttcagccacattggggtcttcataagcctaaagtgatccatcctctcttttagccagcgactttgggctctttctgtcagatgatgaccccaaaaagggtatatggctggaggctgggaaagctttggactactacatgctccgaaatggggtaagtatcctttcatcaaggaccaccacatccccttccatcagcttctccctgttccacctcctgttttcagcacccacatctgttgtctcttagccctccccatgctttcttcctattaacagacagtcataattccctgcttttgaacgaaccaccatagtcttcctttcagtgctccactctctcccctcgggctgtgtaaagaggaaataatacccctagctcagagtaggcccctgtctcttcttcctgccctaacaggacactatggagtacaggaagaaacagagacccctgaagatccgtatgctggatggaactgtgaagacgatcatggtggatgactctaagactgtcactgacatgctcatgaccatctgtgcccgcattggtaaggggccctagtacagttgaaagcctgggccagaaagcctcaactctctcaaaaggcatggatgcagtacctgggaagctaacaagccatctccttcctcaggcatcaccaatcatgatgaatattcattggttcgagagctgatggaagagaaaaaggaggaaataacagggaccttaagaaaggacaagacattgctgcgagatgaaaagaagatggagaaactaaagcagaaattgcacacagatgatgagtgtaagcagaactagaaaaaagagggcttttgaaatgggaagggtgggaaggggcttcagcatctgcttctgccaggcactgttttacaccctggggatacatcagtgagaaaacaaagtcctacactcatgggacttacatttaagtgaggggaggtaggaaatgcagaaataaacagagaccagacagcacaggggccatgggggtttggcactgaggggactgtctgtatcccagtgaactggctggaccatggtcggacactgagggagcagggtgtagaggagcacgagacgctgctgctgcggaggaagttcttttactcagaccagaatgtggattcccgggaccctgtacagctgaacctcctgtatgtgcaggtatgcagaggacttggctggggtggggcaggaatagggagggctcggaagcacagtgtgcgtgtccttgcacccacacacaacattcgcctccttgccctgtgctctccaggcacgagatgacatcctgaatggctcccaccctgtctcctttgacaaggcctgtgagtttgctggcttccaatgccagatccagtttgggccccacaatgagcagaagcacaaggctggcttccttgagtgagtgacccacatcctataccctgtcagggcccaggactccctgccattgtgaccccagtgggcctgtctccattccaagcctgccccccactatttcttcttccgaggtaccagggtttgaccaacatagctacccttttagttgccatcatccattgtctcttctctgcctctggaat

SEQ ID NO: 133044 - DNA, 1048 bp, Homo sapiens
taagaggcttaaggatagctctcagacagggcaaggggagaggtctgggttggcctctgaagattctttgtctcctcagtgttgtcccgccagcttcgtgccctccccagtgaggacccttaccagctggagctgcctgccctgcagtcagaagtgccgaaagacagcacacaccagtggttggacggctcagactgtgtactccaggcccctggcaacacttcctgcctgctgcattacatgcctcaggctcccagtgcagagcctcccctggagtggccattccctgacctcttctcagagcctctctgccgaggtcccatcctccccctgcaggcaaatctcacaaggaagggaggatggcttcctactggtagcccctctgtcattttgcaggacagatactcaggctagatatgaggatatgtggggggtctcagcaggagcctggggggctccccatctgtgtccaaataaaaagcggtgggcaagggctggccgcagctcctgtgccctgtcaggacgactgagggctcaaacacaccacacttaatggctttctgggtcttttatttgtacccatgtgtctgtcacaccatgaatgtacctggggaaatcaactgacctccctgaacatttcacgcagtcagggaacaggtgaggaaagaaataaataagtgattctaatgctgcctaggtcaccctcaacccccatttactggcacaattgggtggagagaagggaaggggtatgattgtcctgatggctcagggttgcaggaggttcagaggggaaggaggaaaggccaggctggaggctgggctgttagcacttccctcccacagttcagacggctcactctgggctcaggtttgccatggcttcctttggtccaaacataggccctgtccttagtcctgtgccctgtttgacttttggccaggaggcctttttgtgctgctgctgttgcagggctagctgcatggcccatatgctcagtggccgcatgtaggccagtgagcggaacactcgctgctggcagtatgc

SEQ ID NO: 133045 - DNA, 1052 bp, Homo sapiens
taataagtaggccttgtttccatgttagggatccctatccctggggctgaaggggctcctgtcctgaattctcttgtgtttctctcaggccaaagcacccctacgcagaaaggagtaggcattgctggagctgtgtgtgtttccagcaagttgcgacctcgaggccagtgccgcctggagttttcactggcttgggacatgcccaggatcatgtttggagctaaaggccaagtccactacaggtgaggggaccaagaaagtgtaaggatccagagtgctggggctctgacctggggcttgtgttcatccttccccttcccaccccaggcggtatacaaggttctttggccaggatggagatgcagcacctgccctcagccactatgcactgtgccgatacgcagagtgggaagagaggatctcagcttggcagagcccggtattggatgacaggtgccagtggggcccatttcttgcctttctcctgggcactcactccaaatgggactcctcgatttactctccacccaccaaagtcagtagacttgcactgggattcatttgatgatcccactctgctgaacccccaaatcctttccatcttgggaggtacatgttccttaaaccatttcctcctcctcgcttcccagatcactgcctgcctggtacaaatctgcgctgttcaatgaactatacttcctggctgatggaggcacagtgtggctggaagttcttgaggactccctaccagaggagctgggcagaaacatgtgtcacctccgccccaccctacgggactacggtcgatttggctaccttgagggtacaggatgctggtgggctgggatatggcaggccatccccaagtcaggatgatggatttgcctaccccagggtattggttaggatgagggggtgttgggtgtggactagtaacaatgccccacctctaaatctagaggacaagctacagaggggtttgaaggggaagcaggaattctggcaacagtgtgtctcattcattcctccaggccaggagtaccgcatgtaca

SEQ ID NO: 133046 - DNA, 1134 bp, Homo sapiens
tgctacctccccatccatctatctcccaagctttctctcccttctccactacggtggtgttagcacctcacttaagcccaatctcctgctttttctgtggcccttttcatctgggtagcagagtgatctttctcacaggcaaatcaagatatgtcagtccttggttaggatgtttcagtgactccccatggccctcaggctaaagtctcaactcttgcctggctttcaaggcccttcttgagctggcctctccctgcccatcagactcatcacctgttcaagcacctatagtctgttcatataaaaacactcactgttccttgagcacactacattctctcctccatgcctgtgctcatgcttgttcgctatctggtgaaacctctcatccttcaaagcctaggtcaaaagccatctcttcctcctctacttcttccagcagtgagtcattatgtgtgcccccctccccttctattctagcatttggtgtattatgttataatgtattgactgaccattctgtgtccctgactgctgtatggattcttctgagggtagggacattttttaattcactgatgcacccttcttcagagttggcatgtatgtggagggaatgagcgaaatctgcagcaccgtccctttttccacagtatactatccacccctctccttttagcactgatgtggtctcacagtctccatttcccctaagtcttattttctcaaaaaaagttttagctcttggagggtaggagctatgagggattaatatccctttccctggttcaaactatgtcaaatatttttattgtatacagtgggctctccatatctgtgagttccacatcagtggattcaaccaaccaaatctaaaatatgtggaaaaaaagttgtgtctgtaccgaatatgtacacactttatttactgtacggcacaacaagggtttatgtaacaatgtatgaggtattataagtaatctacagatgatttaaagtatataggaggatgtgcaatggttatttgcaaatactataagccatttcaaatcaaagacttgagcatcctcggatagcaggtcctgggcccaaccccccatggatactgagggacaactgtataaaataattttt

SEQ ID NO: 133047 - DNA, 1047 bp, Homo sapiens
tacctttagccatctcatgttagaatctaaaaccctaacctctactctcatctccgttccctctcagcattacctctccactcattctttctctaggccttcaggatgtccggtttccccaggatgaggctgtagccccatccagtccattcttggaggaggatgaaggtgggaagaaagattcatggctagctgagctggctggggaacgcctaatggctgccacatcctgccgcagcctccgtgagaattctttcagaattgtcctaccccatccttcccctcattgttttcccatctcagagacagtctcctaaccaccacacacttctgtggatccactgatacctgacacctccaattttaaagaaaagccccatcttttggcctgtggtgcccagtcctagacgttatccagtatgtagactccaggcttatagtgtcctattctccccagatctatacaatatcagtgatggccgagggaaagttgggacgtttggcatcttcaaatctgtgtacagacttggcgaggacgtggtggggaccttaaacttaggggaaggaaccgtagcttgtttgcaggtaagaagggagcagagcttcttacctgctggggtgctggggttgaagggctagggtggaaggcctgtataaagaggggtggcatgtagaaggggatagtggggtcatccagggtccctttgtaaaacagcttgaggttgggctgtcctctcacctacagacagcacttcctgttagcacacacctgtctcttgctcccagttttcagtcagcttacagaccgaggagcgtgtacagcctgagtaccagcggcgacgtggggcagggggtgtcccctctgtgtcacatgtgactcacgcccggcaccaggaatcctgcctacatacaactagaaccagcttctccctcccaatccctctcagctccaccccaggcttctgtacagccattggtgagaccctcactgttactggagaagggagagggggacagtaaaatgctgtgctaagggagggtgtaatg

SEQ ID NO: 133048 - DNA, 1023 bp, Homo sapiens
agtaagtacgcactatccccgtatttagtttgtctttcctgtttcacagctggaggaagcctgggtattttgacacgggatcatctgtaaggccccatcctccctgtgccctctctgctgctcctccattcctaacgcttcaccccactttaccttgagcttggaagtagcacttgctgtagactcctgggtgctggaggagtagagacatcaccaagcagatgatcccccagcctcctaggatccccttggcctgtccagcccagagcatccttagggccattgctgctgcacagccctctcagacccttcttggcctctgctcagctactctggtcttgactccttgactttgctttgcgttgctccttgagtcttagtttctgtctttctcccctgggctcctgtctcacactatctccctgccctctgctctcacaggctggggatgtttataaagtgaggaccctggccccctgctgagtagagctggaaaagttgtaactctgtttcctgaggtgagggcatgaaaacaagaggtctagctttaacaagctgtgagagctgattcatgccccggcacagctagagggagggaggtggccatggagggggcactggactgggcacttccccagcaaggaggcaggaggggcgagggcccccaggtggtccccagatctcttccctgacctggagagaaggaagcattccaccttccccctttctcccccactgccaccaccaggggtgtgtatgctgggatccctgcctggaccggagggaggcatttcctggggatggttaatcctgtgccccagccaaacccaggagctgcaatagggtgcgacggccagaagctccaggagagtgagcaggcacctggagtggagactgtgtttccctcagatcctagggcagggtttccctaatgtatccaagaaatagggctgcccctcagagatggtggggagggtctcttttcctcaggcattccagaggtgaactgtccattgcttatca

SEQ ID NO: 133049 - DNA, 1006 bp, Homo sapiens
gggttcagtcggggcagaaccaaaactactagatgagggatttgttttctctgctggcactgcatcctggctgggtggtaggctggggagaaaagcagcgaaacagctggggtctggggaggaggctggtgggagcaggcctgtgggcccagctttttgcttccttacagcctgcagcccactactcgggagctgagaagcagatttggtggacgggacggcctattccctgggtgaagggggctcctccctcggacaatcccccctgtgcctttgacttggacgacccatcctgtgataaaagtgggtgtgtgcagggactgggagcagctttcctccctttgctttccattcatggcctccaccctcactgaccctccactcttaactgtgcttctgcctttacgtctgcatccctccctcctcatttcttcctactcccaaggagtctgtctatgcacctatgcaccccgttctccattctgccaagtccgcacacagtcttcctcagggtctctatttccccttcagctccactttcaaccctggcaattgtggctctgggcacaggaatcaccttcatcatgtttggtgtttccagcttcctaattttccggtgagttctgggtttcttgctgacctactccctgcccccattgccacacaacctctggctgaagccaggtggtccctataatgtgggatagggtagtaggtttcttaatttgctggttgtctcttagatccaacagcgtcttcctctctagcctttctctttagttgtcgcttagcctaggtgtttgttccacttttggtcctagactggatatactaactagtgtttttcagtggggttaagatcaaaggtgaattttccattggtcttcttttaggaaagaactttcacccccagtctctgtgtttgttagtgagcatagggcatgtgccagatatgccgagaatgcagccttatcttccagccctgtctctcaggtgtaacagttgc

SEQ ID NO: 133050 - DNA, 1346 bp, Homo sapiens
cagtcgcctcacactgtcgctggtgagcccttgtctcagctgttcctctgcctccctctgagttcctgtcccttcttaccctggatctctcccagcacattggcttgtaatgatagcccctgcactaccaccatcatctaatgttcctttcatccttccgcctccatgttgcccttggccccagcggggatccagttacggctcgctcatgacagcccatgggaaataccagatctttgccaacaccggtcacttcaaggtgaacagtcatttgcttgttctggtccccaccatttcatcctgtctcatccccatctgccacctctgcccctgaacctctgtccctcatacccgactctctgtgcccagctgagctcctgggtgcttccactgctctctagcatttccttgtacccagaacttctgatattcactttcctttcccctttcactcccaccatcagggaaatgttgtcgccatcaaacatgtgaataagaagcgcattgagctgacccggcaggttctgtttgaactcaaacatgtatgtaacagaggatggactctaacatgtatgtaatggaggagtggggaaaactatgaaatagtaaaattggctagatgggcaaggggttgatttataaatgattttaaaatcgtagatacaactaagagaaaggtcctcttatgtagtggtaagtttctgtatctaatttttaactctttcaattttcttatccttcccattgtttttttctgccagatgagagatgttcagttcaaccatctcactcgcttcattggcgcctgcatagaccctcccaacatttgcattgtcactgaatactgtcctcgtgggagtttacaggtgagggataggtgtaggagattatggcaggggtgggaaggatagacccaaagttatactgactctatgctgggtgatagctggtgggaccaggacagacagtctattccatgtcacttaccaggatattctagaaaatgacagcatcaacttggactggatgtttcgttattcactcattaatgaccttgttaaggtgagtcttccccactccttaaaagttcatccactttaaatcacttccactgttctttgattgtggtttttctccttctagtcctctgaagtcctgttctctcatctccccttattcccatggtctggtaataatgggtaaacaaggagtctggggcttataactgggacagtgagttttacctgccacaaggagtcctgtgcctgtagagagtttctatctttctgtcttaaatatctcaggtctctttccatcatctcttttacctctaagaactcataaaa

SEQ ID NO: 133051 - DNA, 1047 bp, Homo sapiens
cagccatgccctctatgccagtgaggcccacccccacaacccactttttatattgctcctctttccacctagggatggtgggagagggaggtggagtgacagtaatatagggatgagcccaggtgggcttgggggtgccccatttcgggggacctggccagccggtttcctcttttcagagaagctgtggactgccccagaactgctcagtgggaaccccttgccaaccacaggcatgcagaaggctgacgtctatagctttgggatcatcctgcaggagatagcacttcgcagtggtcctttctacttggagggcctggacctcagccccaaaggtaagagtcaatccactacccacagcctcttcttcctgggggaactctgttcttcatccaaacctttgatcaccctcagagattgtccagaaggtacgaaatggtcagcggccatatttccggccaagcattgaccggacccaactgaatgaagagctagttttgctgatggagcgatgttgggctcaggacccagctgagcggccagactttggacagattaagggcttcattcggcgctttaacaagtgagagggcattatggggcaggggcttcccagggatagaagactcattagtcctagtgcatgaagtggggcaggtgggaccagagggtgggttggataggaagtcctgggaatcttcagaatcttagagcaagtgccttatcctggcctccctctagggagggtggcaccagcatattggacaacctcctgctgcgcatggaacagtatgccaataacttggagaagctggtggaggaacgcacacaggcctatctggaggaaaaacgcaaggctgaagctctgctctaccaaatcctaccccagtgagactttgtcccccttcctgtattttcttttgggattctgctctgttgggctctgcctcatcaggcacctgagaactcgcctccccaccctcagaaccctgctggccacagggagcacccctgcttatagattatttgctgtcattctgtctccac

SEQ ID NO: 133052 - DNA, 1066 bp, Homo sapiens
ggtgaggtcgaactggtggctccggagaacgagctggtgctgattcccgccctgcgcaggccggggcgccgaggtcgggacagggtcagtgcagcggctgccgccttctttccactgcctgcagcccagctggcccgatgccccctgcaggaaatgagctttctcttcttggagccagtgctctgccctcctcaggcttctggcctcctaatgagcactagtgttaacctctcttctgcacttgccagaagcggctcggaggtcagagaattcattccgtcccgttctcccccaacgtgatgcaatgacatcagccttctctgaatcccttacccgaagttccctggggctaggggagcagaggtcacttagctgaactcttacctccactcattcaagggacaagagttaaaattcacagagtcacatgtgacacccagatgaggggtcaactagtgtcaaacagggcgattgcattaaaacttaaataaaacaggcgacaaggcttaaagatcagaaaacaagtaacggaaataagtggaaatgtactaacaaggtgagagtggaaagagattcaagccatcgcaagagattatggaaaccatccctttattttatattagaagctgagagaaggaatttatctgaggtaattcagtggtatggtaaggtaggaactgagaccaaaatccccagtctctcattctagatcctttccctaaacagtgctatatttcgtggacacatgagcaggaatcaattgcactgctgaatcctgataataataccgcctgttatctaaccaggtccagcaccttctggccctaccctttgctgctggtgctctgaaattcaggaactttcctcctgggtgggaacgatgaataggttattagaaggacgaaattaacaactatcagagcccagcttctgccagctccctcctttgaatatggtcgatccaccttcaggtccgaggagctgcaggtgtgactgatgggaatgaagtggccaaggcccagcaggcaactcctgggggagcagccccaaccatcttctcccggat

SEQ ID NO: 133053 - DNA, 1050 bp, Homo sapiens
agaagaataaccccaggaagtaccttcgcagtgtaggagatggagagactgtggagtttgatgttgttgaaggagaaaagggtgcggaggcagcaaatgttacagggcctggtggtgttccagttcaaggcagtacatatgcagcagaccgtaaccattatagacgctatccacgtcgtagggtcctccacgcaattaccagcaaaattaccagaatagtgagagtggggaaaagaacgagggatcggagagtgctcccgcaggccaagcccaacaacgccggccctaccgcaggcgaaggttcccaccttactacatgcggagaccctatgggcgtcgaccacagtattccaaccctcctgtgcagggtgaagtgatggagggtgctgacaaccagggtgcaggagaacaaggtagaccagtgaggcagaatacgtatcggggatatagaccacgattccgcaggggccctccacgccaaagacagcctagagaggacggcaatgatgaagataaagaaaatcaaggagatgagacccaaggtcagcagccacctcaacgtcggtaccgccgcaacttcaattgccgacgcagacacccagaaaaccctaaaccacaagatggcaaagagacaaaagcagccgatccaccagctgagaattcgtccactcctgaggctgagcggggcaggactgagtaaatgccagcttaccatctctaccatcatccggtttagtcatccaacaggaagaaatatgaaattccagctataagaaatgaacaaaagattggagctgaagaccttaagtgcttgctttttgcccgttgaccagataaatagaactatctgcattatctatgcagcatgggatttttattatttttacctaaagacgtctctttttggtaataacaaacgtgttttttaaaaaagcctggtttttttcaatacgcctttaaaggtttttaaattgtttcatatctggtcaagttgagatttttaagaacttcatttttaatttgtaataaaagtttacaacttgatttttt

SEQ ID NO: 133054 - DNA, 1898 bp, Homo sapiens
atatgaaacaatttaaaaacctttaaaggcgtattgaaaaaaaccaggcttttttaaaaaacacgtttgttattaccaaaaagagacgtctttaggtaaaaataataaaaatcccatgctgcatagataatgcagatagttctatttatctggtcaacgggcaaaaagcaagcacttaaggtcttcagctccaatcttttgttcatttcttatagctggaatttcatatttcttcctgttggatgactaaaccggatgatggtagagatggtaagctggcatttactcagtcctgccccgctcagcctcaggagtggacgaattctcagctggtggatcggctgcttttgtctctttgccatcttgtggtttagggttttctgggtgtctgcgtcggcaattgaagttgcggcggtaccgacgttgaggtggctgctgaccttgggtctcatctccttgattttctttatcttcatcattgccgtcctctctaggctgtctttggcgtggagggcccctgcggaatcgtggtctatatccccgatacgtattctgcctcactggtctaccttgttctcctgcaccctggttgtcagcaccctccatcacttcaccctgcacaggagggttggaatactgtggtcgacgcccatagggtctccgcatgtagtaaggtgggaaccttcgcctgcggtagggccggcgttgttgggcttggcctgcgggagcactctccgatccctcgttcttttccccactctcactattctggtaattttgctggtaattgcgtggaggaccctacgacgtggatagcgtctataatggttacggtctgctgcatatgtactgccttgaactggaacaccaccaggccctgtaacatttgctgcctccgcacccttttctccttcaacaacatcaaactccacagtctctccatctcctacactgcgaaggtacttcctggggttattcttctttctggcagtctggtgtacaaatacatcttccttggtgtcattcctgttgatgaaaccatatccgttccttacactgaaccattttactgttcccaaaaccttcgttgcgatgaccttcttgtccccgccggcaggcgccgccgatgtgaggccgcccgggccaccgcttcctgcgccgctgcctgcagtgctggggtgggtgtcggcggcgctgagggcgggggcggcgtgggggagcggcgggcggctgctgggtctcggcctcgctgctcatagttgcggtgatggtgactggggccggctgcggcagctgcggcttctcccggggtgtgatggtaactaggccggcggcggaggtggggctgcccagggctctctggggtcagctctccgctcccgctaccgattgaactctccttgtagaggtcttttacatcctcagttaaatttatttctaggtatttttggcgtgactattgtaaataaaattgcattcttgatttctttttcagctagtttgttattggtttatagaaacactacttattttgtgtattaatttttgtgtcctgctactttactgatttcattttttggttctaagtggcatccttgtcttgttccagttctttgagaaaaagcattcaactttttctcacttaatatgatgttagctgtgggtttgtcatatgtggcctttattgtgttgaggtacatttcttctatacctgttttgttgagaatttttatcatgaaagaatgttaaattttatcaaatcatttttctgcatctattgagaggatcctatggtatttttccttcattctgttgatgtgataatcacatttattaatttgcgtatgttgaaccatccttgcaagcatccctgacataaatcctacttgatcatggtg

SEQ ID NO: 133055 - DNA, 1488 bp, Homo sapiens
aaggattcctgtggtaaaacaaacaaacaaacaacaaaaaaaaaaacaagaaacttttttgctgggggaatggcagtgattgctaatgagtatgaagtttcttttgggagtaatgaaaatgttctaaaattagatagtggtgatggctacacaactctgtgaatatactaaaaacaactgaattgtacatattaaaagggttaatttcatggtatacaaattgtagctcaataaagttgttaaagaaagaaacttgtttgctcataaaattctttttttcttcataacacctaaagcgcacttcagaaaatgctgggttagttgatttctaaaggcccttctaagctctaaaagttcatgacaacatatagtttgcattgtttgataaaaaaaaaaaattccaagtttgatctaaaagtgagacatgttccttatactaaattctaggaagcatgtattgcctggttccttactaaaggacattgagtaatataatggacaaaggcttccactgtgaattgtagaaagtatagaaaatgcttttcaatcctaaacagaattaagaacacaatataaaattgtatttcagtgaaggctttgcttgtattcctgctcagtcttccttcccttcttaaccgcatccaagattgggtacttctgtctgctctggtataaggctttgcaggttattgaccccctctattatacaactttgcaaatcttattaccttgattattcctattcctgggggatggaggtgtgaaagtgaaatgacttgctcaatggttttctctttggaggatgagaagggaccctatcctgcagtatcagcatcgtgtgtcatggcacctgataatggctccgtttttatttaagttgctttgtaatagtacaaaagagggaaggatataaccttaagggccaggtttcagtaagttgacatttaaggaattaggtaatagtaaacctagaatccagaagaagaaagtaatgaattttaagttagaaaaagcaaacgcctatctggagcaaagtaataagaagcagattctcttaccaaagaagtatcttggcccacactgtagaaagagctaggattggtgatagaccagatatgacagtttattctggtatgcagctgaaagtttctgtctggcatccataaatttaagcaatctttcattaataatacttttcactgtgtgccacttgtagaagaaaatgggaagaggtcaaggaggttatttttatatattataaatgtggtttttaaaagaacaaaagagatattatgaggtttgtttatccaaaaaatactatatgagtacttattatacgtcaggcactgttctaggtgcagagctgctgctccaaggagcttacattctgagaggtgatagacaataaatagataaatatgtaacaaaatgatttctaggtatgataaggatgccatgaaggaactaaaccaaatggctaacacagag

SEQ ID NO: 133056 - DNA, 1035 bp, Homo sapiens
tcctactctcactagaatagtagggtcttaaataacaaaaacatcaacatggcctagagttgttggagaagaaaggcttactaagaattaagatgatagttaagccttgcaatatgtttggagtcagcaggaagtgggcatcaagcatttcaggcagaggactgcattctaggtaagtgtagattttctttgctaaaagtaatagaagtttagggaagggaaggctagagaaagactttgaaattttagaattggaatagcaggaagccattgtaggaccttgattagaagagggatgtcatgaaaggtctgttaaaaaaagtaatctggcagtcatattggtactacaattgacttaatataattggctgctgcagcagtgcaatatgaggcaagcagtggagaaggatgtatgtaacttgcaaatgattcgggaaaaaaacaaaatatgtatctatccatacatacatacagatagatatggcagtatgacaagatgttagcagtgttgaattgaggtggtgagtatgtgggtaatcctctcactatttggcgcttccttggctgactgtatactttatgcagatatacccacgtgtatatttttaaagggttaaatgtgacaatttcatgaatgtatttataagttaaagttgcagttctcatttaaatgttttttaagtgattgtcattttccaagttgttttgaaaattaaaatttgattaaaaataagattttacattaaaaaacagatttttaaattaattttttaaatttgaatgatctttttccagtatcaactcagatttagtttttttctcctgaagtgtgtaatacacactcaatgcacgtgcacacacacacatctatgtatgtatatgtgtgtgtatatatatatttatacacatacacactgttttagttgttctttagggagacattaattagagggaatcttttttttttttttttaggaaacaagaattgcttttcattaaccaactgaattatagcttttgtgagacatctgtggc

SEQ ID NO: 133057 - DNA, 1049 bp, Homo sapiens
gtgacggagcagaggtcccctgtcctgttcgtggagagtggcaatgccctcaagagaagacatatgctgttacagaagaacatttggttgggaggaggaaagaagttattaccagaagactttaggcttccctctttcatcccattttgtcagaagtatcaaaaagtcttttggaaagactagaaggaatatatgccaaaatgtcaacagatgttgtggcaggacagtggaaatataatttttctttttcttcttgttttccaaatttttgaggttttttaaatgaaaaaaagaattattttaaaaatttaactttgagggatactcccctatagatttgaccttcaccatttaattggaaaaaaaggcttttatagttatatttttagtaagacctctgttagtggagttttaattataacacattttgtgtttctgtttgaaatagacctttgctccaagaaattgtttttcaaaaatccctaggtccaaatcagactcctgtctgcctgattgtttactttttgctgagcctttttctgtttattgggaccatatgttatcttgaattacctttgcttacgaccagcaggattttctgccctcacatgaactttgtgttagaggctagtagtagaaagtgccaacttctagagctcttcaaaagagcacatcagtgtcactcaggagagccttttttcctgactatcctcccagtctaatgagggtagggacatagcagagtcttaggagatggatgtagtttcgtgtggcattgcagaggagttgttataagaaagcgtcggccaggtgtggtggctcatacctgtaatcccagcactttgggaggccagggtgggcggatcacttgaggccaggagttcaagaccagcctagacaatatggcaaaaccccatctctactaaaaatacaattagccgggcatggtggtgcatgcctgtaatcccagctattaatacttgggaggctgaagcacaagaatcacttgaaggtggaggttgtagtgagccaagactgcaccactccac

SEQ ID NO: 133058 - DNA, 1049 bp, Homo sapiens
actgagaaggaaaatattataattgcataatttgaattatgaagaagtagtcgggcaaacccagtttgaggaatattcctcaaaacatcagcgcctgtactctttaaaaatgtcagtgttataaaaacaaagaaaggctaagaaactgttacagattaaaggaaactaaagagatgtgacaacaaaatgcaatttgtgatcctggattggatcctggaatgaaagaaaattgctataaaggacattatcaggataaattggtaaaatttgaatatagactggatattaaatagtagtattataccaatactgtgatcctgaatttggtgattatattgtggttgggtgtgatggtgtccttgttcttaggagatacatactaggatttaggaatgaatgaacataatgtctataacaaatgctaacatagtccttcaaaataatagtatgtaataatagtttgtgtatatatacagagaattaaagcaaatgttgcaaagtgtttaggatgggtgcatcttgatgaagaccatgtaggtattcactgtgctattcttaaaagttgtctgtaggtttgaatttttctggttgaacctgtttatgaaagttccactgaagcactacccattcataaagccctacctttctttcaggcttggtcatgtatgtctagccttagcactcgagaaacaatagtctcaatcatcttttagaggagtcttcaagtaataacctggatcttgttatttttaaaactgagagaactacttaactgggactataacttctcataagcaataataatgtagacgtagaaagattttgcaagatacggtctgattataagacatgacactgattcagctcatctaaatggctaccggagaattcagtgacatgtcaaatcactattgcaaattaagtttgctgcacatttactgccagaagaatagctttttaaagcaaaaatggccccttgatgatatcataaggaagcttttaaagtagttctgctactttgggaaacatgacttacctgacttttcact

SEQ ID NO: 133059 - DNA, 1017 bp, Homo sapiens
attccttcccagaactgttaactaatcagctctgagaaggtgactctcaaatctaaatcattgtttgtaacttctagatatctttgtagacatctctacctggatctctgcatccaggtgccatctgaagcacaaatccaaaatcaaactcataactgcacctcttgtgaatgatactagactggaaacccccaagttatattttactccttgttctttctagttccattgactctccccttgcaaaattacacctgtcctgtctatttctagttcaagtctttattcttacactcgtgggatagaatattataataaccttataactgatgtttcaacacattatatctttctttcctatcctcttcaaaaataatttatcaggggatattcactcccatcagaataaaacccaaactctctagcctgacactcatgatctcccaggattacagcctatttgccagccctggatagagctaatttcttaaaaaaaaaagagtataccttatgtatctctgaattctagaggctatcgcactgtttaaagtttgtatttcaaactggttgcctttctgaaattgcccacctccttgcctgtctcctagttatgcttgtacccagcatccttagtatcctgtaattttctacacacacacacacacacacacacacacacacacacacacacacagttgctaacaaactgtaatctcccaaataggataaatcatatattttatttattccataatttcatagcccacataacacctaacagagtgccttgtacatagtaggaccttagtaaatataaatgctttttggataatttagtatgttctaagaggccactggatacctggaaacagcagcatacttcattatgatataacaagtcacagagtttatgacctatgttgattccatttaaaattctttccaacatgtgaggaacctgaatagcaagcagcaaagatttagaagaaactatactaggcaatgaggctagatgtg

SEQ ID NO: 133060 - DNA, 1207 bp, Homo sapiens
aggcaggggtatagcggaagtattttacaccatacaaatatgtgcagaagattgtgcctgatatgaaaaaacctcctcattggggctactttgttcattttctagaactctgttcttaaatgtgacaatattacagtttttgtagtgtaaggctatgtaattaaggatacttaagtgcatatatctcatgcaccatttttatatacaaacattgggattcctattgctgtgttttcttggagaaggtagaataactctcttaactacttctaggttatagtttttattttttttcttttctcaaagcctgtatctcttatttttaaacttgacagtcttatttatcttttgttcctttgtactgtttgctaagttgtatctattcctctgaagacaaatttccaaattatagctctcctccgttcttattgaaaggagccctgctacagagaagtaaaagatctttattttcttatctctctatctttgaaataaccagttttagtttctcttgaacaaagtggctaactgtgataattccttcttttctcctacatgatgtctgacactgtccatcttccatagcctgtcctccgttattttagtgtgcttccttctcttgtctggatttctgcattgccctaggaagtctgccagtatgtgttgatgaaggacaagacaggaaaggtaagagagacaaactgtcctatgatagaaatactaagaatagtttacttttcccagtctatcttccctaatttggcctagaattaagcaaccattttccaaaaatctgtatggcaaaaggatccttttgtttttatattaaaagttgatcccacaaattcttcaatataagactcaatttgatttcttacatgttatttagaaacgaaaatagagataagagtactttaatgcaggaagggttctgcattataaacctcacataacagtcactgtcatgattgttgaagtctagtctagacataaaagctatttgttataaagtgaattgggtaaatttggtgtaatatagcctattttaagtggactggttgtttatcaacatcagaataatttatgaaccaggcttttagtatcttttccttaatactggaatgatccctgggatgaacttgtagatgtatgagccatttctataggcttgcaattttaagggtagcatttaccctggagagtagtt

SEQ ID NO: 133061 - DNA, 1055 bp, Homo sapiens
tcaagggaagcaactgtgccgttttcctttttcttcaggtattgggagactttttctgtaaggggccagacagcaaatattttaggcttggagatcattcactctctgtttattcaactttgccatagaagtgtgcttagcgtgaggtagccatataaaatatctaaataagccggcatgcacccatagtcgcaggtacttgggaggcagcagagtggaggccaacctgggcaacatagcaaaaccctgtgtcttaaaaaaaattttttaatttaaaaaagtaggtaaatgaaaaaaataattaaaattttaaaagtatgtaactgaatgggcatgtctgtcttccaataaaaactttatttccaaaaacaggtggcaggcaagatttggcttgtgtgccatagtttgccagcccctgttgtgagtaaaagctattgtccataagtatttcccctttctaggccttggcctctgacttctattaaataaggaagttggactagatgatttctcacatttcgcaggttttatctcctttagtagtacctctccctgaagctaagtgatccacaggctgaaccacagtgacatttatttgtaaagtcagttttttaaacatccaggttgaacaaatgtataagtctctagagcagagtttatcagtcttggcaccactggcattttggtctggataatcttttgcgggagggagactgtcctgtgcagtgtaggatgcttagcagtgtgcctggcctctactcaccagatgccagtagcactccccacccctcagttgtgataaccaaaaatgtctccaggcgctgccaaatgtaccatgggaagcaaaatcacccctagttgaaaaccacttctgtggaaagttcaaaaataactagaaaaatatcaaatactagaaaatcaggccatgcaacccaagatagccaccaagttatcaaacatatttattcaggtacaaggtcaaaaaaagccaaaccaaagggaacaaagatcttattagaaggaaaagagcaatgagaattgcattcatccagtca

SEQ ID NO: 133062 - DNA, 1607 bp, Homo sapiens
tttattttattttattttattatttgtttgtttgtttatttgtttatttatttatttattttgagacagagtttcgctcttgtttcccaggctggagtgtagtggcatgatctcggctcactgcaacctccgcctcccaggttcaagtgattctcttgcctcagcctcctgagtagctaggattacaggcatgcaccaccacgcccggctaattttgtattttcagtagagacagggtttctccatgtttttcaggctggtctcgaactcccgacctcaggtgatcctcccacctcggcctcccaaagtgctgggattacaggtgtgagccacctcgcccagctggtagctgactactttttaatattgatttagatcattttaaaagtgttcctgagtccagtgaatccatttaaatagagagttatctataatgcataactgaaaagtcacactaaaagaaggaaacatgaatgaagagagatataaacaagatcattgttaatgaacactaagaatatttactttttcactcctgttatattgcttgatggagtctctagcagaaagaattcatactgggtgaattgaggaacccttatctatgaggcccagggttttctgttttattttgctttaaattgttaaatcaagtgtggcatattcctacaatggaatattatttagcagagaaaatgaatgaatacagcttcacacagctacatagagggatctttgaagctaggttttaaatgccaatagctgatcctttaacaaatccccatcacctagccagcttgcaatatggctgcaattaaaagccaaaatcgtctcgtttcaacaataagggtgtgcttgatttccttctgcctgtaatttatgcccatattatttcttttaggaagtaattatcctcccattgtgattgattattattcatagctgacaagccctaaatatccaaatggctttgtataagtttttcatttttgtcttgttttgggttttattttctttacattgactttaatacagggtggtgttttctgaacaataatctaagcactctagagacactaattatagtctcaaactcgcttttgactttttctattacctggggcgggtctcttttaccctgctgaggaaacagtttcttcatctgtaaaatgatagattcccaaactctggtcccaggatggctataaaaaaactgtatttcaagtcttgtttaaaatttagatttctgtgcctcacccctagattctgaatctgtagtctagggtaaggtctaggaaactcagatgattccagtgtacagccatgtttgagaacaagtagagataatgtctaaaatcctttcaaatctaaaatgcagtggttacatgaaatatatatttccctagatgtcatttattagattattttctggaaagtttttatatcctgcaaggaataattaagattaatacattgtagcccctcccacacacttacagctttacataaacttggtttgctataactggtcagcttatggctccaagtagtcatcttgatcctgatatatgttggaagatggtttccctttttaccagaatatcatt

SEQ ID NO: 133063 - DNA, 1012 bp, Homo sapiens
taatgctagtgtctacactgaatcttcatacaatcgaagctgatatcctttcatgggttgtatgtgctttcttaagaaaaccagatttttctgatgcattagtatgtcaggattttacttgttgcttctctctagaaaataattgcctcttgattctttctggccttttttctctttaggccaacagaacttttcaggagttgtaatgcacagtcagatcaaggagccatgaatgacatgaagttgtgggagaaaggaagcataaagatgccatttatcaatatacctgttcttgatattaaaaagtgccagccagagatgtggaaagcaatagcttgttcactgcagattaaaccttgtcatagtaaatctcggggaagtattatttgcaagtaagtttctttcatcctaacgattctccagctttagttcagaccctccgtgatctctagccagagcctctccatagaattttctctcttaccacttcctttgcctatcacccccgtatgtcaaatgctttcccactttttcctcctctagttgaaatactgctcccctcatcaccacctactggctgtccttgtctcctctgaaataccagacattcctgtagtcttcccagatttctccagctgaaagtaatttatccttactacagattcctatagacctttatttgtacttctcttatggaacttagttcatgaaacatttattaaatacctctgatgcacaattctatttttatatgttaatttatggacttgtcttatattctgttagactttgctcttcttcttctttttttgttttgttttgtgttttttttttgagatggagtctcactctgtcgccaggctggagtgcagtggcatgacctcagctcactgcaacctccacctcccaggttcaagcaattctcctgcctcagcctcccgagtagctgggactacacgcccagctaatgtttgtattcttagtagagatggggttttaccatgttggccag

SEQ ID NO: 133064 - DNA, 1242 bp, Homo sapiens
gaaagagttgcactctgtctcccaagctggagtgcagtgatgtgatctcggcccactgcaacatctgcctcccgggttcaagcaattctcctgcctcagcctcctgagtagctaggattacaggcacctgccaccatgcccagctaatttttatattttagtagaaacagggtttcaccatgttggccaggctggtctcaaactcctggcctccggtgatccgcccgcctcagcctcccaaagtgctgggattacaggcgtaagccactgtgcccagctcatacatagtgtatttattgtctgtttctctactagatgtaaactctatgttagagacttgtctattttgttcatcactgtatctccagcacctagaaccttgcctggaatattgtagatcccaataaatttaaaaaaagaatgaatgtatgtttatgtgaaattcatcatttcacaaatgaaagaatctcggtgttttaatagcttggtagaatcaggccttactttacactcatgagctcttcatttattccagccataattaattcagataatttacagttttctcttactcttttaggttggttaaactaatctgttttggttttttcagggccaagtactttaggtaacattgtagaagaagtgactcatccctgtaacccaaatccttgccctgccaatgagctctgtgaagtaaaccgaaaaggatgtccatctggagatccctgtcttccatacttttgtgttcaaggtaagaggtaggtgggtgtgagaagaggatggataggtgctgctagtgtttctttataggagctatctttctttttttcaatcctgctccttctgtaatataggggttatcttcggagtgagattatgagggacttcatgttctatattatgtttttctataatgttttgagattttctcattaaacatgtattattgatgtaagcaggaaaagacagacacttgtaatcctccattgttatttaaattgtaaactaataataacagtctaaaacttgactctcgtgagttgcagggttctagactatgaaagaaaagaagctcagaccagctttttgtactttctcttctatgttgtaatgtttgaaaaaaaatactctacattgttcatgttttttctttcctttcctttagtatatagagaaatagcatattcaatagaatgtatagctatctccataaagattaatgttatgttgaaatatata

SEQ ID NO: 133065 - DNA, 1139 bp, Homo sapiens
tgtagtcccagctacttggaaggctgaggcagaagaatcacttgaacccgagaggcagaagttgcactgagccaagatcgtgccactacactccagcctgggcaacagagcaagactccgtctcaaaaaaaaaaaaaaaaaaatactgttagtttccctattctattttttaaaatatctgtgattttaaaatattttttactagcccctacaaataaaaagttacatatcttacagcactgttatactgaatgataggtcactttggggtacagatctgtaatcaccaccatcctccagaatgtggaattttaatttgagaggtatgtttttggccaatgaaccaaagcaattccttaatttggtgaaagttctattacataatctttaatagtgatttagtacctataagacttttatcaagtgtatatctaatgttataaaacaatgtcatagaacagtaccatctctctcagctaatttttgcttgtacaggttgcaaactgggagaagcttctgatttcattgtccgtcaagggacactaatccaggtgccatcatctgcaggggaagttggttgttataaaatctgttcatgtggacaaagtggactcttagaaaactgtatggaaatgcactgtatagacctccagaagtcttgtattgttggaggaaaaagaaaaagtgagtcttaagctctgattttgtttttaatatgagattagttatttttactttgtaggaagaatactggatagattctgaccacagagtaaggtctgcatatcagatactccagggcagtatttttcaaactatacagagcactaggacttctaaggaagtctttagaagtcccctcaataaggggctaatggctaataataattaatatttattgaattctaatcatgtgctaaacacaaagctaagtcttgccttacattatctcattaaatcctccaagttacactttgatataggtaataataatacctgtattacccttactgcatagatgaggaagctgatgcttaaagagttcacccagctagtaaatgaccaaagctggattctgctccaggtctagttgactccaaatcccttacgcttcacaggccaaggacacaggtaatctt

SEQ ID NO: 133066 - DNA, 1042 bp, Homo sapiens
tcgctgtgtgggcctccaagaccatcagtttgagtttggatcatgcatgtcaaaggatccatgtaatcctaatccctgccaaaaaaaccaaaggtaagtcaaatggcttcttattttattcaactgaagactagtacttacaaagcatctaccatataccagacagtgaaaacagaaaggtaaattaagaaatcgctgctgccctgaagagtttggagtctggagggaaagagagccatgtaaagctgcttgataaggtgctgcgattgggagcccagaagtagggcagttaatgcagcctggggaaggccctgggggagcctctagagattgtgatacctagctgaatctagaaagatgagtaagagattgcaggcaaggtttgcagtagagaaaaagaagtggtagtgaaggcagactaacaagagtcatggctgctggaaatgttatctccgtaacattgttatctccataacatggtgtctgttgggcactaaagcagttctgtaagactgaaacagaaaaggtaacataaggagaggtagcagaagagacaagagaaaagggtgtattcttattagtagctgtcacctgatagtcaggggaaattttcttctagttatatgcaactgttttagaaattggacatgagaaatctctggaaatgcaacttcactactatttgaaattacttgttttgagctcctttctctgctgtttcctcacttgagctcagaagacagttgccccagccttaatgatggatttctgtatggggcagccaccacggcaggcatcttgctgacccttaggttacagccttctggaagcagagtgtttattggattgcctgaatgacctgaacaatacacattccaatgccacagtgctttcctaagcaattgctgcttctccatcctgaaaaccctggtgtaatatggagggagggggagactctctcatgtgttaaaataaatggcaaagaattagtcatccatctgccaaattttatacaatgaaactaatccaagaaagtttctat

SEQ ID NO: 133067 - DNA, 1090 bp, Homo sapiens
tagagatggggtttctccatgttggtcaggctggtctcgactcccgacctcaggtgatccacccgcctcggccttccaaagtgctagcattacaggcgtgaggcaccgtgcccagctgaggccttttcttaaggtagactcatattagccaagctgaaagttaagcccgtggaagtgtttcatttgttactgaatgcaagggcctccagcctcaggctccagcctatctcttggcctcatatcatggcccttctgctataggtctgtctgtgcctgcttggctcctgccctctggatcacctgccatttccccagcaccacattccttgagcatcacacctgtgttcatggctgctctctcagcctggcaagcccatgctgccccctttgcccccccagcctccagctagaacactgcctcctccccatgctttcttcaggctccccagacgagaatgactcatccccgcaagctttgtgcacatcttttctactttttagcctactgtatatacaggcttgactctcccactctacataagctctttggagacaggactgtcctgattcatctcttgctctctcttcagcctcctatccctcatctagtgctttgctagccccaccacagtccctccctacattggctcatggtgctgcattcgtctttttcaggtgcatacccaaaccacaggtctgcctgacgacttttgataaatttggatgtagccagtatgagtgtgtaccaagacagctcgcgtgtgaccaggtccaagatcctgtttgtgacacagaccacatggagcacaacaatctctgcactttataccaaagaggaaaaagcctctcttacaaaggtccctgccaggtacagtgctttggctgacaaaacaaagtacactacggataaaattggtttatgatattttacagatgaatcaacagtaagaccagccgagggtcttctgtgaatcctgtcaaatctatagcacccagtcctccactaaaaaggaagactggctccttctcctaactctggaagctatcttgctagtgtgtgtacctttgcacatctggtgtacaagcaaga

SEQ ID NO: 133068 - DNA, 1043 bp, Homo sapiens
tgttggctccagagtctgtctaccccactgctcccccaactcctccctctccttatcccatacccagcatgaaatgataagacctctgcatttgcatgaagattgatctggtcatcttaaagaggcgcttctgggatactaacagaagtctgagcagagcagagagaggtagcaggaaagaagatttttatctcttatcagttcacatggaataagcacccagatcccagagaggctgagaaaagtaatctttcagctcatctggagacacccatattgctgcccacgccaccaccacccccagcatttagcccacctcaggaacttaagaggtcctcataatttatacctgtgtcttttttccttcctgaaaatagggaggcatgctgtgtactcttggttgggaaaggtacaacatagacatttccaggctaaatgtgatttgtttgccctcagcccttttgcagagcaaccgagcccgtatgtgggcacaatggtgagacctacagcagtgtgtgtgctgcctactcggatcgcgtggcagtcgattactatggggactgccaggccgtcggagtcctctcagagcacagctccgtcgccgagtgtgcttctgtcaagtgtccttcgctcttggcagctggatgcaaacccatcatcccaccgggtaggctggcagtatcggggtggacaggggaggactgagaagatttgcttatccacctccagagagtgagtcattgagaagagagctcatttacgtttttcagaaagtcttgaagagattcttatgctgatcatactcactactttgggttgaccttaaaaaactagggcttgccttcgatatcatctggtgtcctgctattttaaaacaatacagcagccttttctcaagctaaatcttacaccagacaccaatatataaacagataaagcagtattcaattatgaaaattagggttattaaatgcataatgtttacttattacaaagttaacaaataacgaattactaattaatgaataattaaagtagttttg

SEQ ID NO: 133069 - DNA, 1033 bp, Homo sapiens
gccatatttgtaaaatgacaatcatgtgtgttaacccagtgctttccattcgtgaaaacacatttgctttttgtgatatgcacaatgtagataagtgttctgtctgactttcttttttgatatagaagtataaagaattgtggtttatatatttaaaagtgtcaagctgagtattaaaatgtatgcatgttgtctaagaaattgaatactttgaatgtgtttcacagtttgaaataagctatttgatgtaatacttcttgtgtgtatgcacatgaacttagattttacatgaagtattttttcagtattatatgtaccctctgaaatacatagggatatgcgtattataccaaaatgttgctgaaaaatgggcacttaaagctttcagaatatgtcagtgctgatgtagcatgcttgttgcaattgccttttttctgtataaatgtctttaatgcaatatactggaaagcttttctattttaataaaaataatttttatatgatcatgcatgcttctaagcaatgttgacattcaaaaaggaaaccactgatcacccttaggtgagctgtgtcctttgctcggggataagaagtcatggaaattagccgggtatggtggcacatgtctgtggtcccatctacttgggaggctgaggctggagaatcgcttgaacctgggaggtggaggttacagtgagctgagatcacaccactgtaccccaacctgtctcatacctgagacagagtgagaccctgtctcaaaaaaaaaaaaaagaagtcatggagtgctattatcccaagccaagggccctgggagaacaggccagctaggacacagttggtcagaccagagggcaggcagtgacagagagtcaaatacaaagaccccagctttcagccttaaggacagagagagcttcaggccttccaagactgcatactaggcagttctccccactgtgctggtcctgatgttccagttccagggtacacctggggcagggagaccatgggaatatggagatggagggct

SEQ ID NO: 133070 - DNA, 1036 bp, Homo sapiens
gcgcggagccggccatgggcaagtcaggtgagcccgcgggctcgcccgctgcggaatggttcggaaccccgcgctcccggacctcgccgtctccctcgtccgccgcaagccaggtcctggggagtgcgggagcccggggtgcgggtggagggcgcgcgggcggagcgccccggcgcggtttccggggaacccggggggaaggcgagcccgagggaggcccccgccggagagccggggatcgcgccaagttgggcttcccgaccctgaggggctgcgcgccgcggcccgccaaggcgtggcttctgctttgtttcaggaggccagacttagagttggaaaagtcaccaaagtgtgacaacagctctcgctgcgaagcagtttgccccgctcggctgtcccgaggacagccctgagcatccccctcatccatttgttgttccttctctcctgagcgcccgcgccgtgccgggctccccctgtgctaggctcggtctggctccctttctcctggggcaccccatcctctctactgtggctgtcgggatgaactttctgcagcgcagctctcctcctgtcgctccctaacaccttcctcaccattgtcctcagagtgaaaggacacactccagtcctgccttcgggcccctgggagtgggtccctagcccttacctccgccctacactagagctgtccagaagctggtgcacaggtcccttcccctaggtttccttgccgggccttcaccaccccaactctcagcctgaaaatcccatccctctaggctcagctcctgggctggagcccatctgtgattccccccgggagggagcgcccaacctggtgttttcctcgctgcagcccttcctgtagtgggccggggacaagagttcagccatagacctgtttcccaccgggtcctcacccctggctgccaggggccgtgtttatctcagcattgcttctgcctcacaggaggctcttagagaacagctgttgaacaggattcagaagtcctgcttcatccggattgtccac

SEQ ID NO: 133071 - DNA, 1088 bp, Homo sapiens
taataatcccgggagggggcgcaagagcaggattcttgtttctattttacgaatgaggaaactgaggttcagaaagcctaagtggcatgcctcttcagtaatcggccaatcgtcgctgccctaacttcacctcacctcccagtgcagcactagagtcccctcaggggtggccgtccctggtcagtccagctccagcagacggggtgggtaggacgctccctatcaggcagcacttccgcctcccggggcccgcgcagctcacctccctcacctcccgccctaccccagtcacgagttgttttagggggaccgcccctccacttgctgattgggtagctcctgaaccattgttgtcctctgattggttgttcccttttcggctctgcaacaccgcctagaccgaccggatacacgggtagggcttccgctttacccgtctccctcctggcgcttgtcctcctctcccagtcggcaccacagcggtggctgccgggcgtggtgtcggtgggtcggttggtttttgtctcaccgttggtgtccgtgccgttcagttgcccgccatggctgagctggatccgttcggcgcccctgccggcgcccctggcggtcccgcgctggggaacggagtggccggcgccggcgaagaagacccggctgcggccttcttggcgcagcaagagagcgagattgcgggcatcgagaacgacgaggccttcgccatcctggacggcggcgcccccgggccccagccgcacggcgagccgccggggggtccgggtgagagtgcgggcgcgtttggggcgagaggacttgtctggaaactcggtccacagtgggtccgagagcttctgtgtgactcgtgctccttgctgaattaggaggttagggagcagtgcaaacaggaaacgagaccctggcccggtctttcagaaacctaggctcgagaagcctgttcggttctcagcatgtttgagtgcttctgggcgcgggcggagcgagaaagcaagtgtagggtggcaggctccggagccggaagaagcccgttcaattcagcaacttttcattaagcatttgctgtgcctttagtc

SEQ ID NO: 133072 - DNA, 1123 bp, Homo sapiens
tgagtttttgactgcaccatgttgcttcctaaacaaatcagtcccccaataagaacttagtgggaacatgtaatatgcccgaatatgcaactttatagcgggtaggttggactaaactaggctgtgattgtgagatgaagttggccttaagtgattaggggatattttcattgggtggtctctaacatttgtctgagaattttaaaattgacttcttagacccttagtttaaccttcctcatttaatagaagagaagcaatcctagagagaaacgacttgcttaaaaaagcacgagttaatagctgagccccaagtctacccactcttagaatataccacattctgttgcagtgtttagttgttttagcaggggtgtagtgcgataacagacaggcagctgtggctgtcccaggtggaacagatttgggagaagcagaacccaagatctgtagttggaagattgtcctgattcaaggacagtgttacccttactgttttatctccactgcctagcagtgtgtctgacatgtagtagatgctcacgtttgacaaagaaatgggcaaaaatgtcagatccaagggtcctatgtagaactgacagatcttggtgacgggcagttagggaaggtaaaagggagagaatagagttggatgctcggtcctttgtgcatcaagccttcggcaaagggaaggaaagaaatggttgctgacttagttcctaggagggactttcttagtgaactaagcatttggtgacttaaagccagattcctgacagtgtaattgaagttggtaatatgcagtggtcagcatttcctttggagtttagagaactgattggacactttttctctcttagttttctttttccttctttttttttttttttaaagatatgctctagtggttaagattctatgctatcctaaactgcttgagtgtgagtttagctttgtgatctcagacaatgtatataactaccaccactgcccggcctcagttttctcctttgtaaaagttgcataatataatttataatgctatgtggcatctttaggattacattaaagagtgtctataaagtgcttacagttatattaagtatctagtgaattccagcta

SEQ ID NO: 133073 - DNA, 1169 bp, Homo sapiens
ctcaaagatgaagctgcaggtctctgctcactatgggtgattccaggccacacttttttttttccctcatgcagaattttcatagagaaacactgttctctttctgctagtcttccatttgttaccactgtaaaatagaaaacagaaaataaaatcaaaagcttttggacttgggagcttaaggacagatgtgtacacattttggtgaaatttgtatataagcacatcttggttttatttgttgtatatagcacctaccacagggatagcatttagtagctcaaggttcatacagcatatgatgctgtattctactgtacaaccctttggcccagtgtttgaccagtccttattgatagaccaaaatcttatgtcttgcagatgctgttgatggagtaatgaatggtgaatactaccaggtacagagtactctgattctgttcattgatagtgattgagaatcttcctttcctgtgattttaattgactgacctagaaagaaaccccagtcctttgactttcctgaatgtattactggctggtgtgttatctaccaaagtggaaagatttaaagagaggtagcattgataaaaagagaactgtttaaaaatgttatttacctgcccctagtgttatcacctttattctaaagaaatcaccattcaaatgatactgtgttgagtgcagtaagttaatactaatactttaaataattctccttccatctttgtttatagtctgattaggttaacctggtaatattaatattccttagttcagtgagtggcatatggaataattttgtaaagattaacatttatttgagtctttttttttttttttttttttgagacagtctcactgtcgcccaggctagagtgcagtggcacgatcttgtctcattgcaacctccaccttctgggttcaagcgattcatccacttcagcctcctgagtagctggaattacaggcgcatgccaccacgcccggctaattttttgtatttttagtagagatggggtttcgccatgttggccaggcaggtcttgaactcctgggctcaagtgaccatcccgccttggcctcccaaagtgctgggattacaggcgtgagccaccgcaccccgccagagccaccgcaaccttggctcactgcagaacccgtttcta

SEQ ID NO: 133074 - DNA, 1069 bp, Homo sapiens
tcaggttaacttcaagtgtcagctgcctcagtagctatgacatgtatttcttttttttttttttcttttttgagacagagtctcactttgttgcctaggctggagtgcagtggtgcgatctcagctcactgcaacctctgcctcccagattcaagcgattctcctgcctcagcctccccagtaatccccagtagctgggattataggcatgcaccaccacatccagctaattttttgtatttttagtagagacgggattttaccatgttggccaggctggtctcgaactcctaacctcagatgatccacctgcctcggcctcccaaagtgttgggattacaggcgtgagccaccacaagcagccggcatgtatttctttatctctcactatctactgatgtatgtctcttcagcttagtgtcttagagaaaaccatatttagtcctcagaaacttcatgtttcatgtttgagaatccaatctagcaaacctgctaggtatgcattttcttgctgtcatttctagaacctttaggttaactgttagcaatgatcccatacctctaccccctgcacttctctccagtggagtttcttttgtagctctgccctggctctgccacaaacacactgcagaccaagtaggagtagatgctttgtggtcctctctagtgctaatattctgtgttctatcattctctggttcctgaatcatctctacctttggtaattgtcctaatagcaccctgcctcacagaagtgcttctaccatatttagttatgagagtgccaccttgtgttccacaaaaccattgtcaaacctggaatatggactagtttgggagaagaggtaaaagattaagatgaataccctactatgaactaatattggcagcattggtaaagaatcatctataattgtttctcccccaattggtgcccagaaggcttttttcctattaataatagaagtcagtatttccacatacacccttctcttttgctctgcccaaaacaagacaaaacaaaactaatgacccactaagatgtcagtggactgggataagacca

SEQ ID NO: 133075 - DNA, 1042 bp, Homo sapiens
ctcccccaacaggcacacagacatggacctgcacccaccacaagttcagcaagaccaaaataaactgatgaacttcagtttgcactttgcctcaattgtattgtctttctcttctctcccttcaaagatgccaattctcggaagcaagaagcagagtggaaagaaaaggcaataaaggagctagaagaatggtatgcaagacaggacgagcagctacagaaaacaaaagcaaacaacaggtcagtccgtggtggttgtagcacactttgttttccaaaattgaatcaaatccattctcagcatccagtctcggtttttggcttctgcctcctttagtgtgaaatgtctgcagtttttaaagaaagtgcttgaaacaggttgcaagtctctcgggtcttgtgagcataattcaccctattgtttagccatcccaattgtagtgagcttagctctctgagagtttggttaatatgcataacctgtaatggtgtgattcagccaagggaaaagttactttccatggaaccctgaaacgaaagctgggtgtcatgaatacacccagatctagttactttggatatgattatagacttggtcatgttgagtctcctcaatatagccctgccccctgaaagccacttcatgaaggggtccgttggcaggaatatgtgctttgtaattaggcagccaaggatgttccaacatgattattttagaattgagggttctgtgggtacttatttgtgccttaaaaagtcttgaattgacttcttaaaaatgttctgtttgaaatagattttatttagttactgatggttaaggagttgtgaggagaaaaacgctttcattctcatatcactactcaccagcagctgggctttaatgccctacacttagagcccttcttggaagcagcaaagagaggatatgtggtgttgcttccctcagggcaggcaggttcagagcccaactttcactgaatagtcaatccattcacttcagtgtataaacgggccagaccgagcctggggatatttttaat

SEQ ID NO: 133076 - DNA, 1043 bp, Homo sapiens
ataacttaacacaagttttcaaacttagataatgaatatgttggtaacagcctttctgttgcagaaatttttttcaaggaagttttgctgaactgtcaagaaagggatattctctgtatacagaatccgttgttctcagagggagtaatgacacctgttttttttttttttttttttttgagatggagtcttgctctgttgcccaggctggagtgcggtggtgcgatctcggctcactgcaagctccacctcctggattcacgccattctcctgcctcagcctcccgagtagctgggactacaggtgcccgccaccatgcccagctaatttttttctgtttttagtagaaacaaggtttcactgtgttagccaggatggtctcgatctcctgacctcgtgatctgccttccttggcctcccaaagtgctgggattacaggcgtgagccaccgcgcctggccatgacacctgtttttaggagctcagtcttaaaagtttagtccctccaggcattgaatttgggccttggtacctttctgtacttggaactgtagaatgctgggtaagctggtctcacagatgaacctcttaagttccagagagaaggaacttccccactgctcactgagaatgtagagctgcttaggaagcaggtcacttgccttgtgggaaccttgcagcacagggctgactcttgagagcataacgctagtggcacactagccattgtcaccagggctctaggacagaagagatggtttttacagtttattccagtgattcttcactggttggaggtgggatccatttgagagtcactttgggggacttcttccaagggtctacaccctcccctggagatttttatattgctgactactccccctctccatccatgtttgactctaaactttagagttcaaaggaataggtcccatttagatgtataaagtaattcatccttgttatctgtctatgggtaaagagtgaatatttttagaaaagaaaatgggggccggacaccgtgactcaacatctgtaat

SEQ ID NO: 133077 - DNA, 1035 bp, Homo sapiens
ggattgaatcaacataatgtatgtgaaagggcttagtccatgattgggtgcttaataaatgcccgtgttgctggggtgagccaaagggatgaagttggcagtgcttgctctgtcgtggagcagtccccacgtgggaaggccagcgggaaaccaggcctgctgaagtctccagcgctggaagcctcacgggggttaggaaggagccttgggagcagctcctcagagcacagttgtacctcaattgtggattttagatgtttctgcttctcaatgttctctcttttttcctgcctgcttgcctgccttttggacctcttgctgtctagggtggcagatgaagctttctacaaacaacccttcgctgacgtgattggttatgtgtatgttgcaaaactaattcctttttctacatctgattctttctacttttgtttagagttaatgctccttttatgtcacaagttgctttgctttttaaattatttcaaattggcactttgggggctgcctaagaattgataagcggggtatgatctgttgatgaatcttccagatttgtgactccctgcatcctctgatggccatttttcatatttggggttttggagggaagaaagctaactcgctttcaaaatgtgtcatttgcgatcttatctgggaacggtttgaggctcgggggaactctgctctcttgctcttggctgccatcactgctgccatgccctgttgcctgcctgcctcaggtgggaaggaggtttccccacctgggagcaggtggcagtcccaggaggttaggagccagtgagcagcagcaccttgcattgccaaaatcagagctgtggggcagcattttccatacttggttcattcaaacaatgtggggtcgtttgcctctccctcaggcagaagagtccagagcagagggggttgtctccagtgggtgtctataattgttcctctgtggtcttgcatgtcagaaattgctatttagtggtcagcttctgatgtcctgtctcctagcacagggaagccccc

SEQ ID NO: 133078 - DNA, 1509 bp, Homo sapiens
catcctgccaaaaagcaactcacgttggctctcctgccagtgtgccctgagtggccccaaggcacctggctggagggaaaatggcaaacttttggctgaactggagaatgtcctaacaaacccccttccagaatggctttagtctctagtgcttgctagcatgggagctttgtcttgaattccttttgatctgccccgtttctctccagccttaggaataaatctagaggctattgtgcaatgatctgtgggctttttagaagtctctaaatttccttgaaattcagtacagcccagcataaactactcaagttcttgatcagcctgctgctttgttcttattaataaaagcagtgtgtagctggctaaggacttgttttattaatgctccacaggagcagagacagacagagagacatagtgagccttgaaccaaacacctgtattccaacattttacacagcggtctgggcaccctgtgcctaggagagccagctacgtgtctacctgagtctgacctgggccaggggctgttatcttgggaaagccagaatgtcattaagaaagggacaaataggcagttgcttgtgtagcaaggcagccaccaggttgctcaaagggggttctgcataaaccaacatattttgttgttgcttccagggcagcagaagaagcctttgtaaatgacattgacgagtcgtccccaggcactgagtgggaacgggtggcccggctgtgtgactttaaccccaagtctagcaagcaggccaaagatgtctcccgcatgcgctcagtcctcatctccctcaagcaggccccgctggtgcactgaagagccaccctgtggaaacactacatctgcaatatcttaatcctactcagtgaagctcttcacagtcattggattaattatgttgagttcttttggaccaaacctttttgtctttagagttgttcattgtttgtgattgcatgtttccttccttcaactgtgttctccctggcattcagagaggagggagaggaggaagaggaaggggagggaagcttcccaagagtagcctcaacctgtgcttctgtgcattattctgagaataaatttctgtttcaaactgtattatgtgaagcttctttattgacctcaagatgtgttgtagtttggagtgaggttggaaggaatttccaggaggaatttccttgaaatttctagggctgaggaggcacagccactgggcacacagccctgccttgaactaagatagcaccgggatctagagtgggatcctgtggacattttcatttgagaagggagtttagtggctgaaggttaaccccctcattatctacctaagacacagctgtgaatcctctcaccaacctagtcgttttctcccagatgggctcttgcttgccagtgtccctcagtttagggtcttggatagtatatttcggcaggagtctgtggggcacgtagactctagtaagaccttgactcctttggatccggcc

SEQ ID NO: 133079 - DNA, 1056 bp, Homo sapiens
cttagaactaccatactctaaagtactgactgaagggattctacattaggcccagaaaataaaagactagcattcatatattcatgaaacattcaaccacattctctcttaaacacagccatgaaagaccataattaaaaaccacttaggctgggcgcggtggctcacgcctgtaatcccagcactttgggaggccgaggtgggcggatcacgaggtcaggagattgagaccatcctggctaacaaagtgaaaccccgtctctactaaaaaatacaaaaaattagccgggcttggtggctgacgcctgtagtcccagctacttgggagcctgaggcaggagaatggcgtgaacctgggaggcggagcttgcagtgagccgagatcacgctactgcaccccagcctgggcgacagagcgagactccatctcaaaaaaaaaaaaagaaagaaccacttagtgctaattgatattacaaagacaataaaatgtaagtagagatctaaaatatttggtaatcactgtgtgctatttatcgactatagattttaggcttcaactggttattaacctcattcactcacttgttcacaaaatatatgctcagtactgatatatgcataccttataacaactcacgtatgtataaagcctagtcagttgaagtatgagcaaaggtaaatacctgtttctcttccaatctgacgtgttcccaggttgatcacaggtgttccaaaagctccaacttctcgaaccccacagctgctgttcccaatcatacagccagcatgggcaaccaactgtataaactggtcaaatgggacgtgtttaactgcacgaaagttgggatgatgctcaatgcccttcttccgcatcactcgaaccatctctttgctccctatgaaaatgaaaagaaccaattggtaaatggtttgtgagataaagaaaccattttcattggcaagtatagcccacgtaaagaaatctccctaaaaaaacctcacatcagttattagggaaatagtaattttaactactggctttttcatgaatgatgg

SEQ ID NO: 133080 - DNA, 1046 bp, Homo sapiens
ggctcgcgctctgcctgcttcgtggcgcttggttcgtccctcgcccgaggagcgcggtggcggcgtgggagggagcctctgacggcgtctggtgagagccgcgcggcggcgtgggactccgggagagcatcctgcccacccccagggccgcctcccccggcctcctgccccaggcctcccctccccggccgctttccaccccaccgcgccccgaggcccacactggacccggctctcgcccaatgtcctgcaggcctcaccatagggcacctctttggcccaattcagggctccgccgtgtggctcggggtgggccctgatgagcaggggaggggatgtagagggaggcccaggttgacttgtcccctggaacagtgctgtccaatcaggggggatgctgactgtcccgttaggagcggggcggggcgagagagggtggagaactgcctggcaggcgagctgtcctggcgtgaaaaggctgggctaaaaggtcccctccctgctctgagtctacattctgagtctgggcttccttgtatatttgagaaacgttaattccccgccctcaccccaatttttttttttttttttttttttttttttttttttgagactgagtctcgctctgtcgcccaggctggagtgcagtggcgcgatctcggctcactgcaagctccgcctcccaggttcacgccattctcctgcctcagcctcccgagtagctgggactacaggcgcccaccaccacgcccggctaattttttgtatttttagtagagacggggtttcaccatgttagccaggatggtctcgatctcctgacctcgtgatccgcccacctcggcctcccaaagtgctgggattacaggcgtgagccaccgcgcccggcccctccccccagttttacgcttgtaaaattgttagaacacaagaacgtattttttactactctggtaggaggggtggggtacagtttcgcagtataggtaactcgttaacccaactgtaggagcgccgcagttgaagccaaaccgaattatagcgtc

SEQ ID NO: 133081 - DNA, 1105 bp, Homo sapiens
cagcagggtctgttttggtcaaatcttgaatttcgttgttgcactctagtgactgatctttgggaatgtcttgtctttgcatggggctcatagagatgtgtgcagacttgcttattgtggttagtgtgtatcaggaacacacacacaggtgttctgaccagctcaggcttgccacagtgagcaactctgtggctagcaaaagagaagtttatttgtgcccagccattggtcaccttgggtgatgcaccagatagcaggcagatgttggttcattggccttcgtcctctttcctcctaaaataatattggctttaccatcttaactcagctgtgggttttttgtgggttcttgtttgttttttggcatgaattgtcatctttggtgtttttttaacccccagcccctcaaaaaaataaggcctccaggtatcaagatctcatattaggattttctgtccttaattttttgagcaaaatctggaaaatgtgaaagcatatttagattttatatactatctgaaatgtgatttgttaagattcttaaatttgggcctcttagaataattttgaatgagatctaccgactcacttgtgagaatatttttcacagattatctttgggccttttcattagaaagctgtttgtttgtccccctgttggtacatttggttacctcattttgccgtttcagattgtgaaagctcacaggggtgttttttggaatcatttgctgagtcattttctcaaatcatattccattgtatcagttaacatatagttttaaatgtatgtattataaatatctgtaaccaaatcatttgaaggcttgataaatttttaacaaagtttgtacattttttatgaaagttactagtaatgctttactaagtagtgcaatgaatttttatttttaatccctgtgcccaattttggagttgagagggttgttggtaataaatgtatgatgtacacttaaaacatctgttgtgtttcatgtcactgtgttagggatggggaagggttgtatatgcatggggatggagagatagatagcagcaggaagatagagctgggttgaattactggctgccagattctgtattt

SEQ ID NO: 133082 - DNA, 2372 bp, Homo sapiens
tggtgggcacctgtaatctcagctgctcgggaggctgagacgggagaatcgcttgaacccaggaggcagtggttgcagtgagttgagatcgtgccattgcactccagcctgggcaacaagagcgaaactccatctcaaaaaaaaaattcctgggctaattcggaggtttatgggttaaaaaaaggcaaaaattgctttgtacctcttcagaggaagaaagaatgtaaaaactgtgggaagtaaaagtagttccattgctttgaatgtgtttcattgtatgtgtcacaatttaaacaagttttcctttttgttttgtaggcaaatcgtacttgcccaatttgccgagctgatgcttcagaagtgcatcgggattcagaatgaccaacctaagaagcacaaatttagtttgggtgttcctcatcacatgtatatacggactatccattgaacttaatctgtgtggcttccagccctccctttaccaaaagggtcaatggacctttctttgcactgtgtgacttaatcaactataaaagcttacaattagtcttcacagttatgggattgttatactaaccgtgtgattggaactccaaagactttttctttagcttaattttgtgtgtgcactaacattccctggtttttgtgtgatcattccgagtgttgctgcaagattacagtggacgtgatcttttagcatgtgcttttataaaaagtggtagctacagatgatatagcaatctaccttatatagagccttcagaaactgtgagtggaaatgaatgcgcagcgtatgactgttggtgataagtgtatctgtgtgagtgtgtgcaactacttgtgtgagggcatggtagctaacgtgtgtatgagatcctatataccagcatgtaccaagaatgtgtgtgtagttttaattatgctgcaatgtataatctggtgtgttatttaaacagcactagtactgtacactggtttttttcccttgtgtttgctgttgcacactgattgctgagggtgcatcaattacaagcattgaatactccatccccttccctcccagtgaatggaatgagaaaagccttcttcctttgcttcaggcagctgtcaccttctctttattggtggtcctaagtgggtcacttaagaaaaaaaagtgtaacaaattctcgctccatgaacctggtttttttttattctgttgtggaaatttttaaatctccaacttgctgtttccaaaaagaaggtgcaatatcatatatcatcagttagcaatattagcatttcaatcagtgatttgaatgttgatacttttttttcctttacatttccagtaagtttcttacagaaagtacctgtgattttttttaatgtttagatttgtagtctagtctattctgaagatatttgattaatatatttctaagaagaccactagtcccatgaagtctcaccttgttgacttccaccagaacaaaacctgttaattcagcttgacttctcatatgtgttctgtgttcaagctcctgtgggcaactcaattgttttaagaaaactctatttctgttcatattaattcacttgccagactccaattctgaaagttgtctagttcttccttcatcacacgtgcttctcatcgaaaccctggtttcaggatggatcaagtgctgttacagctcatgttccttagacctgatttgttttgatattttactgcctttccttttaatttttgtttgaatgagaaaagtttaatacaacaggtgtccagaatacttgcagtataaatgaagatttggtttttgtataaaaaaataatgctgttaaacaggagttgaccttcatttagttgatgtaatacatagctgtatggggttttttttagtaagttctttgagcataattcactttaaagtcatttttccagcaatgtttaaattactttctcattcttttagtgtattcaacattgtctgcctcttcctgcagttgatgtaattgctttgtttgcaatagcacaagctgcattattccagtcaggactgtgataacttgctgccagccccactcaactttcagttggctctgtgtcagttttccattcagtgttaactacttgttactgccatgctgcttgccctcccttgaagtgtctataagctcatcacagcctagagttaagtaaagtcaattcacagaagcacaattttgccctttgcgagacattgttgcctctatctagtcctacaagtagggttttgcatactgtgtttgcccctagggttgtcagtgcatcagaaatacttctaaatagtggtaaaaatgcacatggttaatgcacatgttacttttaaatcattaggata

SEQ ID NO: 133083 - DNA, 1050 bp, Homo sapiens
aagtgttgggattatatactgcacctggctatttaatgtttaaaaaaaaaagtttacaaaagctgcttttttactcttcatagtttcatagtctcaaattgtgatacagtaaaatgtgatacagtaaaagaattttaataggctgggtgcagtggctccatgactatataaaaaaaatatagtcaaatttatgttattttttaaattaagtgttccggtttggataaaactagataaccttactatttggtgaggaagataaagtcagttctgagggagcacagttccagagatctagtttagcccaaactcaatcctgaagacaaagagtcttaaattattttaaaaggaaagcattatatgtgtaaatccctgacacgtgcggacagagaatcagaaaaccacaagttccgtgtggctgatagttggaatgtgaggaagagtgggaaaagaaaaggtgttcagagataaaatcaatgagcggcttgttgtgaagccactctgaagcgtaaaggagtttagtgtgatcctgaaagcatttgggaagtatataacagactgttttatagaaggatttctggccactgttctaataaaagaggtaatttctgagagacagggagatagaataaagacatggtgggccagagaatggatagtagcaactagatgaaaagagggactgatttgagaattactgtaatgcagaaataagattatgtgctgaataatggggttgtaggaagtaggagagcaggtgatgcttatgtgtctggcattagcaactccacaaattatggtcccatttgttgaaatggagaaagcaaatttaggagccagggaacaggtgagtaagtagagctatcagtatagagtcagtcacctattttacaatcaagctttcctcggtaccactaaatgttttctgtgacttcattccattaagaatagccaaggggccaggaatggtgactcaggcatgtaatcccaacattttgggaggcaaaggcaggaggatcatttgaggcctggagtttgagaccagcctgg

SEQ ID NO: 133084 - DNA, 1006 bp, Homo sapiens
tttcttgttaattcttgtgcttttaatgtcatctccaagaaaccattgtctaatccaaggtcatgaaaatttactgtgttttcttctaagaggttaatagatcagctcttaacacttaagcttttgatccatttgagtcagtttttatatatggtatgaggtaggggtccacctttattcttttgtatgtggacatccagttctaataccatttttttttaaatagtatagaatctttggtattaagattgacttgatgttaactagaaattttcttgctaatctgtcagcaaagcaaaactcttactgccttaacatcacaattttttcagggtattggttgataattttgtttaaaaatttaagtgacgttttgataacagaataaattatcttgtaggtttcagtagtcataacaatagaaaaccatctggttttgtggttaaatgatctttttgctttttttaggtgtgtagtatgcatgtgtgattttgagtcaaggcagctacttagagtcttaccctgtaaccacgagttccatgccaagtgtgttgacaaatggcttaaggtaaagtgatgacatctttaaaggaaatgacattgaattttctattttattgaccatggattagagtaagttcatagctcagtggacaggaaggaagacaaaatggaaacacagctttcagtatgatctctgcaaatgagaaaaggccagtaaaaattaactgcagtcaacaacataggagtgactatacaaaatccaaaatggatgacctcttgacaatcagtatgtcctttttcatggtatatagggacaaggcccgaacttgctaggccacagtttgagagtttagaaggctacctaattatagctctattttcagaggttagcatggagaaaaatacatctagtgtttttatttaattctgaccattttctcctttgtatatatgaacaaaagcacaaaggacacaaatcctaagagtggctatgccagagtga

SEQ ID NO: 133085 - DNA, 3011 bp, Homo sapiens
cagaggttgcagtgagccaagatggcgccactgcactccagcctgggcaagaagagcaagactctgtctcaaaaaataaataaataaataatggaaagctgatggcttggggaaatggggattgactgataatgggtatacagtttctttttgggctgatgaaaatgttctggaactagatagtggtgatggttacataactgttaatataccaaaaatccattcagttgaattccttttatcatatgtcagttatatctcaatgaactgttctttgttttcttgtggcttttgtttttgtttttgtttgagacagagcctccctcttgtttcccagtgttaactacacacttttgaagtaggctctgagcatgccggttttatagatgacaatactgaggttcagattaagtaatttatctgaaagttaacatggctgattggtgacagtaccaagattctaatgtccagaagcccataatctttctgcacagcataatgcctctgtaccatatctcatttagccctgtttctgatttataaatgcacatcctgttttgtttcatctgtgaaaggttaaatgtctgaaaatcctttaggtcagggtgctatgactgaaaaagtaattttaattttgctataattggcttattcgatgactttttgccttctcattttaagagaaggttcaaatagtaaaataaatagagggtaatggaaatgtttgataacatgttttaaaccttgttgaaatcaaagttaggaagattttactgtagcctatatgtttacttgtatgaattttagattcatgtgaatatcaagagatgcatggccttaaagacattttgggattttaaatttgtgattattataaagcataatctatctaaacacaggaagtatatatatatatacatatatgtgtttttttttccccctcctcagcctctgcaaaggatagaaaatgaagtggaactcttaggagaacatcttccagtaggaggttttacttaccctccatcagcccaccccccaacattacctccatcagctcccttgcagttcttaacacatgatcctttgcatcaggaggtgtcctttggagtagtaagttttcacagagtactatgttaattacttgctttggcaacttacttgttctgagttatgttttagtataattcaccatatttagaattatatgtattctcgacagcattcagttggaaagttatatttagaaatacacctgagtgtatggtttaaaatggttgctgcatccattaataagttagtatttaaggaatattaaaactttgaacaataaagaactttactgtttaagtctttttttaattagatactttatttgacaggctatttgtaaacgtagagtgattctaaatcttaacatttttccccttgcagccttatcctccatttatgcctcggaggcttacaggacgtagtagataccgatcccagcagccaataccacctcccccttatcatcccagcttactgccatatgtgttgtaagttctttcttatcttaatgatttctgaattttgaaactcttgagattctctttcctttgtgaatgtctttgtgtctatagcttttggtgtgttagttatttgtctttacttaatgttaaagggtggggtgggaggagccagttaaggctgaaagaaagaacagtaacataggagaaatggggaaggaagaaatctgtgagccaaaaaataggtttaacagatcaagaagcagaaaaggttaagattttctgcctcttttacaactgataacacttaccaccagtcttgattattcagcttttagtgctgtttttcttagggagaaaggagaaaaatttatttatttctatgtcttagaactactctatttggattaagttggtctgtaacagaaattcccatgggtaggtttgttgttttttttttttaatttgagatggagtctcgctcttaagtctgtgctggagtgcagtggcaccacctcggctcggctcactgcaagctctgcctcccaggttccagcgattttcctgcctcggcctcccaagtagctgggattacaggcatggaccaccatgcccagctaatttttgtacttttagtagaaacagggtttcgccatgttggccaggctgctcacgaactcctgacctcaggtgatccgcccatcttaccctcccaaagtgctgggattacaggtgtgagccactgcgccctgccagtaattatttatttctgtctcacataataaagtctagaagtaggcagctcaacgatgatttcgttagccctgtgactatgaacaatgttaatggcttcctgtataagatctaaggtggcctctcaggctctagtcatatgacattccacctagcaaaaataaaaatagattcctctgcctacctgctcctctcaaggatatgtcccagaagtggcacgtataacccctgcctctgtatcacattggccagaacttagtcacatgtctataattactttctgggaatgctaggaaatacagtttttataccagaaggccacgtgcttacgttaccacactgtggtcatagtttttccttccttccttcctctctctccccgttttctctatttatctttctatcttaatgtcagatatagtatgtctcccaatttggtcttaaaatgtttcagtttaaggtcttttgcatttccttataaatttttaaatcagcatgtgagtttttacttaagtgcttgctgcaatcttggtaggtattgcatggaatttatagattattttaaggagaaagtgacatctgaatgatattgagtcttctaatcttcttatgtggtatatttctgtttattcacctttaagttatcctagcaatctatttgcagtttttattgtacagttcttgcatatgttttgttaaatttgtcagattaacactaaccattcttcatccttatagcactggcctctg

SEQ ID NO: 133086 - DNA, 1053 bp, Homo sapiens
acaggtgtgagccactgtgcctgaccacaggaaaacttatttaaatgagagatttgactcgaaagatcccgttttttttaaggctcttagttcttaaaagcggcacataatagaattagtataatcccaaataaattttcagtagatttttggtgtaacttgagaagatgattctgtcatttttagtgacaatttaaaagacctgaaattgtctacagccatagaaagtgaactactgatagttgtttctgtaaagttttattggaacacaaccacacctatttgttcatctgtattgtctttggttactttgtgcagagaccatggcccacaaacctaaaacattcactttctagctctttaagaaataattggcccactgacaccctggtcttaaggtctagaccaattatttctcaagagtattagctgaatcagctgagcagcagcagcatcacctagatatttgttagaactgcagattcgcagactgtacactagacttactgaatcaggatctgtgggtgtgggactcagcaatctagtttaccatgccctccaggtgattctaatgcacattgtaattagagaaccactgttctagtcatgaaagaacaggtgggcaaagtagcttctccagttactaggaattattataaaactatggtaataaagacatttatgccagcatagccaaataagctaatgaaatagaatataaaatctagaagccaacacattttctgtgaatatggtcatatgctacataataacgtttgaccaacagaccacatatacaacagtggtctcgtaagtttataataccatatttttactatatcttttttgtgtttagatacacaaatacaggggttagaggtaccaaccctctacactgttgaaaatacacatataatggttgactccctcaaaaactaatagactaatgttgaccaataacatagttaatacatatttagtatattatatactgtattcttataatgtaagctagagaaagtgtgattaaaaaaatcataaaatacattaagt

SEQ ID NO: 133087 - DNA, 1415 bp, Homo sapiens
tcaatcatattcatcgcgtgtttacccagtttctatttgcggttgtcagcaaattatatgttctttggttatttcatgttttctcattttttaaaagtgtcattttggccacataggaactatgtcttatgtatgtgttagctaaatagacaaaaaggtgcctattaggtatatgaggaacactgacaaggtatctacagattaaagttcgttttattataatatttaaaaagggagaaaatggtaggttaaattatatgaaattgttgctattagactatttttcacttataaaaagggcaatttcatatgattcaagaaaaaattgtagctgttgatttctaaatactttcagagatgaataccaatactgtttgctttcattattgtataaaacatataccttgtatttaaatttgtaagtttttagagctgatggggaattttagcagttatttaataatgaagcttaccttagcatatactattgatagatatcaaagaaagacaatacagaatcctgatggatcacaataagcataatgactttctttttgatatttatcacagtcctcctgtcaggcgccagagaggaagaagggatcgtctgtctcgacataattccattagtcaagatgaaaactatcaccatctcccttacgcacagcagcaagcaatagaggagcctcgagccttccaccctccgaatgtatctccccgtctgctacatcctgctgctcatccaccccagcagaatgcagtcatggttgacatacatgatcaggtacaataacagaatgtcttggaaatacagaagctgaaattttgtggcagtttgagattttttttttttggctttttgttgcaaatttcttttagtttttacctaaaatgaagttatttaagttcctcattccttttaagaattgagatttaaattctacacagcttccatagaagaaagttgaacttaaaaaattagtatcggcccagcacggtggctcatgcctgtaatcccagcactttgggaggctgaggcaggcacatcacttgagcttaggcattcgagacaagcctaacacagtgaaaccccgtctctactaaaagtacgaaaattagctggatgtggtggtacatgtttatgatcccagttgatgcagaagaatcacttgaactcaggaggtggaggttgcagtgagtcaagatcgcaccactgcactgggtggcagaacgagacttcgtctcaaaaaattaaaaaaaaggatcaaggttatgaaagcttagaatgaattcatgtatgcttgatttgaaattattgatttaagattagtaggaaatagcagacaactgatggtttgagtacatattcctgtttcctagtttcttctggaataattcaataagcaagacagttg

SEQ ID NO: 133088 - DNA, 1012 bp, Homo sapiens
taaatgtaggattgagtgaatgaatgaggcaatgaaactctaaaaagaagaccatgttaaagtatgtaacttttagtgtaggtacaagaagggaccacgagccttaaccccccaagaagaattcactgtcacagcacagtggaacacattatgttcatgattttttttttaatgttacagagtaagtatatttacatatgaatttaagaggattaacccataatcaagtcaaacatttatttttgttttttaatttttgtagataactggggcgatcctcccaccttggcataccaaagtgctgggattacaggtgtgaccactgcattggccaaatcaagcattggaaatgtggcagtcatttacttttgtgcttatgattgtgtcctttattccttaggaaggtctttaggtttgtgttgaatagagctgagatttctgcagtcaaacatatgtttgctatagaaaatttgccacaaatattgttaaatctgtcattttcctttgcatgattatttggaaggttaactaaaaaacagaatgagaaaaagtattaatcttggtccaggcaaacacttaacctttctgtacttaagatatgtaattttaccttgggttttcttagcatgaagtctgtcctttaggatttcggaattaacaccagcagaaaaagttaccaataggtatttgggaaacaggaaggacgtggtgttcttgggctgtgctgttttgcctccaacagtttttgtaagagagatccattgccagaggcaacctttgccatctttatgttttgatgtttaaaattaatttttaatttctttcctgtcttcgctagcagaatcatcaaatacctagaaaatccagactatccttcataggcgtgattctccacattggtgcagctagccatgaactatccttttcttcctctttttcccagatatctcccggggccaattcagcatctctacctggccatcctaacaaggtgatttgtgaaagggtgaga

SEQ ID NO: 133089 - DNA, 1049 bp, Homo sapiens
agttgcaagtctgctgtattctgtttggccttgattgcgagtgttgttatacttgaaaatttaccgtaaatttttttcaatagcaaacaaaccttgtatgtaggctttaaaaaaaattcccttttatagggacagttggaatcgaagtaaaattgttcctatcttcagggaacaccgtctaatggaagaaatagaacttttgtagagataatacgaaaccacatacatatagatgtcagatcaggtgtgggaagctgggacacacttggaataaaaagatgaaatttctgactggaagtttacctgggaattgtgtcacttcagatactcctttctctggggtttataaatatatatttataatatatttatttataatatggtattatataatatattatatatatttataatatggtatatttcaccttttgcaaacctgctaatcatacattgttcattcaattttaagttgatttttatgatatttctgtaagacttatttctaagagatttgaaggccttagcgcctatagttgaataagttctgccacagactcgtcatgtgggcctcaggctctcatctgtaaaatataaaaaaagttggacttaaataatctgtgggttttccacctctgacttcgtctgtgattctagaaggtagttcgtatttccatacttgttgggctttatatgcccatcttgtttttatagttaaattgtcaagtattactctgggtgaatattgaggagaattttctctactaaaataacctaatttttgatgaagagtaaacaagatggcatagtcagacataactgactgttagcatcataatgtagagtgtagatctgttgtctctctgccaacagcattggatgaggcttttaattcatgttacattcctaggctgtttctgtttgtgctcactttctttttttgaggctgtgagtggaaagtgtgggtgagaaattcttatgataaaagtttctgaaatgattaggtacttgctcagtatggaaagattattggtcaagattatgtcttc

SEQ ID NO: 133090 - DNA, 1045 bp, Homo sapiens
aatatttacatatcattaacagaactatttattaagcacatggtatgtgctaaccccttgccagatttggtaagacttagtccttggcttcaagaagtttactatttattgggcagaagtgtcaagtaaatacaaagttggaaggcagaatgattaatgctattttagaacacacaggagaggccactaactcggcaatagagattgaggttgttggagtgagattatagtagggatacttggatgtggatgtgatggcagaacagtactgacagtgttaaccaatgaggaactgccttctcattagtagaggtccagaacttccagcaggtaagccattctttaccccagcacctcctttgacatttccttccatgtgaatggttcttcagcatttggacaagtggttctttacctgtagctgttgaatcatgcctttcaatgccttaaaataggagatggtcctctttccatttttgtgcattttccgtcatccattcttccccccaacatcggtgtcagtgatatacaaacaaagcagaactgagacttgaggagcttacagtttaacaggaggaaacagatatttgataaacgctgtaaggtgttatgatacaagtgtgtagagggataaggaggacagcctgtaacctcatagtcaacttttttgtaaaaagatccttcagataaccattattttagatattccttgatgtctagaaatgcaaaactggtcacaaaaataaactgtatatttaccatttgacagactattaactagcacttatttaaatttgtttatgattattgtttagtgtgttttaaaatgtatttgtagcaacggtacccttcaaattcacaagattgggaaatggttttctagaagcagatagtgaatttcagaatgagatctttcttatatatatatcctaagattacagttgttttgccttagttagaaataaagaaaaaacaggacatctaaggaaatttaactccaagtccagttagccaaccagcaaattttcccaaacatttaaagaag

SEQ ID NO: 133091 - DNA, 1038 bp, Homo sapiens
ggtgctgtctgttctccggaacagaacaagcaagagtgtggcttcaaagagtataggttacagcaggccatctagtggaggcctgttgcctcagggtcagctcctgcctggttaccctgttctagaggttgaatatgctgtgatgtgcagtgtatgctttatttgtgcccttgggtctccacttctgattggtataggtctctgtttttctgcttctgacttggctgtcctaggcacttaggtttcttcatttgaactccttcctggccgatgccttttcactgtccacctgctttagccccttcacaccttcactaccatgagcttgccctctgtcattccagctaccatggttcagtccaagtcatctctcacctgcactgtggaaacagccacctgactaactcttcacctcaaagctggataagtggctatataatatgggaggctttcagtggacttcgatttgggtgagcctttgctgccctcttctggtctctagctgctatagccggcagctgctactaattaactttttctactttgatttgtgttaacatttctgggtgaaactgcttatgctgattgttttgcagtagtagatcaagttgtagcatgcttgtagatactgcgtaggctaaatgctgttcagccaatatgccttttccctcagtgcagctttatcttttgttttttgggttttttttgtatttttggtggagatggggtttcatcatgctgtccaggctaatctcaaactcctgagctcaaatgatctgcccgccttggcctctcaaagtgctgggattacaggcgtgagccaccgcgcccggcccagtgcagctttatgttattcagtccttttagctggttttggaggaagaaaggaaacttagggatgacagcaaagctagcttcagggaagattttgaaatttattttttctgcatcccttttcctctcttttcactgcccgctttctgttgttcctgtgcttcatttctccttgggaatttaccaagcgagaaacgtagaatc

SEQ ID NO: 133092 - DNA, 1049 bp, Homo sapiens
ctggaagtgccttaaaaaagcacatcgttgtgttaggctgagtcaagctggaatgagcagtgagacagtacaattcttaggcataaatatgtacgtagttcacctgtagatttgctggaagagccgacatgtttgcagtaccacagaccagagaagtctcagtggaggaaaatgagagagaagcaaagggagagatggagttaggggccttcgggttcagattttgaaataaaatctatgagtctttgagggaggcagcaggaagttaaaggtggaatactggaaatagttttccttcctccatgctgtatggagatgggggctgctgcatggaagtgggggctagatgttggtgaaggtgtccttgttcgagcagagaaggtaaggtatatccccttggttggtttgttttaaggtgacagattcctgctacaatattagcaatacaaacaaaggttagacaatcttgttaattttattatgcctggggttaaaattgaaattcccttattttaaaagaaaaatagcttataacataacagtgacatctaagcggaataaatttccatggcagtttaatggtagttgtgtgctttctgtcacacacacaacatactcttgtctaactagggcatgcagtgctgtttttcccacaggattggtaagtgatagattcatattcaaagagagaaaaaccactgctctttcagtgggcctcccctacttcccattcccagaaaccactcagacactgtgtggatgggtgcgaagcattatggattggggcttatggtttgtggccctgaggtagaccagggggatcttgttaaaatgccgatttctggcaaggcatcaggtgatggtgaagaaagttttgagtaccaggaggtagagtagtggttcttagactttaaaagctggacacccccaccagtgcttttgattcacctcactgggtggggcctgcagatttcattttaaacaggttcctaggtgatgctaatgcacatgaagggcagggtgtgttctgagagccactgtggtggagt

SEQ ID NO: 133093 - DNA, 1400 bp, Homo sapiens
tctctcagagtgctgggattacagatatgagccaccgtacccagccctggattctctataaatcaggcatatttaagttacttcttagaaaagatcccatgctctgtgattctcaacattagatcttaactgagtgcttgtttgggcacttaaacagatgaagaaaaacttcttggctgggcttggtagttcagtatctcatctgtattgtgggcttaataggtattggtgggccatcctgggaacgtaccatttagaaaatgatctatggcaaaatgggcttctaaggtcaaagccagattatatgaacttttggaataaggcctgttttttctttgagtgctgctaactgctggccagggatgtccaatcttttgtcttctctgggccatgttgaaagaattgtcttggaccacacatgaaatacacttgaagaaatttatgaatttgtgttgggctgcattgaaagccatcctgggctatgggttagagaagcttggtttatggatacctaggaaggaaaaatgaattctctgcctttcataattactaaactgtggaattcataggaggaagacattgattctatacaggcaggataaaagctgattaatccagataattgaagagtttctacacactcactgttcttagtttttaaaataaccttaggtttagaccatatctagagattgatatgtttggtggctcttaagacattgttgactgtctttgctaatggcaggaatgtaagtcaagaactcttgtaatcgaattatctaatatttttattaaaactgcatatatagttgaaaacaaattgttattttaaaattgtttttttaaaattgatattttaaagcttcaagtaaaagctaccattatttgctaaaaaaaagaaacattcctcttccccaaacaaatccaagaagcaaagcaagaagtgaaaagatttgactttttaaagtgaatttgtaaattggatgcggtggctcacctgtaatcccagctacttgggaggctgaggtgggaggatgacttgaggccagatgtttgagaccatcccaggcaacatagcaagactccatttctaaaaagaagtaaagtaaatttatgtgcaactcataaattctgtgttgagataaaaactgaagttacaatttgactctggaatgtttagttagtactatacatcttttgagtctaattgacagggtgagttttgttttgttattttgagataagagtcactattttgcccaggctggcctggaactcctgggctcaggcgatcacttcagtctctggagtagctgggattaccgcttcagaagtgattttgacaagttattctggaactgtgttggagaagtttaaaaaaggttggggtgggagtcgaa

SEQ ID NO: 133094 - DNA, 1608 bp, Homo sapiens
gtgctcacttgaaggggtaaatgcagttatttttctcttcctatttccccctgcactagcattcctgaagacctgaggctttttagctaattttgaaaatatttacccatttgtattttccattaagtggttgtttacgcttcctgctgtttcattttttcttggagagagaggaggggggagtacaaaccaaggacaagaccggacttcctactgcttttggaaataatggcagagtttttcaggacagttgtcgtggatgaatgctgttctgggggctcaagggaaagatacatttgaagtggtttctgttgtcttttttattattatttttaaacatgattgagggtggtgggataggaagtttcaatttgcttatgctgctgtcttggagtaattttttgaaagaaattatatgttaaaaaactaaagatgtttaacaaaagtggtcttttgcccacagaagggaaataaacaattcttacctgcaggccttacccagactggtttcagtttttttcctgttctacttaaatggatattagcgctgttcttgggactgctgagaacagttaactgcagtgatgttggacaggtggaagagtagaatgatgggagtatattggggtttatcaatagttacgctatcaaaagctatcactagctggtgtggtggctcatgcctgtaatcccagcactttgggaggtcgaggcgggtggatcacctgagctcaggagtttgagaccagcctgaccaacatggtgaaaccctgcctctactaaaaatacaaaaattagctgggcgtggtggcacgcacgtgtaatctcagctacttgagaggctgaagcaggagaatcgcttgaacccaggaggcggaggttgcaatgagccgagattgcaccattgcactccagcctgggtgacagagcaagactctgtctcaaaaaaaaaaaaaaaagaaagagaagaaaaaaagctatcactgcattttctgcttttgtggtaaaatatgtatagaaataagagagtgagatattgtgagttttggtgtatatactgatcctttgactttgttgagaaatgtagggaagtagtagtaagaggaccaaatatatacatggaaggggccgggcgtggcggctcacccctgtaatcccagcactttgggaggccaaggcgggtggataacttgagctcgagtttgagaccagcctgggcaacatggtgaaaccctgtctttactaaaaatacaaaaattagctgggtgtggtggcacttgcctgtaatttcagctgcttgagaggctgaggcacgagaatcgcttgagcctgggaggcggagattgcagtgagttgagatggtgccactgccctccagcctggggaacagagtgagaccctgtctcaaaaaaaaaaaaaaaaaaaaagaaaaagaaaaaaactgtatacatagaatagcaagcagttaggtagtaggacaatttgtagtgcttttgggatgttcttggagttgaaaagttggctgtccattctgcttctgcaccttggattttagtggctgcagatgctgcatgctgaccttctgttgaaatttgttttattgtcaga

SEQ ID NO: 133095 - DNA, 1800 bp, Homo sapiens
tgtgtaaaatctgaaaacatgaaaaataatattgtttgtggctatgcccatatgtggtgatagtattaaattatgcatattaagtgtaatgattgtctttgggaagagaagatgaggaatgggattacacaagggtacccaaaagggctttatttatacctttaatgtcctattacttaaaaaaaatctgaatcaggtaatcgtaaattaagatttggtaatgttgggtgtagggtatagagatatttagtatactctaaatatttttcagatgtttgaaatatttctcacacaaaaattttgtttatagaacacagtttttgtttcataataatggacctctcctacaggctccagcctagcgcagcctgttagacatgcaggctggtgatcctttttcgcccctttctgacctgctaaacctagttttgcagtggatgacttttattttggaactgctgatagttgcggtagatttctcattatttctaaactttctattggacctgtgtcagcagtttgagctttgttgaaatagatgtgctccaggacattctgatatatcaggtgtagggagggacccagacatctgattctgagaaaactccccagtagattgggatgcccactaaagtttgagaaccactatcttgggtttgccccagcctagtcctcatcttttccttaggctgcccctctgttcccactcctggatgactgggatggaattttgacccacgtgatactttacctcttttgtggagcataaaagaatgatagggttggatgccatacccctcttaatctaggttgtccattcctctgattttcatggagttagctaaggggcccactacctaccagggttgtttatcaggttttacagattttaacacatgtgtcaactgtatgtggtttcaaagtaagggcaaaaagggtctagcagagaaggaaaatttggagaaagtaaaacccccaaaggtaaacatgtcattatgtcttaagagaaagatgatccatccctctgcagatgctagtgattgttttagcttgtgaccaacatttgaggttcagccgtctgaacctatggtcagagattaaggtctttaggagacaactgattatccctcaagatggaagagtgtcctttctccaaaatttgctagttttccttctctactagacctttcttccttagtcctgatgtgtttatgaatgaatttatgttaacaaatctgaggctttctgatagtgaaatttgtgaagtgcctgtttgtctttgttaaggttcctctatctggaaacccactttggaggtgcagcattgcccaggtacgcttttctttttttttgagacagagtttcgctcttgttgcccaggctggagtgcagtggcgcaatctcggctcactgcagcctccacctcccaggttcaagcgattctcctgcctcagcctctcgagtagctgggattacaggtgcctgccaccatgcccggataattttcatatttttagtagagacggggtttcaccatgttggccaggctggtctcaaactcctgacctctgtgatcagcctgcctcggccttccaaagtgttgggattacacgcgtgaacagccgtgcctggccggtacacttcttaacggtgctgctgtgtaggaccatagagattgcacccagcaaaaggatacctgtttcaggtggcaagtgagggtggaaatctattctgtactccacttaccaagatgagtacctggtgtggaactgtgtgcactcagagaaggggcaccttttc

SEQ ID NO: 133096 - DNA, 1552 bp, Homo sapiens
tcagctttgtccggccccggagcccctgcgagccctgcgcctcagccgcgccgagcgctcacaaagcgttttcccacccggtgggtagccccctcccccagggtgtgcagggcaggacctctctaggtctctgctcggcggaggaggaaaccgaggcttagagggggaagtgacttgcccaaggtcacatagccaatgagagccgtagcttggctgggacccagggccaccctgggccggcgcgggccccgagcagagggggctgggaagaggtcgatcccccggcccccaggagccgagggagacagatctcgggggagggggtcaggccctggaccctggcacacccacccagccctttttgggctggtttgggagtaatgatctcttacggggtgggacggaagagcagggggccgacttgggagcttggtggtgccctggggagccgcagcgggaaagacttctgtgcggggtgtgctctcggggagagggctttcttgagtgagtggggcagagcttcggaaacttcttatcgtggggaccgtttggtctctgccaggccaccttccccaccactgcactgactaaaccaattcagctggaattactgggagggaggcctgcccgcttttgtggaggcgcccgtaaggtgtcttttttcagtaaatggcccgaatttcgttcatgccgaaaccagaaatgcatacatggccttggtaaagacgtttacggcacagaaggccatgtgagttttttccaggtggtttggacctaccacacttggagaactccccgagaaagaacagctatcccaggcttgaagggggaaggaagctgggaggattgggaccgagtcacccgcctgcctggcatgtaatacatgggatttccgtttttatttggggtggatgatgaggtgggttgttttgactgcggatgtcccttggaaggggaaaggacttgcagttctagagggaagggagagagcaacgtgttacaggcagggacgagggtcccgtggagctagaaaatagaatggggaaaaaggagagggtattcagtcattgtgggggaagggagatgaaagggttgctgaagggcgggggacggtgtctagtctggagaaaaagattgggatgtttcaaagaaggtgccaaacgtgatgagtttgaaaggagtctgttggaggtggatggtagcttacaaggttgagtgtgaattggtctgcagtcacttattttcttttagtaaggacagctatacttttatagaaacgttctagcttgagcaccccctccccctcattctcgctcttgttctaaggatgcagacccacagggcctggagtattgtcttggaagtaaggcttgacaaaagagggaagggaaagactaattaacaaatgcattaattaaggccctttgtccaagatgattccttgtttaagtcagctgttttcttgctgccctcttgcaccttagctttcctgctgtggtggctgttggcagggtgctttgggaaggactgccccaattcagacaagatgggt

SEQ ID NO: 133097 - DNA, 1056 bp, Homo sapiens
catttatggttttctttttttgatggtgtctttggttgtatagaagtgcttagttttatttttattttttttatagatgtggtcttgctatgttgcccaggctggcctcgaactcctgggctcaagctgtcctcccaagtggctgacaacacacgcaccactgtgcccagctgaagttcttaattttaatgttgtttaatatattaatttttttcattattattattagtactttatttaagtgatcctctcctatcctgaaataatgacaatattctttaaaaagttttaaaggtttatgtttcatactttttaagtctatctggaattcatttttatgtatggtgtgagataagaatcctttttttcatatggccaataatcagttttttcagtatcatgtaaatgcataagacttatttagatttgcagttacaagaatggaggagatgatccggtattatttcctttattgattatgtactctctgtcttctaggttctttttctaattccaaataaacttgcaagaggactatgaaagattatgatgaacttctcaaatattatgaattacatgaaactattgggacaggtaattgttatttttttttggaggcagtggatagatcaactatttgagagtatagattatttgggtaggtgtgagctttttcgtctaacccacacagttttaaaattcttctacctacttcagtaagaaaaagtggagcaagcagagaggagaatagtaggagaagccctgtaggttattgcaaggactttgacttttattctaaataatttattctaaatatttcttttatttctttttttttttgagacggagtctcactctgtcgcccaggctggatggagtgcagtggcgcgatcttggctcactgcaagctctgcctcccgggttcacgccattctcctgcctcagcctcccaagtagctgggactacaggcgctcgccatgcctggctaattttttgtatttttagtagagacggggtttcaccgtgttaatcaggatggtctcgatctcctgacc

SEQ ID NO: 133098 - DNA, 1041 bp, Homo sapiens
gttgaacagtttttggggggctttttgatagcttttgctacttagtattttttttttttgaaacagagtcttgctctgttgcccaggcgggagtgcagtggcgcaatctcggctcactccaagctccgcctcccggattcacgccattctcctgcctcagcctgctgagtagctgggactacaggctcctgccaccacgcccggctaatttttttgtagttttagtgagacagggtttcatcgtgttagccaggatggtctcgatttcctgacctcatgatccgcccgcctcggcctcccaaagtgcgggattacaggtgtgagccaccgtgcccggccagctacttagtattaaagctgttagtattggagcttggaacaccacctgaataagtttattgctcattccatatgatgttttgtcacagagtgatttgccccggatcaaaacggagattgaggccttgaagaacctgagacatcagcatatatgtcaactctaccatgtgctagagacagccaacaaaatattcatggttcttgaggttagtagtatgttccagatacctgaaaacatttgatcactttatcaatagtaaaagagaaaagtacatttcacctgaaagattagaagagatgttaagcgacttacctgttttgttccatttgtaacaatttagattaaatagatgtatataataagttggagattcaatgtaaatgtcatttttctaatacacccctaatggggtagtatggtttactagatagaatatgttagaattttctcctagagggaaggactcattctagtttttttttttttttttttgagacggaatttcgctctgtcgctcaggctgaagtgcagtgatgccatctctgctcactgcaccctccacctcccgagttcacgccattctcctgcctcagcctcctgagtagctgggactacaggcgcccaccaccatgcccggctaattttttatatttttagtagagacggggtttcacgtgttagccaggatggtctcaatctcc

SEQ ID NO: 133099 - DNA, 1021 bp, Homo sapiens
gaacacctgggctcaaataatcctctctcatctgccttcagagtgctgggattacaggcatgagctgccacacctggccttaagtcatttttagaaatggctagaggtgggatgtgatataaggaagtcagtatacagttatcaaaatatctttgttttcccaggaaaatttgctgtttgatgaatatcataaattaaagctgattgactttggtctctgtgcaaaacccaaggtaagtgcagaaataagatgcatctatgttctttgtaaatgcatttatttcttagtgtgtgattttgtcctgacttccacttattctttattgagcttggttgcatccattgagaagaatgttaaatttcatcccaggtatgggtagtttttgtaagttctctagatgatcataacatgcaatcaagattgagagtcactgccctagttctaggattggtcctgctgaagactccatgggtatgctgtgagaatttgcagtgcagaggtgacttgaggctattacagcaagaatgctgacttgaccagtgcttgcagtttgagtatattgccactagatgatgcctttgtttgtttagataaaagttgagaatttagtgcaaatctgttatccaaatggttctataactaacaattagttacattttgagaaacaatccgctttccttttaaaagaaggaaaaagcccatatgcacttctaaatttataactgttatatatttccttaatttgcattccatggttatgtattggtgttctccagcataacttctctttgaggtgactttgaactttctggctctgctgtctgcagcagatctcctgtgtggctgcctgttggaagcttcctctggagttctctaatcatggtactcacaatctctaaaatgagctgtctacactcattaagaatgttgaaattgcagacttgtctcgggctttggtaatcccataactgtttcctgccctgatcagaattagctaggtgcaaagggaagcagattttg

SEQ ID NO: 133100 - DNA, 1035 bp, Homo sapiens
tgacagaccctgtgagccttcatttatggctgccacggattacacacatagacaccatctaaggaaagtggggttgcctgggagaggattgcctcagccttcttccaaggagcacactcctgggcatgttgtttcagttgtaaatgacatctcacaattcacaaatcctttgccagctgtaagaactctatacagctgttggactgtagctttattttcattatgtcttggtatttctgtgggagggcagaggaggatgagcagattactcattttaacagaactggaagctaagggagtgatttataactgcatctagaaaacagactttcaaggcactgttctatgtaacatattgcttttttccctctaagaaaatagagctcttctgtatttgtgaagatttcatactggagataaggtccagtaaataaatttttccccccgggatacttggggatggaaagacgtggatgcttggatatatgctgggcttatttatgtatgtgggtatttagggaagtatgaacctgatttgactgagctaaggggaaaggatttgttcatgccaggttgtagtggtgttgggaatccagagaagcagagaccacacgtgcatgcacacatgtatacagagtattgtgttggctgcagaaatcctttattatgtggggtggtttttcatctagcttctctttgcttgtgctcaaataatttttatcggccaggcgtggtggctcattgcctgtaatcccggcactttgggaggccgaggcgggtggatcacctgaagtctggagttcaagactagcccagccaacatggcaaaaccccgtctataccaaaaatacaaaaattagttgggcatggtggcacgctgcgtgcctgtaatcccagctactctggaggctgaggcaggagaatcacttgaacccaggaggcagaggttgcagtgagccgagattgcgccattgcactccagcctgggtgacagagtgagactccgtctcaaaaaaaaaaaaaaaaaaaaaaaag

SEQ ID NO: 133101 - DNA, 1064 bp, Homo sapiens
tctcatcttcttatcatgtccaatccagcccagcctactggaaattattttctgttaagtgttagagtccagctggaggagagtgcattaaattggaagtcaggaggtcttcctgggtggcctccaattgactgggtgactttaggcaagcctccttagcttcaggttctctgactatagaataagcaggttgaaatggttgatatctgagttcttttttagctttgcgacaattctgtgattggatcaagagtcctaccattctgaaatatgtttgaatttttgtttcagtaatttttctttttccctctttctctcaggcagatgtttggagcatgggcatactgttatatgttcttatgtgtggatttctaccatttgatgatgataatgtaatggctttatacaagaagattatggtgagtattacaaggcatagaatttcaatgtagaacttttctataccgaatagtatatgctttcattcataaatgtacaaaaacaggcataaaagttattctctgctgttagaagtcaaaatcttagttattctttgggagtggttaaggagtgggcttctgttctgtttcttaatctgggagttggctacacttgtatacagtagtttccccttgtcagcagttttgctttctgcggtcttagttgcccatggtcaactgcggtctgaaaattggtgagtttgtgtaatacagtaagatattttgagagaaagaggcacattcaggccgggcgcggtggctcacgcctgtaatcccagcactttgggaggctgagactggcagatcacgaggtcaggagatcgagaccatcctggctaacgtggtgaaaccccgtctctactaaaaatacaaaaaattagccgggcatggtggcgggtgcctgtagtcccagctactcgggaggctgaggcaggagaatggggtgaacccaggaggtggagcttgcagagccgagattacgccactgcactccagcctgggcgacagagcaagactctgtctcaaaaaaaaaaaaaaaaaaaaaaaaaaggcacattcacataa

SEQ ID NO: 133102 - DNA, 1046 bp, Homo sapiens
tgttttctacttttatttatttgaatgcactagtagatcctagattaatcctttgagggagagagcttaccttaaaataataaaaaagtatatcctaatagtatatgtgagattcaagttctgatatttttgaaaaatcaaatatctttgcagtggaatgaatatggtagaaaatgtctaattcttgttcagtggagatttggccttcctaattaatagtatttactaatacttgtatattctttgtttctcctactctgaatttcattttttagtttttcatgtatttgcaagttgaaaattgattcaaattaggacttttatgcattattgtggaatttaatttcacacattatagattttgaaatttattgtaatcttggctcagaactattgttccgagtcgcagtgtaatacagtctgctggttgaatctaattaaggtgtcgtatcacttgcatgcagtatgtatctttgcctagaatgttctaaaattcctcacttgggaataacactttcctcagttcttggtttgattgaaaaacccagcaatatttgacgcaccgtatgtaactcttgtttaaaaggcagacttcgtttatcttttgcatttgttgactattttaaccaaaatgctcaactgcactttctagcatgattactaatggcttgagtattaatcttattaatgttacctatattcatttgtcatcactgcattcaaagacaagcacgagtgtactccagctgtggtatacaaatattagggaagtataaataatttagcaattgaaaattgagtagtttgaaaataaaattgctgcctaacaattacaatttataattttaaggaaaatgagcaagttgtctctttatgaaattatatttttacaattacggagtttactacagcattatgattatgtattggtgagatggcctgcctctcttagaacagtgtgaaaaacaatttcaagccactggaattcccaggattattttgcttagtccatagatcttttctccctctcttcacttggattctcc

SEQ ID NO: 133103 - DNA, 1032 bp, Homo sapiens
cctgttatcttagcatcattaaacaatgtgatttctgctgtgagaaactgttgtattgcttcctctgaattgggaaagaggatgtgtgtggtaagtgtgtaaagagatattctatcatgtattagcatttagccaagtccctgatcttttctttgatgacttggtggccataatttctgagtatactaggttgtatacatttgccttcttagtctcttttagtcctaaaagaggtatttaccttagaaagtggctttcactagttttcctcaaagattgtgaattctgttttgtggatgacctgtttttaaccatagcctatgtactgtcaccaaatatgcttttctgctgcttcattttgtcaactgataattgctctgaaattataaactaataattgtttcagcagtataaaaatagactacagtgtatacttactgtccatttaatactacagattccaaagctgtatgacatttttgttttctactgttatgttctttgtgctctagcccttctctgatatgtggataatttagaggcaatgatagtatttaatatgcccgattttttctttaaggcaagaaattgtttttttttttttttttttgtgatggagtctcgctctgtcacccaggttggagtgcagtggcacgatctcggctcactgcaacctccgtctcctgggttcaagtgattctcctgcctcagcctcctgagtagctgggattacaggtgcctgccaccacgactgactaatttttgtatttttagtagagacagtgtttcaccacgttggccaggctggtcttgaactcctgatctcaggtgatctgcccgctttgacctcccaaagtgctgggacttcaggtgtgagccaccacgcccagccaagaaattgattttttttagttaataatgtttaccaagtattgtagttgggtgaagtcttcaagcttaaaagtaaacctccagcatgttattacctaaggaatttgtgtcaaggctgattgaacctgaatctcttaaatg

SEQ ID NO: 133104 - DNA, 1012 bp, Homo sapiens
ttacctagtgcagtggttctcaaacttcagcagatatcaaaattaccccgggcttgttaaaatacagattgctggcctccagccccagagtgtgtaattcaatagatctgaggcaggactgaaattttgcatttctaacaagctcccagaagatgctgatgctgcaggtcttggggccacactttgagaaccacagatttattggaatgagcctctgagggtgaaagataggagtgctgaagcctaggtaagcactctaccaattaatcaatgtatcacctaatctgatctataaaatgggggttctgagcctggcctcactgctatgtagtgttataaggacaaaatgagattgataggaaacactttgaaaatatgagtatcttcttagtgcaatttttttttcattatgtattcagaatatcttctggttttttcatctattaagtcatctccatcttttattcaaaatttacctcaggctcactcaccttgattaagtagggccagaccaccaaatctccgtaatgagattgaaaatgccttactctttcttctagactccaaaataacgttaatctttgttgattaatttttctctccttacatttgaaaattacaaatggaaaggtgtgcttttcaacttgttctgtgtgattgtaagctcattggaggtagagattgcatattcagtatgaatgccctgcattgtggctgcttgaatgtttaattggtgaatatttcccgtgaataggttttccagcaaaagactattacatcatacaatagattgaacttcacgaataatgtccataccaatgaagttcatgtttgttaaacatttatcttctaagcctgtgttggttgctatagttttcttgcctctgttgcctttttaaaagaatttcttccaaggccattttaaagtctttgacagcatttttgtgatgataaagtttacatctgttctgatgcatttttagttttcaggaggaaaggtgttctatgttct

SEQ ID NO: 133105 - DNA, 1058 bp, Homo sapiens
tctcctgaccttgttatccgcctgcctcggcctcccaaagtgctgggattacaggcatgagccactgcacccggccagcaactagatttcaaaagaagaaagaggataagccctagtgctctagcatttttcaagcttctgcttgcattgtacttactaatgttccactggccaaagcaagccatgtgacaaagcccagagccactatggaaggtgtatctttcaaggttgtacaattcttattccctatttatagataagggaacggaaaaatgaaaagcaactatttaagatataaatgtagtgagaagagtggcattgctttacatctttgccaatttctttgaagtctgtcttattagaagacaactcatgtgcttctgcattcagcctgttttgataacatcgttttgattgaaacaaatgaagaaaatacagcctcacacagatatgtaattagaaaaaatagaagtattttaatagtgtttccagataattggggatattctctgatatgtcaccaaaacttttgcagtggactaggacatgtgcatgaatcaacacaacagcttagaggtgtgtctcagatatgccacagcatagaattggtagagctgtggggtatttgctttctggaataatcacaccaatgtaaatatccttcccagtagccagctcgtcttggaaagatagactatacttgctccaagccctttctcactgttctgcccactattaatgggccatgtggcctgagctgaaatcactcctgattctcctatgactgtcaactcctaaaacttctgttatctaaattcccccagccctacatgacatctttaatatctattgagcaaatataacataattctaacagcaaccacaccaagatcctaagaaaagcagaatgtgcaagtgtctgagcagtgtagcagcagaaccagggaagctgtgatgtgccccttgtgaggtggagagagtgggtggtgcaaatgcctgtgttcagccattgggggtcatcatttctccatgtgcggagggctttgcacatcttctca

SEQ ID NO: 133106 - DNA, 1103 bp, Homo sapiens
aagttatgagtgttccaaaagagtatacagtttcccttacatcttttttttgtttgtttttttgaaatggagtttcgttcttgttgcccaggctggagtgcagtggtgtgatctcggctcaccgcagcctcttcctcctgggttcaagcgattttcctgccttagccttccgagtagctgggattacaggcatgcgccaccacgcccagctaattttgtatttttagtagagacggggtttatccatgttggtcaggctggtctttaactcccgacctcaggtgatcggccgacctcagcctcccaaagttctggtgttacagatgtgagccaccatgcccagcctcccttacatcttaatttaataattgctactatttactgagcacgtagagtagaatagtgtactattttagtaagggctctctgtatattatactgtggtaaaatataggtagaactgttaggatagtacctttaagagtcaggcactatcctatgggctttatgttgtgttaactcctttaatccatttaatctgtacgccaatcctccgaagaaggtactattattgcccctttttgcagatgaggcaactgagacacagaatcattaagtaacttgcccatggtcaaacaacgagtaagtgtagaaccaggatttaaacgcacaccgaagggttctggaatggaatggatctgataggctagctgattcaagctcagggcccacgtcctgtgtatttgcagcctttgtggcgagcattgcttatctggtgtctgttgaagtagctactggagcagagtgatggagaggtggcattgtgttatggtaggaaaacctggggctaggaatgaaaaatgccagtcttaggcagatcacagtaacttttctgagtcttcattttatcacctctaatatgggtattctaatgtcaatctgtgtatgtttgggtcatgttttgccatttatagagtaactttacatgttgtatcattaatctcttttgcctgccttgcagagctgttacaggatcaaatgaattatatacaggagaggcataatgaattgttgttgctttttaaaggatttgcttttctctt

SEQ ID NO: 133107 - DNA, 1131 bp, Homo sapiens
aaccttgaactcttgggctcaagtgatcctcccacctcagcctcctgagtagctaggactacgcatgtgagccatcgcacctggctaatttttgaatatttttttgtagtaatggagtcttgctgtattgcccaggccagtctccaactcctggcttcaagtgatcctcccaccttagcttcccaaagccctgggattacaggcatgagccattgtactttggcctggggcctcttttataagtgtaataaccccatttatgagggcagagcccacttgtgacctactcacctcccaaagacccaacctcctaatactattacactagtgattaggtttcagcgtatgaattgaggggaaaaatttgtctttactgtttcttttcatgatggcagcctttctcttgagcttgttgttacaagtgtgatgttcaaaacaagggaagctcatgatattgccctgccttgtgctgggcagacctctctttcttgttatgtttggttctgaatacttcactttgatgtgtagtatcaacctggagtgtgatctaaagaaagggccagaatagtaaggggagttaatcattaaagtggaggttggcggaactagaaaacggaagacttgcagaggaaaggttgcttataataggaatacgcaaatttctgaaaggctcttttagcacagaggaaatagaattatgactgttggtgaaaataaccagtttttgagggcctactctgttgagatgttgtactaggcgcttgctctatgttgcatatattgcagggcacataccatctctctctagcagatgatgaaactgagactcagaggtgtggtcatgttcaaggccgcatggttattaagtcctgttgcaattaaaactaaggtctgtctaattcccaagcctgttagccatcagtttgtaccaattcccagtggacagagatcacagggagacagacctcaggcagcaggagggagatgctaaccattccagctgttctgtgtaccctggagaggaggcctttaagcagaacataaagcatccctcactcgggctgccataaagagagatttttttttttttttttttttggagatggagtttcactgttgttgcccagcctg

SEQ ID NO: 133108 - DNA, 1065 bp, Homo sapiens
cttccctattcaactttgagaacgctgaaaccaggatttgtatcctatttgcagtgatggtggggaaaatattggaagatttatctccagggaaaagctaagataaatatcctactatattagtggttgggagttcaagttcctgtccgttcatcttagagaggagccttcaaggtattgagcagccccatcatacacatagaacctctcatcagctgtgtaacgtaattcttcacttttaagtagaaacagacaaccaaaaatcactagaaatttgaggaaaacttctaacatgaaagtcggagatcaaaacaaatggagtaaggtggggagaggaaagaagaaaaagtagatactgagaaaaaaaaaccccagatatgcagggagcgggagaaaatggctaaaaactgctaattaatattctcagataagagaagtgattttcattcttgacataggaataagatgaataaaaatgaacattccaagagatagctcttgaaaatctaaaatgtgaccacagaaattaaaagctcagtaaaagtgtttgaaaatgaaattcatttgaaatcttttaaaagtagaacctggtgggctaggtgcggcggctcacacctgtaatcccagcactttgggaggccagcgcgggcagatcatgaggtcaggagatcgagaccatcctggctagcacggtgaaaccctgtctctactaaaaatacaaaaaaaatagccgggtgtggtggcgggcgcctgtagtcccagctactcgggagtctgaggcaggagaagggcgtgaacctgggaggcagagcttgcagtgacccaagatcgcgccactgcactccagcctgggcgacagagcaaagtagaacagctaggcacggtggcttacgcctgtaaacccagcactttgggaggctgaggcggcaggtggatcatttgagaccaggagttcgagaccagcctggacaacatggtgaaacctcatctctactaaaaatacaaaaattagccaggcgtggtggcatgtgcctgtaatcccgggtactcgggaccctgaggcga

SEQ ID NO: 133109 - DNA, 1032 bp, Homo sapiens
aaacatatagcaggtcagaaatgactagcattgctttcaggaatttctaggagaagtgaagctgttttttatcatgtcatttgcattagttaaaatgaaagcatatttgtcaatttcaatttattctcaaatgataccaagtttttcctctttttcacgtttataaaattgaatcatagcatcctaggatatcaaagctgaaaggcaagttagagctcatttaatccaactccctttttcacagctaagaaacctgagactcagaaggagtgaagtgatttgcccaaggtcatatacccaggtttagacctttcatgcccatttaccccgacttatgactcaagctgacgcctccgctgagcctttacttatctggatctccagttgtggtgtctggtcctgttctgccctatggtattactgcctgtcctcagcaggcagggtgaatccatgatgcccttccagatatctgtctttgtccagttatcacaacttcctcatttcccttggtttcctcttcaatttagtcatgagcagttatttaaaccatttcctttatgatacttcactgttttggttgctggcctcatctggacacattctatttgatcagactgcctcttagaatacagtgcctagaactaaactgagttttctagactaggtctcactagggtagagtggtaagtgtcatgacagtagagactctctgccttgtttattgcagcatggcatggtctgtagtaggggccatacctgtctggtacatagtacacagtactagacctgatgcctagtacataataggggccatatttatgtaatgaattaataaattagagcccaaaggaattttatttacagtgatcctgtttatgtcactttaaaaaatgttacctaaactttattagcctttttccccccaccaattgtgaccttctcaagtttcaagattctaacaaacctaaactctggagcattgccatgtgaactgctgggaaaccacatcctgccattgtgcttctagtgtac

SEQ ID NO: 133110 - DNA, 1008 bp, Homo sapiens
tataataaaattaaaagcatggcctaaatttgcagtgaagaaaaaaaagaagagccacacatacaaagcaaaatgattttgtttttattataaatcacatggaaacatttcttgaaagaattagagccttcgacatcacaggtcaagtgattatactgtttctgagtcaatgaataatgtgatacctgcattattattaataatagaaatttcagaaccatagtatgtgctgcatatggattgtgtttgttctgtttctaatagctagaaaccagtgcctgaaagaaactccaattaaaataccagtaaattcaacaggaacagacaagttaatgacaggtgtcattagccctgagaggcggtaagtgtttggtttttttagactctaatctttagtatatgtaaccagatttcctttttcatgtattaatagacctgattaaggtaaatcatcacatagattctgttggagagtaggaatatctgtttatgtgtggatgacctgtggccattcctggacctgtagccactgccttcctcatggggtagaatcatgaaactgatcagcagtaggacggcaccttaagtacaacaggctgggaagacagtggtcctcaccccagccaactagttacctctctgaggcccatcttacccttctcttctgccagtaaaatacagatatcctctaacagattgtagtcctcccaaatcgtaaagatactgttgtttcaaagaaaatcctctgtatgaaaagttctgcagcataggtaactcttcaagttgctattcttttatagcaatttcttaaaggcattgtctattttcaagacaattggagaattagaatgtggacagggtattagatgatattatggaattattattaatttattgatgaagaaactgaggagatcaggaataaaatgatttatcaaagctatatagtacaaagctggagccagaacccaggtcttctcattcctaatcttatggtttttctcccac

SEQ ID NO: 133111 - DNA, 1086 bp, Homo sapiens
gatatatacattgatgtatatatatcagtgtatatctatatacatatgtacattaatatattatctatatccaaatagaaagcaaatgtggcaaaatatgaacaattgttgaatctaggaggatataccggtgttcattgtactcttctttgaacttttctatatatatgaaaaaaggatatatatatccttttttaaaaaggaaggggataaatagttttgctgagtggcagttgcctggtagaagtgtgacagctcctgtccagggggagatggctttggtgcttcctgaggaagagagaggtgatctggccctggcatacctgagtgaggcatcctaatgtgtatgaagggacaaaagttcacccttgtggaccccacaggccggaggcccagctctacttgtgccttgttttatgttttgtttcaggtgccgctcagtggaattggatctcaaccaagcacatatggaggagactccaaaaagaaagggagccaaagtgtttgggagccttgaaagggggttggataaggttatcactgtgctcaccaggagcaaaaggaagggttctgccagagacgggcccagaagactaaaggtaagcaggctggaattctttcatatggagcagaagctgactgctaatggactgccttttttttttaaggtgctgaatgaattgattagtgttttttatttgagtatttattcacttagttaatatatgttttttgagcaactaaaatctgcatgttactgtgcagtcagtaaatagatacagtcactcccttcaaggagcaaacagctatcattcaaatattcaagaacaggtggagggattagtcacaggggcaacatggaggtgaggaagcagggggcacagatggagagctgagagctgccttaaggagggggacttgagctcagttgtgtccctgattcatggatactttgtaggccctcatgaaatatttgaatgcatgggaagataattggaactttgagtgtggtgtgtgtcaggaaaatagtgagtgacaagcggggaaggtaggccggaagggcctcaaggcctggctaagaaggtg

SEQ ID NO: 133112 - DNA, 1031 bp, Homo sapiens
aatcacttgaacctgggtggaggctgcaatgagctgagatcacaccactgcactccagcataggtaacagagcgagactctgtctcaaaaaaaagagaaaatagaagttgatctcctcacccctgtgctttagaaaaaatgtatttctcccacctcattcccaaaagcttttgaggtagtgttattgcttataatttattctcttttgtttggttcaagctataaaagttttagaagcacagatattgtcccactttatttcaaaataggaaaattcaaaattcttctggctttcttgtagatcctctattttcctttgattgtctgctttacaataatatttataaattataatctaaatttgtgagacatttcaaatgaatcagggatttatacagaatccttctcttcatgactggctgttttacagggctgggttttcagtgctttaggaagttttttcaccttacctctctcccgctgttgaaggaactgccatcaaagcctccttggttatgatctcctggtctcaatagccaggcctcttctggtcacccaagatggccgtatttctaagcatttccattcaattatttccctttaaaatttctttattaaagcaaccagaagagacatgcatggatttaaacatgtaaatagaatagtcaatatagagtaagatttgaagaaacaatcttgtgcagatataatttttagtttttagttatctgtaaatgttggcaagcattccttctgtgaaccctggcattcctctcaggcttcattagaacacatctctcccactctgatctcttcttcatgcttggggctatgagcctctgggcatacctctgtcacaggtctctcaatgatctattatctaacatgtgactaaattgttctatgcctcatcttcttgtcaagaatcttaacttcagggtgctccttttggcatttttgatgttgactgcttatttttgagagatcaagcctctttcccaaaacacatgactaagttagtaagaaaaaga

SEQ ID NO: 133113 - DNA, 1727 bp, Homo sapiens
agctttgcaggatcatacgtatgtcttaagatgtgtttcaggcttcattttgactgggcctttccattctcagagtagataatgcggcagttctatctataaatgccgtacgtttcagttatgggaatataccatttccttgggctttttcttctgcttttctttctgccataaagtgatgtgatgatcgtcataagaggttatctctcattactaattagaaaaacctcaaaaacacacgtgcctttctgacaggttactggcttcagctttatttatatgaaagacaagtttctgacaaggctcacacacatgaaatattatctttcttgcgctttcctttgttgtgaatgttgtggaaatgcccaatgtttgcggattacacgttgaaaggattgcataaagaatgccagatttcttgagcatgaatggcatgtatagctatgaaacaggggcttttctttggagcaagggagacttgtaataaagccttttcatgcttattcttaggatcctagttcagtttctgggaaaacaccagtcatactctattactaaagcatagctaggtcatttggaaactgtaaacagtaatacattgcttaatatgaaataatggttcatttcctccactggcctcctagaggcttagaaaactcttatacagaatatggttctcctactaactagcttcttatcttgtttttcacagttatacactgaagtgtcaaacacagtcagattttgggaaagtgacaatgcaatttgaattagaagtgtgccagcttcaaaaacccgatgtggtgggtatcaggaggcagcggcttaagggcgatgcctgggtttacaaaagattagtggaagacatcctatctagctgcaaggtataattgatggattcttccatcctgccggatgagtgtgggtgtgatacagcctacataaagactgttatgatcgctttgattttaaagttcattggaactaccaacttgtttctaaagagctatcttaagaccaatatctctttgtttttaaacaaaagatattattttgtgtatgaatctaaatcaagcccatctgtcattatgttactgtcttttttaatcatgtggttttgtatattaataattgttgactttcttagattcacttccatatgtgaatgtaagctcttaactatgtctctttgtaatgtgtaatttctttctgaaataaaaccatttgtgaatatagcaggcttctcttttttgtatttgattttgatccaaataaaacctcaaatggcttcctgactattaagtagagactatttggagtatgttttatctgttatcaaatatgccttgggcagaaaaacagataagaattcatttgcataattttttcctgtctgatttaagtaggatttattgagatcgttaactgtcacagctgtggttaccagagttaaacaacacatttaatatgttgaataaaagagtattgactttaagtatgtttggtcaacaaatgataagtatccgaactatgaaccccccctgaaatgttactttatggtaatttccctaagtctcaatgttggccccaaatttgtatttttatttcattttattggtctccaaaggctagaactcaagttatattggtatggatttcaccaattaaactagttggagaaaaaatagcactccttctggtcagtagtgaagggaatgttttgtcat

SEQ ID NO: 133114 - DNA, 1061 bp, Homo sapiens
acattctgcttcggaaaagtagctgaggaatctcccagacagttttctttgagttctttgatctggaaaagagctgctgatactgcatcggtcccagagaaatggaggcaggaaaccaggacatctccccaaagtgtgctcctcttggagaggggcctcagggggagcctgcagcacaaccagcccagtgagactcctcgtaaagatactaaagaaggagggatgagcaggaggctggggcccaagggcagcatcctccatcttgaggacagctctgagcgcacctgccagggtcacccagggcagagaggatgctctgccataggtctaagatgtccggtgatgcaccaagagtgcgagatgcatcatgggtggagcagtcttctcagtcggaccttcaggcccacagaaaagcaagaaggtatttacatgggtgctgctgaagcaacaaaagcaagctctccttcccaggctggggtggttatgatggatggatagtcagacagctggaggacaggcaggctgggctggggctgcggttatttgcaggacagtctattggtttgcagagacccagtggccatcgggagaagctcatagattggcttttagaaatagacaagcatccagaagtccaacggccccaccaaagggccccagagtccctggaggaagagaggaagaggggagcttcaggcaagtgggggatgctgggggacggtctcatgggctctctggctatcttcaggagggctgggtggctgtcaccctcaataggtgccatcagtgtttggtgcccgcctggctccaagggtcagtgacggtcataggcagtggcggctgcaggtggggcggctcctcgggcggcagcgctataatagtagggggagcctggaagagacgggagagagcaccgaggtcagatccggggtcccctttccaccagtctcctccacttctgtcctttcctcccctcactcagtccgggccaccatcctctctcaccaagatctctgtcccagtctgttccccagatggcaagtcccatcagggccacaacc

SEQ ID NO: 133115 - DNA, 1025 bp, Homo sapiens
tgggtcaactcaaatagtccatttaagaaaaaaacattaggtaagcggatatcttggttcgatacttagaactaattttgaccaaaaccaaaaaaggagtctgagaagagatcaatctgcagattctgcccctcttggagaccacagataataagaagctaggagtcttctgcaaggcttgcaatctccttgcacagggacctgcagcactaatgggaattgtttcttattgaatccccaagtcatgcatgacacaccaaaatcctttggacagcccaaggtcccaagagcatggaatggtagtagcaagagagaagtggtttccatactgtgtgtctgtcctagccaccaaatcaggtttgggaaggggtcaaggctgagattacatggcctttttcacagacctatggtttggcaacttgagtttgaagacaccaggttatggcttttctgatgaagcctgtttctcagtcccaaaataattaaggatccaaggaattaaaaggttcttccttaaggaggccttgttaagctgggcagataaacctgggtggtctcagagggcccttccatgtctgaccttttactgctcgaagtagaaaattcttagctgactgctgggggagggctccatgttgctatctgcaggctgattggctggctccacctcccagatggtgagtgacatctttgagcccatgcctctacttcatgtcccagaacctttagctccaactggcactcactagctggtttcatgtaaggtcagtccaacaaaacagagggctccccttggccttttgaaagctgagttagacttgcatggtctttgcggtggcccaaatcttgatgatgttcacagatcagactgccaccagtcacggacaatctgccaatccaaggcttgggcagagggtgggcaccagctgagccctaaatggcatgctttgtcagacctccagccacaggcaaccaggttctaacagagccggctctggtgatgtccatgcagacatcactaatca

SEQ ID NO: 133116 - DNA, 1021 bp, Homo sapiens
aagtacagcagccacccaaccaaccagtcccagcttccagtcacagcataggtaagaggaacttttaaaaaaaatttaaaaatctaatgggctccaaatattctaaagaacttttaatcattcttatggacagataattctgcataaaacacttcagcacacgtactaatgcgccttctttgtcattctccaagggctgaacctggtaaatgaattttataaatactgctaaaaggttttgaattttactgattattatgataaatagctttcaccatgagacagaaaattgaaatctaagccaaaaaaaaatccactaatgggggtctatagaatgtcagataattaaagtaataaatcaagaaagggatacttattcataacattttctgcatcattagtcagtaagtagttttgaatgtgtttttttcttctatcaaccagcccttctacaattctttgtgcacttgcagtcttgagtgaagatgtggcaaaagttcccaaacttactttctctctctctcttgcttcgatctcatgaactctatgaactgtcaagggctgccagtggggtttccagtgctcgcaggtgacgtctgagagtggctgtgacccgacagagtgggagtcatacttcctagtgctcaagagttcagaaatgtcctttgtcttcccttcaaagattgtgaaatgacatgtgtctatttaaggtgtattatttctccacttgggatacaggaaacaccgctggttagctgggggaaaagttattgtactatataagaaagtgggcaatgatttagcaagtctctgacacttctggttgccacagtcaatcctgcagaatcacacctcagattgtgtaacatttccacacttttgttattccttctttaactgagaacttgaactcacacggtgatggggaatgggcagagtcctggcctccagttccaactttgtcattacctcacccagtaaaatgtaaaagttctctcacctccctgagcctcagtttcct

SEQ ID NO: 133117 - DNA, 1014 bp, Homo sapiens
ctaaataagagagcacgttatgcccagcacaattttcaagtacagacggtacaaaatcctcttaaaggccataggggctaaattgttaaattcatttttctacatttcagggaaagagataaatcctttgacccaaggaagtcagtttttattatggttctgtagtttatttttggcatacattcacaggtgtgcctatggctctattcttaatccctttcctttgggatggctgcaagagtagtacaaacttgtaactttgtaatttggctttttaattttttctgtgctgcactggaattatgttttgtcttaagtccacactggatcctcaggatggatccagtgaggattttgaaagaagcataattcctttgacttcttttagaattaatttacctattaaataaaaaggaaaggattcatcttttattcgaattcctctgaggctaacaattcaatataaactgatgaatgctgtgagcattattcagacaatcacattcaatttgtgtgacagtaacagcatagccacctgaaggacagtgcaacaagggcacaggtatatgataccctttagaagaaaagcattacaggtgggtttatttgtttctggaaaacaaacaactccagtaggaatgtagtacatttttggctcttgtccatttggtttttgggattaaggtggttctattaccagaactaccaccacaacaccctggtatttttgggcagaaatttgggacactaagaaaacaactattttttattttatgtgtatagctgttagtggaagaaagaataaataggcatcattattgctctttaggctgtccctgattttggacacacacttattttttcagggctctcattttaatcagtagtccatcagtacctaatggaaacatctactgtgtagagttttggttgctgatgctagaatttaagactttggagtagtcgaaagacaacagagaaattcatctcataatttttgtattttaagcacat

SEQ ID NO: 133118 - DNA, 3878 bp, Homo sapiens
gttacatgctgtattggtttgtatcctaggagcaatagaccataccatgtagcctagttgtgtagttgactacaccatctagtttgtgaaaatcatcctatgaagtttgcacgatgaaatcacagaacaaagcatttcttagagtgttgactgtgtttccatcaataactataactcaatttgtcagtagtaattctcgttggggagtggtgggacttacaggagtgggtcctaacaggacttagaaatccttggaaaaaaaggtattttaatatgtctgagaatagtgatggccttcatattagcagttgtcactgacaggtgatattgttacttaaactggcatgatctgaacttttaaagtatattctgtgtacaactttctcttttgcagcttcaaggttactgactttttatgatgtttggtggctatgagactatagaagcatacgaagatgatctttatcgagatgagtcatctagtgaactgagtgttgatagtgaggtggaatttcaactctatagccaaattcattatgcccaagatcttgatgatgtcatcagggaggaagagcatgaagaaaagaactctgggaattcggaatcttcgagtagtaaaccaaatcagaagaagctaatcgtcctttcagatagtgaggtcatccagctgtcagatgggtcagaggtcatcactttgtctgatgaagacagtatttatagatgtaaaggaaagaatgttagagttcaagcacaagaaaatgcccatggtctttcttcttctcttcaatctaatgagctggttgataagaaatgcaagagtgatattgagaagcctaaatctgaagagagatcaggtgtaatccgagaggtcatgattatagaggtcagttcaagtgaagaggaagagagcaccatttcagaaggtgataatgtggaaagctggatgctactgggatgtgaagtagatgataaagatgatgatatccttctcaaccttgtgggatgtgaaaactctgttactgaaggttagtatcatattggccattttgaaagtagtatcatctttcataaggaggactgcttttcctagagaaaagaccaatagggtctactccgtttaattcctcactttttggtcttgttttttggtttgtttctcatgcgactctcttaccagtggctactctaatggtggtttgtctgaacgtcagaaagagtatgtcagaataccaaagacactctgcttctgctgtaagcagattcatagctgcttcttcctgtttggctagagccagttctggacctgaaatcttacttcccccctctctctctgcttggtaccacaggtgagtactccatccacctctggcattagccctgtgcactcattcagccaactctgttgggactgtctcttcctatgggatttgcttacccaggagttagatggcaagcatagggaatgtctggcacacagaatatatggaattagtgttaggattaggattttaggtactccacagtcagaaagacaggaaaatatgaagagctgtaagtctagggcaggttataggggagaatgcaaattttgatagctacatcatcaaggattaaaattttggtgttagttatgtctctgtgacatgtagtcatctagtcttaatgcttatgccttcaagaagttccttttcatttccctccctttatgcctaatgctcagtctcttgcactagtttcctaagtagtcttcttttatatctaccctgtacactgttgttaaaactggtattgaaatgctcttttactcatagtactttattgctgctccaaaatttttaatggcagcctgcttccctagaaatgatgacattgaatgtagattgtgcttggagcccctgggattggcaaatgtttttttaagaagccagatagaaaatattttaggattccaagccatgtgatatcttaactactcaacttggcccttgtgggaaagcagccttaaataatacctatagaaatgggggtggctgttctcagtaaagccctacttacaaaaacaggtggccggctcaggctgtagtttgcaaaccctgagaacttgacagcaaaacgaaaagagagaatagtagttaggacagaacagaatcgcgtaaagttttttccatataggtgagctctgataatgtttgtaggtagaaagaaagaaacttgtgaaggagagactaaacctgtttgatggattgggttgggggccaggttagagataggatcaggtgtatgtgttgttgaattattcctaaaaaggaagagagacactagtaattgctaaatcatcaaatatttgtagaggtagaggagaaagaataaattcagatggattgaggcagatgagagaacatatggggatgtgtttgattttcttaggaaaatgaaagcagaagtgggagagggcgggggataattggaagcttagaatgtggaagggatgtttaagtgctgtggggaatactttgaggcagtggttaccagtattttgaagatgacaacctgtgtaactttgaaacaatttgtggaccacccatggttgtagttatgattttagtattcaattgagaaaatgcatattagaaagaagctactactcttacatgactttgtgttttattaatcacaacattgatatgtgagaaatagtgtttataatgcgttgctctaggtacccattaaggtaactaattctgcagtttcccaggaggctgaaggctcttaagttggaaatcattgcacttgagtgaatcaacagtaagagaataaaggattgtttagaagtagtattcagtcaaaattaaaatgatgtgaacttgtagtgaactcactttgaaggattccataactttatccagtaatacttgtcagcttggagcaagatgacagaaacaaaatgatcttgggttaggcgtaacactatagaaggccaaaataagcatttagcttattctttctctaaattaccttttcctgagatcacacctagtttcattaatcacttctgtatttatggtcatcaaattgtcatctccttaaccattttgttgatttcaaattctctgtgtacatctacagaatatttccatttgggtatcttactgtctcacatttgacatactgaaaagaaagcttgataacttgaaaaaaaagcttattatctttcctttgaaacaactccctgctgctttctgtttgcactagagaatctacagacatgctaaagttgatggcacaatgtggataggttgggaaaaacatgaattaggtgctggatttagtgaagaaatcgaactgtgccatatttggcaaatgatggtgatgagaaagtagagagaaccttggatttgttttctgttttagccaaatagaattaaattctgaatttttggaaattaatttacttgactcttataaactcttacaaatactcaaatatatattctccattttatttccttgatccactaatgctgtaatcctatttccaattaataaacaacatatttagtactgatgcccatttaagtgtgttgttactctgtaatcactatccctctcataaaactatctggggatagattggttcatataatctttagagagaagatttttctcatttctgtaaaagtgtagagaaaatctcaagtactttagaaatgcctattgttaaacagtatccataattattttgtgttctgtttccttgacctcactcaagaaaaaaacaaaatatctcccagaattatggcatactgaaaactgcagtatgacataaaagaaaagactacaggctccttgaggttgggtcttttccatactcataaacc

SEQ ID NO: 133119 - DNA, 5980 bp, Homo sapiens
tttttttagaatggaaaagcataaaattagatgggcaacattttcttccttgtcagaagagcttgaatcctgatgtctttttaagtgaagagtgtttatatataattttcttgtagcttttgtttattataaaaataattattgcatatagtgatcacttatctaagaagataagtatgatttatatagacagtatatttttatggtcagaaagtaaatttgatgtgagctacatatgattagacagtaaaacttttttccaaagaaatatagaatggagaacatttaatcattatttccccttcttagagtagaggctgttcagataattcatattctgtaagtaggagatcctgtttttaagactttactaaatttaatttcaaagtaataatctcttataaatgcttccttggtggttaagacttattaatgaagcaaaagtatggacttcatggaagttttcagcctaacgttttaaatctcttcattattatttatctttgttttgttataaattaaagatactggcatggttaacttttggcattttgagttacttgccagatatttgttgattgtgcaaatagttaagaaataaatattttaattgggcatccaccatgtattatgtcacattttctttttaaatcatatgcttaagaatacttaaaggagtatgacttgctttttagtttgaatcttgatctaacagcattggttctggatggagatgtaattctagagataaaaattatttctgttgtgtagatttggattctaaatgtaataattattttaaagtggatcttgtctgctaaatgtatagcttttatttctataacaaattcttaccttagaattccaacttttgtcagttttgaaaattagtttattgtggacttgagagcatctgttcttaatctcgtgttttgcaaacacgttttaagggaagacagcataaatctgtgatagtgaaaatcatttgtacttcccctccctcgcttttgcttaaatatacaattaacttataaccacctcagtgtgaaagaatggatgttaagtagcttaagaggtatttattaagggaaaatatttttattggcagttcccttaagtcatatttgttttgtaactaaatagtgcttgcaacagaattatctatcatagggagggaaagctccaactcttgaaaacttttcaatactttttctatattggtagttaatgagaattcttaagataggaaatagactggttatgactggtaatatgatattgctaatgtaatacaaattatgctttaaaaaagccaggtgaggaattcaggatttggaagaatatgacatacatatacatttaactaaagaaaggagattttctttaaagagaagatgtgcaaccacaatcaatcctgtaagttagtccttaatcctgtactagccagtttttagtattaaatggtctgatttaacacaaatgaacttttgtcaatggttttatttagaaatagcattacttcctacttttaaggaggattttaatagctaataaaaattcgttgttctgataagaacttgaaagacatccttactcccatataattgagtattttgctcttcattcaacacctcagcccttttggtttgcttaaaaaatgatacaaattttgtgggagaataaatataacttaaatattgctgtaaatgtgttgtataatcatattttagcctggtattattggttcttctgtgtatgaaatacttttaaacattcaaaatattcaatttaaaagtttctggataggtgagtggtagagatccatcaggtacttacttggttgtggaatatttgtgttcttgatgccatgacattttaaagttgtattaatccctttatttttctgtttgagatgattcagtttgggaggttttattatcagatctaacagaagaaacgtaagtgttgtaccacaggtcatctaattttcaaaccatgttggttagttaaactgactttggtgtataattatgtacccggtagtcagaggagttcaagtcgattgcaattcaactctgtgattgtgccaccagttaggttaacatcagcagtgaagggccttcattgtgttaaatttttaaattccgttaagattatttaaacatagaaggagataggtttgtgaagcaaatttctaaagcagtattaagcaaagagaatcttttcttcctcttcttttagatatatcacatacatgtgtattttgattaaaaggaaaaaaatttaatgcttatagtataatgcgcatacttatttcttatttttagaatttattaaaactaataaaatttgtttggaaatctcaaaagatctttagtagtatacctgcaacctcagcagtccctttttatccatacagattctctgcctattgtggccgtttgctctaatttaaatttcccatggctttcggttgcagacttggttttctgcaagagtgcccatgcttacatggtcatatattcttggtgacttttccactttttcttttttgttattttgttgattgctaaagaaaaaggggaatttttttttttaaatttgtttctttgttttgatctttcttccttagcccatctatttgtgtgttctttgttttgcagattggaaagaattattgtgtggtacttagatccatggggactagcaggggaaaactaattttgttcttggttttgttttcttaataacagaagcaatttaatttttgagccattgagaagctgaaaagatatgttagtgttatgcatgaaattgatgggaaattattaatcctgaaaatttgtattcatggtcactttactgttggaataaaaatgttattttatagtgtaaccaagttaatactagaaatactaattaacagtaagtggtactgttataaatctttaatttaaatattattgtatattaagtagttgtttacaagaaatctgttgtaatctgataatgtgatttctcttacattcaattttgtggtccacagtgtgtatatattcaaataagcatatgaacatgcctttgacggtggacacatttttactttgaccagatcttaagagtttgctttttcttggcaaaacttgcatactttcaaatgtgaggaattttgttttataacataactttgtactgctgaatttaagtccttgaagtgctatggcaatttagttattgttagaagtcaaaagtagaggtctctgttcccaacatctccccaaaatattttttcattaatattcacaggctttaaaatatcaaattattgtgatcaaagctacttctgttttacagttgttttgtgaggctggtgtcatacagtaacatttaactgaattttgtatttgctaaattaacataaaataataaagagatcctttttaccatttaaaaaattctaataatttcctaatcaggaaaaatgatgttatgatatactgtaaataggctaaaaaaaaccttgtaatgttgatacatagggaaaagagtaattttgataattaataattttagatttttttcctttgattgtacctcatggttgtgaggtgtctaaaatgctctttctgcatatctgttaaggactttgggaattggggtaagggcaagccttctttctgtgtctgttaattacaggttttttcttgtggatgtagtgctcttagaatatgaaactgatttatagaatttgtaattaccaagaaataaatagcatcattgaattttgttttctttatttttgctattattttctagttactgtgcttcacattttgatttctatcaaatgacttctcaaaaagcaatttcttttaaatcagtgagtttcaaactaagaagaaaatgtatcctgatagtctaattagctgttgtttgtccatgccaattaaaataatcttttgaatttctagtctttgattatagttatataggcttcatgagtttgtaaaactattcctccttttaaagtattttaaaaggtgtattgtaattttataattgatattcatatgtaattattgagaaacttgaataacctaaaatatatttctagtattcagcacatcaaatcaaggtataacctgtgatataaaagtggtccaacagaagtatacagctttaaaaataacaaggaattaattctgttagcatgttttactagcaaatgttcgtggaaaatgttattaattcttaaagctcagtgcctgggttttattgtgtgtggccttactaggagaacactgtagagccgaacttgaaatttattaaggaaagaagaaactggtgaagtgcttttatgctgttaaaaaaacttcacagacaattgtcagacaattttttttttaaaggtcatgattgcttgatgccttttccagtctttatttgaaactctcgttttgtaggatttcttttttgttcttcctcttccttttttcttttggcagtgggtggaagattcttttaaaactgaatggctaaacctgtatggtaactattgaagtatgatcgaaatacttttattcatgatttttttaggccaaaaaatgctatgaaggtaagccaatgatggtaaaattacattgtgttgcgtggaaactgttttagctttagcgttttctgttcagaaaagtaggctctgcattagagttttaaattgggatttgtttgtgaaatattttgtaattctcatattgctgattgcctttatgtctcggtgttctagtagatagttcgtagttcctgaaaaataatattctgtgtatgaaagaaaataggaggtgagaacagaatgagaattgggaaagaaaaccccctacccaaaatgccgccacctaacaggtggaaatatctatgccattacagattttcaaaacgtagagtgcttgaactctttttttctaagagattacttcaaatttgacagatttcacaaaattttgttatgataaatattaaaattttaactcttatttttatcctaaatttaagcccttacaaattaagaaaagagtgcctcgaggctgattgctaatgttcaattaagttatgtgttcagtgaagtaattttttgattatgatattttgattttattaatatgtaaactaaaaattataaaaggattatgagtacagaaattaaattatgtgaaattaattttgatattttgcggcagacagtttagaattaaaatatccttggtgtgtaataattttatttcttgtaaggacatctgttggctttcagtattcagaaaatttagactttttaattttaaatgttgacgtaaattaacgggagccatactttaaattgaaagaacttaagggaaatacataaaatatgctagtgattggcttacttacattttcagtgattagactttgtgaaataagagtaaggcctagcattttattttatttaagaaaatatacttaatttaaaagtactaatacaagaatgagagaaatctggtcaagtatagtaaatccatatccataattattttcaatcactagttacagaggaaggtgtgaatgctaatatcttctttgttgaaaatcataagttgtattttgaaaagggatgaaagggaacaagtaactgctttcaggcagatttatatcatcctaacatcatatgttatttgtgggttcatgtcacaaaagcttgcaaaacttcacaaaataatttaatgtattttaatttagtaagcttgctgaaaactcttttgtgataaatctagaaaaatttatacatgatatttttcttttttaaagtttagtgatccatcttggtactttgtctcaatttcagtcttgttgatttagataatattcttattgttttataaatttcctttcaggaatgtgttactgccttgatacgttctcacctttccagttatatatgatccatcta

SEQ ID NO: 133120 - DNA, 1104 bp, Homo sapiens
ctgtagttttttggtacctagaataatttattatggaattgaatattaaaaatttgacgatcccaatagttatgaagcttacagattctgtatgtaggcttttttcctcctttggtttcaggcataatgaatggatggcccttgctttctgatatttgtgtatccaattttctgaggaaacacttttctacaaagtctgcatgtttgattgttctacatttttctttcattataatttgaaaaggacttagatcctccaaatgaaaaatggctgtcttggccatatggtaaattaggcctgctttattattgtctaataattaagcctccctttacttatcccaccctcgttttaaaaactaaaaacgtgtggtagctgtattagttagaacattttcaagtaacaggaagtaattcagtggtaacttcctcatgtggtttactgtttatcaaaaaggaaagtagtttcttttgagagaataatgcagtttttgctgctcaacattttctcaagctctttggaaaataagagagaagtctttaatgtgcttgtaatatgataaggacagatttaaaaattttgtttctcttctcattacttggtgtttgacttcagtggaagctgaaagaagtaaatagatgttaagttgaaaatctgcctcagtgtcagatgctcatataatttaaataatttaaaatttgtgggtacttatattgattgaccttatattttaaaaacatagggaataacatcaactatttgtatcttctctcttaacttaaagttgaattaattaactttagctatctaatagagtaggtccagaaattaacattcaaataacagtagtaagtataggtgaagaccaggctatcccaaagataattcattaggacttctgtttctatagtatctttcatatgatagtaactgttgtaaacaattgaattatatatatcaatttaataaataattgcaatattaaaaagttagccccgataatttctacccaaacacctccaaattatgctacttcaaaaacagttgaagggaagtttaggaatataatatagtttcattttaagaccactaggataatagac

SEQ ID NO: 133121 - DNA, 3028 bp, Homo sapiens
gcactggtgataatgatgtctattcctgtattttttgctgacttttacctggtatcctgtcagtaattgttttttcatgttgaggaagaaaaaagaatctatacttgcatctgtcagtattattgttgttttaactttataggtatattgtagacattgaattgaaagatttgtaagcttttggttttctgtgatactgattgggaacaaaggcatagataatcagagacagcaaataatagccaaaaatatatatttgatatgtattcatttagccaacaataactagggccttttgtgaatcactgtgcaagatgtgctggtacttacaaagatgaatcaggtatagaccctgaccccacggatcctatggcttaatagaagaggtaagaggtgagtggcataatagagtcatggggtgcaggagaggaaagatactgctttcatgaggggtagaggtgtgtgtcaggggagataaggatatatcatgtttagaggaacaacagacttttaaaattctattttgaattaggtcggtttttcttagactgagttcctcattctcctagggtccatttgtagggaaaggttttttagttcttaaattatttcttaaatttgtatttttattttgatgttaaaaagtgatcgtacctgttataaaggtaacactttgcagtgataactcatagatgaaagacatttgttataggatgagacttcagtttcttaagtcagtgtttctcattgggatttttggacagatatgatgttcaagagaactttttttttaaggggtttatatattttctaagtttgagaaacaaaggcttaggctcatttcatgttactttgcactgtctaaactacattctaattggtggcagaaagtaggtggcctagaaatgtaagtagcaaatttttttcaggaggtaaggcaattcagcaaggtagtggagagttcactgtcagttaccactatttaggagttaagttggtggcagtgctgctgaatgggcacagtttgtttgattttaaatggtaatgaactgtgagtttattaaatagagggtaaaagttctaaatacattctgaacataaactagacccgttaaagtggtttgtgttacaacctactctatagtgtcctatacagtagtcaaagcttttgtgtaattgattacttctgtggtcccaatgttaatttctgcttatagttttgtaatagcttaatttcattaaagttaattaaacatagattatcttgtacagtatggtatagaattttgttccataaattgggagaaactcataaggaataaataagtactctttaatttatagttcggtgtttccaaagaaatttgggcttcacattgggtgaattcatcacgatagatttaagaatatctgtattgaatatcccaaacattgtacacttttgggggaacatcactgaacaatattttcctttcccacttatttttttttagcagaaaaaaatacccccctgtccccaacaaacaaaactgatcaaagtaagaattagatcatggctttcaattccttagacattttttgaagtctctccaggcttttaagatgaggaattcctaggaattactattcttactggggaaaaagactattttgattacagagagaaaattaggtgacatttgctcacattatacatagaatagaatgattctagttcatctgtagattcttattatagtgtttcgcatgtaatatatgctactttaggataatattttattactgtttgaggttcttaatagttcatgtgtcagcttgcctttatataaaagtctatgtaagttgctttgacagactttaaataaaaatgggaaacacataaatgcagtgttgccatgttctcttttgttttgagcaattacaagcatttctcatttcctgtgcacagaaattccctgaaaaatcaagacgctgctaaaagagtcaaactctgaaagaaatcccaaagatacatcactgcttgacgcaaacatttttaagaagtcactgattataatgaacacagcctttaatggcagtttttcatctccttttcacaagaatgtgacagagtgtcattaaggttttagaaatgaatgctcctaaggaaaggaggatcactaggactacaatgatgctcagtatgtggccatgggattctctgttgggctctttttaggtttttaatcaggttggagaagggagttagagaggaaaggaataggaacagacaagagctttaggacacctgtacaccacagtattttactttctcattgatcttctagatgttgaatccgtaaggtttaatatagaaagtcaaacaaggttccaaatattttgaggaccagtaaacaaaatcagctctaactatatatatgtggaagcacataatttttgcatttaacttaaagtgtttggatatattaaatctgaaatttcatttaaatagtaattccagttctgctctaaggatattgttttaacccattgttcttttctatggtgacagtgattgcccttgatgtattctgcaggtcagtcagattgtatcacagaagagggcacataataaatgtgagccagaaacagctatgtctcagtacaggaacagaaaagcatatttttgcatcacacattaaaataacacccagaaggcattgcatcacatataaatgtaaatcttttctagaggggtgtagcatggaaagaagggttcagccaaaatgtcctcttaagttttttaacaataacaaacactataaagctcatatttaatgagtaataattaatgtctatgaagtttgttttatgagtttttaaaattacagaatattgtaataaataatgtaaaatattacaaaatatgctgtgcttgagaagatatttttccaggttagaaagttacagtttttctgagcaggtgttttctgtgaatctctgtagcattggaatttatagagatataacttttctatttctgtggggt

SEQ ID NO: 133122 - DNA, 2388 bp, Homo sapiens
cgtaatgagaccctgtctctaaaaaaagaaaattatccaggtgtggtgcttgcctgtagtcccagctacttggggaaactgaggcaggcagattcccttgagcccaggaggtcaaggctatagtgagccatgattgtgccactgcactgcagcctgggtgacagagtgagaccttgtctcaaaaaaaagaagttaacctacagaatgagagaaaatatttataacccacgtatctgataggggactaatatctaaaatgtataaggaactcataatacatatttgtagcaaaccaagtaacccaattaaaaaatggggtaatggacctgaacaggcatttttccaaaggcatacaaataactaacagatatgtgaaaaggtgctcaatatcacttttcagggaaatgcaaatcaaaccacaatgaggtatcacctcacacctgttgttagaatggctattatcaaaaagtaaaatgataacaaatagtggtgaagatgtggagattgggaacctgtgtacactgttggtgggattgcaaattgctatagctgttacaggaaacagtatggaggttcctcaaaaaactaaaactagaactactgtctgatccagcagttctgcttctgcctgtatattcaaaggaaatgcaactactgtcttgaggagatatttgcactgccatgttacgttagagtatatacagaatatacttggtaaggatgtacttcaactggttgaagcagaagtgaatgggtgaacttgagtgtggcctgccactcttgattatttaatatcctgtagcatcggtatgttttataaaacaaattgagagcattagtcatttttagtcagtgggttatgtagagatttgttaagagagcatttattgtgacagtttgagtctgtacaacatccttgcttagaaaccaattaaaatgcctcaaggaatggatacgtatgtagttacttcttccctttctagatcccaaatgttaaagggtattatatagacccaaggaagttgtttggttttaagcacttagccccatgttgaacaacgactctaggcagacatacttgatgagtgaagcaaaaggaggaaaagcaaaagtcaaaaatggattttgattatgggtagtgatcaaggaatggatgatgtgggaacagtgtgtaaggagtatctggagggaacatgaaggggagtaattgtgtcagacaagtttgagagagtcatttatatgacatttcccccttgagattttcccttttatcttgaattttgtattactgaagataataaatgcatatatttagctaatgtgaaacaagtgttttctctggtggattgacttttttttttaacaaagatatgtgtattatatataaaattaatgtggtaaccttttcatcttattctccttagaatccatcagtagaagaattattttgtacactatgtgtgaaagatcaaagaatatggggcagtcaccagttgtttacaacctggtttgcaagtggcataaaaaaatattagtttgtctgctgaataaaattaaacttatttttctctctgtagcatattaattgtattatagtatgccacagccacttccagtgcaatcctcctagtcttggaacagcagccaattccaggaattaagagaattaggttactttgcctagtggcacaaaaaataccaaggtattaaatcattggcttgtctgtttggggcacaatcagaaataaagtttagagataaaagttgatttgcatgctgttcacatttgttcatactttaacaggtatgtttttctatttctctccgatttatataatccttttgaaacagattttcagttgctgttaggtccagaggaacagaatgttaataaaattttaggttaaagactaaattcagaattcaactacagtaacttgatgctactggctgtgacaacattttaatctatctttggaatatttaagcaaatattaaaatatgtggttacctaacatggctatatattaaaatataaatgttatattaccctgtaacattttaaatgatttactaatctattatgtaaagtaatataagaagccagtttagtggtagaaatgttaattttattttaactttagtatttcaaaacaaagatgttatttttgaactcaaagtggtagaagcagagaggaggtgacaaactgagaaccttttgattttgttggggtggaacttggtctgctgttatagctgacattattactgtatctcaatgatttttgagattttgggaaaattgttttaatgtttcactcccaagcgctgaagatactccagaaatctttgccgttctgttcctataacatttgctcttccattttg

SEQ ID NO: 133123 - DNA, 1074 bp, Homo sapiens
attccaatagggactcgagtgaacaacgtgggcattccagttgtgacttgagtgagcaacgtgggcatgcactagggacttgagttagcaatgtcggcattccagtagtgtgacagatattcttttggttggtgtctcattgttcattttgaagatttaacatgttttttctgagttccttctctttcaacctcttatgaccctgcagactgattatgaagtttccattaaccagaataagaaaatgtacttgcagactactgtagttaactgttcatatagcattttatcttatgcatactataaaactgttatatgggtatgtaatacagaacagacaaaataaggaaaacattcttttccaaaggactcaccgtagaattcctttaacagagatctctgatggtatgttttgaaatttaatacctataaaacttcagttagattctgcatttcagaagcaaatctattgtatagagccaaatacaactatatatttttacagcacgtttgtttttttgggggagatcattaaagaatatttaccttctaatcagattaaaaacttttctttgatcttttatgtgttcgatttgttaatggtacagttggtatcagattcttctgattaacagcaactggcctgaatctactataaacttgtgagagaaacttaaaattggcccttgttattacttaataaacctattatttttcttattaatttttttaatgaccatcatgtttactcttctaggcagaaattatggtttattgtgtaatgggaataaacatgatttgtggaattatacctcgttcatatactcactgtatttcttgtgaaagccgtaacatctctaagcatagtttcttcaattgtacaatgtagaaaattactttgtagaattattacaaaaattcgatgagttaggctgggtgtggtggctcacatctgtaattccagcactttgggaggctgaggcgggcagatcagtttaggtcaggagttcgagaccagcctggccgatatggtgaaaccccatctctacgaaaaatacaaaaaattagccaggc

SEQ ID NO: 133124 - DNA, 1030 bp, Homo sapiens
gtcaggagtttgagacgagcctggccaacgcagtgaaaccccgtctctactgaaaatacttagctgggtgtggtggcacacacctgtagtcccagctacttgagaggctgagacaggagaattgcttgaacctgggaggtggagtttgcagtgagctgagaccacgccagtgcattccagcctgggtgacagagtgagactcagtctcaataaataaataaataaataaaattaaaaaataaaagcatggagctaggtcagaaatagctacagactgagagtaatcactgtaagtagtgacacaaagactaatctttgtgcagtgtggaaagtacagctgggttgtttctttgattcctcctgccccattgagccatacctacagagagcagctgtgaaaaactatcactttcaacaatgaagaatagtaatatgtcataatggagattatgaagttcagaaaggggtaaatgcagttttggggagggctgagactaagagagaacacaataagacaggcaattaagactgacatgaaagatcagtcacattgataggatatactcttgatatgatataatgagaatggcagtttaccgctgtggttttcttttcccaaaacccataaccacagcctaaccatgagaaagacatcaaacaaatcccaatttgggacattctgtagaatacctaacccagtattccttaaaaacaatgaaagtcagagatactgtcacagccaagaggagcctagggagacatgacaactaagtgtaatgtggtatcctggatagaattctagaacagaaaaaaattaaaaactaaagaaatcatgtatgagcttcagttaataaggtatcaatattgtttcattaattttgtcaaatttaccatactaatgtaagatgtcactattataggggaaactggctgtggtgcacatgagaactcgttgtactatcttcacaatttttctgtaaacctaaaactgttctaaccctaaacctagccagtaatggtgccttggtaa

SEQ ID NO: 133125 - DNA, 1498 bp, Homo sapiens
ccgccccctaccccccaccaaaaaaaaaaaaaaaggaaaaggaaagaaaaaaggagaaggtaaaaaggaaggaaagaaggtaaaagagaaagtagaaagagaggaaaggaaggaagaatggaaagaagaaaactcacaatggttggcaaataaacctctatatttcaaaggttattgtgaggataaaactcttatagttatgatataaaagatttaacgcggtgttggtacatgttgttggaataattcacagtcaacataatgagcagtgatacaaagttcaggtgttgtagcagacgtattttgagtttacagatattaaacagtgaaagtaaattttgggtttctgttaagaaacacgtaaaatagccattagagttttgtggatatgtcaggtaaattttgaaggcattttagaaatgtcaacttgctaactctaggtgactaaaataggtaagctttttataaataaggtagattgagaaatttttggatatgaaattaatgatctgtatgatgactgatattttattttgcaaatcagcataatgtttactgtgtctcttcttgttaaagtgttttatttacctttcctgtgtttgactgtctattcttgatattatgtggtcattatttctttgcctctgtcattatgtactgtttgcatcttttccgtagtatcttgatcttcaaaataaccaggcatgctatttacatgaagcagataagcataacccatgtaaattttcattgagtcactgagaggtggtgtgtgttttttcccttttactttaaaatgatttatttatttatttatttttgctggcagccttaataatgttttcataaaatatgatcgatttataagtctgttttacatgcctttccctttttgtcttagtgctttgcttctaagttgcagatgcagtgggtgaacaataccctgtgtggtgtgacaggtaaatttcccaatttacctgccgtaatagtgcgctgtgtaatgccattcaatcatctctgaattttacttgcctgattagttaagtgaagcagattttcaatttaaatgtaacttcatctgcttgattaaaaatgtaacagaacattatctgctgcaaataaatttcagtggaagagatgatttttgcctgtttaaaaataacatctgtttatgttggctggaagcagacgattaatacctctctaatttcgaggtttaccagtccagctcacctgtctctttgcatggatagttgaaattgatggctgtcgagtataaacatttacctgttgatgttgagttgatggatttcttttttaaggataatacagaatcccatcattgggcattcatttatttgctgctcatcaagatgattgacagttttgccaacaacatggaaaaaggatcttccttcatgatgcatatgagaaaaattttacccctcaatgatgagtgccctacagaaaaacatattcttgtagattctttttcata

SEQ ID NO: 133126 - DNA, 1028 bp, Homo sapiens
atacatcaggttattccttgatatttagcagaagtttttgccatagtgcttaatgaaaacagctcaaactgttaaaatacatttttggtataagtatatttggtatgttctatgctttaattattaatttgtaattttattttaacaaattactttgtgtagtttttttttagaagcagatcagctcagtgtaagaaacttagaatattgttttgtagctttctttgttatttcgttgtccttcctttttatttgtagtttgcaagggtagatgagatttttttttcagtttcacttgtccagatgatatttaatgtagaatgaataaactcagaagagcagcctttacctaaggaagaaggtatgactacttcaaattgtttcatcacttagtttgacttcagagatttttgctctgtgatttgcactgacttcaaaactttttgcatgtatctcaaaagtgggtgagaacatttatagcagcattattcataataaccaaacttggaaataaacgctatatccatcagttgataaattgacatacaaaatgtggtatattcttaaaatggaatattattcagtcataaaaaggaatgaagtacagattcatgctttaacatacctgagctttgaaaacacgttagtgaaagaaatgagacaccaaaggccacaaaatatgtgattccatttacgtgaaatgtccaaatgggcaaatccatacagacaggaagtagattagtagctgacaggaaggagctgggagaatgtgggaatggaaaggtactgtaatggatgtgggatatatggaagatgttctggattatggttgcacaactttgtgaatgtactagaaaatacttgcacatttcaaaaaggtgatttttctttatttttataaatttttaaaaaaaatttgagatggagtcttgctgtgtcgcccaggctggtcttaaacttctgggctcaagccatcctcccacttcagcttcccaaagtgctgggattcaggcatgagctactgtgcc

SEQ ID NO: 133127 - DNA, 1004 bp, Homo sapiens
agttccttttactttctatcccaccatttgtggatagcatgtaaataaatcttgaaatttggggcaagagaaacgtaagaggttaatccacttctaaggctacatcattttcagagtaactgattccaaggatgagcagaatatatttatttaatagctatgagagatggattttcataaacttttatccaaagtaacaagattctcacattcagtgtaaagggtgttatgaaaatgtaaagttcattaatatgctgtatatttttatccccttgaatgtaatttagagattatatactgtaataggatttatgacattatactgtttaatctttagggtgttacaaacacatcaaggacagttggcagtaactgaagtttgcttgcattttaagaatgcattagtattgctgagtatcatgtactttcctaaaaataaagaaaattatactcttagaatatttacagattcaaatatttttttttccttgcaggccaagaataaaatctttatgaactaacaagatgaattaaagatggaatgattcatttctatggttaggttttaattaatacatgggggatgattttggcactttttcaaagaatttgtttctgtgtatctgaatttgcacctactctgtaacctaactgcgatttataaaatgaaacaatctcttctaatttggcacttgataggtgctttgactttaaaaggcaagtgtatttttctgtcacgaatatcttgtcattctaaaataagtaaaaacaatggattgatgaaacttcttcactgcttttttctttgtgtataacaaatacattgatattttactggcataaaatgtgtattttagttgagtctttaaattattgctcagtgtattttgtttattttaagccattattacttcctttatgttggatttggatagtttagattgtaagcttctaaagggcaaataatacatcttttcaactgtggtcttgactagcagtcccaa

SEQ ID NO: 133128 - DNA, 2608 bp, Homo sapiens
aggcgggtggatcacctgaagtcaggagttcgagaccagcctgaccaacatggaaaaaccctgtctctactaaaaaaaaataccaaattagctgggcgtggtggtgcttgcctgtaatcccagctacttgggtggctgaggtgggagaattgcttgaacccgggaggcggaggttgcggtgagccgagatcgcgccattgcactccagcctgggcatcaagagcaaaactccgtctcaaaaaaaaaaaaaaagaatacatgcattagaacccacacaaggaaactgtcccgtttcagggtacaccttttatgggtgcaactaaatgtgcaaatttagtaaaacattttgggcacttgaagctattgcaacttttgctgcctcagagaagcaggataattaaatttttgcctatggaaaaagtaattttaccttagttttatgtcttttctaatttgtcataagattctaggccaaagatctaataaccattttctaggaagtttctttttgtttgttgtacttatttgaagtgcattaggtttctcttctttttaatcaccagtatattgttttgaaagtatattgaacattttttgtcatattttttctcctttctcttttatatttcttacctttttgtactttttgttttttacactgtatttctttattttagattcttcacccctactctccatgtcccctactcccaccccactaaaatggtggataggatttatgtaggggtgctgctctgagagtttgaactctgattgagagactaatccccacccccgaaggctgtctgcatcagctgtccccctggctaattagaattccaaagggcattaataaccatttaaattaatccgattatacctgcagttgctaaaggtaaggttcaggctgtttaaccctctgttaatgaacgcaaacatgaatcaaaactgggtaggaattttacagtttattttcatttctgcccaaaggaagaaaaccatttcacctgctctttgtagcagtctagtttacaacaatgcaaggaagccttgccattaattcagccttcattaaaagaccaaagctaaattgctccatcttgtgaaaatgcatttgcattgtttgtgaaagtcctttgggggcagagctgtagaaaaccgcctaacagcaaataatcctttagttaaatgcaaaagtgttataaagagctaaaaattctctttctagcaactaatgttgcaatgataatttgacagtagtggtctcccaaggggcattaaacaggtggaaaaagagctaccatttcagaactttagttaaaaaggagtggaaattgaatgaccagtattaagagtcagaagaaagtctatagggttatgtagtccagtttctctcatataggaattttttctccaacatagtggacatggttacctagtttctttgtaaacatctcagtaacagcaagtgttaataaggcagcccatctcataatcagataacttgttattgtcagagaatcctgatctgaaattagtaactattatttttctttcattttaccctttgagccatattgaattatttcagtatagctcattgccctcattcctattccctgacctctccatattttcttctttagatcaggtgtgtattacaggagatttttgaaatgtagaaatatatggaagaataaaatgttcagtaaacatgattgtaagacagcacttttcatacatggttgaagttgaaaaattttaaagcaagaaaaggaccagaagaaatatctttccatgtaattggctatttcttgaagagttattctttttgctgttaatgtgtgtgtcacctatggaaaagtctagattcaataactaagtcagaaaaattggtttgagaaaaagacatctactggaatctgtacggcagtccttcaacaaagatatctattagtcgatagatgtcatccccaacacctgtctacaatgactcatgtcttttcctgattaccacttatagatttttccctttttaaaaaaactttacacaaaatgtaaacttcatacattgggattattctttagtctggatcttttctttgaatgaaataagctttgggatgcttatttagatgttcaatggaacagtgtggagaacagtaattgtgtttgggctaaagaattaatccatttagtcatgggaagcactacttagctttccatagcagctgaattgtggtgcaactttggggctattttaggattttaacctcaaatagaaatgaaagtttatttgtattgatgaacatatgcttttgaataatgagccattgacttgatttcaatgaaagtgaaattgtttttcaattcagttattttatgtttgaacatgaattgaaagctacatctttgtattgctgaaatttaaaaaaaatcaataactttaacattttaacagaaagtgttttaataagcaattattagggtggcttcagaagggtattgtagctttaaaaatttctgacggttattagtacacttttgtactgtgtaaatcagacattggaataaaattacttttattaactaaaattctcctacaata

SEQ ID NO: 133129 - DNA, 2757 bp, Homo sapiens
gtatttagtatagggaatggaattatttggagtaatggtactgggaaaacatgtctgaacagataatagagagtgtgtggggttaagacagactctagtggcactgggaggattgggatagagcttggtgttgcacagatattgtgccttaagcttaagtgatgtattgatgattttcatggagcatttattctttttaaagggaagatttatttgggtgttgtcctggttaacttcaggaaggcttctgtgtgaaattatgctggaattcgttttaaggatgtaaatcctataaatccacagcttgggtgacaaattgaatctctaacaaatagaaggaatttaagagaaaaatcctgttgtcaaagaatagctgatattacaaacagttattatatatacaaattctctatccaaaggatgtctttgtatgttgttgagatcattgtcactgcttactctcaggtgggtatagcagaacaagaactcagatttcttggattctcttttttctttttttttttttttttgagatggggtctcactctattgcccaggctagagtgcagtggtgtgatctcggctcactgcaacctccaccacccgggttcaagctattctcatgcctcagcctccctagtagctaggattacaggcgtgcaccaccacacctggctaatttttgtattttcagtgaagacggggttttaccatgttagcaaggctggtcttgaactcctgacctcaggagatccgcccacctcagcctcccaaagtgctgggattacagacgtaagccaccgcgtccagccagattctcatattttttgtaacagcagatcccttataagtgcatccctttgcacacctaaatgcctaaatcatattgttgataagtttaattcagcaaataactgttatttagccactagggacgttgcagaagaaactacaaaataaagttttttttgtttattttcttctcatctcctttagatatatgaaaaatgctgctcattagcaatgtttgtgatgtggtcatgcaaaccaatgtgttttgcgtctaatgtagcagtttaatgagtgggaagatgactatcctggggtgaatatgaaatgtggcatggaaaaggaaacaattgcttgtgaatcctggagaatctggtaaagggggaacttaaatatgtcgaggaagggaaaggcattgtaaaccagaagaatagatagggagaacagtttgagcaaattgttttgggaggcatatttaatgtagtgaagacttaatgtagtagtgatttaatgcgaattagctggaagagacactacctacaaagctcataatttagtccaaattctgaggagtaacttatactaggttggtaatggtactactgcaagtaaataaaatattgccaaaataattttgaaattagagtcaccacgatttaatgacttgataaaaatgttaatggagagaagagagattgtaagtttgtgtgattttttaaaataattcaactactgatagcaatagggaagttgaaaggaagggcccagtccactttagttttagatgtgtagagtttgaattttctgcatttgattttggtgaaggaattatgagggtacttcaaaaaataagactagaatgtttgtgtcaggcccagatatataaatatatataaatatttgggcatggaaagaaaatcccaggaatcaaataatgtgccagttttatgattttgacacactcaaacctctgccttttgtttctctgggtcactctgtccagtacaacaataggcttgctatgtattttggatgaacaatgaaagagagtgaactgttctttaaaaagctgtttattatagtgaaactttatctgtagatgcagccactttgccagatctctgatggaactaacaataattttgtctagttaattttaatagtacgtcctttgtcacaggttgttcaaatgaacaaatataacatgatttttatggcaggtaaagaagaatattttaaatggaaggagacctgatgcaaagaaaaaggcattatttttagtggtgcagcgattttgggacttattatagtagaacctattctttatagagattattttgtttgatttttctattttgtttttctttgctatctagctttgttacatagtgaccatttttagcactataaaacttaatgtagtaatcagatttagcagattattatttaaagctgagcatttaaaattaactttttgccctgtgttcatttttgaatttcctgtttttatataaatatttgattaaaaagctttctgtttaataaaattgtgttatgattattttaatgtcgtttgaggacatttaaaaaaccctcccaaaatatctaggatattgttttaatctgtagccttctcagtagaaattaaaaaaattgggggatacacttttttgtgtgaaggataaagctcttgtattaatgacaacattaggtactgggtagtattttagtcattattaaaattattattaaaaattctgttatatattgtaacgtattaaacatttgagtatgtgttgagttcatcatttgaatacatagtgctgttttaagttatttgtgtgttatgaagaaaaggtcactatgttttatttttataaggtggaaaaaacaatccagaatgataatcaaagccaaggtagaggaacttgttaaacactttaaaattagacttccccccacccccag

SEQ ID NO: 133130 - DNA, 2752 bp, Homo sapiens
tcaaagacacaggaagttataacaaagtataaaaagaaccgagttcacatttattgaaaatgttgttatttaaagcacttgatgctagcttgtgatgatgagtgatggggtgcagtctggaaggaaaggcacagtgaactgttttttattttggaaacgaaaatgccagtctcagtgttatgatttcagagatgtagatttgtcattaagtgtgcagtacccagaataattcagttatttgatctaatgtaagaatgtaaaacaatccatcctgtaaatgaatgtcctggcttttatttcctatgcaggagtcctctctgtttcgaaagtcaaaacagcaattgcactattctggatttgatgttttgttaaaaaaaaaaagtttccgaaatctgatctgtgagatctgggccagtgacaactataagtggttgtctctttggcatagcagccaaatattctgaagtgaaattgtggatactttatctacttcaggtagtgtctcatttaatatatgagcagggatgttggcactgtcatcatgaataattgttgaatcacccatcacttgatgttatgactgtctataaggaaaaaggggaatttcccatcttataaaatgacaaaatttgtaattaaatgggaaactgtagtgttcctcataacaaagcctaagcctgtctttcaaatctgatacctctttctctaaataacctgttttccaaccactctggccctcttacttgtcctagaatctgtggtgccctgttatgttttcatatcttttttcattttatttcatcattctgcagagcccttcctcaaaaaagcttctattcatcctgtgagatgaatagacccagctaaaatatcacttgttctatggagtctttctcagactgaataattttattttctcccagaatgttacaaccagagtaatctttgtaaactacagatttgatcatgcctcaataaaaaagttttaatggtaattaacatttcatatcaaactcagtgtatcagcctagtggtctctgtcttcatttgtccagccgatcacatcttctctttgtcacagaacaacttgctgttatcccttcctctgagcctactttgtggtcacttttgccctggagtgctcacccgtctgtctattttagtcttcctcatttttaaagatctagagtctatgaggaattaagataatacaaagtggaaagtgttaggtgccaaaagagaaagaattcagttggcatacttatgttgtctttgcctcctctgttcaagtgggaggtcctaatgatagagcttgctccctcaaacttgtgtatattctgcagtctctagtacagtatcttagggaagaggtagaggaggagataaatttgaaagattagtaagaaagaactgagtaaaacctgggtttggttagataggataggtggtagagtgaaggaagaggcatcaaagactcgtgttcaataccttttttgcattgaattaattgatgattgacccttggtgtgtttgtcatattttccttgctctttgaaattcttttgcctaatgtgtgctaaagtagtctgaaacagactgcttaccacctgtatcttttagccttctacccactgagctccttttctattgcttcctatttttgacacatttgccacaccctcctccccacctgtattctctttttggggttctgtttcccatagtaatttaaatggccaatgaaaacatgccccagatgatactatttttcatcatgctctcctgccactttgttttcctgtttaaaagaacaaacagcaaaagaaaaagacacaagctgctagtttgtagcctagctggctctgatttctctaattcttgtctttgctgttctgtcattcttggtttctactgtttctttttcttttttcttttctttcttcttttttttttttttttttcttgagacggagcttcactcttgttgcccaggctggagtgcaatggtgcgatctcagctcgctgcaacctccacctcctgggttcaagcgattctcctgcctcagcctcccgagtagctgggattataggcatacaccaccacgcccagttaattttttgtaattttactagacacagggtttcactatgttggccaggctggtctcgaactcctgacttcaggtgatccacctgcctcggcctcccaaagtgctgggattacaggcgtgagccaccgtgcccagccctactgtttctttttctgtctgtctgtctgtctgtctttctctctgtctgtctgtctttctgtctgtctttctttctgtctttctttctttctttctccttttctctctgttgtccaggctggagtgcagtggcgcgatctcggctcactgcaagctccacctcctgggttcacgccattctcctgcctcagcctcccagtagctgggactacaggcacccgccaccacgcccggctaattttttgtatttttagtagagacggggtttcacggtgttggccaggctggtctcaaactcctgacttcaggtgatccacctgcctcggcctcccaaagtgctgggattacaggcgtgagccactgtgccaggactgtttctttttcttaccgcgctctgctcccatttttgccttcccatttgtgcgccaccattattaaatgctttatattctctcttttgattgggttacacgttcttttattcttcctattcttaatccttt

SEQ ID NO: 133131 - DNA, 1635 bp, Homo sapiens
ctgaccttgtgatctgcccacctcggcctcccacagtgctgggattacaggcatgagccaccacgcctggccattttttttttaaagttccaagtatattcctgtcttagagcttttgcaggtatcgtgccctctgttgtgtatgctttccaacctcaatatttacatggctgtcttcctcaattttttcaatcttgctcaaatatcatcagagagaattcccctcacctgtataaaataacatctttgtctacccttttcattttctctcccccttttcttaatgttttatatgcatatgtatgtatacacatgtgtgtatatatgtatttaatggtttcactctacctgttaaagaagaaccctttttgtttcatttctgcatccccagggcctagaaacagtactcaaatacttcttgaatgcatgactgaataaactggataaatatttgtgtttataagggaaatcagtgggcatatagcagcattaggactctggagaagtgtggagtagttaggtaggggtgtgttctggagagaataagttactggagtggacatgttcatgctaaagattatttgtgggcagattacttgggcagatagtaatacatgaagtcagaagcctttctggattattggtttctctttgaatccaccaaggacagtttttttttctcttcatttgaccccatgatataggattaggtttctttctttttctgtttcttcttcctgtttttttatttatttttatttttttattttttggcttcagagtgagcaagctttctttcaccctttcttggctctctggtttattgtcatagccagtcctttcctgccagcttgattgtcttccctctagtggctggctctcatctccctggcttcttttttgtcaggaagggtgttgtgtatgtgcactttatccctgaatgctaagagaggacttgtcaaactgacagttggtgtgactgctggctgccacttgacacggagaatgacatctaaaagtctgcatttgcagccgtggaccttcaagagactcatagaagaggctgtactttttcagtgagaaataaccacatctatgaacatttagtatttataatattaaaatgtatcctttcactaaactatatttagccctcatactgttcatcctatcttatattactgatctttttcatgtgataaataagattatgtagaaaacaccaagatttttcaggagtagtgtataataatgaacaaggtttatttcatttgtttcttgtgtgcattacatcattcatttccctcccattttgacatctgcaatggctccctgatatctactaaatataactatttaaccagcatctaaggcaattcataatatgccccaacctactttttaaaatcttatttcttagtcccctcacagattttctctaccctattccactggtttctaaacaggttttttttgaagcctcttaggcattcccttggaaaggtaggggtcaagtcaccagatttctatcctcaacctttaggctttaatctcttttgcatattttggtttctttaaaatagggctctataactaaaagaggtttgaaagtcactccatttgtctggtcagatg

SEQ ID NO: 133132 - DNA, 1025 bp, Homo sapiens
attttgaagataatgtaattactgctcaacctgacctggatagtgttatttccttgtttaaagggggcaagcaaatagttttagctaaaatgacaatataacagaaaacctgtagttccacaggatgaataaagacagacttagaaattatattggtaaatatgttattttaagaaatattagttaaaatttcaaaagcagatcattcaaggcagcaacagaacccttgttagttgctttattgatacagggatcctaatactgtctgaaaacttttaacaaggtgtcaaattcagaatatgctttttattgttagtaatgtctatttatctgatgattcatacttagtaaatgcataaatattgagtaaatgttttagattcattgatctgcaaggcagatggtataagaatagcctggatacatgaattctaatcctacttgtgctgttgttgactagtaccaatatgccaagttttcacctcctgagagtgcctttcctttccttattgtaaaattgattgtttctaaagtgttttgattataaaaatttctgatttattatcttgcacattgttttaaagaaatggatgataaaatcatatacttatttaatattgcatatttccatttccctggctcagtgcagagtaaatcaacaacattgaaaagctagttgggaatcggagatgatagatagctttttctaagtttttaggtccttaaccaatatttggtatgagattcgctcaatggtgtgtatgtgtgtgtgtgtgtgtgtatttgtgtgttagaattcatcagacaagaaaattaatttctattttagatattttacaaagaatcacttattcctaggattgttccccaagacatctgaaatcttaatttgcatatctatgtggcaaagctttaaatttaagttatccagtagtttaacataaaatcatactgaaacactcattaacacatttgagtatactatgtaagttcagaatataaattacttagtactgagccatgct

SEQ ID NO: 133133 - DNA, 1229 bp, Homo sapiens
ttatatttgttcctggttaataggtaagctgttgttttgtatatttttttattaagccaccttcctgaaaattatacatagtatttaaaaaatttataactcaacattaagttgattaatgaaaaccaaacctttataccttaaacgatacataattttgtggtagaggaagtggctgtttttctccattttttttcaccctaattgttgaaagcttcctatcacaatggtcaagtatttatcatttaaaactgagcagactctcaatactttgggggcacatttcacctaccccaaggcattaggcagaaatgctgaggaagctggaagacttagtactctgttctttggtcagcaagtgatagttgacctataattaattaatagaagaaggaagtactctcagtgttttgggtcttttatcaaacaggtatgttattcttaggatcttttcactgttactccctttctgctattctaaaatataatcctggagtctcttctttttgttgctggttgtcacatttctgcaaacagcaatgtattgtgttaatagttatttcattacagacatttctgcgttttggtttacatgtgttcttgccttatttttcttaaattatttaaaggagaggagtatgttttgtgcagaattgtgttgatcagacgtgtactaagcagttactgtgtacagtgcagcagtgaaagggaatgataatactgagcacttatgtgccagttctgaacagtatcgatgcggaaaccaagaatctgaaagaataggtgtcttgtcaaaatttaggaagctatggaatgtccatttgattctaaattctatagtcttaagccctggctacacattagaatcatctggaatatttaacaaatctcatagttttattgtactccccctcaccctcacctttcatctagccaggaaattgatttctacagatagggcctaagcatctgggtgtgtgggagagacatataattttttaaagctgttacatgattctaatttgctgccttggtgaagaacaggagtcagcaaactatgccccataggccaaatccaaccaatctcctgtttttgtactgccttggagctaagaagggctttaacttttttaaatgactgggaaaaaaatcatgacatgaaaattctatgaaattcaaatttcactgtctgtaaatcaagtttcgttgcaaccaaagcctttggtaaa

SEQ ID NO: 133134 - DNA, 1152 bp, Homo sapiens
atcgccattctatttcatttccaaatcaaatgttaatggattcctataggtaaggtatcccaaggaaatacttattttcaaagtacagatgctccttaacttacagtgaggttatatttctaaaagcccattgcatgtagaaaatattttaagtcaaaaatttatttaataagccatacccaccagacattatagcttagcctagcatatcttaagcttgttcttgtttttatttgtattattttattttagtcttaacttgtaaggataggaattaaaataataccaaatgctgtcattttcctcagcaaattttaggcatatgacctgggaaattgtgaactactttctcttttggcttttggacttcctgttgggttttgggtataatatgcttataaagatagatttttattaattgtgattggacttcttactgagagcactttctgaaaatgttaattttcttaattgcataccagtgttaaataatgagatcacaactatttttgaacaattagaggttatgttctctttaagaactgattctgtagtctctatccataaatctttcctcaccttgtttagtggtaaggtcaagtaaccattaagtagactgaaatatccccagatcaggcattcattcaccatcttttagtattgcagtggagccacagaattactaggaatggcagagaatggcactacatgaaggaatgacaggagactgacagggtcaagagaaaatgatggagggttttagaaacccaaaccaaaggaaagaaagaaaaaagaaggtaaggaagtggggattagagggtgttttttggtggttgtttttgttttgttttgagacggagtcttactgtgtctcccaggctggagtgcagtggcacgatctcggctcactgcaacttacacctcatgggatcaagcgattctcctgccgcagcctcctgagtagctgggactacaggcgcctgccaccacgcccggctaatatttgtatttttagtagagacagggtttcactatgttggccagggtttcactatgttggccaggcttgaactcctgacctcaggtgatccacccgccttggcctcccagagtgctagaattacaggcatcagccaccacgcccggccagga

SEQ ID NO: 133135 - DNA, 2036 bp, Homo sapiens
cgctagcttgttgaagaaagttctctaaccaaaggcaattctaattgcctttgaaaccagtactagtcaagctgtacagtagttttatgaagactgagcactcaacctggagttccttaaaaagaagacacaacaggaaggcccaagatacccttttgcccttcaaaatgaactgccagtgcccctgctttcatgccttgagtgaacatattccattagaacaagactgtacttttggttttacttaagaataactctctgagaaatgtgttgtttagcaatattcctttcaaattcacaagcgctaattgaaattactctctatgctatctttctagcaagacttaaggtttcatgaatagatagtgatcctcttctcatgtttcagggttctgtcttcatactctgttctccttcctttcctccatgtctttccccttgactgtatcacttaaaaagctattctttaaaattagtgatattgcttctaatttatatatttcatctccttaaccgtactgtaaacctctctgagtcaggaagtatatgtcttgtatttattttgtattttcacacaatggtcacttagttcaaataattcataaatttttggcatctaggttagaatggcacaaaataaggcatagttcttgtcttcaaagtgcttttaacctttagaagagatgtgacatgcaagtttaatatgcaagagttattaaagagagcacaatcagtttctcctcaggaaaacagtggggacagatggtattaagagccatgccttagtagcactggattattgggatattttaatgtgtgtatttgctggatcacagcattataaaggagacatttaaagaaaacactaatgatcgtaatcccttctatgtataattcttggtggtgggcaaaactcattcccgttgttatttcattttcgtttcattaccctttgaatcaacggatcacatttattatgaacatataaaaatctcacctatttagctttcagagttttgttttgtttttcctaattgccttgatgatcagaaaacagaaatatcagagtcttgacctctctctgccatgatcttttgtgttgagtttagcactcttgaagaaaggagagatttgtttatagcatctgccctgacaagtcagtactgattctctatcctggttaaccagatttattagtgactttcttataatactattgtaacattacttttgctttccttctccacctcatgcaaagagaaatgaagtaggaactttttgcttgtttgacatattcctgatttttttgtaggtttctctgaggtgatgtagcttttttggacagtacacctgctatgatatgtaatagtttgtactgttttgctaagtgatttttcttcctttaacagaagtatattttaactgtttggtttcttttttctttgtgttccaatattctttgaggagaatagaaaatggaagaagaaaccttagtaaataagttttttttgtgttaccgagaaactgtttaataataaatgtttcccgatccacttgatgtccacttttttaaaaaatggcctttattgaaggcaaaatttggtttcgattttgcttagatgaaattgcattattttgctattattcaggagactgtttctcacctggttgatcatttcaactgtttctttctgtgcttcaaatcatgagaatcccatttgccccaccgcagacttggcatgtcgaataaatgtgatggcagcaattaacatcacgattgcaatgaaaatgtaaaaaggaaatagttgcaaagttgtagtagggaaaacaaaagctggaaaagcagctttttataaataattatgaaattattttcatttttcctacataggattgaaaagtaaacaaattctctggttattttacatgttgattgtttctgccatatagcttaggactctatatagttgtggttagttttgtttttacattttaagaacaacacaataaattggagtcatcagtgttctacatag

SEQ ID NO: 133136 - DNA, 1002 bp, Homo sapiens
ttttctgttaaaataggttttggtttatcttagtgatgctgatattttctcagattttccattagtattttttctcccatctgaataataatctgaataaataatgaactggcttttgttataggggtaggtgcatagagcatccaatagcattccaaatatttggctgccaaataaggaaatcataactgcttatttgtattaaattagtattaaataaaatgattaacattttaaaatgttttggtataatctacatgcaatccgttaaaatttccaaactaatgtcagattctttattgcttggctttctgccaaatgatgttcaaaggaaattgagtttttctctagcatctaaggtaaatggaaatgtatgtgatgtttagctttgactagagagttacaaatggatccatggagttttggttatataatttatatgctatatgtatgagggcacttccttgcttcccatgatacttgggatggtgctgtcagtggagcaaatgtatgcttatgccatcttgtccataatatgtatttctgttgctatttgaactattaatgctatgtaataccaagtacttatatcagaaatttgtactctatgtagatagtgcttttgaacttctttctgatagtacatattcctgtattaatacaataaagccaagctgacaggatgacatagtgaagctcttattaaaaatgtgttctaattgttgctgagatactattggaaatctagagcttgctgcctcaagttattttaaattgtgtattttatatttacattttacatttacatattttatctattaagaattgcttttaaattaaaagctttacatacgcttaaacaaaagtatgaaagtatatttgaacttcaggaagcaattctttgtatcagcaccctgaatggttttgtattaaggaaagccagattcagtgacaagtttgaccctcacatctggaattgccattagagaaaagcaatcatct

SEQ ID NO: 133137 - DNA, 1122 bp, Homo sapiens
tccaaattaatacagcttttaaaggaatcgatggataagccatttgaaatttatatatatttgttttatgttgatgtcatagatctaccgtgtaaaatttaaacattatgaaaacagattttaaatatttagtaaagccttctctggaaaatgctaaacctttgttttaaaattatatctgtagatatctggtcactaatactgtgaaattatttcagcattgagtattgccggctacaagtgctttggaaactctttagctgttcatttttggcaaaatcttactttttgaaaagaccttattttagaggagatatcaatattgctttctcagtttttcaaactaccattttgtaatttattagtaaattgtaagtgccacagaaaccactgtgcagtattcaaggtccttgcattcagggttaaaactgagtttatatacacacatactaaactcttacaaagccagggaacaactattcaaactgcactgtggactatgctagaggagttagcatgctttctttgcagacatggttgatttgaatacaacaacaaaaaattgtccagactgccaactgaaacccttgaaaacacttttcaatctgtagatacaactgtatcagcaaaatgttgatcaaagttcaagtggaaacattaactagtctagctagccttctggtgttttcattggttaattcacaaagagcatcgcacagtggatttttacgtagtagtaacaatttgctgtaaaattgtatggtctgaggatatgaccgtagagtttgtcttctgtgtctccaaacttactatcctgtacatcttgactcattttattcatttttcacttcattaaacaataaggatttaccttaaattaagcatttttttggtatgtttattgtctcctagtggtcctttgtaatgccatatggttgctgcccagctcgacttacaaacttactctttttgcttctcatactagccattttgcaagcctgagctgctttgtggtacaggtcaagtacttatggagtaaagttaagtgaatttttattgtgcaggaatgtcttcgtttaaagaaaaaaaaaaaaagaaagaaagaagaaaaagactgcccca

SEQ ID NO: 133138 - DNA, 1060 bp, Homo sapiens
taaaatatactagcaaattattagataagcaaataatttcttagaagccatataacagtaaactaaattcaatccaacaaactattgttgagcacctacctgtgcagagtggacaatgttaagcagtagaaatgtgttattgcctaagagtaactagttcgtagcctaagagagagtcagacacataaatggatacttacaatacaaagtgtaagtaccttgatagatgaaaatataggacatcatggggacgtctaggactctgaattcacttttgggaaatcaggtaagacttctttactccaagacttctttcctccagaagtcttatctgatttcccaaaactgaattaggacctgaagaataattaaaataagctaaacagaggaaggcctggaagagagagagtgttgttgcaggttcagagaatagcaggtatatagccctattgctattgcttaagagatttatgtataatttggtgtggctggaccataggttttaaaggtaatggagaatagtgagacattagtctggattggtaaagtgagaccagattatgaagggatttataagaacgatcagaaaaatcaagaatatctcaaagatatttttagtaagatagtgacaggatcatatttacaatttacaagtcagtttggcagaaggcaaagaatagcaggggttgggcagatgatggcaagatcaaacttaaagagactgattcctttctaaaatagatgagaggtcatggtactgttcttctggatagtgaatactagaggagaatcaagtttgaaagtggacaaataatagtttgtttttaacatttgatttgaggtgcttgtggatgatctaatttgaggtgtccagaaaggaactggatatatgaatatagagccaagctcaagagagaatgaagctagatatatagattaggaaggtaatcagcatgagaatgttaactgaacccacaggagtccacaagggtcttcagggctctccatctttagcatcagcgtatgataatgattttgttacctaattcattatgtttca

SEQ ID NO: 133139 - DNA, 1062 bp, Homo sapiens
ccgtaattaagcaattaccttttaaccatttatgtaatcagtattgcttttgttctttttcagtttttttctcctaattttagtcaaggtaaacatctaagcagcaagtaatatactgatgaaaataaattttgagatttgtaatctagtaatttgtcttctgagtcttgtgttaataggaaccagaggtcttagtaaatgagaactatgattctgggtgcttaaattgttttatccgcacactcattgcgtgaaagatttcagcctataaggaagaaattatgtcagtctagagtctcctcattgtagaaaagttcccatttttatacttttgatgataacaaagcagctccattggattgtggttgacaatagcaatctgtatgtttttgctagcaacatacagatcataagtagaacatatttcagagttacacatgatccaagagaaagtgtgccgaattttgaacttggttggtagaaaaaggtgatttttttttttttggtaaagagatttttttagataaactctaagaaagtagttatttacagaaagtacactgaagtataaaaagatagtaaacatagtcataatgactatagttgctagctatatattcagtttatctgagggggcaggaactttagcatcatcttgttttatgaactctaatttacttatcaataatttttcttactagttacttgttgcaataacttatactattatacttcatgtgtggttttgatttcttaatggcagtatcttctttattagttgactatgggaaatatacaagtatagtgtccccttgtttgcaaagaaagggattcgcgtcttcacagtttactcacagctgcagtggtgagctgccctctcctggtcatctatgccttccagaactcccggtggataccagggaaaatcatacattttgccaaataaatggatgttttaatcatctttgatcttaacattattttgtgacactgtagtataaagctctgctgtagctccttacttttcatgtcttaaaagacattgttgacagaaaagatggg

SEQ ID NO: 133140 - DNA, 1028 bp, Homo sapiens
tatttctgaatttatgtatgtgtgtggcagtgtagggtagatgataaattttgtagcctaggaaacctgtatcccatcaggagagaaaacagatgttcttcctcctggttaagaactacatctatccatttagcaattatgaatctcttccctaggtaatactctttgagaaaggaatctttcagcagacaggatcaagaagcacatgattcattttttacattatgggaatgaatccttttacatttgccttctcctttttcatgctttcagtttaaataaaagtaagtagacgttccagtttaaatcacgttccagtttaaataccttacaggatgaaaggtattctttacttcctaggatcctaggattcctagtaaagggattctttcttacttcctaggatcagcgaattggagacactgtcagagatcacgaaagaaagttcgtcattcctcccatccccaatccagttcaaccaacttgtttctagccatgtttttatttaatagtttctgattttagcttgttttgattgaaattatattatccaagtcttgtttatgtttctctgaaagtggccaaatactgtttgttctacttaagtagtatttgcatctttttctgtcctcatgctaccactgtagttgaaacccttatctcttaccaaaacataatctgtcatctcgttgcttctctaaatttcttccatattgctgttggactgatcttcctaaaatagaggtctcatcatggctttctgttttccagcgaccattttcctttttcaaaggtatcctattgcctttaaaattgaggatagtgtgtttagcctagaattgacacccctcagtgttggccctagtctgtttttttcaggctgtatgccatagcactccttcacatgagccaaactggatggttcaggctttgatacttcactacctcttttctcatcctcaaatcagtctctgtctttgtgatacccatcttctcttccttcatcccctccccaaatccctgcatgt

SEQ ID NO: 133141 - DNA, 1030 bp, Homo sapiens
ggtaattatagaaatttgaacactgatgaacatctgattagttattgttggtttttaaatatatgatattgtattatggttacatttaaaagagtccttatttatcatttgtttgtttgtttgttgagacatagtcttgcactgttgcccaggctagagtgcagtggcacaatctcggctcactgcaacctccgccctccaggttcaagcaattctcatgtctcagcctcctgagtagctgggactgtgggggtgcgccaacatgcctggctaatttttgtatttttaggagagtcgaggtttcaccatgttggccaggctggtctcaaactcctgaccccaagtgatctgcccgcctcagcctcccaaattgctgggattatatgcgtgagtcactgcgcccggccattatttatcttttagacatagcatgctgaaatttttgcagataaaatgttttgcttaacaatagttcagtagaggacaagggtaagtgggtagggatacagatgaaataagattggctgtgaattaagaattgttaaagctggaactttgggagtttattatactattttttcaactttcatatgtttgaagttttccaaaatagtgaatgagtaagaacacacacagacattatacagaggggaagtgtcattaatgattttatctactatacctttttgtatcagaagatctggagaagaaacagaaatattaaagtttatttccatgaataatccctttactttcataaatatctgctgggcctggtgatttgaccagtaaatgggatttatctttttgtgtagccaataaattggctctttaatcttttctcattcacgttaactttctcttaccctgtaaagtgtgttgaatttaatgtttattattcctatgagttggggaattggtataaaatacatacataaaacgtgtaagaaaaattataaattgaacacctatgtaaccatcacccgggtcaagaaataggaccctttacatgtttcaaagctgtgtggta

SEQ ID NO: 133142 - DNA, 1053 bp, Homo sapiens
tttgtttatagtgacacctatatggtgtatcaagtttatgcatgcaggtcgttgggctacgtgattgactgttcatgtacttagatcacactgtcttaaaaattagagctttatactaattattgatatctgcctggcaagtctttctagcatgttcttctcaaatttaacatttactttgataaatagttacatagcaacaattcatgtaatcatcacatactcaaaatacaagatattaccagcatagtgaaacccatgctctcaggatgttgcacccttgcagtaaccttctccttctcccaacagttgggccttatcctgacttttgtggcagtacttccttgattttctttgtagttttgtcactgataacttctcctaatctatattgtctagttttccttttttttttttttttttgagctttatattcatggatgcatccaggagatataattttgtatacatcaggcttccttaataaaacattataaagctgtggttcatttttttgttttttagttgatgtgggatattttattttgtgactataccagagtttattcactctgctctaagtgagcattttggctattgttaaccagtgtttctcttaatatgcatgttttgggttaatttcaggtaatacatgtaggagtagaattgtttttccctatggtatgtttatcttccactttaacatggaatggcagactcttttttcttttctttttttgttttttgaaacggagtttcactcttgtcacccaggctggattgcaatggcgtgatctcagctcactgtaacctccgcctcccaggttcaagcgattctcctgtctcagcgtcccaagtagctgagattacaggcacccaccaccatgcctggctaattttttttatttttatttttagtagacacggagtttcaccatgttggccaaagctggtcttgaactcctgacctcaggtgatccgcctgcctcagcctcccaaagtgctgggattacaggcgtgagccactgtgcccagctggcaaactcttttttc

SEQ ID NO: 133143 - DNA, 1075 bp, Homo sapiens
ttgtggcttgccttttcactctcttaatggtgtttttttgttttattttgtttcttgatgaacagaagtactttatttcaatgtagtcaaaagttatcaaatttgaattcatgctcaatcattacttacctactatgtgaccatggccagcttcgagcttcagtttacttatctgtaaataggtggtaataatatccatgtcattgggtaattgagaagattaaataagataaagcacttattatagagctttttacctagcagtccctcaatagatgttaattgccttcctcatcatttagggtgctcattttcatactgtcttttgggaaattgggtagtattcatgagctatttgcaaatgaatgttttggaaattagaatctcatataattatcctaggaatttagaagattgcctaaaatagtaaatcataattaatttgcccagagaactaaaatgtaatattttctctgatgtagaggatttacactgaatatgggatccttgtataataaaactcatgactggagtatcttatccaggaaatgagaagagataataaaaaatagtctaacccttctacatgcatcatattttaaaccaagagtagttctctttgcctccaagagaaaacaaggtttattaaatagtgaaaaattgctaatcactccagcccaaagtaccttctctctcctaggaacatttagtgcctattgatgattttcattttcccatatttcatcattcaacaataatttgtaggacatctcttactatgcttactatgcaccaagtatagactcattctttgtgtgaatggagctaagaatgaagagtggaagattttgtaaaaaagattttaattataacaccatgccaaaaaatttcaaagttctgctactggtaatggcggaattgttcataatgtaccaattttcccacaggtaattctactctggatgaagcttatactataaatatttagtacataaaatctaaatgtttatatacacacacataattgaaagcacactttaatgcttcaaaacataatctggccagacctggatgg

SEQ ID NO: 133144 - DNA, 1715 bp, Homo sapiens
aaaacaggtagaaactgtttaactgttttatttctctgtgtatatacatatttatgtgtgtttatacacacaaaaaaataccttttttgcattttatgtagccagtcctaattacatttgatcaatagtgtttgttaaatttttttaaatatgtaacaaatatgaaggtttttcttgtttttacagcttttttgctccataaaagtatcctggtttttatcaggacatattatatgtattggaaatgaaagtcagcacggtgtgagtttaaatggttaaaaaaaaaatggatttttatattacctctgcaggagcttctgttaggaccagctcatgtattttgtattttttctgtataagggaaactgctttaaatatgaaaagatggtatcttaagttggattaaacatccgtaattcatgtgtatttaacctcaggacttgtgagccttgttgaaaaatccagctttaaaccttccctgtaggcctcaatagtgcatactgcattgggattataaatagtcagtctgtttctggagtgtaggttagtatgtattcccaggaggcatgaactatttacatttctaacaaatgtttcacatatgttgctgattcatatttctatgtacaaatttaggctttaatttttttaatttccttttttattagaagttttgttataaaaagtttcttaagtgtttcattctttctagcatgggtggcttaaggagattggaggggagcgtttcatttatttatatagagattttgatgttttgaaagacaatagaattaatagagaaaattgtccagatatccagcgcttggatttttgtttgagaagtttgaggaagcagatgccatttgagttggtttctatggaaaaatttatcttagagatgatgtagggctatatttatgttcacaaatgagaaattgaagctgagagaaagagaaaatgtttaatacataattactcaatatgtcttggaagaacctaggtttttattcatacctggtgtttctttataaactgcctctcttttatcttgagatggtattttcgaaattatttctctttctcattttcttctaccatttcctgacattttcttgtcttttgttctattcttcttcgtctcttatttttctatattggttgtactgtaaataggttgctagcaacacaccttaggagcaggcttttggggaatgggtctaagtattccatttggcctataataggctatattgttgttttggaatataattttgaaaaaatcaaatttatatttatcctgctagttgatcaagctataaatcaatcaatacttactagttgctgcttatataaatagaagagttaaccagtgactcagacagatgacaattgactattaaagatttttttaaattggcatatgtttaggaaaatcacttgtttcttcaaaatttattcattaagcagtattttttgagcacttactatgtgacaaacaccacacaggtgatagagatacaacagagaggaagatggaactggttcctgtctccttacatcctggtgtaattatataataaaagttaaccacaagtagaaacttggggcattatttttgtaaaatctcagtcaagtttctctctacatagaagactagtataacttcagataccatcattcatatccatatcagaatatagtcctatgttaaaagt

SEQ ID NO: 133145 - DNA, 1015 bp, Homo sapiens
ctctttatatgtattagctgtttttatgtcctatattctttttttattaatttaatcttgattctctttttccctccctccctcccccccgttcccgccctccctccctgcttccctcggtccctccctcccccttccctccctccctccccccctcccccttccctccctccctccccctcccccttccctccctccctcccctcccacctccctccctccctccccccttccctccctccctccccctcccccctccctccctccctccctcccccctccttccctccctccctccctccctcccttccttcctctctgctgttgttgaaacagagcctctctctttcatccaggctgaagtgcagtggtgtaattactgcccactgcaacctctgcctcccgggctctagcagtcctactgcctcagcctcccaagtagctaggactacaggcatgagccaccatgcccagccatgattttctttctctagaaaagtctgttagtggggatttgaacattctttttgtattatacatattttctttgaggtgtcatacattaaaatcaatttcttcaaaaatcaggatgagcatttgtacaaaagtatacagtcaactaggatgaggttttttaaaagttgttttccttttaacataaagttgtatgtaataatttccaatccctcgtgccttcttgcttcctttctggcaatctcaacttcaaatcagtaatacttattataggtacattggtacctataataacaaagcgactttgttctgcaaacgttggcctaagctttgaaaaccatgagccattgagttttatgaattcaagttagacggtaacagaggccaagactctaagcaagcaatatctgaaaaggaagtacacaaaaacaggtagaaactgtttaactgttttatttctctgtgtgtatacatatttatgtgtttttacacacaaaaaagtaccttttttgcattttatgtagctagtcctaattactat

SEQ ID NO: 133146 - DNA, 1045 bp, Homo sapiens
agaggtgtaagtggttgcctcttgggaatgggagctggcataaggaggagagaactggtattgtttcttacatggtattttagtatttttagagtttttaaaaaccatgtgtattgctttgataaaaattaatagtaaaatatgaaactggatttagagagaatctcgctggtatgtatcaaatgaaattgaaggcacagggaaaacagtcttagatctcaggtgatgaacaactgtaatgactggaagggggaaccaaagtactggcttggaaagacattttaaaggaatataatgtggaattttaagacctattctgattggacaatgggagtgaaatattaggttaagatgcaaacaaacctgttttgaggcactcataacaataggggagaaggtatttatgcccatttcaagtggagttggaatggtaggttgtgctttggatatgttatagcttgcaatgaatgtaatataaacatttgtgatatatcctgtaaacagtttgaagtgtgagcctgaacatgtttgatctaaggtctggaggaagatgtgaagcaaatctgacctaaaaaaaattataggaaaaaagcaaattgttctggatttgtttcaccaaggaacaagtaagcagagaaccagacactggagaaaaaaaggagtcaggaagtagacaaggaaatgttaaaagaaataataggataactgaaagaatgtagcttccagattgctagctatcagcagatagatagaaacttttatacagcctttaaatcttccctagaaacctttttaaaagtagcttcttgattagatttaaatgggttttatttatgcttgtcattttacagatattgtaaatatacatatggtatattttctttttgccttttgtggacagttggaggtggggaacaggcatccatagtcagtatatttaaaggaagaaaaaacaacttccataatcttgttatattgactgtttctgttgatacattttccctttctttcttgtttcttagtatgatttgagggtcattttaaa

SEQ ID NO: 133147 - DNA, 1048 bp, Homo sapiens
gagtacaatggcacaatctcggctcaccacatcctccgcctcccaggcgcaagcgattctcctgcctcagcctcccaagtagctgggattacagacctgcgccaccacgcccagctagttttgtatttttagtagagatggggtttctccatgttggtcaggctggttttgaactcccgacctcgggtgatccgcccacctcggcctccgaaagtgctgggattacaggcatgagccaccacgcccaacctctacctctttttaagagaacaagagagatcataaagttcccctgtggctaggttctaagttgaacagatataactaataattctcttgctttatcaaggtaatggaactgacttgaagcttgatgtatctttatttgcttatagttgtctttaacaagagtagtagatggcttttatttagcagtgaaacaatttttttaattcttgatttttttttcccttaggcccagatagctaataaccgaacacctggaagatggacccagcggtactattcagccaacaaaaacattatctgtagaaattgtgacaaacgtggtcatttatcaaaaaactgccccttaccacgagtacgtgaaatatgctttgcttctttccacatttgtaaactcaaaatctcaagggtgaggctgggcacggtggctcatgcctgtaatcccagcactttgggaagccgaggcaggtggatcatgaggtcaggagattgagaccatcctagctaacatggtgaaaaaccccgtctctaccaaaaatatacaaaaaattagccgggcgtgatggcgggcgcctgtagtcccagctacttgggaggctgaggcaggagaatggtgtgaacccgggagatggagcttgcggtaacagagatcacaccattgcactccagcctgggtgacaaagtgaaactctgtctcagaaaaaaaaaaaaaatctcaagtgtgaaaccctataaccttagaattcaaatctttttatagtatgtgtgttaaatttcatgtagcttacagcctagtgtcgga

SEQ ID NO: 133148 - DNA, 1017 bp, Homo sapiens
cttgcttctccagtcaaaacagcttcttctgtatctgttcctcctatgacttagcttctagatatcctcctcattctactttccctcttacatacctttcattttgtcaatattcctataagaagaggcataaggaatatatgccagctgctagtatgtacagactaagcctttttggcaaacaatatacatacagtgttttggacattttgtttgatttttacagttgtgctcaggattctacctttattgggatctcaaattagaaaagatttttttatgggattatattgaaaaacaaatactaatcttctaccttttgagactgaagagattttatgtttttttcgccacatagaaagttcgtcgctgcttcctgtgctccaggagaggacatctcctgtattcctgtccagcccccctttgcgaatactgtcctgtgcctaagatgttggaccactcatgtcttttcagacattcctgggataaacagtgtgaccgatgtcatatgctaggccactatacagatgtgagtatcctgcatataactaatttgtcaggctttggagggagtgtgcaagtttgtaattaatgtgcaagtttataactatcagtcagcatacctaaaggaatgtttactccgtgagatatatatatatatatatagtcatgtccattttgtcactgaacatgtatataaagcagtgctctaaataatataggggtaaggagcctactgaatcagaagacagcatcaagagatagcattaataaatattttaagcccattctagccctttttctttataagcttgttaaataaaggctgaatttaaagaggtaataaataacatgtaaaatttgtgtattcatatttatttatttatttatttattttttgagacatagtctcactctgtcacccaggctggagtgcggtggtgcaatctcggctcattgcaacttctgcctcccgggttccagcgattctcctgcctcagcctcccgagtagctgg

SEQ ID NO: 133149 - DNA, 1942 bp, Homo sapiens
tagaaaaaaggaatacataagtttgagttgaattaaagaaagttgtcttaactttcagaatagtgtacttttctttttcatcaatgaccaaggtattttaagatttttgtattccagaattttaatataaaatacaacatcaggattatctgatccagtatttttttttaacaactaaaaacatcgagtagacttcggctgaatgtaaaaataggtacattgcacatactagatgcttattgatgtttctgaatttttttaagaaggtggccacaaacagctgtagtctaataaaatctgtattttattcattttgttcattgttttattttttcctctattatgtctttatcaacaggtcacctaaactgagtttcttctaggtttgggcacatccaagagttgaccttggtacagtagattcatttatttcagctactttattgatgccaatatttccattatttatttctgcatcagcagtatggggagtgccaaattgatgttgtcataacaatagttaatacagtggagcacttgctatatgtcaggcattgctctaaagactttatacttatcaaccccttaaatatcacaacaatcctttgaggaggtactgttagccccgttttacctatgaggaaactgagacacagagatatataacttgcccaaaatagtaaatagctggattagaatccagccatttttgctctggattttctgattttagctgctacattatcatgctacattttactagctcttacaaggttttactttacattaccttaggtcatcagtcagcagatttactacaaatattagcaactatttgtgaaattaaccttgaaatgtaatctactgataaactttgtgccttcataactgtacttaagttaggaggagaatatcaaagagaaaaatctttgagccagaaattaagcttgtcagtttccctgattacagaggattaaaagtataggaattgattaaaatttgaccttgggtggaaagatgattttatgaagtctggttcatcttggaggcagcttagagttaaagaccaatgcatggctttccataccgattggttaaaaaaattatgtagattttatacacattgccacttacatcttgtatgtttgtagctcctctttatcaagaatggcaaattttcatgcagaatagaagtataataagcattattaagacagtaacttgtcttgaatcttaattgtatatttctatgatttcagacctcagagcagtctttatgtggaattttgattgacggcaaatgctaggatgttcttttcaaaattttccttctaggagaaattatatttcacgtatactcaaagtatatgtacaataggatacaaaaatattttgtgtagctgaggaatagtgtatatgccagtgattaccaaagtatcgggacaatcagatgacttggtagctataagtctatgaagagcctggtcttgaggcttcagagtaggggcgttctttttaataaaggcacctaaacttatatttgtgtgcatatggaacagttaagatggtggttgagtccagagactagaatggttttcttgccatgtgttttcattcaacaatttttaaactgaattattctctttattctttatttatgttattcactatcaatgaatattgtttgttttattaaatcttttgttttgctgtagtgacttgagggggccatctcctaacaacagaggctttgacaaagcaccagaggattctgttaaaaagttgtgtttcgtaattgtagttgtcgtgtcagagcctaactgacttggagctgaaggatttttgtgagatgagtagctgtgccagcagggacccaagtctcctgggctggccgcgctctcattaagatttgccgctagcagtggcggtgttcagcatgtat

SEQ ID NO: 133150 - DNA, 1001 bp, Homo sapiens
gttcaaaaaccaagtaattctttcttttattactaaattgctgcaacacaagaaaaggtcacatggtagagtggcattctgccagtgtatgacaactcagtgattgcgatttttcaaccgtattattctgaggacactgtggtaatcaagaactatccataactaatgtataaataactgcttgcttatttctacaataatccaactcaaattatatatacacagcaaaaagcttatgatagaaggtaggaaatgaatatttaaggatatattgtacattagatatttgtgtgtatacatgtttataaaaatagatatttcttgtatatattcttaagaacttttgtaacaaagtttgtggctacatttggtaactaacatgatctttgccttatgaatcaaccttttactttttaaaaatagttgtcttttcatcagtgttgttcatccagaaatgactggatataataagtgggtttttttagtaagacactttagtttccaggaatttgatattaaaactggaaagctgaccactaaacagtctttcctatagaaagctgtgtagactgctttctataggagcagtctacacagctttctataggaaattacacaggaaagttaaaatgcgtaaaggataaaatttttcagcatagatatgtttcagcatagttgaaacatatctacttttttgtctaatcacttatggtggtataatcagtagaggtattggcattcaaatgtttcttaaattattatcatagccatgatattttcagattgtatgaattacctttgttagtcttatcaatactttgaaaaataaatgaaagaggaatgacaaatcaagtaaagagttgtttcaaactaggtatcaaaaattacaaagatttcagaaagtcttactctaattttaggcatgcatctataaacaaaagctataaatttccattcgcttttaagaatcaccatttcctttgcttggtgttttaatttat

SEQ ID NO: 133151 - DNA, 1960 bp, Homo sapiens
aagcattgattaattactttttctaaccaaaattgtcatatttcttaccccaaatgatggcaaagatgattagtatccagtttggagatgtttatatttgggagctttacagttgcttttatctgcctcccaactagagggtcatttacagaacgacttaaattttaacagtaaattaatgtttatccaggagtcgttttctttaaaaaccaaaaaagtctataggttaaacagaatattgtttctcaaacacataagaaaggtggtgtagttgattgttacaagtggacttttgaaatattccaaataaaaaattccttaaaacactttcagaactaagaagaaagttatagaagtgttcactattttcaacaatttcaagaaaaataaaatgaaatatcttcaacaacctgtatatgaatataatagctttttaatcagctagactcgactacattaataaaagctaaagaccatcattctaaagggttcatgctaataaaactaaaaagactacatatacacaaacatccatattataacaaccatctggtgacaccatctttctatgttttaatgattctataattatataatttaatgtctttatcaatttggagaccatgaaaaaaagaaaaaaatattgtttttacttaacaagtacataatttcctcaaatagttaatatttttacctccttcaaaaatgtttagaatgcttttaaatgtttaataatatagctaaaatataacttcttgtattttcatttctgctacattttcagatttttgtagagcctgacttttaatgttctttttcatctttcaaataactcattctagataaaaatttccccctttattcgagaaagaatgtcccttcccccaccccctgtcatttctactctcatttatattaaaaatcctaggccaatatggccaccaacagagttttacaaccaacagaatttttaactagtagaggctatgatttgacatgagttggacatttggttaatcttgtttttaatctacttactttaaaaagtaaccaggagtttgctatttgagggctgtatgtgttaagaatcgaaaaggacaatgcatcttttatgtttaattttgcatttgatttctttgtgtgcattgttaaaatgtatttcaaccctactgccttttattttaactgaaggtttaagcaggaagcaaatgtaactgttttagaagaattaagccttaattgtttttttatatataatgttttgaatgcctagaattcacacttcaaaaaatagactatttgttatccgggaaatggggaagagtagagaaatgagtgtgcttgacttcctttctggcctaagaaaggcttatggccacagtttgtcagggtatatcttataaaccataagtaacaatattacatttcattttgccacttagttttctgtccttacctggaaatacccatttagaaatgtattttttgtgttttcacagtttggagttttatactgagtgagaatgttattctctaaagcattctatgccatactacagagtgggtacccctaaatgtcaacagatttggatttaactctagaactatgttttacactccagaaggaaggaataagaaggtggttttggttctgagactatagctatgcaaaagcctttatcctgagattgtgatgtaagataggatagataattttctaattgcctaatgctaatatggaatgtttttcctttaaaataacttaaaatgtgaaatgaagagattcaaaaagtcagccagaatcttttcttttcctggttaattggatatatgttgggattcctaaatatctttctgagaggtccttggctacataagcagatctgtaaaaaccataataaccccatccacacagtagatatcaagtgataggtctgtttttctctgtgtgcgctttggt

SEQ ID NO: 133152 - DNA, 1027 bp, Homo sapiens
taacatttcctcagatatttagaaattgtatgtatgcatatttatttgtgaatggagttagaataagatcatttagatttgggtgtaatttttatttattggagcacttgtgagaaccttagtattttcttctttacaaagaaatactgaagtgttcactccttcaattctgaagttacttgattctcagtattttaatgcaaatactaatttggtttaaatgggaaatcaatatggcatattttgcatagttttttccttgcattaatatatttagataatatcaagtactttatgatggtaatcctaatgtagatttaagtgtttcagataatgaagcaatgagaagtatgcagccttcactcaatttaggaaagatttatcataaatgttttggcatagaagcagctgtgcttttgccatcttctaaatatctttaatgacctactcactagtcatcatgaatttggctcatatttttagatattagatgttcaataatcaaataattgaatctgaagttctactataaatagtgacttcctttctttatttgacggaaaaagtccctgtgctttttattcctgcccctagtggctaggggcaaagaccagtatatttaggacttaaatatgtctcacatggccttaaagttgtacttctgttttaaaaatggaaagaagtacttgttgtggtcatctgttttcttatctgttaacaaatgtttatcctgaggatgacaaatggagcatcacgtttgcacttttttttattaccctttcctctcttccccatgtgtgttcagcattacttagaaaggaattatagttagtcattatagggacaatttattcttgattattaaatactgtggtaattaaatttcatttctaagtgcttcttgttttaacatatataacacactttaaaaatcttttttaaaacccacagtattcatataatctcaaagaaaactacatttctttctttaaaaaaattaaaatatggaacacttcatgaatttgcg

SEQ ID NO: 133153 - DNA, 6165 bp, Homo sapiens
gcagtttgtattctttcaaagagcattcctatttcatgtttgttccttgttttaagacaagcaaaggctcagatggaacatattgtaaaagcaaaagaacattacttcccccttctaacaggtccttgcagctgtggaattccctgcctttgtgatcgatggttaagagtattacagtggaataagcagagttgggatggcaggtggtgggagggccatgtgttgtaagtcatgtggagttatggtaaaaatgaaaatcttggggtttatttggatcccccatgtattagctaataaacgtaatagagctatggttctattcttttataatttttttattggggttcatgtacaatcacatgcaaaatatagtagcagatttgaatatgttaagcattttgtatggttggaagatgtatattagtgtgatttctgtgttttatagtctagcccaataaacattcagataaaatgtccatggatttacacatttatgtgttcttttctgtcccttccccctacatcctgtctccatgccttcatccctctatcctgcatcaaagcttgtggtccttctccatccatgtactaaatggtttctttgtaaaccaagccatttgtccatcattgtttggggtccaaacagtggtaagataccctgtcaccgatcccgcatgctatgaatggcagctcctctccggacaattggcggaggggccgagaaatattcctgagaggattatttaacctttcaatttagagggcacaaagcctggctgattaatgaactttctgatgggtgccgataagcggatctatttctttatttcccctaaaagtgattccttcttctgtccatattactataatcttaaacataaaatgtggcaaatagattaaaaaacagcactaaagagtttatctggctggcaaactgaaggagctaaattaaaattggtaatgacagcagtggctcagcctcatatatggtttttaaatgcactgtgtattttgaagagacttattctccagctcgcctggtaatgactgcttttggtgcacagtctggggctggcttctgttatcccaccccaccctacccacccaccccccccccccccaaaaaaaatgagttgtgttatctggatggctgcagacacatacgcatccccctttctcactgcatgggcagacaaggtcgatagcattacaaggtatttgtggcagtgcttgtttcagttttcagagctgccagtttccaggcggatttgaattacaaaagaagaagctggcatgaaaattgaaaggttttatcggctggtctgaagcctcatagcacattgcttatttatgcagtccatttgcaccaggaaatataaaaaggaaatacatttttaaaataaggccataaagactcagatatgtttaagatggcaaataaaatatagatacctataatatctttccaggaaacgattttcacttaatgttgcacattacttcagaagagcatttatgttgctgtcataaatttgtgcgtttgtgtcactatgtaggtagtctctggggattaagaaggaagcctttgctaacttactttaaaattaaaatagacggagggatagctctgcagtttgagagctacattggaaatatttaaatagggtggtatattaaacttaaactaacatttttgcattccatgtaaaattagctatggcccaatgaataaatgctactacctttagagaaaattgggatgctttttaagccatgaagatttggagcattcaggaagtgaattactctgatccttactgtgttgcgtgtgttcattgttctctgcttactgaggttttctttctgttgttggagttgttttgatagggggagtgtcctgtttacaaaaagaaaggttataaattaataagcttaatagctcatttttataaaactcgtgcttctttttagttttcagatatattttagattttgcatagtggttaatgttgtgaatatataaccctttcactattggaagttataccaataatttatatctatttacattactttaatgtagttttcgatttactgaaaaagatacaatgatgtaatcccttatactcttgactacataaaatgaagacataagtatacaaacataaagtagtgcaagaccttgagtgattggtcattcgcagcttttcaacccattggtttataaaatttcagtgtatccaaaagagaagtagggaggaagttacagagatacaggaaatatcaaataactaaagcaacacacgttattctgcagttcaaatgaacactctttaagaatcttttttccaatatggcaaattactctcaggtaaaccatgagagatgcatttttttactatttttattttcactatttttaccagtatctgggtacctttcccatgttttcacgacctcgactaattacttcatgtagttgttttttgttttctttttaaacagagaaaatatcaaaagcatacatgtctgttgcatgctaatgatgtgctgtacattttttcatgaattttcataaggattttttctacgtagcatgtgtggcttaatgatgtaatcacccgatagactagaaaatgctccaaaggagacgttccggtctgttgtgtacataatacatgtttcaaaaatctgcctaattaaggaattacccaatggattgggagtctgttgggtacatgacatggttttttaacacataaaagtattatgtatatatggtacacatggtacttttaatgccatttttaacatatgaggaaaattagtagcaatgtccactagaatacaggggaattctgttttttcactaagcaaaaataaaagctttaaaaacagcactcttttaaaataattctaaagccattagcttggagaaaattcctcctagtattcctgaaagggaagtaatactgtcaatatttgccagaacagtgtacaaatggaagactttgtccaaaacctcagttgaagtaggcctagagttcaggtcccaggtgtgaggatccacctcagaaaaacaccttaaagggaggaaagggaacagtttttggcttttttgtaacacagcatcatctttgttgtctcacagcctctgctttggttcagttcactataaaacagtttgcctaacttttaggtttctttatttgattcttttaggcataaattgatttggaaatatgaaagaataaggttgttctcaaacatgaaaatcatattgattgaagaggtgcctaggcacatgtgatttagtcagtaagattggagccaagctctacttttctcagtgttatatttggttatgaatgcatttacctcaggtatttaatatatttgctttttaatatatgtcatatagcaaactggattaataaatagaaacacatagtgtagtctttaagcatatgtgtgattataaaaataaatccattttgcattcacagaatagaaaataccctttaattagtgaaattgattacatatcgtatatagtaatgagcttcagctagatgcaagccctcattggatcaaagtcagtttagataagggcagctgaaggtcacagagggagatgcccagcaggttcatttgcataaaaaattactgttagaaataggacactgaggcagctctagcattttgatctcttggcctttgtcatggagattcctagtagtgaagggagtaaggccagtgtcccagataatgattaactgttttaatggcattcattcattcattccacactaactactcatgcagaaaaaagggttatgtaaaatgacattagaagaaaatcatttgtaatcgttgcatcgggctgcactttgaggagacattaggagtaaatccgtggcgtggtaggcttatgctttatcttctgatatttactgagtttactggtgcatgaaaagctttcagcaagaatagcagatgggatggacctttcataggtaatgctatctaccaggttattacttctatatattgatagtaaagtaatctccaagatatcaccctacaaatatagattatttaaatgtctgcaaccaaaaaaaaaaaaagaaatacaaaaggcctgcttttataagtaattaatttggtatccgttgggtcaaagtctttagatgaaattttgacttaaaaaagttcacaaaaactacattcattgccttgcatttaactttttgtcagcagtacaggcacgtatgacagaacactgaacttagagctaatcagttgacacattctgctttaaattggacctttactgttaattaaaaataaagacatgctccaaggcataagtattgagtcacaaatttatatttctaacacaatagcttagagatttttgttagatcatagtatgaaaacttgtccactggaaaccactattgagttttcagtagtgtattctaatacagaaatgttctctaattaggtaagatctaggctgatttcattcctattaagccctagtacatgatagtttattaaaatgagagtatgtagatagcgtttgtcatgtcatttactaattaattattgtgaaacagtttagaatttcatagcacaatatactgttgctatttttattagtaataatggaagtttttaactactgacattattcagatgaatgaacatccacatgtttacatttctttcaggggctaaatttgagattcctttaaaataaaataagaagtgtcaacatgaaacatgctttcaaaatctcgattaagaaggatctctttgtccctggtactgtaagactgagttcctgttcacttggcattactaattccttcctgattttgtcagagtatataccacattctcagtgtgaagtaggggagacaataaggaagctgtattattaatttattcaagctttttaatatatttaagcatgatttgataggttttcccttaatgacataaaaaattaatagtttcccaaagtatgcaagtttttattaacaagagctaaatcatattggatgattactgtaggccatgtgctttacttatgcattacctcattattcattcattaatatttactgaactactactatatgcctggccctattccaggagctgaagtacagcagtgaacaaaaacagacaaaaatccctgccctcacagaacttactttctcctagcctggggatggggttgggagtggataggtagtaaactatatagtatgtcagatatgataagtgccatgttgagttttgtttggttggttggttggttggttggtctttttaaaataaaatggcagtacagcaggatagggagtacagattggagggagctagccattttaaatagggtgctcaggaaggccttactgagatgacatttgagccaaggcttgaaggaagtgaaggagtgcactatattaaatctgggagaagagtgatgcaggcagatcaagtagctggtgcaaagcgctgaggtggaagtttgtctggggtattcagagaacagtgaaaaggccagcatgacaggcttgctgtgagggaaagtagtaggagatgaggttagagaggtgggaggatgcaaattacaggccattgtaaagtttttggctttttctctgagatgagaagctgttagagagttttgagctgaagagtggtatgttctgatttgcaggctataaggatcatctttggtttagagtatgttgtagagggcagggatagaagcggagagaccagttatgatgttcttgtaatcatccaaacgagagttgagtaattggaccaggacagtactggtagagtggaaagaggtggatgtatttgcagagccaacaagctttgctgatgggctgggtatgaggtataagcaagagacaagttaaggttgttcgtttttggcctaagaaactggaaggacaaagttgccgatgagatgggaaagattttgggaggaacatatttggggtgggggaagaacaggatttgattttaactaactaaatttgaggtgcctgttcgacattctagtagagatacgtgagtgtagagttaacagagatcaaggctgaagatagaattttagaatggcaagcgaaaagg

SEQ ID NO: 133154 - DNA, 1807 bp, Homo sapiens
ttgttgagcacttcctatgttctaggtcaggggtcagcaaactttttctataaagagccaggtagtaaatattttagcctggcaggccatatggtctctgttataactctatccttatagtatgaaatcaaccatagaaaatttgtaaactaatatgtgtgcctgtgttccaataaaactttatagacactgcaatttgaatttcacataattttcatgtgttgcaaactattctgtggtgattattattattttagccattaaaaaatgtaaaaccagctgggcacagtggttcagttctgtaatcctagtgcttttggaggccaagtcaggaggattgcttgagcccaggagttcgagaccagcctcagcagcatagcaagacccccatctcctaaaaaccttaaattaaaagataagttatgtcttatatttgcacaaacaaacataaatagaaatatttgtgaacatagaccttttcagagagcatttattatttggagagtggatgatcctttttatcatcacaatccctgctgacagctaccaactagttattgatcacctaccattagcttcaaacccatcatgggcatcccatgccacttaaaacaaatccgatattcttcaccctaatttataaagccctaagtgatctggtccctccctgtcctctagagcctcctctttcactcttccttcacctactccacttccaaatttacaggtatttttttcaaatcctcaaatttggtaagtttgttcctaccataggactcggtactactcgttccccatgccttacgccaagagtggtgtttcccagacatcacatacatggcttttcttgttatgagaaaggaccttcctagttgaggcttcccccaaaaagtcaatctaagtcatcactagtgattctcattcatataactattttaattgtttgcatactatttttcgctaatattttgtatgtttgtgtattattggctctatttatcttccaccactggagatgtgagcaatgacttttatcttgctcacttctcagttacctgatcttagaacaatatctggcatgtattaggccctcaataattattttttgaacaaattaatgaaggaatgcatgcatacactcatgccatgggcccagcactctggtaaatctccctgatggaggcatccttcgacttgtattctgctctacttgtccccttcccttcttgcatacacagcctagtttctaggaaaagtgacctatgttctgttcttcagcagctttctacttataataaatccattacaatctggcttgtacctctacccctcgaaagaaactactcacaatagtttctccacttgccaacaacttcctatttgctaagtccagtggatttcatagtcttcatcttatataacccatcagtagcttttaacagtttcttccttgaaacatccattctgccttcatatctatgacatcatctcttttgtttttatttctcttaagccatgtatgcttgtggctgcaatttgatgtcacgtcaaataatatagctgtctttgtgggtggaaaatcatttctgcttaataatttcatgtcttcacagtgttctatctgaagaaatttgtgaaccactgcaataagggatacatggcttacatgcgtacctgttaaaactctgtttaggctgggtgtggtggctcatgcctgtaatcccagcatttggggaggctgaggcaggcggatcacttgaagtcaggatcaacctgaccaacatggcaaaacctcatctctactaaa

SEQ ID NO: 133155 - DNA, 1078 bp, Homo sapiens
cagaagaaaaaggagaggtgctgggaagatgatgacaatgataacttatttcttattaagcagagaaaaaaaaagtcttaagccgtcaggcagcctctgatgtggcttttcattgttcatttggcctttgtgtctataaccttctggcactgtgtttattatctatgattaaataaagtgagtttttggttttgtttttttaatttcagccattcctagagttactgaatatccatggagatctcaattctctgtgtccaacaggatattaggtaagaaagtacaaagataaacctggacttctcctattccaatatgtcatctttactcagaatcctagggataggtagaagaattcatcttttcaagaaagtgttttaaaaatactttgggaaaaaaactgcatcaaaggtaatttatcctcaaattaaatccttgcaggaagagaaattaacactaagaaaaagtcatcaatatttttcaactttttttttttttttttttactttggaaaggacaataactataaacctatatccagattttctttctgctgaagctgttgtcagaatcttcctttggacaaaacatcactagctgactataaaaacaaaagtgtcatcattgaagccctgaagaggcagggaattgagcttcagcaaaatacaggaaaagaactatccagtataaatgtcagaagacagatttcctaaacaagtaaaagagacatcaaaaattttaacataatcacaatgaaatcattttttaccacttttacagcggtgtttcaagcggactgtcactcagatctgcagagatgaatattactcaaaaaatttttttgttctcttgcatttttttcaactaccgcaaagctatacagatttttttgtacttgtggatcttttgtacttctcataacctaatgtcagactaagaaaaataaaatatctgagagtaaatacatgtgtttattatgtaaaaagacaatgagagtttgagtgacaaagagcatagttaatgtttattttgtttgtttgtttgtttgttgtagagacaaggtctcactgtgttgtct

SEQ ID NO: 133156 - DNA, 1729 bp, Homo sapiens
agattgtttggagaaggagagaaaggaagcacttttttttctgtttgtctctgcacattatcttattttttcccaaaacttacaaacattttgttctagggtataatttacctattgggtccatgtatttacatgcagataggaaaggatgctgagctacttcacctgtgggcatgaagatacagtcttcatttcctggtaagagaagaacagaaacatggaggagtctttgcttcatttcctcttcatttcccttgcccccagctgttacaccaaatgttcagttaaggtgaatcagtcagtcagtttattaacatacagactcttcatacaacaatggggagtttaaaatatgtatagattcaaccattaattaaataagactttacatggataaatacaagagaagaaaagcaaatgtccaaaacagtaaagatctgtatagttggtaggattaagaagattctaaacatcttacctctggcccaactttgatttgaagcagcttgagtggctcctatcttgggttctaccttggtttgtgtttggccttctcaaaacagagcaaggggaaccagtctcccattttctccatggaaagtcttgctttcatggaccttgctatttgcagtacttattagtagctctttatttttctgttatacaaagattatgtaatcattttaagggggaaaaatgttaaaaacaagtcatatgtgattctttcacacaaaaatgtagttaaaattattagtgtctattttttcagacttttctatacctatgtatacattgttttgtaacctgtttttcacttactttgggaacaaatacatgtctgcacttttgcatgatgttctattatatggctgtgccatgatttaatcagctccctgtcgagcattttgtttccaatttttattatttttgaaaaattcttctacataatatcttctccatttattcaattgtgataaaatggaatttagggtcagagagcatgcatatatttcataaaagttttaatacatgatgccaaattatattcccaagtcagattcttccccaatcatttatatgtccctggcagtttgtgagtattcatctccccattcccacaatcacatggaatattgccattcccttgtctctttgccactctgatgggcagcaaagaaacattattcattagtgctgcagtgaaaagattgatgtgggtttgtctgtgtaaggagagacaggattagcaatatagggaaaatctgtttttaaaagatgtggagagaagcttctcataggaaacaactgaaaattcttctgccaacaaaaaattacatacaaaataagggagcctttcatttgtttatagctgtcctgatcccctggtcttatgcttcgctttctcaacaaaaggaggatgctgctggcatctaataagtagaagccagagatgttgctaaatatcctacaatgcacagactagcttcccacaatgaatctggcccaaaatgtcaatagcgctgaggttcagaaaccctagttgaaaccccagctatttctcaaatggaattctgttcactcgagagagagttcacgttgccttccacatctaacaggatgtgcccttgtcttacaaggctttgcatttcatcatattgccagtgtttgagagactggttggacatggccattcatgtgaaataaggaacactagttccatggcatgaag

SEQ ID NO: 133157 - DNA, 1120 bp, Homo sapiens
catctgcaggccccactcacttttcctccactggcgccctcttgcctgccagcctaccctggttaaccttcctgggaggagagcttgtcaaagtcgcctccgcctcagcctcctttcacaaccctgcctcatcttccacaccaagtctcagggggcctgcaggacccaccatcatcctggagaagtcatgggtcgccagccacctgtctcctgtgcctgcacccaactaaccatcgcttcctgctaatttgcattgacaaccttcctgcacttggctgctcaggggagttttctggttttatctcctcaattaactttggcctcctgggtcactctggatttcccactgcagacctggctgtggaagcctgcctatatgctccagaggattcttgtcttttcacgagccctcccttcccatctgcaagccaggctgtgcacacagcaacatcttgcaagggagtctcggccatggcaggatttttgaagttctggtgggtgtcagagctgcaaagggccaaaggactgtctagtccactctagcccacccgactttgcctcctctcctcacttcacagatgggaaattgaggcaagaactgagaaaaggcttgcggtggtcatacatcaagtcagaataatggccagacccaggccttggtgccccctcaaccccctcacactctctctgccacattttgtcaacagaaaacaatttgcaaacttcatcaagttaggagggagtgaaaaatgtgtttaaatattgagcttcaacagccttgttacttctaggcaccttcagctatttgcaagaatctctgggcatagcatgagccgggctgtggcatgggagtgaggggctggatggagaagaggcctccctcctgggccaggaagccgactcccatcccctcctttagcaccgtggactgagcacctctaaaataacacctcccatggagttacgatgcgtcagggagcaaatgaactctgagatgcaggaactagacctgaggacaggaggaaactgggaagggagtggggagcagcagcagagcaaacagaaaagatgcccgaaggaagcgagttcctaggccaccaggggccaagaccccagcacg

SEQ ID NO: 133158 - DNA, 1047 bp, Homo sapiens
ggccgcctgcttggccgcccagcccctgtgaatgtgggaaagctcttctctgtgctgacctgagagctgtccccatgccttcccccttgcagcttaggctctgctggggggcccctcagcccttcacctgtcacctgctgtctcgggacagttctgagaccacccctgcctgaccctgcctcccctcagccagccccgggcagcctgaggccagggccatcagaggccaggattcccagctgggaggggcggggacaggtgtgcggctcctgcttctcctgagggcctccctttccccgcagctgtgaggtggagcagtgggactcggatgagcccatccctgccaaggagctagagcgaggtgtggcgggggcccacggcctgctctgcctcctctccgaccacgtggacaagaggatcctggatgctgcaggtgcacactgggtgggcaggggacttgagggtggcttggccctgtgggcccctcagcctgtgctgctggctcctggctgctctgcagtgctgtctgggttctgagggcgtttcctgcgataccaggcccgagcgggcagatagcttgctctggcacaggcactgcccctccctcctgctgtgaaccccttggcgggggaccctaggagggcaaagaccgcggtgtggagactgtgggtgtggggaagtgcatccaaggccctgggttctccagccctgccacaaccttgctctgtgacctccagcaagaccctgccccttctgggcgtgtgcgtagtatgagggaggacctagctcagtgccaagccccagcaggatgtctttcctcaaccgcagccacgggtctcagcccatggaagaataaacctccccctgtgaggctgttgtgacagttttgagaaaaggttcagactcagaggctgccagatgggaagggacccttgtgagtcagtgctgagccgccccacatcctggccttggcctggaagctttgtggtgtcctgcttgcaggagagggtagagagggtcacgtcccagccaccttcttggcactct

SEQ ID NO: 133159 - DNA, 1030 bp, Homo sapiens
gaggcaggtccagggagcagcacaagattacgcaggccctcagagagcaactgggtagactgaaaagcaaaatctcatgcatgtgcgtagctcaaagacagaaaaggcgggggaaggcagaagggaatgatttgagaggaacgaccaattaactgttaatagaaggtttggtttaaaacaaagtactagtcaaagaagggctggcaaagagatattaccctctttggtttcaaccttaataacgtaaagaaaaagaacacatatttagaggcatgaatatgacaaattttttatttcaaaaatctcaagttgtaaccagcatagcaccactgacatggatgccttgatagaactccttgatagaactttatgatctgttcaccagaaaagattctacatgatcacgccagactataattaaggctaaccaatcaaaattcaggtacccaaaaccagttataatccaggtagaaactacagatcataggaaccctgggactggttttccagggaaccctggaattattttttaagtgctacagcatgtacaaggacactggcccacaagcttgcttctcacacgtagaaactgacagactaagaggtagatgagagattccaggttccatctagcagtggagaggcagggctccagcatgtatcagagataagccccaaaagcaaagtccacttatgcttcagcagaggtaagcgggcaggctcctggcaccacctcctccaaatggaagggaaggagggctgcaccgctctgcctgtgtcactggctcctctccctgggtccaggcagggcctctcattttctccaggctaacccactgtgtcccaaggttaatctcacaagacactggtccctacatcatgtaaagggtggatggggagcctcctaacaccatgtcaacatgactgctaacaaggagccacacacacaactgaatttcacaggacctcatatcctccaatgggctctttcccacatctactcgaaaggaatcgtgggtttccctttggg

SEQ ID NO: 133160 - DNA, 1050 bp, Homo sapiens
ggcagagcagcaatcttcccagcactttgctctagctgtttgtccttacaagacaacgctgaggccagttgtcagactgaatttcttttggtaagcagttaatgcctttgggttcgaggcttccagctgcccagtggctcttaaacagtttagcaactaataaccggagaactaacatgtagtatttgtgctgctgcatttctgagtgaagtgcacgtcttgggaaagggatgcaatccctgaaaccaggtgcttccttggggttgagtaatgcagtcagaaagtagtttgtaattgatattaaaagtggcacatttaaaaatttaaaaattgaagtgcaaaaaaaattttttagcaatttttgtaaaactgtgtagcatttaaatttcctataccttctgatgggagtattatatccctgtatagtgatgcaaaatgcacttatgtgtaaccagtggtgatttggtgcctgtcttaaaggaaggcctttgaggacacacctgtctgccacaaatgctttaaagtgtatcatgagctagtcctaggcctcaaagtactgtattttttatttttacctgatttgcagtcataaacactgcactttggtgctgacactgggtccagagtgagcattctcttggactattagatgtatatacttttgaatacatcactgttggatagatgttttaacagttttttctggtttaaaaaccaaattgtaaatggagtgtgtacttgtagagagtgacaaggtattgtttccctatgtgctgtttgagcagtattttaaccaacttgtattacagatgttacagttccatgttaggaagtcagaaaagacttgtgtttgtctttgttctgctgatgtggagtcatgttttgtggggtcttccatggcacatttacctgttgctccgtccagatgttgagggccagtctaggctgacacatcctacccgaggacaagcctgttctccatttcttcactctcccctccccatatagcaactctcccaggtttagattaccgttttcgacgacagatta

SEQ ID NO: 133161 - DNA, 1084 bp, Homo sapiens
gggtttcaggaaaaagcacggggcaaatgcgtgtgtgcaatctgctaccatctataactggaaatcttccacactaatattgatttgcccttttcacttatttagggttcctaagactttggaatttcttggtattcattcctcatccttagggaatgcagaattctaacaaacttctgtgggatagatatgccatcactcacacactggtctttactaatttagacccttagtgttatacatggctcatatgaagagtaaaggggagcctgtcggtagctaggcccacatgtgtgcatgcctcctgggctgatggctgaattgccatttgcttcttatatgacaagctcttagtgtatgtgcccattatcagagatatcacgggcttcaaaggtccaagcttggccatccattccactcttttcatcataccctttgtgttctgactttgaagcttttctaggtcttaacattttctttctttgtttttctgtaggatcatggattttcctggtcactttgaacaaatcttccagcagctgaactaccagagacttcatggccagctctgtgattgtgtcattgtagtggggaatagacactttaaagcccaccgctccgtgctggcagcatgcagcacgcatttccgagccctgttctcagtggcagaaggagatcagaccatgaacatgatccagctggatagcgaggtggtgacagcagaggcctttgctgcactgattgacatgatgtatacctccaccctcatgctgggggagagcaatgtaatggatgtcttattggcagcctctcacctgcatttgaactctgttgttaaggcatgtaaacattacttaacgacaaggacgctgcccatgtctccccccagtgagcgcgttcaggagcagagcgcccgcatgcagcgctcctttatgctacagcagctgggactaagcatcgtgagctcagccctcaattccagccagaatggcgaggagcagccagcccccatgagctcttccatgcgcagtaacctggatcagcgcacgcccttccccatgagacgccttcataagcgcaagca

SEQ ID NO: 133162 - DNA, 1057 bp, Homo sapiens
aggtctcttgagtccggacacccatctgtgaatttcctaggtgtccccctgctttgcaaacatatataactatatttaaatcatcttccaactgttcttgtaaaatccagggaggcaaggaaaattgtaatttaacgtgttgattaaacatatttttgttgttatatgtaagaagtttgtaaatatgagtttattctaggtagcacacacacagagataacatttaagtccttactatatgctagtcactgttctaagcactttccatgcatataccaaccttctggagtaagtactgttgttctttttttaccagtgatgaaactggcacagaggttagatgaccttatcaggggtgatggctgagataacaggcaaggccactccagagcttgtactgttgtgtactaagttatactgcccttatttgagtactttgtagatgattggagagcatcggtaagtaccacatacctcatgtttatgcctgcttttaggtctttcaccaagaaagcaaaattattttctggaaagagccaaggacttgttttctaatcctgtctctgccactacctggtgaactgacctggggcaagtaatttcatctgtgggccttctgttttttaatttctaaaatgaagaggttgggctggatgaccgcttgatttggctaatttattttccaagttctttaactgtatactaaagctgcatattaaatattcacagtatacactcatgttaggctcagggaagtcctatagtaaagaaatctattattcttagatagacaaatgaatattaaacactattactatttgtaggcctcccaattgacttttctttctctctgtttttgtgtgttttgatagatgtatcagttgagagtgaactggcgctagagagtcagaccaaaacttacagagaaaaggtgagtgtgatagaattaagatgtgggaccttaagcaagttccttctacacctcgggtttctccatcagtgaaatgagcttgttgaactcaagggtctccctggctgctccccgctcattcagtct

SEQ ID NO: 133163 - DNA, 1027 bp, Homo sapiens
tgtgcctaaaaccacagacatcttctgggtttccaactctgggtaggtatgagggtgtgacccgcaaaggatcctagctacaggtgacactgggttaccatcagattgactctctcctgttagaaataagctgacacaacacaaacctgccacaagccttcaagatacatctgtgtaactcataagctctctctatatatacacacacacacgcacacacgtggctgatgtttgttctaacagtcccttaaagttttccttttatttgacctggatattctactttgcctcatgcagaatagaagtagcaaatgttagctctggaaggaccctgaactatcatataatccaacgtggccccaattttcagatgagaaaatgggagatccagagagaaaaaggggcctggcaagtcccctcgacatgtcagcagtaccagaatgaatctcacagttgacagtaaagacttggacagacatatccattttcttctctcatcagaactcatctaagaattacagacaaataatatactggaaacaattagaataaaatgtttatcatagacttacttttccgcttaactaccctatgagctcgaaatttgatgagggtatccagaaaccatatgcatcgggcctggcggtctcggctctccacatctgatggcaaagacttcaacgcttctatgacaaaggtgcaatggctaaaacaaggaaaagaaaaggaggcctgtgtcagggtaagatgggctctgtcaggaactacttccctcttacaacgagaacagcaggcgcctctcaccccgacgcactcaacagctgatgaaaccctgggcaacaaggcaagaccccatctctacaaaaacgtagccggcatggtggcacatgtgtgtggtcccagctactcggaaggctgaggcgggaggatcacttgagcccaggaggtcgaggctccagtgagctgtctgcgccactgtactccagcctaggtgacagagcaagaccctgtctcagaaacaaaaaaa

SEQ ID NO: 133164 - DNA, 1050 bp, Homo sapiens
tctctagcagtccgtggagggactgttctgagggctgtccacaaactgtgttcccacaggcagtgaggctgaaaaaaagagaacaggtacttggaacctgtcagattctagcaagtgctcaatcctggttgctaaaagtttggttatgggaggtaaagaaagttgctcacggggctgtagataccctggtttttcatcacccatatggatcttttgaagggcattaaaatgaaattggctgtctgatggttcccagcgggtgaggggaccttgcctgcctctctgccaggggctttgtgcctgctggcaacctttgggattctgtctttatggcctggagcatgaatgtgctgctaccttttgccaaacctccctgaacagtcatgttgaggggtctctccagttcttctgtttatgtcttccttaggatgatggagatagccaaagccatgaggctgaagatctccaaaagaagggtgtctgtggccgccggcagtgaagaagatcacaagctgggcaccctgtccctcccgctgcctccagcccagacctcagaccgcctggcaaagcggaggaagattacctagacgcatgctttccagacagggcgttttggctgcatcacagccactggctggtcctattcatttccatttttatgtatgttttgaaaagaaaaggtccggggatggtggctcacacctgaaatcccagcactttgggaggccgaggcaggaagatcattgagctcaggagtttgaaaccagtctggacaacatagggagaccccatctctaccggaggaaaaaaaaaagagtcaggcctggtggtgtgcgcctgtaatcccagctactcgggaggctgaggcaggacgattacttgagcttgggaaatcaaggttgcagtgagctatgattgtgtggccacactccatcctgggtcacagagtgagaccttgtctcaaaaaagtaacataaggaaaaaagaagccttgctttagcacaggtatgaagccagaagccagcatctcaactgtgcttgtcttatgca

SEQ ID NO: 133165 - DNA, 1066 bp, Homo sapiens
gtctcaaaaataagaagcacctctgctcggccgccccaccgtctgggaagtgaggagcacctctccctggcccccacgctgtctgggaagtgaggagcgcctctccctggcccccacactgtctgggaagtgaggagcgcctctgcctggccgctgtgcaaccctccaagtgtgaagtggcaaccttgtgtgtgatttttctgccctacccaggtttgcatctttgacattaaagtttacttttaaatttaaattaaattaaaagttttaaattggagaaaaaaaaagacagtggggagccatggaaggttcttgagcaggggctgagggggtatactcacctccattgtgattaatactgttagactcaacaagagctatggtgatgggccggcgcagtgggtcgtcctccttctccagctctgtctcccagaggatggcgtccccatcctcgctgaagttctcttgagccctgtggcctcgaggtaactcgctggagccatccttctggctaaatactgccactccatacaggccattgtagctgacgtggttgctggtgacatgggggaggctggacgacatcatccacacaccacagcccttgttagctgggacagtgagaggagctggtcaccgacactgaactcaggtgaagcggcacctgagtctccctgagaggggaaacaaaagccactggcctgggagagagtccctgccttgctaatgacctcggacaagccacctgatggctctagctgcagacttcaccttcacacaagagaggtcatcaggatcaggtgaacctcacaagctcggctcgttccacacagtgtgaaagtgctctgaggactgtcaggccacatgtccacatcagaagcacatgagcccacagtgacagtgccaagggggcaccaatccctccctgcataggaggcagcctcagttggaatcccagccctaccacttcccagctgtgagaccctgagcaggttaccagacctctctctgtccctcagttttctcatcttttaaatggggttaataaccgtgcctccttcagaag

SEQ ID NO: 133166 - DNA, 2014 bp, Homo sapiens
ctgttgttcctaccatatgagtcaggctggatgggaacatcaatttacttgagcagattggtatcagattccctctgaggggagagaaaagtgccaggcatgtgtagccaccgaaaaaaaaaacacagtacggtgattgactgtcagagctggaggatgcctgggaaaccatctaatccagctgtctcctttgcaaatggagagactggacccagaaggacgacaggactttgattttgctcaggacccaacagagtgctggcagtgggtagtggagaggatggaccttttaccaggcactgtgctttccctcagttctaatctcattccgcatttattcagcagctatatggaacccctactctgtcttgtacacctactaggatctggacatagagctgtgaacaagacacacatggtccctgtcctcaaggggctttttccagagctagctatgttagtttgaggttatataatgttttatatatatatccatctccctgcccgttctcagtacattttaaaataacaataagctgcagctcccagtgagcttacctcataacagctggcctccagggataggagcacacagagaggcctgaattgtttcctgatccctcacaccagttccagagcccttgctggagcctggtgagatttgagagactggagaaaaagctgctttatcagggcttttaagaaaggatttccttctgccctggagcacttggatttctttgtctttctggtttcaagcctattattgtttttagatttctgagaagagccgccttcaccatagtgccatcattttggttgccgtggttatcaggggaattgtatttttatgatcgcacaagtagctgttaagcaataaatgctcaagcagtcaccaggtcaccatgagtttccgttctctggtttctttcagttgcagtgcagttacactatcccttccttccctccctccttttttccttcaataaacgtgcattggtggcagtgccaagaggagtgggagtgagtagaaatagataaaaacatacgtagactctggccttagggacctcagattctttggcagggataaaactgagggcagattagtgggggctctgatgatgtagatagggagtcagcaagagctctcagagatgggagggatggtgtcctgggcaaccaagaagacatcacttgcttttcacaggaagatgtgaagtaaacaaattccttgtacctgcttcagtcaggaaatagatggaacaagtgttttgttctttcagtttgccttaatgaatgaacctattcttgagttacctgtcatgggttttgtttgaaatgtctgctaatttctctcattaccctcttttagtttagtgattattagtttcccactcgtctaaaatgtttgatactgtatacataaaggaatgtacacaaagagacatttgattaagattttgtctatttcagtttagatgtttaacatgtgtgtctcatttcacaagttgggtttacattcactcttgtctttccttatttttttctaagtagactcccaagtcctctctaatgtccttattagtgagaattccagtgtctccttctccagcctctctgggggcttatacattccaatggggtcagtcttactgtcactctccagaggagagagaactgcattgtctgagcagtccacacacattgtcattcctgacacagctatatggcataactgttgaagagctgtcctacacagtccacggatgtgtgatcactgctgctcaatgcccttattggaccaaatctctgccagcatgattccatgcttggttttccaaggttagagcttgtttcatttatgcttgcgtgctcagccattctccccaaagcacctcactctgggcttttgttgagcttttcaccaggctgggttcccctggtgtcctggagagttctcttttagggcatttggggcccttcctgctagcaaccttggtcatggtcatct

SEQ ID NO: 133167 - DNA, 1030 bp, Homo sapiens
tacctaataatcacatcaggataacgggattatctgtcacctcatttataatttatttatgttacaaacattccagttatacttttagttatttttagatgtacagtaaattattattgactgtaatcacccattatgctatcaaatactagaacttattcattacatctaactatatttttgtacccattagccatccctgcattccttccctaacctttcctagcctctggtaaccatcattctactctgtctccatgagttcagtcgtattaatttgtagcatccaccaatgaatgcttataggtttttattgatttcctccccttctttttccttctgctctctttttagaacaatagtacttttaatgttttctttttcctttatattctattttatctgtaattgcttttctctttttttgtttcatgttagatgctttccttggttgtctgctcacacttaaaaattgggaactaacatggattaaaggcctggagtggagcttgttgatgttgaactttgccaaagggccatctattgggccatttttgttgagaaaactttttgcgtctgtatctttagttatttcccattgagctggtcattgctcagagaacaaagactcttccaatctcccaagtgctgaatgaggccctgccaacgttctgggattcaaaggaatagggctgtggtgaggctcaggacagacaggtgtgtgtgtgtgtgtttcaatatccagtatgtatttgctcactgcgtctctgttttgagtatagtacctctgcccaaactgcctggcatcccataatctagagaccttctattttacccttttcagaaaataaactttttattttttggagacagagttttgctccaggctggagtgcagtggacgatcttggctcgctgcaacctctgcctccctgactcaaacggttcttgtgccttagccacctgagtagctgggattacaggcgcacaccaccatgcctgtctaatttttgtagttttagtagagatg

SEQ ID NO: 133168 - DNA, 1502 bp, Homo sapiens
aataataataattccaaactcacaagattaaatgagatcatgtataacagtgtctaataggatgtttgcatgtaataggtgttggataaaagtcaattctttttatcagagggttcatgggcaagctgaataagtgtttgaaggcaccattggagtaaatagtgcttttggtttaagcatgtgcattgatttagaacctcaccagcagcagagagttcttgtgacaatgtgatgtgtcctcgaggtgcctcctgattcaaggggcaggggctttttgttatttggaaggtgttcagatcagatactaacatcaacaacaggcaatgccctgtaaatactgttaggtggtgggaggtcacagaaggctaatcagaaggctcaatccctgcctcacacaagcttatcactatgtactcaaggacccagattggtgggggaggggggcagatttgacagacacagctctaaatatatcagctttgtccatatagctgggagcggggtactggctcccttctgtcttagatttgcagtggtcaaagaataggatacaacctgggtagcatagtgagaccccatctctacaaaaaatttacaaattagctgggtgtagtgggtgtgcacctgtggtcccagctacttgggaggctgaggtgctgaggtgggaggatcacttgagtctcactcgagactgcggtgagctatgatcaggccactgcactccagcccggtcaaaagagtgagactccatctctaaaaaaaagaagacagagggtgaagaataacattgcaataccttatgaccctgtgtagcactatgtagcatctatggtactgtccttcattttttcaatcaatggttgttcatagaacacctgctctctgccagaaaattgttctaggtgcctcgagaatacatcggaacaaaaggcaaggtctctaccttcctggagtttatattctagttggagaaaataatgaagaagtcattacataaataaggtaactacaggttgtgccaaaggctgggaagaaaataagtggggaaatgtgggagaaagtagtaggagtgggactccattggagggtggtcagggcaggcctatctgagccagtgagagccacaggagagagggagccagtcttgcctggagctgggtgagggtcagtgcagcagctctgtatctgtaagaggtagggtagttctgtgtatgagaatgcagactctggggccacaccacctggatttgaatacttgccccttggctaactaaatatattccactatcaggttatttaatcttctgaacttcagttttttcatctgtaaactagggataataacagtacctccttgagagggttgttggataactgaatgagtcgatacatgtaaagtacttagaatagtgccagttatgtagtaagcaccaaataaaagttcaattgagggtgagagaaggaggaaactgttccaggctgaaggaacagcaaatgctaag

SEQ ID NO: 133169 - DNA, 1019 bp, Homo sapiens
aaacagatcttctccagattggcagaaagttgatataggtggacttttttacaggtcagttgaggcaaaaaactatgggttttttcaggtgaacctcccccatttaaatactcagaagataaggtgtgaatgtatgtattattagagtccgaaagtatttttataagttactggttttcacccacgcttttgtgggagagaaaatcattgcaaaatcattttttttgttcggtacaataaagtttactaaaaaacagtattagggtttatttggagttaactcccttagtaattgctacagcttccataattaactggaggtcagcagtaaaataattttgtgattataacagtaagccaggttcaccagaggaaatgtggaatacctaagtataaagcagcaaagaaatgtcacctgtagtcccattattcagcgggtgagtatataacaacgaaatactttttcatttaccaagtattgtgttttgcatggattaactcctttattctaactgcagaagacacttatcctcataattgaaactgaggcacagaatttaacttggcctacattctctatattcatcaaattgaaattatagttattatagcttatatgccactttgtaatatacttttgtctacttcaaacagcatgatacatttcacaactttagtcacatatttcatgttacaggatatttttgagttttatcattatataaataacactatgaggatttctgaatccaaatctggccaagtcttattttgctaaaatcatttcctaggagctaagcatagaaaactcttctatgctatttagtatattaaccaaaacctttagaggtaaagagactgccaggtgatccacatcagtgattcttggtttctagacctctgagaatatgtgagatacagatcccctgaagcctatccatagaaagtcctttttggatcaaagagattatagaactctatttgttgataaagaccaaggagcttcgtgtgtttctaat

SEQ ID NO: 133170 - DNA, 1028 bp, Homo sapiens
ggacttgctgaaggtatcttccaatggtatcttgtcatttatggctgttttttcattctgtttctttttgtagtatgttccagtaaaaggagaccatgtgattggcatagtgacagctaaatctggagatatattcaaagttgatgttggagggagtgagccagcttctttgtcttacttgtcatttgaaggtgcaactaaaagaaacagaccaaatgtgcaggtaattacgggagcctttggtttcaaagaaacaaacatccattccctagaacactcacatatccagaaggctatctgaattgtctccaaagcatgacctagatctctgagcttgtatataattgccccaggctccaagagtttcttcagatgctccaggatcagagccacataattattattattattttttacatttacaatttattttacattggctacatttgttcttgggatgtttcatttctactgagttgaaaggttgtatctatcatcgccattatttgttatgtccatatcctctggacaaggatgtctgctgtaggcttagaggagggacaggtggtgcaaattgacattatcagctatccatccatcctggctgtaggtcctaggagctgatagaggagtaatattgttaccttgggttttcaatttgagcttttcaggtagcatagccacactcttcttgtctatccagcctgaaatttagtgatttcttcacctcttctcattcacttctcatgcaaatttagttgcttaatcctattttgatcctatttgattctgtctctgatctttggcatgtccgtccctttatctccacaagttcaggcttcagctccctcttgactggtctcagtcacttcttcattaatccctgcctccacgcttttacctcaccatccaggattttgagagctgacatcctcacacggtcactttctcgaaaagacaagattctccaaaatctacagaattccttggcattacactccaggtgtctttcctcatccctaattata

SEQ ID NO: 133171 - DNA, 1026 bp, Homo sapiens
ttttctatgtaatgagattatattacttttataattattacttttaattttctaaaaaaagaaataggtaaattactagtcaacgtaacatactgggtgttttgatgtaactcctatgctcaaaacacatagaacaataaattaaatagtacaaaaagtatagccaggttctgaaacaacataaacatctttgtgggccagaaatgaaacatggacacaaagttttaaacggggctgaaaccacagaccagctggctttcagtctagcactgacagctagtagttttgctcctgtcaggtaaaaggattaagaagtgcttaagtgtttcatgcgaggcaggaaccagagccagaatcactacatgaagtccggggtttggttaaaatatctgtcttatttatgaaaggctgaaaagagaaaagagctattcactacccgagactataagttttagctgataaaaacacagcctcatcaatagctattgaatgaagccacttgctgagtcagtaactgaatgtctatgtatgatatttccagtatcatgattaaaatggagccccgaaatgtcattataaggcctagttgtggactgggggcccagatggccaagtgggagcaactctgaaaccattaaataggaggagagagagaaattaaaaaccttttctattcaaaagaaacctataacccaaattctaaaatttataaagacatataatattaatataacaaaatcagccaccaaaacattcatttctctggatgaaattaattttatggagcagttcaacaaagactttattttaaaaaataaattatgtatttatttttgactagtaatagatgcatgtagtacaaaattcaaaggtacaaaaagggtaaacagtgaaaagtaagtctatctccacctctttcacctagccacccagtttccctccccaaaggcaaccactgttacccatttcttgctatcctttctaagataattgttgcatatacaaacatatatatatatatacaca

SEQ ID NO: 133172 - DNA, 1034 bp, Homo sapiens
aggctgaggtgggacaatcactggagggcaggagttcaagactagcctgggcaacacagtgagactccgtctctacaaacaatttaaaaattagccaggtgtagttgcacgtgcctatagtcccagctacttagaaagcttaggaggaatgcttgagcccaggagtttgaggctgcagggagccatgattgcaccactgcattccagtctgggtgacagagcaagaccctgtctcttaaagaataaagaagaagaagaaagaaattaatgcatatgtggacacggaggtatatgaagaagattcattatagcattgtttgtaatagagagaagttggaaacgaatgtctatcaagaggaaatattaatagataaataaattctggtgtactcatacaatgaaatactatacatcagttaagataaatgaactaaaagcatcagcatctgatacacatctcagaaatttaaagttgaggtagaaaagaaaaaaatgtagaatgagctttatatagtgtgataccatttacataaaatttgaaaacattacaaacataagcttggtgagggcatgtatttgttctgtgctctatcccagcatctagaattgtgcctagcatatggtgggttcttattaaacatttacagagaaaaaactgaacgcaaaacaatactataaagtgtttatggttacatacatatgaattcatggtattaaaaatttacatgggaataacaacaacttttggatagtggttccctctggggaggaagagaagggaagggactggggagggatatacaaggcacttcaactgtgtttgtaatgttcaaaaatatgtgaaagataaaatgttaaaattgataaagctgagtggtatcacagatgtttgttatatttttcatagttttctctatgttgctaatatgttataatttaaaaatttcttagaaagataagacttgtgccaagttgtttgcctttactcaaaacaacctttggctaatccgctattagaatgtattatttatcaa

SEQ ID NO: 133173 - DNA, 1036 bp, Homo sapiens
acgcctgcagtcccagctactcgggaggcaggagactcgcttgaacccaggaggcagaggttgcagtgagccgagatcgcgccactgcactccagcctgggcgatagagcgagactctgtctcaaaaaaaaagaaagttttgagtgaagatctgaagagtctttggtgcatgagctcaagtgtgctttatttattaataatactaacttccattttttaatgctttctatgtgccaaaccttctgtgaagcactttttatacattacttaatcctcacagtatccctctgtgagacagatattgtagctatttaaggaataaaaaactataactcaaataaagagatttgcccaagttcttagatatagtaagtggtggagctggaattcatactcagttccattagatcacctcactgtactgttcagagacaggggcatgcattttctggtttgaatctagacggtcattttgtacatacttggtaatgtcttctagttcatttcttagttttgtagtttgcttattatcttgtaaaataaaaaaataaaaaacattggtagttacggacaatattttctattacttcatattttgggaaagtagtgggaaaagtctgtaatttaaatacttacacccattatacaggcttacttctcattcctgagggatctgtatgtggatttagagttcctttaataatcattagctgggcgtggtggccggcatctgtaatcccagctactcgggaggctgaggcagagaattgcttgaacctgggaggcggaggctgtagtgacccgagattgtgccactgcactccagcctgggcgacagagcgagactccgtctcaaaaaacaaaacaaaaaaaagatctaggtccccccagttatgaagttgcagggagaagcccggaggtcatcataaaaatatttacttagtgatattacatttaaaaaattagtacctatttagtcgggcatggtggcgggtgcctgtaatcccagctactcaggaggctgaggcaggagaat

SEQ ID NO: 133174 - DNA, 1068 bp, Homo sapiens
gctaattttttttgtatttttagtagagacagggtttcaccatctcggccaggctggtcttgaactcctgaccttgtgatccacccgcctcagcctctcaaagtgctgggattacaggcgtgagccactgcgcccagccgattttttttcattaaaaatattttcagtagaaatgttttttgttatcgttatttttaaaataagagatggggtttcgtcatgttgcccaggctggtctcaaactcctgagctcaagtgatccatccatcttggccttccaaaatgttgggattataggtatgagctaccacgcttggccaggaaatgtatttttataattaaaaaatagttactggtaatcaccatagaataaatccataatgtattccctagtcatctctactttcccacacacagcactcctaactgctgcttctcagagggcaccatccgctcacatgcctgtgtatctttgcttagtaaccctgaccacttagggagttcctgctcatcttttattcagttcaaatgataacatcatgaagtctttcccagccaccctctttgcttattccacacaattatttcgtgtaattatgtacttacagtgtcttttctgctaggcagtgaacttctctttcatttattttgtaagtatttgttgagtgcatatgtgtctggcaccatgtgtattgtatactgcagatctaaccatgaccctaggcagacaggttccttctgtcttcagggagtttacagtaaagttgttccttacagtataatattaagtattatgatagaagctcccagaatgctttgggagctcagagaattggtaggtctaccaggctggttaaacaaggaaggcttcctggagggcataacagctgaatacagttatatgccacataacaacatttcagtgagtgacaccatatacaacagtggttccagaagattataatggagctgaaaaattcctattgcctaatacttactatgttatacttattattgttattttagaatgtactcctacttaaaaaaaaattaaactgtaaaacagcc

SEQ ID NO: 133175 - DNA, 1076 bp, Homo sapiens
gtaacatcaggatttgatggaaatgtcattatttgggacactaacaggtttgtgaataggagaccatgttaggattatgaacaaaaacattttttttaaagatggtgaacaaattcagtgttctgtcctagcctcaagaaggaaactggctttaggaaaagcaaccaaaaagtgatgatatattttgttaattgtacctagtcatatattgcaactaaaaattttggggaaaattatacaggaaggagaccaagtagtatagttaatgatgaaaactggcttataaaaaaagagtttcctgaatttaaggaaaaatatttttgttatttctcctgtgaaactaaactgtttctcactttttcttccctcaattctacatatatttattttgcaatttttgttctttgttttcatgcattaaaagagtagttctcatttggaatggtactgatctcaaagggaatgtttaggaataaagcgtggggcaattttggttgtcactatgggggaagagaactatctactagcatgtagtcagcaaggaccagagtttctaaacctcctgcagtacacaggtcagtgtgcacagtggactagttgtcccacctaaaatgccagttatgcctctgttgtgcaacattccaacaaaatgtctccttataaagaaattgatatttaaagagttgaagtttgaaaaacaattaaaatatgcctgctttgctagctatggtgaaatgataatatagtaaacacaccatgatcatttctgtgtatatttgtttttgttgttgtttttgagacagggtctcgcattgtcacccaggctgtagtgcagtggtacagtcacagctcactgcagactggatctcccaggcttaagtgatcctcctgcctcagactcctgagcagctaggactataggcatgagccaccatgcccacctaattttttattttttgtagagacggggtctcgctatgctgcccaggctggtcttgaactcctgggctcaagtgatcctcctgccttagctcccaaaatacaaggattacaggcatgagccactgtgtgtggcc

SEQ ID NO: 133176 - DNA, 1102 bp, Homo sapiens
ttttgtttatagtgttgttattgcaggtgcttaagtcctgatctttttatttgcttaaaaggcaatcctcatggcttccaagtatttccttctctggaccagaaagcaccaggaccaatgagaggagaattgttaccttttacctttctagagtcctttcatgtcacataactttggttcttacttaaataaagagctttctgagatgtaagatccaaataaaagaacccctagtcagcttctatgccttagccttaggtcagtgacaattactgctgtgggaacttggatcttttgttctatttataccctttccccacaccttcaccccgccaaaactcacacaccatacattggggagtaccacgctctttaacatatggtagcataaggggcagactaaggaatgacggcatgggaggtggctgccagaaataaaaagctttgatgaactgccttagttttttgataatacaaatcccacatcctcattttcttatatctcaggagtttcaccacgaaatagtcttgaagtcgtaacccctgaagttcttggtgagagtgaccacggaaactgcatcacgtccttacagctgcacccaaaaggctgggccactcttcttcggtgctcaagcaacagtgatgatgaggaggtacaggcagcagcactccaccttcaacagggctcattggacaaattgccattgccgtgtgtgcagagcttaggccgatcgctgactgcagtctctgccttcaagggcatactgctagagatcctgcttctcgactctcctgtttctgtcctctcttgcttcatatggtatcattatcccttccaaactcttcttattcctctcctgctggggttgagcaaggtgggaggtactttaaaggccagcatcagctcagtttttgcccagcttcttaaatcttgcctctttcatctcaccctaaacaaacaaacaaacaaacaaacaaaaaccccttgtataataaacataggtctgaaatgtttcagctaagctggctaaatgtgagattttactaagccaattgagtatcataattttctttttttaaaaaccaggggaaactctgggaa

SEQ ID NO: 133177 - DNA, 1528 bp, Homo sapiens
tccgttctctgtactctcataatgatgtggtactgacaacaaagttctctccaacacattgtcagattgcctcagggtgccttagtggacgggtttctttgtatcagccaaagttttaggcacaacttacatcaaataaggaactcttctggtgtttgacttaggaattgcttcaatttagatgaagtattttctttttagaagatcttataagtttgggtcaagatcctggttcttatgggtccatgaacacacttgtgaccttagtacttggtcatccagcatcatacaggcatctccaagttagactctatgcagcatcatcttttgcagcattcctctgctcctgctgatctgtgccactgaactccagttcttctggtcattttgcatggtagctcttgtcacgttccttccttcctcactctctatttctctttccctctccctgtccctctctttctttgtgtttgttgattttggtgtcaattttgtggacatttggcaggagttttgactggggtaggagaaacccatgacattagaattgaataaaacctagaagttggatattggcatattggttgttgaaaaataaatttcatcctcacttatgagtatacttggccttttaaagttactgttatgtttatctatattgagcacagataatggcattattcttataattgttaagatagtcttgcaacaaaatgtcttttaagtttcctgttaaaattataaaaagattttcatggtgagagggattttattgtgaaattctagaaaaaaatattaccacctctctttgtaatttactttacttgtatgaatttaacatctctagcatgtatccttacttgatattttgttcctatcaacagcattagaaaggaaaggagacagaatgagctttggttatttctattgcacagaaaaggatttttaaaattagattagtataatatctggccatagagtgataagaacaatatgacttagattttctgtatttcatctgccagattatttgaatcacacaggatgatgtgttaacagtattagggtggaagaggaatcaagagtaaagaggtaggggtttactcatttttcttccctgagccaggtgtgacaagccaactctgtcaccattcgtgaggggagagttgcagtcctcttcaagctgttatcataagtacagtagtcagctacttggatatcaagactaagtgctgatatgaagacttgcctttgtgttttgttatgaaacacgcaagcataaagcaggactcaagcacaaggctgactgttctactttgaataacagcttccttgcagtctcctccacatgggtggtactgtgtttagaagggattaccaaaggctggagcgatttaagctatgcactagccttgccctcttaggttgcattctctttaggccactggttctcaaacattagggtgcactgtaaccattacagagcttgtgaaaagtgcagaaacctgagcctcaccttatgagattc

SEQ ID NO: 133178 - DNA, 1030 bp, Homo sapiens
aatgattctttactatagagtacctatcatgtgtcaaataatatacagacttcactactaaccctcacaaaaacttgcagggtaggtggaatgagccccaatttaatttggaggtaatagtgggtcagaaagattaaatgacttgccttaagtcatagagttagcagtgagtggcagcactgggattcaaacccaggtttgtgtcttgtccaaagcctgtgcttactgctttaccattgtgctctttagtttgtaaagtatggtaagctggcctgttatttgtttagtatcttctggattttttttttttaattatagagctagcttaccgtgtgtatcatgtaaaaaaaattcataagattaacaatttccatgagaatatcataaactcagggcacacattctggccattcctgactaaaaaacttcaagcagaataagcagctataaaatagaaaagaaaaattaaggataaacggcattgtgaaaaaaaaccgagccacacagatgagaattaaaaattaacagccagcaaactcaaaagaacctttgtcctccttgagatatggtgatgatcaaaaagttagcaaggaatattaatcaaggaattaaagggcattaggaatgctatagtattggaagaaattacatcttaacatttcaaagccccatttcacttaagagtaaaatctaatctgatgttttttactctgaattttattcagtaatttttattcataattcatgataattggtaatgtagtataattgttagtaaatgcagtacaaattgttctactgttttaaaaagttttccgcagaacagtgcatttatggcaatgctatgtttaatgagttagggacatcaaatatatagtagttccttattttcagttgtgaaaatgaaatggctaaagcagaagagacgtctattttagtcttttaaaaatgtgtgtgggtggtcttttttcctcagaagcccaaagcacatgtatattttgttatttctccttgctatattcctgagact

SEQ ID NO: 133179 - DNA, 1118 bp, Homo sapiens
agtgattctctcagccctgaggtatacagaatcatttgcctcagactgctgttggattttaaaatttttaaaatatctgctaagtaatttgctatgtcttctcccacactatcaatatgcctgcttctaacaggctccccactttcttctaatgtgctgttatgagctttggacatgagataaccgtgcctgttcagagtgtctacagtaagagctggacaaactctggggggacacagtctttgagacagctcttttggttgctttccacttttctgaaaggttcacagtaaccttctagataatagaaactcccagttaaagcctaggctagcaattttttttagttgcaactaagtaagatatactacaaactaaggatgctgctagactaaggaataaacagcaaggtaccaaagtacagcaaagcaacaacaaaggctctgtatttgcagaggggtctatcatgcttttaagaaaaaagaagagtacaggaaaaaaattcagatagacataagagtattttggatgccattaaactttgtcaataaccattaaaacataggcttaaattatcacgtattgttacaaagacacagttttgtctcattataaaataagattatatgaaatttatattctagaaatgattccaaatcatgtcctaagaatttctcccattcaaatgataatggaaattactgtcaaaaggaaaatctcaaagttaccattacgctgctctcttgtaaatgaactagggataaagatatgggttttatcaaaagccctaaggaatatatctcacattcacctcctatatgtatgtgtatatataaatgccactataaatgaaaatgtcacccagagataataaaataatttttaaagtttaaatctggtccaaagtctttaaaataggtagattttcagctttcttaagtttctccctcatttagatttcatggtttttacataaagggtgaatatttgaattttcttttaaatttcactgcatcttcaattgcccaactgtgtttcctgataaattttagattcacatttttaggaaatttggagtattccagacaatatactagatacccagaaacttttctcag

SEQ ID NO: 133180 - DNA, 1001 bp, Homo sapiens
taaatgcactatggctggttaaatacagtgaccatccttcttccagctgtaaaggatgaagcgtattaagcattagccaggcagtaataaagctaaatagccatacagcagctctgacaatgttgtgctggatattgcagtttgctttcaaggtgcagatgtaaggatttaaaaaaataataatttggcaccaaataaatatgagtagcatccattggcctattaaatcgagtcaggatttgaagggaattgagtttgagaaatgaataaataaaggcaccttggtgcctgaccccctcaatcatgcgtgtgactttgagcactcacaggtgtgtgcagctactcagcccagggcaggtgggttagcctggggttataccttggccctgggaatagacaccattgggcctttggttttgttgggcttccttttgtctttacactccacacaggtggtagaaatctgagttctaaagcacttttgtgaaatacaagctaagtgagaattctaaagaaaatgctttggtttctgctgtctcaaataagtggcatttaaaaacaattattaataaatatttttaatggttttaactcagtatttttttttatttctttgtcactctttacagcttttgaagaccaaactgcaaatacattaccagggatggttttgtgttgtcctatagacttcttaaatttgacaaaaaatttagcagaacttgtaaccaacagctttgtctgaacttgaagtcaaaatgtgttgttaataagagattctaactattgcttttaccttcagtgtgaactagtgtggtaacaactttgaaaaggcaggccgggtgcggtggctcacgcctgtaatcccagcactttgggaggccaaggcgggtggatcacttgaggtcagaagtttgagaccagcctggccaacatggcgaaaccccatctctactaaaaatacaaaaaactagccgggtatggtggcacatgcctgtgatccc

SEQ ID NO: 133181 - DNA, 1159 bp, Homo sapiens
tggtggcgggcgcctgtagtcctagctactcgggaggctgaggcaggagaatctctttcttaattggccaaatataagttggtgtcgtaactccaggccacagtgagttatgggcaaagcttttttccttaagcatcaacaaaataggataaaaggttccaataggaaaatacaaggttttttttttttttttttttttttttatcattacctaagagctttaggctaattgcctggtaaatagctgtccatctgatggcctttgacagggaacctaatccccaagataggattctttttcttaaaccaatcttgaaatcgcctgcattgaaacataagtggctgtgaccggccagaggagaaggtcctcaggggccaggggctcctcaggcttcctttgttactccattgcttgcttctctgccctcaggagcagctgcagaggacagtcttcattaagctcaagcatatgacaaaggggcagaacagaaaagaaaaacagcttattaggtataggcttttcatgataaattgcttgtattagttttgaaactaagcacctattggataggcattatactatttctatttagatatggtagatcaaggagctatgaaagttcctgttttgctttctaggtttgaaagttttctgtttgattctgactgtgatcttcaacccttccaaaatgtccttgtgttataatttcacttatttcattgccaaaagatgaagggacttgaatcttgttatagttgttccatcctgttaacaagttttcattttgtgtgtggatcaaattctggttagcttggtttctttgaattactggtgccatctcagcaaaggcctgtggttatttttccccttgagtgggagttggtcatattcaagcatcctgttctcttaaaactctccttttaaaaaataaacacttccataacattttgttttggaagtctattaatgcaatcccacttttttccccctagtttctaaatgttaaagagaggggaaaaaaggctcaggatagttttcacctcacagtgttagctgtcttttattttactcttggaaatagagactccattagggttttgacattttgggaacccagttttaccattgtgtcagtaaaacaataagatagtttgagag

SEQ ID NO: 133182 - DNA, 1438 bp, Homo sapiens
tcctctggccggtcacagccacttatgtttcaatgcaggcgatttcaagattggtttaagaaaaagaatcctatcttggggattaggttccctgtcaaaggccatcagatggacagctatttaccaggcaattagcctaaagctcttaggtaatgataaaaaaaaaaaaaaaaaaaaaaaaaaccttgtattttcctattggaaccttttatcctattttgttgatgcttaaggaaaaaagctttgcccataactcactgtggcctggagttacgacaccaacttatatttggccaattaagaaagagattctcctgcctcagcctcccgagtagctaggactacaggcgcccgccaccacgcctggctaattttttgtatttttagtagagatggggtttcactgtgagtttcactctttttggcaacaataatacggcgcccaacgtgggcctcagagaagactcggaaccccaaaggagttgcccgaaaccggagagagaagcggagatcctgatgtttctcagtgccattgtgatgatgaagaaccgcagatccatcactgtggagcaacatataggcaacattttcatgtttagtaaagtggccaacgcaattcttttcttccgcttggatattcgcatgggcctactttacatcacactctgcatagtgttcctgatgacgtgcaaacccccccctccccatatatgggccctgagtatatcaagtacttcaatgataaaaccattgatgaggaactagaacgggacaacagggtcacttggattgtggagttctttgccaattggtctaatgactgccaatcatttgcccctatctatgctgacctctcccttaagtacaactgtacagggctaaattttgggacggtggatgctggacgctatactgatgttagtacgcggtacaaagtgagcacatcacccctcaccaatcaactccctaccctgatcctgttccaaggtggcaagaaggtaatgcggcagccacagactgacaagaaaggacgggctgtctcatggaccttctctgaggagaatgtgatccgagaatttaacttaaatgagctataccagcgggccaagaagctatcaaaggctggagacaatatccctgaggagcagcctgtggcttcaacccccaccacagtgtcagatggggaaagcaagaaggataaataagatcctcactttggcagtgcttcctctcctgtcaattccaggctctttccataaccacaagcctgagactacagccttttatttatgttttccctttggctgtgactgggtggggcagtgcgcagcttctgattttaaagaggcatctagggaattgtcaggcaccctacaggaaggcctgccatgctgtggccaactgttgcactggagcaagaaagagatctcacaggatg

SEQ ID NO: 133183 - DNA, 1009 bp, Homo sapiens
taaccctgagtggacacagcacatgtttcagagagcacagggttgggggtaaggtcatagatcaacagcatcccaaggcagaagaatttttcttagtacagaacaaaatggagtctcctatgtctacttctttctacacagacacagcaacaatctgatttctctgtcttttccccacatttcccccttttctattcgacaaaaccgccatcgtcatcatggcccgttctcaatgagctgttgggtacacctcccagacagggtggcggccgggcagaggggctcctcacttcccagaaggggctgccgggcagaggcgcctcccacctcccggacggggcggctggccgggtgggggctgccccccacctccctcctggacggggcggctggccgggcgatggctgaatctttgtgtacatgttgtgtgaattattttcttaatctgtagtcttagaaggaaaattatggttgtgtgtgtgttccatattcattacacattggtggctctggcagatatacgccccttaggaactaatgctatctgattctttctgtgcctcagctctacgctttctactttgagagtgatcatggttctctttaacatcttttgtcctgagtgttgagcagttcaccacagcatgtgtgtagtatgaggagggaaaaaaaacttaaggaacttggcaattttttgttccaagtgaaagacctagacggttttttgttgtttttattatttcccattgaaactcttaaatatggtttggattgtttccacctcttggctgttgtgaatagtacttctgtgaacgtgggtgtacaaggtctttgagactgcgctttcaattgttttggttatatccccagaagtaggattgttggatcgtatgttcttttttttttttaaagcagggtattactctgtcacccaggctggaacgcagtgacatgaacacagctcactgcagcctgaacttcctgggctcaagaggtccttctccctcca

SEQ ID NO: 133184 - DNA, 1063 bp, Homo sapiens
gatgggtggatgggtgatgggcacagtgccccagctgtgtgccaggcatgtatgtgtgcccagaggccagagggggctaaggctcagcctgctgagaaacatcacaatgggctgacaggattcttaacctccagttctcaccaagctgcagggaagccagatcttggggcagaaagaggccaacgggtagctgagcagaggaagatgaggctgtggtgggagcttcagggccttgaatgccaggctttggagttcaacaaacataggttcaaatcctagccctaccatgtcccatgagacacaattttcctgagcctcagttttcccatctgtaaacagtgatcattctaacaacttaaagttgtttgctctacagtttaaatgagataatatgtggcaacagctcagctcagagcccagtacccagtaggggctcttgaagtactgggtgttgttatatctgttttggccatggggagccttagatggttttgacctgagggctaatgttctggggacatctgggtcaggacagcagctccccatgcacctttcaagctaaggtaaaccagaaatcccctctgtgtctggagtcctgtaactgggtcccacacattagtcccaaaggccaatttccatccttctcctgcataaatattatatgcaagtatttttaagtcatttcatcatgaaaagaagcgatttaacataactattacccaggattcttcatgaaatatgcatcaagcaattaggtctaaaagcgagaggtgaggcctcgcaccctgctcggcggccggcagctgcaggctgagtaatgttttattaaagcccgtgattgcgctgcaaggtggggcctgttattagccctgcgtgcccggcacatttgataatcctgatgatgaggaggtgctttttgtgatgataatgagcgatctgaacgcctgtgacagctccagcaccccggcctctgccagccttacaagactcattagacaggtcacccaccagagacacctctcattgtgactttgccctcgcaagatgtcctatcaaaggagat

SEQ ID NO: 133185 - DNA, 1892 bp, Homo sapiens
accagaggggctggttctgagccaacagtgtcagcatccatgacccaaatagaagagtctagtttcttctctgggtccagccctcaaggagctgtgaagaaagcgcaactcattgctcctactttacagaagaggaaacagaggctcaaaggggcttaacctgtcttaaggccgtgttgtcagggaggggcagaggctgagcctgcccagctcctggaccactgttctttcctgacccttctcagccatttgctccagctaagcttagaagttctccatttgcactcaggtgctaggctgatgatgctgagactatctggtagcaaactaggaggccaaggccaattcagaggggccagtggcaggcggcctacatacctgatgagagagaagtttaggaagccctatctggccctgggtgtgtgatatagatcaggagagaaggactagggcagtgggagtagaaaggagaggtgtgtggaggtagaattgatgagagggaggaggagtgaggagtcaaggaccacatccagatttcggagcagctgggtggatagtggctctcccggctgcaacgtagacctggaaaagaccaggaaaacagactccctgcagctcagcttcccccttcccaatgctgcctaaaacgcagaggcaagaggtgcctgctctcattctgcctcactctgccagttcacggcccagtgcaccaccccccaacccggcagtgccagacgtgcccgtcaacaggctggggttccctccctggactgctgcgtctcccgtctgagccagggatggagcagtgccctttgttttaccggagctccttggtcttctccagcatctgagcagccgcgattacatttccagccggtttttaattgtctcgtatcagcccacataaatctgcctgtgcggctccgccaccagggaagcattccaactgcccgtctgtctccaggaaacctctcgtgccccgggacagttgccttctgaggcattgggtggtctctccaaatgagaaaaacatttctttccaatcacatttctaacatcttgttaatttgaattatttaacaatatttttgcaaaagccatctgggaatgagttggttggcgacttgggagaaggcatagagggtgctgcagggaaggccacgaggacagctgcagacgtcacatctgctatcagtgaaagggtggctgcatggagaggaaggctgtgatcaggagcccggggattacagcctgaatcccaccattcctaccagccaggaggtcaccagtgagtcacttcccgtctcagcctctgagccctgaggcccagatttgcaatggcagtggaagctcttgtaaactctgagaggctgcacagatgcaggtagggtggtttgcagagcctttgtgctgtaggggcttattttactgatagctgggtaagcgatacaaaggccccacaggaaacatgattggcccttacctagaggcattcggtggggcttgaagcagctaacttcacgtggtaaaatcccagtgttaaggcagggcctgactgttccccagacttttggggagtcagagcccaaagggagttgaatcatccaggtcaagaccctggtggggtcaactgaggcacaggaaggcaagaggaccttcctgaggtcctctggaaggctgctggtagagcccccagaagtcccagctcccaccccagggttatcaccctttggagccccgtaagcactgtatattcttctctcattttctccacagacattgtcagtccttgaggcagatttataaaatcagatgtcaaattttatagcccttgtcttcgctcccgcagttcaaatgctagggctataaaatgaggttttgttgtgtatgcg

SEQ ID NO: 133186 - DNA, 1043 bp, Homo sapiens
ccaaagccagtggggctaatggctgcatacagtccttacggagggacctttggctttctaatccccgaaggcaaattgcctggcatcttgcaaacgtgacctaaggagacacctctggggtctggcctgtttccatcatgctgtggcacttggttgttcacagcctctccagcccagccaatgagctctgccccgtccagtgtcagttactgaatgagctgtagccctgcaggagctcacagcctcacaaggaaaggaagacacttacacctataactcacggagaatgtgttcagggctgcccgaagtagaaagtactctttctatgaaagtttccaggctatgaaagagggaaggaatcaggaaggggaatgtgaaggatgagcaggtcttaaacccatgcacaggggagaaaaggcaggctgcagagagaatgggcccagagacagggcagggcggagcttgcctaagaacaacaaatgacacattcatctgagcccaagagagatgtagccctgatcaccaggtggaggggtcggggctttacctgtgaggcagcagggagttctcaaggtttgaaacaggatgcagtgctattgtcagggctgtattctagaaccatgagtgaactagggggcccatgagtactggcgaggagggatgccagcttctgcctccctgtccccccagtgatcccccccttcccctccatgtccctacacatgccacgtgaactggcacagaccgagagctggggaggggcctgatgtaggagtccagaaggcgaacagcacgtgggcaggcatcccaggagaccgaggcagcccttttcaagatggagagggacaacacaggctctgcagtcagatatctgaatccaagtcctgcttccatctctttccccgcacctgatgctgggcaaggtactgcaccttcctgagcatcacgggatgcttgcctcagcaagaagtaaggcttggcagataagccctacacatagatggtgctcagtatataccagtctctgcttctcccagcttttc

SEQ ID NO: 133187 - DNA, 1060 bp, Homo sapiens
tgtagggcactgctccacacttgctattcccaccaagctatgtgactcatcttcacgtgctcagaataaacagggccccggcatctgcagagggtcccttggagaaccttaaacccggccaccaccaccacctgtcctagccaggagaatgctgtctcttccaaactggctccccttaggctcccatgatgcttcctgtcccctgtatagcttcccagaatgccttgagcctgtgaggaaattaacaattgtgttggtaccaaatgctttttgctatgtaatgagtaacagttgtaattaatgtttaacacctgtgaacagcaggtctgcccaggaaaggggggtttcagtgagagaacggggatcacttgtttcctttggctaatgtattactgagggacaggtttttccagttggtttttctatttgacgtatgaataaattcatttagtaatcttaaaaaaaggagaggaaaaaaacaccaatgtttaatagctttgtttcatctgctaattacattgatagaaatattcctccaagtgcctttgtctcctcagtggaaaaaaaacaaagatttgatagaatacttttgctcttctgtttggcagctcagagatcttcatgtggagatttttaagttccctgaggtcagagaccctgcctgtcttgttcacacctgtgatctgtgcctggcacacagtgagccctcagatatttgagtaaatcaggccagacgcagtggcttacgcctgtaatcccagcactttgggaggctgtggcgggtggatcacctgaggtcaggagctcgagaccagcctggccaatatggtgaaaccctgtctccacttgaatccaggtctctacttgagtccaggtctcctgaatcctggaggcccctaacaagttcagcataaaccctgtgtgagtgcaatacagtctcaaaaacaaccacagtaaccacagtgatacatctatgagcactcactgtgcccccaactctcagtgcatagtaccgcccccactgtacagatgaggaaacagagacaacttggcccaggtc

SEQ ID NO: 133188 - DNA, 1055 bp, Homo sapiens
aatgcccagtcaggttccaccacgggctgctggctgcagggagtggactgcagctctgcctccacagggaagtgatgtggcttccatcaagctgtcagcccccttcccacccggcagagacaccagccttccagagcaggctagactctgttcctggcccactttgaatcaccccaggagtctttacagcaaccagcaaggccagcagttgggtctagaaatggccttcttgctctgtccccaacccacccccgccaggtgcagcttgggcccacacgaggcctatgtggcaccccctgcccaatgttgggaaggggacaaggagccttggatgatgtcatggtgtctgggggtggtgcaggttggtgtggcaggtctacctggttgccaggctgtgtggcacagattgcaagatggacaaatggaacctgagcagaaagtggccacgtagggaggggcccacaggcagggaccaaggagccggggtggatagcctgtagaagcagacctcggtggaggtggcaaagacaccaaatcggtgtcttcacacctctgaaggaccagtgtgaggactgggcatgaacatgtcctgggagtctcagtttctccacctgggaagtaagaccagtagttcccacttcagaagggtcttggtgagatttgatgggtatcacatcaggaaagtactggcattgttgctagcatttactgagcactttctgtgtgcattctctcattcaatcctcataatcaccctctgggaggttagtttcctccttttacagataaggaagctaaggtcccatgagaagaaataacttggctgggggcccagcccatggctggtcagcagcagagccggactttgaacctgtcagctccaactccagagcccctgccctaacccagtcaaatgtctggcctctctggtgctatccaagatgctgcaggaaatatgattggagctctcatccccccacagccctcaagaggtatcgcatgcccttcatctcacttgcactaatttcttcatctcacttgcactaatttctgcg

SEQ ID NO: 133189 - DNA, 1123 bp, Homo sapiens
ggtgaatactggagcagagtatagcttgttgcttgtggactgggcaatcttttaaacccccatcacatcctctcaggattactgcctgctctcttccccagcccttaccttctccacattcccatgggcagaccccgccatggccgcagtctgtggggagcacacctgcctagctctcctggtgaatgggcccaggcaaattcttagggtccctttcagttctaacattctctgattctaaagaaagtgctttagtcttcttttctttctatgtatgtagttctgtttacaaacctttctgctccagaggtcaacagaaacccccatcctgttaatgtttctgctttctgcctaagaggcatgaaattacagactgccacctaatattaaaggtcattttgcatgaatgtgtagatgctgatgttcagataacttgtgacttaaaacatatggtcacagactcccttgtgagatcggtctctggaccctcatggattggcccagctaataaggaagacgggcctggtagttaggcaggaggcagcaacatctggcaagctggcctggcacaagggccttcgatgtcctggagctgttggtgagcctctcccaggagagaagatgctcccaaatgggcattttctcagggaaaggcagctgcttcctaaatacacgcagctcctggaagcccagcctgcttaaaatcatatttactctctttcatgtgctcatcttaattacattttttctgctctagtgtctttattcattatttaaaacaactttcaaaaataattacgcgataatcccttctcctctacacagtagctgtttaccttcctgtattgggtttttcagctcttggtgttgtggatgtctgtacttacaacgttgctgtcatcacagtgtagatataggccaaatctgtgatgtcagtatttaccaatgcccaggcaaggagcagaattccctgtggggccctgctcatattgacggagacttgtttaaaaagcctgcgttatactttgccccccacacataaacaatcttgcattttactttttagcttagcataatttcttgcatggtttcccatgtcgctacataatcttcagattgatca

SEQ ID NO: 133190 - DNA, 1464 bp, Homo sapiens
gccttgttgtcctttctgccacttgcccttgtcacacagtgagaagctgctgtcgccctggacagctgttgtttgataagctggccatctgccctggggtgatggagcagagtgcctcggcctccgtgtctctgtgatgtgagaggtacagggttccagtcctgaggtggtggagctggacagcccagaaggccaaccacaaagatgagataacttggggtagcagtactttaggagttttgcccactctgcagtcattttgtaccctcctgtgccagcttctacactgggcgtccagagattgacataaatgagatccaagccccagtggatgtggactcaggtctgacatgtcttgggctttactttgcgctgtggggacctccacagaggtatttcgatcactcaggttccaggggaaaaggaggcaggaaaggcttccaaggaattggagcttggcctaagtcttaaaagatgagcaggccaggagggaaggggctgtctaggcagcagcccaagctcagacctggaggagaggactagctagtggctctggggacccaccagtggtttcgtaggtgctgagctgacacctgagttgggtcctgaagttaactcagaggtgggtgtcatgtagagaagagggaaaggatggcttgcaaatggagatacagcctgtggccggcatggctgcagcttcaagaacttacagaggggagacgtggctgccaagatgttcgatgactagttcataaagggctttctgagccccctaaggggcttggactgtacccacaggactatctggagttgttgaaccttcacctgctcccacccacctcctgcctgtcagcttcccatttccctgactcagactattgagctcattgaaatcctcctgacaccaggcagacacacagattgatcacatagagcctctgctctcaaacctggatcaagcaagaaaattagtccaggataagccggtagatatggagagtcacagggcagttagagccagcactggcaatgtcttaaggccttgggtgattaattgacatgtgaatcagacagataattagtgctacattggggtaccaaagggacagaattcttctccagggtgattaagagactacagtagaaggaggggagatctaggcccaaccttgaatgcctttgggtgttgaatgaggagctgaaagaaaggccattgctggggaggtggggaccagcaggctccaaccttggcccagagccagcacatcagtggacactctgtgtctgtccaacattaggagatgaggagccagttggtactatagagataagggctttagactctcatctaagtgttcattgaattaccaaatttttttaaagaactgctgctttatttaggctctgggctcctatgtacatgatcacagaattctgcacacgtacaggcctcaggcctgagtt

SEQ ID NO: 133191 - DNA, 1517 bp, Homo sapiens
tccctgctgattggattctcacaccaccctggcgagacaggcaggacacgtggtgctatctccattgtatagatggtgagatgaggtctcagagaggctaagggactttcccgaagtcacataggaaaccaggactaaagcactctgccagcaccctgactaaaagccaggctttggcacctgcagggcagtattttggttcattttgtgagatccctcaaccccaactggctctggggctcctatgtggcaagtaaagcctctcagccttgaggggcttccgagggccaaatgccatgcactttataggactgaattgaggagcagcccccaaagactttggaggccaaatcacactgcatttcccaatggactgtacaggttagcccagcgttgcagacagaatcagcccacccggcctcggaacagcgccacctgggaatcagcacacagtgcagaggatgggaggctcaggagaatgcccccgccccctggctctgctcaccacattgggtcaaggtgaagggcaggctgccctgaagatccatgagtgcagggccttccagggtcagttggtaccatggtcaacatggggaaacaagggcaaggtcgtgggcagtggtgaaaatgcggattcctaggccccatcctgtagaggccctcactgaagcccgagaacttgcactgtaatacatggctccatggctctgggacagatggtcccatggttagagagtccctgctttagcaaagagcttaggcctggggtctccttcagttgttcaagctgtggtctggcctggcctggtctgccagcagcagcaattctcgctgacttctcgctccctctcttttctctctccactgcctgtgggagggatggacatccgttctgttgtctccttgaagctacctgtgcaagtcctgaggacccagccctgggcctgtggaaaggaatggaaaccacccactcaggtgtggtgccccagcctcgtggctcttcttgtcagccttcacaaagctgtgattcatactggaatcttgtaaatctctgaatggccaaatagaacagggctgggggtagagggcatggggtgactagtggagagagtcatgagctggaggctgcaggagtgaattgcagctcctccgacagccggtttgagcttggacaaggcatgcctcagtttctccatctctgaagtcaaggcttcagccagatcctaaggtgactttagtgctaacctgtcctggtagtggtggcagtcacacaaagacacgctggatgcacacagggacacaatctcccagaacacagaagcctcccacgtgctgctggtggttgggctgctgcctcggctgcctttgtttgtccccagtctctgtcagacctccactcagtatgcggcgcttggtgtctgcagcttccactcagcactccagaaacctgtttgtgagctcaagtcacactagcctccctaggggatatctttccacagaagcctactttcgaattg

SEQ ID NO: 133192 - DNA, 1406 bp, Homo sapiens
ccctgacactgagcacgttcaggttttcaggaaagttgcagcaggcctggaataggccaaggagagcagacagtcattgatagcacccccgctgtgggctgagggtccttgccctccaggtgctcctgtcacatggggaaggtggacaggggcccagagaacacttgatgtctgtagtataaaacaaactaagaaaaattacactggagagagaaatctggtcttggagaacacagaagaaggagtggtacagcctctgggaccaaagtgtgctgcacaaagagggcagcatcccagcaaagccaagcttgaggtcctgactcaaaatgacctcctcagggaggccttctggccacttatcttacatttccacccctcccccacctctctgatgttgttccttaacacttgtcattatttagcatattacatactttttttacatttcccttgtttgttgtctgtctcactgctgagatgtggccttcacaagggcagagatataggttttgttccctgttagaacctgaagtacctggtacaaagtaggttgtcagtaaacactggttgaatgaatgagtgcattaattcactcctgggacctgggctggtccacagagtcctgggtgcccctcaggagcccagggacctcctatcctcctccaaagaatgccagatctggaaagtctgagtttagccacttgctaggtgggcagggaggctgccttggcgtcagggtgggagttgggtgggcgttctgaccagttctgtctccgcagccggcggactgcatagggatagctgattctgcctcttttccttccctctctgggccgagagctccgtgaaggaagggactggtcctcacccatcttcatttctcttctgggcccagtaaatattcaccgattgcatgaatgagtataggaatgcaagtctgtatggagaagaaagaaaaggaaacaaacaaatactcactataagcagcctctcccattctgctgtgacttgcttgcttgaagtcacagggcctgggtcaggggaaaaatgcagtgcattcattcattgactgggtggctatttgtgagcacctgccatgtgctggcaccgttctatgctcccgggtctatgcatgaacaaaacaaagttgttctcatggagttaacagttgagtgagggaccaaggtggcagtagcctacccatgattccccgaaactcatttactagatgctgtggctccgggttatcaagggctggaattcaggggctttctcaaagtcaggagctgagtggagacttgtccccagggccagggccaccttcagtaggaaggatggtctcagtgctgtcttctggggataagggggacagctgtggcccagtggctggcaggtgtgttcctctg

SEQ ID NO: 133193 - DNA, 1164 bp, Homo sapiens
tgcaggcatgagccactgcaccgactttgccttttaaatgagggtacaccccatggggttaggtccaaggcagggcaatttgattgaggcagtttgatttagaacctcttaaagacctcatgcattctctctccaaagaagcattctagcatatgctgctctgtgtttgcatcctagcttggcagctgtgccctagtttacccacaattcttatttttaagaatataggttattaaaaggggtgttttctgtttgtaacgatccttgctgaagctccctttgactcaaaattatttgtgtgtaattctttgtggcgtcaccccagtgattgatggcagggctgcatatgggtaggatgagccatcagtgcgtagatgctccaggaggcttgcagagctgacgtgaagcttttcgaaggggagatggtgggggaagagagagtggtgctggtgatggcagtggagtgggagtgacatggaaaaagtttaaccttttagaatgatcctttttggatgatattacattttatgtgtatgtgagcgtgtaacttgtagttacagggcatcatcttgaataagtaagcataacgctgacaagaaggctgtgccctccgtgtgccgcaggtggcgtacctgtacaggaggagcgtgggctggagtcaagcagatatgggatggtcacttgccacctgaatgacccagggacctcggttttcccctgcaaagcagtagcctcagagcaggcagtcattagtgcttctagccgctttgggctgctaactggctgtgcgacgatgggcagcacgttgtatgcccccatatttacttacatatggaatgaggggccggtgataacaacaacggggaggcagctggtaagctctctagtacttgcttacagcacttgatgtcagttcttaactgggtcctcaccattaccctttggagtataggctgcccacttgactaatggagaaaccaaggcacagagaggttaaaaaactagcccaagacgtcccagctggtaagtcagttgtggggctgacttcctagcctgtttgaaccatcatgtggagcattctttccagggcctctccagccttggtgcactgtagtttggttttcagattccccagcatagccgtcttgggcagtgattcactga

SEQ ID NO: 133194 - DNA, 1042 bp, Homo sapiens
caagtttgggaaacattctgtctactgtaccaaaaatagcctgtggaagaggagtgcttttaagcaagtttagttttgcacatagtacatgaataggttctccttgtttgaaaatgttttaacattgcagagaaggtctcttttgacttcccctaagcaccccattccaagtccttccctccttcccaaagaggggtcagtttggagtgtgcatctcccagaccctttctttaacttaatagagatacaggtttctgttttgtttttcattaagtaggtatgatgttgtagttatcattctacagcttgcttgctttccattcagagctatgtcatggagtgctgtgccagctcacacagagcaactgctttttttaaattttttttttcagcctgctgcataatgttacatcgtatggaactagcacagtttatttagcgattcctctattgatggatgcagtagtttcgggtggtttctcatgattacttcaggcagcatccttcccatggacccttatgcacatttgggaataaatactgagaagtaaaattgctgggtcaaacttggcgcatttggggattttaatggattctgcccaaagttacccttgtaagtgtctccacccaagtgcatttccactgaaagcatgtggagaggacccaattctgctcacaagtgcagctgtcccacaaaagcaactaaaactctgaccagtccatagggaagtgtggccaaggggcaacacccaccttcctctagtcctttcctttgggatgaacagctgcagactacttcctatcacaaagtgaagtttctaagataaaaacacaggggccccagcagtgtgcgttccagagaggaggcatggagaggccatccccaggccactgctggtttgctaggtgactgacaacgccctgcagtgggccctgtggaaaacaaggggaggtcagagcaggtctccaggaggacaaacctgtggaagccctgtaggggctttgggctgacctggggtctgtagttttgtctgaaagcaag

SEQ ID NO: 133195 - DNA, 1022 bp, Homo sapiens
tgttgtgctgtgtaggatctcacgttgtatagtcaggttcattacaaagtggtaggaaattgatatgttgtcaaattgtttattgttgtggctttgttttttttggagacagggtctcactctgttgtccaggctgaagcgcagtggcacaatcccggctcactgcgacctctacctcccagattcaagagattctcctgccttagcctcccgagtagctgggattacaggtgcgcgccacctatcggctaatttttatatttttagtagagacttgggggtggggggggtctcaccatgttgaccaagctggtctcgaactcctggcctcaagtgatccacccacctcagcctcccagagtgctgggattacaggcgtgagccaccgcacctggtcgttgtggcttttacaaatgttactagaagaaaagttccatacctgatatcccatgtggctgtagtcttgacccttttgatttgtcctttatcttctgtcttccaaaagtgagtctggacgtgtcatcatttagacactacccatggcttctatcatgtccagactcatagcttgacattccagctgacccttacctcttggaaaggcttctttttactccatcccttccatgacagccagctgggaacctctgaccttgtgccaggatgcaaggctcacctgtatgcctctgtgtcttcacttgtgtgtcacacctttatcctcctcatcctcttaagttcagctcagctgtcctgccatttgggaggcttcctgacctcccacccctccctcctctgtgtacacatgtccacacctctggcggaagcagtcacaccatgtcatggctcctggagagccacagtgagagccctgcaccttgcacggggcctgaccccagagtggatgcaggagtgcttgtcagataagtgatctcagagaggttgattgaagagccagtatgctgtaaaaccccaatagtccccaaattgccagtaactccaacaagggaaaaaacctccaaact

SEQ ID NO: 133196 - DNA, 1368 bp, Homo sapiens
ccatccaactctcttccatccatgctgaaaacttccaatgttgagatttgttaccttttgtccggccacctttgcacagctggggttgactttttttttattttaaatgtttactctagctttttgagcacctggtattcacaggaactcgttggttgaactctttttctttgtagattctactactgtcttggtttgactctctgaggtcaagtagaaccagtctaaccttgcttctctcatataaggaccctcagatgtgcgattgtatcttcaaaggcagagagaagctgcaggctataacactgcccacagagccagattcccagccaggaccccagctgctaagggcaaggaccctttgatgtcacaactgtggaggtcttgatggagcccaagtctaggagcttcctgtgggcatgaagtaataggctagagcaggttcccggtgggtgagttgaggttggcactgaggtgttaactgtgcaggcatgtgactggatggggaacaaggtcagattcccaggtggatttggggagtctcagcaaaggagctgtcaggagtggattccagaggagtaggtagcaagtggagcagaggttgcgtggctgaaagcagtgtgatgtcagggttgggcattccctgtcctgcttcttggccccttgtgggggctagctgacaaggtcatacaccacaggagcccagggctgttgctccagacacagcagaacccaagtgtgtcccactgtggtggcatgaaacactcactggctttagggtcggaagtccagagctcaaatcctagccctggtgcttggaagcttagtaacttgggacaagtgataaaattctctgggcctggaatgccccatcttctatgtaggtagaatagtaacagatggtgtttcctgaccattcactctgtgtcaccataggtaacactttcagtacttgatccttaactgtgtgtctttgaggtgttgctgtgagaatccccattttacagatggtaaggcatttgggagatgaggttctggggaagtacattgggtcgttgtgaggattaaataaaatcatttgttgaaatggctgagcacaatgcctagcatttaggaagagctttatgaatgttttatattattttggcctgtgtgtcttgggcctcagtccagctttgaactttgggctttctatagccacagtaaagtcagtggggttgccctgtctgggctgatgatgtggtcctcagagagtgaacctatccttatcttggtgggtctgcttacggttaagctttacctgggatcaccactctgttctaagagcttgaggtatgttagctcactgattcccacaacaccccatag

SEQ ID NO: 133197 - DNA, 1018 bp, Homo sapiens
gacaagtttggtatagaaaataataagtaagcaaaactcagaaaccaaccctaattccgtaattcaaagaaaccaccattaacattttactactttttcatctagccatttttcattgcatatatatatatgtttatttttctcgccacaaaaattaagtgataccgtctatatttttttaaacgtaaagacatggaaagatgtctacaatatcttaaatatttaacaactgtaatttaatagctgcattgtattctgttcacatgttgggcttttcctcgttttcaccaatttaacagtgccgtaatgaacatctttgtaacttaattctttgcataggtctgtgattatttccttggggttgattctgagaattgttggataagacagtaaaaagtctgatacatactttcaaattgtgttctagaaagaccttacaagttgacacctgttttacccttctcacacaatcctcggaattctaatgcaagttagttgcatttgcagtttcctggattcctggtgcaaatgtgtgttgaccatttgtgttgcttttccaaaactgtttactttatcatctgttcatccttttctgctgcagggttttgtctgttgatttgtaagaactctttgtggattaacaatagcagccccttacctgccatttgggttgcagaacattttttaaagtttgtaatttgccttttggttctatatgtggcaattgttgttggttacaatgaattgttttctatttaatcagtctccaccttcatgatttcttgagcatgctgctgagaaaagtcttcccatgtgggcgcggtggctcacgcctataatcccagtactttgggagactgaggcgggtggatcacatgagctcaggattcaagaccagcctgggcagcatggcaaaaacctgtctctactaaaaatacagaaaattacctgtgtgtggtggcatccccctgtagtcccagctactttagaggctgaggcacgagaattgcttgaaccc

SEQ ID NO: 133198 - DNA, 1150 bp, Homo sapiens
ctaatgtcacacagctgcaaagtgatagagcaaggatcacaccagtgcagtcttgagttcaaaacctatatgcttcctctattttccgtggtttcaatggaaataagtagtatgaggcttggatatttactggaatatatgttacatgtctcctcctcccctttacttaatgctactcttcttgcatccctctgctgtaatttctccgctttcagcctttgctttggtgtccctagaagaggccctagagctggcttttctgtttctctgtctcccatctgcctcagagttccagaaatgagatgttaatgcagcacttgagttattttatagagaaattctgagcacagagttggcacatcccaagggacagctgcacaaaacgtgagtcttgtaactgtcatgtcttctcattctaacaccaagcattccttcccttcaaggatttgccgggctgtgtgtgctctgtttggaggaagagactggcggtacattggccctgatcaacaaggaacttaagtttccttgaaggagatcaggtgactgtcctctctaatctgacaatctcagaacatgactgattaccccagggcttaacccccatgacttgaccctatcctctctttgcccccagagcatttctgacccataaaaattagctttaaaagtcaaatctgaaacagctgtggtttcttctgatcagtcagcaaggtctaacttgcctgtggtcaagccttcccctgattagcttagcttgtgctgggagagcccagaagtggtggcctgtggggaatgggtaggccaggcttggccctagaaaataaactgggacgtgtgactttccaacagagctcgcatgctggctggctgacggcaacacaccctgtggctttgtgaggttggttgatggtggtggtaggggtgatgtattttctatttctttttttttttttttttgagacaggatctcactcctgtcccccatactggagtgagtggcacgattacagctcactgcagcctcaacttcccaggctcaggcgattctcccacctcagcctctcaagtagctgggactatagtcacacgccagcacacccaactaatgtttgtatttttttattgcccaggctgatctcaaactcctggg

SEQ ID NO: 133199 - DNA, 1049 bp, Homo sapiens
ctggggaaacctggaggtcttgtatataaaaggcacgagagggtcacggctaactgcactggactttatgcatcctccttgttaccctgcagccacaccccaggtgggcagatctcctttctcttccactgctagtggttcaaaacttcagtaaacattttttcccagttacagttaagactgtttcaaacactaaggaatgatttgttttatagccaggatgtcaagatatttaagacttgactcttttcatcaccagatatttcttacgggtcttctctgtgtcctcccctgctgggtgctggagcagggaccctctgcagcgaatgctatgacagaggccatagtggcgtgatggtgatgagtgctatgatgagacctcgtgttacagggttacaggagggatgaagggcaagggagaggttggggggtgtggcatcgaggagtgcaccttggaggcagggccattattgtgagggaggggtggtcaccatggttggctggagaagaaccctgtgcttcagggaactgcaggtgaagtcccttgtggctgaaattgagaggttaagagttgggcagggcctgagtcagggaggaccttgtaggctaagcacagagggggcctgtgaagggatttagctgcgagagtgttgtgatcagatatggttttttagaagatctctctgggttacttttcacctactaggttgtgactgcgagacctttgatcttttgagaagttgtccagatgttctttctacccaggagggaggaggcagccagggaggctcagcaggacgttatagtgcagcgatcctcaaactttagtgcacctatagggctggttacaacagattgctggggcccatcctgcagcgtctgattgagcatgcctggtgggggacctgagtgtttgcattccatcatttcccaggttgaggggaaatggctgagggtcctgggaccatggtttgaaaaccactcatgcaacagtggcttctccttaactgtccctctgggtcttctggtcagggcagccttgggatgca

SEQ ID NO: 133200 - DNA, 1098 bp, Homo sapiens
ccagagtgctgggactacaggcatgtattagttcattctcacgctgctaacaaagacatatccaaaactgggtaatttataaaggaaagaggtttaattgactcacagttcagcatggctggggaggtctctggaaacttaccatcatggcagaaggggaagcaaacatattcttcttcacatggcagcaggaaggagaatgagtgctgagcaaaggggtaaaagtcccttataatactatcagatctcttgagaactcactcactatcatgagaacagcagcatgggggtaactgcccccatgattcaattacctcccaccaggtccctccaacaacatgtggggattatgagaactacaattcaaaatgagatttgcatggggacacagccaaactatatgaaggcatgagccaccacacctggcctagcacttttttaataattaaaaattttcctgagataactgtagaatcacatgcagttgtaagacagaatgcagagagaactcttatgcactttgccaagtttcccctcaatggtgacattttgcaagaccatagtataatatcacaatcagaatattgatattgataaaagccacacatctcattcagatttcaccagttttacttgtactcaattgtgtgtgtgtgttaagttttacacaatcttatcccctgggtagatctttgtatgggatacaaccacaccatagtcaagatattgaacggttccaacaccaccaagattccttgtgtagccctttgtggtaagctgaataatgcaactaccactatcccccaagagatacaggtcctaatccctggaatctgtgaatgttatagggactttgcagatgtacttaagttaaggatcttcaaagggggagatgatgctgctggattatccaggtaggccctaaaagtaatcacaggggttcttgtgagagggaggcaagaaggtcaaagcaggaagtaagaaatgtgatgatggatgcaagaggctaaggtgatgcaaggaagaggtcatgagtcaaagaatgcagacggcctcatgaagctgaaaaaggcaaaacacaggtttccccctggagtc

SEQ ID NO: 133201 - DNA, 1026 bp, Homo sapiens
caggcatttgaactggcaggagtgggtgtgggggattccaggctaaggaaacagcatgcaaaaaggagtcggggtagaaaaatgcagtgtagtttgtgaacagggaggaatggccagttgctgctgctcagagctatggtggtgggcgggtagtagtttggggcaacacccctcaatgcagacagaggaggttgaacttgttgccgtaagcagtggacagactgaatctctgtctctgttgtcagctgggcttgaggaagacaattccacagcccatgttcaatcccaaatgtatctgctttcccccttaaacacaaataaggctagtttttagttaaggtggatttttttttctttcaggttttatggtgaaattaattccaacatctttaaaaacactgtcctgccctctcctccagggacggatggtgcaggagaaatgaataagaacggcagatccagcgacagtaaaagtctccgctaatgaatttcctccttcccagcctttacgagggcttcttgaacattacatcagacaatgattattccatgatattttaattaattaagggaaagccaggtgctctggtgtctcagtttaatgaattcagaacgtggaagcccagtgcccagggctgagatggacaccaacacttgcccacgctctggctctctggggctgaccgctctcctggaacgtgaactcgtttacggccagggctccttttcagttcagcctcgattgcatccagcagtgagaagtgcgtgggtccaaggaggcagacttccctgtgttgactttcactgtggctgtctcttcctcatgcctacatctcccctcctatattagggaacggttgattctcgagggaagagtaaaaatcctgagtactagggagtgggggaacagtctcccctcttttctccatgcataaacccacccatcacacatttgcagagctcctccagtgcaccaggcatcgccaggtagcaaagggtctacaattgcccacagacctcggagtc

SEQ ID NO: 133202 - DNA, 1416 bp, Homo sapiens
caggtagaaaaccctatgaatgtagtgactgtgagaaaacttttgcccataattcagccctcaaaatacatcagagaattcacacgggggagaaaccctatgaatgtaatgaatgtgagaaaacatttgcccataattcagcccttagagcacatcagaatatccacacaggggagaaactctatgaatgtagtgaatgtggaaaaacttttttccagaagacacgcctcagtacacatcggagaattcacacaggggagaaaccctatgaatgtagcaagtgtgggaaaactttctcccagaaatcatacctcagtggacatgagagaattcacacaggggaaaaaccgtatgaatgtaacgtatgtgggaaaacttttgtctataaggcagccctcatagtgcatcaaagaattcacacaggggagaaaccctatgaatgtaaccaatgtgggaaaactttctcccaaagaacacacctctgtgcacatcagagaattcatactggggaaaaaccctatgagtgtaatgaatgtgggaaaacgtttgctgataattcagccctcagggcacatcacagaattcacacaggggagaaaccctatgaatgtaatgactgtgggaagactttctccaagacatcacatctcagagcacatcttagaactcgctcaggggagaaaccctatgaatgcagtgaatgtgggaaaaccttctctgagaagtcatatgttagtgcacatcagagagttcatacgggggagaaaccctacgaatgtaatgtatgtgggaagccatttgcccataattcaaccctcagagtacatcaaagaattcacacaggggagaaatcctatgaatgtaatgattgtgggaaaacgttctcccagaaatcacaccttagtgcacaccagagaattcacacaggggagaaaccctatgagtgtaatgaatgcggaaaagcttttgcccaaaattcaactctcagagtacaccagagaattcacacaggggagaaaccctatgaatgtgatgaatgtgggaaaacttttgtccgtaaggcagctcttagggtacatcacaccagaatgcataccagagagaaaaccctagcatgtaatggatttgggaagtcctgagggaatgcataccttaccacataacacgtagtgcagaaactcatgtgacataggctgggaacttgtttcccttatccatttcctttttcattaggctcatagtttgtggaaaaatcccaatatgccgtttattcaggtggggctgaccatgggatgtggtgctaatgataaatattacatttacccttggcccttaaaaaaaaaaaagaaaaaccctcacagtcttcctggttcataagatggatttggaggttatttctgcagcaaacttgggtcc

SEQ ID NO: 133203 - DNA, 1478 bp, Homo sapiens
tctgtaaaactgaattactttctatccagttccactggttccactgttttatatctttatattaaaacatatataaatgattgattgatgattttttttcttttagacgctgctgctgaatccatggagagaaaaaggataaatttccagaactatggtccctgtgctccagttcgtcaggcgggcgcggcggagacggagaccgaggaacgccgctggggccatgcggcgctaccgcgcgtggtggctctgtgtctggcctgaggcttctgctcgctcctttacgccttcagccagctccccgtgtccccggaggaaggagcgggccgtggtggcgggaagccgcaggccgcagtggcttcctggctggcgggaggcggatgcggtgcggtgagaggcgcgagcagcgcttgtcccgctgctcatccccgcaggtgggacaggtgtagtctgaaaatacagcctgttgagaaaatgtatctaggtgaaagactggaagaaactatgaccatgttgaagtcagctattattttcaggatcaaacctcttcaattccagatttttgctgaagatcaactacatcatagctttaaaggaaggcttgacaggggtcatttctacaaatatttaattatacaatatactccataacctttccaagtgagaatgcagcagagtggaaaaactctttaaaccatgtggtttgcagagattgtccttgccgttattcctgaaagaagttgactctcacactgatagcctttttaaaagaccagctgataatatttggtctttactaaagaaatttaattccacacaaattctgcaatggccccagaacacaaggaatgtcaaataggatggtatagtcgctttgctaggcatccatagtgtggaaaagctggagtaaactctggagttatgttgacaaacatgacttgaatgagaaggaagtatttcaagaataatatgacaactgtgtgactacaatgaggagatatacttatgacatggcttaaaatatacaagttaaacattacatgggcgatcaagatctgttggatatcctgttttttcataatccagaaagcctttttgtctttccgtgtcaatggaagtgtcgtccagatcactgtctatatggaagcagttgccaagaagcagaagaaggaatctttatttttcacgggaacagaggtgtttaccatgatgataagcaaccagcatttagagctgtttatgaagcactgagaaattgttcttttaagatgacaatgttcattcattaataaaacctttagaattggaactacaaaaaatagtgcatacataccgtggaaaaatttactaaatatttatcaaacaattagcaaaaacataagagatcgctatgtcagatcaccaaaggaaaggtgattcttgttgcctgctacatcaaatggatgaaaagaacaaagcattggaggataagtatgaag

SEQ ID NO: 133204 - DNA, 1022 bp, Homo sapiens
tttccagcaggctggcctcagctctacctacagccagtagcttattaaggctctaggcgccagtgacaccttcagacaggtggttagtgcgccctaaggactctccgcagcgtcgctcaggttcacagaacacgcccaggggcgtgtccagctgtcgtcggggagagcccacctccccggggggtgtggctaagggacgaggcagttctcgtccagagcccaggtaatccgggcgggatcagctagcgtcgcgatgtgatgacgtcaggccccggccaggccgggagtggcgtgctgggcgtgcgcggctgcggtacggcgtgttggtcccagcggttcagctgaggtagggacgtgctgtaggccggaatgttaccggctgttggatctgtggatgaggaagaggatcctgcggaggaggattgtcctgaattggttcccattgagacgacgcaaagcgaggaggaggaaaagtctggcctcggcgccaagatcccagtcacaattatcaccgggtatttaggtaactaaccatcccagtcacaaaatgccgtgaactctggtgtcatgggattttgcgggctgccggtgcctcttctcctgaggcattggggcctcatgatcaagagcaaatgtctttgaggtaggggctgggtcacttgcttctcgtatgggttacctctcatcttgggagttaatgatgcccggtcccctctgcgttagattcccatttctcaagtgagatggaaagttagcctttgaaacaaggctttgaagctaagacacgcccccctaattgtctctgtgacctcttaccaagttatcttaccttcctgacgctcatctacctcacctgaaaatggaaaaatacctgtcacctgtgaaatagggccggaacaacctacctattgccattaaaggatgtcccgtctgtaaaatgcccgacacgtggggctttcgtcagcagattccccttccccaggagccaaagtcctccagccagttggcaggaagtgctccta

SEQ ID NO: 133205 - DNA, 1072 bp, Homo sapiens
atatgactgtattagaagtttggaaaaagttaagaaatgtaaataaaataatactgtttccgggaaataatattcctagttgttgctagagacaggtacagacttgggccacttcgtgaccttttatgtaaaaataagaaataactgcttttgtttttttaaaaactttgtagactgtaagtttattcccgttttttgctcggaagtaattttataaaggaatttatttttggcgtttccccacagttattcagaggctgctctactgagaagatgaacaaatttcttgtccaaaacaatgtatttcaaacgtgcccctcgggcctttcccgtgttgctcactggtaggtcagtagatcattggagaaaatgatctgaagctcaggagtgagaattaataccagcaaccttgttgctgaatctagggatagtttcactcctatccctgaccattttccctttttgaaacactgttcctttggcttctattacatttttcttctgatttttccacctgcttctctggcttctttttaaggctccctcctccttccccctttgtccatctttagctacacacctgtgtaatttctattttgatgtcctacaacttaaaacttaacatgtctgaaacttcgtctgttaccatccccccaaatcctgcttctgtgatcccaaccatttggaatactctaaaagcctcctgactaatctggagtcttgctgccctttaatttattcgttgcatgttagccttaatgatctttataaatgtcaatccgactgcgtcacacctttcagtggcgtccctatgggttaaaattcaaattccttaacatgaattacaaggacctgtaggatctggatcttgccaacctttccagcctgccaaattggccccgcacaataaactaaggttacttcaaaggtgccaagtgttttagccccttggaataggtacttttttactgtgactcctctggctagatgtccctcttaggttctccatagcattttgtgcatctcctattgaatatgtcaccctgtgacataattgcctccttattcactg

SEQ ID NO: 133206 - DNA, 1117 bp, Homo sapiens
agttaggattttctttttttcctctatgaattttagtgtgtacggttcacaagacttttttttctactggagattgacatattgggtttcatatgccacctgctggataaagttggtatagctttatgaatttatcttaactgaacattctgttcattgttgacactacctggctctattccccatttcataaaaacttttatagattgtttaaagcatactataagtagccatatagtcagcctgaagttgcgtctcgttaatgttgaaataaaaggtcactataaataaaagattgtgtgtcaattttagggaaggttaggctaggttgaagaaactgtttcaacttgtaggagtgtttgtaaatatttataaaattttatgtctacataaagtattttgcaacaggtttcaaaggatgctttaatcttatcctctaggatattctatactaaaataatatatgaaaaatagcatgcaaattctcaaaaacgttaggattctttatatgttttttgtatctttaaaattattttgaatttttttatttacaaaaaatatgttttataggtgctgggaagacaacacttctgaactatattttgacagagcaacatagtaaaagagtagcggtcattttaaatgaatctggggaaggtaagtaaagttcaataaatgtcatgttgcaagattttgtgtgactgtttattcctctggtgaattgatattccatatttaaaaatgaaaatgcaaggtattgtattgatgtggatagctttagaaaaattagattaatttctgttaagatttatatgggttgagatactgaaattagttttaataaaattttattttgtataactttggaattcttattaacagaattaaactacatttttacatgaaataaatgactccagaagtaaaaatctagacatatgaaaaaacgtttattttttattttattttattttttttgagatggagtctctctcttgccaggctggagtgcagtggtgcaatctcagctcactgccacctctgtctcccgggttaaagtgattctcctgcctcagcctcccgagtagctgggactacaggcatgcgccaccatgcc

SEQ ID NO: 133207 - DNA, 1097 bp, Homo sapiens
ctcttatagaagttttgttttattttttgttttttaaaatttttttaccattttgtagctgacaagtactgacaataaactgctataagcatgtgtagaaaaaggctcaccttgagtagttaagagtaaggaaaaggaatagtgtgtagcatcgtcttagtggtaagacttaagttgatttagtagcaaatggaagtactagtgaaccacatagatttcagaagtaggagtaacaggttagaagatgtgtcattttaatcttctctagactttttcttaatttttagaaatgtaagtggactgaacagaggaaaaccaaaacacagctggtcaataataagttaaattaatttgacaaactgcctgctatgcatttcatagcattttaaggactatataagcaatggataaggcaaaaactctgcctttaaggagatcagtcattggggggaaacagaagcaaacaaacaaaaaggcaacataatagatattaatattaatacaagaattttaaaagcacagagttctataataataggaaaatagagggaatgattgctcaacttttcttgaaaaagagtcaggaaaatattgaccgagaaggcagtcattgacctgagtcttaaagaatgaataaggtttttacagatggagtagggtagggataactttccaggtataaggaagattttgtattccagggacctttgaatattttagaatggctagaaaacttggtattatgtagcacagaaaaagtggtatgactgaagagatagagaacttaccacaaagggtcttgaatgccatgatacatagtttggattttcttctgtagggagcaaggagttagtgaaggattttaaaagcaacatgactcttgggaggtagattcaatgtgagactaatctccgaggtataggaaatacaggaaggaggagcaacaggtcgggtagtggtggaagcaggtttggaaaatgtgattggttttgtaaacgtttttgagtttgaagtgccactggggaaggcttttggaaatttatttccagagttcaagactgagctatcattgcagtttgctcagctatttactgagc

SEQ ID NO: 133208 - DNA, 1039 bp, Homo sapiens
ttttttagttgaagttttattttttccctttacatattgtatcctttagtgctttatttcactaataagaattatagtatgcaatcatttcccacctctatattcagtatatcaatttttgtttttcctttctacttctgtcttttgctataatttgctgtaatacaggtactttcatcaaggcatccagttctttatatcattctatatttttacttgggagaaatagaaatgttgctaattccatcttactgacaatacctaaattattgtttgttatagaacataatgatttaaatatacaaaacactaaactgtttgagattttttacattttatgcgtgcagaatttacattttatgtgtgcagagacaaaaattgttataagattacaagttaatgtgcaagatgatttccgattcatgagtttcaggttttgatagcatatccttatccactagattagtcttttaaaaatgtgtatgatagggaaaaaatcgagggcatgaaattctgagacttatgggaactaaacttaaatgttcgttgttagatttttttttttttttttttttgctgcgtatgaagttttaggcagtcattgtccaacaacattaaatactgaacatatgggaaaagcatatgatttttcgaaatgtttttctaaagtaatctcattctacatacacttaagagcagttataatgctttagtgacacttgaagtagctatttaatgtgatctcaccactatagggaaggccgttgcatgacttttttgtgtgtgcttaactgctaaacaggagaatcttttcctgagcaaccagctgggaaggatttaatttgacattctccctactaggacccccccaaagagactcattccctccaatagttcctacaagttctttctctttcctaaacttgctgttactaatttacccctcactgttcttcaaggcaaagcatctgcaaggttttcagtcctttccccctcccgtcctgtccccatcagtgttgaaatgtatgctacagttatt

SEQ ID NO: 133209 - DNA, 1033 bp, Homo sapiens
gactggagatagggagactaatcacagaagagatgaaaaggacctgaagtaatgtagtgtggatagggaagagtgagtagatttgatattcaagagggagaatttctaggacttgatgaccacctggatatgagttttggggaatggtagtagtagatgattctctggcttttggcttgagtgactggagagattggggaatgatgctcaactgagagagaataccaggtagaggcatcgtacatatggtagcagaggcaggagggctgtgatgatgagtcctattttggacatgcatttgagatacctgggggctatccaggtaggatgtggctgtaagatcaatccatgatggagacactggctgtgttgtggtcatatcatctgggctgtgggagagcatgagatcgaatgagattgagatacaggacatgaaggtggagagtctaaagagaagctgtgtgtaagtgtggaagaggccatgatgaagacacagtattatgagctcttgccagcaattaaaaccatgagactaaatgaaatgttcctgaaattgtgtaagaagaagacagaagatcacttgttgatcttcacttgcaatttcatttccctgtagcgtggctcattccgttgttttcttttctctgtttaaggaaatggcatcagattttcatgatagcatgtacagcctactgtttcggaagacctctctgagcccactgatccccactctgcctccctagaagtgatttctcaggcacacattctctttggtcctcttgctcctgtgactctttgggaactttccctagaggcttctgtttcatttgttctctgcttatctctccaagcagattcgagtcctgacagcagggatcatatctttgcctgctttgtctcccccaaccaaaacctaacagctctttctttattttttatttttattttttgagatggagtctccctctgtcacccaggctggagtgcagtggtgcgattttggctcactgcaacttcacctcccgggttcaag

SEQ ID NO: 133210 - DNA, 1013 bp, Homo sapiens
attgtgtatttggctgcatatgaatatggcatgaagaacagaagaaaatataattcacttaaaggaggtatatcataggatatagaaaataatatccagggtcaacaagatttggagcacctgatacgaacagccaggaaatgggatgccaatgagggtctactctatgcttccaatgaaagtgaggatggagtaattgaagaaatactcctcaagactaattgaaactaacattcattcccaaaaagtaagccatgtcagcagatgagatttatttttggattaaaaaataacttcacagaaacttttagatctgttatcgcggcccatatccagttacaacattaaatttttttctatatagaaacagatttctaaattcttaacagatatcacactttgagtaatgtcatatacaagtaaattgcagaaaagcagagaatttcagccaacagaagtcactgtagtggactttgacctggactttgttgtgaaataaaactcttgagcttgtcacaccaagttgtattggaatgggacaataaattccaaagattcattgagtccttaaaatgggtgggtaggctttatgtatatgctgggtacaaattcaaatcgactaggttggaaacaagaaaaggatgaatggatttcatgattgttttgaatttagaattttgaatacagttatccaatatttcttctcccctcttttcatgagaaaggattaccctgaaatggggccaggcaggccactggtttccttgaagtcttagttgaaatatgcttcttcaatcattaaccagtaaacagatatgacttccataatcttcactgtcaaggaaagttacctttagcacatgcctgtggatccctttcaatatgtgtgataattttggtttcaagggtcatgtgttatggtcaagtgctgcttcagaatcttagaggctgttctagaacgcttgatgtctaaagcttgccatgtttcaatttaacatcagtttgtgaatatc

SEQ ID NO: 133211 - DNA, 1023 bp, Homo sapiens
tttttttttttttttttttgagatggagtctcacaccgtcaccgaggctggagtgcagtggcgtgatctcagctcactgcaagctccacctcctgggttcacgccattctcctgcctcagcctcctgagtagctgggactccaggcgccagccaccacgccttgctaattttttatatttttagtagagacggggtttcaccatgttagccaggatggtcttgatctcctgaccttgtgatctgcccgcctcggcctcgcaaagtgctgggattacaggcgtgagccaccgcacacagcctaatttttgtatttttagtagagatggggtttcgccatgttgtccaggccagtcttgaactcctgacctcaggtgatccacccgccttggcctcccaaagtgctgggattacaggcgtgagctaccatgcccggcccttcttgaatattcttcatgattgttcttctataagaacattagagtaattttgtcaagttctaaacaaaactgctagtgggatattaattgtaactccattgcatttctgcgtttatttaagggaacattgtcatctttacagttaagctttaacattcagcaggatggtgaatcattttattaatttaagtcttcttttatgttccatgatttcttttttttttttgagacagagtctcgctctgtcgcccaggctggagtacagtggcgcgatcttggctcactgcaagctccaccccccgggttcacgccattctcctgcctcagcctcccaagtagctgggactacaggcgcccgccaccatgcctgactgattttttgtatttttagtagagacggggtttcaccgtgttagccaggatggtctcaatctcccgacctcgtgattcacccgcctcagcctcccaaagtgctgggattacaggcgtgagccaccacgcccggccggttccatgattttttaatgttagttctgtacacctatcttttgaatgtattctatttgtttatactctttctttctt

SEQ ID NO: 133212 - DNA, 1027 bp, Homo sapiens
ttatgttctaggccagtgttgttcaacggaacttcccgcaatgatggaaatgttctataatttgcaccaatgcggtagccacaagctatgtgtggctatagggcatttgaaatgtggccagtgtgtctgagaactgtaatttttaatcttaattttagttaaatttaaacttaaataagcacacgtggctgatgactgccatgctggggagtgcagttttcaggcggtgatgtactgtaacattgttgtaggggctagtgacaaatgaaaggcctgtgcaaagccagtggcagagcacaagttgtacagggttgagggagatgacacgggaaggcttttgtgttagttgagcaacaaagttgggtgcaaagttgagtaggaaaagatgtggggaatatttttgaaaagaaaattacatttccaatcagtgcgactaccagaagttttctgccattggtggaactagggaagtttgggaaagagtattgtgttattttgggattttgtttgtttgttgtttaaaaaggcaagagacctaaaaggaagcaggaggcgcagggcacgagtttacttgaaagaggatggtctcaatgcaagtcaaatactgatgctagacattcaagttttgtctgttttatatgtgaagaaatgacccagccccacctctccaaaacaaacagatgtcagggtggttcagtgacatatgccaggttaccttgcagttctttgttaggaagatgattagaagctccagtcacatgatgtcccatgttgtcatttgtccgttggactgggtcagtgtttcccaacaccagggccttgactgtcatgggaaacgtgcactgccatttgcctttcttcttgtctcacctcttcaccctgaggttgtcgttctaggcccctcaccccttcctcttctgtttctcctgcctttctgggcctgcccacaataggcctccactgggagattctggttttgatgaccgcaggctgccgtggggtcagaggccacctgcctgtggcaccg

SEQ ID NO: 133213 - DNA, 1026 bp, Homo sapiens
tcctcttctctttcccttttctacttcactccttccataaaatcgatgtgctcaataaatgtaccttcaatacctaagtctccctgtaatcaacttacataaataagaaatcactttctgggacataaacatgaacctggcttcaaatgcaacacgttgtgactgaaaagcaaatgtggctcaggttactactgttaacatgaagcaattcatgtttgaacagaattttcaaaatcaaattttgaactcactgctggagacgatgtggcccccttcatttcctggattattatgcatctcccacagaaccatttgctatattatttctttggtgtttacagaagcagatcatgtttatgaagcatgtccagaagaaggaaatgatatatggaaaatctctacgtggggtatagagtcaagtgatccctaggttacagttgagagctataaataggccagtgacttcatgtgtaccatgggactggtattttccatctttcgtcccacagtttggataaacttagatggattttttaatagttctttgaaaatggaacattagctatccacagagatttaacttgggacaaaaaaaaggaataaaagtcatcatttctgatgacaggattagacagaccttttttcttgaaagtaattgaatattctgtgtgttttttgcagtttctgttgaattgagaatagtgaccatcatttgaggtggaaatagcagaaatgattaatttagaaagaagaaggattgtagggtgggtggaagtggcattttctgcattgtattcttagaaacttagactgttagagttggaagtgctctgataaaaccgttctttaacatacgagaaaacagaggcccaaataccttaagtcccttgtccaagagtatgctgagtgcagaaagccacactgtggctcaggtcctgggccctggccctcagcgtttctcagcccactgcactcatctccagcacttctgatggactcactggggtgacaccatcaaaccatgtg

SEQ ID NO: 133214 - DNA, 1035 bp, Homo sapiens
gccaaacctcagcctcgtcattgttttggagcaagaaagagaattgaacctcactcatgttttgttgcctgtaccattgaacaaggccctgactgttaagactaatgttgagacccttgttttctttgcagactgcatcatctgctattaaaggtgctattcagctgggaataggatacacagtgggtaatctcacttccaagccagaacgagatgttcttatgcaagacttttatgtggtggaaagtgtgttcctacccaggtaagaacatttttatttgtgatgatttccatgctaaggaaccttctttgtgacaaccccatattgaagggcttttctactatgtacatgtttatatgtacagatgtgaatattgggcctttggcagggccaaaggcagtccaaatgatgtttacttcctgtttcatcaggatgtctcacaatttttatgtggagatggtaaataggtttcatctatggactaattctaattagttgtgatgaatgcctggaagaccatatggagaaagattttgaggttcagtgggaaagagtgcagtaatcacagagtaatgtccgccaagggtttatagaaagaaggcttccatgaagcagcaactggtgctaggtttttgctccccctaatttaaaagcatgggctggtaggcccataattgggcctcaaatctgagtttagtcttatctcttctcttttatgatgactttaacttaactttcctcgagaaaacatggataatcctgctgtttgcaaaaataccaaagttacccatatatgttgtctctagctttcatcattttagggtgaggggatcaattatttaaaaacaaatacatctggaaatggatgatggtaatatgaatgtattaatgccacaaaactgtacacttaaaagtggctaacatagtaaattttatgttgagtatattttaccacaataaaactaattaattaaaaattctattactacgttcatttaggaagagaagaagtaatcattaaataagtatcacca

SEQ ID NO: 133215 - DNA, 1061 bp, Homo sapiens
gagaaaccatagaattctacagcataatggtgatactcctgttcagtatcataatcacagtttattgcacattgatgctagtctatgaatagcccccaaagggttattaaagtggatcaaaacaatttattatttcattcgtgttatgtataaatgacataataaaagaatatttgacaatgtagtaaccaatgaaatagtcttcatattatgtcactgcatttttttttaatgtcactgcttatagaagaattggagactttaattgggagcagatgttcaggtctgaatccagttttttctagacacctctttccggatcaccccctaatttctcaatttgcaacctctaatttctgcatcctttgttgttttcatattttcacaacataaactcctacccataaggaagttctgtgtcaggaattcaaatgccatggaacaaagaatccaaattcctaaagagagtctagggtctgcctttactttttatgagagcttggagtccacacctttatattccagggtcccaaattcgtgagtaaatgagaaacccaacattttcttgcttcactcagaatgttttagtgtctctttggatcaccctgaagtcatgggcagtaggctgagaacctcagtgtatcctagggtggtatcagctcttccttacctgcctgtggaatgagtatattgtaggccgtgtgcttctctcacctgtgtgtgatcatgtcataaaattaacaacagcaatacatggtcactctttgccagggttttcaaaagcattcactttaaaaacttccagtgactttccagtagatattattacctttattttagaaatgaaacttctaaaactccaagatgctaaattccttactcagaatcacataactagcaactgatacaaatctcacgcccttttcacaaatcgctcttccacaaggacactttgtctgcacacatggctgggcaagtgctctctgattcctctcggtttttatggtgtcctgtctgcagtctgatagctatttttgttttcctaacttatcctcaactca

SEQ ID NO: 133216 - DNA, 1033 bp, Homo sapiens
gtttttttatgcatgcctcactctgctggaccgttcttcccctcttctacacctggccctcacctgctcgtctcaggactactcagggatcagttcctccaagaccgtgctgttgtggttccccatgcatcctgggcttacttctttcatgggacttaatacactgttactttttcacatgtaaatcctggagcctgaggagcaaggcttaatctatctttatatctacatgcctggttcttagtaggtacttagtaagtgtttattggaatatgtatttgaacagaggaataatcagctgtctaatgatttaaaaaaagagaaagaaaggtttaggtaagaaacctgtctttggtgatttttgtgtatctagctattttttaagttctgcctattttggaggaagtatccagtttcactgcaatgcctgccaaaaattgcactgagaatttaataaagtagattatctccattttgaatcacttgggattatttgaaaagttgtactggttgtcctcctatcaagagtcatttgtgtaacaaaagtacatttatattgcagtgagttttcccatggaagcaatgttgtaaatggtcattagactttttttctttccaacttttattttaagttcaggggtacatgagcagatttgttacatgggtaaattgtcatgagggtttgctgtacagattatttcatcactcaggtaataagcatagtacctaataggtaaattttccatctttctaccctcctcctcccgccctccaccctcaagtaggcccttgtgtctgtcattttctactttatgttcacatgtgctcaatgtgcaactcccatttagaagtaagaacatgcaatatttggttttctgttactaggttaattcacttagaataatggtcttcacctccatccatgttgctgcaaaggacatgatttcattctttttatggctacatagtattctgtgttgcgtatgtaccatattttcattatccagtccactgttgatgggcatctaggttg

SEQ ID NO: 133217 - DNA, 1053 bp, Homo sapiens
gtgctggtctttatcgactggccaccaggtggcagatttgggcaagggtctgcctttgggtttagaattattgcttaggccttaaagtagttcttttttgccagtgggagaaaatccctcaaagatggttttctgggttggttggtttgtttgtctgtttgtttgttttttgagacagagtctccctctgttattcagcctggagtgcagtggcatgatctcactgcaacctctgcctctcgggttcaagcagttctcctgcctcaacctcccaagtagctggaattataggcacacgcccccacacccagctaatttttgtatttttagtagagacagtgtttcaccacgttggccaggctggttttgaactcctgaactcaagtaatcctcccacctcagcctcccaaagtgctaggattacaggtgtgagccaccgcgcctggctcctcaaagatgttaatcctcttgatggcaattgactaataccagaaaatgtcacgaagcgtgcattttggattcaatcatggaattgttgaggacaatcagccatcagactaaagcgatagaaatagtattggaaattgcagcgggagcactgaatggagaaggcactccacataatggaggaggcaaccaagtcttagagaaggtatcaagcctgactataaggacagtgagggaattgaaaaaacaaaaaaggagcaatggagcagggaaggattgaatgcctttcaagtagattcagtaattgctgttagcagcaaaaaatgcagtagtgcctgggcagggctttaaagtgcttgcacaggcagccctagagggccgggctgcttgggaactcttacaaactgacctaccaacttgagcatccacagcctgatcagaggtgggggagttaagggccttctctcccctagcctctactagagcctgtaactgcagggaaaccaagttgcaggctaaactctgcccacacatgcagacattgattagcaagctacaaaaacagtcatgaaacctgtttttataggattagtgaagccccagttt

SEQ ID NO: 133218 - DNA, 1063 bp, Homo sapiens
tgccctaagttgggcagatggtatcacactacctggacatcatctgctcattcactatttgaccagttggtcattcattcacaaatgtcctttttgcaggagggatggaggtgctagacctgcagatgctagcatgaaaagacagatctcctgctgctaaggtgcttaaagtagtggaggtcaggggacaagcaagcagtcaggcagctctgaatgcagaggcaggaagcaccacgaggcaatgggacccacagaggggtagcagggtagaggtgagtgggtctcatgtggggagggaggaagttgactgcagagaaggtgccagggggtgaaaatagcttgagagctgtggagctagaagggctctcacatttgcttattaatatgccctttgaaaaagagtggcctgatacctggagtcactcaaaagatttccaattccgataggaaaaagtcaattttggcttcagtggttgcatgtgcaccccctgatttgctgtatgctgaggcattgtggtgatggacgcaagtgcggagaccttgagcacgcatctgcccctagttcttgccctgagtcctcgaaggaggcaggagagacatcaaggcagacaggcgccgctcatcagtgatgagaccagacctggaactcgcgtcttatactcagtcctctgccctttctgctggattgtggccccccagtatagggtgcaacacacaactggagcatttaagggccacaaagagaacaaattaccaatgattgtgtgttgattctttgagctctttttttttattattatactttaagtgttagggtacatgtgcacaatgtgcaggttagttacatatgtatacatgtgccatgctggtgtgctgcacccattaactcgtcatttagcattaggtatagctcctaaagctatccctccccccttccccctccctccaccccacaacagtccccagagtgtgatgttccccttcctgtgaccatgtgttctcattgttcagttcccacctatgagtgagaatatgcagtgtttgattttttgttcttgcgata

SEQ ID NO: 133219 - DNA, 1118 bp, Homo sapiens
aacaacagcactgggtctccttttggggtgatgcagatgttttgaagctaggcagaggtagtggttgcacaacattgtaaatgtactaaatgccaccaaattattcatttttaaatggttaatgtgttatgtgaatttcaccttaacaactaataatattataggtaaggcacaagttacatctgtagcacaaaaatggccctaatttttaaaacactgctccagcatagcaggtatcacatgtgaggtagcaaaagctggagatcaaagtgtgatacctggagacttatcagtaagggtcaaatgttttttcaggttttgagaatcattcttggaattgttccagaagatatatcgtataactcttcttagatgctaagataagaaggcagatatacactagctcattttgtgttattttctagagctttactccagtcaatttcttgggggcagcatttgtggaatcagtggttcatctgaagggctgtgctgtggaattactatgcatttgttttgtcttccagtggacctaagcgttatgactggactgggaaaaactgggtgtactcccacgacggcgtgtccctccatgagctgctggccgcagagctcactaaagccttaaaaaccaaactggacttgtcttccttggcctattccggaaaagatgcttgatgcccagccccgttttaaggacattaaaagctatcaggccaagaccccagcttcattatgcagctgaggtctgttttttgttgttgttgttgtttattttttttattcctgcttttgaggacagttgggctatgtgtcacagctctgtagaaagaatgtgttgcctcctaccttgcccccaagttctgatttttaatttctatggaagattttttggattgtcggatttcctccctcacatgataccccttatcttttataatgtcttatgcctatacctgaatataacaacctttaaaaaagcaaaataataagaaggaaaaattccaggagggaaaatgaattgtcttcactcttcattctttgaaggatttactgcaagaagtacatgaagagcagctggtcaacctgctcactgttctatctccaaatgagacaca

SEQ ID NO: 133220 - DNA, 1038 bp, Homo sapiens
cccgccaccacgcccggctaatttttttgaattttttttcttttttttagtagagacggggtttcaccgtgttagccaggatggtcttgatctcctgacctcgtgatccgcccacctcggccttccaaagtgctgggattacaggcctgagccacggcgcccagccttattttattttttgagacagagtcttgctgtgtttccaggctggagtgcagtggtgtaatcttggttcactgcagcttcaacctctcaggctcaagtgatcctcccacctcagcctcccaagtagctgggactacaggtgcaaactaccatgcctggctaattttgtttatttttgtagaggctagtttaaattattattattatttttttctgtagattgggttcttgctttgctgcccaggctagtcttgaactcctggctttaagccatcctcccgccttggcctcccaaagtgttgggattacaggtgtgagcccccgctattttttcttgacccttgcctcttcttgtgttacgactttcatcacaatgaggttatcaacttgtagtaagaatttacagcttcctttgattgaaaagtccctttgaaatggtgaatgaagataattcaaacggcaagatttggcagaacattctctcttaagaagactcctgcattcacagactttcagaatgttattacttccttttaattctagtaaggcaagagagaaaaggtttaccctcctatagtatgttctcttctgaacaatatagttcagagttttatttggtaaatggatgcattttgcaatctacatgagaaaacatttcttagaaaatgtccagtgaatggttttatcagtgatttcagtgatgtttggggaatcacctggtagcttaataaaaatggaaactctccaaatattccagatttattaagtcaaactctttttttgttgttgttgagatggagtttcgctcttgtcacccaggctggagtgcaacggcgcgatcttggcttactgcaacctctgcttcccaggttc

SEQ ID NO: 133221 - DNA, 1024 bp, Homo sapiens
aagtgatctgcccacctcggcttccaccttccaaagtgctgagattacgggcatgagccattgcacctggctcaccttgattctgatatgtaattaggtttgggggtcactagaataaacacatgcacacacacacactcgaatgtgagtgcaaaccaagatataaaattaatctgaagttacaagataacacaattttatatacaacatgaaataaaattaacaatagtttcttccttataattaggtagacagttcaagtttggcaaatctaattggcaccttttgatattgatcatcactgaactttagaatccccagtgtccagaactactggtctccataggagatatcaaggtactggactagtatttgatttagcattaatgaacactagttgtgtacccattgtgaaacagggattttcagatatactgtcgttaaatctttacaacaaccttgagcatggtatttctttttttctcattttacggaagagaaaattgaggccactttgggtcttcttgcttgaaaccatggttcttttcctggtcctcccattgtagaataagaaattcctacctactcactccccttcacctccagcagttatattgagatgtaattcatgacaagctatgtacagtattcataaattcttcatgcaaatcttttggaacatcaggtactgtgctaggccctgaggcaaataaaaagatgagccaaaatggaaataaatttcaaaagagcaaaggactcaagagccaagggttcttttcatggtaccctgagacctctgatgagttagattatacttgaatggggtcttaggttggctgggccagctccccagaaaatcaagtcgtgggcatttgcttattgagatgggtcagaagtactctgcatgacagtacctacctggcaccctgaaatgccacacagtgtaaaagaaaggacccaggctttaggtgtggaagaactgacctctgctacaaccagctgaatgaaccacagtaaatctcat

SEQ ID NO: 133222 - DNA, 1002 bp, Homo sapiens
ttttttttttgagatggagtctggctctgtcgcccaggctggagtgcagtggagtgatctcgtttcactacaagctctgccttccgggttcacaccattctcctgcctcagcctcccgagtagctgggactacaggcgcccaacaccacgcccggctaatttttgttgttatttttcagtagagacggggtttcatcgtgttagccaggatggtctcaatctcctgacctcgtgatccgcccgcctcggcctcccaaagtcctgggattacaggcgtgagccactgcgcctggctattagattattattcctggacttttttcttgattcttttccaagggaaaaggacatagggaaagaggaaattctgttttgaataaattctccagtttcaatggtttagattagaagcatactgaaaatgtaaattgagccatttgctcttttggaatttattgcggcttaggcctctgggcctagtgtaatacctgatgttcctaaagatttgaatgaagaattaatgaatacgtagtttcttggggttgatggggagtacgtaagcagggacttactattctacctgctgatttaatgtccatgaaaataatcatacactaaaatgttaataatacatacacacaaacggactagtgtacatggtggacattttaaactctttcaccaaaatatttattgattaacatctgtcagggccagatgaggtggttcatgcctgtaataccagcactttgggcagatcacttgaatccaagagttcgagaccagcctggccaacatggtgaaacccagtctctactaaaaatatgaaaaattagccaggcatggtggcgtgtgctgtccttccagctactcaggaggctgaggtgggagaatccttttagcctgggaggtccaggctgcagtgagctgtgattgcaccactgcactccacctgggcaacagaacaagaacctgtcgcaaaaaacaaaaaaaaaccccgtc

SEQ ID NO: 133223 - DNA, 1084 bp, Homo sapiens
gaccaaagccaggctcacgcctgtaatcccagcactttgggaagctgaggcaggaggatcacctgaggtcaggagttcgagaccagcctggccaacatggtgaaaccctgtctctactaaaaataaaaaaattagctgggcgtggtggcgtgcctgtaatcccagctgcttgggaggctgaggcaagaaaatcgcctgaacccgggaggcggaggttgcagtgagccaagatcacgccattgcactccagcctgggggacaagagcgaaactctgcctcaaaaaaaaaaaaaaaaagaaaaagaaaaaaaagaaaaagaaagtaaaaaaagagtagattaataagacatttttcacgagtcagtgcatttttgttccttgtttcccaagctgcacggcagtgtttttcctttgtagccacagagaattttcttcattctctacagtcacaagccagtattgagtttcttaaatatctgttgtgttttggaggctcgctataacctgacctcaggttatactgtttggatcttgtattatggggaaatgttggtaatagcagagaactagggaagtcagctggatttagaaaaagaaaacttccatttgagggttctttgagacagtagtgggataggtgagtggaagtgtgtagcgcagtgattctcaaacattagtttgcatctgaaccatctggaaggcttgtcaaaatacagattgcaggcccccctcctggagtttctgattgcgtagatctggggcgggggctcaagaatctgtgtctctaacgagtgcccacccaggtcatgctgctgctgctgctctgggaatcccgctttgagaaccagtgctttggaggcctttggaagtgcaggtctggaacttgcatgacggaaggggccgggcttgaggctggtctgggcatcctgtgtgtgcaggggcttggtggagctgtggaagtgggtaccagccaaagcagggcgcatagacaagtgctgaggacgaattgaggaatactgtggggaggggtggctgcgaggaagaacagagctgagagataaggaagaaatggacagagggttatg

SEQ ID NO: 133224 - DNA, 1734 bp, Homo sapiens
cccaaatttcagactcacacaaggaaagcagctgttcagcataaaccacatggttgtacagtttaaggacagtgtgagactcttaccagtcctggcagtggtgggaatccaaattcccaggcatcagctgagagccaccttgtaagtgggtctttcaaaggataacagtcaggcttgctatgttaccttttggatggggatgagagtggcaggtgaggatggtggtggggacccctgaacttggagaagggatctgttaatgcagcctcggggcctggtgctgcaggagaaggtggaaggaagtgaactggggttttgcacctagatcctgggttcagaatgataactgggattcctgcactacacggatagagaagggtggaaaagagttcaaagtcctgtgcattcattcatccatttattcattcttaacaggcgcttatcaatgcctatgccctttgaggcactgtggcaaggtgctaaggataccacggtgagcagggtaaattctctgctctcatgagacccacttctagagggaatgaatgaggaaaggggcagttaaattcattgctatggggatataccaaaggccctagggtacctacctggtaggcttagtgggagttcagaaggcatgaattttataatcagaccaacctgggtaggaatcacacctctactacttattacctgtgtgccttgggcaagttacttagtcacctggtgcctagatttcttcatttcttcatctaaaaacagggagaatttattgccttttttttaagatagggtctcactgtgttgctcaggctggagtgcagtggtgcaatctcgactcactgcaacttctgcctcctggattcaagtgatcctcctacctcagcctcccaaacagctgggactacaggcatgtgccatcacacctggctaatttttgtattttttgtagagacagggttttaccatattgcccagcctggtctcgaacgcttgagctcaagcaaccctcctgcctcggcctcccaaagtgctgggattacaggcatgagccactgtgcccatcctttcttttaaggctgttgtgagaactaaacaaggccgtgtatgtagagtgcttatttcaggggctggcacagtagaaatgttcactaaataatggcttagcgacgcctagccaaggataggtgtgtattctccggaaagactggcgtctgctgcatcttcactctgcaagtcacttcagaggcatccccttcagccctgggctcatgggtgcacacaagcctgcattcctgccacactgctccgcttgctggtctaagaatgctttcctgtttcatttttctggctttttttttttttttttttttttgagacagggtctcgctctgtcacccaggctggagtacagtggcgcgatctcggctcactgcagcctctgcctcccgagttcaagcgattctcctgcctcagcctcctgagtagctgggactacagcgtgcaccatcatgcccagctaagttttatatttttagtacagacagtgtttcaccatgttgtccaggctggcctcgaattcctgacctcaagtgacccgcctgcctcagcctcccaacgtgctgggattacagatgtgagccaccatgcccagcctcatttttctggctcttgaacacacttttctctttacctggatgccccagatttcttttgtcagcctaaggaatatgt

SEQ ID NO: 133225 - DNA, 1014 bp, Homo sapiens
atcatcatagataagaatcactttgtaagagctgcatgttaaatgcatcgaaaattccaataaaaaatgaaactttaaaacatcccatttgcaaaatatcatgtcacttttcactgcaggagaacagcttccaatgggtaacaagtttaagttgattttttcttgttgttagctcaggctttgttacttatttagagtgttgtatagtaatttttatcatgcgtcatcagaaatacaatttgttagaacaatgactgttgtgtgagtgtaattacatcttcctgtatgattaaatgagggctgtatgggacctttactcagaggtggcagctgtagccaaccaagttcagcctataaaagaattcctgggactaactggtactaattgtttgcagaacaaccagtgggagtaatattcatgaatactatggaaatgaaatattccaagaccaaatgctttagcccttgttttttactttattgtggtcagattatattaattgcataatcaggccaagtgaagtgggagctcttggtcttttgttgtttttggaagaaaacttagccttcatctattcagtcctctcatcttataaacagggaaattgaggcttagggagtagttgaagggttatttaaagtcaccaaactgtaatataccctgtcagagttttaagtacactcatatacccctgtcagatttttaagtacactctaccgtatacatgagtatattagtttgtaaatagtgtaccttattacaatttaaaagatattagttctcaaggtaaatattatgaatattcaaaacacaaacattcaattttattttttatttttttgagacagagtctctctctgtcacccaggctggaataaaatgacacgattatagcttactgcagcctcgaacttgtgggctcaagtgatcctcctgcctcagcctcctaaagtgctaggagtacagatgtgagccacgtgcccagcaacactcaaatttttaaagcatgagag

SEQ ID NO: 133226 - DNA, 2079 bp, Homo sapiens
tggaagcttctcactatagatgtaaatactttttgtctgttttggggacccatatagaaaaaagggtcctctgtcttgtggggataataaatgagttcttcattaagaacttgtttcttcttggtggagaatggaactcctagactgatttaaaaataggaatgaaattgttggataatattctaatacccaagaagatgaataatgggtgtgtctagagcccatttttacaatctagacatttaattttctgattttgaaaatgtttttttaacatggtttacaaatgtagcaattcttaagaatgaagaaaatatgccttattactataatgtttttcaacaatacaagtgtttttctgattaaagtgtatgtgcagactatgcttcggggaaatactttgcttgaaacagcagttttccttccacatctctttctgcagccccactgatttaccatgatgaagaaaggttgagaagttctttatgcatagctacaagccttagttctaactttcttctctgaagtcttcttttgtgcttcttacacattaaagacaaggtgaatttaaggtgcctttatggtagacgatatttttagggcctgaatttaattttcaaactgaatgagtcacacagtagcatgtactgatcaacttgcatctgtgtagcaaatatttctttttaacaattagatagttactagcttatttttatcatatgagcaatgtacattcattatagaagatttagaaaatacagaaaaataagggggaaaattacccattgtcctatctccccaagagaactactagaatcgtttaggtcagtggttgtcaacggggaggtggaaatagggaattttgctccccaggggacaattgtcaatgtctggggcattttttttgttgttatagcccaggggttgctattggcatctagttggtagagtctggggatactgcccaacatcccacaaggtacaggacagccccctgcaacaacgaattatccagcccacagtgtcaacggtgccactggtgagacatttgatttagataggttttcttcccatctgtaaaagggtacattttattagaaaaaaataaatatttctttgggaaatcttagagatgctttagaatggaattctgaggcaacattttaattatattattgttattctactgttattgtcttgaaagtaaatggaagtgtgtatatgcgtggagagggcagggggcatacagagactctatcagagtccatgtaggttaatgctgttcagccagggctgtggaaaacattgtaatgactaaactgagattctccaagtagcctctcgtgattgggcatgcggtagcctagaccttagtctcagaatgacgaaagtttagaactgggaggacctttgccagggatggcaaacaggtttcatgtggaagacaggtgccagttgatggttggctgcttggagtatctagctaggaggacctggaggccaaacctgggcttagcgggaaaggaatatcgcaactgattagggatgtttgttctgaacctatgattagggaattggggagatgcaagccgtggcctatatatttaccattcctgaattctagtttagtgttcgaattttacaagtgggaaactcagcctcattggagtcatcctgatcaagggcctggctctcagacagaaacgggatgttcttagtttctgcctcagggtctttcatgaagggattcggcctaaacaagctcccatgattcagatgtgcaagttgattgctagattattaatttttgttcagagataacctctactagcaattggaataagtaccctaaatagacctaaatagatctctgcttctcctcatttccccaaatcaaaccaaacagaagtcaaattattacaaagtagcccttaataagggaagttgaatgtgccttttttttgagagagagaacgtttccttaagctggatgaaatagcattggatcagaggacgaacaagatcttccttgtacctataatactctttgagttctgtgaatacacagggataaaacat

SEQ ID NO: 133227 - DNA, 1083 bp, Homo sapiens
agtgctaactcggtttcagtatagccacaatggagaaagatagaataaaaataattgatacccaaatactaacctaaaatacccagccacctatgaatcttccttttgaaatctgtaaagtttttcagctttaactcatgttacctgacaattttacattatctctcaatactattgaaatccaagaatatattttatttctttctgccaaatgttcttttaatttagaggccctattcaataatagtgtattttagaaacaactgattgttattgggggtttgtatacatgaaaaaactccttggattattatagagaaagttaaagccaggatacattagaaatgcagaaaactccttaaattaaaaagcaagccattttaataaaagaaataagctctccttggagctgatacctgtagaaaagtttgcatatgaagccaaaagcataactaagtacctctcgatttgtaagccatttatttatctttggaagtaataatagaaaccatgtatgggctgggctttaatcccgttgcttgctttgtaggatgtccagatggcatagctttagcctttgcctacatttcctgctgatcctgggagaagggaaatgtgcctcccgcctgtacaaataaaactgacaccatcttttctttctatttcatcgtgtagggagtagagtgttttgcacagacgccacaatatcagtttgtctagcaaacagaagagtatgtccagaagtggtgagaggctgcattcttcctcccactgaaagtttttcctgtgactgcccgagtgaagctgccttcacaagctcaacccagaaaggagcttgcctccttgtggtattcgaaaggcacatgcaggcttcataagaatttgcagaaggggtatttcttgggttttcttggtcttaggggtaaaacgagaaagtatttgccatctttcctgctggtgagcaacccataaatataaacacaagcctaggccagttgcggtggctcatgcctgtaatcccagcactttaggaggccaaggtggatggatcacttgaggtcaggagttcgacaccagccgggc

SEQ ID NO: 133228 - DNA, 1595 bp, Homo sapiens
ggattgtggtgacagttgcataactctgtgaaggtactaaaagccatcctaaaaacgggcaaattgtatggtatgtggacttcagtgcatttcccaaaatcttaccattgcagggaatgagcatgttggatttttaacaacactgtcttttccagggtgcgaagtaccacattactgtcatctccctgtgagtgggattggcaccccggctgcagctccaggagcaagtactccaggaagcacagagctgtaccagtacacggcccacgttgccaggtatttgcttatttaatctctcatcaacctagttactggtctcccccaaaatttgttcgaatagttaccgttttcacattctagaggtagtcagagttaccatttttgatgttgctgatatatacattttcatagaaaatttaatggtaatgtcctatttaccaaagaatagaaacatcttacctgaattaatggactgaattgataggtataactttgccatggttggtgaatgcttattgaggatgacctttctggcatgtaagtaagtacaacttctgtggttcaaaataaatgcctaaattggcatttggtgctgatgatgtctgggattggaggtcattttaataggttatattttttcattatcattgaggtagtaaaattatataacagtggtaagcactttgatgaaaagataaaggacatcagtcacactggcttctaaagattaattatgtccaagcttttagtgaaagagctaggagcgagtattatctatttactgattcacttttaagagtgaatcaaatgagatttacaaggtcttaaattttgacagatgtgggatgcatttgttttttgttacactttgacctctgtttataggccaggccatggctagctggaatggggttgtaatttttttcatgtgcttgttttataattcctgtctgttgaagttggcagcccctacttgggtggattccagataaatgtgtgaactggagtttagtggagtgtgaatggcacactccagaagagcagatagtcgttcagatcctagtcctgctgccttctaattgtgtgatcttgggcacatgtcttaatgcttctgagcctcagatccttcatctgtaaaaagggaacgtcgacatgaaactaaatgagttaatgggcccagcaagtaccaggcccatgctaaggcctttctcagtgtctagttgtccaaatgaggacattcaagtgggggaagtcctcattttccactgaattaacagggctggatgtgggttttgtttactgaaatgttctctctggagctctttttttttttttttttttttttttttttttgagacggagtctcgctctgtcgcccaggctggagtgcagtggtgcgatctcggctcactgcaagctccgccctctggagctcttaaaggtcccagccaggcaaggcagctcatacctataatcccactgttttgggaagtagaggtgggaggatcgcttgaggccaagagtttgaaaccagcctaggcaacatagtgagaccctgtctctatttaaaaaaaaataataataataatttgctg

SEQ ID NO: 133229 - DNA, 1309 bp, Homo sapiens
gctatttaggatctgggaagtgtacaagttaattacccccaccctcaaaaaagaaaaaagaggaggactttaacaaactttgaaagtgatcatgagggcaggacgcggtggctcatgcctgtaatcccagcgctttgggaggctgaggcaggtggatcacctgaggtcaggagatcgagaccatcctggccaacacggtgaaaccccatctctactaaaaatacaaaaattagccaggtgtggtggtgggcgcctgtagtcccagctactcaggaggctgaggcaggagaatcgcttgaacctgggaggcagaggttgcagtgagctaagacggcgccattgcacattgcaatccagcctgagcaacaagcgcgaaactgtctcaaaaaaaaaaaaaaaagaaaaaagaaagtaatatataataactaaaagtgaaagcataagggggaagcagaacgttagatgccgctctcctggaggtaatcacaggggccattgagtggggtgattattgtgggaggaagcctgcaggtgaaccgggtggttattgttaactggtgtttggactgaggaagatgggtggagccaggagaggagatgaggctacctggaagtgggggcggggacgggggaggacacaaggcctttactgaaaaaacatcaggtccttctggcggagttttagctgctgcctcagcactttagtcatctctgtagttgagcaattctcctaacgtgtcacaatgtgtttacatatcgttgtcttcaacacactgtgagcaggctcccttttataaattgtcattatcttctgtatagctaccccagggtatatggtaggcattcaagaaaggtttgttaaaggagagttacgattccagtctactttacagtgtacacgttaactaaattgtttggtgaacctgtaaacttttctctttttttttttttttgggggggggatggagtttcactcttgtcgcccaggctggagtgcagtggcgtgatctcggcttactgaaacccccacctcccaagttcaagtgattctcctgcctcagtctcccaagtagctgggactacaggcgcctgctaccatgccagctaatttttttgtatttttagtagagacggggtttcaccatgttagtcagggtggtctcgaactcctgatctcagttgatccatccgcctcggcctcccaaagttttgggattacaggcgtgagccaccgtacccggctgaacttgtaaacttttcagtgttagttttctttgctcccagttgatgatactttataaccatattg

SEQ ID NO: 133230 - DNA, 1849 bp, Homo sapiens
taagtacctgttgagtagaagaatttttttttttttttttttttttttgagacggaatctcgctctgtcaccaggctggagtgcagtggtgcaatctcgtctcactgtaacctccgcctcttgggttcaagcgattctcctgcctcagcctcctgaacagctgggactacaggcgtgcgccaccacgcccagctaatttttgttatttttagtagagacggggtctcaccatgttggccaggatggtcttgatttcttgacctcgcgatctgtccgcctcgacctcccaaagtgctgggattacaggcatgagccaccgcgccctgcggagtagaagttctttggataaacacattctaggagtggggtcaaaatgtgcaaacccacacgtgaagaagatgactaataaattgtttctccaaagagttgtattgatttacactgccaccagcaaaaaagctaatatatcaactgaaccgtgtttctaacaaccatttactgaatgcttatcatctgtcaggtgttgtgccagaagaatggagtttgtctataaatatttcatcatttcgagtagtgcagtccaacagaactttctgcattgatggaaatattctatatttgcactgtccaatagggtagctattagccacatgtggcttctgagcccttgaaatgagacaagtgtgactgaagaactgaatttgtcatttcctctaattttagttaatttacatgtaaatgtaaacacttactggtggcaagtggtcatcttattgaacagtgccgctctagagagaaaaaaggaaatcagtcagtagatgtaactgccacattctggattattttttaaatgttagtggctctaagcccacatcattaaggtgtggccacctttcaagtgctatcatttttattagtcagcaccacctaatttgggaaatattttatttttttttccttttttttgattaaaacaatttttaaaaaatagagatggggtctcactatgttgcccagactggtctcaaactcgtgggctcaagtgattctcctgccttgccttcccaaagtgctgggattacaggcatgagccaccgtgcctggccagatttgggaaacattttataaataggtgcttagatcaggagagcaatgccttacatcaggaatacaaccaaaatgtctaagtccggagactcgaggcaaagtgggaaacgttactcacagtgctttttatccagaggcgtggacttagttactccaaaggagtccagaagcataacacttctggagaggcatctactggacttgtttttccacgaaacttctagacttgttttgatcaggcaggaagtgaagcaacttttcagggagagagcccagcatctgcatctcctctgggacagaccacaccttttaccttctacttgtgagcctaggacgagttttgctttccaattaagggaagagcagggcaggcaaaactattctcttacaagatggttttttaagatttcaaacccaaggttatatttttaatcggtacctgtttggattctccaaattaatttatatgctcttaaaataaagacacttaacgtcactgcacaattctttgcacatggaggacttcgaaaggaataagcacactgaattgcattagatgaatcctgtcagataagcacttgtgacctactggcaaccttttataagctgatgatgggagaggagtttcaatctctttattggagttgttggaaatgtgccaaagagataacctggaatatattgtcctgaaaagtcctgttttaatatttaatacgaacatcttataaccctcggaattcgg

SEQ ID NO: 133231 - DNA, 2102 bp, Homo sapiens
cggccagcgcggaggcgccacgctcgggtcgggggcgggctgacgccgccgccgccgcgggaggagggacaaaggggtgggtccccgcgggtcggcaccccggcggttgggctgcgggtcagagcactgtccggtggtgcccaggaggagtaggagcaggagcagaagcagaagcggggtccggagctgcgcgcctacgcgggacctgtgtccgaaatgccggtgcgaggagaccgcgggtttccaccccggcgggagctgtcaggttggctccgcgtaagtgcctccttgtgccgcgcggttgggaggagggtcgtgagcgtgagcgtgggagcgctgggggctctgctcgcgtgctgctctgaagttgttccccgatgcgccgtaggaagctgggattctcccatccggacgtgggacgcaggggaggggtaggtttcaccgtccgggctgatgactcgtggcctccggggctcctggaacctttactctgaagtcacttgggctggagattaaggcgcgagtaggggacactgtcttgaacccggtgtcctggatttctgctggcttggaggcatctcgtgtctgttgtgtcgcttgcatgtctttgtgttttccttctctatttcaaaccacactcggtattgatgcaaagttacaggcttgtgtacgtgagagaaactgaaaactcatcacagagcagaatcccttttccctttcaatcagctgcgtctgtaatagaagtaaaagttgtttttttttttttttttttccagtagggaatggggatggaggtttggaaggacccacaaaagaggagtgtgatgaatgctttgtattctagtactagcctacctgtcaccagttctttttatgtcttcatttgtcaagtttctgcttttacacggtagtttaagttataaataatcagggatttctaccacagggttttaacattcttgaaatgtggacaaacttgggagtgagtgctcccgcgcttagtaatggaatacagcctcccacctctatttcagcttcagttcttaggctaggctgcttttctggcagctgtctggcctgagtaatgatggttgtggtttccctgaagttcccagcggagagtcatcccatgatagaaactgccttgcgcttctcactcacgctctcagcccggggaatcccagcggggaggagggagggaggtcgttttcttcagctccccaggtggtctgtgctgggtgtgctgacggtccttttgggaaaacaggtccacctttgccagcgtaattcagaaagagatgtaattttctgagagcacacacctgggcaggagatcgcttgaagtgagaaattcgtagtggtaaatgtatttgtagcaaagtaccactgcatatcctgcttgagaggatgaaatttgattatttagtaagttttcatgaacaactccacttcagtgtggggattacgcagatgagcaagagcgtggctctgtcacacagtcccgttgggaaagcctgcaactcattaagaatccgatgagtgccatttagaaatgtggacagggtactggagcttcctcattgtggggagatggcagaagcggaggtgctttactaaagcaccggtggcttttgaggtgtttcttgtgtttttttcagaactacttctgcagtggggccactttatttcttttcagagctacttatgcagattgatgaaggggaactttcccctctgaaatgctgctgtaactttttcagtaccatccagatattataatactgaatgagcccctactcctgccagtcactgtgggggatacaaagatgaacaagattcaatttctgcatttaggggtctagtggacctgaaactgttagactttactctgcaatctgtgtcgggattcctgagactgagggagggaatgtatgatgccgatgcacactctgcaatacagaaatttagcaaagagtgggattggtcctatatgcattcccttcaggggattcttgctgggaataaagggcatttgaacagttacctcacccgagcaagccactatagaaaatggggccagtaatgcgcccacctcaccgggc

SEQ ID NO: 133232 - DNA, 2627 bp, Homo sapiens
aagcagttgtggctacagatgaatttatctaggttgagagctgattcccaataacatgcctcattgatttgactctaagcagtaatcaggggcccaacagttgttggaccaaccagccttgattttccagagaaggtgatttggtatatggtagtgtctgagggtgagattgccccagatgggagtggagggaagcagaacagttttctctggtgttttactgagtttttgtcttgatcctaaatccaagggttagggtcagaaacacagactcagaggttagatttaacacccatttagtgggttaaacacatcaatggttatgtgaactttgttaaggtttaaaaagctatttagggcctgtttctccctcataggaatttttgcaatcagcctttttagtagatgcccatatagaaagtgaatttgggagggtctaaggtggtattactattaaactttttgaaaaggctgtgtgatagcaatggaaaaaaaaattcaggcatggaaatccaatatgcagtattgcagtagctagttttaattttatttttgtttttttggttttttttttggagatggagtcttgctctgttgcccaggctgaagtgtggtggtgcggtcttggctcactgcaacctctgcctcccgggttcaagcggttctcttgcttcagccttcaaagtagctgggattacagaagtgagccaccgtgcccggccactagttttaattttggatggtacctaggaaagcagttgagctagtatgctgcatacattgtagtgtgagaggcagagttccgagttggagagtgtctgcttccactttttccatttgattaggaaaagcacttcttagaactgggtgactgacagctagagccccagaagacctgcacaagctggggcaatggctacccataacagtgacggctccattctgttttttaaagggattggtgtctctatcatccagctggccattaaacaaccaaagcttcatcatcctagataacctgtgagctctcagaggagacagagtaaggactatcatacccccaaaatacctaatcatttaataaagcattttctctaccttttatgctatcccaaaacagtgctttccaaagtctggtatacagacagacttacaggtggtgcagagagatacatattctatttttcaattatgatgcatgaatattatatgttaggaataaaaacagaaaaccagctaccacatccatttatttcatggctagattgcttagaatgaggcaaaaataaatattaagtaaagcagtgagtttgctttaagaaaaattatcaactctgggaatgagtaatatgaggctaaggcaaaaatggtaaagctagcccttgacatctgaggtgtgcataatactgcttaaaatatgagtgtggtgcttacttatagagagcctggtataccttgaccacgccttcaagaaagtcaaacacagaatggcccagaatagccaggaaagttgaatttgatggactttctgtcttaagcgtgtgcatcctgctcttatccactcagatctcttagatgtggttgcagacagtgtatttgtagagctagctgtttgttttaacgtctggcccaattctcattcctttctctgcttccacaagccattctgcagtttttaaaggtctgttggtatgatatttttgatatgatagagtgataggggaggaagtattttgacactgatgaaggacatcactgtattatcaagtgactcttgctcatgattcattgccgaagaatgtggacagccaaacagcctcacctgtaaatgcatttaatttctcaaagtctttcagaagaatgccaactggatgagtttttttttcttattttttttttaatatgaagcttgtattggtctgtaaaataggctttaacaaggattttcgtaggaacaggaagccttgaggtagaaaacaagtatccctgctttgacctagagagatgcatgctcatggcaggcgaatgaatcaaggagaagagaaaatactgtttcagtagactctctagtgatgtgtgtgttcacaccatttatgagaaatcctaagctttcaattagtaacttgtactttagtcatttaaaatcagcacagatgtttgtttagtgcctctgccagatggttaaagttaaatcaggttttttaacctgaaaaacgtaatgtagctttccttaaccatttacacaccattgtatattgcagaccatagtcagatacattttgttataatgaatgtttattttaccttttagctcaattagaatatcagtggttatggtttctattttgttttcctacagttactgtatgggggtgcagtaacagcggtggtggtgaaagtaagttacttttttctttttctttctttttttttttttttgagacggagtctccctctgtcgcccaggctggaatgcagtggtgcgatctcggctcactgcaagctccacctcccgggttcacgccattcagcctccccagtagctgggactacaggcgcccgccaccacgcccggctaattttttgtatttttagtagagacggggtttcaccatgttagccaggat

SEQ ID NO: 133233 - DNA, 1064 bp, Homo sapiens
aagctgagcacacctgagaccctgggtggagctctacaatgggaataggagtaagtaatgtaggcttcgagagacaatcattctgctctcagtccttggaagactgttcctaggtatatatggcaaagcagatgaaattatttgagggaattaattagcaaaactaaacatttctgtttttgaaaggaatgaatcatttggaaggaacttcctggtgagctcagttttagcagcctggtttctgcgttacccttctgcagtctggctgaatcaattgtgttcttgcctgtgattggtgaggatgcacatgctagtatttattctagcccttatcacttcccatcagccctgagcccctccctggtctgagtcatcttggtaaccccagaagctaacagagcaccaacacatccactaaacgttggactgacttgatttggggcaggcttgttgtataagctagtaggaataagagactaattgagaaattaggacagtggattcctgacatttatatagtgagtagatgatcgtttgttagaattgcgaatttcatccagagaattttgtccaaaaaaaattatagaatttcatctagaccatttttgtaatggcatggaagcagcattagctgcaccactgattagctgggtggcttttgctgtcttgtgactctagtttgcaatttcttttttttttttttttttttttttttgaggtggagtctagccctatcgctgaggctggagtgcaatggcccgatctcagctcactgcaacgtctgcctcctaggttcaagcgattctcctgcctcagcctcccaagtagctgggattacaggcacacgccaccacaccctgctaattttttgtatctttggtagagacggggcttcaccatgttggccaggctggtctcgaactcctgagctcgtgatccgcctgccttggcctcccgaagtgctgggattataggcatgagccacctcgcctggcctagttctcagtttctttatcagaaaatgagtagttacagttgatcatctcaaagtcttttgtgcttaa

SEQ ID NO: 133234 - DNA, 1012 bp, Homo sapiens
caaacaaacaaacaaacttctcctgtagcagtttgctttgagttgtgggtgccacctccctcactgtctttttctgagggtacataaataaattgcatcctagcttgagatcaggagcaatggtttttagttctctgtgtccaacacaattcttctacacagtgtcttgcccaatacatgtgttggtaatactgacaaacatagttaatcttcttctttgaagattatctgaagcaagattttgaccttaggtcagcttcccctgaagtatgtgattggaaactgaacgagttcagattttagtttaggtaaaaatataaccagagaagttgctaccaagcatagttgactttgagctgacctaacttttggattatgtactcactaagaacttacctcttattaattaaacaaatacaaggaaataaataacccaataaaaacactcaaaacaagtttatccccaaatagtgtacttgatgctaaggacagacctaaagtttgttgaggatagaaatgaaaaatgaggcaaaagaaaccaggaattgagatgtgtgtgtgcctgtaccagcacccgtgtgagccccttgcaggtaacgacccatggtccctgcacatcagtcttctgttactaagttttgcataaattgagtctggtggttggcaagctacatatagccagctgcgtgtttgttgttttttctgcctgctagctaagaactgttcttgcattttaaatggttatgtaagtatctatatgatctccgtgattttgcctcttgtagtggcaagcctaaaatatttattgtcaggccctttgagaaaatgtttcctggctcctgcctcagacctcctggaagcagggtgttggcttgatttgtctcctgttctgcaatctgggaatagtagatcaggatgctgacttgtgggaagatgctggctgcatgagatgcccctgtctgcagtcactcatagcttggaaaagcaaaaaggaaaaagggttggatctgag

SEQ ID NO: 133235 - DNA, 1094 bp, Homo sapiens
ttccctctatgcagaatgcccacccacctgaccagttagtcatccttcagcatggagctgtgggagagggagcctccctgtggttgggacatacctccctccaccccaggcctctcatcctcagttaacaacccgcctgtgccatcaattacactgttttgtggttttttacacctttttttctagacacaggatctcactgtattgccaaggctggagtgtggtggcatgatcatagctcactgtagcctccaactcctgtgctcaagtgatcctcctgcctcagtgtcctgagcagctaggactataggcacatgccactgcacctggctagattttaacatttttctttttgtagagataggatcttgctttgttgcctagcccagtcttgaactcctgggctcaactgatgctcccacttcagcctcttaaagtgctgggattataggcttgagccaccatgggggctggcctcgcttcacattttatgtagttgctataaccccaccactcaccctgctccagcccatgtcaccttttctctttcctaaatgtactaagcttgtttcccaccccagggcctttgcatttgctgttcccgcagcaatctggagagctgttcagattttcctaggattaattcttcccagtctgccatcccatggcacttattactacctgagatgatgatatatattgactcttgtctgctttctctgctaaaatcctccctgtgaggaaacgagtttggcacatatcccctggcagcatctgacatggcataagtactcagggagtatatgtcgaatgaatgagcctcttggtgggctcttgtacttgcactgaattgtaattgcttgtttacacatcccacctccccactgggctgtgtgacttcctttgcatcataacttggggtgatttgtctttctgtccacagggccaggtgcatggttgcttttgggtctgtaagtatggaagctaggaatctttgagaaggcacatccttaaacccataagctcttctcatggaggtagctgtccaccacaaaatgtccttctgatgccattggtagaacaagtactggttg

SEQ ID NO: 133236 - DNA, 1024 bp, Homo sapiens
atatacatctcagcctcaaatcaaatggcacactttacatttgcacgctgtttggccaagcccattggcatataacatacactatggtagcaagaattggccagaggctccccaagaccagacttctgaattcctaaccccagctcccaagccccaggcatcccataaaatctttgctagatgttcagaaacctaaaatttgcttctccacccctcccttctccccaagtggtaaagacaaagaacagacggcagggctctttgttattcttttatctgctaagtttacaaaaaggttagacagtggaactttgctgagcaagcattctgtccctgagttgtctctgagcagcaccaaatgagtcttatcttccccttgttatctccaaggacgtaaaacattttcttttcatgctttttaatttctgtgtaacattagccattcagttgacctgaaacattgctagtttatttctagctggcgtgtgtgtgtgtgtatcagagggtctatactgtataaatacttctctaaatattcttttccataatgttgctctaaagtgtctcatttactcaattctgtcaacttagatgctgaatcattttatgtgcttaaaagaaatatctactcggatgctctagttccctggcaagggagagagagggagagaaagaaagctgttgaagtggtgcaaatccaaactgctttcttttttgctcataagtagtgcttttcaaagcgtttggcatccctgccatatggatgtgtcactgtgtgagatgacaacaggatttgctggaaatgtgggccactattgtatccgccttacgtaaccacatggagtgatggaaatgggtgagcagcccggaatgtaggcggtggcctggcccatgcatctccagagaccatgaagactgctcaagccctacataggatgtggatccaggctgttaaaaagttgaggagatggaaaggccgtgtgagtccctctgcaagctctccccttgttttccccaacctttc

SEQ ID NO: 133237 - DNA, 1090 bp, Homo sapiens
gagtcagtattcattttggtgttcacccactcatctccctattttttatttatttatttatttatttaatttttttatttctttttgagacggagtcttgctctgttgcccaggctggagtgcagtggcgcgatttcggctcactgcaagctccacctcccgggttcgagccattctcctgcctcagcctcccgagtagctgggactacaggtgcctgccaccacacctggctaattttttgtatttttagtagagatggggtttaaccatgttagtcagtatggtcttgatctcctgacctcgtgatccacccgcctcggcctcccaaagtgctgggattacaggcgcgagccatcgcgcccggcctcatctccctattttttaaacttatgaaatgtttggtaccataaaagaattaaatatctaaatcatggagcataataattaaacaaatgccatgagcccattacacatatctgcagaccatcaccaagacaaaacacgaaggaaatttgtgtacctcccaccatactctgcctcctgcccaggtcacctcatcctgaatgttatgtttttcatttccttgctttttctttatatttccactgcatgcgtgcgtacacacacacacgcccctaaacaatagattaattttgttggcaattttttactatagtgaaaaacgcataccaaaatttactgtctgtaccatttgtaaatgtacagttcagtagtgttaagtatattcaagttgttgtaaaacattgttttttgagctatataaaaatggtatcacactctacaaatccttctggggtgtttttttgctcaactttatgtttgagatgcatcccttttgtggtggtctatgtgactggtttgttcgtcttcattgcagtaaaacattgtattttaataatgtatcaatttgtccatcctgcccttgagagatactgggatattttccaagttttggctgttgggaacattgctgctgtgaatactctatacatgtgtccttgtgcatttagtcacacggttctcccggtgcctctgcccaggtagaggaatcactgggtcgtggaatgt

SEQ ID NO: 133238 - DNA, 1043 bp, Homo sapiens
attttagaggttcattttttatctcttgtattttgagaaaccattggcacctgctaatacttcagagttaaacggcactttagagacttctttttgtttgtggtgacatatgtggcatagacttacattttttgtggattttgtgatttttctatttagaaacgcactcttgttagtccagattgataacagtagatgtttcttaacctacagctcctcaaccaaaagcagccccgagaacttttcttcgtcctagtcctgaagatgaagcaatatatgggtatgtatttccgtctctctttgttttcccttcttccttacagctctgtctctgtaactgaaatccagaagagtggtggtttttgcctagatggtgattttgtacactgtcagccacctgtaaccaatccccattggtagtgcttatgagaaagaggaatgatttgtgggaacagcaaaatgcggaagtgggtgaactttgtgatgttaatgttgtctgtttacctacctatctagctacctttccagagtgttactctgaatatttgcgtttgtcagataaattcactcccaaataggtgaagtatttattgctaaactacggtgccctgtggtgactgcactgatgtgatggtcccagtgtcagtccgtgtgggggagggaggaggagtgctgctgcgctctgcacttgataatcagaacccctagttcagcagggttcaagggcagcagcctcctggattaggattctgcttctttgtacccagactgtgtctttatttgacaagaatgcagtgcaagcgggccttcctttggaagaattttagccctaactctgccctttatttgctttctcatcttgaaagagttgctgtaaagattctataattctatgtcttcaccagtaaccagggacctactgatactcatctcatggtcccaagaaagataaaattgtaggatatatgagatagatgagaaaaatgagagggctttgtaaactataaatcactctgtagctagaagaaattaaatctctcatt

SEQ ID NO: 133239 - DNA, 1039 bp, Homo sapiens
aaaatattttcgtatgttcaggggctgggagattttctaaatttccgtgaagaaaagtagtgaattcacctagaggcttggcagtcagacctctctgtaagttgttgttagatggggagagtcgctttggtggataaaaagtcatggtatcagcatttatacttaaggtgttttgtttcttgttatcaccctggcaacacggaaggaactctgggaactggcttcttttgctgtcatcccatatggaggtcaggcaataggtggtcctcatttcttgggtgcgaataaattttctgttgactacaaaagaagctttccgttctagaaaggggtgaaaaagattgagtttgcctacgagggcggagaagctgctgcacaatactaagctgtggctgatacaggatcctcttcaggctcacagcagacacggctagaccctgtagactactaaatagctaatcaaagaggatatttattggaaaggactgttcaatgtaaccttcaagtagaaaagtgctgccctagccttttttcactttaatttgtttcaatgctccttttcatggccaaattgaatatataaagtgagccttatacacatgctaatcactttattctgttgtggggtttttaagtgtggctctttgttttgcaaaggtgacagcctaatgtgtggaatgaagacgtgagccagatatgtatattccttatcaataatggagatatatgtgcttttgctcattcctgcttggctgaactacctctttgcttgttatttatctgatagagttgtcatttctctttcagaaacttttatgggatggaaaagagaaaaaagacttctaagtttggttattaaccatgtagatttttaaaatataactaccatgtgtgctttaattttgaccattatagtttttggctatcgaagactgtgatcgagactgatctaaggttaatctcttgtggccagagagatggactgaaggactcccaaggtcctcccacagccttgtggccctgtcttatttaagtaaac

SEQ ID NO: 133240 - DNA, 1922 bp, Homo sapiens
actttccataaaaatgttttctatgcatgcactgaaataattttactagttgtgtcaatttggaataaaactgccttcctgaacagtgatgcagccttatgttctgcctggagttattagtgagtttacatacgacatgtgcaaaggccatggctgctggctggtgcgcctgttacccctgtccagtctgacaagttgtttcacctttccaggccttgttcccatctgttaagtgggtgttgagagtgtcctccttgtctgcttcagagcttgattggcaactgtgttaatgttctccagagaaacagaatgataggagatattggaatcaataggaaagaaagagatttattataaagaattggctcacataattatggagactggcaagtgccaagatctgcagtgaaaatgggcaagatagagactcaggagagccagtgatttagttctagtctcagtctgaaggcctgagaaccaggagagccaatggtgtagttccagtaccaagtcagggaaaagagctgatgtcgccttttgaaggccatcaggcaggaagagtagtttcctcctaattttttatttatttatttatttatttatttatttattattatttttttgagacggagtctggctttgtcgctgaggctggagtgcagtggagcaatcttggctcactgcaagctctgcctcccaggttcaccccattctcctgcctcagcctcccgagtagctgggactacaggcgcccaccaccacgcccggctaattttttgtatttttagtagagacggggtttcactgtgttagccaggatggtctcgatctcctgaccttgtgatccacccaccttggcctcccaaagtgctgggattataggcatgagccaccacgcccagcctagtttcctcttaattgagaaggggtctgattgtcattctcttcaggccctcaactgattggatgaggcccactcgcattggggagggcgatcttctttgctcagtctacccatttatacgtgactgtcattcaaaaacaccctcagagaaaggcatagaataaagtctgaccaaatacctggttatttcatggcccagtcaagttgaaataaaattaaccattgcagcaagccgtgaagctggttatttgtccttgttcctgttggagctgtgactcccataggacttgtgcactgaatggaaggaaggtaaaggggagatcagagataggagaagctgtgttgagtgtctagtactgtaacttgtactaagctgaatgcaacaaacgatgcttttgtctttcagtgtatagagacatcctggcttgtggcagaggggattcgttttttataagaagccactttgaatgtgagaaggaaactccacagagcctggccttcaccagaggggaggtcttccgagtggtagacacactgtatgacggcaagctgggcaactggctggctgtgaggattgggaacgagttggagaaaggcttaatccccaacaagagcaggtaacagagatcgcattctcacataccccttttaatccttccccctgcagaaaactagagaccgccccccttcccccgtaaaaggaaaccccacatgatgagttcattacttgtcaccatctatttcttgtttatggagagtggcctgaactgtaaatagccaccagccagtttattgtgagtaaatttagcatcatgtggttggttgctgaatgtggctgtttgaacaacttcctaaggagcatccactgccttgtaccgtatacaagagatatactgaatggccgtagcacaccagcacacctcttagagacaaggtacccttgtccggtgcccagtctccatccttggagaggtttatgcaccccagtgaacacttggtgtttggctgacagtgcagg

SEQ ID NO: 133241 - DNA, 1016 bp, Homo sapiens
tcatctctgcaaaaaataaaaaaagtttccatatattatcaatgggaaagtttgtgtttaaaaatggtgaggagctaggcagtgtagtcccagctactcaggaggcttgagcctaggagtttgagtttagtctgggcaacatagtgagatcttgtctcttaaaaaaaaatctaggttagcatgtggttgaatgaaaagaaaaaaattgttttaaatggtgaggatagtgaaggcatattcttcagaacagagccaagctgaattggggagaaaccacagtttctttcgtttagttatgttatcaaaagcccatacaatacttttactgcttatcataacagctaggcaagtgtgtatgctttaatggcctttcttgtcatttcagctggtttcaagagacctgtggtcttattcggccccatagctgatatagcaatggaaaaattggctaatgagttacctgactggtttcaaactgctagtaagtctgtcagtgtttttttttcccccaaatttttattttgaaaaatttctaacagaggagttggaagaatcatgaacacccacgtacccttcacctggaatcaccagttgctgacattttgtcacgcattttctctcacccactgcctgcaccatagacacacatacacacacacatacacatactctttgaaaaatttctgcagaatcatttataacactttatccctgaatacttgtgtgaatctcctaagaacaaggactttctcccacataactgcaataccattatcacagccaagaaaggtaacattgatgtggtgtgattttgtatatagtccattttccacgttttcttaattgtcctagttatgtgcttcatagcttttttttaaattcagaatacaaccaaggaccattcatgacatttgatttttatgtctttttgtgatttttatgtctttccagtcccctcttttttctaaataactttgttacactgatattttgaagaatccaagctagttgtctcc

SEQ ID NO: 133242 - DNA, 1030 bp, Homo sapiens
attggtaatattgaagtgggcattaggtagaaggaaatgtgttctgcttcttgatttaaatttacaagataggtggctcatgcctgtaatcccagcactttgggaggcagaggcgggcggatcacctgaagtcaggagtttgggaccagcctggccaacatggtgaaaccctgtctctactaaaaatacaaaaattagctggccatggtggtggcgggcacctgtaatcccagctactcaggaggctgagacaggataattgcttgaacccgggaggcggaggtcgcagtgagccaagtttgtgccactgcactccagcctgggcaacagagcaagaatctatcccaaataagtaaacaaacaaacaaacaagatatatctcatacagcctttacttattaaaacaaagtatttgatgctatattactttatatatccatttctctaacttttccccttttgtaaacaggataagcatgcactactggatgtgactccgaaagctgtggacctgttgaattacacccagtggttcccaattgtgatttttttcaacccagactccagacaaggtgtcaaaaccatgagacaaaggttaaatccaacgtccaacaaaagttctcgaaagttatttgatcaagccaacaagcttaaaaaaacgtgtgcacacctttttacaggtaagtgaaatgtaaatgtagtccctttgctaaaaaatgagaaataaagaattgaagagtagaagaaataattaattaatctgaatggagaatttgaaattgtgttcatgactccttgaaaaatagttaatcctataaaatgggatattaggccaatggcatttatatattgaactttgtaattttgtctatttgaaaatgaccataaagatccatgatgtggtaataattagctattttgatgaagttcatattttcctgtgagactataaggctagtgattgagccaggccaaacacctatgtctctctagagattgtgtcattgttctctactcaccatcaatacat

SEQ ID NO: 133243 - DNA, 1443 bp, Homo sapiens
tctacagataccaagggacaactttatgtttaagtgttacttttagtattttattggaggtagccaatacagtatattagtgtatactaattagtgtatacacctcagcctcccagagtgctgagattacaggcatgagccaccacacctggccgaaaacacatgttcttaaaaacatttttaaaagttagcctttctgaaaataaacattctaaaaatctatttttagctttatcacatccacctataatgtgaactcaaacagctacatgattagtagttttaattgcattcattaaaagggttttaatattcaaagatgtgcaaacatcttcttgcgtctgccatagtcttaaatatcacagaaatgagtgtaaattatgtcaaatagcatccttaataaacatgcctctggaaattaatgcagacctttttgtttatatttctatagctacaatcaacctaaattcagccaatgatagctggtttggcagcttaaaggacactattcagcatcagcaaggagaagcggtttgggtctctgaaggaaaggtatgtggcatagatatgctgctatgaggtgagagtccctgttctgaaacttttctcaagagggcagtgaatgtagtcaagccatgcccatttgaagtgatgctcacatgtgtgctaatcaagtttgaaatttcgtaaattctctgaccaagtaataaaaatgaagggacttttaaaagaagagcagaatgtgacatgtgcagccctacattcacttccctttcacttttaatgtagtaactagtgttatattccaagtacactaatcagagcttacaagatctcatgctgagctccacagcttactaaggacgtgggaaacttagagtgcagatgagaggtgaggttgagcaacttggagaatacggctaaacattaataaaaagaaaagctaatggagttagaattacttagaaaataaggttggttgagaatgtgccatcgttctgggagtttgaatgggtgatatgagaacgttagggaatttgtctaggcctctagaattggatcgcttctccctcggggagatagctcacacacagctgtgctgcagggaggagagagggagattctattacctgtggccgcttttattttagaagcttttggtgttagtatcctgttcaccagctgaactgaggtagttttgtgagacttgacagtgactattttgttgcagaattgactaagttttgctctttgagaactagatgtgtagtcaaagtatctggcatctatggagtgcttccagtttggaagggggatgcaagcttccctggggaggacaggttgaacaggacatagcttctgcctttgagggtctgagaatcttgtagaggcatggatgtgagtgtagcacaaggcagcgtgcaatgtgttgatattactagg

SEQ ID NO: 133244 - DNA, 1130 bp, Homo sapiens
tgggcgcggactatctgagttgcgacagccgcctcatcagtgactttgaagacacggacggtgaaggaggcgcctacactgacaatgagctggatgagccagccgaggagccgctggtgtcgtccatcacccgctcctcggagccggtgcagcacgaggaggtgaggcgaggcaggccacgggcaggaacaggagagcctggtgttttccttgcactctcgtggacagctgtgtgttcagggtgctgtggaaggcattcctaagggttggagcagatgacttccagggagtctctcgctttgagtccacgctggcatggttgcagtctgtgggaaagtggggcaggcaggtggacttcagaagagcttgaggggtcagcactccgcacacccatgccctcaggtgcgatggataaacagaatggctttaggtgccgtctgtccaaattaccagcggaaccttccttcccatgcagtattgttgtatgtacttgtaacctttgattaggtttctctctgtactcttagatgtccttgcttttcttccccatcctgcctttaacctttctaatcttgccaaagctcttgagtgtttccccatcagtttccttctctcttatatttcagttttttaattgagttcatgatcaaaccttcatctgatcacatcacatgtactgtgcatccactgtgattagatagcttatgggatccttgaaatcacattgacaggcactgtaaagtcacagccaagttagcaattattagttgcacctcagagaatgttggaataatgatctttgaagatgggattgttcatatatttggataattattgctgtggatttctctctagcattttagctcattccagtaaatgatttttttctttatgaaatagaactaccaaaaaaaaaaaaaaaaaaaagttcaacaacaacaaactgaagggggagaaaaatacaccattaccacagcaacaaattagtttatgctagacaacttgtaaagaataaattaacttccaaatgcctatagacatggatattagtgacacaagagattttagacttttggagggttcttaaaaaattgtgctttaaaggaagagactctacattggatgcagcc

SEQ ID NO: 133245 - DNA, 1559 bp, Homo sapiens
ataaggaaacccagcccagagccacgagctcagatgaggagggctgctagcagcgatcaacttagggacaatagcccgcccccagcattcaagccagagccgcccaaggtacgtggctgggaagcccaggatgggaaggaagaggaagcagatgcctctgaagcctcctggacggccagggaggagcatgcacactgagatggtgtttaattacggttctgactcactgtgttctctattagagcctatcttttggcctgttgggtgaactcccaaattagggaagggcaaaaaggaaggaaaggcaatattaggagagcatatgattttaggactgttagtgtttatttaatttactcttcttgttaaaaaaagattgtaaagaaaaagattgaaaaatactgtactgtatacccagaatcaccaatcgcagaacgtgtttttcttttgctgtccagctaaagttttctgcccagtctgatttagatgcaccagataattcttactggtgatgtgctaaagagaataatcatcaccactgcttacaatgcctctcattaagagagctgcttatttgtttaataaatcattatccagagcagaatcaatataaagacacaagggcttatatcaaaagattatttacctttagtcagaatcagagctgtgactctatgtttttccttataccagaataaaacctatttaactcaataatttattatttattattactattttttgagacagagtctcactctgttgcccaggctggagtgcagtggtgcaatctcggctcactgcaacctccacctcctgggttcaagtgattctcctgcctcagcctcccgagtagctgggacttagaggtgtgcaccactatattcagctaatttttgtatttttagtagagatggggtttcgacatgttggccaggctggtctcgaactcctggcctcaggtgatccacccacttcggcctcccacagtgctgggattacaggcgtgagccactgcgcccagcctaactcaataatttagatgagaagaaagccataattgattgtgtgagccatcagaagtagtaaatgtgataggtactaagtaataataagtgacctcataaaatacatcagcgaaaatttgcaagccgggcaagactggaagtgtgaaggaaaagtggctgttagcgtgaagcagtgctctcctcgctccccaccccagtctcattcctcagctggacatgggtctcacctgggccggctcatgtaccctcagtgcagcagtgacctcagaagcccactcttcgagtcccaaagcctgaattgttctgagatcttctccaagatgctgatctcctctagaacaaaattattccaggtctgatcttacctccagcaatcacagccctcccagcactttccctattcctttttggcttcctgacattcctaatagactagtataggaagggaggtagggctcaggaagcctggccagtggctgtttgccctgctgtattacattccttgtcagaatggtatttgtggaccacctt

SEQ ID NO: 133246 - DNA, 1008 bp, Homo sapiens
tcctgggcaaagtcaaaatatttgagaagatggatcacaaggccaggttacagagaatgcaggagctccaggaagcacagaatgcaagggtaattgtttttaaactacacatcatcaataagagttttaaataagtttgatttcaacataacagcgaacagcccctttgctgctgctgcagatgtggcagggatgcactgcaccaaaggcaggtgctgtgtatgtcacttcagattgccagctcccagcacgtcccttgttcttccaaagaagaaaacttgacaatataggggaagaagattctgctctttatacacagaactttgtatagagttctggaatgaggaagtgtgaggagggaatcagtgcctctcggaagtcgttttaattagaatgtgatttttttttcttaaacgtgtcttcattggctcccagatttgccgtagaaaccaagcaaactgggtgctaaaacagaaaggcccatagattgtactttttgagctgtttgaatttgtataccatatgcacatagaacttttcaaacaaagaagaatttaactaaaggtctgtggagtatatttgcccagtagatgtgggagttttctttcaggtctagcacaacagcagcagtacatctgagcatttttcttttcttgtcgtaaaatatacataacataaaatttaccatttcaaccacttttttcttttatttattttgttttgttttgttttgttttgagacagggtctccctctgtcaccccggctggagtgtagcagtgtgatcacagctcgcagcagcctccacctctcaggctcaggagatactcccacctcagcctcctgaatagctgtaaccacaggcacatgccactgcacccagctaatttttcgtattttttgaagagacaaggttttgtcatgttgctaggctggtctcgaactcctgggctcaagcaatgcaccctcctcagcctcccaaagtgctaggattacaatcatgagtcac

SEQ ID NO: 133247 - DNA, 1645 bp, Homo sapiens
tcgctgctgggtgagactagccagggagcttaggggtaaggagggcaccccctgtccaacagggagattcttaggtcagggagcacctggctggcttcctcactcaccgccgaagtgggcattggatttgacctattacgaacctggagcaggaccagggatgccctggttgctctgcagaatgtggctcagaggtaagtgatctgctcgggatacccagtcactgtgctcagagccatgcctccccgggcagccggaggacatggatgtgctctggaatgtctttaacaccctttttttgttagttccagaccccctgagccacagaaagctccttccagaccttatcaggataccagaggaagttatggcagtgatgccgaggaggaggagtaccgccagcagctgtcagaacactccaagcgcggttactatggccagtctgcccgataccgggacacagaattatagatgtctgagcacggactctcccaggcctgcctgcatggcatcagactagccactcctgccaggccgccgggatggttcttctccagttagaatgcaccatggagacgtggtgggactccagctcgtgtgtcctcatggagaacccaggggacagctggtgcaaattcagaactgagggctctgtttgtgggactgggttagaggagtctgtggctttttgttcagaattaagcagaacactgcagtcagatcctgttacttgcttcagtggaccgaaatctgtattctgtttgcgtacttgtaatatgtatattaagaagcaataactatttttcctcattaatagctgccttcaaggactgtttcagtgtgagtcagaatgtgaaaaaggaataaaaaatactgttgggctcaaactaaattcaaagaagtactttattgcaactcttttaagtgccttggatgagaagtgtcttaaattttcttcctttgaagctttaggcagagccataatggactaaaacattttgactaagtttttataccagcttaatagctgtagttttccctgcactgtgtcatcttttcaaggcatttgtctttgtaatattttccataaatttggactgtctatatcataactatacttgatagtttggctataagtgctcaatagcttgaagcccaagaagttggtatcgaaatttgttgtttgtttaaacccaagtgctgcacaaaagcagatacttgaggaaaacactatttccaaaagcacatgtattgacaacagttttataatttaataaaaaggaatacattgcaatccgtaattttctttgtggtggatttgtatgctacttcctatttttaaatgcaacttttatttcagttactaatcatagaagtgattactaacctccttgtcgaacattggaaaatggaaacgtgaaaaagaaaattatacccataatcccatccctcagataattttggtgtattttctccaattacgtatttgtggatgtctgtgtgtatgatacttgagggtgtactgtgtttgtagttctatttcctattttttctgtttatcattctatcactaacatttctcaagtggttacaactgtgcagcaaggtatttaaagcgtggtgtacacatcatcattaacaacca

SEQ ID NO: 133248 - DNA, 1050 bp, Homo sapiens
taagtttttggaattaagaagtacacattattgcatgagggtcataataatagccagcatttatttgggcactttccacgagccaaacaccatctaagtcctttacatgcatcctctcctgagaattgtcttatggaggcagcgttattattattttaaagattttctacattgtattctggtgatgtttgttgaagtacttagtggtgccattgtttccttgccccagaaagtcctctttgccctgtgtgccttgaatgccctgaccaccaccgtctgcttggtggccgctgccctccgctacctccagatattcgcaaccaggagatcctgcatcgtaagtctatgcaagggcatcatggccacgtttccgctgagccagcccatggaccccttcgtgtcatccactgcctctctccccgtgcctttgtaatgaaggctgttgactaactgagctgctgtttaatcaggatgaatcccagatttctgctgaagaagcggaggatcatggacgcatccccgaccctgatgattttgtgccgcctgtgcctcccccttcctattttgccacgttttactcgtgcacaccccggatgaaccgcaggtatcgttcctgagttcccctgcagtctgagtgggatgctgtgggttctgaagactgaagtgtctccagaactcaccacatgagatctcacttttctttgaaaaagaaaaagaaaaatttttcctgacttgaggaacgttagcccaatgagtgacaaaatcagctagtgaaccctgtggtatggcttttagagagtccacctctgccagccttctttagaaaaatgaaaaacaattatgctgtttttcaggggtttctattctctctgtctctctctctctgttttctgtcttactttctctttttgtctgataaaacagatgaatccaaagaaaagttaaactttggcctgaagatagacattttcaatttcaattagctttctaagggaaactgacacccagggagataacagctgtaatttgacatgattgagagtcgctgtt

SEQ ID NO: 133249 - DNA, 1089 bp, Homo sapiens
cattcgtttattcattcaacaaacgtggaatcctctgtgctgggttattggaattcaaaatgagctagacctgcttcctcctctaccattaaggagctcacagtctaggtcattaaaatgtgtgttggaaggatcacggtaatattcaaaagagggactttgggtgcacagagaaggtacacctaacccagagtggcaaggcagtcagagatggcttcctggatgaagtgaacttaagctgagtttaaaggataagcaaacatctgttgaactttttgaaagagaatctcttaattccacagaaatactagtgtctttagcttcatattcagagggccagaaatttctattttttaatccctgtagtacatgtagagacttatcaaactaacttggtgctgagcttgaggtttttagagaagtattttctaatgtccagggtgatggtatgtgactttgagataggtcaccagtggggctgccacccagacactgttagtgttcttttcagtggcttagctgctgactcgtccctcagttatacctgaaccctacgtctataccctccccagctcacttgcccaggcaggggcagagatgactgcaaagctggaggggatgtcagctgggtgacaggtggcctgggctaggcctgtgggacagcttggcctctctggtgttcagggagtggcctctactggaatttcaaagcctcaggggctgggatggcttccttaatctttcaggaaatgagccaagaatgacagaggctgaagagatatggcagcaaaacacatgttctttctgtacctgaggacacatttgcaaaaatcttagcgccgtctcaggctgtctgtagagggtacattggaggacagtaaaaaatgactgatatttcatggtggggatgagaaataccctctccaataagaagaattctttgacactgaggttgcggatgagcactctgttgacctaggaggaggcagcagacagatttagtttctgcagtggcagaaagggaaagtgactcatgtgggtttaggagccgagccatccagcagtgtgctctgagcactcccgaccttc

SEQ ID NO: 133250 - DNA, 1046 bp, Homo sapiens
caagggaagagaacccagtttttctgggatgtggaagcatgtctgggaaaattaaagagtgcatcctaggaataaaagcggaggatgtggacagtgtggagtgcattcaacatttgatttcctgaattgaaggtttcctttgatagggcatgttttctcagccctttggaaatgatgacataggtgaattttaatatcaacaagattctaagaggctgttcacattcccatgaaatgtttggcaagataaataagccaacaggtcctaagggaataagcaccttttcttcttgtagattaaaaagtacaaggcaatccccgaaactgaagccacttggggaaaagatagaattgggcatgaacataatccagttgggtctcaggtttctcctctttaaagtaaatggttggactaggtagtctctctacctttatttttgaatgaatggagtttccttctggtaagagccttctctccacctcttttaagagccattcccttttaggtgttggcttcattgctgcaggtagtggggtggatgttgtagacagcaccccacaatggcgtatggatgttttgtggctctgtgtctttgggcattaaatggctaacaaatacttcctcaactgaagtgggctaatttctcagggtaattaccaacttcaggatgtaggtaaattttcaattcaaattgagtaaataccctctcactgtcccttccgttccccctttctacctgctggcctcttcttacagaagccagaagccaaactctctcccagtccctcaggggattcagcggggaggaatgatctgattacttgcatgaagaggtacatgaaccacagaccctcttgggtttgcactctgaaagagtgatcagttgacggttccgggtgaggctccagttactaacctatgtagggaaaacattttacatcctggtgtcccttagctactccagatgtcattgtctgtcaccttccctctgtccggccccaatagcccaataatcaggagtcacttctggaaggctgccaagctc

SEQ ID NO: 133251 - DNA, 1015 bp, Homo sapiens
gaacatttggaggatttacaaagaacctctggaattccaagtgagttccactttgggaaaatgccttttttttttctttttcaaagcaattacacattaagataggtggatggacctaggaggtaggtcaaagggccacatctggtaaagcttacttaacttctccccacccctctcttttcccaaagataatggccccattgcagcccagcacatccagggcccacaagctgccctcgcggagacagcctggcctgctgcacctccagagctgcggcgaccttcacaccttcacaccagcggggaggccccgagccgagaggaggccccggcgagtggaggctgagcggccacacagcctcattggggtcatccgagagactgtcctgtgaaccctggaagacagaaggccactccaaggggaaggatccctctcctctctgccatttcttggctgggagctgtggtccacctcaaaaaaaaggagcactctggaggacacgttttcccacctgttggctcccgtgtctgctgactgagggcattcaggagtaaatgcacaggtcggtccaggcccgtctgggtttgggatgcactgagttggaggttatgaaagctttgatcctcttcttcctctgctgggcctcgcagcattcccaagggtcacatgccctggcatgggcagaaactgggctaatgattctttgcccacttcacccctcgtgtctctctttgttgctaagttctttccctcttggaaggacagatctgccgggctgctatttatagttgcctttggcctttcactgctctgcgatttggcaggaaataaggcgattaaccctatgtgtccacaagcctcaagccttgtttcaggtcaccctcaaatcacactctctttaggcaaaacaggaaacttcttaagtgacaaattttaatgccagacatttaaggagaggattattgttgattccatttactcatgcttgcaaaactagagacccctaaggcagaa

SEQ ID NO: 133252 - DNA, 2352 bp, Homo sapiens
gggctctgtagatggttttcatctgtgtgcgggaggtgttggtgcccacagggtgaggggggcagaggagcgatgggggaggtagtaggttactctgggactccctgaaggcggtgttgatgggcaatgttcagaaagcaaacccgtgcacagggacccggcacccctgccatgcactcctaggagcctgctctggcgagggaaggtgtcgctggagaagtgggctccaggcattggtctttgggggtttcttcctctcatgaacccaaggctgatggtggctccctgaaatgctcacactggagaaaaggcaggatgggttctggtgcctctgcctggaccaggagggggaggtgaacgtgggagtccaaccccaaagctgagccaccagcacaccctggtggagcagccacagcagctctgtgccctcacagcgtttgggaaggctgccctgtacatagccttcccattacatggggtatttagatatttacatgtataactatatatactgggatgacagaagggaagaccaccacttctcttgggactttcaaaaaatctagcgacttgcttttaagactgtggctgctgaggtgaccatacctaggctcactcccttgccccagtggtagtgggaaaaagaacccacttcagctgggtggacctgtaccgagctccagcaacttccactcactgggtgtgaagacacacctggattaacacaaaagaatgtggcagagaaatcttctcactctaatgttacaatgtcagtcctctaggagagcttgcagaattggctttttcagcacctctcaaagtttacaaggtttttgtgcaataggaatagaaagtatattctctcctttaggtgaacatacataaccgttatgtgcaggttgtacagggatgcactactggagttctgtcccctggccagtcgtgggcgggcctctgtggcactgcccaggtgcctagggacagacaggcatgggcccctacgatgattttccaaggctcctgatgcctgaaataccaccagtaacacttcattcctgttctatccactcttattggcagaggaaagatgaactggctgatgactctttagtgtctcactgtatcaccagatactctacagcaaatggagaaccctggccatggttccttcctggtcctcacgtttgtgatgggttgaccttgaggctggtctcccagaaacattctgtaaagcatccttcaaagaagtcctggggagctttacggaccatcccagagcccctggccccaccgggtgccactctctgcagcagcagaagtccctttccccccagggcacctgggcagccagcggcctcccttcctcagggctcctttgtaacacagtgaaactgagagtgccactgctcgttcctgtcaagcactgagcttccctgattctaagcagaaaactcagaagatgcagagatctcggggaattgatcacagaactctctggttgaagtctcttgtccctaatcttgttatagtcactttgctccctccttagaatccctccattctctctataaatacatgctacccaccatttgctcactgagttcctatttccatagacacaacataaatatctcggatgcagagaacagggactatattaattacaaaatataatagtttctcttcccctgtctctactgaggtcatgaatgaaacaaaacaaaagcaaagccaaatcacacctcacatgaacacaaaatgctctttggaccaagtgaaaactggctcagaattataatattactaaaacatctacactgaactgagacggaagcataaatatgaggcacctgatgaaaacacggaacaattccacaccagccaaaaatgctctcaggcccacaaggcagcaagagggtgtttatggaccacatctggggattctgaggcataacttgaggttgctattgtctccttaattttgtggtttatgtactattctggcctttccaatatcacatccgcctagtggccctgagcagagaagaaagttggtcttgccttgggccagaaaacaagacgcaattgcacctgcagcttgccttcttgggaacagtccctccttcccagactcctgggatgtgtgttcggcagggaggggagtccaggaggaggatgctttaagccaaagtggtgctggaggggctgggcctcagcgcagagagggcaggtctctcaggatgaggctgagcagcccccgcctgcctggccacctgccagggaaggggccttccagagaggtgggtttccaggggatctgtgtgcctaatcttcagcttgtctcactggtgg

SEQ ID NO: 133253 - DNA, 1090 bp, Homo sapiens
cagtcactgctcggcttcacctacccagggctaagacgccacatgttgcagatggagccctcttagcccacgcacagatggggttcctgtgggcaatgccttccttttgggaagtgggctgggttcaagggatctgatcaaagtacttgtgcaactatgaggaagtatcagatgtcctttttggcttcaaagatgaaggaggcacactatttcccccagccaggagcaacatgagtgggaaatggacttttcttctgaaaggcaaactctagcaatgactcctcttctaacaaaggacatctaactcacagcaactggcctgattcatcatggctcttttctcttgtctctgatgctcctctttccccttctttctgccagttagagattttatagctgtcaacattcccacagcaaccagggactccaatcagtgtgtgcctccttgggagaatggggagggttgtaggatgggtgttgatggagaaggaagaggaagaaatacgacttgcagactgttgtttcatgatccctgatgacacacctctccctctaaattaaaatggagcgtagagggaaagctgatcttcgactataaaaaggaactagtttcagagactatgtagaaagcttccacctctgtgtggtctgagctgagctcaggctcctgctcctgtcccctgatcagactcacagcagtgacagaagccctggtgtgctcagaagcatctttagaaaaccatcacaaggctacacttgccctctgctgggtggtgggaaggtttgctcctgcaggcctgaccactgacttgtcagcttcaccctagaggagggtgccaggcaaaaggaactcagccctgaaacaaatgtccacttccagtctccccagggtgcctgctgtgcctcaacaaactcctcattgccacatggaggagaaggaatggctgatagcaggtgccttcccacccctttcaagtcatggtatgcaggaggatcatgtttgcatgctggggtaaacagaccacactgttgtagctgcaggccctgcagcccctggccctgctataagagctgaggcagcgggggtcat

SEQ ID NO: 133254 - DNA, 1472 bp, Homo sapiens
tgggcttcttttgtggggctaggaggtacggtggagagcagctcagacattcatgcagatatttttatctgctttgagtgcttcctcctttccatccacctaatcaataaatatttacgaatcacttgtcatgtgccaagaaatgtgttaggcactggagattcagggaagcgcaccctctccggggctggataagagacattatcagtactaagcacagggctctgagcccagagggggctggagtcccttcacccttttctctctaatcacacaccaggagaccaggaatttgtgggaaagaagagagatgaatgatgaagacaggagcatgttgttggaatctcaacccttcaggcaaagccacctgctttaaatgtttacgcctattaaccactgagattatttaggtatgcttgtgtgatacagaaaatgttacccaacataccgaaaagcaagagaatgactctattttctcaatgttgcctaaaaaattcatattgctctggtgggttctttccggttctttccttctctgtgaattgatttgggatgcctgatctgtccctcagtgaaaaattttctagattggggaaaatgtgttgcaagatgaagcttagagaaatagcaatttgaaataacgagaccatgcatttgctctgctgttcctaatcaatgtttcatgttgggtcccattaacttggatttctgagctgccattttattggaggtgccaattaaataaagggtcatttggtccccatgacaacagtggaacggtacagcaaattaagaaatctggtgggaggggaagcccagagaagaggggcgaagagagaaaagagaagccagaatggtctctatagcaacgggagagcagaaccatgatgctcctggggaagcaagggaagctgtgcgctattctaaaacagagcaaaaacccagagggcaggaccacagaggcaaaggcacagaaagaggcagcctgtaaaatgttccacccaccaataattatgccttgggaattaattatgacccaaaaaataaggtaggaagagtaaggcaagtcaatacctataattctactctagaaattgatttcctgtaacctggggggacaatagtcaaccagtattgaagtggccagatgcagaatgcacactttggatccctgttcctgaaagtgtagcctgcagactggtgatgccatccccgccgcaaagcctgccaaaaatgcagaattccaccctatacctgctgaatcagacctgcattctaacaagatccccaggtgattccaatcagtttgagaagcactgattcatcaggatgagagttgcttgtcaaagtcactgcaaagagcatggacatacactgaaacaaatttgaacacagccttgaagtggtccagatgctgctctgcagtggcccgaggggtgggggtagggcagtgtgcacatctgtccaggtgc

SEQ ID NO: 133255 - DNA, 1016 bp, Homo sapiens
gaaccaaggctatcagacgccatcttctcttcccagatcaggactccgtgctccatgtgagaaacagagcctattcctctgtgtcaggaggaaaaatgagcacagtcaaaagcaatggccctcagggggtgggtgagttttctgctattaaaaattactatagggctgtggcctcccctgggaggcggcttctgaggactgctgaggcccaggatggtgcggggaggtaggggagcacctgggagcagcttagttcaggctgcagtttgcagcctggtggcctcactagcagcttgggttacaaccctgaaagtaggccaaatgacagaatggcttctgttgtaaacaaattttctctgttgactgcatcacccagagaaatggagcttaggaaccactggctttgtgccaggaaaaggagctggttttcctaaggactggggtgggcagtgctcctgctgtttgctggggagggacagggatgctaactttcctgtagcccagaggatggtcctggaccacaaagaactgtcctcccaaaatgccctcatgcttggacagacctgctcaaacccctacaggaggtgccaaattcttcctactcttcacctcatcccaaagtcgctaatagcttggcctcctttcccttcctcaaagggaaacgcagctagcccctgcctcagggccttcgcatttgctccttcctctttctcactttattcaggtctctgctccaaggtcacctcctcaagtgagggctttgttgatcaccctacctgacatagcccctgtccctccatcccctgaccctgttttatttgtctgtggagcactccccactacccaattttacattaagtatatttacctattgattttctgcctcctttcagcccttgcgatgagtaccctgtctgttttactcagccttatatctctagtgctggaacagtgcctgacacacagtacgtgcacaataaatacatgcatcatgtgtgatgaattagactgaatca

SEQ ID NO: 133256 - DNA, 1046 bp, Homo sapiens
caccttacagccagtcaagtatggttcgcatgcagggtgggctccagggctcactgcaaagcccatgctgagggatcaacggatacccacccaggccggagggcatttcccttagctaatcaagagcaggaaatgatctgtggcaggtgaaaagaaataagaaattccaaacagttgaatctcttgtggagaagtttaaaaaaaaaaaagacaaatcaaaatggcagggctgtttctgtttttgtgtgcgtgaatgtaagagattttaaataaaatttcttaaaagacaaatttgttcacattaatgaattctctgattaaaatttctgaaaatgctaaacgtcatccatgtcttaggggtgtttttgggctttaagaaagcaatcccaaaccccacccagcagcaggcactgtgaacaccaccttctagctcactggggcccagaatctagggacagctgctctacagacacatgcctgctctacagacacatgcatctctgagttacgatgtcactaagcttcaccctgggaaaggtggaagccagctgatacctgtgtgtcggcgttcagcactttgattctctgggtagaaatgaagagatccacttcagtcattggctgagattcgccttcaggagcctgagaagaaaaaatgcaccaagagaaagtttgaccacactaccctgacccagatgcagaaggagtaaggttagctcacacagaggcaccacgacacagtcaccagaacagcaatacagactctagggttaaactgccaaagctgaagttaccacacagaggatggacacatggacaagagttagcacctctaggttacagggaaaaatgcggaatccccttttcttcttcccctatagaagcagtaactcactgcagtagatttcactctttgaacgatgatggcaagtggccctctctgtaagggttttggagcccaacagattgaagaaataggccaaaaagctcataccaaaagaccttggggaagtcacttagaatttgcctctgcttgagctgatagg

SEQ ID NO: 133257 - DNA, 1010 bp, Homo sapiens
acatgtgtggttattagcgagttttcttttttgcatccagcaatctgacaaatccacaaatcaagcataactataatcaaacagactcaagtccctgccacatcgatgctcctgaatgtttggaacttccatactactatacgattcattcagcgtctccaatctgctccctgtcgttcctctgaagtgaaatgactaatgagcaacagaaaacggccaccttcggcaactgagttttgagaaacgctggcttatggggcggttcaaaaagaaatctgaacaaaaacttgctggatgcagaaaacaaaaacacgaaaatataaaaaggtaaaacagaaacgaatgaaaagaacaggcataacaccaagctgatgaagttgtttgtactgcaccttcttcctgcttttggctaatttctgggccatctgcttagcatggaacaaacagagacaggagaatagttagaaagaatgtgtagagactcaaagtcaaaaagggaattgacaaactaatactgaatagtggcataaagcgtttctgtgggaggaggactggcttttaaaaatcccagtctaaagataatcaatgtcgtaattcagaatttagtatgtgggaagtggtgaagtgagacaaaggaaatgtgttgcagtgcttcttatacttaattgcaagtgatctttccaaataaccaagttttggttctgttaattttctttattgtacgcctggttttctatttcactgatttcagcatagatctttatttccttctactttctttgggtttaatttgctgacttctcagcttcctgagataaaaacttaaattatggcttttcaaactttattctgatatgcaaagctatgaatctccctctaagcattgctttggatgtattccacagatttttgtgtttcaatttaatcattgttccgttaaattttttttcaaatttccactgcaatttcttagaaccttggattatttggaattgtattattaattttga

SEQ ID NO: 133258 - DNA, 1485 bp, Homo sapiens
ttggccagcctggtctcaaatgatctcaggtgatccatctgcctcagcctcccaaagtgctgggattacaggcgcgagccaccgcgcctggcctctagttatctttttctgctgattttggaattaattccactgtggtcagagaacacagtctgtatgtcaatcttttgaaatatgctgaggcttagctctatggtccagcacatgactgcctttggtggatgtgtcatgtgcacttcaaaatatgcattccgtagttgttagggacagtgttcaatcaatgacaattaggtcaattaaggtggttaacagtattgttcaaaccttctatatacttgctggttctttaatctcttgttccatcatttattgagtgtgttaaaacctccagctgttatgtggatttgtctgtgtatcctgattctgtcaatctttatcttacagctatgttataaggtgcacacacaggtaggatggtatacctgcttggtaaattgatcctttcattgttctccctttttatctccagtaatacttcttgccttaaatttatgtaatattaatgtagtttacacctaactaaaaatggatgtaccattctcccttttgctcacaattaaaagacagcatagttgataaaagcagagcgtggggctggattgtctaaaaccaagtcctggctctgccacttactagctgtgcaactttgaggcaagccactgaacatctctgtgcctcagtttcttcatctgtaaagtgaagataaaaatagtatctacctcacagggatattttgaggacaaaatgaatacatgcaaagctcttcaaacagtgcctcatacattctaagcactatatttgtgtttgctgttatatgattataattgacctaggtcatgatgcaatttcttgccttttgctaagacttgctatttatacagatcttgtacaaataatggcaagtcaatggccaaactgcagacgctattgtggtaatgggattggggtggaggaagaactgctctctcatattcctgggtactcacctggtagaaaagctcctctgctctcagcagcacatctctgtttcattagtgactaaaatatgttgcctatactacctcattgtagagaaactggataagtcagccatccagacaccacatagcgaatctctggtacacccgggaaaccagggcaaccacactcccacacagatgccctgctgttcttactggtcgccatgagttcacagtgaatagtctgctctgaaaaagtttgaaggtagcaactctgtcatcctgactgctgcacattacagtgggaatagttctgcatctgagaagtgaccctatgctgatgttatgccatgccacaccacgaggattcccgtgtggaaccccagagtctggccagggatgttcggactggcatcagttataatctgcataactgacagctgggagatctttaatgtttgttttt

SEQ ID NO: 133259 - DNA, 1614 bp, Homo sapiens
acctcaggtcatccacccgccttggcctcccatagtgctgggagtacaggcgtgagccactgtgcctggcccgaaacagtttttatgaagttaaaaatattctgtggatttagagtaataccatctttaaatcactcatgatatccaagtaccctgcaacaaattataatttaaaatttaaatataacatcacagaagatgggagagttggagccagaatgagaaattagggtagcagaaaggggtccaagagaaacataaggccagcatgcattttaaagccaggaatgacaacatctatttaaaccctcgtgtttcatgggattgatcatggtttaccacgtggcggggtgtagtgcaaaggacaaactgcagcaccccccacccccttactccatccacaatgtgtactgagtttctgccgctgttaacacactctagattagtcgtgccagggatgctcctgactgttctatcttttctctccccactgacatttactgagaacttgctatgtgccagaatccttcaaagtatttcacataaatcagtgtaaaagcttacaacacccctgtgagctactaccctgctagatggtaagccatgatcaatcccatgaaacacgaggtttaagtagatgttgtcatttctgcctatattatgttatcctcatttttcagaagagggaaatgtggcacagagaggctaattaacttgccccaggtcacacagctgtgaagtggcagaatagagattcaaactctggcaatctcactccattgtaaacccctagttgtgcaactggggcaagcatgtcatctgtaaacttctccatttgtctataccatggggttaacaacacctacctcacaatgttctctaccccatccattttgaggagtaaatgagattgagataatgcatgtgaagggcctaatactttactgatcatagatttcttcaactaagctgggaaatgctacaacttaggcaaagctataatgatagacattttacttctacaatgaaatcataattttgagaaaatcataaaagaatgaaaaaaatctgatctttgggacaggctagttaagatgaatatatgaatatttgataatgaatgcagcttgccaaaatgcatggaccacaagatacctatacaccatttgtaatctaatctaattgcattagcttcacaaatacaggaagaatggagacacaaacaccacactctgggtggatggacatgaagcagtctctgtggttcaggtagggctcagcaggccaccctatcttctggttgaagagcagagaatgaagtgggaatgagagtggaaggcaaggtggagatgcagtggagaacaaggaagacaaatgagctcattgtgctggcttccagtctggctttctctagaaaggggtaggcatgagtcccacgttgttaggggagagatgtgtttctatctacggcacattaaagactgacagcacataggacaaagctctctctagaagtttctcccaaaacatgttccagagaatactaccaatgacaggtatctatcacatggtaacaatgtattctgtgctcaaataagtatgggagctgctagt

SEQ ID NO: 133260 - DNA, 1054 bp, Homo sapiens
taggcaggtctaaaatgtatttataatcagaaagcctctatcttggttgttctgatcaacagagccatctaatttttgattcaaatgaactgtggaacttcgggataccaatcctttggaagctttgaagtaaaatctctgatttcttatgaggcagctggactttaaagaaggaataacaactctataggacaccactttggaaataagaaaatgtaattcacaatataattggcactgacgagctttggtacagggatgctgtgtaccccgaacattgctttacgttcaagtgatgtgccccgtgcccgctttttccctgtaaggccatctcagcactacctaagtgccataaggggactggaaaggcataaatgttctgtctgtaggagtccaaagctatcagagggctaataaacaaggtgtcccaaatgaaacctgaaccttaaaatgtttgaagccttgatggatagaacctagaaaaaactaacctcaaggcaacgtgcagttttcaacctcagaagtcttcagtactcctttgggggcagactgctgctttattctggaagatacgcctgaacgggctctgggtagcattccttgataggggctctttggcattttggtagagataaaatctttgttttgtggctctgccctggatgttatagggtcttgagcacacctggctctggcccagaaaatgcccccagtcatggtgacaagcagaggtgcccccactcatttccaaacacatcttatgaaggcagtccctgtctatcagagaccccaagtgaggcacaccaggcttttgtgcttccaccaaacctggggaagctaacagcaccattcacctggaagcccaggtggcatatctggtacccatggggcacgtggagtcagaactatgtctctatgtctctttgatttaaagttctctgctttatacaaaataggacgtgactttgcctgagaagcagcttgctctctctgagaggtttgtgggttgttgttttgaatgctgtgcctggaagacaactaaattaagatggag

SEQ ID NO: 133261 - DNA, 1097 bp, Homo sapiens
gctcagtattttcttttcagctcttaccttcaacgtaggttgggaatgaagccaagctttttcttgactgtaataaagacaaagaggtttcaaaaagagcaaagcataatgaaatatgaattaacacaatcatccatgcaacatgaaaaataaatacataatcagtggcagttaccaattattgatcatttttagttagagaaagtaaagtgcagataaacatgcatttattagtaaaggttacctaaaacccagaatagtccattcatattttagataatctagaaatcttacatttcacaatcagagaggtatttgccaactaaaaaacaatcccacagacaagtctctaacaacaataaaaagggcacaatttgtattcttaaggatctgcatttccatgtgaaaaactgattagtgaaagcaccaatgctatgattatagctgaaattaagaattctctcagagaaatttattttactctttgccacagtgatctctcactgtgctaaaaatgtgtgctagagtttttaaaaatctcttcatctcctactgatttattttagttgaaaaactccattatataaatcattattgtgtgttatctgaataagaacacaacaaaggagtaaattaaaaaccctggaatttcttttgcacctcagagcaaaggtcagcgttctcacagcactgttggaagcagagatgatgagctagacaccttttagagcctgactagatggcagcttaactgcctgctatcagaggagcaaaactcaccatacgttcctttcagaagcagatgtcctagatgtaacactgactgagataagagaaaaaaattcacccctgcttccaccagtagtagaatttgtagctagtgtgtctggaccagggtgatacaagcatcacaggagagtggagagctagtgttaaagacaagtccctaaaatgggcagaaggtaaggtttgcatggccaagaattccattgctgagaacctacccggttcttaggtgattatttaaatgcatgactttaagaggaaagatatctggcactgaatagctgttggataggctgacctgcatagaggga

SEQ ID NO: 133262 - DNA, 1053 bp, Homo sapiens
tggtttaaagaaaagaaaaaaaccctcataacttcatggtatgcagatggaagctagcatcttcataggggcctaaaacttttaagttattatttcccaaccatttccctacccttgtcccaagtaactatagcctggggtaatgagagtttgtttaatcagaattgcttagcctccaggtatatctaagaagtcaattcacattttcttgctctattttgatacttttctgaatgctagacagtgtccagattttagcagaagctacaaaagaattactttggtctatagctctaaaagctgcagttttattaagagctacaccaacatggcacatgtatacgtatgtaactaacctgcatgttgtgcacatgtaccctaaaacttgaagtataattaaaaaaattaaaaaaaagataagtttgaaaaaaataatttggcaaaataaagtttaccatctttaaaaaaaaagctgcaacagagggcatttggtacattcacttattctctatgcatgagctcatgactagctttcttagtctctggggtagtaaatttttttaaaaagagttttgtgaaatgaaagaatctctaattattacacacaaataggattttcatcatcatttctaaggatatatagaaacatgagccaagtcttgtaggaactgagaaactaacaaatttgccttattatatctaatgcataatcaaatgctgaatatttagatgtctggttagccctttatttcacatgtggactgagatgaacatcagttgatccttaactttcaagaataaataaataaagttgcatttaaaaagctaaaggctaagatctttggggtttgggtttgggggtcacacaaatcgactcgtgcagaacttggaggcacaattggacaactggaacaatgacagacaaggtaccttgtccatgtagtctgtgacctgcaaacactttctactccagcagtggcagatcttggcagttaagagcacgggttcccatgagttctggatttgaatcctggctgaccacttgtgagctct

SEQ ID NO: 133263 - DNA, 1805 bp, Homo sapiens
actgttgtggggtggggggaggggggagggatagcattgggagatatacctaatgctagatgccgagttagtgggtgcagcgcaccagcatggcacatgtatacatatgtaactaacctgcacaatgtgcacatgtaccctaaaacttaaagtataataaaaaaaaaattaagtcaaaaaaacaaaaaaacgaaacaaaaaaaaaaaaaaagaattccacagcaatggtcctctgagaggaaggctgcgctgcttcacagtctgttggcaatgtttgacaaaaggcataaaacacagagaaaaactaaacagagatgtattctctcaggaagtgtggggatgcgtggggaggtaagtcctgagcaaaggaagcaaaataaccctattgcttgcttgaacccatgtctgatctctcgggaccagcccccttgggggaaactgatgcacagagacatcagcaaaatattttcatggaaagggataatattgcacacagcaatggtgctggtgttggggctgagggggcacgctgatagacaagggggagcttggtgagcatagtgtgaaacaaacaaacaaaaaaatcttttccaaaaagtctgaattatggaaaatataaagggccacaaatgaacagaaagataatgcagtgaaattcattttaattcagatgaagaagttgtatgatcccagcctaatgctgtgaggcttgaatttgtttcttgtgatcccatacacctgattctaggcagggaggtcaggacaacgaacaaaccccttaaacattcacatgcagacatcagacactctgtggggaagccaagagggcaggcccagggtaacagctggcataaagaaccccagaccccacagcccctggctgcaataaagtagccccacatgccttcaagaagaaacacacacaacttttatttggcaccaaagagagctggtgggtacttgctgatttagctctctggctgactccaaattaatgtagtaaagtcttcatgagaatttaatgcctttaaatttccccaatctgaagagcttctttggatatgtacgattctattttttcccccaagtaattttctgtcacaaagattttaagggtctggcccccagggaaactggtgcagctggattttctttaattgcatggtttgagggctgtatcacaccttcattaaaaacaatcctccagagagtctcacatttcctatttctcaattgctctaaatcttctaaaaataaattctttacaacattatggggacctgatgatcttaggatgatgtaagaagacaggttatacagagagcaggggcatggaagagggaacccggaccccacagtaaagtgaggtgactgctgctgagtacccatatggaacagggggaggaggcacaaatgagcctgctgtgggcactgcccttgcagaggctctggctggacccacaccaacctcatcagggaccacttccctgcagaccccgggtgctcttgcctttggcacatgcttgagctcattcgagtttcctcctatttgcatgtgcaattaatgacctccacttagaaagttcaccctcattctttcctacattcaatgttcagctcaaaagcactcatcttgctgaagcttccgcagaccctattcacagtacattccttttctccacagccacgtgccatgctgtgtaatcatctgttcacgttatgccccttctcccccaagagctctcaggagatagggaccttgtcttgttcatgttcatcctccaactgcctcgccttgggtcttg

SEQ ID NO: 133264 - DNA, 1833 bp, Homo sapiens
gcacaacccctttccaagcaccttttctgagtggtcgagcagcctttgctctgtccttaccatcttggacttccaagccccaggcaaacctgattccactgcctcctgtctggggtaatgcacactccccctctctattcttgctgtactaactcctaccgtcaagggaaatgcagagaccaacttataacctgacaggatgagaaaaagaaaataaaaagcaaaacagcaaatgtgattttgaagcctaggatccacctacctctccttcgtgacactcaaatcggtacatccagaagttctccatctttccgggtgctgtttgggcagctgggccagctctagtgcctccacttgagagccgaggctaagtcctgacctcagtactcgtgtgagttgtttccagtgttgttagatacccgagtcaatcatgcaactggtaacaggagatgtgaccacctcccagggtgtccgaccctcacattaacccctcgctgcctgaatggtccaggcagtcatgcgtcactgctgggcatcagcagctgatgtttctgagaaggggctggcctaccccttctggcagcagcacctactatttctggagaaaataaactcggctctgaattgctaccagaaactttcacacaccccaaactctgctacgtttatagaacctgtgaaaaagcatccagctcatgtggaaggaacgggtgggagttgggggaaaagaggctctctcaggacctgcatcaggatgcacctgggcatgtggtgcgagcctggaggacactgaggccagctaggggccgcacctctaggcacgggaagtctcttcacctttaccgagggcctgagacagcctcatgctgcagtctgaataaggggtatggcaagccagcgacaccaacacagaaaagggctgcctccagggccaatacggtttgaaccaaaccaacagataatcctacattgggctcaagagctggactatatatgctggttcagaccagaccagagaaaggtcaagacaaacatggcagaactaagctggatggaggagctcttggaaacagaggcagcagtgtggttctgaaggcaggaggcagacagagagacctctgcagagagacgcccccagagctaatcagcctctcagtgatctgtggcgatggggaaggatgtggatgcatgaaaagcgctcatctgaatagatgactttagccttctctctcatcaaaccctttatcagacatgctgacaggtctctctgtgagcctacctgattggctaatgtgctatgataggaccaaaaggtagaaaaaaagagacacaaagggcctgtgaacaatccacagctggcaaatcctcccatgctagttgacagtttgctgtgctgtggacaagctctgcaggccaaagtgggaaacggggccagagagagggtgtcctcaggcactgccctctctctcctcattgttctggcatttctgaccactcttgttggcagtccgattgcacctactctaatccgaatcagtgggatgcaagtcccatagctgctagccaccattctagaaagccctttctaaatggtgagcactgcaggaggtatctcttcctactttacagcactgggcatctctcaaaacactttcttccgtctattaattatttaaagagagaaaatcttggggtgttgattctcaagagtccagactgaatattcctcaccatttaactctccctagcccatggtgcagccatttcccccattatcactcttgaaaattgcactggtttccatttatgaactgctcagaacaggctgggtga

SEQ ID NO: 133265 - DNA, 1063 bp, Homo sapiens
agcctgccctagtcccagctttttctgacatagccccctgcaccatctctgtgctagctctcacacaccttcccttttacgccactttggtttcatcgtccatcggtcacttcgggatctgcaaatctgcctcatctcagccagacaacaaaacaaatgcagcccaggagttcggaatggttgacaaggtcagtgggagaggacaaggccagcagctgctctgccctaaatttgaagcccagtagctctttgctggcatggaacgatgacagataccaaatgtggaaggcagagttctcagatggctcccaatcatctccacctcctggtattcagcctcttgggtaatctcctccctggggagggagcacggctgagtgacttactctaagcaataaaatacagcaaaggtgataggatatcaccctgtgactgggttacaaaaaaccatgacttccatcttgctaccagactccatgaccttcttatcctgcatactttatgaagcaagatgccaagtgtcagacagcccatgtagcagagaactgaggacacctctggccaacagtcaactgggaactgaggccctcagcatcaatgcccatgggaagctgagtcctgccccacaagcatgtgagcttgagatgactgcaggccacctgaccccctgatggcagcctccaagagaccctaatggagagaaactgtgagatagtcaaggaaggttgttttatgccactaaattttggggaaatttgttacacagcaatagataattaagacactaaataaggattcagatgaaaggcttaagagcagaggaggcttgaaggtctcgcttggggcttgacaaaggactagcttagattgtacactctgcaccagcagagcctgtctgtgtcagtcagagcctctatctgtcattgctgtatccctggggtcttgcacagtgcgtgatctatagaaggatctaacaacgtttattgaatgagtggatgataaattgtaagatgcactttcaacttttgacctagaacagtagtcacaaactctctgtagttca

SEQ ID NO: 133266 - DNA, 1028 bp, Homo sapiens
gcctctaccccatgcttgtaatcatgcggatctcgcctctatccaggtcacattccgattagataaagtccgggcttcgctctttaaacatagatttcaaggccccagacttcttgattagagcctctggaggttgggtcttggcacgggtgttaataagattcagtcaaaattggtaagtgctagcttaagctgtggaccagagtttaacactcaactctttaggatctcattttccgcttttcttgcgtgagttaacctgttgcctctgtaattcactgtcggtgtctcatcgttctcctgtatctctctcagagcaagtcacacagatgcgctgctcagagtgtccatcgtatgtaaatatttggctcacagtcgatctgctgcagttaccttgagtttgtcacctgctttcctcccagccttcagtttcctcatcagtaaaatgagttaatcaggtttatgtcccagggaagctgtgagagaaaatggttttgcagatatcgagtcctatatggaaatgtgaaacaagaatcacaagtttgttgtgccagttacatttggaagtcaaagctcacttaacatttggggttggttactggcgatctgaattagggggctggcctttagtagcccttcctcaccctctctaggctagtgtttcctttctgctgtcctcagcattcagatcccccactgggctgcccatcctggtcaggcactcaggcgaccctagttctcagcttccaccttaagcagcattataccgtcagcctttccttccagggttggtctgattaaatcaaactaaactgctaattagtgataatggcaacatgcaccgcccctccagataacatttaccttttattggcattctactcctgatttcagagaccactggagaaagtattttgaagcaggaaaccatttcagcactaatgcttcttaatcagaaaccagccactctcctgctgagatggaggtattgtcaaaatcctgagaagtaagggcttggtgtgaactct

SEQ ID NO: 133267 - DNA, 1049 bp, Homo sapiens
cctgccgcctcgtcggtcacctccacctccgcagacccctccaagtggttcatggtgggagtcggaacggctaggagagaagctgggcccggctcactgcgctctcattttgctccactgggctggaaaaacaagaaggggagaggctgtcacgtggtgcaaacagtcgttatgagctgagtattcagataaccataaaaacaactgctattgattccttttagttctgggtcaattaaaaaaagactgcaaatttaagttcaatctgacagcacatacatagcacgcatcataatttgtaattacatatctacttgtttaattgcttattgcctttctccgttcccacccctcacactgagcgcctcaggaacgttttgttctccaccacgcatacgattcaggtcccatttctgatgcatctgaataaagagtactactaaattgaatgggccaactgacacattttccatctgctaacagataaatctctccaaattaaactaggatcctacaactttagaaatcactctttacatcaatttcaaagaaacataatcttgaacaccttttgaagccattctgagagaggctatcagccagcagtggggtcccgccccggttctgtcattactgactttgtgacctcaggcaagtggcttaattttctggacctccacggtgtgactggactcatttcctacatgcaggatgttaacagctattatatagggtaaaaaagactcggtggtcaagtaagtttggaaaatgctgagttacagttgacttttcattgttaatatccagaaggaggaagatgcaggacacagggtttccctaacttgtttgaccaggagacactttttcctagaggccaatgttacatagcagctggtttctaatagttaggcttccctattgcgcactcagcatccaggatacaaccaaccacggaagacaatattaggggaaaatatccaacacaatacaacaataaaaaataatgcaagtaaaaatacagtataacaacaatttatatagcatttata

SEQ ID NO: 133268 - DNA, 1035 bp, Homo sapiens
actccttcaacttcttctaatgctttaagtgcctaaagaatgcaaatgattcaacattctcctgcatctgagtgtgttaatccaatgggcatttatcagacatgtaccagtcactgtgcaaggcaaaggggatgtaaaagtttctaaactatggtttagggcagacagctctgacagttatgatacctggtgataagtgcaaaatagaaatatactcaagatacaaaagcagcccagagttaaaacaatgacaacaattgtaacaccttgtgactcatattaagtgctgctgttcttatgggttctggatttcatgagctagtgagcatcctaagcaagcttaggaaagaagtgacatcatctaataaatgtccttgatgatgacccatgtgcctctggaggaagacagaggcaaatagaggaagagcggctgatggaagaaaatctctcttcctctacaaaaaagttggatgacctggaagacacatgcagaatagtcccctcctcagggacacctgcaaaacatgaagaaggggtgctgtggcatcctggctacaggatgagggtctccacgttaccagtggtgaagcacagatggctttctggtctatggttctagaatgttccacagcttgggtggaaaaggtgaacaaaaagagggaattccacttcagtgcaccatttagaaatagaatagttcatgattcagcagttgaatccaggtatctcataatgtgtagcagaggctcgtgttgatttgggattgatagaaggggaggctgtaaattactttagttgctctttccttaagcaatcattgatgagcatttccaataaactgtcccttttagcatattcagaagtagtgttagaagaagggtcagacataaggcaaatgcaatgtaaaaaagagcaaaaggcatcataccatcttaacacagagagaagtttgtgtacgtcagtgatagagaacaaagaagagcattacataatgataaagggttcaattcaacaagaaagcttagctatcatgta

SEQ ID NO: 133269 - DNA, 1064 bp, Homo sapiens
attttacttaactactgggcagcatttgatacagcctatcacacacttgttctcaaagcactcttctctccaggcttccaggccaccactttctcctgttgcttccccatctcattggctggtttctctttatccgtcagacctctcaacactggaggacccaggctcagtctttggactcaactgttaagtatctacactgtcctcccaggtgatcacatgaaggctcatggtttatctaccgtctatacaatggcaattctgaaatttacaatgacagctcaaactgttcccctgagctcctttagacataactgtgcctccttaatacttcaccatggatgtcaaattatcatgtgttaaaacagacttctgatttctcattctaaacctgttctttccactgtctgcctcatcattcttcttccagttgctcagacaaaaccttggcattatcttttaatcctttttttcataccctatatcaagtctgtcagcaactcttgttatttctactttcaaaatggatcaagaaccaactaaacactttttattccttccattgcaaccaccagcatcttttcttacctggaccatgtcaacagcttcctaatttgtcttgagatttccaaaatctcgccaaagtgtaagttagatcacgtatctccttgaatgatttctcatctcactctccctcgcacctctcacctcagcgtctacgctcctcctgtccttattttcacagtcgcattagcctccttgctactccatgaaatgacaatacctgctttgcactctcctttccctctgcctctactgatcttctctcagataattcactgggcttattcctgtctcttctgcatgtgtctgcttatatgtcaccttattagccgggggcagtggctgacacctgtaatcccagcactttaggaggctaagggtggcggatctactgaggtcaggagttcaagaccagcctggccaatgtggtgaaaccctgtctctactaaaaatacaaaaatatagccaggcatggtggtgtgtgcctgtaatcccagcta

SEQ ID NO: 133270 - DNA, 1038 bp, Homo sapiens
agcttctaagatttacacacattctttcttccaaaaattcaaagcgaaattgcattatcctgttctgcctaaaataaaggtatcattgactggggctcagaagttttggttgtaacctgccattttggatgacggttttgcctttgtcagaaatttattattttggttttaaatctgaggtcttcagccagtgattgggctcagatggtggtttgtggcataaggcatgtgaatgcaagatgagaagacaccttttgattcttctggagctaactgtcccgtttgcccctggttccagccatgcatcacttgtctttttctctttagctatttagtttcatccttactaccctcccagaggaccaggagaaggaaagaaaggggaaaattccacatgttgatttgctgccaaaagtcttttgataagaaagatgattgactctgttttgcatattttcatggtcatgtgtgtgtatgtatttttttgtttgccagattaagcatattctttttcttgcatgtatttctatatttctaaatatgtaatgtttttcattttgtgaaatgtaggcagtcactagaataaaaactccactggggagactcatagcctattttgtttcccaatctctcccccagggcctaaagtggtgcctggtgccaagtaggtgctcaaaaataacaagaatgaagaatgctatagagacagaaagtagattagtttttgctggggtggaagatagaagaatgagagtgactgctaataggtctgtgatttcttttttcttcttcttcttctttttttttaatgagacagagtctctctccgtcacccaggctggaatgcagtggcgcgatcttggcaaactgcacgctccacctcccaggttcatgccattctcctgcctcagcctcccaagtagctgggactataggcggctgccaccatgcccagctaattgtttgtatttttagtagagacggggtttcaccatgttaggcaggatggtcttgatctcctgacctcatgatccgccc

SEQ ID NO: 133271 - DNA, 1031 bp, Homo sapiens
ttaatcgcagctgctggccctgccatcctcaaagctacctctgtgtcgagtgtgcagctacaaggccacccttctcctgccactgctgaagagagcacgagctcccccctccctttcataatgtaagctcccagtccgcctccgtgcaggctgcctggttggcagagctcacttctccctcagccttttctctagctgcaagggaaactgggcaagcaagtctctagctttttttctctcacttcaggtagacgatcttgcctcgcccaacctggactcacaaagtggtgaacttgccaaacacataactcggttcaggcagtgagtggccaaatgaaagaaaaatgttttgcttgtgtcatgttgttatgagatcttgccttaactgatgttttcaaataactaaacagcttcctgttcaatcatgttagagaaattgacctcaattctgttggcctctgtggcttggacaaagttacagcctttcttacttacctatcccatgagccagtaaggatcaagtaagatgaaaatgctttggaggtaataaaaaacatacaagttatacttattcaacccctcgactaatttctcagtatctcctttcccttccaacatcgatcttaaactgtcatcttgaggattatcgtggatatcctaataaactatccagtgacttctggcttgacaccttggcagcatctgacacctctcccacccccagtcccccactcccatccccacacatacttctactcactttccaaattctatagattcttcccaccatgtttttttctgcagcagtctctgtttccagagccctatctaggccataatcatcttctaccctgaataatcacaggtcactatcattctacccattgctaccagacatcttcttgaagcacatcttttattacctactcctgctgagaaaccatcagtggccccccactactcacagaataaagtctgcttccaaggggtgtcaccattaggaccctggctttccatccagcatgagttca

SEQ ID NO: 133272 - DNA, 1026 bp, Homo sapiens
ctcattgctatatggtattcagttgtataaacatacaacaatttgtttatccattctcctattgatagaaatctaggttattttcagtttttggctattataaacaaaactactatgaacaatgttatatatgtctttctgtctttgtatttcttcagtatatatttaggagtgaaactatttcgtcatagggatgggcatgtgtttagttggagacattttagtcaactgtttttataataagtacctttctgtttggtgtaatctgagcatatattcttcacaattcaaggatagatgtatgtatacatgctctgttttaatgcagtgatttatttttgttaatttccttctgattttgttgtccagctcagttaactgaatgtgattttgttactttatctatcaaagggaaatgaggcatatgcttctgaattcactggatactgaacaggtatactgaattcaggttattcgtgcatatttgaggaaggtttttgtcacactctgttaagaagccaacaaccattcactaacagatattttgtttgttttatctgagttcaacaaggttaagcattcagactattttcattaaaaatagtttcgtgtataacaaaacaagacagtacacgttttaattttaacatcttcattttaaacattgagttccattctaaccaaaacataacacttttagccagaatgctgttaaacatctttaaaacaccaagtaacaataacatggcaaatgtttgtgtattgcttactataagcagcataagacattgctcaaagcacttaacctacattaactcatttaatcctcacaacaacactataaggcatgctgttgttatcctcattttgcagatgaggacactgaagcagagaggttaagtgacttgcccaagatagcacagccagtaggtgacagagccagaatttgaatgcagctagccagagtccagagtgtgtgcacatataaccagtataccacactgcctgtaactctgtctctcatct

SEQ ID NO: 133273 - DNA, 1051 bp, Homo sapiens
atcttgttttttatttcacaaagagattcttagagtaatcctggctgtcaggattctgagtgctttacctcttcttaatgatatgagcaacagacagaatggtatttctgaatttactcttttagtattggaaaagtctgatgataatacaaatgtctcttgtatcagatttctcatatacctctcacaataactacagcagcatgatcagcgaaaggtctgtgtagggaagctaactaggctgaattgaccctctatcatattttatattctcatattttttaaaattgctagtgacctcactagatatattgttgagaaaaatactgaaaggtagtgactcaatgggacaggtgcaacaccagtcacccccatttgttttattttcaagtaagttgtgtagccataccatctactgacatcccttggagcaaaaataatcacattatctcttgtttataactaaatgaggatacatctagttggtggcattgatatgtcttaatttcagttattccatgtgaataaaaaaaatcatcttgtgtagcatttattatactagaaaatcaccaagaactacaatgtgcaacaatagattgagtaaattagtgttttcctgtagaggtatactatgcactcataaaaatagaacttataattacaaggaaaaagcctcataataagtttagtttttaaaagtaggttacaaagcagtatgtaaataagattctaactttttttttttatttaaatcccatttctaatcatagcaggaccaaccttcttactgagcacaactaaaaatgttggaaaatatattaaaattttattcaaagcagataaactaaaaaacatcataccaaaactgtagaatgccagtagaaaaaagaaatcaaaaagagctaaagacaaaagattaaactgataacttacttcttgacagcaacattgagtcagaagacagtggtaatctagaattataaacagaaaaaaatttttggtgaatgagaataaagtacacatacacaatatgagtccattcatgtaaagt

SEQ ID NO: 133274 - DNA, 4177 bp, Homo sapiens
accaggccatgttaacactgtaaaaccaaactctttgctaagaacaatacagggcagtagtttagtctgctgatgaaaccttgtgcttccaagaatattagctatatataatttgtgctttctggatgattctattgtccagaaagctaaccctgacgttacttttattagtctgttgttattcctcagggtgtagaagatttagtaaattcaggacaaattttatattcagtggcaaaaagaaaaggcaaaaatatgctaaatatattattagctcttaaattttagtatagatcgtattttttataaactattaccagtacagtagctagtagatattctgtgactgcctcattgtttatcttgctgctttggtccctatggctctagtatgaacattctcgtgtcttctgtggaaatgatttctgtgttatagttccatctttggtagaggtggggatgattgtattttgttttagttgacatcattctcaacttttagaaatactgttgaggaaaatgattaccgttggttttcaaattgacaactattttgcttccaaagacttcagtttccctttgttttatgtgtagacctcatatatgttcaacacattgcatactgccttgcacattgtaggaattcaacaagtcaagagttgataaaagctagaaagataaaactagcttagctatcatatcatcattgtccatattcttagctttgggaaaaatataccattttgcataaaatacataatcagtttcaaatgcataaggcaaagatatacagttgcacaacattgcaagtgaaatttacaaaggatttttatttttgtgtatgctaaaagtgctcctacttaaagcagttttctttattagaccaacaccttccagcaaagttagaaaccaaacacaagtgctcatttgcccaaattaaccagatagttatgtaaactgttcatattaagtctttagtggtttacaaacaataacattctggcttttcttccataccttttaggaatcagccttaattttaagtatagcagtcactttcctcaaggtactatgcagcatactttagattgcttatttatcattataaggtgataggtaataaatttgaggtttacttgtcatataatttcatatggcagatattgattcaaggagcattctattagaaaaagttgataaattatcctcccttacaaatatcatcttgcatttggagcaggtatttttttcttattagttaaagactgggtacagttatagtagatgctcaataaatgcttagtcagtgattgatctaacatcaaactaacagctttcagaaaggagactgttgacatcttttcaccaaggagtatatttgtagagtaatatatgtgtggaattttgaaattatatcatttgacatgatttatgaggcttatttaagctggagttagtaacgtaatagaagtattatttatacagaacatagttgaaagataggagatgtgaaagattaagtagtattttcttgtgcaaggcatattaataaatgtaattaaatgtcttaataagcagctggctgaactctagagagaactgctgtagtcttctgcaatcagtctctgtattggtatatccagtactatcgggtttaggttctttttatttttccttaaatcttacttgtttctagcgtcttaagagtggtaatggtaaaatgtgaagttacaataaacttctgcttgttttctcagaacatctttggcatgaggaagaactttttgtgaatgatacagtagtctcagcatctgttaatttgtggttttcaaagcatttttgacagagtttacctaatgtaaaaagattaaacagttttataaaacacaaataaacattcctacctgaactgtgaggaacagagtgtatagtacaaatgtaattaggcattgcctcctggcgaggttcttgatgcatgacttcgatgctggctgctgactgaggtgaccactgtcagtattgtactttggcatatgttgtttttaggaaaataatggaatgcattcttagattaacttactgtttttgagttggaaaaaataaaagatgaggtattataagtatgccaaatatttatacactacaaaagattaaaaaaggagagggagaaaaaaaaaggccagttatgattttaatagcgtctaatttttttttgactcgaattttgtggacactagtcaattgcataatttaacatggaggagctttcatttaaaagaagttctcagctactatattctgccattaaaattaaccatgcctgttaattttacattgcttgaagatataagtaagctgccgtcaatattgttttaagattttcttatagtttatgtttaaatggaaaagttacatatataatctatggtgcagggtcaggcattggccattaaagataagtttggctaactattttactgaagagactaatggtcttccctctgttgtactgctatgtttcttgatctgtttttccccaatgtaacagtctacattgaagtcctttagctctctccatatactaattgacatttgttaaggattcaatattttgtgaattctttttacccttaaaatgcatatctttcagagagataagaatgaattttgcaataatttatatgcagagtgtgcttatgggtttctgggagttcaagttagtaccccagagtgcttaaaagtatgatgctaaattctaaggctaatgtaatgactgtagattatctatgtccacattgttcaacagaaatataatgtgaaccacaacataatttttaattttctagtagccatattaaaaaagaaacaagcaaaattaattttaataacagtttatgtaacccagtatattaaaaatatcatttcaacatgtaatcaatataaaagattattaatgaaacaccttatcttctttttcttccatactaagtcttagatttgagtgtattttgcactcacagcacatctcaattctgactggccacattttaagtgctcagtagtcacatatggctaagggctactatactggacagtacagattcatagagtataaaatatgactttaactttggagatggtgaggtaggcctgtaattatggtactttaaaaattcagaatatttagaaaagcatctaatagaattatccacttgttttccttcatcttcattttaatatgttctagaagtaggatcagcctgttccaatttgccaagcattattaaggaggaataattccataccatgtaaaataccatgatatgctgattatactacattaacaaatttttaagttgcgttcactaaattctgtcctgtttcttcaaaataatatagcttaaattgcatgttaattgtatatcttacctattttgtttttatattattcttacaatataatcatgtatattaacaaacagccctgggattctaatcttcctctgcaactgtcttccaggacttactggcacttattacactgtgataagtggcagaaaagtagaatgaaatattctttttccattagatttgttcttatgtgaccatgtaccaagccagctataaagtattgtatttctgtagaatatggaaaatagtatttgtcttacctttgctaaatgtttgcaatttctaagtaaaccttttatctcctaaaatgagtgttaagtgtgattttgtttttacttttggtgctttaaacttgagtctagtctaccaagctttccattttatttgctttgatggtggtaggggggtggaggtgtgaactgttgtctaaatgaaaccaataattttatgacctacatttgtagaaagaataaaaatgccactatgtctagaacataaaagaaatgtcaaaaacaaattagagatatcgccacagttgtttttaaattgtattaacagtgactaattgccttataaaagttattatgactagatacgctttttcccatccatttcaaatgaagctgtagagcacatataattactcggttattttagtgttacatcctatgttttctcaatcctgagtctcacttctgtatgttataagccagatatagtggtcttacttacacaatataatacatagatagactccaaaaagtgt

SEQ ID NO: 133275 - DNA, 1114 bp, Homo sapiens
actgtattataatatatattaaaaatttgtagagctaaagaacccacttgcattaagaacaccactttctgttcatttgtgatactagaggacagatcctgcatacagagccgaaactgcttttaatcatctgaagaaattctttgatttcagtgacttactgatctgtacctgtgcacatatcattttatgcttctccttttttccccgcaacttgaactgtgactctttcagatatttcttaaatctgtatgagtcattttttaagcttagggatttgatatgtattaatgtcccctttgtcttctgtagattttagcattttattacctcttaagaaactctgggcccagactttcagtcatatttcttattcctatggtacagttctcacttaaaggcttaattattagtagggttaaatatatacaggttatctctaaaagtacttaaatttttaaataagggcttatgtgatacaagatacggaaacaaaagtttttggatttttatgcagtagtttgcaggaaagcaaatacatagtagatcgtatgccacttaggtatgttcaggtcatgccagtttattcttgttgggccacacacacatgtatgtgtgtgtaaaaggaatttttagtattgaagcaaacaaattgtcagtttaataattttctcttacatagcacaagatggcagataccacctactgtacaacaatctaataatccctaccttagttcccctgagttatagaagatgctaaagatttagttgtaaagggaagtaacatgattttttttttctaaaaagctgttttaagctaactattattttgctactggaaaattatattttaaaacttacagatatttaaagtatgctagaaaatttgaacctgataacaactgaaccttttgtcttgaataaatttctcaaatagaactgtgcaaaccctagcactttatgtgttgctgcctccccatacctaggtatgctctgtaataagctcccatttaatggagagatgtgtggaggcactgagaagttaatgaagaaaaatcaaccctaagaattccttattgtcacatagtgtcttttaaaaaataactgtagag

SEQ ID NO: 133276 - DNA, 4233 bp, Homo sapiens
attagagcaaagcataatataaactaggtatgcctgtattacataggccggttttctactgctgactcattgtcattaggcagcttatctagcctttaagttttaccccctgtaaaagtggaacattatgtgctccctgtctgcttcagaatatgcaaggaaaatgaatagaattctcttaagggcttagagttgctaatgtgaatgatgagatgtaacaacctagaagttatacagttcattgtacatggatgtgcccccactgaattgaaatttttggagattagacgcgggaatcttcatttttaacaaacaattgtaggtggttgtaagggcaggagaattgctctcctcggagggagaacaggaactgtatcttttacatgttttgctcagagcccagcacatccccaatgcatgtggatgtttaaaactgtagttggtgatggatttagggtaaagttcagttgacttttagggaataagacccactacaacagatatgttatttttattaaagtacttgatagaggccacagattaagcctctaaaggaactgttcattccccttatttctgaatcacttgtcttctaggatatcaatgagatttgtcttggttttgttttatatttataacttatagcagaaataagactgtcacatatttctagttttatattacggttaccatagagtaccatctccaagtcattgtcatctcagtaaatgcttatgaaaaaccttaggactgtattctttctcacaaacaaacctgtaagctggagttataaggctttctttgtccaaatatcctggaacatcatctctactgtttttcctccttcctctgtataacttggttatgaaatgggcagtgaattgaatactgtatgttttgaaattgcaaacttttttttctggaaaagcttgactttgtaatgtgattttctttattctcttccttcccctctctatcgcaggcggcatattttctaccttcagcatcacttaaatggtaggtttcctcacagcatgacccagttgtcacctgcagacagccctggggggactttgagtgacttgcaccttatcccagcaggctcccagctgtctcaagcaatggaagtagatggactgaatgactctagcaagcaaggctattcccaggaaaccaaacgcctgaagcggacgccagttccagactccctaggcctagaaatggagcacaggttcattgatcaagtattgtccacctgtcggaacgtggagcaagccaggtttgccagtgcatacaggaaatggctggttactttgagtcaatgaaagaggtgaattagtcctacaaggttccccttttagtgcaatattgctttcttttattatttacatagttgcatgaactgtttactattattggctaaccatatgttcttcgtctttaggttgaaagtccatagtaaatctttcattttatttattttgttaataactggcattcctgtggggataaaataatcgtatagttccttcctgctgaacagcgagtcttaaattttctgtttaacttctcaccctttgtatttctatatgtggggcttctcatttggttttcctgattggttcacacacacacacctctacccccctcagtccaattgctgcataggcaaattcttttaaaaattaaaaatttaaggcctaggcaggaggattgcctgagcccaggactttgagaccaacctgggccacatagcaagacccgatttctacaaaaagtaaaacaaaatagctaggcatggtgctatgcaactgtgttcctagctatgcaggaagctgaggcagaaggattgcttgagccccaggtgtttgtggctgtagtgagccatgattgcaccactgtactcagcctgggcaatagagttgagaccctgtctctaaaacaaattgaaaataaacatttatgttgcagttcaactgaagaatgttggtatgaatgccgaataacttgatgtaattgttttgagaatcaaatggctagatgggcgaatgtttaaaaatgtaaactagttctctttctctagcatgttctacccaattaccaaagtcagaagtattggaatttatatgaaaaaaatgcttccaatgtaatccattttttaaatggttatttaagaaaaaactaacttaagagtttatgtaattgcagtaaaggaaaattatttttattgctagttttgatagattatttttacctcaaatttggtatatgccaaaacacatcagtccttataaaattgatttttttttcctgaaaacctggaatgccatttttagctattactactttttaatttcaaattcacttatgacaaatgggagaaatatataaagaaatagatccataaaaatattcctttttaaaaatctaaattattgaggatacactatggaaactataaaattatcatgaagtgactgttaaagtttactggcaaatgccaagggaaggaatagtatgtgcaaaacaaaacactttgatactgaacttaatcagggatgaggtaccaaagtatccacattatagccgtatcttatgtttccaataacaagggctgagtttttcaggtaggtgggatgagggtggggaatgggccatgtaatgtctgctttcttatatttgcccttttgtaagtggtctgtttcttcttttcatatactttgttttgccaatccattacgtattttttgtcacttttgtgtgtcatttttgtatacctttcctttcttacttcaggggtgtgtcttcaagatttctaccccctatttgcaatgaatttcatacctcatctaaaatacattcatataccagaaatatgaagagtggcccttctaaaagtttccctaatgatggaagctgtcagttgtcctatctgtgcagaatgtgagtaatagtggcagaaataagtgtgacaacaatgctttgcctgttgttctttttacttgctaggtaatttgtaaagtggggataaagatgtagggaaagtaaacctctctctcactgttacggaaagcctggacttgagttaggtagactgccttaaagaagaagaaatatgtccttttctttggcatcatggttttgttgagtggcagactgttgaagtgagttgagacttaagaacgccagaaaagttgtctagcctggccccagtagacagaatttgttcttctctcaagtaaaaaattacctttttatagcttttatattatttagatgaaaaaataccattatgaacataattccatggccctttgtgtacaaagcatattttgaattaaatacctcaaggtccacctagacctctatggataaaatcataagtttatgatttttagctcctgtgagtgtttgggggcaaactacacagagaagacatgggtggttcagcccattccactaaaatatgttgccagattctggcctaactcagtattaccttttttcctaaaaatcatttttcacattttgagtaatagggcttatgctttgatgtgaaaaaatgtcaggaaatgagtgtagacaataccctataaaacactagctaagttttatagtgctccatgcctttgtgtaccttccactgattatcttgcctatctttggtgtgtaaactattttcatatcttctaaggctcttaacccactcttttctgaagccgcacagtcctttaatatgtcttgtttccttcctaaaagtttaaagtagagagcaaaaatgcaaatacccaaaggatactgttagtatgtaacttttgtgtgctgctttatttctagagtttgcattttttaattgttcattcacagaaaatcctaatattgccctatatggttggtttttttcctaagtggttaatatttaaacccgctagctgtagcatgataatgtctttgactgagcttatgtagtagaaaggatgtgtctgttttctgggacttttagtcttcacttatttttctataacaatctaattgttaaaaggaaaagatggcttattgacacatatttcattaaactttcactggaagaacagtgggtcatcctactgtggattaagaatactactgacaagcaaaaagcattaagctctgtaactgtctccaacaccaccttcaccccgcctttagtgtaccttagtgtactttagtgtacctattttggcagtacggtgt

SEQ ID NO: 133277 - DNA, 1232 bp, Homo sapiens
gattaaaagtagtatagggtggaattatgacactaattttctattttatgttctctctgatgtctgcatgcttaaataaacatttaagtaaattttaaaatatttttatatttgagggtagtgtggcaggaaagattcacagtcaggcagtttattactactggcaaattacaagtttcacataaaaaaagcacatatagtcatttctccaaaaaacctacccacaccaccaataaggacatgaaaagatattcaccatctttactattagggaaatgcaaagcaaaaccacagggagtgagataccacttcacaccaaaatacggacaataacaaatgttggttaggatgtggagaaactgaaactcttatttatggctggtaagaatgtaaaatggtacagccactgtggaaagcagtttggcatttcctcaaataattaaacatagaatcactatatattaataaaactatagttaatatatatcatattcttggagaaaaacatgcattaccatatatgaccctgtaattctgctcctaggtatatacccaagagaagtgaaaacacattccataccaaatcttgtatgagaacattaatagccatattatttataatagccaaaaaataatacctcacctgaggaatggaaaacaaaatgtggcgtatccatgcaatagaacattggccataaaaaaggaaggaaatactgatacatgctataacgtggatgaaccttgaaaacatgctgattgaaagcagtcagattcaaggccacatattgtatgatttcatttatataacatgttcagaataggcaaagcaggttagtgggtgccagaggctggggaggagggaatgggatgtaacttctaataggaatggggttttgtgggggtggtgaaaacattagaaattagataagagcaatggttgcacaattctgtgaatatattaaaaaccactgatttattttttcacttcaaaaatgattctaaagtacattagagagaataaagcttaaagaatagctgaggaattgttgggaaaaacaataaagaacactctaccattagatacttacatgtttattaataagacagagtaattaaaattgtgatgctatttcaaaaatagactcagtaatggaacagaatataaagtccagaaacaaattccaatacataatatgtacatatttcattaatgatgaatatggcatttcaca

SEQ ID NO: 133278 - DNA, 1048 bp, Homo sapiens
aagttgtttggtgggttgtcagggatatggagtgcttggtggtcatctcagatccatgacttgatagtgtgtgggaagaggaaagagatatggggaggattggggataaaaaggaaggcggagtccaggttgactgagagatctttggaaatttttctgccatgatgtggacctttacaagtggcatttccataaaatcaggaacaaggggccaaagtgaaatttttggttacttgagaccatctggtggtaaagataactcattaatggtgagttataactcattaatggtgagctcagctgccagggtccactcctgggttcagatgtcatcatccttccttgacccgcccttggaggaagacttaccattcttccattcaccacttgccactgcaacatctcttgctcttgttgtcagtgaggagtcctaaatttgcaaaatcccctttctgttgttataagccattgggcccacctagaacatttactactatgctttgtctgttacaggaggtaatcacaaaaataccagtagtctaaatcagcttaaaaatatatatgaaatgagccagcattttttaacttaggaaattgaaaatgactttttaaagtgctggcatcgagtattagtaagagtatgaaaatgagcattattcaaattgttataagcttactgaagggcaacatggcagcacttatcacacttttaaaaatagggtgttatttttaagagttctgcttccaggaattcatcataaagaaataatggaagatgaagtatggtagaatgattagaagcttcactcagtggtcatgcagacctgctttgcattctggctttaccaccaatttgctgtgtagccttgaggaagttgcttagcctcttcaaccttcagttttctcatccggaaaaggagggtgacaataattcccatctcactgagtgatgcaaattgaaagggaggattcatataaagtggctatcaaagtgccttaattaagtgctcaataaacactggctattaaatatagaagtttgatatat

SEQ ID NO: 133279 - DNA, 1145 bp, Homo sapiens
tctgaatggaaattaaattaggaacaatgaaaactggttatttttctctctggtttatgttctttctgtgttctctttcccacatgctgccttaacaggcgatgggtgctacaacagctaattcaggaaacctccttgccttcctttgtgaccaaaggaaacttgggaacaattcccacagaaagggcacagcgactcatacaagaagagatggaggtctgtggtgaagcagcagggagatacccaagcaactataatgcttggtcccatcgcatctgggttttacagcacttggccaagctagatgtcaaggtaggaatattactgtctcctgggcagactgcctgtctgcccttaaaatcttctggtagtagttcattctcagaagagctttgaaggagtagagaaactgatggtctggcaacttgagagaatcgcaacagctgctacctctggaggaaccctgtaattaaataaaaagcttgcattccccactagtgctgtttttggcagtcttaaggctagtgcattggtaaagcaaggcaggtttaaccaactgaggaagattgagcataactcactttatcctgaaacaggaagggattattaagccttatagaactggaattgctatttcttggtagtgtttggttatgtgacaatatactaagtcagctggctgtcttttcacactctcgtcctctgaaaagggggagaggagggcagggatagacaatctcacccaggtgtttttaaaattggctgagcctataaattacctggggattcctaagttccactccaagcctactaaagcagaatgagggtggatctagagatcagtattttccactgactcagggttatttgaatgcagagccagtttggaaactctcacagcctaatcctttcagtttagaaatgaggagatggagatttccagagaattttaatggcttagacttagctacagttgtaccacttattattcatcagaatgagagccacatgtcccttttgctccttatatactacggtgtctcagttttttcttttctgatggcgtcacagtgccataagaatctagggtgctcatctaaaaagcttctcaggcttgagacagttaaaagaggtcaagttgaaga

SEQ ID NO: 133280 - DNA, 1004 bp, Homo sapiens
agagagttacacttaccaggagagggtcttgagagtaatcttcatatccttgacagcttagaagagggaatttatcattaaagttagtatgacatgagagatatattagtataatgtgatagagagaaagagaaccttaaaagaatgagaagccaagctttaaaaggtaggactatttgtttttaatatgacttctctttattttagaattgatagatgtcacatgtaccctgctgcttctaaacccagactttaccactgcatggaacgtgaggtatgtcattttcattagtgatatgataaagtttgtccaaatttctgaagacatgtaagccccataagttgttagcttttgaaaacgaaatataaaccattttacacttatttcttctccctattctttatacctgtgacaattctaaataggcattttgcccctttttgtgtggtgtcttcataaactttcttgcctgaaatataaattgtcatgttgagttacagtatactgtttgatacatgcttttattttccttcattttttggggtgggagactaatgggcaatgggcataactggttggcttataaggcatataacattatatcattggtatttgagaagcactgcagtgtagtggaaagtgtatgggatgagaaagagggagtcatgcttgcctctggctttttccctgagcaactgaaaggatggaattgccatttactgaaatggcagtgtctggaagagaaacagatttaggtaggcggtgtttgttataggccaagagttcagattgggacatgttagatttgtgtccaagtagttgtatattaatttaaagttcaggaaaaaggtctgggccagatgtaaacttgggaattactaacatatagatggttttaaagccatgaaactgttttaagatccccaaaagtgttggcatagctagagacaagaaccagttcaaagactgagccctgagacattctattttctagggttgcaca

SEQ ID NO: 133281 - DNA, 1061 bp, Homo sapiens
catatgtatctcttccattttacttgaagtactgtgggaagataccgcaagagtctactttttgtaacactttgcttttatgtaacaagtgaaaagaaagctattgagagagagagagagatctacattatacaaaggtgtagggaagaagcaacaatgtacctcctttcccatacctcttcctcctcaaagaaaagaaacatggcatccagttctgcattactttcattttagctagttgtttttggagtttattttttttttttttagtttattattttttattattatttaatttatttttattttattctttagactggagctcatgatttttttttttaagtattctaaccggttcagcttttctgcctaaaaaagttgccaaacgtgtatcttaccaaagtgttcttttcctctaaggtgatgattgtaaaacagttaagaagccgttggatgttttgctcccttgtggcacacaattggagacgtgcaactgtgccacattaaaaacaaaacactgctggcctcaaaacacacctgccacctctgacagcatccacttccctcccccttatgactgctgcctttttcaaaatgagagtgtttggaatgatttcctggcagtatccatagtggttgctgagccttctaaagaatgctttgatgccttgctgtatatcagtctttcgatttctttttgagaatgggagccttagtgcaagtaagagacgacctcaaaaaaaaaaaaagttggacaaatgaagagtgtattttctcatcactggtatttttctagaagaaattacagcagagattagaaatctaatacaaaatgtcgtaatcatcttatgttctcttctttgaggtagactaaaagagcatcattatatttgaagaaaccaagattgaatgttcattggcttggcagtttttaacacagtgcagtttggaacatgtcccagttcttgtggatcacatttatggaaactcttaaaggactttaatgcccctccctaatcctttttctactgtaaaacctcattaatatatcctcaatg

SEQ ID NO: 133282 - DNA, 1026 bp, Homo sapiens
caactgaggatgcagggcctcttaacagttagtcccgggcgtttttcagagcttgtctgctttattttcccagcctgagagatgaagaggtccagaggcattgcggcggagcgagtccctatttgaccgtgttggtgacctcctttctaactgtgccaatttttgtctctgaacttgaaagcagcctttttaaaaaacattaattaaaattcttaaatttattaaaggaagagaaaggaaagtgaaggaaaagttatttgccatctgtatgtaggaagtagaagtgaaatcgtttttagatttttcgacttcattttgtactgcatttggtagcctttgcgtcaattttggaatttaaaaaaaaggatcaaggctctgacagggtttgttcataatagcaaaaataaatttttgtaggaaaaacgagctttctagtttatttaggattttgaaatgccataactaaaatttttgtgtatcaggttttcttttgcacctctggtagaaaaatctggctgcccttggttcagttttattcttccacccttgaaatctggccaggtgcggtggctcacgcctgtaatcccagcactttggggggccaaggcgggcggatcacaaggtcaggagatcgagaccatcctggctaacacggtgaaaccccgtctctactaaaaatacaaaaaaaaaaaaaaaaaaaaaaaagccgggcgtggtggcgggcgcctgtaatcccagctactccccactgcactccagcctgggcgacagagcgagactccgtctttaaaaaaaggccgggcgcggtggctcacgcctgtaatcccagcaccttgggaggccgaggcgggtggatcatgaggtcaggagatcgagaccatcctggctaacaaggtgaaaccccgtctctactaaaaatacaaaaaattagctgggcgcggtggcgggcgcctgtagtcccagctactcgggaggctgaggcaggagaatggcgtgaacccgggaagcggagcttgcagtgagccg

SEQ ID NO: 133283 - DNA, 1223 bp, Homo sapiens
ttgcattactattcatatatagttttacttcagtgacatgatagtgattgtttaacaccaactggctttgagaaggatgtactgacttgtatacatgtccaatttctgtagtttaaatagtcccatcatggcccagttccagctaccaatgtgaaatcacctggagctcggacagaatgcatacaatggactattggaagcccgtacaagttggctgcagcacaccactgccttatctacatgccgattaatcctgtttctgcctgaagccaataaatttaaaaatagcaataaaataaaattagaaaaggaaattggaaaggcaatttaaaaatattacagaatatggctcttcgccatcttttctcttcccgtggagccgtcgccacgaaggtcgagctgtgcagttttagtgggtacaagatctacccgggacaggggaggcactacgccaggaccgacgggaaggttttcgagtttcttaatgcgaaatgcgagtcggcattcctttccaagaggaatccttggcagataaactggactgtcctccacagaaggaagcacaaaaagggagagtcggaagaaattcaaaagaaaagaacccacccagcagtcaaattccagagggccattactggtgcatctcttgctgatataatggccaagaggaatcagaaaccttaagttagaaaggctcaacgagaacaagctatcagggctgctaaggaagcaaaaaaggctaagcaagcatctaaaaagactgcaatggctactgctaaggcacctacaaaggcagcacctaagcaaaagattgtgaagcctgtgaaagtttcagctccccaagttggtggaaaacgctaaactggcagattagatttttaaataaagattggattatatttaaaaaaattacagagtatgttttcaaaactaaaaaaaagtgtcacaaaaagttttaggaattaagtaggacaggaaacaaataatggaatatgcataacatgtgagcatatgtcattatgttatttaattctcacaattctgtagcataggtattaacccttatcttaaaatgatgaatgtaagtttagagattattcattagaccagaatcacataaacaacaaatattatagtcaagacttgaacccagatctacctgactacaaaacccaccctctctttctctccaaaccaacgtctggaagctttaggatattgtc

SEQ ID NO: 133284 - DNA, 1050 bp, Homo sapiens
catgactgaggctcgggaagcaataaagtggctttcaaaatactaaacgcaattgagattttttcctgagttaaaacaaaaaaaaaaaggaactgaatgccgaaatatacggagaagaaactccagttgccacgtccccgaacgtctccacccagtcctgcctgctgtttcgccctcagtctgggcctcgcacagcgcggcggagcgcgggaggggcggggcgggcctgctgacgtcgccggacctgaactgcgcaggcgcggcgcgagatcgcgggagcgagcgcgcggtaacagttcgcggcagttcgcgcgggagcggggcgcctgggtggatgggcgcttgggcgcctgggctgccggacggtgggaacggaagtcgctgtgggacgctgaggaagccaggatggcgactccgagcaagaagacgtcaactccaagcccccagccttccaagagagctctcccgagagacccttcgtcggaggtcccgagcaagaggaagaattcggccccgcagctgccgctgttgcagtcgtccgggcctttcgtggaaggctctatcgtccgcatctcgatggagaacttcctgtaagttgcccggaggccgcgccgcgggtgtggaggtgtgctggccagcaggccccggggctccggcagcgcgcgggcgtgggcgtgtgggtgtgtacctggcttgtgggtctggccttgaattcgtgccggggttcccttgaggattttcctacgtaggctgtggagattgacgtgtatgatgtaggagatgtgtgccttgggtgatgtggtttttaaatttagtcagccaaggttttccaaaggtgtcatgtagcaggtagtggttgtaggagggagtaggtctctgcccgctgggagtcgcgatccatagcggccctggtctggaattcacagaagtattgtccccgggaacttaagaggaggcaacagttaattcggcgtgatagtgatgctgtggcggattcttagggtaggcatttgccagagaggagtagataagacggtaaaggttgttcgg

SEQ ID NO: 133285 - DNA, 1008 bp, Homo sapiens
tgagccactgcacccgcctaagaagataggaaagtcttgcaagaagtgaagagcattgaagacagaaggaactgtctgaaatagtttggtatatttagaaagcgtcaagtattttagtaaggcaagaatataggatgtgaatgagtatttggacaaagggtaagcaaccattcaggggcctgtatgtttactatgctaagaagttccgacatcatcctgtaggcagccacggtgtgttttcaacagggaatgacgtgtgttctgtgttattctggaagcactgtagaggatgatttagaaagggtgcaagattggaagcaaaaagacaatacgaaggcaagagatgatcagagtgtgaaggaatgagatttgacaggatccagctacagaatagttgtgaggcatgggggaaagggaggaatgcagcatttttcccaagtgtaagagccttagctaattgatcaggtgctattcagaagagggagcagtttgaggagaataataaatgcctcttagatcctgtgacttaaagtttcctttgtggcatctaagagagatgttctataggcagaatgtaggagtctggagcttagaggaaaatatgaacagatgagagttttgggagtcatgcatacaggtgattgatgaagttgcagaactggttatgattgcccaataggaattatgaattgaagaactagaagaccatgtacagagtcttgggagaatgcctacattaagggtgaactgaagaaggactcaaagtcagaaggaactattcagggaggtaagatgaaaacagtgggagacaattatcaaagaagccaaggaaaaagaatgtttcaaaaatatcacctgctacattgaagtcagatagcgggactgaaaagagcccactgcatttagcaattgggaaatctttgaccttttaatgaagcagtggaagcagaaaactttgcaggccggatgcaaagagaagaaagagaaggtagctggaagtgcagaggt

SEQ ID NO: 133286 - DNA, 2491 bp, Homo sapiens
aagttaagcttgaactaatggacatattataaaaagtgcactcaacaactggagagtatgcattcttttcaagcacaagttaacatttctaaaagttaattgtatactgagtcataaagcaagtatcaaaaaatttcaaaaaatggacaccacgtagaccatatcctatttctattaagatagaaataataaaaaaaaaattaaaagttaatggatggttacaaaatggaagcaaattccccttaagattataaattatttaaaatgtgtgtgtgtgtgtttagtgctatatggaagacatttatcaggtagaagatacttttctctgttaataactagccttgtgaccttgagcaattatctggacttcagtttttcttcatttcaaagatgagagagttggaacagatagcatccaaggaccaactcagatttttatgaatattgatatatagttttttaattgtcagatcatttaatccctatctctttgtaatcgtctgttggattgtactccaggggctgtacagtaggactgaattggctataacaatttttactaactttctcatgttgatttttgtcatgaaaacacatctcatccttgagtgataggatttttaagggaggctgtggagtgcagtgtttcctagatgacagattgcagccctttgggtacacagatgtatttatgggatgcccaagttctcagcaagaatatttaatgtatttttgtttaaatgctaatataaaaatttaacaaaaacatactctacaccatctgtatggatactttataataagaactgcctcctgatttttgtttcctcctcattggtaccaagtcttttaattcttgcaagctaatgagcagatgtcattcctacatggatgtccttggttttcctgtgaggaaacagagaggttaagtaactgtccaatgtttaacaacttgtatgtggtggagttgagatttgaacctagatagtagatgttaaaacctgtacttttaagcattaggctgtacttggtggttacaagataaggcttttttttttttttttctcccatctttctgggactcagctttattgtctataaaatgaatgtatacttcaaggttgcttatgagtattaaatgagaaaaatacatgtttagtgcttagcacaacagtatatagtaaatgcttgataaatgttagctgttgtcatcactgtcattatcactattaaaaagattactatttgtgaggtatattttctaccttttttaatatttatcacttatttatagcctgatttaagatccagtctgatttttttaggctcagactttgttttcggacttagactcataagcatatagaaactagcacagatatgtctgctttatcatgtaaatttcaattatattgctccttttagaacgatgcttggtggcaattatatcattaacaggataggtaatattagcgtggttgttaatatttaacctgcgcgactgtaggaagtcttcaatggtaataagaagctttgagtgcttagtggttatactataggacctgttttcccacaggcattttctcttctgtctgggtgtttaatatagtggacaagtacacaggctctggagccaagatttcctgggttcagatcgtttttctggcacttactggctttgtcacgaggttggtaagaggctatggagtgcataggagttcgataaatcttacctaatattattattgttgttatttgtgggagggaacaatggaggaacccagatctgggagagataccttagaaagtgacaggagcgaacatacaagtggtacctgaaaaaaatcttgatttgacaaataataatgactgctaaatctctgattgttaacctgggaatgtcactacacagctcactttttcttttttatgtcttaggttgggttttttgtgaagagaggatgttctagaggcatggttgaaattgaattgtaagtgttaaaagtgctaaaactcctttttcctataaaattcttagtttatattcatgttttcctgatgattagaaaagagtattaatatagtattatggcataaatattggaaataatatttaaagaatacttaatccagataagtaaggggtttaaaaaatatattttaaaaacttaaattgtaggctagccatggtggctcatgcctgtaatctgagcactttggggaggccgaggtgggcagatcacctgagatcaggagttggagaccagcctgaccaacatgaggaagccccgtctctactaaaaatagaaaaattatccaggcatggtggcacatgcctgtaatcccagctactggggagtctgaggcaggagaattgctggaacctgggaggcaaaggttgcagtgagccgagatggcgccactgcactccagcctgggagacagagctagactctgcccatgccccctgccccccccaaaaaaaaaactt

SEQ ID NO: 133287 - DNA, 1149 bp, Homo sapiens
gtggagtacatggtgaggaatccatgggctacctgtatgggtagttttgatttctggaaatgccacgagtcagttttcattcatatgttttctgagcagggggagtttcaaggtttaactgctctaccctttaatatactaacacattttgaattgcagtcaatgcatgtgattgaagaatagcatagtaattaaaggataaacaactccagctatgtgactcctctagtagtgtttatgaattagtgttcacatttgctttaattttaacagtttaaataattttgaatgttgagtaagtaactgatgtggtcaattatggcattatgactaataaaatgccaaagtttccttcttgaggggccaaaatatcaaaaggagtaaaaatcataataataattctatctggcaccttttgtgcaagagaattttgggaattttatttctaaactaatgtatatattttgaatataaagattcttaaattattttttaattaggttcagggcttctggaaatcttgtaatcacccgtgagattgatgtggcaaaaaatcagtccttttggttcatcaacaaaaaatctacaacccagaaaatagtggaagagaaagttgcagccttaaatattcaagtggggaatctttgccagtttctccctcaggtatgagagaaataaatgtaaagatgggaaaattttgtatatagtgtttcctttttatgccgttgaagggatatcataatgactgctatttaaattgaacatagcactcttacagttctttgtaaaggtagcatttcatcacttagagtataatgttattaatttgtagtaatttggaaaatttcaattagtaaaaaagtctaaattagagtattttgaaataaagtattatttttgaagttcagagagtggctcagatagctatgtgcttctatttgtagaaccttaaaatgttgttaatgaacaactttttagtcagtttttgttcgtatacattatacatatatttgagtctacaaaatatttgatataataaaactcctatatttataagtataccttctaaaatcttgttatagtttattaaacataaaaaatgctaataatttatgttaaatgttaaagtcatattacctattaaatttg

SEQ ID NO: 133288 - DNA, 1002 bp, Homo sapiens
attatctccagaagtagatgtttgaaattgcctttttttttcctttttaaaccctctaacatttcaactgatatgtaatagacagtgatcattttcatcttgggactatgtgttcttttattcccaaacttttattatacatatgtagacatttcaaccttgaaatattggcacagaaaatttttaaagatgatcaaaaaggtaacagtttatatcctaagtttatcttcattattctaaagaataatgcacaaaaggtttatatctcaaatgttttttttaatgagtttcaccttgacaagtgtaagcattgagtgaaatacattttgaagatatatgtaaatgaatgatagttgctgatatttaatttttgtgctctaggacaaagttggagaatttgctaaactcagcaaaattgaactcctcgaagccactgaaaagtcaattggtcccccagaaatgcacaaatatcactgtgaactcaaaaacttaagggagaaagaaaaacagctcgaggtactttaaatagacaactcatttgtattgtttcttattgatttctgtatctcagaacatgggagagagagtagtagtattgattcattgagtgaattcgtatttgtgattttttttcacttaggattgtactgctaatatcagttaaagtgacagagtgagaatggatctaataatgtgaagtttaaaaaggttgactatttcagcaaatacgtattactaattgaatttttaaggaaccagtaacagtattataaaaaaaaattatctcaggaagttattctttcattcattcagtatctattaaacacctactatgtgccaggcactgtgtaaggctttgagtaatagaagagataccatgtgccatttaatatagcacttccgttgaaccaattctctcatgtatttttttcagtcacatgagggtagactttggaagagaattacacatttagttggaatgttggttattttcaccattaa

SEQ ID NO: 133289 - DNA, 1039 bp, Homo sapiens
agctttctttcatctcgtttctaagacctttcagtcatgagtgttcatttaacatcctaatcctagtattactatttttcatttgtatatcacttttacagcttttgtttagctttcatttatattaagtgaattgcttctacccttcaagtggatgcagcagatatttgggcaagaagagcctgggctcagatgtgacagggcttctttacagttaggactaataaattgtagaccctagaccagaacttgggtatgaatgttgcttttacacaggttttaggtgttttgttgagacagggtctcactgttgcctaggctggagtctacatagttcttaagaactcctgtgaattctttattgtgaaattttgccatcgtttatttttcattgttaaaagatgtgacctgttgtcattttttctgtcaaactgattgttcaacatatatttattgtagacctcatgcaaagagaaaactgagtatctacagaaaatggttcagaggaatgaaagatataaacaagatgtggagaggttctatgaacggaagcgacatttagatttaattgagatgcttgaagcaaaaaggccatgggtggtaagtcataatttttagaggcaaagtacgtgtttctttaagtagcagagtaattatgatgaaagtattagttactgtgtattcaagttaggtgcttctttttcatttttggctttatatgttatacataataaaattcatgtcttttttttttttgagacggagtcttgctgtgtctcccatgctggagttcagtggtacgatctcggctcactgcaacctctgcctcctgggttcaagcgattctcctgcctcagcctcccagtagttgggattataggcatgtgccaccacacctggccaactttttttttgtatttttagtagagacagggtttcaccatgttggccaggctggtcttgaactcctgacctcaggtgatctgcccccctcggcctcccaaaatactgattacgggtgtgagccaccgcgccaggc

SEQ ID NO: 133290 - DNA, 1113 bp, Homo sapiens
accatcatcccattcactcttatataatgttgccttagtgtgccacttaatttttttttagcaaatactcctatgacatgacaggcatcactttcacctacatgctggtttttatttttcttttgacccattttcattttgttttttttttttatttttaccctttatacttgagtttcttttgcttctttatacatccctgtatctcttctttattgacagattagaggtaagtcacattttcgtagccattaagatatgtttcagataacaggatggaagtctgagaatctgaactggtgatagaaataaacgctcagtgattatcaggactgttattaaatcattacactggtatttactatttctgaagttgtcccagaggacaaatttacattaataaacctgttttgatatcaaaacaatcttttcttacatttggtttctgcctgtatcttgatttttagtatatgtgttagtttaaggtagggcattaacttctgtttgttgaattatttgcaaggaatatgaaaatgttcgtcaggaatatgaagaagtaaaactagttcgtgaccgagtgaaggaagaggtcagaaaacttaaagaagggcagattcctgtaacatgtcgaattgaagaaatggaaaacgagcgtcacaatttggaggctcgaatcaaagaaaaggtactttttggtttcaattttggattatctgaattttattttagcaaatataaaaaatattttgcaggtgtttgaaaatattttcaagggttttcttgtatctttcatttcttaagttttttaaccaggaattctgccaccataggattttcaaggacatacttattactgtggaagtgttgctactttataggacttccaagatataaagagagaaaagtgaaatatgattttttttaggtacaagaggattcatagtggtattcctggaaacactgagctctttttgtgaatatattatacatctgctttgtaattatacacccttttgaaggagggcaatatagaaaatctgatgtttttggaatagataatagaataatattccctgtattttaaaagtataactagatattttttatgactat

SEQ ID NO: 133291 - DNA, 1068 bp, Homo sapiens
ggtgttaatgatgtgtaatatgtgtctataatatgtcatgtatgtgttttatgtgttaatgaaaaatatcaaggaggtagcatacttggtatgatagaactctgcatttgaaatcagacctgattttttataattagtttccattttttagctatgtataaaggttacttggcctcttttgagccctaccagtcagtaatatttgtcctgattatcctgtagggttgtttttaggatcagatgaaataagacaggaagataaatgtaaagagaaaaaacatgcatgcgtattactgcaactgtttattaatatcattaggaataaccttttatagacttgcaaataactgttggtattttgttgataattatggattttgcttgatgtaaattgttgtgggttaactcgatatttgaatgggcagggccatataatttgcttgcatgagtttttaactagctgtccccccctctccccggtttaattttacaggcaacagatattaaggaggcatctcaaaaatgcaaacagaagcaagatgttatagaaaggaaagataaacatgtaaggtttcatactaaaatttttattacattaaagtttgctctaacttttgttttcaaatacagattatgagacagattcttgttggggaatggccaagatcctctgcattctctatttcttaatccgagggaaagtaagatttggaagtatagtagttgctcagaggacaattgtggaaaatttctcaaaactactagcagctgtgccttatgatatttgtagctgggtggctgtagttttttaataggataatggtggatttggttaccttaacagcaaaaactaaggtctaagggatttattctgttgttgtttaaaacacagaaatagaccttttattttgaaaaatcagtgatgacgcttatgtagaaaatgcgtatgtacctttatgcatgattgaaattaatgagacaaagtatacttaaactatggaacttttcgtctttttttttttttttttttttgagacagggtctctgttacccaggttggagtacagt

SEQ ID NO: 133292 - DNA, 1028 bp, Homo sapiens
catgtcagctacaaatggggacagctttatttctttctttctgatttgtatgcacttagttttcttacgttattgcattggctacaacttcagcactctgttgaataagagtggtgaacactgaaatcttcaccttattcttgatcttaggaggaaagcattcagtttttcattattcagtatgtaataatagcaggtttttaaaagaatatgtatgctctgtcagattcaggaaattcttatatgtattcctatgtttctaggaatttttatgttgagtacatactcaattttgtcaaatgcttttctgcatctattgatataattgtgtaagtttttaggtggttagtaagtgatggattatattgattgatttttgactaccaaatcaattttgcatccgtcaaataaaccccacttggttgtggtgtataagtgtataattctttttacatattgctgaattctgtgttaaaggatttttgcgtctgtattcatgagttatactgttttgtagtcttcttgtattctctgcctagttttggtattaggataataactagcttcataaaatgaattgggaagtgatccttcctcttctactttctgaaagagattgtgtagaattgatgtttatatactttaaacattttgtgtaattctcaagtgaaactctctggttgtagagatttcttcttggagggagttttaaaattatgttttcaacttccttaatagctattagactagtcaaataatctatttcatattaggtgaattggtccttttgtccaagttgtcaaatttatgtatgcataaattctcttatcctttgatatgtatagaatctgcagtgataaccctatttcattcctgatactggcaattccccctctcccccacccccctactctttttttagttaatcttgccaaagattttctaattttattgatttttttcaaggaggcagctgtttgttttattgatttttctctctgttttccgtttcattgatgtctgttctt

SEQ ID NO: 133293 - DNA, 1062 bp, Homo sapiens
attagttctgttgcttagatatagatagttagaaggtatatcaataggtttaattagaactgggctttttcctggccagtgtgacataagaagaaaggtcaagggatctttccaagggagtggttatagcgctgcattgtggagcctcagctgattaaggaaagaaatgtaaaaaggtagtggggttaatggattgcacaaccttgtgggggtcaaaagatagagtaggaataccagagtaagtaaaatggaagaaaaggaaatagtgaccaaagaatagaattatggaaatacatttttcagaagtggtatgatttggggggctttatgatctagaacataaccctcctcagctaccttcctctgttcactagacaggtggctgaggaaaggttaaggaaaagatgattgaagttgaagaagtaagggaacacagaggccaaagagttagattgattttctgtagatatgtttaagtcacatgatgacagatataatgatggagagaggaagacagtgaatcagatgccacagtcatccctgaatggataaggttggggaggattttcagggaggtagttaacatagcaacaagggtaatgagtgacaaagtctgaccccaagatcttcagaggaaccaaagtggggctcaattaaaggaggaaggagtacagtggggattaatgagaataccctccccacctccatgtcctgaaataatggcaggaaaaggtcaccacttgagagggctctggggagaacaggtgtcttccagaaatagccaagtttccattagaacaagaagagggaacattcaggcggggcgcggtggctcacacctgtaatcccagcacttcgggaggccaaggcgggcggatcacgaggtcaggagatcgagaccatcctggccaacacagtgaaaccctgtctctactaaaaaaaaaaatacaaaaaattagccgggcgtggtggcgggtgcctgtagtcccagctactcgggaggctgaggcaggagaatggcttgaacccaggaggcggagcttgcagtgagctgagattgca

SEQ ID NO: 133294 - DNA, 1104 bp, Homo sapiens
tatatccatatcagagaacattatgcacaagatgttaaaatttatttatttattttgcaaggacatgagggataatgagaaactgctctcaatgcatttttagtgatgccatttagtaaaaagaatatatattctacaggcagatataagtaggcattaaaacgtaaaagtttaccgaggcaggcagatcacttgaggccaggaatttgagaccagcctggccaacatggtgaaaacccagttctactaaatatacaaaaattaaccgggcatggtggcacacgcctgtggtcccagctacttgggaggctgagacacaagaatcacttgaacccaggttgcagtgaaccgagatcgcaccactgcactccagcctgggcaacagagtgagactctgtctcaaaaaaaaaaaaaaggtaaaagtttaaggacattaagattataagttatttttatttgttataagtctctattttcagtaatgaatgcattataacttttataatgaggaaggagaggagtaaatctgacttggaaataaagctggctaaaacagattatgtgatgtgttaaatttatctattttaatgcaaaattctagttgtaaaatgtaaattgggcatataagtgtatatttgtttatatgtgtgtgtcctaaagaaaatctttactctgtcttaggtagaccatagttttgataaaaatttcactgacatcaagtggcaagttacatagctggttataaaaatgtaatttaccctgaatataagtgaaggaatctaagcatatagactgatgattaaaatctcacaatattagtctgaagtattggtagaaaatatttccattggaagaaaatagtttatttctgtttcagattacaggttgagtatctctatccaaaatacttgggaccagaagtgtttggatttcagagtttttcagatttttggaatgtttgcatatacataatgaggtatcttgagaatacaacccaagtccaaacacaaaattcatttatatttcacatacaccttatacacatagcctgaatgtaattttaaatgatgtttttaataattttgtgtatgaaccaaagtttgt

SEQ ID NO: 133295 - DNA, 1162 bp, Homo sapiens
tgtggtgtcatgtcagcactaaaaaaatttcagattttggagaattttggatttgggatttttggattagggatattcaacctgtaatagggtgacttgtaatctttattatcatttttattatttatggaaactgtatcacatatgccacatgactgttttaattttggtcttacggcatatagtatgtacttcctgtaaatatttagaaatccgttgggcttttaaaatattttgtttattcaggaaatatttaatgagtgttaattatatagtgagcaccacttaaagtatttgagatatattagtgaatgtgtgaaacaaagatacaggtagtctggtagaactggtaatgtgctagtctaattctcacaggacaccttttagtgaggaaaacacctatgttagattgtttgcatgttaaaaactatattactacagaagtcttataaaccaagaggaaaacagtctcaagtactaacctacttttgttttattagattgaggaacttcagcaggctttaatagtaaagcaaaatgaagagcttgaccgacagaggagaataggtaatacccgcaaaatgatagaggatttgcaaaatgaactaaagaccacggaaaactgcgagaatcttcagccccagattgatgccattacaaatgatctgagacggattcaggatgaaaaggcattatgtgaaggcgaaataattgataagcgaagagagagggaaactctagagaaggagaaaaagagtaagtttcataaagttagaatgaaatgtttataaaatgtagatacatctctgttgatgaactttcttctgcttctataattatttctataaaatgttcaagttgccttcttgaggaagctcaactcagttcttccaacttcataccttaattatctatatctgtcgtgtactgtaatttgccattatagctgaccactgtcttctatcagattatggcacttgatttaataattctctataaatgcctagctttattttctttacaaagtcactcactattactcatatcaaatttaagctctttattctagcctttgtaaccttctgttagcttagttccttgaaacctgtccaatttcatctttggttttctttttttgtagaccatgtgaatagatctgtgg

SEQ ID NO: 133296 - DNA, 1052 bp, Homo sapiens
aaaatattcttatttcatcatcccccccccttttttagttttgttgtatatacaattctagaatgaaaatattaatttttcttccagaattttgaaggcctattgctgtttgtcttttgataggaaatctagtgttttccttgtgggtttttttgtttgtttgtttgtttgtttgtttttgtaggttacctgttttttatatttgatagtttcaggatcttatgttttcccaggtttttggacattttagaaagatttgttcaggtcacatattttccactatgggagttacttgctgagtggtgtttgtaacctttagaactagggtattcttttgtgttattattagattatttcactaattaaaattttcagagaaacaagactttgttttgttttacaattttaggtgtggacgatcatattgtacgttttgacaatcttatgaatcagaaggaagataagctaagacagagattccgtgacacgtatgatgctgttttatggctaagaaataacagagacaaatttaaacaaagagtctgtgagcccataatgctcacggtaagaaactttgttcatcttggtagtattggttttattattgtaatcatagatttttgttttaagacattttagtcccaatattaccctggttttacattatcagacttgtggcatctggcatactgctgaatctatacatgagctttttaaaggtcccctgatcaatgagggtaataactgtcataaaacctgtgcttttttctagaaagaggtataaaactggcaacttattgacctagaatcatgtagaaaattagtttggttagctggttccttttggcgcttgttactagattgtagcagggattagattaaaaccctgctgaagaggtagaatgctgctgtaaataggttgattaaaggaaaaaaactaagagaataggcaagaaaatcacctgctacaaagaacgggcattcttaggattttgaaagtgaaaccaataccttattgacatcataaaattttgatagcttttgttgatgat

SEQ ID NO: 133297 - DNA, 1023 bp, Homo sapiens
taattttttttctttagaaaagaagacatcctttcaggattcgtgaaaaattctattctctgtaactcatgtttgtgttatactttattaaaaatcattttatatagttttcaattttttaccatatcttaaattagcaaagttaatattcataacattctcttattcacatatgtgttattagaatatttttgctagatcaagaagagaatttctattttagatgcattgttttgattagtctgatgaggattgaaagaaagtataagaaaaaatattgtgacccttataaaagttataatgcaggtgtaattgttaacatttttactaaaatgccagtgtcagaataatacttcagaactgtattagatttgtctcctcttgtcatttggttttctaatagtagcatatatcaccaagtcagattaatagctggcatatatttccattttaaattgcattcgaatctttgagataaagagatatattctgcttttttacccttttcagactaacctttcacctttcctgccaccttcctacattcacatcttccacgcagtttactcacctttctaggtctagttgaaatgcccctaccatcatacacaagtgagcaatatgcaaacttaaaattttagtcatataaatggtcatttagtagtctatttctatgatttatttttaacaattccaatctagaattggagaagtgtacaaagatttacatatgaactccccacagtagtgtttatgatagcaaaatggtggagcaaaaaaagaaaatttatgaagatgctgattggttaaataagttactttatatctttataatggaatattatgcagcccttaaaatgtttctgtaggtctctttttactaatataaaaataaatttatgacatgttagtaaatcataaagtaggttatggaataggatgtatggaaaaattttgtttaaaaaatcataaagcagaaagatgccatcaaccaccagatcatcacagagtgctgcgtctcct

SEQ ID NO: 133298 - DNA, 1871 bp, Homo sapiens
caatcattgtttgtagaaaagttagtccaatacaagataatctgccaataatgtaagcataactatctcccttctgtatcattttgaagtaattcccagacattctgtttcacctgaaaatattttggtatgtatctctaaaagaagtggactctttttataaaaacacataactacagtattatcacagtaaaaaaatttatactaagtaacatctaatatgccgtgttcgagtttcttatccatcccacgaatgccagtaggagtatggtaactataaatcatttcagtagagaatatatggtaattaaaataatattttcttttccctatattcaggttcgtgacaataaaaaattaagagtaaatgctgttattgctcccaagagttcatatgcagacaaagcaccttcaagatctttgaatgaacttaagtaagtcttgaaaatactaagatttatttaaatattgaattattcaacatttattgttacataaataagctattacaagctgtattatttccttttaagatctcttaagtcgaatataaggaaaaatttaggcacaggaccatgatatagttagcacacagtgagtgtgatgcgatgtgatgtttcaagtctgcagaataatattgaactatttaataaaagatgctaaagtagtgggttagttattgggaaaatgaaatgataaattatcccttcataatgcagaaacaatttccaaaaggactaaatgtaaaaaatgttaattataaaataattataagtaaatatcttaatttggaatataagtaagcattctaaacataatagaagaaatttaaaaagagtagtttgtaatcataaaaagcttaagcttttctggtaagtgaataagtcatatgtgattttaaaatataaaagaaaaaagacttgtcctgtgtcattgttgaaataatgtatgttttacttattgtttattggtggcttatcaactcccagatttttttaatgatattttaagaagaaaaatctaatcaatacttttcctttcagacaatacggatttttctcttatttgagagaattatttgatgcacctgatcctgtaatgagttacctttgctgtcagtatcatattcatgaagttcctgtaggaactgaaaagaccagagaaagaattgaacgggtaggaaagtagtgaatcatgtactgaatcatgtaccaaaaatgtagttttgttaaaacttcttagctaaaggcaagcaaaacgtgtcagaatttaagtaagtctgttgtttttaaccatgcagaaattatatttgtattaattattttccatatgacatgaaacattgactgttaactaatacattgtgagaggagtgatgtggaattaactagaataaatacttaatacatttagggtaattccataaagttaaaacctgaaaagagatacctagtacactaacctgattctgccttgcttggtaaatctatgttcaaacattgtattaatagtttagtcttttaaattattatatttgagattatttttaagacaaattatactttagaatggtaggctggggtataaaactgtttttggtcagccttccttttattaaaacttgtacttaagattatctcagatatgaatgaccacttctcataggatttgtttggctagtacatacagccaaagaaactcctagtttctgtattctgctaatgctgttgggaattttattctttaaagcaatctctgtgactccaaaccgtatgcacttttatcacaggcagaaacagagaggaaatctctcctgcaacaggtttttccagtattaataccaagttgctgtattactgcttatgagcatc

SEQ ID NO: 133299 - DNA, 1996 bp, Homo sapiens
gaggtgcgtggatcacttgaggtcaggagtttgagaccagcctggccaacatgatgaaaccctgtctctactaaaaatacaaaaattatccgggcatggcggtgggcgcctgtaatcccagcttctcgggaggctgaggcaggagaattgcttgagctgggaagtggaagttgcagtgagctgagattgtgctgctgcactccagcctaggcaaaagaataagactcctatctcaaacaaacaaaaaaaaattatggctttctacagttgctacatgaaatttaattaaacactactctcctttaggcaagcttttatgattcttcaaaatgttatttcgctttacccattccaacttatctccctcccctccccaacatactcgtccttgtaccattctggccactctctacagcacccgctgaatttgtttgttgttgcttccatcctttgttcttttctcttcgaggcaacatggtgtagtggaaagaacatggactttggtaccaaacacatcttaacacttaatatctgtgattttaggcaatttacttcacttacctgagccttagtttcttcatctttaaaattgagaacatactattaacttttaggattattgtgttgtgttttttgtttgttcgtttctggtttttagctattaactctccccactttagctccttaagggaagtgactgttttataaacaatattaatagcaacagaaacaacttatattgattgatcggttatgggccaggcactatatatctgaaaagtattgctaaatatatcccagaaaactgggggggacctaagaatttgggatcaattcttatgtttaacactgatttcttcattattatatgtgtcatacagtttaaagctgatggaacaggatacttgcaatcttgaagaggaagagcgaaaagcaagtaccaaaatcaaagaaataaatgttcaaaaagcgaaacttgttaccgaattaacaaacctaataaaggtaaggtattgttttaattttagtcattttttaaaggaaatagcgggcagataagatagtaaaatctttagagggagggaaggttttgattaaggtttttgacattttagttatataagcaagagatctttatcatcagtttcagcttgcttagttgcttgacattttctttagaggtaataaataggataaaagcactcattaagctaaatgtgtttattccagatgactctcttaaaaacaaaggaaaacactttctaaaaaattgttacaagaactgtttgagagagatgtcaggcacaataggaaaattattttttcatggtttataattttgttttaaaaaactatacattttttagttctaaaacataggtaacataaaaattaactcttaggggtttttgttcctagatttgtacttctttgcatatacaaaaagtagatttaattctccaaaatactacagtgatctctgagaagaacaaattagaatcagattatatggccgcatcttcacaactccgtcttacagaggtaaaatttttgcctttactttttattttgaggttctaacctcagactggtttgaaaatatatatcgtgtcatcactagcaatatatagtttgttgttttatgctatttaacttacaaatttaatgcatcatgttgatgaggaagtaatacttaaaatacttaagactggttgagtaacttcagcagtttaatcttttgttaatatctgactgtgaaatgataaacacagaaatactgggtggaggggagagcatgtgatataccatattaacttaaaaccggaaggagagctggcaataagatggtagtggcagtggcatagtttttgaatctccaaaatcttttcccaaaaacagaagagaagctagaataatataacaacaaacctgtggacaacacgtataacaaaactaagtttcagggtatccatgtgggcatactgcagtactattc

SEQ ID NO: 133300 - DNA, 1008 bp, Homo sapiens
tttttgtgccaaccagagtttgagggttagtgaaaagagcaaaccagacctgttttatttctcagaaatctgctagttccgtaaccttgggcaagtttcttaatgtgtctgagccacatctacaaatagagataacccttttctttaagatcataattgggattagaacaattaacaggatagtggttgtaacagtgcttgacctacagaagacatttagtagatgagataccttccctgttgcatgtgaaatttttgcagtctggcccttgtccattttaccaactctgatcttttacatccttacaaattcctctcctccagccacattagattacttgtttcttaaataagcaggtctttgaggctcatatgccttaaaattcataatcacctgtccttggaatgtcatctgctgtatatgttccttatttcttgtcatttaaggctgttaagttgtcatagcttctgtgaccactctgaccttccctacatacatactctgtccaatctgctcctgctgagaggtgccatgctgtaatgaaaagagcatgtgtcctgtaagcagacagggatctgaatcatgacagtctctaactaaatgtgtgggcttgggcaagttacttaattcctttcagtctcttttttttttttttaatgcgctaaatgaggataatattactgtgcagtgtttgtgagaaataaagggaataatgtatgcgaagcacctagccaagggcccagcacataagcattcggtaaagagtatctgtttctgttatgataatgatcctgtgtccttattcacctttctgtgaccaatgcggattataatactggcatttaataggttctcagtaattatttggtgaaggaataaataggtccatgaataaataaatacatggaaggtacttggaaaactatcaagcatgatttaaaggttctaactacatttgagtgctgagttttgtcatatgaagcctgtgtactgtgtatctcaaatct

SEQ ID NO: 133301 - DNA, 4923 bp, Homo sapiens
ctaaaaacacaaaaattagccaggcatggtggtacacatctgtaatctcagctactcgggaggctgaggcgtgataatcacttgaatctgggaggcagaggttgcagtgagctgagatcacgtcacgtcactgcactccagcctgggtgacagagcaagattgtctcaaaaaaataaataaataagtaaataaataaataaatataattacatggagctaagctagactttcaggaaaaggcagtaaaatttaaattttacacctcttatggattagagaaatgccaggttattgatgtgctgatgtattttaaagtttaagttcaagtttaacctttataataaaaagagtcattatttaagaaacagtttcagataatttgattatcattataatcagaattcaacaatatttaatatgtggtagtttaataaaacatccctctgctttaacattaacattcaaattttcaaaataaatttttttaatagcaacatttcattgaattggatgaaaatagacagagattattgcagaaatgcaaggaacttatgaaaagagctaggcaagtatgtaacctgggtgcagagcagactcttcctcaagaataccagacagtaagtataaaaagtatataatgctacaattgccatatttaacatttttaagattatggaatcttagccattgtaacaggccgtgaaaaacatgatgtgtcgtaaaaaatagggagtttttccacatttttaaactgaatatatatatatatataaaataatgttgcttaagagatcaatggtattggtactataacatttattcttccaatacaaatgccttttaatgggtacagttggaacatatatagtttttcatggaaacattgtaccagtaattggtatatcagaaataataaatagaatattttaaaaataaagggaaaatgaaaatgtttccctggaaattggggtgtttaattagggttcaatgagagctgaatatttaaggctaacatctgccaataagaaaaggaaaaaagaggtcttatttccattatattttttatcctgacataccactcagtaaaattaggagatgctgccctttagtcacattccaccgttaattatgtacctctgtgacaagtggggatgatactttgcctagatacctattcagaataatgtcaaaatgaaattagaaaataagttttaaaatatctagtattggtgtgtctttaaaattcttaatttcaaatgttatctatttcagtagataatgaaatggctactaaagatataaacaactggaaaaaaattaatggattataattttcaaatcctcaattgatttattttatgatatcagacacagaaatcacagagaatggattcgactaattggatacatactaggaacttagtagatatctttaaaacaaattgagaagcttgtttctaaaaacagtagaatgtcttcagaatacattgtgttgttataaaataaatataagtacaatctactaattttttttttcagaaaaagcatgattctattcttgataagtcatactgtttttgaatcaaaattaggagatgattatattcattaaaatgtattaattacctcttatatgtcaagcattgtacaagacagacatacttccttctcagctgaaacttatattctagtctggaagattgggtagatgaaaacacaaatcaaaaatcagataatgtcagataacaagagatgctaagaaaaataaaacagggtgaggagatggagtgacatggatgggaacttggtcagggaagcctcctttgaaaagataccattttataacagtcctgaatgaagagaacagatcagtcaagtgaagatgtcaggcaaaagtattccagacagagaaaatagctcagacaacgcccaagacagaagtatatttgggatgtttcagaataaaaggaatctcattggggttaaaaattatccaagcagagaagaaggcagaagccaagattatgtaggccttgtagactatacaagcaattaaggttgtattcttttgggatggactccagtggaggatcttaaatggaaaagtgacattactacttttatgaacgagcactctaacttttcttctagatggaggataaagtagggatacaagaatggaagcagtgaaaccatttagaaggtcatttctttggaccacgtaagagatacatgatggcatgaattagggtgatagcactgaagagagagagggagaagttgacaagtcttaggtatcttttagtgacagagccagcaagacttgctgatggatttgacatgaaggatgagagagagaacccctaaatttttcacctgaacaaattacgatgccatttactggaatggagaagattgaaggagaaacagggttgcttaaagtgatagggaaggtgggtgaaatccagattctgtttcaccatcttaaatttaagatgcctattagagtcaagtgaggatatcgagtaaataaatgttggacacatgagcttacatctcagtaagtcagagattcaacagaggaatatttgaaggtctatagaggttgaactgctttctaagaggttaaaataataagtttaagatattagattaatatgtcaagatctttttcagggtttcaggattcattttgtaccatgtagtatatagcctttgcaggttgtgctaggccaaacaatgtactgattgcctcccctcaaaaaaaaaagtatatgttctaatttgtccccatggcatggactcagaagatagtactgtggtgaaattcaactgtcaaagtaattagattctcaggatgcttttttagttcttcataagtgcagtataaagttctaacttcttgctctctttcaatgccccacatattctggacccattctaccaattcagcaagtacccaccattccaaatggacacaactcctcactccccatggtatgcagtactcattcttttttcccaagctcctgttttccctctgccttgctcctccctagccatttgctttaaggcccggagatgaattctaggcctttgaattctcttaactctcctgtagcatgaactgatacttcttttctctaaattcctagcctatatgatatgtactgcttgttttaatactcaacatcaatacattgccttaaagtgttatccagtacatacattttgttttctttaaagtacaagcttttgaaggcaaatgaccctgtttattattcctttgtattcttgtgtgccagcatgctgttgaacagatagataacttattcagcagattatttttcttttaactatttgaatggaactgttttcattgtatctataatgacgggcaatttttttcttaggttttccaagaccttccaaacacattggatgaaattgatgctttattaactgaagaaagatcaagagcttcctgcttcacgggactgaatcctacagtatgcctgtttctctattcccattctgcatccaaccaccaccaccaccctccccatacacacacatacacacacagagttccctccagtacttgcctcccactctgtactagagctcttggtaataataagctagacagcaggaacaatgtactttaaatgccagattctgaatctattagaattttaaatagattcttcctaaggaacacaatgttctgtgccttttctttataaaaagaatagttgggctaacctgaaatactgcaatgtctattttttcaaggataaaaaatgtcactttcagtatgtaataagagcatatattatttgcatacaaacaatgcagcacaattggcattttcatttaatgttttaatcaatgcaaaattgtatatagttttatcctttggtagatttatcttaaagaagtttttttttcccctgccagattgttcaggaatatacaaaaagagaagaagaaatagaacagttaactgaggaactaaagggaaagaaagttgaactagatcaatacagggaaaacatttcacaggtaattttttagtttttaatctttttatcatgtgattattaatgaaatgggaatgtagaataatggaaaatgagatgacatgcttctaagagaagtgtgttatgcccagactgatactgatataaaatttacataaaattgtgtgtcagaatatagtaatactgcttttaaattgtgtttttatattgcctttatttgtaggtaaaagaaaggtggcttaatcctttaaaagagctggtagaaaaaattaatgaaaaattcagcaatttttttagttccatgcagtgtgctggtgaagttgatctccatacagaaaatgaggtaaaattgcatttgaaataaataatatttctggcaaataattttaattatatgcttaaagtacatataaattatttatttacttttgagttatatctgtgaaaagttttgtttaccaaaatgttgaaagaaaggagaaaaccacctgtgggattccattagggtcactttttttggggggggttatgtttggaattagtgactaataccttgtaactctttttatacatctgagtaatggttattcagttgtattgaataaatacgttataaagctaccacagctggagttagaagactcaaacagattagtttgaaatatagtgtatatcagtgtctttttttttttaataaagaatttaagaattcatggtcaggtgtggtggctcacgcctgtaatctcagcactttgtgaggctgaggcaggcagatagcttgagctcacgggtttgagaccagcctgggcaacatggcaaaatcgcatctctgtaaaaatacaaaaattagctgggtgcggtggtatgtacctgtggtcc

SEQ ID NO: 133302 - DNA, 1840 bp, Homo sapiens
aagttagggggattcttggccctctgcagttaccatacacaaccacttctctagcacaagagagcatgacactccattatgttctaattgctttcacctacagtttaagaacctagcattttggaactagaatagatagtgctttttgaggacagagttcctcgctcagtaatttctaaaaactcttggggaagcctactaaacttgaatagaatggtatagaggaggaaaatgttaatttaatctgaataatttccttatctaaatagttctttgaaaacccttaaagcttttagatagtaactgtttgcttaatatttattatttttaaaaatacatatatatttattgttacatatttaaactagtgtcactaaattttgagttctttactcttactcagttaattcaatccattttcaaataatagaatgacattaccagaggaaactcatttttcatcactttttaaatgttttataggaagattatgataaatatggaattcgaattagagtcaaatttcgaagtagtactcaactgcatgaattaactcctcatcatcaaagtggaggtgaaagaagtgtttctaccatgttatacttgatggcacttcaggagctaaatagatgtccattcagagtagttgatgaaatcaatcaggtatggtgattgttctgttacttggatcttcttatatcctgtaacaggaataaatgtaatcattattgttgccattgtttagggaatggacccaatcaatgaacggagagtgtttgaaatggttgtaaatactgcctgtaaagaaaatacatctcaatactttttcataacaccaaaggtaggtaaaaagtaacctaaaagtggtcatatactcagaaatctcctgtgacataatcatacagtttttgtcccaacatgcacatattagcaggaacactcccaaaaaaggaatttaaaaggttaacagtaatatttacattattaaagggacaaattccagtgtcatgcttaatcagaggaagaaaggtaggaggcatattattatgttctaaaattgagattgtctcatttctcttctagaaaaggtactctttcagcactgaaagatgagtggggaatacaacccttaagactctggctcttcattttcccaaaaaagcctctcttgtcatatactgcccttcctctttatttgccactagtactaagctggcccaggagaaatttaagtatcccaacatcttctattcacaggttaattctgataaaaacagaattatctttgtagataatttttcataatctaaaaccattgcaatgggaaattttcttttgctaaatctagtgctgtgagtaaattacaaagcatatgtattcaaagatatgtttttaatgtaaccagattttttccattttaagtattcatgaaaaattttggccaggtgcactggctcatacctgtagtcccactactttttgaggccaaggcaggtggatcacttgagcccaggagttcaagaccagcctgggcaacatggcaaaaccccatctctacaaaaaaaatacaaaaattagctggacgtggcagcatgcgcctatagtcccagctacttgggaagctgaggcatgaggatcgcttgagtctgggaggtggaggtttcagtgagcccagatcacaccactgcactgcagcctgggtgacagaatgagaccttgttccaaaaaaaaaaaaaaaattgtttttgcccatcctacattcaaatttttattaaatagtgtcatctgtcttctttttttcagtagatagtcttgtggaatagtcacatctgttaatacc

SEQ ID NO: 133303 - DNA, 2311 bp, Homo sapiens
tgcctgtaatcccagctactctggaggctggctgaggcacgagaatctcttgaatctgggtggtggaggttgcactgagctgagatcgcacctctgtactccggcctgagcagcagagtgggaaaaaaaaagttttattaatattgcaaataaaataatacatttgactgtacacatgtaaggttggaaaactatacttctcagtatatagcttatatgacaatttgttttaatacttacagctcctgcaaaatcttccttattctgaaaagatgacagttttgtttgtctacaatggccctcatatgctggaaccaaacacatggaatttaaaggctttccaaaggcggcggcgccgtattacattcactcaaccttcttaataaaagtaaagagagggaacttgggaattttttttgttaaattctgtttataagtatggctcaactgaataaaaggagattcactaaaacgaaaagcagttatttttggaaacctgcttttaaatacaaataggttgataatggaaactataatgacctttccaaaatagcagctggtagtaaaagttaagtcttcttcagtcttggttgaacttgagttcttggcactctgaccatgagtcattcagttctcatgttaaaatgtacttaatattacaaatcaaaggtacagtggaagaagggttaatcacaagaagttacttatatggtagccctgagctttaattgcagagtaactttaattacttttagagcctaaagatgactctagagcctaagtcctagtttctcccaatgttatatttaattttaaaaaattgatatgaaaatgtctaatgtatagtaataatttatgacagatctagtcatttcttcctattaaaaaagattaccttatctccagtaggaaatggaattttatgggcctttaaaagaaagttttatgaaacttgatgctataattttattggtatttcaaggggaaaaaagcactggggttcaaaaatggtagcagaactgctttgaaatgctgcaaggtggccactagatgatgcaaaatacaaccaaaagattgactgagaataaaattaggtgacaagggtttttaaagaataaccttttaaagtgtgggggcaggggttgcttttttttattttatttaaagtcaattatattttacatcttacatttctaaaagcattttataattatttttagtaagatttttcttaaaatttcatatactggtttctacaatttatatttgaaatttctcagtgttatgtaaagagtgatggaaaagcattgatttctttaaaaccgtaatgtttttagaacttaagcctatagggcctttcttacaatgttgatgtacccattatcttagaaaatctagtttaaactgttttctttcaccgcaaaagaattaaatgggaaaatcatttgtttatctctaagttatactaattagtagaaccaaacaaattatcttcttttaaaaaataaatcttataggaaaatagacagtccaaagtcatgtctttgaacagtggattggatctgtgccagtaatgacaaaattatttttttgacttgcttgcctgaataaattgaagaattgctttcagtttgggttttgtatattcttaagtagccattgaaatttatattcttaactaggtcaaaaaataatgagccataagtttatgtcctctcacttagacattttctctttaaaaaggtattttcttctttataaacattttaaaagagccttcccttcttaaactaactccagtgcatgaagtgtgaaaatattttaaaatgacatttttactaatatgagcaagtcatgtaaacattgaagaacttggtaacatattagtaaatggatattaccaaatgttttcatcgttaattactttgcgttccaccaaaatatctttactaaaatgtgcttggtgtagtttgtttattgtctaaattagtaccagtcatcttatttctgcaaaatgagtatcaatgtgaaaaagacacgtgaagattaagcatgtttgaaaataaaatggtcaattacatttcaatttacataggccaacaactgttccatactttgtttgtaaacatttaatttctctactggacaaaattaatatttggctttacattgaattttgagctgtgaagaataaattatgtatcattttagcatattaaacagtagtaagtctagcacatagtctcagccacttaaaacaaaagtttttttgtttgtttgtttgtttgtttttttgagatggagtctcact

SEQ ID NO: 133304 - DNA, 1044 bp, Homo sapiens
agtacccacatttacaaaatagtgttcagcagtctattagtgttcgaaagggtagaaaatttagtcccttttctgcctgcagtgaaatcacagtctaatagaagcaataaacactcatgaaaaaaaggtttaaaccatttaaagaagccaagttacaaggccgagtattcatcagagaggctgcaacataggttaactgtttttatgtttaaacactatgtttgctaacatgcccaatagccaattttcacttattactccttacattaagctactatataaagtaatttttttaaaatatatttttgagtcaggcagactttcacttacaagttacttgatagtctcatcattggtgaaatgagaatcatacctaattcacagagttgttgagaggagcaaatgagatcggggcctattgggacacatagcattatagtgagtacattattaatgtttatgtatcttctcatattttaaatcttgaaaaatgtactgtgaattttatacacccaggtctgaaaattctaaataatgtgaaagtagagattattttgtagtctattgataaatagttcaaaggatgccaatacctacagactgagcattggggagtgctgatagttatttttatagatcttgttaccttgttaaattcaaatataagttagtcagatgagcttctttaaagatattccatctcattattttatattgatatataatttggaaattttataattaatagaatttgcacatttgggagatatgactatgttgacaatttgggctttttatttccaccaaaaaggttaggtatgggggattttatttattttttaatgttgaattataactttattgctgcaaaataaatgactggtgattggctggaagatttagatattttcaaaaaagccagctttgtataatcccaaagagagagagcaggtctcctctggttagcttcattctaagctgtgctaagaggacttggtgaagctgagggcaacctaaaaacagctctggccctggccctggccc

SEQ ID NO: 133305 - DNA, 1052 bp, Homo sapiens
agacatttgttaaacatctatcacaagcaagcacaaaactgttcattataacttgtttcgtaagcatggtagaattctagctctttatcatttgggttaatttgatcacacatgaaaggttcacttataccaaaggtgatgacattcccgaggctggttatccttttttttaaattattattattattattattattattattattattattttgagatggagtttccctcttgttgcccaggctggagtgcaatggcacgatcttggctcactgcaacctctgcctcccaagttcaagcgattctcctgcctcagcctcttgagttgctgagattacaaggcatgtgccactatgcccggctaattttttgtaattttttaatagagacggggtttcaccgtgttcaccaggatggtcttgctttcctgacctcatgatccacccgcctcggcctcctttaaatgagcatgaaacaactagaaatccttagacctattgtcggatcataggactcttaagtgtttaggctttagaaatcacccctaaggatgtgggggatattggccttcctggattcttaaacccagatcatgaaataatggggactgtctgaacattttaaccactctattaatacatatcttgaaaacctctaatttctcagaacccatttttaacattcttcatgcttattacaaccatcaatttaataaaaaaccaatttctgatattcatggtgctaattaacaaagctgctgtgtgctattaatcaatattagcaggacttatgatagctaccactctagtatgggctttacgtgagctactaattagggcaactgactgcactagtaatttaacctagcatgtaatatcgtgcttcttatgctggaatattttaatggtttataacaatggctaaagacagtagtaaaaaaaataataggaaggtaagtagcccctagggtggggctaggtaatggaggacaaggtacagaatttcctcttagctttagagttttgttttttgtttttgagaggaattgctct

SEQ ID NO: 133306 - DNA, 5382 bp, Homo sapiens
ctgtcgcctaggctagagtgcagtggcatgatcttggctcactgcaaccttcgcttcctgggttcaagcaattctcctgtctcagcctcccaagtagctgggactacaggcgcacgccaccacacccagctaatttttgtatttttagtagaggtggggtttcaccatgttggtcaggctggtctcttaactcctgacctcaggtgatctgcccgcctcagcctcccaaagtgctgggattacaggcgtgagggattacacacctggcacaaacttacttctagtgttaagacaatatgacttaaagtatggcctttgcaggaaggcagattttatatcaataaaagatgtgacagagatgctcaggaacaaccagatgctgagtggcccctgcactcaggagctcagggagaaatgctcgttccaggtaggaggctggttggacccaatgccaattcttttccatcctacaacaccaagaaatttagcaaaaaggctcagcttttttactcttgaaagaatttatgaaaccagcaattgtgtggaataaaacagaaaaaatactttccaggggacccatagggtaccaaatggcaagctcatttgcttagagatgttagcaactttctcattgtattagtttgggctgccataacacacaaccacagactgggtggctgaaacaacagaactttatttcctcacagttctggagactgggagtccaaggtagaggcaggggacgggttcgtttcattggaggcctctctccttggcttgtagatggtggcttcatccctgtcttcccaaggtcttccctagtcttcacatgtctgtgtcctcatctcctcttataaagacaccagtcgtggattaaggcctgccctcatgaacttgtttaacatcagttgcctctttaaaggccttaacttcaaatgcagtcattttctgtggtgctgggggttaaggcttcaacatagggattttggggagggggacacataataatcatctccgagggatttatcctttgagtcgtagggactattgaccatgaccgcccttcggaatttttttcatgttctttgagctgtatcctttctgattcctttctcttaggtgaacggccctttccctgcacgtggccagactgccttaaaaagttctcccgctcagacgagctgacccgccactaccggacccacactggggaaaagcagttccgctgtccgctgtgtgagaagcgcttcatgaggagtgaccacctcacaaagcacgcccggcggcacaccgagttccaccccagcatgatcaagcgatcgaaaaaggcgctggccaacgctttgtgaggtgctgcccgtggaagccagggagggatggaccccgaaaggagaaaagtactcccaggaaacagacgcgtgaaaactgagccccagaagaggcacacttgacggcacaggaagtcactgctctttggtcaatattctgattttcctctccctgcattgtttttaaaaagcacattgtagcctaagatcaaagtcaacaacactcggtccccttgaagaggcaactctctgaacccgtctctgactgttggagggaaggcaaatgcttttgggttttttggtttttgtttttgtttttttttctccttttatttttttgcgggggagggtagggagtgggtgggggggaggggggtaaggccaagactggggtagaattttaaagattcaacactggtgtacatatgtccgctgggtgagttgacctgtggcctcgcacagtgattctgggccctttatgcttgctgtctctcagaattgttttcttaccttttaatgtaatgacgagtgtgcttcagtttgtttagcaaaaccactctcttgaatcacgttaacttttgagattaaaaaaaaaaacgccatagcacagctgtctttatgcaagcaagagcacatctactccagcatgatctgtcatctaaagacttgaaaacaaaaaacagttacttatagtcaatgggtaagcagagtctgaatttatactaatcaagacaaacctttgaaaggttacactaagtacagaacttttaaaccttgctttgtatgagttgtactttttgaacataagctgcacttttattttctaatgcagaggatgaataagttaaatacatgctttgaggatagaagcagatgttctgtttggcaccacgttataatctgcttattttacaatatacacgtttccctaagaaatcatggcagagatgtgagggcagaatatacacaacagatgctgaaggagaaggagggtagtgttttgcaaaagaaaaagaaaagaaccaacagaattttaactctattaacttttccaaattttcctatgcttttagttaacatcattattgtatcctaatgccactaggggagagagcttttgactctgttgggttttatttgaatgtgtgcataacagtaatgagatctggaaacacctattttttggggaaaaaggtttgttggtctccttcctgtgttcctacaaaactcccactctcaggtgcaagagttatgtagaaggaaagggagctgaaataggaacagaaaaatcaacccctataactagtgaacaccaagggaaaataccacaatgatttcagaggagactctgcaaaatcgtcccttgtggagaatgcaggcaacatggaatactaggaatgaaatcacatcactgtatcttttacatcaatagcctcaccactaatatatcttgtatctaggtgtctataatggctgaaaccactacatccatctatgccatttacctgaaaacttaactgtggcctttatgaggccagaaaagtgaactgagttttcgtagttaagacctcaaatgaggggagtcagcagtgatcatgggggaaatgtttacattttttttttcttcagaagtaacgctttctgatgattttatctgatatttaaaacagggagctatggtgcactctagtttatacttgcgctctgaaatgtgtaaacatagggtgcctacctatttcacctgacccatactcgtttctgattcagaatcagtgtgggctcctgcagtgggcgcgggtcacggctgactccaacttccaatacaacagccatcactagcacagtgtttttttgtttaaccaacgtagttgtattagtagttctataaagagaactgcttttaacattagggactgggagcagtccatgggataaaaaggaaagtgttttctcacgagaaaacatgtcaggaaaaataaagaacactttctacctctgtttcagatttttgaaacacttattttaaaccaaattttaatttctgtgtccaaaataagttttaaggacatctgttcttccatacgaaataggttaggctgcctatttctcactgagctcatggaatggttctgcttatgatactctgcacgctgccttttagtgagtgaggagtttggggttgcctagcaacttgctaacttgtaaaaagtcatctttccctcacagaaagaaacgaaagaaagcaaagcaaagtcagtgaaagacaatctttatagtttcaggagtaaatctaaatgtggcttttgtcaagcacttagatggatataaatgcagcaacttgttttaaaaaaatgcacaatttacttcccaaaaaagttgttacttgccttttcaagttgttgacaaacacacatttgatattctcttatatgttatagtaatgtaacgtataaactcaagcctttttattctttgtgattaaatcctgttttaaaatgtcacaaaacaggaaccagcattctaattagatttactatatcaagatatggttcaaataggactactagagttcattgaacactaaaactatgaaacaattactttttatattaaaaagaccatggatttaacttatgaaaatccaaatgcaggatagtaatttttgtttacttttttaaccaaactgaatttttgaaagactattgcaggtgtttaaaaagaaagaaaagttgttttatctaatactgtaagtagttgtcatattctggaaaatttaatagttttagagttaagatatctcctctctttggttagggaagaagaaagcccttcaccattgtggaatgatgccctggctttaaggtttagctccacatcatgcttctcttgagaattctatttggtagttacaattacagaaactgattagtttgtcagtttgcagatagatttagcacagtactcatcactcggatagattgagatgttctttcacatcagatgatctgtaacactgtaagatactgatctttacaactgtttaatcagttttatttttgtacagtattagtgacctaagttattttgctgtcccgtttttgtaaatcaaatgaaattataaaagaggattctgacagtaggtattttgtacatatgtatatatgttgtccaaataaaaataataaatgataaagactgaattgttctagccattatgtgttgtaaaagggggctatttcaccataatgaaagttacttctttaacctgtgttcgcaggattttgggatgagtgcaaagatgattttaccctgtacctttcaacacatgcaatagttatatagacttgtgtgtatttactattcacagacctctgaggaagtagatgcaatagaggtcacttgaaaccattgtgttatgctggaggggaatatttatattttgggagataaatcactttaagaggcttttagagctcataactgtgcagggtgtactaggaactggtcagagaaagttgtaagctcagattgtgctcttgagatacgatattaataagaacacacaagttgaggtttcattggctcaacagtagaaacataacaccaagcaaagacaagcatcaaagtgtgtgtgtgtgtgtgtgtgtgtgtgagatttatgcagacatgtactagctattatgtattaattaagcttttattgtaaactactcatggcgttgggtgtttaggtttttcacatttaatccttacagcagctcagtacagtagataattattattatgtacatatttctgatgaggaaattgaggattggataacttgccaagaggcacatctaataagtggcacagacagtgtttaaatttggatctgctgaatccaaccctgcatctttgtatgcctgcatcacagcagcaagggatttactggagtgtaccattcatttgacccattttattgagcacacctattcatgccaggcactgttgtcactgtggatacaaaggtgaaaaaatagacaaggaccctatgttcagggagtttctgtta

SEQ ID NO: 133307 - DNA, 1898 bp, Homo sapiens
gttggggtgttactgtgttgcccagattggttttgatctcctgggctcaagcagtcctcccatctcagcctcccaaagtgctgggattacaggcgtgagctaccacagccagcccaaattcttcttttatctatggaatcctagtgctgtttttgcaatcagaaaccactcttttttttttttttttttttgagacagggtctcagtctcactctcacccaggctgcagtgcagtggcacaatcatagctcactgcagcctcaacctttgggctcaagcaatcttcccgcctcagcctcccaagtatctgggaccacaggcaagcaccactacgcctggctaatttgttgtatttttggtagagatggggtttcaccacattgcccaggctggtcttgaacttctgtgttcaagtgatccatcttgagcggctgagcattatttttcttctagaagaagtcttgattttctacatctgcaagaaactttaattcttaattggcactgtttgagctctgttctgaaaaggaggcctaaatcccttagatttgttttttaccagattggtttacttttgctagatgcaatggaagcttttgattttgtatttttgactttcctgtctccattaaagttagacccatccctggacttgggtggggcagggaagatgagaagaaccaggtaggaaagagacgacattcagatggcaggcctccctgaccccaggcaggacttcagtggcagcctggacagctcagggagtctggggagggttgcctatgtccagtgagcaagcttggcacttggcaagtacccggtctctgtcttctctatggagaactcacctccattcgtttcaggactgcccacaaaaaaatgggcttcatttggcatcatcaactaatcagcagtcgaggaggctccctctcaaaagcagcaagtgtccttttgtgctaagtaggcaagcacatagccagggggccccagtccactgttcttgcaccctccgtaggcccaggagaattctggaggcctgatgactgtctctgcaaaggaagtcttttacacattgtgcgcagtgttcagtagcttttttgatcacatttattttatactctgagctgagtcagtcagcaagaggtgcttagcttgttactgaaaggggcggggagtggtatataaataatgagaactcagagaaacttgtgctgttaacagctctgctccagtaaagtggagtttattgtgtcactgcctctgggtgtgttttcctgtgaaggccagaaataatgcagtggtacaagtgtgttgggtatttttttccctatccccaggaggatggtaactctctcattaatactaaagacaggtttaaagattctctaattgatagttgcattgctgtgtgatttgttcagcgtgaaggctgaccattctcctttagaccttagcaccgagcctcaaagagagggcctgacttggtttcccccaggctgccagacgaaggtggagtgaccgtctctctaggccagtcctctcctcctctgtagatcatctctggtcccattcagccttaattctgttctcgtctacatgtgacttccccattccatgctttcttaagtgcaaaacatctatcattttctaaataataccttattatatgactgtcattaacttatatgctgggatgttagattcaacatcatggcatgttagatccaaactctccactgtattaaaaaggtgggagatttttcaaagggctacaaattgtaggtccctaagcagaatccagcctgcgtacacaccactgggtggcaccataatttataatgttgaaattgaatgcctctaagtaggggaagcaccctgttcagttcaccatggaatcc

SEQ ID NO: 133308 - DNA, 1447 bp, Homo sapiens
ctggataatatttgcatttttagtagagatgaggtttcgccatgttacccaggctggtctcaaactcctgggctcgagcaatctgcctgcctcgacttcccaaagtgctgagattacaggcatgaaccaccacgtctggccagtatttcttactttataaattatttatttgcatccttgcccacttttattaagttgggctgttcctttttgatttgcaagtcctttctgtgttacagattttaacattttgtcatatgcttcaatttcttttaatttattttgattcttaaatttttctacttatatatatttttaacatgcagaagtttaacatttttacgtattcaaaactatccttcaagtaggattttgcttttggtttcatgtttagaaagtctctattccaggattctaaaaatgctcacctatattttatcgttatggctttattttttacatttacatttatagcccatttggaaatcatttgagtgaaaagtatgaggtagggactaagatttaatttttttcttttacctgacatctaagccacttactgaattaaacattttctgtttcactgatttgaaataccccatttaccatgtacagaatccctatagattcttaaggttattttcagaccctactctgttccactgatttgtcttttcctgtgctgctatctcactatcttaattattacagctttaataatccattttaataactagtattgcaagtgctcacttattatttgttcttccgcaaaattttcttggcaagttgggcatgtttattcttccaaatgaacttcagaaataactttgtcaagttctagaaaaagaaattcttacggtgtgtgttaattccgtagatgaatttgtacagaattgccatattcacaccattgagccttaccatccaaaggcatggcaagcattttgtttgttcattttcttttatattgaggctttatgcatttcttcaccaaggtcctgaacttttattgttaggcttattctgactggttatggctggcatataagaaagccagtgctcttttgtacagttacatctgtgaatgcacctttaatttagattagatttttcagttatcttgaattttttcaaagagaaagttgtgtcaactgcaaataattcttattttataacccccccttcttctcaccatttacttcttattttatctaattgcactcattagtatttcctggaaaatgttaaattatagcaatgggagcgggtgtccatttatgctttgggctagactttagtagttatactacctttattttactgttgaccttgcagaggaaaggtttcagagctgatcttttatactgctgaggaattattttattttcctgaaagcttttattagggatggttgttcaattttatcatatactattttgtacac

SEQ ID NO: 133309 - DNA, 1503 bp, Homo sapiens
acttgggaagctgaggtgggaggatcacttgagcctgggaggttgaggctgcagtgagccaagatcacgtcactgggtgacagagcaagaccttgcctcacagaaaaaaagaaaaagaaaatgtatagtttttgctgaatcaagaacctaaagaggcaagaatctgttgtcagctgggcacagtggctcatccttataatctcagcactttgggaggccaaggcaggaagatcacctgagctcaggagttcaagaccagcctggccaacatggtgaaaacctgtctctactaaaaatacaaaaattagctgggcatggtggcaggtgcctgttgtaatcccagctacttgggagactgagacacgagaattgcttgaacccgggaggcagaggttgcagtgagccgagatcgtgccactgcactccaacctgggtgacagagcaagactccatctcaaaaaaaaaaaaaaaaattctgttatctgctgtcttttgtttgaggtctgctggaactgcatgtgctgtctcacagatagctgaggttgggaatgtgtgcacgatatttggatatgcttgcttcttagactctgacatgcttaaatgaggaagtgctgcatacagatgtcagagacacacacccacttctcatttcagaacctaaagcataggacaagttgctttctacagataaacacagagatccggaagtaaaatctcacacctaagccctacactgtctctgttgtatcaacaaatacaatataaacggaagccaaatcacaagcaggattcagtgagaggtcagaagcaaatggtagtaatatgatgggatggcattcaggcaggattattctttcaaagcctatttaacatttttattcgttcagaacatctacatgcaaagcaatatttctgataaacaggagacttttgaatgaatgatttttgagttcagtgttcattgaaatgatgtatgcagaaaaatgtggacttctctgtacccaggaatggcctgcacacctcttccgtaatgtgtattggtggttctgcacatgagggtaatggagaatgggaaaaaagcaactgttcatgtttcgtacctgcatgttgacattgctttttggtgaggagagaagccagatggtgatggacaaatggggtgcttgaggcctagggtcagggcaggtctatgtggatgcattccccaccagtctggtccatgaatgctttcttagactcaaatctttgcacttcttcatgatctgactcctctcacctgctttctaacaaggacactcctttgttgggcaaccctactgttactgtttgtgcatttccacctctgaaggaaggttcctgtctgttcttataagagggccatgtccctttcacatatggaaaaagtaggagaggtggaaatagaggagtgagaagacagatgtagtatattcaggaagtttctgactttctccgttttgtttttttttttagtcagagtctcac

SEQ ID NO: 133310 - DNA, 2022 bp, Homo sapiens
gtttaaatcatttagcacaccattataattaaaaataaagaatttatgtgtgtgttccagaagcccttgattcctagaatttttgtttagaattccagattagtccagcactgcctcattcacttcaattatttattattattattattatgattttgagactgagtctcactctgtcaccgaggctggagtgcagtggcatgaaggatcttggctcactgcaacctctgcactctccccgcctacttccccctaccccctactcaagcaatcctcccacctcagcctcccaagtaactgggaccacagatgcacaccattttttgtagaggctgggtttcactatgttgcccaggctggtctcaaactcctgagctcaaaccatttgcctgcctcagcctcccagagtgttaggattacaggcatgagccactgcacccagccatctcattcacttaaattatttattgagtgacttacatgcaaaaagctgtgtaaaatgctggtaccaggcactttggattttgtggctaatagtgataataatgacaatttctaacatttattatatgtcaggttccaagctaaatggtttacatgcattgtcacatttaaactcacagcaatcctgtgagatagaaaggtgctgttcttctcatttaataggaggaatcagactgggagttagttaacgtagttcaaggttacactggaattttcctagtctgtctctaggtgggtggagttgggcatgaatgcttgctgatctggaccccttgagtttccgccagtgggaagagaccctgtgttttacgtggttctcttgggtttggtcccagagccaccagtcttcagctgtctactcttgttgttctgactctggcttatggttggttttcatgaacctcggttaggagtgtcagcagaaatcttggactctgaccatacctactctgtattttccatagttatccagaagctgcttccttcccattgaaaaataacctggttgtgggcccaaagctgtattagtcaggacaacagaatccaaacagggactggcttaataaaaaaaatgaaactttattggttcaggttacaaacacatctaggggtagctctcatttcggtgtctgtggatacaggcactcagtttctgcctctccatggctcagttttgctgccttttgctacagcctcattcatggggttggtgggggctgtctccaaatagtggtgagatggctgcccgcagttccagactcatatcctgccacttaagcaaaccccaaggaaagacagttttccattcccaaagattccagcaaaagttccaggctttaagctccatgactagttcagattgtgtgccccatccctgaaatgaatcactgtggcacgactgggtcacatccaatctctgggtctggaggtgtggggtcaccctccctggaactacatatatccagaatggggaaggagttgttgccaaaaggaaatttaatgtgttatttattatccagaagggaacaaatgccagacaggcaaaaccaacacccattctctctgtcatcccatttagttagttatttatttttatttgtatttttttgagacaaagtctcgccctgctgcccaggctggagtgcagcagcacaatctcggctcactgcaacctccacctccctggtttaagccattctggtgcctcagcctcccgaatagctgggattacagccacaccccaccatgccaggctaatttttgtatttttagtagagatgggttttcaccaggttggtcaggcttgtcttgaactcctgacctcaggtgatccacccgcctcggcctctcaaagtgttgggattacatgtgtgagccaccatgcccggctatcatcccatttataactaccaacaggattttccaaagaacagagtttgacaaaatgagaggcaaacagtacgatatttttttttctatatatttttcttccttttggtgggaaggagctccgaacta

SEQ ID NO: 133311 - DNA, 2081 bp, Homo sapiens
cccctaaaacaatctgacatgctctagttggagcctgctttctatcccatcagtttgatttctgaatgccttatgatcattagcattcttcattaaaaaaaaaaaaagctttgtcgcatttgttagtcttgacttccaaatcttccgtgttctttttttttttttctctctctctctctctttccctttggctgttctcaggcttggagaaaaagcttgtagcatgccattccttcctccactgctagaatcctcccccacatccgaccctcccaccttttcctaatgtttctccagcaagcccagcgcccactgaagagcgtaaattagtgcctagtaattggtacaaaggcactttctgtttctatgcaacacacgcagaaaggaggggcaaaaggaagacgaagaaaaaaaccccacagatggttaaaaagggaaagaagtgagatcctctttcagtggtctttgagcaatcctggctctctttctccgccccactttttgttgaaagttagtcacaggcctaggcctaactcagagcacttggtggcagcagttgttagtatcaaaagaatagcacttggaggttggaagtgaccttgggaggtcatcacatccatcattttgtctttaagaaagcacatccccaccctttctcagagagatggggattgttctcttgaaatgttttggggggacttgaagggctttgaagcacaccaccaggtttcaaaagctgcctatctgccttgactagcatgtgagtggtcatactgtgtaatctcccagagcctcaccagctcatgagggtactaggtagttggaagcatttgtcagcagaaaatgctaaagcccctagcttcaagcttggctctgcgggtgcctaggaatttttccttcattttgaattctttgcagtactttcatttgaattctttccccccacttgctctcctgggacttcagtctatggttaacatttttctttttcaccttagtttaaagggctgcttcatggaattaaccaagtgaaagggcagaggtggagtgagctggggtggcctatgccctttttatgggagcagcactctctttaacagcccaaggcagagctgctgagaggtttcctaccactccctacctggaatcgtcctgaaactttaatacctttttgatgcattaaggccacgagtaaacatttgttttatcccagtgtcaagcagtcccctcagcaaataataggactaacattattattcataagaatgtgatcccccctgagggagtgagaagcacccattttttttttaaatacatgggaccttccaaggccattcattgccatgtgtgtccaaagcctttttgatggtgtgcccgaagccttctcttttaatctcagtttctagtgtggtataattgactttggaatcctgagatgagaattgaagaacctggatctgaaatctaaaggttctagagctgagagaaccagtttgctcacgatctaagccagagctgctgctgctgggcctttgaatttgtttattttttaatgaaactgagaatgatcacaaatttgaacaggagaaaggaatctaggagaatttgaacaggagaaaggccaatccttaactggccagattgagtctttttaaaaagtgaggacatttatttaaatagattaaagtaagagacgggagcttaagccatacaaaattagtgacaaggatttgaaatgcagtcagtggtgttatgtattcaatgaagtttgaacatttttccaagctgagcctccgtccttgtggaagggagtatctcccaaagggcctgacttgaaccaaagtgggaaccagtggaataggcaatggtcaaaaacacaaaagtctctcttgggagttttggacattttagaaccgggagcaaaattacagatcatcttggcccaaagaaatagagggagaagaaaatgtttcaccatctctgtcttccagagagctagctttcataagacaggcagttagaaatgaagagtaaggcctgacctatttcatattgaacagtcaaactgaggaactggaatg

SEQ ID NO: 133312 - DNA, 1004 bp, Homo sapiens
ttcataacccaacttgcttcatccaacatagatgtacaactaggcctgagtggggcttgcacaggtaactgtttctctaccctttttccataattgtcccctccattactgatcctcctgcctcagcctccagagtagctgggattatgggtgtgtgccaccacactcggctaattttttgcatttttagtagagacagggtttcaccatgttggccgggctagtctcgaactcctgacttcaagtgatctgctcacctcggcctcacaaagttctgggattacaggtgtgagccactgcgcctggcctcccccattacattttaattccacagatacacttgagctgtttatggactatgccccattccgaaggcgacaaatcgttgtaatagctaagacttttttcacctgtcacagaaccaatttttgccccctgggagatgatactgcctcaccccactcagcaataggagtgatatcaagtatcctgttagggaagaataacaatctatgcaaaaggctgcatacacatggcttctagctatagaggatgggtttctaaggctgcaagggtttgctatagggtttgtttctgggttttagacaagagggtaaaactcccttgaatcaagtgaaagatgcccagactgttcttcagcccccagcccaagctctctgcagaaatctgaccctggggctggaggctgttaggaccctatagctcttattgctagtcacaaggtaggagccacccagttgcctttctttcctcatttcccatttgtcctgtgtcatcctccatctatctgccctagcaaagacagtcggggggcctctgagaatcttctgctggcaagattacagtttcacgatagaaaacataagtggagtcaaattacagagtacgcacactgtttcccttgattttcctctcacatcttctgtgcgtggtgagaagagagaggggaggggtataagtgggttcctgggtgagagagggag

SEQ ID NO: 133313 - DNA, 4196 bp, Homo sapiens
caacacaaaatacaaagatgtgtccagtttcactacagctcttcgcgtttacaagtgtcgagcgcttgctttcggaacgcccttgtgattggccgagccaatgccagtgacatcaaccaacttacttttgattggaaggctggttgctgggactgtagcgtttgcaggaagtcacttaactgtttgggagctggaaaaccgaagctgaagttctcttttgccataggaacgagcgcaactgactaggaaagatgtgtcccaaagctccgcaagctggaacgtgagccaggaggcccggaccggccacgggaccgcgaggcactccgaaagtgtgcggctgccccttccctgcctcccagctgttacccttttaaatgtcagtgttcgaggctgtaggggtagcacgaggcagcgaaacggaacagtcggattggccgcacgcctcagttctagacgcacctctccaccgaaggccgttctgactggcagggggagaaagtaaacagagttgaatcaccctccccactggccaattggagggggtttggtttgtgacgtgatgggattctgcgaaattgttactgagcaagagaatgccggaacggtgcggaccggccggagcaggggttcagaagccgtcagtggactcgggaaaaagtgtctcttagacctggcgctcggcgggaccctcgccacccgcgtcggggtgatcgggtgaatgtcctggggctttggctcgacggcgaggcggccgagggcgtgcacctctcttgcagtttcctctcccagcgcctcgggggcgttttcagtcgaataaacttgcgaccgccacgtgtggcatctttccaagggagccggctcagaggggccggcgcgcccgtcgggggatcgcggccggcgcggggcaggggcggcggctagaggcggcggcgcggcggagcccggggccgtggatgctgcgtgcggaggcgctgccggttacgtaaagatgaggggctgaggtcgcctcggcgctcctgcgagtcggaagcgccccgcgcccccgcccccttggccgccgcgccgtgccgcgccgcgccgcgctcgtcgtccgaggccagggcagggcgagccgaacctccgcagccaccgccaagtttgtccgcgccgcctgggctgccgtcgcccgcaccatgtccgcggccgcctacatggacttcgtggctgcccagtgtctggtttccatttcgaaccgcgctgcggtgccggagcatggggtcgctccggacgccgagcggctgcgactacctgagcgcgaggtgaccaaggagcacggtgacccgggggacacctggaaggattactgcacactggtcaccatcgccaagagcttgttggacctgaacaagtaccgacccatccagaccccctccgtgtgcagcgacagtctggaaagtccagatgaggatatgggatccgacagcgacgtgaccaccgaatctgggtcgagtccttcccacagcccggaggagagacaggatcctggcagcgcgcccagcccgctctccctcctccatcctggagtggctgcgaaggggaaacacgcctccgaaaagaggcacaagtgcccctacagtggctgtgggaaagtctatggaaaatcctcccatctcaaagcccattacagagtgcatacaggttagcggcgtcgccctctcccccggagctctggggttagttaacctttggccaggcagcgttcctgggcgttcgggacactgcactcggccgaaagggtgcaaacatgttggataagatgcggtttaactctttaaataatttaaatgtgcattggcggaaagctcactctctccttaattgtccccggcctccgggagccacggagagccttaaactggcgggcagagcgagtgcggtgcgtggcttcgcggggagtggtgtccgcccctcccctgtcccgccccgcccccgggactctcccgcaccccgcgacggtggggccaccccacctgggagacgctggcagcggggaagtcagatggcgtatcttttatttaattctcttgtcgggttgcagagaagtggttgaaaccgaggggggacgcggcgcactttacttcgagccttttagggatgactaaggactcatttaactggatgcctgctacttttttgggcttgccaaggtggttttaaatttggctgggagtcccccgagaggtttaaaataacccggcttcaggcagcataggagtctgatcaagtaatggtggttaacttcactcatgagtcctcctgatgagccaggtttcagagctgacttttttttttttttttttttttttttttggccatgtgacttaggtcgcaccctccacccctgaatcgcggtttgcagggaggtgtggtccttgccggaggtcaaggcttggtaatgaatgttgggcggttctggaggcctcagggaatagttcctcccagggagggtgagaggcatggccgtacaaatgaatgtggccagaaagacatctatctgccttttaaaatgggctttggagacttccagggacctgggtcatccaattctgttggttgtgtttaacatgaacggtaaaagttggaaagcattcacatttggacatgctgtcttgaccatcttcggaatggttcttttacaagcgccattcagaggtagcggggcttggtcctctcagataagccttttgcctctgtcttgtgacaccgtgtttgagagggtattgttggagttagttggaaaagtgttgtcattttttggtgtaatacctcgatacttttaagatgaggtcttgggcctgtggtttaaaaatgatacatggaaaaaaatgatacttgattggggttttttgttttgttttgctttcctttttaaaagaaaggccacgtaactgcttctcattccatttcctttggaaacttgttcttgtggaggtggctgctggcaccggaatcagactgaatttcctccatggttaatgcaaaatcaggttctgtttggggtcatcatttaggttgccataaaacagcacattttaaggcttgtatctgtaaggttgctgaaaggcatgtgcctgtgttgggggatgtgacctttagtgtggctctgggggtgaagtaggggtatattaactggagggtgttactcaccaacagctgttgggcgggcctggctgtgtcagccatgttcccggagttcagttgttcccatcgacacccactgccaccttgagcaaaggcattttctccttcagggagctgcccagtcgtgcagccagggaggcctgcagttcctctgtgagctgccagagtctgtccgactcaggaatagggtttccagcgttctgggccattcggctgagtgatttttctcaggcatttatagaaatggctgcttctgtgtgcgtgcatgcgtgctgctccttaattctccataaggcaagtcattcggctcagctgtttcaggagaacctttttcccagtcaggagtggaaaacgaagtgagatgttcattcagctttaagtgctacagtcagtgctttgaacctagggatgtggtgattgcaggtgcctatgttttggggatctctaatcttagtgcatggttgaacaaaacctcagcctgggttaatattgtcggaagtgtattcctgctagaggaggtatgtgttaaggttactttaaataagagacttggaggtctcatgcatttggaagtttcagatacaacttcaatttaaattgactttagggtagggtaaggagcttttctaattttctttctgctggtgttaaatcaagaaggtgggcagagatggcatttggaatgtctgcattctgtgaagattttaggagctaaactccctgccacacccccttgcttagtgctgctaacattccctcaagaaaccctccagcttgctcacttccttatagagacacatacagctgccacttcatagaccacttctacaccagctttagaagttgaatcattcaaacagattttcttctaattcagtgctgctacttctgtagtgtgctgggaggaacgacacagttgaggccagctaagctgggttctgatttgtcctattgttttctcatttgagaccataaggaagttactttaattcagagtttgcaaactggaggcttgc

SEQ ID NO: 133314 - DNA, 1049 bp, Homo sapiens
cgggagcaaagtagggcggcgtgcaagttttcgcgcttgcctgagcgcccttccccctccagcccctgggtgttagctgtcattatggccacgggcgttccaccagatcgggctttacctgattgtatttcaaaatccaggaacatcgccattgttggaagctttatccctttagcctctcccctcctcaagctcgcctccttctctaattcccctgctttcaacaaaatgaacactggtttcctccacatatgttccgtgtgcctaggtggggtcgctggagctggaggggctgggccctgaaagggagaggtctggatgcagcccagaatgaggtccaacacgtgatcctctacccccagtgggccatctgttctcctccttccttcccgcctggaggctggcagttctgcccggcacggtccacccctcccagcaggaaagagtgagaaaagccagaactggcagaacccaatacctacagagtgtgattttagcctgaacttccctggtccttgagcaggggtgacacccggcaatctgtattttaaatcgagcgccaggtgattagctccaccctgcaaggtggggaaaccctgccttggggcacagtttgaataaaaatctccaggggaggggcctgggaatctgtgctgcatatgccaggaagtaccttactccccgctagggtgaaaaatttaccttgggccaggcgcggtggctcacgcctgttaatcccagcgctttggaaggcagaggtgggcggatcacctgaggtcaggagttcgagaccagcctggccaacatggcgaaatcccgtctttactaaaaatacaaaaattagccgggcattgtggcgcatgcctgtaatcccagctactggggaggctgaggcaggagaatcgcttgaaccctggaggcgggggttgttgcagtgaaccgagatcgtgccattgcactccagcctgggcgacagagcgagactgtctcaaaaataaataaataaataaaataatacaatttaccacggaaaaagaataggttatttg

SEQ ID NO: 133315 - DNA, 3056 bp, Homo sapiens
acgtgcctgttctaaaaaactttcatttggagttgacatcgtaggttgagcaaaattgggatctgctgaagtttccagtccatttggtggggaaaaaactcatgtattttgcccactgggaatttcctgtcctcctccaagactggcctaggacaggctgtggctctgtattccctgtgggcttggaaaccagaatgtcaagtacctcgtgtgcagccacactgctgtgtgagttcagtctgccaggtcagcctgaactcacctgggcctgacagctatagctttcttggtcccagcactgccttggtatagtcagtgcatgggatgacatgacttttctcttccttgcagctgtcacccatcaccctttacctctattcttactgcctcactcaaaacaatctggaattgagaactatttcttgtacttaccatctatcttgaaaatagatacgttattctcctttctcttccttttctctctttctctgtttttgcaattgcttctctggtattagcccttgagcttgttcaacttgtgtgtccacttctctctgctctgtcccagtgctccattttttcagattcctctttttactatactgctgtctctgtggcttcccactgcatgtaagtgaagatctgtgagagcttcccatcctgaagaccagtaggaaaactggagggaactctgagtatgagcttcacatgcatggaggtggaagaacgtgattgcaaaacagccttagcattgtaggagctgcaatcccaggagatggtagccattgaaatctcgtatcactcagtggaattgtattcaagactttattgagctttcaatcctacctaaggcattctattgaatagcactgtttctgtttgctcataaattagtgggatttgggacaagatggtgtatgaagctaaaataaaggttttcttaggggtgcgtgatgattccaggaacgttgtttgggttacttaagcaaggatcctcagccagctcttcggtttccagcccctagagtccagtattcatagttgaaccagcttatgatttttttttccccatggaggcacctccctttttgcaaagtttataataggattttggatttactggagactaagaatctaatgacctaagaaagttgtatcttggtattaggctgatttttataaattataaattaaagtagccatactgaggttagccatagcctaagttacatgaacaggggtttaagatgtcagtgttctcatatttcatatgaccatgctggatctaaatggaaattttgctcaatgtggccacttaagggagaatatcacatctgagttatttaaaaaaggcagttgtgtcttcccctaacacttttatccttccagtgtttcataagcatctctgttgcctgaaatggaggcaaacattatcgctgtcatgtcatggatgcagagatggtgcacagacattaattgactttcaccttgcagggcagtggctgagtcattcagggtcacaggtctttttttttttttttttttttttttttttgctgcttattctataggacagcatcaccgcatggtctttgagttaaaacgtctactgctgatggaggcagtctgtcggtgaccttgagtaactttcacattctctctggatgcccgttttcttgctttaagtttggataacaaactcatacttctgattttatcctttttaaagaaaaatcagaaataatggaacaccagtgaatctgaggtcggggattccacattatgtagaagcatatatctctaggtcaggaaggacccaaaaagggcagctggtctactggtcctgaaattttgagtcacagaagacttagtgaaggagttaaaaaaaaaaatacacttgcggccgggcgtggtggctcaagcctacaatcccagcactttgggaggctgaggtgggcagatcacgaggtcaggagatcgagaccatcctggctaacacggtgaaaacctgtctctactaaaaatacaaaaaattagccaggcatggtggcgggcgcctgtagtcccagctactcaggaggctgaggcaggagaatggcatgaacccgggaggtggtgcttgcagtgagccgagatcacaccacagcattccaggctgggcgacagagcgagactccatctcaaaaaaacaaacaaacaaacaaaaaaaactcttgcttgagctccatcccagatctactgaaatggaaaatactaatatagagggccagaattctgtaattttaaaaatcactttgtgtggtctggtgcaggtatagaaactgtggcttaagtggaagcttccaagtgcatgggagaggggacatcctgtggatttgctgaggggtctgatgtgcagtttcagtacacagaccgtgggactaaaactgcaaccttcttaaagacaagtgagtcgataagagatggactgggcagagatgttgggaaaccctggactttgtttttgccagcgagtccctgagcttaagtgtggaagctggaaagaatgctgaatggaatgaagctcagtgccaaatagctgggtaaccttgagaaagtcaccccccgtttcttggtctcagtttcctcatctgtaaaatgagggtatggacttgttgatctctaaattgcttctgtgatactcggtatttattaaatgtccttttcaatgtgaagatggtataatttgaaagctgctcatcatcttaattttttgaaatgctttctatggacccagtgcttgtccacctgaacctgttttcagccatgggcctccccaagctatgcccagccactgagtcagtgtgattacccatagaactcaaatcattccaagatgattctctgcatctcaggctggaagagcaacctctgagaaggtgaggtttggaagaaaaggtggtttggcttggagggagttaagtatcctacaagacatctctgctctgggtgagggtaattctatctgctgcctggtgcttcagaaggtgacagaagaaggctctaagaactggcaa

SEQ ID NO: 133316 - DNA, 1162 bp, Homo sapiens
taagatcatgccattgcactccagcctggatgacagagtgagaccctgtctcaataataataataataaaataaagttaaaaaattgcaaatgtatatgaaataaaatcaaatcttcctttatttctctctttccaatttagattattttttcctcaccttcctaatatggtcaagtgtaggaatcctaaaacagtctttatttcaatatacacagtagtaacaaaatgtgatttgggctgtccttagctttaattgtgtctatataaactaagctgtggtggtttatcaatcacttctgtagctttttgtagcttttacagctgtgagcttagagaaagtccatttatcttaagagaagtatttgcttttttgtaaacagtggtgcgtatatcctgaaccatttaatgggaggaaggagaagagaaaaggctaaattgtagagcctggaagtttaatgttgacttatttaggttctgggagtcattagaggcttgaagagctgtttagcaggccctcttttggaagctgctgtttttaacaggctgttagagttgcgggctctggccttaccttatacatgcaacactttcatttgtggaagaaaggagttgtgtggagagagggcctgcttggatgaaagactggatgacccagatgtctggtcaggtagagtgagcggtgttaggagagtttggttggacgatgttaggtgttaggaagatttggaaaggctggagaattggcaggaaggcagcagcctcccacctctgccatcctgaaggcacgctgggccccacctctcccagttcatgtcaaggtttacaagggtcagtgtgtttgtgctgtacttggcattttcacaaattactctgtagttgtttttattatttttattccaactgttgctccggggactttctggcagccaggacttccaggccagcttggaatcccttgctaattgactcaagccatgaaaaggtgccatcaaggctgctttgaactcttgcctgttctagcgctggacaaatcccaggcatgcaccataggaaaagcaataatgagactcacacctccaagtttacagtgcaaaactttgcctgttcaggtgttaagcgcaggggtgaggtgcaagcccagtggaaccaggttggaagagt

SEQ ID NO: 133317 - DNA, 1202 bp, Homo sapiens
agccattgcttgaggtctgggagacaagaaaatgtcttgtgaggcacaagcaggtatttctagcctgctgcaaggggtagacaaaacagcttctttaccagagaaaatcttctggcaaagaaatatgggttctgctgtcggaagtcaggttagtgagtactgaagtggtaaaggtaaagatatgtggcagatagtgactgctgcaaacatgacccagtttagaagttaatacttctctttcattctttcagtgaataaaccagcagaccaattcagagcccatttcagtggtgcaggtgagaggtgttagagacctggacaaggtggtggcagatgaagatggagagaagaggtgggtctcagatttatgttagacatggtatccatatcttggtgatggtttgaacatggggcatgaggtaaaagggaatttctggcctaaatatttgggtgggccatggtgccatttactgaaatcagataactgggagaaggatgagtttgggtcacatattataaatgacatcagttggcacagttgtgtgactttctccagcaatgctgagctggcataggggaagtgggtctcagatttcattcataagcaaaggtttgctgtgtgtgtgcaataggggagagagggcaagggagttgaagacatttacaagggaatggttagcacaatgttggactaaggactctaaattcatagacaggaaaatgaaagcaggaatgagcagttggtcacagaaaagatggtgggatgtaagctggaggaataggagtgtgtggtcttattcaccttggtagacatagctcctggcacatagtaaaagctcaatgaatatttgcaatgaagctgaagtaattatatatattttatttttttagagataggatctcgctatgttgcccaggctgacctcctgcctcatgcatccctcaccaagcttaacaggtaattactgacctgagggtgggtgatagattgaatcacacatttctccagttctctagttcttggattcagcagtctttttgagtgagtcctttgtatttctctcttcaatttcttccccttaagggtcagcacacaagaaattctctgcttccagtctccagtggggtataaataagagtttctgatgcccactcctgaagttactctgtgcttgtgggaaggtggatctactatggactga

SEQ ID NO: 133318 - DNA, 1038 bp, Homo sapiens
ctcaccacaaccctgtgatagaaagatctgacttaagattcttaaattgtgtttcttaagtatttaccttggtcctgttttcttttcttctcttctctaatgacttcttttcttttttcttttctttctttctctttctttcctcttttcttttctttctttctttctttctttcttgctgtctctctctctctctttctttcctttttctgttttctcctcatgtgagctttttctctccctccaaaaccagtcagatggctacatctaatgggcctgtggttctcttgctagaaacacagcactttgtaaaacttgttttgtattagattcccttaaatgtctacatgtggcacatgagcaggagggcagtgacatccacagaaggcctcaaggctggaaaggatggtcttcaagtgtgaagtgccaagtgaacagcagggagctctgccccaactcttgctatgcatggatggggactcctgaggggaaggcaaaatggctcttggtctctggtgcatgcatttgggtctgagcagcacttattcctactattgttattaataattttttttttgagacagagttttcctctttttgcccaggctggagtgcaatggtgcgatctcagctcactgcaacctccacctcctcagttcaagccattctcctcccttagactccagagtagctgggattacaggtgcatgccaccatgtccggctatttttttttttttaaattttagtagagatggggtttcaccctgttggccagggtggtcttgaactcctgacctcaagtgatccacccacctcggcctcccaaagtgctgggattacagatgtaagccaccgtgcctggcctgtttgttttttgccttgttttgagaacagggtcttattctgttattcttaggctgtgtgcattggcaccatcatagctcactgcagcctcgaactcctgggctcaagtgatcctcctgccccagctgctggaaccacaggcacacaccacacgcccagcttgttattgatg

SEQ ID NO: 133319 - DNA, 1541 bp, Homo sapiens
tcccttccctccatcctcataagtcatctgccttggaggacctaaagccttggattttccagactattccacagcttcttggagataagctcatgagaattgccttgaaacacacacacggtgatttttgtgctagatacttactttttggtatttcctgctggagctgggcttgggtggagttccctttagaagcgccagagttttcctgtttgtgcagttaattatcaaaaccttaaataaactctgttatgtgttcagaataataacaactcaacaactattcattaagcacctactatgagcctggcactgttctagcagctggggatacaacagtgacctcagccgaccctgctttcagagagctctcagtctggtctgggacacagattagtaaacaggcatttgccttccacgtggtaaatgccatgaaggacaaagtccagggtgttggggacgggaggtgtggtacaaatagcaggcagccaacccaatctcagaagtgacagggcttgaaggggggagaggggtgtgtggtgtgccaggagagacttcccagagccagagacagctaaactgcatgctagatataagaaactatttcttgtagaatctgttctcaattatctgcaagtagattattccggtaacttgcaagaaaacttttttcaagtctctttacagtggcttgagcatctcaacttcctctatttatgctgcacgttaacgcagaggcatccaatctaatgtaggtggaggcacaaactggagagcctccttgcaggaaggtttgggattaggcgaatcactgcatttcctgcttggaaaaaggagatggaagaagtgaagttaggcaagataagcaaagtgcttcctggatacaagtaattcaggtctttataggaaactttattatttcattcgaagtgtctttttgggatgtcaagcaggtacatctctgttcaaattacataaagcaacaaaacacattccagggccaccagatgtaaatgacttgtgcattattctctttttagattttccttgccattgtttccctccactagtacacatgataaagaccaacttcttgccaaaagaaaaaacggggtggggttggggaacaacacaaaggcttctgtgtgtctggtctttgctgtttcttatggttagtcttggatctacttttgacctcttggtcaggcaataaaatgcctatttgtttaattttaaaatcaactttattgaggtataatttacatacaataagtgcacccatttcaagcatatagttctatgaatgttgaacaagtatacaccactgtaaacaactccataaccaagacatttattatctttttctttcttccttccttccttcttttctttctttctttctttctttcttttctttccttccttccttcttccttccttccttcctctttctttcttttcttttctttctttctttctttctttctttctttctttctttctttctttctttctttctttctttctttctttctttcttt

SEQ ID NO: 133320 - DNA, 1366 bp, Homo sapiens
ttctgtcaccatagattaattttgcctgttctagaatttccaataaatggaatcataccatgagtattcttttgtgtccagctcttttgtttttgagattcatccttcttgttgtaggtatcagagttcattcctttttatttaaaatgcagatttttgaagtagcaaaccaattgctcagcaagatgaccagacctaggaggtccctctggtctaaaaattctatcaacttgcacaggaaatgaaggcctgagaattacatcaggttagtacagatcacattgaagaagcagccgagcacatgaatttctgagctccaggagcccaggaggacagggagagatgaagccccggtgaatgatagaatatattacagaggatgacagggctatttgttcagttccgttatgagctcagcaaaatgtgacaatcctgggaaatataaatatatattgctatatttatatgtgtgtttgtctcgggaggcctggcggggagtggtgggtggaagagtgggtttcctggaggatttgagtaggcagagataactgggcagagcagagtctgtgtcaggctgcatcgatacatattcaataaataaacattacaatgagagctaatactgcttgagcacttattatgagtcaggcactgtgctctgttccttacatgcattgtttcattacatctgtacctccctatgtaccctatgtaaccagcgtctcagtgccctgcccacacccccttgtgtgctcttgcatagtcctgtacgccctcattactttgtgctgtgcacccagcagccagcatcgtggctctgtgttggaggatggtccttgagctactagaattgctttgcttctcagtatagagagcagaagtgcctgggacttcacctgtgactaccaggtactgtgggacgaatgctcccagctccccatgtgacctctcctgtctctggcacacctctgcgtggactttatttgattgtcaatgttgcttggacgcctctcttcccttcctagtcccactctctacctcctctaccagtttcctttaaggacactttttgtttttttctttgttacccagacgagagtgcagtggtgccatcttggctcactgcaacttccgcttcccaggttcatgtgggaacacttcttttttttgtttgtttttgtttttgagacagaatctcgctctgtcgcccaggctggagtgcaatggcacaatctcagctcacagcaacctctgcctcccaggttcaagccattctcctgcctcagcctcccaagtagctgggattacaggcgcacgcctccacacccaactagtttttgtatttttagtagagatggggtttcac

SEQ ID NO: 133321 - DNA, 1421 bp, Homo sapiens
ctctccttgccctcctgaattgctgagattacaggcataagccaggaaacccagctactccgcttatgttctcagattcttccttgtttccctttatcttggtgctagatttacaatgatctgggtgattatcccatcaatgaccatctcccctactagagtgctggctctgggaagccaggatccatgtcttttgctcttagctgtatctctaggaccctggcatagtttctagaacatagtaattgcttagtaaatattgactgactgaatgaatgatctgaagtttctccagtttcctcacaggcgctcactggtctcctggataaatacttttcagcctttgctgagaaatgggctgggaatgcataatataaaacccctgagagggacacaaggtctccctcctactgccagtcttctgggggtgtttagagagatgcaatgtccagggcaatgtgacagtattttactccagaggaccaaaatttagcaactagaagctgattctagagggtgggccttgaaagttatgtagaatttgaatggatgattaggaggaaatatgaaaaacattttaatgaaatactatgtcatttaaatacacacacattctgaattaaatacacattcttggatccctgttcttctcaacaaaagtacactgagtctccagttctcattaggaagctgataaatatctatttccttctattcctgccacagtaactccccagctatataaaatttacaaactgctttggaagcatttgtggaaaaaagtgccagagctctgtatgtgattattgaaataaatgctgattgagagatttcccaggtggatacttaaaacagacatgggcacatatgtacactcacaccccacacacaggatactttaggctgtgatcaatggagataaattttcccacctgacagttgactgtaaatcaatcagtggttttaatagtcaccagatttctgctcctgtttgctgctgtctcaggcaatcattcacccgctgggacacaggacctcaaggatcttggctttttgtcatcactgcacatggagacatggtgcttagcagcaaggtaaatattgtcatactgcgtatgtgagaggcaagaataagtaagtcaggacatccttagaaaagtttatctctggatccccactttccttaccaatagactaataggaagtcatgaatttcccaggtttttaccaaatcaaaagattttcatgacactgtataagctggaaagtagttgagggtcagtaaatatcgaatgaatagtttcgaaggtgaacatgcactcctgatttttgggttagattcttgaacttgcccctcctgactttattatcctgtccatcaaggtttgcttggagttacttgaacaagccaggctgttcca

SEQ ID NO: 133322 - DNA, 1047 bp, Homo sapiens
gttcattcattctataaatgcccccctgaatgcttgctatgtttaagttggtgactggaatctaggggttgagagatgagtaagatatgttgactgccttcaaagactttattgtccagtgggagaggcagaaatacatactcacacacatgatccataacatagtatttaaaatgcaaatgacatctgggcatggtggctcacatctgtaatcccagcactttaggaggctgagatgggagaatcacttgagcctaggagttccagaccagcctggggcaacatagtgagacccccatctctacaaaaaataaaaaatataatatttataatacaaaggaggttgatacatgctcagtagagatacacataataaactctgatggtagaggaacaggatgaggattctgatacgaagttgaggcaagagtaagctaacagtaaagaaaggaattatagtctttgtcgttaatagaattgcatggtatatttgggtaatgataagtagttcttgtggctgaatggttggtagagttatgtgggaagaagcaaaaaaaaaaaaatagattgagcctagatcagggatacccacgtccccctgttgtgccccttgctaacctttcttcctgaatttgaatgaagcctcagaattcttctcaacatagttctcaatgaatcagttgggattggcacttgggatggaatcatttgtcattcctgacttgggagttaaatcccatgcttacatattttatttattttggttattcttgggagttattgcatgttattaagaccagaatgatatgagagaatgacacgattcagtctgttttggtgaggtagctgatggccatgggaaggatccatgggaaaggtgagaggctggaaacagggagaccactaagaagatatacaaatcatctgaaatagtacgagtgggagggaaaagtagactggacagatgaggcactgggacagataaatgactcaactcagcaatgacagagggagaaagaaaacttgaccataactgaattttctcac

SEQ ID NO: 133323 - DNA, 1050 bp, Homo sapiens
ggtgactggatatggtttggatatccaaaccgtatctgcccaaatctcatgtcgaaatgtaatccccagtgttggaggtgggtcctggtgggaggcaattggatcatggggtcggatttctcaggaatggtttagtacgatcctcttggtacggtcttcacaataatgagtgagtcctcacgagatctggtcatttaaaagtgtgtggcacctcttccctctctctggcacccgctctggccgtgtgatgtgcctgcttcccttttgccttccaccatgattgtttaagcttcctgaggctttcccagaagccgagcagatgccagcatcatgtttcctgtacagcctgaagaactgtgagccagttaaaccttttatctttataaattgcccagtctcaggtatttctttatagcagtgcaagaacagcctaatacagtgactgctaggagagaggagccaagagaaggaatacaggaccagggtcttttacttctctttttataaagggaaaataatgagttgggtttcagacaggttgaatttgaggggtctatgggacatccatggggagaattctagccatcatttggaaatacatatctggagttaaaagccaaagaggtagttcaggattcagtcacacagaggaaccaatggaagccttgggagtaaatgctatcacctaggatgagagccacacagggcatttataggcctgaaaaaggacagccaggttagaccttgagaggtgcctaatgaacaccagaggaagagaatctgaaaacaattcctaacaatgtggagtgtcgttagttaaatccagacctctacttctgtgtctgattcttctttaacatagagcaatgactcacctcaatgtggcctgttggtgtttgagaatgaacaacacaggtagctttctcctgtacatcatttatgggagtgtttctcaagatctcctgatagttgaccatgactcacagtgagaaatatactttattttgggaccaacaacatacatgtctatataattatttaaagcaaagg

SEQ ID NO: 133324 - DNA, 1034 bp, Homo sapiens
tcatcttgtcccaaactgaactcttctctcttccttcagtgccagcttttcctttctgccccctcccagcatctacaggatacagttctgggtcctcagatggccaccccagactcatggtgggccctcctaccttcctccactcctctcccattatttgcccacgtgaagcccagcctggcaagttttctctctgtccctggattcatggtacttgtctgatctcagtgctatgcccacattgtgacttttcatggaacgcattcccctccccttttctccccatccttcaagacccagttcaggccttacctcttccctatggcatcccctcattccttcctttatttttgcatctttgcttttatagtttacattgatcatatcaccaaatactgtggaatatttaaatagttcatgttttatgctctcaactagattcattcattgattcattttaaaactatttattcaattgcctattaagttttgggcacaggaaatttaaggagagtgagggtaagaataggtgtcataactccaggatccacaaagtgggccagcaccgtcaaggcagtggagagctgttgtttttaaccctttatttccattctcctgggaaaacaccctgattttcttttggttactctattctaagtcttagtccttgtggtatgagcagcgctgacctttcctccttgaatgagaagtgggcatgaggccgaggcctggcccatgagagaactgcattccctggtcacagatgttggttcacagatgagtctgtgactgtggctaggccagtgagaactagccctgggctcttgctagaactgcctgggctgttaagctggtaggatgtgatcctggagctctggcaattattattcttattttatttttttgacacagggtctcatctgttgtccaggctggagtgcagtggtgcggatctcagaccactataacctctgcctcccaggctcaagtgattctcatgcctcagcctcctgagtagctgagattacaggtac

SEQ ID NO: 133325 - DNA, 3031 bp, Homo sapiens
atgagttgggaagggccatcttatcagagaatatgatttaattacagctgcttaggagcgagacttcccattctggctagttcctattaataaagcttagaatcctgagacagaacaacaccttccttcccccagatatctcaggaatcattagactttaaagatccagcaacaattttatttttcctctagttgggagtagggaagtgtggcactcaccttcctttctccactggggttcagcagacactgattttatggcagactcaaaggcagtgttctcagccttggggcacactagaataacctgggggcttgaaaaactattgaggtcaggtgctcacctctcaagattttgaattacgtggtccgggctataacctggcatcgggatttaaaaatcttcccaggtatttataacgtgctatagttgtttgatctgatcaggtccaggaaaagaaaaaagctaaatccagactttgcttaaacagatcatcattgcctaaaattgtttttctatatgccagagaatatggaataataagaaatatgactttgtaataaagacagctggaaaattcttttgattgttttttattgtaattggggagagtaaaaatcttgactttggcttggcctggtggcaactgtaattccagtgctttgggagatggaggtaggaggattgcttgaggccaggaatttgagaccagcctgggcaacatagtgagatcctgcctctacaaaaaagttttaaacatacctctgtcctgtcaagatatcttccccaaagtgaagcaagtttgaaatgagtgaacatcagcaagtaccaccattctcaaatttccctgcctcccatactgtctacttggttttcctgttttgtgtgaggagttactagagttgtagcatattacagtagatagggagtgttgatatccttgattgtgttctcttcaatttgcaggcaaggaaccgaggcccaaagagttagaggatatgcccagggtcacatggtcaagtagtggttgtaatgacattcttgattttacccaacacctagtccctatttctttctttctttctttcttttttcttttccttttttttttttttttgagatggagtttcactctgtcacccaggctggagtgcaatggcgtgatctcggctcactgcaacctctgcctcccgagttcaagcgattctcctgcctcagcctcctgagtagctgggattacaggcgcatgccaccacgccctgttaatttttgtatttttagtagagatggggtttttccatgttggtcaggctagtctcaactcctgatctcatgtgatccacccacctccacctcggactgccaaaatgctgggattacaggcatgagccactgtgcccggctctctagtccctatttctttcttctcagcggaatctcagtttggggttctattcctcttattgtgactcagaagaagctgacaccatttgcagctccagtatagatcttggttagtctaagccaatgaatgaatgtcattctcctgccatctgctgttgatctaatggtgagtacatgacccaagatggatcagtcagactgaaggggacgacttatttcccatgcttgaaggagaagattcttgttctgtctcttgcataaacctccattgccactgggagccatcttttcactgtcaggggtccatctgatgcaggtgtccaagcacaattagagcaccgctcaatgtctactaagtgaggtgtaattcttagtacattacacagttgcctcacaatgtctagcaggctaggctactccattgggcatctgggcaaagcggcgttccttaacttttccaggctgctgaggagagatggtgattagccatatcatggcactgagggaatttctgtgcgttagtctttggcaattaaaccttatgctgttccccagtgctgtgagtggcattgcctgtatctgcataagactagcaagacagaagaagaagaaactacctgactcagccaagtgacagacaatgcaattttagttgcctggtgacacttttagttgcaatgatgtactttttgtttcaacttgagctgcttaaataataaaatattggctcaagtaaataaaaagtactggagtgtgtgcctaaaaccagaggttcaaatgatttcacgtgtaccctgtctcttggcttccctatcatccacattgcctttctcgcattccacatgggggcaagacggcagccaatgactccagacacaccttcttccatgcctaagaccaatggaagagagtcgggcctccctcctgtctcaagtactgcaagtgtctcctcacccctcatgggctctggttggattgcatgcccattcctgaactagccattatggcaatgctttgaatttccaggcctcaattgcctgtctctccccaggctgaagaacataaacggagatcggcagcatgtccccagaggaaaatcactgttctgttaccgaggagacaggaaaataggctctggctgtccaagctgatatacctagaagcttttctgaatgtgtagtttttttttgttgttgttgttgtttgtttgtcttgtgcaaagagcagggaatttgcaatcagaagactgagatttcagtcccaactatctgagtctcagctccacaatttttaaatgggaaaggctatctttacccagtttgaacctggtattgctctgaggcttgaatgagattctggataggaaagtgttatttaaaatgataagggctaaacaaaaaagagggattgttgttattactattatcatcttttctgagtttctcccactcatactttggctatgtgcaaggttctcttaggcaagacatgaagattaaatgcagctaggcacaatagctcgtgtctgtaatcctagaactttaggaggctgaggcgggcaaatcacttgagcttaggagttcgagaccagcctgggcaacaaggcacaagaattgcttgagcaca

SEQ ID NO: 133326 - DNA, 1050 bp, Homo sapiens
aaatcaaaaacaaacaaacaaattagtcaggcatggtggcatgcacttttagtcccagctacttggggggctgaggtgggaggatggcttgagcctgggagtttgcagtgaggtgagactgcaccactgcacacacccacctgggtgacagagggagcctcggtctcaaagagtaaatgcattattagcaattaggaagactttggccagtgttgctgttagcacagatagcagctttcttacaatcagaaatagacctctccttccacctctaggcagtgcagtccccagggaacatggtttgccaagtggatagcatcattgtgcaaataaaaagtcatcccttcctctaggcagacccacctgcatgctagggcacacagcattgtgattggagtgcatgctggattccaattgttgctaccctttttgcaggaaagtggggcagttgggagaggggggctctgtgcagtgtacaacctgcacagctctgtactcggggcccttactttggtggtaaatcactgggcagactgaactctggaaggcttactcctcattttcctggcaaagtgcagctacccctctaagaccaatgatcactttgccttttttgagccttttcacttcatgctgaatgcagcagtctgtgctgtctttcttagttaaccacccactagtgatccagattctgctggtcttttcagatgttcacctgcataccgttccaaccacaaggaagaattcttcctttttaactgtcctcatgagtgattttgcagaggacagttaaccctttaagataaatgcaatgcgttggttgactacaattggctgttgttggaaagtcggatgctgatttctccaaagtgcctgggtagaagggctgaaaagcacaggcagcttcacctcaactgaccaccactgtttgctattctaaatcttcttggcaacagcaactccggaaagaaattatttgaactagatccagccagcctccagggatcccaggatgcaatacggtagcctttattttactatgacgggaag

SEQ ID NO: 133327 - DNA, 1163 bp, Homo sapiens
caacaaaggcttacttctctctcacgctacgtgtccactgcacgtattaccgtatcagggactcaggctcatgggacatcggccatctttaacattgccagactctgtaccagagggaacaagagctcacagaagatcttgtatcggggccagagtgacttatacttgcatcttgttggctagaactagtcatgtggcctcactcacccagaaaggcaccaggaagtacaatcttactgtgtacctagagaccctagagatagggtcttgctatgttgctcaggctggttttgaacttctgggcttaagcaatccttctgccttgcatactaaggtgctaggattttaggtgtgcaccactgtgcccagctaccagctactgttttcttaaaagacaattattgtggtaaattacacttaacattaaattgccaatttaattattttagagtgcacaattcagtggcatttagtacaatcactgtgttgtgcagccatcactgctattttgttccagaccattttcatcatcttaaaaggaaacccctccatgaagcagtcaccccccatcctcccacttgctctagcccctggcaatcactaatttgctttctatctctatgaatttgcttattctgaatatttcatataaatggaatcatacaatatgtagtcttttttatctttaagcccagctattttttccaagttgtcctcctgacccacaggaagctgacacaatattgtaccaagtggtggcaacataggttctcccaggtcccctctctctccacctgttgtcactcttatttcatttttcctggctcagaaggagataaacacctgctgcctaagcagggaatggatttcctgcctctcctctttcaggttcctcgatctccatgtgtgcgtctcctggagtccttgtcaacaccaggggaaagagggtgtatatccctggctgcccaaaggaggaaaagccactatgttttcccaggctcatctcttctgactctctgacccctgcccagcagaagtgctcatatagtttgaggtggtggcattctaatgggacccatcaataaaccacaggggcatgtggcatctggccccatattttttgtctttttgaaagagggtatcactctgttgcccaggttaga

SEQ ID NO: 133328 - DNA, 1038 bp, Homo sapiens
tttgtagcagaagttccctttgggcatgcagccacctggaagtgggcatgtctccttttagggtccccaactaggcctctctaaatcaggccaggctagcagcattctgttttgaggcattttgacttttacaaatctgtagctcccttaaaagcaaaggcagatgctgcagaaagtcctgacccttgggcttctctaaggcctgtggtttgacttgcattaaggtgagggtggcctgctggccccgtctctgcactcattcccattcatgagcactcctcacctggcctactgtagcaaatttccaagaagtgttcttgcctttatactctcccgtctacttcattctatgtgcagctgctgggttagttctgttaaagatcccctcttatcttgttccttcacttaaaaatcatcactggctcccattgctcatgaaataactagtttgtgcaatcaagtttctctgcttactccagaaggtacaaaccccatatactcttccattcttccctgagggcaggctggggagctggggagaagtgaaggaccacatgctggggccctgagaatctacgcatatcccattcccagttccagagggtaccacttgggttgctggtgctgagacaatcctgtttttttggcatcctttatactcggggttccctctttttgcaggctttccatcaagccttttaacaatgtttacttatatgttgtggtaaagggaggctctagatgataacagtaagtttgcaaataacagtaaaccagtgattcttggcctgcatgctatcacatccctcctcccatatccatggcagatgtgctgaatccgtttttgcccactgagcccagctgaggcctcagccttttcaacactactccaggcagtcattccaatcaatcgaatttgtccagtgagataaaatctatttgttatccctgtactctactctttcagggtgtgaagcatcagaccttgttgtttgatggatttaagattggatataagaagacatggacagacccttg

SEQ ID NO: 133329 - DNA, 1064 bp, Homo sapiens
gagcccagatggcgccactggactccagcctgggcaacataatgagactccatctcaaaaaaaaaaaaaatcttctagttacttcagttatccagcactaaattaatttcttagctgatattttgagttctgcaatcatagtaatggcaaatctagctagaggtccaagattttaacatgggtcaagattacagggtagtagatatagatagctctttcggaaaagggaaaaatgtctccttttagctttagagaatggcttaagcagaacccagctctctatcctcacagacactatgatctcagggttttacgttttttgttttttatttttaaatcattactttctccaaagtcttgccttttctctggcttgcagtatacattaagagcaattaaaatcaatgccctgctttttgcatggtattatttatcataaatttgcttcctttgatgtcttgccatagaaaatacaagattttcctctgtcaccattgatgtataagatgatcaaatcatagcttagcattttttaactaaggattgtttgttattttaggccatgctcccattctttttcatcccgttttttgatttcgtatgaatgtgcaagaaaatggccaaatgataaaggaatatttggaccattggctgacagacatgtttcctctttctccctctttcaagtataagagatcctgagtcttgcacgataaaaccacaaacggaactaaattatgctgagcaaaaatacattcttttactgagaatttcccaggagttttgatatttttgactcttgctcactaaatatggaaaagattgagacactatgagaaacaggggagctgttctgccatttttagacctttaagaaattgtttcatacctttaatgctatgttaacaatacattggaaatctccctgctgaaaagtcacagccctctgaatggtaacagtttctggagatgttctctaagcttccattttaatataaataataaagctctgtgagttataatttatatttttgagtggtctaaatgttgtccaacatatggaa

SEQ ID NO: 133330 - DNA, 1285 bp, Homo sapiens
actgacacaaaaaagatcagtttttttttttctgaaatagagaaagcactttatttgatgaagcattgctaggcttaccaaataagataagacagaacggattctttaaattatacattgagaatgataggggtgggtgtgggggtggagaataaatataaccaagaataatgccatgtaaataatttttgagaggcttcaagcatcttgggtgcccaatggaagggactggtgagtccggaggccacctctgctcccagttgtggtatctctgggtcatgtgggatgccacacttttcctccaatcttcctgtcaccttctcttgcttgattcaggggcctccagtggagcaccctattaggagcatcttcccatgacaaagttagctttgatgccaagttctaaatatttcttaggggacatctgttggatatatatatatatatatctgttcctgctagattgggaactcactgagggcgtattcagacataccacatgggggaaaaataccttggtgggcaaagcatttggggccatggtccccaaaacacttttcagcccagatttaattttgagtaaaaggtcccatgtatcttctgcctcagccttctgtctacttgccactgtttgggcaaagaaccattattcatttgttcattcattcaattcgtcactcatttgttttataattcatgtattcactcatccattcagcaaatgtttatgagattgcaattgcaatatacaattgcacactcaccagactatttctgtgacctacatttgagactagagacttcagagtcatctttaacttttctctttccattggttgtatctactctcaccccattgtgtctgcctaactgatccttcctgctatatttaacccattctatggcccttttactccattagcaagtcttgtctctttcccattttcgctttgaggggaaaaagcacaaaccatttttcctctgctctcacaccacaacagtcaacacagaagacatctgtgaccagatgtgtggaagttttcccccctacaccaggcaagcaatcagttctgcagtggccaccagctgggtgtcctctaattcaattcaattctgacactgtctacctggagatagtgtcagatcccacaggttgagggcccagtctccaagactgcccccacactctgttcctgatgccaaccacaagctccaggttgttttccctgtgcttctgactgactggctacaaatctgggtgcccacaattccctccctgggtttg

SEQ ID NO: 133331 - DNA, 1049 bp, Homo sapiens
gctttattatattacaaaggataccaatgaagagatgcatagggtgtggggcgagaggggtgtggagcttctttgccctccttgggcatgtcaccctccaggaacctccaggtgttctgctatccagaagctctccaaaccctgtccttttgggtttttatggaagctttattaagtaggcttgattgactaaatcattggccattggtgatcaacttaccttcagtccctctctcttccctagaggtgggggaggctggagctgaaagtcccaaccctctaatcataccttgttttttccagtgactagcccccattctgcaaatacttaggggctgccaaccatcagtcagctcactagaatatgaaaaggtgtcactttggagattctaaggattttagaagttgtatgctaggcaatggggtcaaataacaaatatttcacagtattacaggcttcctctatcatttccactttcaggtcatctttagcttttacctagttcaaattttccttagctcatatctagagcattccacttccaatatgttggcatatgctccagtcacaataaatctctcacctgtcttccagcgctctgttgtgttttcatgccattgtgattcttgttggtcatgctatactacttttcctgaaatctcttccctgctccctcttttctgcttcttgaaattccactcattcttcaaggccaacatatttgagctcaaatatcacctcttctgagaagcccctccaagctttctttcaacccttctttccagttattgcaaatttgaatgtacattaaaagtacactctgtaatctagaggactctgtttatataatctgttaatggtgctttgaaaagtttgattcgtatggtaacatatgtgtttctaccagattgggaatttgttgagggcaggaactgtctattcatttatttcttcattcatgctatttgcaggcactaagctagggaccagggctctcactgtctggctgggagataaacaggtgaacttaccagtattgcgtagaagg

SEQ ID NO: 133332 - DNA, 1080 bp, Homo sapiens
taaatttttttcaaaaggaacaagcaatttagaacaaatcattacatatagtagtatgtaaaaattggcacctttgaagcagatgattaaaccgaagctattacttccttgagctctctatgactttatttacggtcctcagtaacttgctgctcataaactgcttaattcacaaagacaggtaattaacgtcccctcgatcagggatgtggtggaatcaatgggctgagcataagctgactgcacaaggccacagaatcaatgccacattgctgcacagagaacccagaaatggaaggaaatggactgaaaaataacacacatacatgtgcacaggaaggaaatggctcatggaagttacacagtttgtgtctacagtcatttaagtttggcttatatatttcacacgtttcacagacgttagaacttaattttcatgcacaacaaaagaatcaggtaattgcaagatcaggactgttgagtatttcgtttcccagttcctatccttttctctctgaaatcacgatgaatggaaacacttgagctgaaaatttctttccctcacttccaatctggcccagaatgaggccttggaggtgtttgatgtcaatgaataatgttttcacctccttcttggattcctctatagacccttcagggagacttcagcattgtgattgtgcttgatacttaaaatcatcaacatgttaggatgtaagtgcattaaattggcaacatctaatttaaagaacaaaaataacaaaatctttgttcaaactctggtgctgagatttggccttcctgagaatcacagagagatggtctcaaatgtaaagtgcctattacaactgcattaactacgagcaaacatggttcctttccctcataatcaatatagaaccaggggctcatgaaccctttcaagttatattgcaactttgcattatgtacattttttttttctttctggagagagagcctagagttatcgtagagcctcgtagggattcatgactcaaggaagtttaagaacgactgatttattctcagacccagtgcatgtttgctgagagggaaata

SEQ ID NO: 133333 - DNA, 1919 bp, Homo sapiens
tacaaaatggtcatgtgatgagtggtgtgaaaaattggcagttacgtcttggaggtgttcaggaggacgtggtggagccatgcaaatgatgacggtcacacagcagcacaacacacgacatgaacggtgagaacagaacatcccacatggcaatttcaggctagttctgtccactgtttttttttttttttttttaagttcaatattacatattcagtgaatgaattcatccatgacaggtgagatacaaaataaattaaaaaatataaaattatttaattacattctcctgagcttgctcgactagacttgaacgcccactgtatataataaatcacttgacttttgtttttttaacatcaactcttctttcatttcgattgcaatacaaaaaggcatttctgttcccttattttcttcaaaaaaggataaacagttgtggcaccagaagtgaatagataagagacaggtgaactatgactgttaccttgttttttctttataatgatcaattacagaagtgttggcatgagaaggatgtgggacgttaggtagaactgcttgctgccggcttatactgaataaagaggatgctcttcatcagtcaccagtgatggagccaatgtgaaaagaaaacagaatggaagtttagaatatctcattgtgtacgctggctattttattttattttgcaatttagccctgcatcctacaactcttgataatggtcagaaatcaacagatgcctcctggcatggagcgtgctcgaagccccttgtttcccctgctctcatggctttctgctgtgactgcggatacacattcatctctaacccttccttctccctctcttccccctccctgcccagcaagtgtgaacatgccttaaatcccctgtgtctggcactgggtcagatcaaatgctttcttgatctgtggcccagaagtcacctttgagttaacacctcccaaagcattgcttgttttgctcagctaagaataaagcaggtatgattcaaggaaaggggaaaaactggagttggagagaattttagggctggattcttgagccttctgtggcggatattaagaaggtttagttgtgcttgctttcaaagctttggaaagccgatgttctggacagtctcctcatggacaggctgtcccctcggccctccggcttggaggacttgcttctctggaagggatttcgcaggcttgctgtgttccgctgcctgtcgagtttgtcactgatggagaagctcttcctggtgtgtgcatatggcgcacttggctcctctgccgagtagctgttggcgcgctctatcttgggaacagtgatgttgttggacagggttctctctgagttatcaccctcctgggaggatattgcaatggtggctctgcggcctttggcctcattctcctcactgtcagagctggggtgactcagttctgcttctcgctctggatggcagcaagttaagtcctccactttgtctccaagacctccagggaaggcagctctgtccgcaattgcttgaggggcattgacacaccttgtgtcaatacagtctgtaatacttgtgtattctgctgtttttacaggcaccccaaagttggcataatagctccttgagggggaaaacataaagctatgagatttcacaatgggagcctcttctagaagaaagggtgtggtggctaggtagcggctacttttggaacgctcaatggtgtggtacatcggaggctctgagtcccaggggttttggcattctgggaggtgggtgtagtctgaagaaaaagatctagtgtccatggaggtgatgtcctcaaaatcaatgctccggcttggaggtctgtctgtgggtgcaagtgttgcataggcactacttgaaggggctgtggaaggtact

SEQ ID NO: 133334 - DNA, 1044 bp, Homo sapiens
acgatcatggttcactgtagtcttgacctcccggggctcaggcaatcctccactgtagcctcctgagtagctggaaccacaggcatgcaccacaacacccagctaatttttgtacttttggagagacagggtttcaccatgttgcctaggctggtctcaaattcctgatctcaagtgatcgatcacccgcctcagcctcccaaagtgctgggattttcacaggcaggagtcactgcactcagcattggtccagaatcagaacctggttgcctggacgtaggcagtaaactggacacataaagtgagtagtagcccaaggagatgagaggaaagcagagaaggtacaggaggaagagtctcttcagggaaagagagaaggtacatggtgagagccccaagagtgaagaaggatggctgcagggcatggaaccaggggagggaggcctgttggaacagggccaagcaactattcttgtcaaaccttaactgtcctatgggctctgagatgggctgaaatgtaagacttgactaaaacaataatggactgttttctccattttctcccagaatgctgggtgtgttcaacaaacttaccatgaaatgtgtgatcacttaggtcatggacctagctgataggggtttaatataggggctataaaagaaataaaaagtcctagagtcaaggttacctgtgtttgtttcataactagactggttcctttaatctttttttttttttttttttgagatggagtttcactcttgttgcccaggctggagtggagtggtgcgatctcggttcaccccaacctctgcctcctgggttcaagcaattctcctgcctcagtctcctgaatagctgggattaaaggcatgcatcaccatgcaaggctaattttgtatttttagtagagatggggtttctccatgttggtcaggcttgtcttgaactcccgacctcaggtgatccgcctgcctcagcctcccaaagtgctgggattacaggcatgagccactgcacctggccttcctttaatctttaaa

SEQ ID NO: 133335 - DNA, 1078 bp, Homo sapiens
ctctctctctctctctctctctttttaatacgctgaggtgtatccttcagactgaagatttttcttatagctctgctggctatactatttggcccatgagatctaaatgtatataaccattcagtagaaaaatctgcttttattatttttttttgctttcatcttgttctataaaaaggaaaaacaaaacaattctggggaaaaatcctaattattattttagctaatttacaattctgttactgtcatttattcagaaggtgttgggcacccatataaggcaggcactagggctgttcaactcctctggaaaagacgtgcaatagtctacacaaaacataaactaatggagagcctagagtcaggttgagtctcatttggtttttgcctggaacagaacttcccaatttctgatctgagccagcaacctcaggcctgtcctgcactcaaaattctcttctgtctgggaggacagctgctactgcctgctagagaagtctaggatctgtaagtctgggattttgatctatagatactttgggcaatgttctgttctctcataagctccatgatttctcagacaataaaaacaaacacaaaagatctctgttttgtgaccgtgtgaataaattcgatggataaagcatgccttggcacaacacatctgcaggaggcaggtgtccacagaacacacctttctgaagtcacccgtatcctctcatcattagatgagttgaaccgatcatccttttctctgaagtattcttctatgcattgctcttcaaagtcatgtactttcttgagctcatcatcggttatgaagagttctgtggaaaaaaaaaaaaaggaagtcttgagggagagaagtaaaagcgatggcatctgatttgtgggcctagtgacattctcagtataaatctaggtgggaaaaggggcctagattccttgttaagtctcaaatgaaatccaaatccaattaggcaacttgcatcactgtcttctttctgaacatgaaatttattatgggtctctgaagttcacctgagcatatctggtttactgcaggagctgagtagaa

SEQ ID NO: 133336 - DNA, 1063 bp, Homo sapiens
attcatacaatgcagggcccttgtctctgaccttcacccttttccacccagccacagcactaaaatctttcttctctgagaaagcagacatggctgttcctcccttctgagcatccagtaacctggcaatgctttcgttgctaccattggtgataacgacaagaaaaccctgaacagcaactgcatggagctggctcccatctagcccaatgtctggcttattcaggttctctggccttctttgagggggtgggcactggaaaggaaatggatctctggaccatcctacttcctgcattgtatttacaaacaccaccttcctaagctctctggataagtgaggttcctcttctaccacaaatgactcatgctgtattgtaaattattttgggactctgagctagccctcagcatgttatccactgcaggctatcattcattagagcatcccgctgcccctgattttgtatcccatgctcctccacattggctagagttcctgagtcgagaagcttagggtttatttcataggtcatccaccccgacccctccaacttttctctttgcttaaatttgtgtttcagatggaagcagtgaattctggaattcccaggtctctctaatgtaaatgtctagaaagaagttgggcattgcaaggtcagggagggtgttaagagcttcagatttagagaagctgttgaccaaatcgttttggtttcaaaccttagatatactggtgaccacacagagggaagtagactcctgggctataatcccagaggctcttgttcagtagatttgatgtaggtggcctgtttgacacactttgagaaaccataggagcttgctggtatgggattggattcccagtggttcttaatggagcgtggtacccaaagggtatttaggaatctgtgggagtcaccagtatttaatgtgtggaggctggatatgccaaacctcctgcagtgtgtggcacaatcctacacaacaaggaattgttctgcctcaatgctaatagaacctccttttagaaacactgggctggaaggtggatggtgaa

SEQ ID NO: 133337 - DNA, 2013 bp, Homo sapiens
ttataggtccagaagttattgcttaaattatatataatgtagccttgggtggcatattaatatcattgatgtattttgggttgagatctctggaaagcaagaaacttagaacttatgaaggttctaaaatagccctgctggagactgattgtatctctctaagaaagacatgaggctaagagtgctcaatttcagcctctaccatcttctttctgacattatttctcattcaagtcaactccctcatcccccaatgctctccaagccttcagagctgtctgcagcctgcaagaggtaggaggaactaggtgggcatgcgattctgcgtgattgcctataggaagtggtagggatttctgatttgtggcagctcggctgtcgcttgaagcttactcaggccgtagtccctttcatccgggtcgctctcgtgtttcctccatcggcagcacaggtgctggaatatcatggtcatgtggctgaagatgatcagtggtgggggcagaactggcctttcatggaaagtcatgatgagctgatacctctgaaacttccagacttggttggatatcgattttacttcaaaaaatgtattgctaaaatagagaccaaagagaatcaagtgagaaaaacccactgttttctgaagcatcgactccccttcacccctgctgtcctcatccatcccacgtgctccaaaggacccacttacttaaagacagcaatgaggaggttgaccagcaagatgtttgccactaagaggtagcaggccatgatggccggcacgatccaagctcctgtcttgcagggaggcagctggattattttaccatcctctcgggtctcattctgtccacagggagctggagggagcaacacacacaagaaatgagaaactggctatttgagttagaaaaaaaataaaaagatggatttgtaggagggttttagatggaagaaatatatagccatctcaaacagaaaaaagttccaaacaagccaaaattgaaaaatgagagcttcatgaatatctcaaggggctgctactgtggtggtggggggcctcggttccacagtctccccaagttatcacctgaccagaagaggggggtggagccaccttcttgctcacactgccgctaggcccctacaccgggtgaggggcacttggtgctcttctgaagcctgattgagaacttttcttgggtgtgcccagggagaagaaagtcccaccactggcaagttactttcaaaatgtgctgtagaggctgtcagcctgacagctgtaagagcagcagcatctcgggactattgatcgggaattaacaacagggcagctgttaattgctgcaagaaacaacctgggagctccagctaacgatttgctgtctcagtacagaaggaacaacacagggcagtgccttgggaagtatttagagggcttgttgctctctgctcctgatggatgggatttcattaggagggcaatgaggggtgatcggccgtgatcatggagctcatagccacacctgttcttccagcagcatttccattccaaaagtgtgcttttcagggcacaggaaacaaaacctaactgcagtggataaatgggcaaatggggggaaaaaaaaagcctggaggtgggggtgaggaggaaggtgatatgtgggattggctgtgtgtgagtaatgtgctaatgaggcctgcttggaatttccgggtaaatgcaagaaagaaaaaaatccctgacaaagcttcttagtgctgcacagacaatgtggctcaggaagccagatgatgccgtgaggtgccaggcatgggtgaggtagccctcctctccagccccctataatggctttagaacaaggctctttacatctacctgtaaaaggtggttggggggagtgggaggagcaccaagaggtctcagcagttgccacaggctgctttgatgatcggccaggaagatttgaaaagttgacccagaatctactcggctggagtacttggcaagag

SEQ ID NO: 133338 - DNA, 1048 bp, Homo sapiens
ctcaatgaacattagctgagtcatgattggtatttttatttctgtaattgatagactttgagcttctcaggaactatgttttattcccctttgttttgcaatcactaagaatagcgcttactctacaaacatgtattcagtggttataatatgctgaatacagggtatattgggaattagagagatgcttcctgttcttaaagaacttgtaatttggtagagacatagaaagggtacaaagctttgcattattgtgtgatatgagcttggatggggtttctgaggaagcactcacatttgaactgtgatagtccctctagcctggccatacagagcagtctggtagtcaggaccagcctgaggaacattatctagtttctacagcagtaacggcaatatccgtgaattagatgatccttgttaccatgatgatgatggtaaaaatgaatagttaagaaatagccttcatttggtaatatcagcaaagaaagagcattatatgcagcagttaatgcaaaatgttgttctataatggtttctaatgatgtccttgttctgggtagttaccaacctaaaaagtgctatgactcaagcttacagatgtctaccactgatgaagatgaactggtgccttaaaaccctgataagcagcagattccaggatggggaataaattatctggaatgtcatatagcaccaaccagtatctggagatttatgttcccagagaaatgcccccgggacatgcacccaagatggcacatgggtggatgtttaggaaacgtaggctggtgacttcccctgggcctcctccttccttgcttttgggacctgacatttgggtggcttttctctcagtccttttgcaagaggcaaatgcatggtcagtaccacctccataccaagtggcatgttgtcacctccctctttcatggtgacagtcagtacagagtccttctagtggatattgactggttccaactgcccagtgtatatttccccatcctagtttccttttgtggaaccaccccttgtccagtctcagtcc

SEQ ID NO: 133339 - DNA, 1041 bp, Homo sapiens
tagcaggatgtcgcaaatctaggtatgttgtgtgtgtgttgggcaggggggaggtatggggggaagagcgtcctgggggagaagtggggagaattcaattccctgttacttggttccatgttcttcctatcctatatatctagctttacctggaaacaaaaattatttatttgaagagggcttcaaaattctaaccttagtatttcattattttgcatcaggaattaatatcagaaatattttatgcaaatcttgccttggaagaatatatatctaaactagcctattgtacacgccagtgggtttgctgtcatgattaggagatcgattgcattaacagccccaatttctctcccctccctggatccacactgctttgtcatgtgatgttagagtttctatcactaaacaggtgggatctctttcttcacctcttgattctgagtttggccatgtggtttgctttggtgaatggaatgttagcaaatgtgacccacacagaaccttggaaaagcccttaatgtttctgtttccactttttggcttccgccattaccataagagacatgcatgagctagcctgttggagaatgaaacacagggaacctttgcttctaggtgcttgttttctgagctgaggctgttctggaggaggtgatagcccgctgacctcctggcaggtgattgagcccagcccagaccagaagaaccatgcagccaactctcagtcttctgagctcaatacgtgcttatggcgttaagttctgaattctagggtggtttttcctgtatcatttttgtgttgatagatacctgataaacaagctaaatttcccttgccctgctcacagctggaagaggtagccctacgtccttcaggctgacaaagtcctttcctcatttcttcacttctcctttcacccaattcaggctacagatgattggagcagattccaccattgaccaagaaggagtgagttcattgaatggccagtgactaatcagactctttgtgtttagaaataaaacagaagtgcagag

SEQ ID NO: 133340 - DNA, 1544 bp, Homo sapiens
gagtggggatgctaactagtctctgctcctgctcttaataagctatactacctggttatgcaaccctaatccatgtccacagtccagggctcagacggctggcctgtcagcaaaaaaatgtctgaaaaatgttaattcaacaatgttggagggatgttatttccagaactaaactcctcaggggaaatgagaaatcattgctcctgggattcaactcctccacactgaaagatgtttctttaatgatgctttcttcccaaaaaatttcccaatgcctggtgtgtcctgacatttggtcccagtaaaatcctggaacagactcctaggatacaactatcttcaaactccatacaaaaggagtgtttattacagagaatcggcatctattagggcatgaaaccttgggggcttgctggcattcactccccacactgaatcgtttcataatatagatactattttctttttggcatttatagcaagcaactcagtttatgacctaaggcattttccatacttccaggcaatgaataccagcttcctatgagtctcaatagcacataatttaagacagtgggaaagggagttggagaatagtttccagtgcaagaaaaataccatgcagatgtttgcccttactcttgaattctgatggtgaaatcgagcattgtttatttgttctgaagtccaactcaagaaatttattttctaaaggctggggtagaggtagggaggtagtgacataaaatattcctgatactgaaatattcaacacatggccctgggagtttgaatcataaagtaatttagatctttctaagtggttcattgtttgatcaaatttggtataccagatgtcgattcgtgtcacagaacatgacatacctaaagaaatacccaagaactactttgctaaaattgtgtattcaccttctgtaatttttgtttcctccaagatagcaagctaggaatcagtcctctatcttgagccatttattgagaacaaacaaatgaacttggaaaagacataaccgaattgaatttaaatacctgactttggtgtatgagaatcataaacttgcttacggtctatctggtccgcaaacacttccccataaatcatccaatagggcatgtagaagatgttcttggccagtttccatgatggctcctcattgggaaaaaggatggcttgcctggcgaccccaaagctcatcagaaccaccagcataatgatgacaaagtacatcatgtctatcatctggaagggtggggaagcagagggagaaacaagagaaaacccatatgattgagtgttcttataattgctgacaatgatgggaacctttggaggaggtccactttctagactgctgggaagggatgtttagacagggagttgtgtccagataagaagatgcttggtctgttgaagccagtgtccacagaattctatcagtgactcaaaaaacatttcaaaaagtgcacacacagatgaagcctcttcgtttttcattgctgtctgtgggaccgagcataggtcc

SEQ ID NO: 133341 - DNA, 1121 bp, Homo sapiens
atccaatctgattatgtaatcacagaatgcagtaattctcaacagaggccaatttcattccctgagggacacgtggagatgtttagagacttttttgtagtcataactgcgtgtgtgtgtgcacgtgtgcatgctactggcatccactgggtagacactgctaaatatcctatgatacacaggacagcttcctaaaataaggaattatacagcccacgatatcagcagtgtcaaggttgagaaaatgtggcctaattttatagctattatagttctttgctttcattgggtccacttgaaaatacatttgagaatctcatgaaagcttgtcccctctgtccagaaaattcacacacccacacatttttatatataaattgcagagagggtccacagatcctacctcctgagccctatcccttgactctaaatctagactctctgcttttagacaggaattttcaccacaatctcaaattcattgttaaagtgcaaagaagatgatataacaggcagtataatggagtaagatacacatttttttcctagtcaaaaaatccccaattgaactggggttccgttttgggtaagtaactcaagctcatgaattcaagtgttttttctctctagaatgagtttggtgatatttgtcctaaacaatgctggtgttataaataccatttgtacagtagggttaggaatacagcataataactatactcaccaatttttcctttctttcattgtatttaaaaaatgcaatttgaacataatgataacagatataatttgtcaaccaccaactatgagccagacacagctggtcatttagtatgtattatttctaataattacaacaataaccctataagatatgcatttattatacatcactactttagaaacaagtaaaccaagtctcaaaggggtttaaataaattgctcaatgtgttatacccaattcattttgaatttgaattcttcctctctttgcatgagtttgttagtgattttgtaagaaaagtcgtgattatttaagattcatttcagtagagatacacatacatacatacacagagctgttccataaatattgagttagcaatgatacatatagtaaa

SEQ ID NO: 133342 - DNA, 1021 bp, Homo sapiens
gtttgttttctggtctgctgttctccattcttatctgcttctcatcttccatgttagaaatgccacacatcacttctgatcacatcccattggttgaagcacactcacatggccccaacttctctgcaaaggaggctaggatagttagtcttccagtgtataataagagaaaccagtgtggtgagcatgaaatatggtttctgccctaatccttttaatataaaactggtcatgcttgtttggaggggtccagaagagaatgatagtagattcttgtgtttagtggactatatttatctggtactttgtctgtattatttcatgcatcaagaaaagtttagtcatcattgactgtcccaaacatgtcaaacatgggggtggtccttaacagtcgatcatggccatcgatgctcagaatgcagagcaagtgtcctggactcagacaaactgggttcacgtatagattccatgaacttctagcatgtgaccttggccaagatacttagcctctccatacctcagtttcctcaattgtaagatggatgatactgctagtacctgccccattgtggtacttgtgaggattaaagtagttaatatttagaaacatagtaacttctgggccgggcgcggtggctcacgcctgtaatcccagcactttgggaggccgaggcgggcggatcacgaggtcaggagatcgagaccatcctggctaacacagtgaaaccccgtctctactaaaaaatacaaaaaattagctgggcgtggtggcgggcgcccgtagtcccagctacgcgggaggctgaggcaggagaatggtgtgaacccgggaggcggagcttccagtgagccgagatcgcgccactgcactccagcctgggcgacagagcgagactccgtctcaaaaaaagaaaaaaaaaaaaaaaaaaaaaaaaagaaacatagtaacttctatattagttgttattgttgtatgttagatttactgttatatctattttttcatgcttagccaggagga

SEQ ID NO: 133343 - DNA, 1030 bp, Homo sapiens
gactacaggcacctgccaccacccctggctaattttttgtatttttagtagagacagggtttcactgtgttagccaggatggtctcgatctcctaacctcgtgatcctcccaccctggcctcccaaagtgctgggattacaggtgtgagccaccacgctcagccaaaaatatcatcctcttttaactttaattagcagtttttgttgtaattttttatagtcaaaatatgcaaaagcacaatctatatgggatctacaccaactgtgaacaatggctgattatcaaagaatatgagtttatgcacataactagtgcagaggtaaagaattaagtataatttttgatcttaagacgttttaaaattaaaactttaaaaattttaagaaatatttagaaatggttaagaaaatagaagtctaaagagaagttttgtattttatatgtagtgttatgataaaagtgtgctcttgctccaggaaagcaattataaattcatcatgataaaatgaaggcagaatgtttctctgtgccacctgaataacttcaagaatttaatcatgtttatttagcttgataagaaattgtctagccacacatgtgcagccaattttaaaaatcatttccaaataacattatcttgcagtagtgtgctttatgttaagagaaaaaaaaaatggcccacctagaccttattcaccaggaaggatttcttctttgatttctaataaagtccaacagtgttggaaatgtttcactacaaataaatgtaaatctacaactatgtgatcatataaacaaatctatataaatgtgcaccattgtacaaatagaattggatatagagaacacatacatcctgtttatgaaacctttacttcagggctgcatcagtatcttttcaattactttggtaacttaaatatgattaaaaatgttttaagttaatttaaagattcttaaataatacagatccaagaactattcagctatagagacttccattttataatcttaaaggagtaaaaaaaa

SEQ ID NO: 133344 - DNA, 1028 bp, Homo sapiens
cttctgttacctctctgttaattaactcattaacttaagtatccattcattcacctaaaacctcagctttgagcttattgtaggcatgggttatatactgtaaaataaaaaagcttggtccttgcccttttggagtttatgatctaatttaggaaagacagacaataagtagaaaatatatcttaatcataattgggataaataataagaataaaaataatgctgacaaatacccaggcagcgtatgctacttcagaatagcagttctagatgaaatttgaactttcctttgagaaatcactcattaaattgatctgtagtcactgatttgccaagaaaactctatgaaatttaaaactgaggttagaaacctccctagccaaaagaagaaaccaccagagaaaacacattttgtaagagaaaaatataaaggtggtagaatctttaatattataattggcctttattagttttaattttaaagtcttgctttaaaagatttctttctgaccccagagagaagttttctagaccaaagcttaggctactgttgatgcaggagatgcatttgtttattcacccactttcaagatagcagagcttggcaaagactgtagattttggtgcccagtctgaggaacatgagtatgaatacatactcttctggaggtttccagcgtgaacttgaacaggttatttactccttccaagcctcatttttgtaaacattttagtcaaaatacagcacacttgcaaaaagcgcacaaaatatcaatgcatacctcgaagtgttatcaccaaacaagtctgtgttgccaccacccaagccaagacatggacaattgccagcccctcaaaatctcctcttgggcccctccaatctctagtcctctctcctctccagattagccactctcttgaattctaacattaaaatttgatgttgcaccccctctttaaaaactatatttgtatggaataaaatggtatgtattgtttggtgtgtctagctgcttttactgaaccac

SEQ ID NO: 133345 - DNA, 1001 bp, Homo sapiens
taaagtgctaaagtggttttcagatccatggccaggcctctgtggtataaaaataattccccaaggtatggtgttcaatgaaaagtaagtgttaacgtatatataaacaacaaaaatcaatctttcttaagttggggtctggagaaatttagatttcccttttcaatttatttgacttttctctggaagttaatagttaaatttatctagttttattacctttagaactaatgaaacacagttcactggttaaataacataatcatctgccaacataaaggagaaggatcttaccccttacttcattaaccaagacccttcacatagttaacaagaagctggcaatacaatgtacatatgctacttagtctatagagctgacactgaaaagtgaggtggagtcattttctaattttttcattagtatccataaaataaaaatcttcacagaatcaagataaatcacaattacaccattttccagtctattagtcctgccattcccatagaaggaactgatattagtctgataagttttgttcccataaattataatgccagctacataacaaccaaaacaccttttctattagaaaagtctcagaagattacatgcaggatacaaaatgatagtttggcctactaaattcctcagtactaacgaattgtcttcattctcatacaggagagattggtgtagcacttgttcaagtggtagttcatgggtgggtgattaagctaattctgatttttaatgctctttgaacccaaagccagttccaagtagctccagtcctgaggaccagagtctaggctggggcaggtgatgtgtggcccaggaacccttgggtctgcccaaccgtaagcccacatggggctcatgtctataaccaattcagtagtcatatgccttctgatccagtttataaactctgggataactaacaaatataaagatacagaaagagacatacacatgtaccattttccctcaggttttt

SEQ ID NO: 133346 - DNA, 1177 bp, Homo sapiens
acctgtgtaacaaacctgcacatcctgcacgtgtatactggaacttaaagtaaaataaaatatttaaaaaagaaaattcaaagcacaacaaaattaataaaagaggccaatcattaagcaagcaagacgttaatattaagactacaaaacactgaagcaaacgaaagtgtctacaaaggctcaccactgggcttgttcctggtttttcccctggttgcttaaatatcatccttctgcactaggtgcactacatccatatattagagcctgaaaatatatgtacaattgatgtccagatacctatgaattttaatgttgtaataataaactctgaaaaattacattgcaacactgttattttagtgttgtttgcagaaaacacatttcagagggaggcttttgagttctctgtactacctggtcactgtgtcatttcctttttgttttcttaggttttcatgggtcagctccttttacatccaaaagatataaagaagacagggtgcaaagtggtacaatactatattgagggtgctatgacttttgaagagaaggaacgtggtcttcaaaagaaagaattcagaagggctatacaatggccgccttgtcagtattgagaatgagctcaaatttcatcatgattctttggtttcgtatcatttacacagaaaataaaaagggaagataatcagtggaaagtgggcttttctgtagcacgggagagaattagagttggctcaaaggcaggctttggaatacagaaatctgatatgccctgcttgctattttttaggatactgaaagctagtatgattatttcagagttttaagcctgctagaatttgttctgcagatatgtagacatctacattcataagatttataagtaagcactttgaatttgtgagatgctaatatctggggctgggcttgctcctctctgcttttttttttttttctcattagacctctctctaaaactggggaaggcatcttctatgtgaaaatataatttcttgaaagtagagagaagggtcttgaaaacccttctttagatgttttgatagcaaacaattctggcacaaagcgtccccagtgatggaagaaaaactgcctctcatgcactgtcatccttctttgatcttttacctcttttgcagtgtaatctccaaatcaa

SEQ ID NO: 133347 - DNA, 1052 bp, Homo sapiens
tgtgctgtggtcatgggtgttgcctcatttcctgtaaccagtaatggcgtctagggcacatataagtcaggtgctgagtgttaccaacctgacagaatggttgtatttccagaagaatggagaagaaggatgtatgttaggacaaaaaaccagtctccactactgttattaaggtgctccctggggcataattgagctctaagaggaggctgctatgtctccaaagactgatgtgacagaaaagaaatgtattcttttaggacaattgtagcagaaaaattctagtgttaggaaacagaatctcaagttaatggctcatagattggaacaagttgcttcttgaggtttcaaaatttcgtctttgacatgtggtggattgtttactatgcagggtagagggggagcttctggaatgtatagtatgagcctggcaagctaggggctttggctgaaactgcaaacggcaccacggtgattcgaaagctccatcattcttacctatggcttgcaaaagctgactttatatcactgtgtcattgtgtacccacattaaaaacgaaggaacgtctaaggagtatctacaagataaaacatagtttgggaaaattttctcccattcttccaaatacacaaagataatatgtgtttgttattcattttgtctgtaaatggaaaattgatctaaacagtagaaatatgcctaaaagaacaaatatgtacctaacagaatcacagagtacctctgtcttcagatgacttcttcataaagaacgatgctattaggcagattatttttcttagttctttagaattttttttttttaaccaaacttgatgagctgaaaaatgtaatttagtaatgaggggggaattttaatgtttaattttgtactttggaatttccttcttgattttaatcttttattctaattagtttataagagtttcctttgttaaaagacaattttagttacacttggaaaactttagtctggaatttactcccatgttttcagacatgtttccttcaatttttttttctcaatcattac

SEQ ID NO: 133348 - DNA, 1030 bp, Homo sapiens
tttttaataggaagtctaagtgttaatctaaggaacttcttatgctgcattttttattctgttcaacaggtgtgtgcacagtctatatcaggaacatataaaatcttcatataactatgttataagttagagtaaatgattgcaggtttgttacctagaataaaaatgtgggaaaagagcctaagagggtaccatgacaaccagagacatctggaaaagtaactatgtcctcctgtttgctaagggtgatgatggtgctgtagttctctgtagtacttgttaattgaaacattagtaattcagttaaaaaccagttaaggcaaaagcctgtgcttattctcacattgcatggcaagtttgatattgattttcttctaaaaccctaataataagtgcttctagctataatttttaattatcagtgttttaaacaaagatagtgaggttttgtaaatcttagagctaagatggtggttttgaaccaaggtttgattctatagttgttaacaaagagttttgacttcatttgtaagtgagacacccaacttatctatgcaaacaggaggaaggaaatcataatgcttatagcagacatgcttataaaagtttttaatctttaatgtaagattttttctctcccttaaagtgagctgttaaaaaatagcctaacctgtaaagattaaagcagttaatatgattaatgctgttctttatttattcttatgaataaataagatattccataatgtagctgtgaatcttattcattatgtgttgtccccaaaatattgtggtatccatcctgacaaagaaaatatgaggggttcactctgtcttttgaagacaaaatagaaaaatgtggaaaaatttgattaatagtaaaacatgggggctttcataaatcttttttcttttgagaatataaaataattgtttttttaatgtgacatttgttactctcttctctgctttagttggattcttgaaatcacttccagttaaagttattccgagggaatgatatagtcca

SEQ ID NO: 133349 - DNA, 1044 bp, Homo sapiens
agaacaaagttgccccttcctgtctttttctaagtcaactgcagtctccacccatccagtgcgggtaacctaggcttccacacgcagctcggggtggggggaagtgggtcccctggtctggggtcctgggcagggtgaggtgaccgctgggagcgctaccctgcggcgcatcaacagcctcaggcgtgggccctgcactctccagagaaggcggcggctgccgggtggagagcaatttggggacgcaaaagaaagctggctcgggcgcaggtggcgctcgcagccccagcccacagttgagccaatcgcgggcgcaagcgcagcctggtggcggcggcggtaacggagcgcggggctctggcaggagccggcggaggcaaaggcagcgccaaccgagagccgcgcgcaggctggagggagacccgcggcgaggagccagcgagagcgctcggcgctgggctgtttcccggccgagggaggcgaacttctcatggggaagaagtggagggatgcggcggaaatggagcggggctgctccgaccgcgaggacaacgcggagagccgcagacgcagccggagcgccagccggggcaggtttgccgagtcgtggaaaaggttaagttccaagcaggggtccaccaaacgctcgggactcccgtcgcagcagacgccggtgagtggccgggggagagccccagtctttgctttcttttctcccttcgcacgcgacttgagccctttccatggtgctgaacttgcctccctaagggtgagagccagggaacttgtggcgccgcttctaatgaaatagagtgctgggggctgtgaggaagggcgagaaggaacgtcttccctcccttcagcaggggagggtctcctgacgtctctggcggctctgcaaaaattgaaaacatgttcgagaggcgagggggctcgctgttagatcataagagttttgcagttaacagagcgtgtgagacgttgtcgagtgtattgtgactcctgtgtacgttcccaagggtctgtctgtgcagcatgtcgaag

SEQ ID NO: 133350 - DNA, 4085 bp, Homo sapiens
cccaggggttgggaagccctgcactaggtgaacgtacgtaaatgatttggtttatgtatgcgttaccccttgtaagagcaacgtgtgaagcccatggtggtggggtggaagagtgggaattggatggaaaatcatctagacttttttctttttggagttctgcttttatctaatatttctattcagcagtcagttcagaaagatactcagtagaaagatactcatgctgaaggattgaaattggctctgactttctaaatttcacatacaggtccattgttctgttgagcacaagaggagaaataaagcagttaaacatttcacacttactagtacctctgggattagccaaaccagctcatctttatgacaaaggtttgtatttgtattatttcatgaagttcttacagggccagcaacataggtaattttatggtgcaattcagctaccagaccattttcatgagcttgtttgctggagtgggtatcattaagatgatttctaaataagggcacaatgtgagaggaagtgtgttgggatgtggtttgttatctggggcaaaaggtgggtggtgagagttcatttgctgatgtaaggaagtgcagagttttttaatagctgcctttgttttgctcacctccgactcacctcctatattctcttgctggaatgtagctataaaaattgattttttttctttttcttttttttttttttttttagggagtaccatatttttgggattcagtggaaactttaaaccatcatggactaagctatttaccagtcctgctggacagggccttggggtgcttgaacaattcatacctttgcagctggacgaatatggttgtcccagagccaccactgtccgcagaagagacctggaactgctaaagcaagcttcaaaagcacattagagactaactgtaacttaagtgctgggggaaaaaaaatgtgaactaacttatttaatttatggcattttaaaatgacactgttaacccaacggaaccattttccagtttgatacagaatggggagaaaagaaagcgtttgaaattattgcttggataccagcttcatgcaccttctagttgtacaaaatgttaaagacgttgtttgtatttgtaaggctggtgtattcagagagcagatctcttattcctcactttccacccccgtattttgtaatgaccatgagcaatgtttttactttttgtataatggggtggggtggagtgggggcttctgagagtcagcctgaggtctttagaggaccagctattgtagcaccttggatacttgaagtttaatgctcagttgggtcgggtggcagttgacttggtggctggcatgttcagcagtgcctggggccctgtttctgggcagcctttgaggattttctatgatattgaatgacagttttaagtggcaactcaggcccagctcatgcccttttttgcctggacatgtgctatttttattcacttatatatcaattacttgtaagggttaaactttcaaacaggaagtatattgggacaaaagggctcttggggattagatatccctttaatctgtgaccattgggcaaaaaattttcctgcagcaaaagtctgaggctgttgggaccatttttgcagctttaatccttagcctcttttgactgtatatttgtgtttaaaatgcagagctcaactgaatatttccttttttgttttgttttgttttgttttaagaagtaggttgttttcctgaaccgtaaacttgtatcattttaacttgcacaaaggaagtctgttcttggtattgctcttgcacttgggttttttgttattgttttgtgtggattttttaaagcttttctgttcaccctcctgccaggaaaatcccagaaagcttaatgataccccaaaatgattacacccagggaggaaaaaaaggagcgctttctagggtcagaatcgtggagagaatactcagaaatgaacctctttaaagccttgcaggaatgagtcactcttacttaatgaaatgttaaagccaattaaaaagcatgctgtgatgcccagcttccctttccacagggtgcatgcgtctcctgctggtgaatcacatgcggcaagaggcaactggctccacagcctgggatgctgccgtaccaagaggaaagaagcagcaaaatgcctttacgttgttctaaacccccgacgcataaagtgtagaggagggatggccaagggtgggtggtagaaagtgtgttcaggctgacactggcaatgagtacagataatttcactttcctcttctaggggcaaaggctgatggcctctacctttgtatccaggagaaactgcagagcagccctgtgactttacaaaatatgctacctcaaagtgctaccgataaacctttctaattgtaagtgcccttactaagggcacatgtcttaatcaaagttagttttttgttttctggtttgttttttttttttgtatattgatgaatgagatcttacctattaaatatattattggattatggttcctgaaggtcattagagtgtgtgtgtgtgtgtgtgtgtgtgtgtgtgttttatgacttaaatatctttacgtgtgttttttagagcttggttctttaaagatttggagaagatatgtaaattaccaaggcacttggtttttctgttttatatactaataatcagggcctaagttaaataaaaatatgtgtgcatgtattttatatatgtgtgtatgtgaatttatttattatttattttattattattgttattatttttgagatggagtctcgctctgtcacccaggctggagtgaggtgatgcagtctcagctcgctgcaacctccacctcccaggttcaagtgattctcctgcctcagcctcccaagtagctgggattacaggcacccgccaccatgcactgctaatttttgtatttttagtagaagtggggtttcaccgtgttggccaggctggtcttgaactcctgacctcaagtgatactcctgctttggcctcccaaagtgctagcattacaggcatgagccaccgcgcctggcctgtatgtgaatttatatctctatctataaatttaaaattccagattccagctgtaaagaagttactgacggaagtgaggaagacacttggtggacagaatccaccaagtaaatattgtaagagtaagcttcagaagggcagggactgtattctccaaggcagaggttctccatcttggctgcacactggaattacctgaggagctttaaaaaaaaatatagaggcctggactttactcccttccccccagattcagatttaattggtgttgggtgcagcctgagcactggaattttttttaaagctccctggatgattctaatatgcagccaggtttcggaaccacggcactaatataataggcccactgtttaactccagtctgtaatttttttgtgactaaaacaaaattgcatttacctattatttttatttgcatttcctatattactcacaaaactcccagccctaaacaaagcatttctctattgtctctttttaatagaagcttttaatacagtttttagtcctcagtcctctcaaatcattaaattggttctatacactgatatatacatttcagggaattgggagctagcaatctgttctatttctaccaagaaaatatattcaaaggtgatttataagttcataagcattttccatcaggtgaggcagttggttgagctccaaaaatgtggtcgtccacaaatcagccagctgacgagcaacacagagggctctcatgtatccacagactagggtttaagtctttgctgtgattcctgcctctccacctgagtcagcatgccatatattatcttcagaggctggaagagagtgctggcaagaagatgaaaggcagacgcaccatctcatggactatgactgcaaagcagcctctaagctgatgtttagactcggggatgggaagagaggatttatgactcctctgttctctaacttcatcaagagacaacacatcctcatgcc

SEQ ID NO: 133351 - DNA, 1050 bp, Homo sapiens
gagacaggttttggagactgggagtaatttggaggagtacagggaaaagggaagggcattcctgggaagggaacagcatcagcaaaggcagagtggcaaggaagagggtggagtgcttgtgggaaagtgaggccctgcctgagtgtaacagcacagggaaaaataggggcctgtctataaggcacaactctgtttatggaatgccttgcaggtcacaaagaggagttgagacctgctcatgttcaaagttagtaaacgtttcttaacagggtagtccttgttatctacacttctttcctcattcctagagtgactgagggaccatggtctgaaaaaaactttaaaaaatatttgtgcctgtttttccataaaatgtttacaaagatttaaatataaatataaagcacatttatttaatcagttatggaactgaagtgaacaacaagaataatatttatttgaaactgggattgctccagaaaatgaggaacaaatatatacttactgtgttaagaatatcaagatggaattctaggtcatgaaatatgtacaaaaagttcagaataagaaatacaaccactggctttaattataattaactttatattgagggaaccttttggaggaaggtaagagttgccataaatatggaacttcttctctgtctaggtggtgtttactagtgatcctcataaaagttacctccctgtgcaattccagtcacctgataaagcagaaacccagcgtggagacccgtctgttatttctgtaagtaccatctggtgttgtcttagtctgttctaggtggtataacaaaatgccataaactaggtagcttataaacaacagaaattggctgggtgcggtggctcacacctgtgatcccagcactttgggaggccaaggtgggcagatcataaggttagatcgagaccatcctggctaacatggtgaaacgctgtctctactaaaaatacaaaaaattagctgggcgtagaggcgggtgggtgcctgtagtcccagctactcgggaggctgaggcaggagaat

SEQ ID NO: 133352 - DNA, 1074 bp, Homo sapiens
taccaaatcctaaactcaacacattatgtataaagtgttccaaggaatttttgagccaaaccaaatttcatccccccaaattacctatcgaactaattcaaaccagaaatcagctttgatatgttccacaacaatggaagcagggtatgacatatttcctaaagtgttactgcatttgacttaggacccttgaaggatagaaagaaaacagaaataactattcattttgtaatttatgttttaaggaaaagttactaattggaggaatatcccttttggccatgagctgatttgaggaattttgtaagtttttgagaataagtctaactacatggattggtttctgttttgtgcaggttactgtttttgtatctcaaagccaaaagccacaggcatggccacagttactgttcatctcagggatgtgaaagagtcaagatccaagcagccacagactcaaaggacatcagtaactgcatggccaaagcatacccacagtactacagaaagccgtcagtggtcaagcggatgccggccatgctcactggactctgtcaaggctgtggcactcggcaggtaaacaaggatgaaaagtggtctgtggccaaggagaaaaagtcagagggtttctttgcaataggagcacttttctttgaaacatctatattgcccatttatggacattgcatggcatctcctgaattttggcccatgctaaaatgtgaagcgcgtaagaagcaaactagttcaaatttatgacagagatacttgcccctgtgatacgtcagtttaccttgaacaactgcagattttccacagtttaaaattagaggttgctatgttggtcctcattttttttctttctcagatgtttgattctgttgcaatatgactgttggatttacatgccagtgatgtaaaaaagatactttgttttgttggcacagtgtgaaatttcttttcaaaaatacagctaatatgaaaattgtttcctttttataaggtggaaatccgctcttatttttgaagcatatgctattatatctatctgtaattaaagtacagactatcaca

SEQ ID NO: 133353 - DNA, 1050 bp, Homo sapiens
ctgggaggcggaggtcacagtgagctgagatcgcgccactgcactccagcctgagtgaaagagcaagactccatctcaaaaacaacaacaacaaaaaaacaaaaacaaaaaaaattgtaaaggctcatatttttgctgtatatctattgatatgagaaatttgagcaacagatgaaggtgggtgatttgttagtatgccatggttcagaacttccactgtcagtggcccaacacacagaagaaatttaaggaggagaaaactatgggcaggaagtggaagaagtggcacatgaaggacagttatctgcatacgctatagtacttaacagataatggctgaagtgtaaactaatttttttatgtttctcctttaaaggaatgactggattcgagttggcctttgctatccatcaaacacaagttttcaagttacctttggctatttgcagcggcagaatggctcattatccaaaatcgaagaatatgagcctgtgcattcactggaagaactgcaaagaaagcaatccgagaggaaattctattttgactccagcacggggtaattcagtgaaaccagggaatgagaattattcctatttttctttaatggtgaaattgctagttcttcagcatcgcggctgtttagtgaagcagctgatgtgggtaattctctgcacatcttctctattagaggtttagaggggaactagaatggctcgtaattatagttggcagtagggatcgagtgaagatgtttgctgtatacgtattgaggcaatttagagaaagaaattatcccttgtcgatgaagaatcagtaggcccagttggaaattacaataattttttcccataataatgttcttcatatgattatttacatgtgatatagttcatatttcagtgaaagctcatttttctcttcctgacttaggctatcttacaagttgaccttgagtttttgaaaatcactgtgtaactgtggaatatttgctttcaactttctctaggctgcatctttccactttttaattccaatcctgttcttctg

SEQ ID NO: 133354 - DNA, 1056 bp, Homo sapiens
atactgctgaatgctttaattccctctagctgggatgggaagtagttttctatgctcttccagtggagcatttgcttacctgaaaaattaaaagatttttgaggctgagtttagacttggcagaagaaagtagtgggatggattagtaatgcctgctaggggcaagaagtgaaagagttgggacatgaaggccaggtatttgctagccctgcctgaaagcactattttatcccttcttgatttctcagttgtctgttctaatcacaggcaatccaaggggctatttttataattgatttattcaagtgtttattgtgtgtaagttgacataaaggtgaatgagagaagtacttgccttctaggagttcagagtagacaggtagaaaaaactcaagtagatagataaaccaaagctattttttagtggacaaatgatagagcaactattaaataattctgcctaagggagttgagccaggctgcagtgaggaatgattctgatgaagcaatctgtcttgttatattaataaaagcacagtgttgggaaagggccagttctcctgggggaaatgatggagtcagtgtgatggggacatagagtgtgtcaggggaaatgacagaaggtgaaacaaggaaggtgggatgggactatttagaaagggaggggtaaaccacatgtatcttatcaatctagatacatgtggctattaacccatgcgactccatgaaactgctgagatatgtacctgaaaaattgaaatggcttgttcacctgagtcgtcatcaagccctgacttgtcagaacactcttaaaacatccagttgaaatgaacatagaaggactagagcatgtaggaattcagctttaagaaagtcacttccaaggatgatgaacatcgtggcagatgcccttgttctgagattgttagggctctggcatgtgctctgagctgaaccgttaccattactgttactgttttcctgtaatccttgctgcggccctctgtgccccacccacacagtcaaccaagccccaaggccagtactcattcctgt

SEQ ID NO: 133355 - DNA, 3381 bp, Homo sapiens
gcgcccggccaggatttaataatagactgtcagaggagataaaggaaatagatgatcagaacatggagacgagaattagaggaagagcaagggattttccacatagaattgggctgtgatagccctaaagacaggaaagaagcccctttctttgatttgctgctagatgttcttttcgtagcatgggctcttcctggggaggatccgtgctgtgctatttcccctctactgagctctgctcactttgccggtcaaaggtgtgttttcgggctcccgcttgtcacttctctgagccccctgaattacatgttgtttccaccacctgagctttcaataattggagcttcttggatcagaattcttctttgttcttctgactttgaattacgacaattaaagcaggtgatttttaaattttaaaacttaaaaagtttagatccttatctatagactaaacaaagggcttaagaggaataaagacgggagagactttctggtttattttagtgggggtattagcttctttattgctatgggatttctcatttccatgagcaaaaataaaaaatactaaaaaaaaaaagtaatacttgcctaagtcccagaagggatggagaattaactacagtagaataaagaagaaaggaacatggtttataatgtgatttattttttccatttatcttattcttaatcagaattgccttccccaaattaagtttacccatcaatgcctaggaactatagacgttctagaactgaaacaaaactagaaaataaaaactaaggccgggcatggtggctcacgcctgtaatcccagcactttgggaggttgaggcaggtggatcacctgcggtctggagttcgagcccagcctggccaacatggtgaaacttcatctctactaaatagaaaaaattagccaggcgtggtggtgggcacgtgtaatcccagctactcgaggggactgaggcaggagaatcgcttgaacccaggggcagagtttgcagtgagctgagatcatgccattgcactccagcctgggcaacaagagcgaaactctgtctcaaaaataataataataataaataaataaataataagcttttagcctttttgtagctacagttttggctaaagttcttgccagccatgagtattcatgcatgtgtgcgtatatctatctgtctgtcttaaagtggcaggtacacactaatgaaaactatattttttaagtgatcataaatgtttctataaatatgtggttatggtagctcttttataaattaccattgcaactaccaatgtgacatatttttcatttattcaacattcactcagtaaagcattcagtcctttgaatatctaatgtatttgagaatattaacctgatctatattacaaatcagagtagtaattctgtttatagatgaagaaagaaataagtcatctaatactcctcagggggcactgggaatcgtaggactatggaccagaaatttactcctgagaatttgaaatttgggccagaagcccagttctgcagccatttgttgttacttagaaatgatgtagtatgccaaaaatgggagcaattggatctcaagatagaatgatcatgatttaactatttgtaaatattttttagtggaatatgtgctttttttttttttcctttttttttgagatggagttttgtttttgttacccaggctggagtgcaatagtgctatcttggctcactgcaacctccacctcccaggttcaagcaattctcctgcctcagcctcccaagtagctgggattacaggcacccgccaccacacctggctaatttttgtatttttaatagagacgggatttcaccatattggtcaggctggtgtcgaactcctgaccgccagggatctgcctgcctcggcctcccaaagtgctgggattacaggcatgagccactgtgcctggccgaatatgtgctttttaatgacctgagggataaaggtactcagggagaaagatggtgatatagggagagttaaggttactaaggcaggggacagatatgcagtgtatgtacagcctcctatatatatatacacacacacatacacatatataaatgtacatgtaaatatacatatacataaatatatataaatatatgttaaacataagtatgtttaaattaatatatattatatattgagtatatatttaaatgaagacaatcaatagtcttaaaaatgtttcctgtctattttaaatctttaagcggtgtcagtagagtattaaataattgaggtagttaaaaaggacataaaattgaggagtcaatatggataagattatagaaatgacagggaaaaatacagaagtattgtagattaaatgtcaatattctgctgctgctttaatattctggagaatttggttacagatactgatttgttttaggagatttgttctaagaattttcctttgtaggatacatttggggatggctttgttttggcatggcaagtagctctaatgccactggaatacattcaggactttcaaatttgtctcagtttaatgttttttcagttgttgcacagtactttataactttttttttttttgaatgggtgaaaaatggctttgtgggctgacgtaggtcatggaaaattgaaagccaaagctctaagatatataagtttttcatctcttggtttagaagaaagtctcttagatttgagtagaggatatcagttttcacattagtttactaatttttttttgtatgtgtgttctttagactgagagatttctttgacaagctgtataagccacagaagttttatattctgatgaataagctggcctgtagtggtggaagcgatgatgaagatcttggctagcagagcacatggtctgtttttaccatttctagtttaagtaggctgcactataagtggctgaggatgtagttggctgctgctcacttagtctggcacagatcacagaatctcccttttcaaagttgagacacttgactttgtgctgaaaatgtctttttagctgtttaaattttcattctcttccctttacttcttgattattttttcaaggtctatgtacagacatggagcactcagaatctttctatgaccattacacgagatgagtatccgtccaaccctatggtgctccgaggtattaatcagaaggctgcctttccacagtaccagcctgtcgtcatgctggagaagggttataccatccactggaatgggccggcaccacggactacatttctatacctcgtcaacttcaacaagtatgtttctgttactgttatttcaaatagttgagcaagtagtaatttagtggagaaaaag

SEQ ID NO: 133356 - DNA, 1034 bp, Homo sapiens
attttttatttcattgagatataatttacatgtagggaaatgcacagatcttacatgtacagtttataatttttaacaaatatatgtgactgcatagtctcccttcccacaactcttctgctttctctccccacaaatgagttttgtctggagaacaggtaatagtttttaagtggggaaaagaagaatacaaataacgatgaagtttaacatttgcccattaaacaccataaggttttgggaaattccccccaaccccagcatgtcattaattgagtagaaaactcaggctgacttgagtgccatagctgacaactatgaactgtaactcagaactgctctaaccttaaagcaatcacaatggacctgcagttgagtcattgcaggggatgctgagatagcaggagccctcactttgtgatgtctttctttttcactgtggtcaggtctctctgaatgtcttttttggaaagcctggtccctggtttgaagattgtgagatggatggtgataagaactccatattccatgacattgatggctctgtgacaggatacaaggatgcttatgtgggaagaatggacaactacctgatccgccatccaagctgtgtaaatgtgtctaagtggaatgcagtgatctgcagtgggacctatgcacaggtaggcttagcaaatgtataatgctcaagttcctaccagctcctgccagcactgcttctgtgagaagtactcttcagcttttcagtgtgattgacattttccaaagtatgatctatcttcctgtcctgtcctgtcctttcttttctttctttcgattcattaggagtcatggactcctggaatttttcttaaaactccccaactccagatctgtttaagaggtgaaagagtgagtcccagagaggagagctgatttaccctgggttaaatgtggttggaacgtagttgggacaagaacccatgtttcttgactcttaggttttcttgccacactacagctatgccctctaagagggatttttatcctttgct

SEQ ID NO: 133357 - DNA, 1003 bp, Homo sapiens
atttggatccttcctgctattttacttgtctgagggctattcttctgggggactagagaataagaggttgtgaataaagcagaatactgtggcagtgtgatacaaattaggttatttcttttttcttttctttttttttttctttgaggcagggtctcagcctgtcacccaggctgcagtgcactgatgtgaacggtggcaaagtcatggctcactgcagcttcaacctcaattggatggatggctcaagccatcctcccacctcagccccctaagtagctgggtatacaagcatatgccaccacatctggctacttaaaaaaaatttttttttttttttaatagagaaagggcctcattagcctgggctggtctttaactcctggcctcaaatggtcctctcagcttggcctcccaaagtattgggagtgtaggtgtgagccactgcatctggctgaaattgggttatttctgatataaactgttggaaggtttttatgaagattgcagatagactgtaaaaattaccatttacagtacagtagcccacaggaatggttttcttaccaatttcaccagtattacctgtacccataactcacaggacaatctgattacatgcccccaggctttcatcatcttgccagttccatggtggcaatggcacaagacagagaagtctcaggacatctagctgcctgttcccacaggcagccacacctgggaaataagtcatcattctttcattcacatccacccacaaacttaatagttgcccaatttaaaatagagcttgataggtttatcaaagtctatgtctggttttctacaacagcttgggtgtggatcagaggcacaagtacaaattggagtgtcagcttggttggctggttcttttttaggccatgtgactccaggggatgggtaggactaggctggtagatggcacccacataaatcagcaggatgagtcttggatcccctgtccagtacggagacttgc

SEQ ID NO: 133358 - DNA, 1002 bp, Homo sapiens
acgtcttcaaagctttaaggaaactattaactaataattcatatctcagttctgaggcacagtttggacttctcattttacttgtgagaaaaccaggtagaaaaatattcaacagtgtttttaggcctcacatctgagcccatgtcataattctttaagaatcaactcccctagaggagtgctgtcgcagaatgttgggctagaacaaggcagaggaatgggacatacagactgtagctttggggagtggtggcgcagagtgaggactcgggggagagctgtactattttctggaaaaaggtcaccatgcttggcttctcaccccttgtgcttgttgttgtggaatatcgagcactgctatgtgctacactctgtgtggaactcgtgttagcccatagaagccattgggaaaagaacttcatggattttttaattgctaacatgtattaaatgcttatgatatgtcaggccctgttgtaaatatatttatttaatcctcacaaagctcaatgagataggttctgccagcatcctgttttacaaatgagtatcttactaaaggtagagaaggtggaattcaaacccagttaggttgtcttcagtgctgtgctcttcacaattaggctcttgctgctgtttctaaggtgtagattttttaaaaagctgtattggttgtcatatgggctgcaatgtgatggtcgccaaatcaatttcactctgtattttatattgacctccagttttatttcaaaatgctttttgctgtttggtaaggaggattttccaaaatcaaactttctcattatttaatggaaacagctttaatatgatcatatctttacaacttgtattagtccgttttcacactgctgataaagacatacctgagactgggcaatttaaaatcaaaagaaagaggtttattggacttgcagttctacatggctggggaggcctcacaatcatgacagaaggcaatgagagcaagtcacatcttacctg

SEQ ID NO: 133359 - DNA, 1049 bp, Homo sapiens
tgacatacttcctgatctgggtttttttggaaatgatttttatgcaataatattctgcagtgtccattttaattgatttttcaaaaacaaactaagaagatgtaaaagcagttggttctctggaaacttgtggttaaataaatgtaatttcttctttgaatgtttaaaatgtaagtaagttgtatcttaagaatttttcatttgttttggtcaaatttaaattctgcttcttgacacttaaacttataactagctaattcctatggcttttatgttatattttttaaaattctttttttaacccctagatttcgacctcatcaggatgcaaaccccgaaaaaccacgtgttgctgctctaattgacaggctcattgcttttaaaaataatgataatggagcttgggtcagaggaggagatattatcgttcaaaattcagcgtgggtattctctaccaagttattatatgatgacactgatgtattatttttcagattttttttaaagccagtagcatgaaagcacagtgatgattcttggaatcatattattattattaagacaggacaagctctgaggaagtatgctagagttaaaagaccacaaatgtttgaagttgtctcattctggtgcttttattggaacagaacttatccggtgacatgagagtttttgatgaaattgaacagaaaccgggaatttaactttatataacaagcatggtctatgtcagagcgctaaataaaactacctggatcttttcccttcctcttgaaaactccttagtttttctgatgctcttctattgccattcaaaataaaagctttataattccaactcagtaaatctgttgacttatatcttaacatgacttgaggcagtaagtatctcactttttttcccatttgtataattttaggagtggtctcatgcatgttgagctaagatttagtgttcaacagtctagaaaaatgtgtgtgtgtatttttttttctggcactgaaattagcttcttggcatttcacatcatttctgagttttttcatcc

SEQ ID NO: 133360 - DNA, 1096 bp, Homo sapiens
ctttctgctagtttttgtgttagcaacaacaaggatcatatttttcttgttaactaatgtataacactgggtgcctaccagtaagtatttgttgaatgactaaatgagtgaaatgagttaaatgagtagaaaatatccaggaaagtagctgttttttttttttttacagtacctttgctgttgattccctgccccactttttttggtagaagtgataagctaaaatctattttcatgaatcattgtatatgttgttgtaagttgggattcatattcattccagtccattatttatatttttcaggctggcttatttattgacaaaggtgtcaaaacaaccaactctagtgctgctgacccaagggaatacctctgtttggacaatagtgcaaggtaaagctggctcttttaagtcacactcaagctatactttgccaaagcaaaactttctaactggagtttattgtgctctttctgtggtaatacatttaaaataaagttttagaagttcgtaaaagggtttttggaaaaccacttattctgttgtcccaggtcctgtgactggtcttttatcttattgaaatactaaagaggttgatgtttttctcctttttcattgctataaatagatgctagagagagttgcagaaagagaaagaaaaaagaggagatatgttgagaaagtttccaaatttggtgtgcagtatgattcattgaaaaataagttaaactaagatgtttagtctcatccttgaaaaaccaaaccatatagaatttattctttgtggtcaaaatgaatactgcatttaatatttcaaaaggaatgatcccaaatttgatgagcaacctggttctggttcagccctttgtagcctcagatttacatcatagccaggctctaggttactttcttttgtaatcacaaaatgcattaggtatggatcagcatttcagcagagttctcttacatgctatatatgagccaaaataaagaaaatgtcccagatgaaaataaacttttctggaaaagatggtgacttaaagtcatattcagtagaacctgtgtacatattattattttccatacttcaaattg

SEQ ID NO: 133361 - DNA, 1055 bp, Homo sapiens
ttgacatttttcttttcgtgttttaaaccaggagtcttaaagcagattttctggtttttaaaaattgtccctttgcgttgattgcttttggtcacaagtttgagcatgtctctcagatatttagtatcagaaatgtttttaggccgggtgtggtggctcatgcctgtaatccaagcactttaggaggccaaggaggtcagatcacctgagggcaggagtgcgagaccagcttggccaacatggtgaaaccctgtctctactaaaaattaaaaatacaaaaattagctgggtgtggtggtgggcacccgtaatcccagctacttgggaggctaaggcaggagaatcgcttgaaccccagaggtggaggttgtggtgagccgagatcacgccattgcactctagcctaggcgacaagagtgagactctgtctcaaaaaaaaaaaaaaaaaaaaaaaaccagaaaagaaaaagaaataatggtgttttcaaacacattgctgtcaacaaatagacatatagtatataaaatttaaaatctgttggatagtgattctacagctttgatttaatttaggaacgttaagaaatctctgctggctgcggtggctcacacctgtaatcccagcactttgggaggccgaggcaggctgatcacctgagatggggagtttaagaccagcctgaccaacatggagaaaccccatctctactaaaagtacaaaattggccgggcgtggtggcacatgcctataatcccagctactcgggaggctgaggtgggagaattgcttgaacctgggaggcaggaggttgcggtgagccgagattgcgccattgtactccagcctgggtaacaagagcgaaactccatctcaaaaaaaaaaaaaaaaaaaaaaaaaaaatctaactcagttctcaaccttgcctgcacacctggagactttaaaaaatcttgacacctagggtgcaccttagatcaattatgtcaggaagaaggataaaagaaggataagactcccaggctactgaaggttgatgatcactactctaacctct

SEQ ID NO: 133362 - DNA, 2222 bp, Homo sapiens
tcagtacttacttcatcattcactgtgtgcaagaaggaacttgtgaagacctgatcaatgtattatttagcaattttcatttttgatttaccaggatgttgtgaacacatttcttttctaaaacagctttctagtgtgaatcccaagagaatgtataattttgcctcttactattggtttatttccagagtagatgattcagggaaactttttttttttttttttttttttggtgaagtttgtcctgaactagatgctagcaatttagttttgtggtaaaactttaaaatggaaatgtgatgacaaattaaagggtaagatggttctctgctggtgggaaggcgtgggatttccattctaatggcaggaaatcaacatatgttagcacattttttgcagatctgcagtaaataatggtagtgcttagattcggctatattattcctgcattttaatgggttggatggaatatcaatgtgtttatagaaaattgcccagatcaaaatcctcgtctcaggaattgggatccaggacaagattctgcaaagcaagttgttatcaaggagggagatatgctccgtctgacctcagacgccaccgtgcattctatagtcattcaggatggaggtaggtaatggttcctgcctatgggaactgcaaggttgctctttaatgtgggggatatttgatgttccttatgtagaagactatttttaggcagaataggctttagtttgtggtgtcactctaaccatggagatttggaaagatcatgagataaaaccagagaatttatccagagataaaaaacatagaatttaagagcttagaccttaggtatcactcaaatcaagacccctgatttatagacaaggaaacagttccagagaggtgatctctcagagctaaatttttgtcacaattctgagagtgattttgtcacaattctgagagttaacatgagtaaacatatacaaaaataagattcagatttgtagactcttagatatttttaagagaaatgatttaacctctaaagtgagtaggttgaaattcacagtcatgggcattgagagtatattaagatatgaactcttcatttttccctttagttttctaagcagattcttagcgaattcttttttccgacctaattgcggaagtgtatttaacttaaggtgaaatctatttccttgtatctcagaaagatgatttagaagttggcttacagggtggtgttccctgcaggactgcttgtatttggggacaataaagatggatccagaaatattactttgaggactcattacatcctgatccaggatggtggggcgcttcatattggagcagaaaaatgccgctataaatccaaagcgacaattaccttgtatggcaagtcagatgaaggtgaaagtatgccaacatttggcaaaaagtttattggtgtggaagctggcgggacactggagttacatggggcacggaaggcatcgtggacgttgttggcaaggaccctgaattcctcaggcttgccctttgggtcctatacctttgaaaaggacttttcccggggcctcaatgtgagggtcattgaccaagacacggccaaaattttggaaagtgagagatttgatacccatgaataccgcaatgagagcaggcggcttcaggagtttctgagattccaggatccaggtcggattgttgccatagctgtcggggattcagccgctaaaagtctcttacaaggaaccatccagatgatccaggaacggttgggaagtgaactgatccaaggactgggctacaggtaggcataccttcttcccagatccctatcagagtccgtgtctgtgtgagaggagagtgagggtggggaaaggagccacagccacagcatgactcaggcatcagaagggccactctaccatttgcatgtctggtagctttgagacatggggctggaggataggacaccacatacaaaagctattttcattggctttggtttacaaagccctttgtgaactggagtgccagacttgtgaaaagttgagagcagaagtgtggtactgaaaaacagtcaggcagtttaaggacaatttgcctctgaagatacttcttcctttcgttaccttctgaagatcatatgaaactcaggctaattgaggcaacttaatgagtttaaaggttagggcagaatttcatgctaagttctaaac

SEQ ID NO: 133363 - DNA, 2424 bp, Homo sapiens
atgggcttgggaagcagttccaaaggaaaagtttcaaatatttttgagtaacaatatatatcctggaagggaagcatcctttaggatatataagttctgacacctttgtctaaaaatcagtcattacttcatagttaaatattatgcagggagattttaatttcttaaatggtattttcttttcaagttaatgatatatcaatattttgaaaagttttgaagaagatggttgcaagtcagccttattggaataccaacaaagaattgcctcataaaagaataccatccatctgtctaaaatcaaaggactcggggctgtgaagagagaagactctaacagcctggactgggtaccatatttgtctacaacagatttttgtcaagttaaatgcttccttaagtggctgtaacagttcagaggcattttactacttataagacttacaaatactttattatttagttttcttgggtgctttcaagggatttttaaaattttaaggttctgggagaggtagtgctagtacttctaagaaaataaacctcaaatgagagagacatgcacattaatatccttatggaccaaacaagtagaccacattatgaacttataacattgatttccattgcatgcggtatgacttcctctctccttttcccagcagaataaccaagttctctgtgctgattcataataaccaagttcactgtgctgattcatacttcccaactcttctgcagtaaagggatgctagaccagtgggaaatcagagctgaagtctatggctttgattggtgttttcatattccatctaaaacagggcattgctgatatggttccttgaaccaacattctttagtttcacattttggcagtgtaaagtgcagatcatcagtggaaagatctggtatgctgaaatatttcagggtcagcttgactgtggttattgctgttacataactttgataatatactcactgctcttcaagtgggtagctgggaaggtggggttggctgagctacttttcagtgctttgtacagactacacattttctcattaagtgcattttactggaaggaaacagactggaatttttggtgatggttctaatgaaccatgctctcctgggaaataattaaaaacaattaagagaaattatataatcattgaagtaggctccagatctcaaaagactggatttccttctttatagctgggtacagtgcttgttataaaactatggagaatttcagctagatgttgtatgggaagagggaggtagaaaagttaaggaatcctcattattaaggcaaaacaaatttaagagtttttttgtttctttgatgggaagaaaagcttaaagattgtttttagtataatagtgatactcattgacttatcagaagcattaaatatcaacagttatgatactgctgtgagaaaaactaattccatgaaataattgccaaggatataactggtgaggctaattgtagctgtggttaataagagaaagcataaacctagggcattgtgagagctcagaaacaggaagatgtttgcattagtgttatgcaagttcaaaatgaggaatcatttttttttctgtatagaacaatatgtttgtgtagcaccctacctctctactttttctcttgttattcctaaacatgtacctgccaccttaatgaaaggaatttcttcctatggtttttcaagcatatcttgcttattcttaccttagctgagtttaaataaagccaccttggaattctgaacaaccaaatggactacttggatctcaagggataattgcattactagtgttctcatgatcctcttatttaaatactgcccatcctttggtgtccagctctcaagtcacctgttcatgaagctgcctcagttactccagccccatgcctcctttgcctgaggtcttttgaacctcgactgactaccatattgttcagtgtttcattatttcatacttggtgttttttccctccaaagcttgcatataaactctgaggaaatgtgagctgattctatgctttataaattttaaaatatctggtacagagtggataaattgatgctccacaaatacttggccataggttgatcaaaattgaaggcgtgattttttttctcccctcttcaaaattatggcggaccttaaagttttcatacattaaatagctatggctattttaattaaatactgttatatttttgttattataatacctattcaagaggcaagttctaattccagtaaaggaacactacaagtcaataatctcattttctaaaaggggaaacttgcgtatcactcagcttgctaagtaatctttggtttctctaacctgtaatttcctcatctctgaaaatgagaagttatgtctttagccacttgcc

SEQ ID NO: 133364 - DNA, 1079 bp, Homo sapiens
ggagttcgagaccagcctaacctacatggagaaacattgtctctacttaaaaaaaaaaaaaaaaattagctgggcgtggtggtgcatgcctctaatcccagctactcgggaggctgaggcaggagaatcacttgaacctgggaggcagaggtggcggtgagccgagatcatgccattgcactccagtgtgggcaacaagagtgaaactccatctcataaataaataaataaaagaaattaaaaaagaatttacacatactgaagcttaatttttttttcttttcacagtaacagtgtatcatgtatgccactgattccaggggacactcccctgctttcctccaacctcagaatggaaatagtcgtcacccatctggctatgttccagggaaggttgtcccattgcgtccccctcctcctccaaagagtcaagcttcagccaaatttacctccatcagacgagaagaccgggcaaccttcgcattctcacctgaagaacagcaagcccagagagaaagtcaaaagcaaaagagacacaaaaatactttcatttgttttgctattactagtttctcattttttattgcacttgcaatcattttaggaatatcctcaaaatatgctccagatggtaagtgtgtgtatatgcacatagaacatattctagaagacaaaagaggaggaaatagtagaatacttaaaaaaaaatttatcttaagttggccctagctaactaatatgtagttaggtaatacgaggtgtcacttcttatgaatgagagcaattgttcaataatctgttggaaatgattaaatggttgctcttcctgtccattgtgccactttgttgcagcactcagggaggtcttggagtacctcttttggaaatgctttgagggccttcactaaattcttatggtaggtatgatttttggactgctgcaattttttttttctttttttctttttttgaggcagtcttgctctgttgtcctggctggagtgcagtggtgtgttcttggctcactgtaacctccgccccctgggttcaaatgattctcatgcctcagcctcctgagt

SEQ ID NO: 133365 - DNA, 1023 bp, Homo sapiens
ttagcttcaatttgaagagcttagaataatgatactcaaagtgtgacctgccaagatatatttttttaaaatgtaaaatccagggccctgtttgcaccagctgagccagaattatagggcaaagaggccaggaatctaggtttttagcaagcttctctgatgattcttaggcacagtgaaaattgagaacagttggcatagaacagcggctctcacctagatgttcatgagaatcacttggggagcatttaaaagctgcaaatacttagatcccagggacagcaatcctgattgaattgtttagccgtggtgccctgagcattcaccttagcgggtgattacactatgcagccagggttgagaaggagtgacattagaacacaagtaatgaaggtgattgtcaacatggtttattagatcagggatgtaagctgacttgatattttcaagaagtcattatgatggttaccaggggctgggaaaaatggagagttacttaatggatatagagtttttgtttgggatgatgaaaaagttctgaaaatggatagtggtgatggtcacacaactttgtgaatgtacgtaatgccattgaattgtacgcttaacatagttaaaatgtaagtttatggtatatttaacacaatttaaaaagtactttaaaaaaaccatttatgattcatacattccagctggatactggggctcacgcctgtaatcccagcactttgcaaggctgaggtggaagaatcacttgagctccggagtttgagaccagcctaggcaatatagcaggatcccatctctacaaaaaatttaaaaattagccaatcatcgtgggatgtacctgtagtcctggctacccgggaggctcaggcaggaggattgcttgagcccaggagtgcgagactgtagtgatctatgatcatgccactgcacttcagtctgggcaacagagtgagaccctgtctctaaaaaatagaaattaaaggcgagttgcggtggctcacacctgtaatccca

SEQ ID NO: 133366 - DNA, 1077 bp, Homo sapiens
gagaatagctcaattttattaaaatcatgcctctcctttatttatttaattttattttttatttttttagagagtcttactctgtcacccaagctgggctgcagtggttcattcatggctcactgcaaccttgaactactggtctcatgcaatcctcctgcctcactgcctccgcctccggagtagctagggctacaggcatggaaccaccacaaccagctgatttaattttgtgtgtgtgtgtgtgtgtgtgtgtgtgtgtgtgtagagacagggtgtctcactaggttcccaggctggtcttgaattcctggcctcaagcaatcctcccatattgaccccccaaagcactgagattacaggtgtgagccaccttgcttggccaaaatcatgcctctttttataggtaaaaaaaaaaaaaaaaaagcatgatttcctttaatgttattgaaatctcaaaataattgctttctatgtttagttactgtaatttattaccaaataaagtggatgctcttaccaattatacaagtctctctcactttgaactgcttttgaggtaatacaccagttttttttcccaagagaagaatttaatttaaaataacagtgagtttttaaggtatctttttgtgggggcaactgagaattagacaaaagcactagctactttttggaatgcttatgtttttccagcatttgtatttttttttaacagcatttgtatattttaagtagatatgttttcgtagtctgagtcacttctttattatttaatttaatactgcctaaattgcctgtgcaattttctaattgctttgcttacttgcttgcttgattcataaccaagccttttgggctactactttttataatccagtaaataaatactcacaaaacgactctctcaaggaatatctaaataccaaaaattatgttttaaaagctttgtagagtacattgccaattttaatatgaatgacttagattatccccattttggattatctgtcttattttaggtgttgtcacagtctgtagtttgtctaaaaatgtgtcataaaatactcatatgct

SEQ ID NO: 133367 - DNA, 1072 bp, Homo sapiens
ggcagttagaatctggttaaatattttattaggtcaaaagtacaaataattatagtatcatctgttttcatgataattcatgctcactcctctttttactttttgctgcatgtttttactttttgggcatactagtgaatgtgttagatcttctaagatcgtaataaaagaaaaaatgttcttagccaaattttggccagttgtactgaaactctccgaaagcaaaaattgtaacttgacccttaggttgagtattgtttaaaaaattatgtccttgatcaaaaaagaactgacctgattagatcgtgccaacttcttggctcttcccacaagcctgaatcttccattcaaaaattagttttcttaaaaagcctaggcgtgatttgagagagcttaaatgaatcaaaagtattgtattttcattagttgttcaatatgaggggatgatggggccaatatgcatttcttggactgtgtggctgtggcaccttctctgcattgggttggaagggctagattatttgggggactgatgatatagcctagggggcaagtgtcctcaaccaccatgtaagtgataagtacctttgtcttgcatattaacatctcagcagctgaaagaacactaaaatcccttttaaagagctcctactagttttgaactgctgccgctttctctgtgttgagaagcctttctctttgatcacagcattgaatggctgtcaacataacaaaataaagtggagtggaatgtttctttttttctgtgtgcctactgcatttcataatgtgtagttaaaactattacaaaatattgtgaaaggttgaatttatctaggtagtttgctgctctttatctttagaattccttcctgcagttgttaataataccttttagtcacctattagttttcatactagaattgcattttataagaattaacacatagactttttttgctttaagtagtattgttctcaattttctcctgaatcagagaaactgatatagaaattagtcaaattgcccagagcctcaaggatgtcaaagaaggattaaataggaaatttc

SEQ ID NO: 133368 - DNA, 1029 bp, Homo sapiens
ctgggaaataaggaactaagtgtaaaaatagcattagctttacttgtattttctataaacaggatggaaatttaaagtactgtagatgtgcacattttttagaagaagcaagttcctggaaaccctgttcagatttggcttgtgaatcatagaataaaagcatactagaatatgtttgcatgttcttttttttcttcttcaaaacttatggctgtaggtcatgtttgcttgttcttttgttttcctggtacttgctttgggaagcctttaatattggttgtcaggaactatgttcagcaactattttattgcattcctaggatgtgcaaggcactgtactggttgctgtgagcaatacagagataaattaagcatagggtttttattaaaatgtctttaaaaaaagtgaaagactcataaactgtatgtcttaaaacacagaattgctatctcccaacaaatcagtcctttgatctataaggcaaatctgctttgaaattgttaatattagggtaacctagtaaccagatttgtaacaagacatttattttctttacacggtgaaaagtgataaacctttttacatttgttgtatcaagggtccattgtagtttgaacaataagtaaaagttcaatatttgataagaattttatgtgaaaagtttgcctggtagagattgtggcattcttaatcctcatattttttaataaggctttaccactggttagaagtgtcattaggatgttgttgcctgaaagagttgaaatttaagacaatccacattgagcccatgagaaaagaattgacctctgactgagtttcatgtaagtatcttaaaacatatgaatatccactataaatttgatatcgtggtcaggtcagattaagtccccctccagtgtgaaattgttatcgatttgggggctcttacttaattattggtgtgcactttggagacagcaagccttctgttgtcttaatggtctctgtaatggtgattcacttccctgaagaatgaatcatttttt

SEQ ID NO: 133369 - DNA, 1759 bp, Homo sapiens
acatgctttgggcaagtttctgaaattgagaaagacaagccacattttagaaagaggaaacttaggccgggcacaattggctcacgcctgtaatcccagcactttgggaggccgaggcaggtggatcacctgaggtcgggagtttgagaccagcctggccaacatggtaaaaccctatctctactaaaaatacaaaaaaaaattagccaggtgtggtggtgcacgcctgtaatcccagctactcgggaggctgaggaaggagaatcgcttgcacctgggaggtggaggttgcagtgagccgagatcgtgccactacactccaacctaggtgatgggaacgagactccatctgaaaaaaaaaaaaagaaaaaaaagaagaaacaataatcactaccaaattcatggtcttagactcacatggagtgctgtatgtaaatgtgtgcattgtgatgtgtgctctaaaatatgtatgagcattgcatcattcacccacccaccatccattcagctagcacttattaatcacctattgtggtccagaccctctggaagcaattgcaacacctgctttgtggagcattcatgttggtaaagagaaggagttgaagtggttgcaacccgggaggccacagggattgaagatacctgtgtcacttgcaactagagagatgacaatctctgctattgaagaaatgagcctagccccggacataaggaaatgaacaattagaaggtccaataagtgcatgtctgggagaattacgcacagaacgctctaagaagccagagaaggaacagttgggggtgggggagcaattttgtgagaaataaaatttgttaaatcagacaaaatagtagggactgaaaactagtgtcagaagtactatcttaaaatggtgaagattggaggacttgaagtcagacttggatttaaaacaaggcttggcacttgctaaacatttgctgtgggcaaatcccctaatccttctcacgttgtttcttcacctgaaaaaggagttttaaaatgctttatgggaatgttttggggattcaatttgagtaagtttgctatgtattaatatatgataaagtactgtacaggctaatgctgtctggtatcaaaaggtactttcaaaagttttttaaagctataaatagatataaatcatagcttaatcaggtctcagctacagattttcattttattggccctttccagaatgatctgaatcccatcttgagagcaagtctttagacttttaagctagttactgtcatatggtattgctctcttgtccaggcttcttcccatcccagccacaggaaatcttttcatttctcttggattgtgagcattagtgagaagaatgggctgtctagtacagtacatcaattgaaaaggtcttgtctggttttgtacggtaacatccattctcccctctgcctcccaagccaagctagcccttctgttttcctctctctcaatatgatgaatatggaaaaggaaaaaaaaaaaaaggaagaaaagctatgcatctgcctttttgagagtatgaaaatccccattactagttttctccatttgtaaagaggtataattttcatctagattgttaaagtctattctctcaatagcagcagctgctgtctaggcgaatctgttagcaatactcgctttagttctccacttgaaatggacttaagcccatctgacattttaataaattgcctttgatagaaatccaaactcagatattta

SEQ ID NO: 133370 - DNA, 1233 bp, Homo sapiens
ggcggctccgggagagagcgagccgaggcccctgcccccgaggctcggggcaggaggaggaggaggaggaggaggcggaggcggagggaagtgcgcgtcactctcgggaggagagtatttcacctccaggcagaggctgcggctgccagttgagtacgagcggcagctgcgggcgccggcaatcgagtggcttcctggccatggagaggagatctggacccgaggacgccagggactcctctccgtctccctggaccgctgtgtaggcacctgagttaacggacgctaagcggggtaggggaaggtaagaagcgactcggtcacccgcccccccaccccgctccacctcgtttgctgccctcgggggccactgcggggacgcagacccgggtctcgcccaccttttctgctcccggcggcctggccggctccggcgttgggcatttctgccgaaaaggaaaacgtcctcccgcccttcccccgtgcgcctcctttcccggtttcatctctggattgggactgacccgactccccaggagtcagtcctctcttcttaagaaagggtcctcgggaacggtgtcttgatttctttctctccactctctcttttcattacgtttacggggaagggaacaatggacctttcaaagtcggtgcgaacagccttaaactttctggagagggatggggtgaggggataaaccccacagtaagccgattacagtgaaaggttgatggaatgtgctttgcagtccgggcttcagtgcgcgcgcgcttgtgcgtttggggtcatctttgtctccttacaattcccctgggttggtgggtcctccgccctccgccccctgcctctctgttagctgaggtaaggtgaggctttaaaatcgtgtacagcttcctttaaatctggggaatagccttagccctggaccctattcccagcttttctctgcagagttgggagatcctggtaaaggaggggggccctctctgtgaggacccagagtgctgctgttaatagcactagtggctacacccttagcgataaaaccaaggtcctgaattccctggatgctctctgctgagggttgatgagtgtcaccagacttcgacctggagcggaaacagctcacttgaattctccgcaggttaggaaaacagactttgatatatatctccttttatcagcagttgggattaaggatagactgcctaataatttttaaaactttc

SEQ ID NO: 133371 - DNA, 1026 bp, Homo sapiens
gagactcacttgaacccaggaggcggaggttgcagtgagccaagattgtgccattgcactccagcctgggcaacaagagcaaaactctgtctcaaaaaataaataaataaataaataaattactagcacattaataagatttaatatcttttaaagcagatttttaaatgtaaaacttttaatgtcttaatattttatttatctttatgataacacaaaaatatgacatacaggaaactctgtatcttgactaaattcttataatctgtgtcattagtttctcattcaagtgtagtggcagcagagtcactcctttgcattaaccaggaatcaatgaatttagataggagggttttttaaaacagtctaatccattagggataatcccttgaaagtggttgtccagagttgccattcatttagctgccctgaaaaacaagctaataaacagaaaatctcctacttatgactttcctggagcttttccatacttttcagtggtggctgcattgaagtaagttcatctcaccagaccttggagaaggggaaggaaaaacactttgatttacactactttacgaagaaaatatttattctactgtataatgtgatgtaaaatgtacataagtgaacaactgaatagcaattgacttattgatttgaattgatttgacttaatccatacgttgtttatgttttctgattccagcagctaattaatctttttttaaaatgaggttataaagtgctatactagcttgtatagttctgaaaaagaggttttagattggggttttaaaatgctcttcatcaggccgagtgcagtggctgatacctgtaatcccagcactttgggaggccgaggcaggtggatcacaaggtcagcagtttgagaccagtctggccaacatggtgaaaccccgtctctactaaaaatacaaaaattagccgggtgtggtggtgcacaccagtagtcccagctactcaggaggctgaggcatgagaatcacttgaatctgagaggcg

SEQ ID NO: 133372 - DNA, 1052 bp, Homo sapiens
atttatattttttctgtgaatttttttttaacatcaagatgagtactgtatgagattttaattctataaaatcaaatgctgtaaaagtattgccaaatgcttttgcatactagaaacaaatttataaatatttttaaaacatctcaatatattaaatcttatcctggaatacaactgtaatattttgaaaaaagctatgtatctaaagcaatttaagtactcataatggaatgaactgtaaaagagatttaaaaccatgcaagttcactagaattaacctaaaccctgttgtacagggatagaggtttaaagttattttattgtaaaatacattgaattttctgtatactctgattacatacatttatcctttaaaaaagatgtaaatcttaatttttatgccatctattaatttaccaatgagttaccttgtaaatgagaagtcatgatagcactgaattttaactagttttgacttctaagtttggtactgtgaggcaagtacttaaaattttcatgctggttacttaaaaggcatttagagatttcaagaatgattttgtatacgatgttttaaattttgactgatctcatagtcttcatagaattgcagtagtcttcattgtatgaaatcccgaaagtccatgagttgatcttaaagaccactaacagactggctatcagatcccttttcactttggctatttttttcattttttgagatggagtcttgctgtgtcactgaggctggagtgcagtggcgcgatcttgattcactgcaacctctgcctcccgggatcaagtgattctcctgcctcagcctcctgagtagctggtattacagatgcttgccaccacgcctggctaatttttgtatttttagtagagacagggttttgccatgttgatcaggctggtcttgaactcctgacctcatgatctgcccttggcctcccaaagtgtcggaattacaggcatgagccactgcgcctggcccactttagctatttttaaaaataggacctattgttttggattactatctgagaatt

SEQ ID NO: 133373 - DNA, 1650 bp, Homo sapiens
gtggcgggtggatcacttgaggccaagagttcgagaccagcctggccaacatggtgaaaccccgtctccaccaaaattacaaaaattagccaggcatggtgatgcgtgcctgtaatcccagctactcgagaggctgaggcatgagaatcccttgaacctgggagacagagatggcagtgagccaagatggtgccactgcactccagcctgggcgacagagcgagaccctgtctcaaaaaataaaaataaactgtttgaaaaagataatatacttctttttattttttattcaagttttaattcctctaccgctgaacatctttctgacaacagatagtaaacccaagtatttattcttaccaaatgcagccttagattatttcattgatggttttttcattgtcaacattccattttcattttatgtttattataatacctttctctaaagattcttaaaaagaattgtctgtgtagtttctgtgtcctccaagttgccttttaaaaaagtgtttgttttgattcctctgttatttgaagtgttctcctctcatgtctgataattcttggttgcctgcttatatgtaagtaaaggagctgatcaactctttactcttacatataagcagacaatcaagatttagcagatcaactaaagggctgatctgataataatctccaaagaaggctctttctttctttctttctttctttttttttctgagacagagtctcgctgcgacacccaggctggagtacaatggtgtgatcttggctcactgcaacctctgcctccagggttcaagtgattctcctgcctcagcctcgcgagtagctgggattacaggcatgcgccatcatgcctggctaatttttttttttttttttgtatttttagtagagacggggtttcaccatgttgatcaggctggtctcgaactcctgacctcaggtgatccacccactacggcctcccaaagtgccgagattacaggcatgagccaccgcacctggcccaaagaagactttctaaaagtccctcctggaggacagtggcctgactaccagcattctgggagccacatagggaaaatgggttcatagtagccagtatgtaaatgtatatgtttccattgtctctatgatacctctgttctaaactctggcagtcttctagttcacagacattccagtcttgggggcaggcagtttctgggtatatgaacaggcaaaaggaactgggaaggggaggctaactttcttacacagactttgcaaaaatcctgtatatttcaatcacccccttcatcaccatggtaattccttagctttctggggtattctgttgtataaattggtttcgttcatcactttaccatctatctgcctaaaattgtgttttcttcttttaataaattgtttcacacattaatcttctttccagctccaacattttattatattttagtacattctccttgtttttgtatctttatcctcaaacaagaacaaaaacataaaacattttgctgtcattttagtaggagactaggagaaagaatatagtgagtgcagaaagtgaaattagcgcatacttgaaatggttcttaaattttctcttcttctggacacctaagtttctctgtgcca

SEQ ID NO: 133374 - DNA, 1164 bp, Homo sapiens
actaagcaaagatcaattttaagaaaaatcgtaaaatcataatttgccctttactaaaaccatacatatattcatttcataccataactatatgtaacagttcatcaatatgaccaattttggaaattaaaatgagccactcttgatgtgtggagaaataaataacttttgttacactgaacggaaaataaatatgacctattcattcaacatcagttcattaaaatattagtgatatgccccaagcttagtcagcagtaagctaggttgaaatattatagtgtaataaattatttaataaatttatttcttaagattgaaatcttaaaatacctcagcaattattcttccaaaagatgaagtagagaaacacatgaaataaactgatgatacagactttattgtaatgttaaaactaacagtaatagctaagaaacttaagtttaaaaaatggattagttgacattgtcttattctaagatcaaatcctttggaatgatggaacatttcatatcactccaacttttttggtttttgtttttaacgcctgaactttgtagatatggcattcgccctgaaaatgtgattatatatggccaaagtatagggacagtaccgtctgtggatcttgctgctcgatatgagagtgctgctgttattcttcattctcctctgacttcgggaatgcgagttgcctttcctgataccaagaagacctactgttttgatgcattcccaaagtaagtagcaatattcaaaatagttaaattccaagaaacttgggaattttttcatcatttaaagtattcatgacacagttcactcaaccataaacttcattttatatatattagcacatagaaattatgaaaaattaatttgtaaagagggtattagcaggtgaccagtcagaaggctgaaatgtttgaggagtagtaatccagatgaaaattgctgagggccttacacctcaggtggtggcactagtattggagacaagggaattaatttgaaacataaatttgacagaactgagtatcagactgggtgtaggatgctaaagagaaaaacttgaacatgactaccatgtttctgccctgaggtgctaatggatagggccatccagtgagacacttgatgttagagaagaacaggtagaagcta

SEQ ID NO: 133375 - DNA, 1576 bp, Homo sapiens
taaaatatttgctatctccttttctttttcagagcatgaataatctttcatttagtgagctatgttgcctcttctgctgtccaccttgtccagggaagattgcttcaaaattagcgtttttgccacctgatccaacttacacactgatgtgtgatgaaagcggaagccgttggactttacatctgtctgaacgagcagactggcagtattcttctagagaaaaagatgctattgagtgtttcatgactagaaccagtaaaggcaacagaattgcttgtatgtttgtacgttgttcacccaatgcgaaatacactttactcttctcacatggaaatgctgttgatcttggtcaaatgagcagcttttacataggactaggatcacggattaattgtaatatattctcatatgattattctggatatggtgccagttccgggaaacccacagagaagaacctctatgcagacattgaagctgcttggcttgctcttaggacaaggtaaattgtggttggaatttatttttcatactcgtggtggttagctaaaaatatcttgtgtaagaatagaataaaagctgtttttattatacataactgctatatagaggttatatttactattatatacctgtgaataaatattttagacagcaattttaaatttcacataatagcaaaacaaagtttttaaagacagtttcaggtttgtttgtctacattaatacacgtatatatgtatgttttttttaacttaaattcttagctggaagtccatggtgcatgcctatagtcctagttacttaggagacaaagtcaggggaatcacttgaggccaggagtttgaggctgcagtgagctatgatcgtgccactgcactccagcctgagtgacagcgtcagacctcatctcttaaaaagttaaaaaaaaaaaaaaattaaatccagtgacaaatgtttggtttttgtaagctttcttattggagtgtgatataaaaaatgtttattcaaagctgcaacctttcaaggaaatgagagaaaatactgacatagctaattattcacttgatctgtcattaacagtatgaggctggattgctttctattaaaatcttaagccaagatttgcattattttatgtgattacttcttgggaagtacaacttaaagataccttattggaattatttttcaagtattcattctgtaaaactgagattttactttatattctgtgttcctaaaattgggagagattatatcaagtttaaaaaaattttttaggctgggtgcggtggctcacgcctgtagtcctagcactttgggaggctgaggcaggcgaatcacaaggtcaggagttcgagaccagtctggccaacatggtgaaaccccatctctactaaaaatacaaaaaaaaaatgtctgggcgcagtggctcatgcctgtaatcacagcactttgggaggctaaggcaggtagatcacgaggtcaggtattcgagaccagcctggccaagatggtgaaaccccgtctctactaaaaatacgaaaattagccgggcacagtggcgggtgcc

SEQ ID NO: 133376 - DNA, 1613 bp, Homo sapiens
ggaaggtgggggtaatgagataatagccagaagcaggactttacatatataaagggcgttctgatacaaacccctagggtaatggctttccatttttcattagattctataaaaaatacattttgcttcataacctagttcatacacatgcacccaaaaaccaaaataagtctcactaaagagattatctaaattaatcagcatgggcacgggtcaggggagactgtttttgccccctacggaaggaagtacagcttaaacagaggtttaaaaactagtaaaagtttcatttatttgaagggggagtgatgagttggggagattttatcaacaaaaaaggaactatatgtgataaggcacagaagcagaaaagaacctctcttagcgaggaacagcctgttaaattaaataaatgaatcggacagtgctcagaaataaggctagagaccaaggagggtagggggaatcatgtatagcatgccagagaatttagacttatttaagagggcttgaaaggcccattggaacattttaaacaggaaagtgacatcacctggtggcagtgtagagcatggattaggggggtatgaaatagatattagtgagtgattttataacattcattgaaaagtcgttgagctaaaaatgtggctaagaggtttggagagaggtccataggaagtagaccttgattgaatgagaggaatgaagagggggatggggaaagagtgaaatgcaggtggagatatttcagagtctagagtttaaggggagagacctgaaatcttagagatttagatttttagatctaggtaacattgtagtataaagggtagttaaagcattaggtttaggtgcgataaaaagaggaaaacaaaagaccaatctataaaaataaataaataggttaaaaaagagtttgaagaaaccatcagagaaaccaagattgaaggttaatttcaagaaggaaggaaaggacaacgatgttaaatgctataaagtgatcctgtataaattgaagattgaaaaacacctgttatacttcgaaattgttaagaggttgtcagtgatcctacaagttgatgatagatgttatattacaattcattttgggcctgacagggaatattggtaagtgagaagtaaagaggtttgattctgaaaaaagaaaaacaaaaaacaaacaaaaaaaacaactcaggtacagtaggtagaatctagatacagatacatgcaaaaaaaaaaattatttatttatttatttattttgagacagagtctcgctctgtcttccaggctggagtgcagtggcacgatctcggctcactgcaagctccgcctcccgggttcaggccattctcttgcctcagcctcctgagtagctgggactacaggcgcccgctaccatgcccggctaattttttgtattttttttaggagagacggggtttcacagtgttagccaggacggtctcaatctcctgaccttgtgatccacccacctcggcctcccaaagtgctgggattacaggcgtgagccactgcacccagcccatgcaaacattttttaggcaagtgcatgaactctgatgtggaaacagcttcatgctttc

SEQ ID NO: 133377 - DNA, 1008 bp, Homo sapiens
cagtccctgcggtccgtggagcggccggagtcagggggtgggggagggaggaccgaccgacactctaagaaggtctttggtcctcctcggtgaagagaagggttccatttcatttcctttgcttttctctcagtggatgaaaagatggggtcaggttcccattcccctcactggcgcactgagagattcgcgggtgcctaaaagctttctcctgaatgtccttatatctctgtcgggcgcgattttagattgaatctgcacggggcttggcgatttgtgtattccggtggggctgtcgtagggttctttttctttagatggttgggctttaatcttatttgttttcgaactctaaggtaggcttatcaggaatcgtttttgaattggaaaatttaaaggttttgtttgggattttttttaaccccgaaacaaagttatgtcaaattagattgtactgtgtgggggctctcgtgaaggaaagagtgtatttaacctggggtttttgtttaaaaaaaaaaaaagttcagatctttgatctttggtgagatctctgccaatgccagaagagaattttttgtaaatgatgctttaagtcagtgtgaagtagatttggtaagcaaaaggatgaataacggaatacagagggtgacctttaaatttcgctgtttatgaaatgtgttcctgtttaatactttttgtgatatatgatgcttgatctatagatgattcatttggaatttttttatgcctctaataaatctttggagatcttgtgccaacatatgaaactataatacctaatgagtcggagtagaaagccagatacatgttgtaataacgttaatctgtttagattaacagggaaatttacattaaaatgaacttttttccgtaaagagtttctctacatatgtttatagcatgaatttcagttgggtgacatctaatgatagccagtattttgaaaattgtcatgattgctagtattctaatttgagactgctcaac

SEQ ID NO: 133378 - DNA, 1174 bp, Homo sapiens
aggtagtattttattacaggtaatttgcattcttcattaagaatatatattaattttatcccttagatttttatattcttgtcatcaaaatcctctttctgctgtttctaagagtgagaaaatgctctcaactgaagttaggcaggtcacatgtgaatactgagctttaaaccaaatgaatcatggtacaatctaatttcttcctgatgtgagttgactcttgaattcattgttaccataaatagggtattcttgtgacatattaatatgaccagagcgaggcacctatctttgaggaagttagttttaagatggtcattgtcctcttacacctgccccaagtaaatgacttacgaagcagattttttttaaagacaaaatcatttggtttgtggacattaccaattattatgtttgtaagacttaactccatacatccctattaggaaatctcattcttcttttttgtttaatacatgttaaacaatagtccatcagtggtttgtctcttttaagatcactaacttggggcataccgtaccggttggacaagatctcaaatggtgacttaacttttaatgagtgcttataaaaacatgtgtgttgcctcatgacactatgcaattgctgctttagtggtgctttttgcattccagttgaattgtacataggttggcccatattgctcaccatttagttagatcttcattgtttagatctcagtatgttgaaaatctgggaacagcatcatagaaaactatatcctcctctcttagaacattgcttagcaaaaattatgttttgttctctaaatgaacttttccaacttcgaaattttgtgacttttaaataatgtataatactctaatgttattctaggaacaagccagcatgtttggccttatttacaaagcagttaatataccagtgttagaataagtcaaaacactgtaccaatgaaaatgtgtgctcttccaagtagtatatgtgttttattttaatatttagaagatctaaaaagctataggaacacatgttccacttgtaacttaatagcatgccttaaacttaaagatatctttttatggattctgcctctgctgcttctgattaattttgtgacctcaagcaaatctcttaattctttgagccttaggtttctcatctgcaaaac

SEQ ID NO: 133379 - DNA, 1094 bp, Homo sapiens
ggtgggattacaggcctgagcactactcccggcctacaatattaagtcttttcatataaaatatgggatgtctttccgtatagttaggtctttagtttctttcagtgatgttttgtaattttcagtgtattggtcttgcacttcttttattggatttattcctttattctttggtagattgtttcttggtagtgtatagaaatacagttgagttttgtatattgatcttgttttaacacatttttaatgacactttaaaaaattttaagagtggataaatatccagcagttttattctgcagctgtaaactgttatttagaaatgtgatataattaatttagagtgacataagataaacacctgaaattgaaacctaggaattttgatttcttaggctttttaactatacatttagacacatcttattttatcaaataagtctgaaataaacataaataagttaacattttattttttattttagtgttaaatgtttacaaaagacagtgaaggattcttatcacataatgtgcaggccatgtgcctgtgaacttgaagtttgcgcaaaatgtggaaagaaagaagacattgttattccgtgagtgtttccttttatgtttgaattttactcttagtgattgatacatgaatttcttttaagagatgatccttgctaggcgcagtggctcacgcctgtaatcccagtactttgggaggccaaggcaggtggatcacgaggtcaggagttcaagaccagactggccaagatggtgaaacctcatctctactaaaaatacaaaaaaattagccgggcacagtggcaggcgcctgtaatcccaattactcgggagtctaaggcaggagaatcgcttgaacttggggggcagaggttgcagtaagctgagatggtgccactgcactccagcctgggtaacatatagtgggactccatctcaaaaaaaaaaaaaaaaaaaagagatgatccgtgatccataacccttagacttaagttgtatgtcaaactaatatagacttttaaaattatttttctatcattacaataaaagtgaaactatatttttaagaaaataaa

SEQ ID NO: 133380 - DNA, 1532 bp, Homo sapiens
acaggaggagaccatcaaatgaattaatatcactgtattaaaagtctgccgggcacagtggctcacgcctgtaatcccaacactttgggaggccaaggagggtggatcacctgaggtcaggagttcgagaccagcctggccaacatggcggaaccccatctccactaaaagtacaaaaaattagctgggcgtggtggctcatgcctgtaatcccagctactcaggaggctgaggcaggaggattgcttgaaccctggaggcggagattgaagtgagctgagttcgtgccattacactccagcctgggtgacagagtgagactctgtctcaaaaaaaataaaataaaaagtcaatttagaatgtgaaattctgaccaccttttggctttgagtattttccaaaagatatttgaaatcctaatgaggaaatcagaaaaagctatggaaaaatagacaaatttcatacatgaacaatataaattgtgtatattacttaacatcaaactaaacaagattcagaattgatggttgtataagaactagctcatgtaaaaataaaataacattattacattgcctcaaaaattggtcctcggtaagtgccttttgataaatgatctcaaataaatgactcatagcaaaagccctgtcgcttatgtttaatttttacaaagtaaaagcaattttttccaaataataatgtttaacaagcgtatagcaattctgctttgtatttttatatatttcatcacattttaacttttttctcgtgaaatgtacatacagaaaaagtgcatataatttatacactttataagtgtatgcattttttataataattataaaggaaagttcatgcatttacacacctcggtgaggaaactgccagcatcaggacaccccagtgaggctctccctcagcaaaagttcatctttcttcccatagttggcactattctgaattttgatcattattgtcttaatttttttactacccatgtttgtactcctaaacaatataaattagcttggtctgggttttgttgttttttttttttaactcttctttttttattacgtttcttattttatttctttaattttatttattttattaatttatttttctgagacagagtttcactcttgttgcacaggctggagtgcaatggcgcaatctcagctcactgcaacctccacctcctgggttcaagcgattctcctgcctcagcctcccaagtagctgagattacaggtgcccgccaccacgcccagctgatctttgtctttttagtagagacggggtttcaccatgttggccaggctggtcttgaactcctgacctcaggtgatccacctgcctcggcctcccacagtgctgggattacaggtgtgagccaccatgccaggccatattttttattttttattttactttttttttttttgagatggagtctcgctctgttgcccaggtagagtgcagtggcatgatctcggttcactgcagcctccacctcccgggttcaagtg

SEQ ID NO: 133381 - DNA, 1047 bp, Homo sapiens
atgtttctcgtctctgcaacacttgtggctgccagctgacacaaggcaggtgcagtgtgagtggctgccagtggacagtgacaaaaacaagacttactgaaacaaacaagtgtttcataaataatttggaaacaattttggaatccctttcttggtcatggtaatagtacacttcagatcctattaagtgatttatgtgtgggaaatcctcaactggtaatgctggaaatgcttaatgatgctatactactgtccgtaaatgtgagaggatatccaacagaaaatgaaaatcccagaggaagcaagccacagtgaggggccaggctgtctctgcaaggtcatgaacatctgatataaagtttgcattgtagctgtgtggttacacaagcaggtacaactgaaatgggccctaggggatagattagagacaaatcaggaatccacaaaacagctccatagtatgcttggaccagcatctaaccagtcaacctctgtatatttttccagtcatacagcatcctctttttctatgatccacttgtcaagtaaattttgcccacacatgggacatgcttctagtccgaaaaataaatcatgttcttcccagctgtaaactaattgcagagatgactaaaaacatcatggaattgaacttaaagcagcaatttttcttttcttggttcactgctgcattaaggagttggaagctttagaaggagtttcaactcaggagtcactgtcccttgagtgagaccccacctgtatggaggagctggtgattctatatctgcacttaacattgttagtagactgactactatatcttgctatttatattctatttttatatgtagtagatgtgattagttaagtccaaattcaattaaaattatcacagtattcctgaaattatgtatttcctcaatttatgcttaaggttcaatttaactattgtggggctatgatttttttgctgttaaaaaggaattcttggcctggaaatggttgggaattactgagaaaaataccagccttcattgtgctgta

SEQ ID NO: 133382 - DNA, 1048 bp, Homo sapiens
ttataagaaaagaggtataattgactcatggtctgcaggctgtacaggaagcatagtggcatctgcttctggggaggcctctagaagcttctaatcatggtggaaggcaaagtgggagcaggcacattgcctggtgagaacaggagcaagagagagagagagagagacaggtgcctcacttttaaacagccagatcttgcgagaaatcactatgatgaggatgggaccaagaggatgttgctaaactattcctgagaaatccacccccgtgatccgatcacctcccaccaggtcccacctccaacactggagattacacttcaatgtgagattagggtggggccagcatccaaactatatcaactgttaaggaaataaaagctttctgctattttatatgtatgttcctcattcaggttacacagttcttgtgttgtattctgtgtaacgctctcactggctttgttcctgtgaaggccagtggataaaacctcttatgttattcatgaggggtattcatctgccctaaagcagggagctggggaagaggggccaattctcaatcagaaaaccagagctcaggtgattctcagagctcagaggcacaaagaataagcaatattatatgattgggtctagctctgttgtgtgtgtgtttttttccaaatgtgtatgtgtgtgtgtgtatatatatatacacacacacacatacacatttggaaaaaaacacttggaaaaaaacacacacacaacagagctagacccaatcaatatatgggtctatgtatatatacatacacacatatatattatatattttataatatataaaaataatgagaatatatattatatattttataatatataaaaataatgaggatatatatatatcctcattatttttagtaaggtttccttttaaagttctggccctgctcctgaagacataaagaagggccttagatccttgggagcagggttcttacagtgtggtctcagggccagcagcagcagcagcagcatctccctggggactcgggagtaa

SEQ ID NO: 133383 - DNA, 1094 bp, Homo sapiens
ctgttgcccaggccagagtgcagtggcgtgatctcggctcactgcaacctccacctcctggattcgagcaattctcctgcctcagcctcccaagtagctgagatcacaggcatgcaccactacacctggctaatttttgtatttttaatagagacggggtttcaccatgttggtcaggctgatctagaactcctgagctcaggtgatccacccgcctcggcctcccaaagtactgggattacaggtgtgagccactgtgcccggcctcctgtgcttcctttaaaagcccctatgtctcatttctcagaggcctgaaacatacactgaagagtcagagtagcagcatcccagatgctcagcttcttggccccccacgtggttctttcaaaggctggcatttgaggaggagtgaggatcactgcaagttcctctcagccacctgtcagctctggaagcttcagattccttatcagtacagtgggatagccggtaatggctatctcagttgtaaaaagtgtgcttcttggaacttcagaagacgtaactgagtgctcgcaggcaaatgttacatctctcctttgctaatagaatcatttcagtctcttccgtgccacatcctccagatgcccctaatgtattgactgcagagacatttaaataaattaggaggcattaaccactgacatttctatttcagttgcaggaaaaatgtaatcaacaaggaagccaacctagtattcagaggatcaagggaggttcctggatccacaggcccttcgggctgatgtctcataaatagatcacattcaggctaatctcatatcacgttgtctttgggtgtgaaggacttgaaaaaaataaacttgttagctaaataaatcctgaatggataggggcttgagtgggaggtgtcagctgaaaagatgtgatcccatgtctgtaggccatctgtgtgtttcgagggaaattatgactgagaggttgtgagaatgaaaggaagaccatatgacaccgaggtgtctctcttgaaattagatcccacaaaaatccagtatggcctgtgttaaccttgcgggaagagaaatgccacacca

SEQ ID NO: 133384 - DNA, 1051 bp, Homo sapiens
ttgaaagggctatttctcagatgagttggaggtggtgggggagatattgggaatattgaaaaccaaagtcaatttcagatcaaaattccttctacctacaagggtctgaggtttctgaagtgggctaattgacaatagccatcattttgtgatagccaggtcaggcttcgagactgattgatctgccaagcattttagatatgggccactgactcagaaattgcacaaagaatgattgcagcagtgagtagttacaagttcatgcagttgcagaattctcttgacgagagtactcttgaagcactctgatgtgttctttgtgcagcctttgactgaataccattgaatgccacctgacggagagaaaagaggtaaggaaatttcttgggaggtacaacctatgtggcctcagatgctaataggttaaaaagaatactaagcaaaactttagttttatcaaggtacgaatctagcatttccaccattaagaatggttcatttcattattttacctttaagaactcccacttagactattgtagttgggtacattgcatacacaagatttgaaactgtaaaacaaaaaagctttcaaactcagattgtaaaagccatgcaattgccattgactatgtagaatttctgaagtgcaagctgttttgaagcttcctgataatcatcccccagttttatccaggttgtgagttattcaaagggctgaatgtacagaaggatcctttagatgtgttaagggcctctcagaaatggaggtgtatgtatgacctcacttaattccttccctgattaaagaagtaatgcatgatcactgtagaaaacacaaaaaatgcacacaagaacaaaataagtgacagtaacatcctgtaattctaccaccccagtttcagttgtaggtaggaggacaaaaggagctattccccaaagacagcaaaatgtgatgactggaaacttggacaaaatggtgggttttcagctggggatgattttgctctccctttcccagcacatcgggtaatacccagagacattgtta

SEQ ID NO: 133385 - DNA, 3116 bp, Homo sapiens
tgtgatgtaatgaatttgaactgccctgattgaaaagtttgcatttaggaaattataacgtggaaaaactgagcatatgattaacatctcccagctctttaaaacagaattaggattttgtttttagtactggctgttaccagtgttttaaaggaatttcttgagtgaagcgatcattttacaaaattagagaagcaagtagtatggtgattggcaggaatttctcagatttgaatcaagttctgatgttaaaatggaagattctgtttaaagcttgtattttcaaggaatacttataaacatttttatcaggcatcttcctgtttctcttaaatacttccttttttgacttaaaaatgttagccagtgaatgcttgacaaatttgtgtttttgtccttttcagttgtcactcagcccagtccatcagtttctcagcccagtacttctcagagtgaagaaaaagctcctgaattgcccaaaccaaagaaaaacagatgtttcatgtgcagaaagaaagttggtcttacaggtattacaaaacacaagacaatgtatgttttacttctgcagttaacaaggagcttttggtcactccctaagagactagttggtcttacacataaaaaaaaaaaaaaagcctgactagctgtagtctaggaaaggtggaggaggtggtattggggtggaaagaagttgggttttacttccatttgtctcctaatcatataaaactattaactcaggccctcttattttattagattgataaaaagtttttgtatacctagggaaaatgttactgaactaacagtaagcgccacctactttgagctatgcagggaatgttcttggtgctttttttcttgtctccttcaaatctcagaccttgatggttgttttcacttgaggaagcattacttaagatatggtaggactgtgttttgaatccagcttagcctaactccagagcctgtgtaaattttatcctgcgttgcatctacaggagtcgatagagggagagcatctgggagaaattagctggcagatagcccattttgttttctccacgtggtttggcttaccaaacacttcgctattgcccttgcaaggaaagactgaacatagttatttgaatttctcaccatgtcaaaggaagttaaaagttccttttccaggttaacgtgatagactctgtaagagttgactgtgtcttatcaccaggaagtggaagaaaagagttcactgtcttttatgttacaaagcaatgaaaatctggttccttttctatagtgactaaggcttttttttcttttaattgcctcaagttctcaaatgactctacttcttcgtttgtacagggtttgactgccgatgtggaaatttgttttgtggacttcaccgttactctgacaagcacaactgtccgtatgattacaaagcagaagctgcagcaaaaatcagaaaagagaatccagttgttgtggctgaaaaaattcagagaatataaattacttcttgtgaagagactgaaactttgtttttattttaatatatcgtaggaaaacattaaagagcagatgcatggccatttttctttgatgttctccagagttttacattacacttgtctgtcttataattgatattttaggatgtttgggtgtttgttacaggcagaattggatagatacagccctacaaatgtatatgccctcccctgaaaaaaattggatgaaaatctgcacagcaaagtgaaacacacagataataggaacaaaatgtagttcccatgtgccaaacaaaataaatgaaatctctgcatgtttgcagcatatctgccttttgggaatgtaatcaaggtataatctttggctagtgttatgtgcctgtatttttttaaaatggtacaccagaaaaggactggcagtctacttctaccatagttaaacttcaccctctttaatttcacaacatattctttggaagcaggaagaaatgctcataaagaggatcagaccttctttcccgtgaaaccagtatttggcgccatatataagcctggttaaattggtcatctaaagctgtcaaataagacattctgtgaaaggtaaacatcgaaactggttataagtaaaaccatcaagccaacaacagggtcttgagataacctttgaagcttattgtactggcctgcaccagaagatgtctgcattactcattgctaaaaatgtgtagcacagaactgcactaggattaatttgtttacaagaagaaatttaaactctacgtttggttttcacatacagcagctctattgaataacatgcatctgaattttaagttgcaaaggtatctgaataatttttcatgtgcatcttttgtcgaatgttttggttcaagaaagaatgtttaaagctttttaaaagacttcagttcttaatgtaactgtacccttctgcatggaaaatcataaccaacatggctgcagtagacttcttagtggtatccagcaccacttgcagagggctgctttatcatattgtacttgggtgtaggactctagtgttcttgggtgtattgcatgggctgcattatctacagcattgtacaataacaactagaaaaggcagtatacttcactgatgcttgtctggtaataatcacttctgtgttataatggaaggttttttgtgatgtatgaaacttgtgttttttatatataaatgagtatagttagtgttgtggtaatgcctgttttcatctgtaaatagttaagtatgtacacgaggcactacttctgatttattgcaatgttcagtcctagtttttacttttattcttaaagcattcagttttgctttcaattttatgtaccttagttctgagttagacctgcagatgtgtacagatagttcatatttatgtattgcacataatcatgctattcagcattgatgctatattgtattatgtaaataataaaagccatgtacagagggaaacttcacttgttcattgggtttttaagccatagttggagtcctaaagggggaaaattagaaaatgttactttacatggctatataattttttttcctttgccatcgctgaactt

SEQ ID NO: 133386 - DNA, 5630 bp, Homo sapiens
gtcttttgggcttctcgacgtcgctgcgtttttatcctgagatccgttttcatggaggaaatggaacacctcctttgtttggtgcatttaggctgatgaatgtgaaattttttgctcgctttccacgcactccgtggaggtgtgttttcggggaagggtcggattatctttattgattgagtgtctcctaagggatagcatctaaggagataccaagataaaggaacatataggtcacacatccccgttcttaaacctgggatttagatacagacttctaaaaacataaacgaatgtattttattccttatttttaggattttttttaaagagtaggctttcagaactcagttggtgaaaatactgcaattttatctttgaagttttttgttaaaatgtttccccacacccccctaaaaaattaaggattctttgtagttgtctcctgttttctatctcccaggccctgaaaaggagcctttaaaagtcaattctactccatttggcaaagagggaactgaaatctggaaagtaaggacttgcccaaggtcactgacttagtggcagactagagacttgaactcaggtctccattcccaggtgagtgggaattcatgccatctcatcacatcatgtgcacctgaaagaactgtattccataggtgtaaaagctctttgttcagaattggaattggagaattgttcagttacactcgggtgtttttttaagctgtaagttagaggaagccataaactttataaaatctgcattctagctatacctgatagagctgacacgtgcatgctcaagttgctaattactttaaaggcaataaatagtaatggtatttttttctaaaatacaaggggaatgcaatacctaatgggaacacacatcccccacttcatcccctaaatcctcactaaatgaggattcttttttacactgtctccactgtgcttagttttttatcaacaaccttgaccattttagctttgactatgctttcatcttctagattgagattgttctgtagtttttcctacattaggaaaaaactagcagccctttttttgttttcttatgttagatatatgaacgctgcatccttagttcttggggttgtgtaggagttggcaggctttgagatataaatagaagctgatttcagaggcccctgttgactaggctttatgtgagagcctccatccagctcagcttgtcacattgcagccttgtgacaggctgaagcgccctcccatgtgatctgagcttctgagaaatattaaagcaagctgtgcacatgtgatggcatttaaaagctggctttctaggggaaaaaaatctaaaagatgggaacccatgtagaagactcatgtcctggtacctcttgtgtgtctcgcagttgaaagttatttataatgaaatgaaggtagacatgttctctgaagcaaagttggaatactttgttatctctgagtgtgtgaaatctttagatggagtatcctccattttatctaaaacaaatattttaagaatcagattaactaaaattacttaggtaggttgatcgcttggccttaaactttaaagccaatgtcacatgagactgggcctcagtgtagaaaatgtaagctagcatacttaaactggttttaaggagtgacccaactttcatgcatagggcaaacattcacacatattttgtgcgtggtgggcatgcaaatacatacatatttatcatttgaaagcattttttgctcctattatgctcatttaaaaacccagctgaaagtgtttattaataaacttcctaagtgatgttgaaatgtttacactaccctgctccaaaatgagtcagctaaattccagttaatatttaaagagacagtgtcaactaaattaatactgttgttaaaagtaagttgtggatcttggtcactccacacaagctagattgtcttaatatttgtatggtgcacttttacttacaaaagggaagataaaatgttttggggaataattaccaggggtctggccaggtcaaaattggttagtccccttctcccatcttctaattttggtagttaatacttgttaaaacatcgttttttaataactcactaaaaagtgtattctagtatgtagttggaaaaaatgactgaccacaagttacagcacacgaattttcctttaagcaaatgctctcaaatatgctttttgtacatatgcttatacatgtttaagatgacatgaaaaccctccacaactttattttaaaataatttttctttaatatgtattttctcatccagaggaaaacttattaataatttagcacagcgttttaacaagacttttagaaaagcaaatcttccttggaaacaaatgcttgctatgtaaagctttttctggtaacccagcattgaatattaaccattactaaaggttatgtgtatatattgactttaatacattgaatttgagcttggaacggttttattattttctggtatgaggaagacaagcacttgttaaaattaatagtgcctttggctgagaaatctggttcataatttgtgtattgcaggttcctaggcactggctttgacatactctgaaacttcaaatggagaacgtaaaaggagtttcgtaaaccagctgaccctaaattcttagagatttacttgttggtgccagggtagcaggaagggctaccagttctcttttcagccttatatgaagatgtttcagcattaaaaagtacagatgctctgcctcagcagatttgtcaaattactgatgaagcccagatatgtacaggtgttttaagaaaactttattcatccagtttaaagaactacctataaatatcaagactcagtgataattgtgattagccaattaagtaaaaacatttgaaatggtctgcctgtagtgcagcagagtgaaaagttaaagataccagtttcccaaattgattaaaacataaccctgagagctaacagaccttttcataaattgaaaccaagaatagtgataggtaaaaataccctaataattgataaaatttctttttgggtttttttttggtcctaaaacagtttgcttttataaaggcaacaaaatattgataattatctctgcccaccctttttaatgattaacggaatttgggcttttgttaaaacttgcgtagcaattacaacggtataccgatgattatattagactatattttggtgataacactaatttctgaaatttcgtttcatctatagcagaaaaatatggctcaggagactaaccagaccccggggcccatgctgtgtagcacaggatgtggcttttatggaaatcctaggacaaatggaatgtgttcagtttgctacaaagaacatcttcagaggcagcaaaatagtggcagaatgagcccaatgggtaagttatttccaaggaaaaacacatttgaaagaactggtggacagaaatacagaaccaagaattggggctgagaatgctgaaagcacatggagagaacacctgataagagcttgaaattcaagcaacagcccaagtgcttgacatgactgatcaggaatgaatgactatctacaagcatcttatagcttttcagttttcttttttggggttattttgtttcacacttgtgttcattggattgactttttaatattttttgtttggatactcaagtataggattacagcacagtgaatgcttatatcactaacctaattaaatgcaagtatttattactacgtcttgatactaagtgagtttttgtagtgttcattggttccttacaaatcctttttttaaataggaacagctagtggttccaacagtcctacctcagattctgcatctgtacagagagcagacactagcttaaacaactgtgaaggtgctgctggcagcacatctgaaaaatcaaggtaagattgaacgtttcagagtttttatgatattacaaagaagaaatcaagatgtctgtactggtccaataataagttaatagatacccttggctttgcaatcgaggatttcagtgtcttttaatacatgactcttaagtcattgagtaaagatgtgtgttacttacacctgactccctaaccccctcaaggatactgtgttggaaatgctgtgcttttttatttctttgtaattgaggtttagggattgtcgagtgagactgtagaatattattgggccagacaaggtgttttggcagagctgcccttttgcccttaaacaagttacaggcacagctaaaaatccctagctggttgtaaaatatggtaacctatacaaaatgcagcctcgagttcatgagccatttatcaaacttttttctcaaccatttgtgctgggcatccaatttttttttaaactttagattatctagctccatttgctcattttggaaatattctataatttaaagttgaactgacaacttattcattgtctcaagaagtacccttaacacctttaaaaattgtttgcttgaactcaaatagaaatgtgcctgtggctgccttgcctgtaactcagcaaatgacagaaatgagcatttcaagagaggacaaaataactaccccgaaaacagaggtgtcagagccaggtatgtttttcatttaatacttgttcagttctgaatttgatagtgcaagaaatggctggtggggggattctttccttcccattgaaggaccaaagaggagggagagccataaaatataggccaagcaaagaactactatctttaaaagtatcttgagtatgagtatcttgaagtgtaaaatagtcatatttattctcagtttcttctctgctcatcccctgcactacccttgtgcataatgggcaaagtctgtaatctggagattggatgtgttaaaaacttgatgaagttaaatttcaagggtataaggaataattttataaccaaaagcagtaactttagttttgatattgtcaatgttgtggaaaacttttaagtagaacaacatatttgaacactagaacttatttgaagtacaatattcctatcatattttgtgggagtttgaaactcagtgtggaaaggcattttggttttcatgagatatggtgactttggaaactttgcttatatagcacaaccagaagtgccctgatggtggaagaagactgacttgaattacctgtactaggccctagaacaaaaagatttctgtgctttatatagtgcacgtagcttattttatcaatttgttcttttttggcagagtgctgattaaatgcaatataaaacttctgttgtgaaaaaatactgtcagtggttatacagtctgctttggaggctggcttttgctaacagcagtcaagtttgtttattgtattaatcttacaaagttaaggccaaattctcaagtttggcaggtgaatctatatttggcattttgaaatgagctccatccttaaactgaccacattagtttgcccgtgatgcctttgtttgggtttttgtttttggttttggtttttaaatacaaaattactctgaccttggaagaatagtcttgggttagagctagtctgcatttattattacttagta

SEQ ID NO: 133387 - DNA, 1012 bp, Homo sapiens
ctgaaaataaaagtgcaaaataaatatcccatctggaaataaaagtgcaaaataaagagggaggaaaaatcagcccttccatttcttttcctttgtaatgccagttgaattggtttagtgagtagttttgcaagacttgtttcactttgtttttggacatagctgagccatgtacttcaaacagaaggcagccaattactaacttctggttgctaggtgtggcttcctttaaaatcctataaaatcagaagcccaagtctccactgccagtgtgaaatcttcagagaagaatttctctttagttctttgcaagaaggtagagataaaggtaagtcttggttttccttttagttagttttggttgttttgaaaacttttctcatcactatgttaaatgttactgcttctacaggatttatggttagttgcatttaacatgataagtcattcataaatctttctgtagaattacattggatatttatattttaggaatcacaaattacaatatttttgttctacttagttaacaaatacaagtaaaaataagataagtttgcttaatactggctcattgtactcttggtaagttaccatgagaaagaagggaagaatgtgctttccctctggtagccttaaaagaatgtgtttttcctttccttccccttgaaatatttcttcccaagagctgtgtgttttacagagaaatcgtgatgggggctgctttttgggggcaagaacaaaagtgataggagtgggctgcagggaactgtttcaaaatagtaggactttcataatttattttcttcttttgtaaggaaaacaagatagattcagacctcaaagtgctaatcatgctctttgtaataaacatttaaaaatatatgttatatttgcttatgctatttaaaataagaaggtccgcttattacttttttcatttaaagagggtgtggccacattccttttcttgtaggctctgtgtcatatacagtcttttcaagtgctggct

SEQ ID NO: 133388 - DNA, 1048 bp, Homo sapiens
cctttgagtgcaagatttagctctgggcctcttggaagtgaaggcgatggaaaagttatgacaattaccaaagttcaccatcttataatagtatactgatttctactgttaaatgtaagagaaatttagtgcacaggtctttatataagggaagatccatttgctgtggctcttagaactgctgtaggaagtgctatagttgtcaatcacatgccgtttctaataactgtcaacatttgcaaacatttcgccaaaatatataggaataccaaaatggccaggtaagttacattcctaggagaggatgaagtattcacgttatgattaattgggtatattgctttaaaaggtgtagccaaagttgttattctaaaaaattctttgagtcagttgccttgattttgctaaagctttctaaagaaaaggatgttttgcatgtatcttagtttgaatttaatattcagtgtttcagaaatacaccaagtacagtaagcatgacatgaacaaagttctggacctggagttgaaaggtgacattgagaaatgcctcacagctatcggtatgtagtccagcagttgaaagagttttctaactagaaattgtattttcaaagctatcctatacttaacaagaacaacagcaacaaaaccaataaaagaaaacaaaaaacaatcagaagtagtgcatctgtttcaattgaagcaacgtaaaagattggcaaagtactataaccttaataacaatagatattattccccttttcaaaaatagagagagatagactatacttattgagcacctacttatatcaaacaatgtaccaggctgggcacaccacagaggcaattcagaatggtcactgagagcatgggatctggaataaatgtaacatctggataaatgtaacttcaagtcctggtctactgcttgttaattgtacaatcttgggcaggtccaggagagtctgattcagtgggtccgagttggcctctaaaaatcggtactttttaaagatctcccaggttattcagacaaccatcagggttg

SEQ ID NO: 133389 - DNA, 1036 bp, Homo sapiens
tgaaaaccttgaattctgaaaataagtgtctttctgccctacttatgttctgcatcggctaggatcgtttacctactcctcttcatctgtttcctcacctgtccaatatgataccaatgacagctacatcattgaataggtgtaagaattaaataaggcaataaatatcaaatctactaggttcttttttaatttttttttgtttattaaattcagatgatagtgagataaattaccaggttcttaactggttgtatcattatttgatacatagcaataatatacaatatttcaacttttaaaagttggcttcaaacagctacctagaatttaatatgccttttatatttctgggcctggctttttttttctgcacattgtgaacctgcctgtggttctgttgatcttgcatcttgcctgataatgagctaaccattatcactaaccttagagtcttacatattctatagtctatttcctatctattgctccacactattgcaggcctgttagacatgaaaataaatggtaaaattctgtgatttaacagattaattaaccagatcgaggtgttaaattgaggcaatcatcttcatgtggctaaccctgtatttagtttattaggcaaccagatgccaattggcattccctatcagctagaaaaatacataaacatagcatcttcctggtctctaaatcctgctgttaactaaaacttcattgtaccactgcattaatcaccaagcttgagctgaaacttttgtttttattctggaaagataatttattccaaataatgtttcacttaagggtctaatcgtaagtccaagatgattcagatggtgaagtccagctgtaacaacaacagtatcatccagaaaaataaccacatgtatattgaatcccttgaaagttttccataacagatctgggggtgataaatcatgcaaactcattctataattaactaaagtgtttcttttccttcaccataatccaaaaggattagcccatgacatttagctggataaatcag

SEQ ID NO: 133390 - DNA, 1041 bp, Homo sapiens
tttttaccacgcttgtcctggcagaaacaaatgcacaggttcctgtctccttcgtgtgcacaggaatcctgaggggaaaaaccttcctctatccagccagctcgatcagctgagtcaacccccacctgcagaaggataacaaatgtcacagtcaggttcccatcacatctagaggagtaaacataaactttgaaagcagatctttagaatttgcattcagcatggccactgactggtcaggcacaaatggggaggccatttaactcttggaggctcattcacttcatcctaaaatggggattagcaatatgggatattgcagcgcttgaatatggggatgtattgaaagttctacgaaaattgctatgtactacagaactgcaaattttctcttcccttctatgttcactgcgagcaggtttttttttttttgcggcgcttattggggttgaggggtcttccttctgttttgccaagtgatagctatctagttaactagtgttaagttgcatggagttcatggcttaatttactcacaggccctcccttccaattttgtgcctcaaaagagatcttctggtacagtgtttaacccagggttatttcagtcatggggatttggagcacgttggtagttctagttggagtaagattgcggtgcctttttgtatccatcaaatcactccattattttacacaaacaactggcccacaggattttcttgagatagcccaagtcatttatagtaaatatatctaacattatcattgctaactcattctctgtttcagaaatgaatgaatccaatttcccagtgtaagtgatcagcagtgtttgtgaaataggtaatgtctaagaaaagtctttgaaaatcagaaaaagaagcagagtaccctcaagaagaaaaacaagcaaaggtgaagacagaaagatgagaaggttggagagaggtggtagaaaactaatctgattaggctggggaaatttctcaggagagaaagaagttcccaggtcaattacatttagaaacacttcaaaca

SEQ ID NO: 133391 - DNA, 1049 bp, Homo sapiens
gtaagaatgtgaggaaattgcatatcgaacaactgttccaaaattagcaaattgtagctgaatttgagacggtaattttcactcttcagaatcttttaattgtagatcacaaaaatcttatcttctttgtattaaactattttggtaattcggtcaggtgcccattttcccaatctactaagtatataacttgaggtaaaagtaacaaaagtttcacacatacttcaattactgaagactagacagttttcaaacgtgtttttttccacatcttaactccatggacctcacttttttgaacaaagtatgtggtgccattttggacatttaattaactggcacatcttgtaaagaattcacacatgatctgtagctgttttgagggggttgcacatcagatatcaatgaggggccaatcagccacttgtgcatgtcatttgtacaagtgtgttttcccattcaattttggctccactctaaatgacaacgtcagtgcttgaattttttccacagaaggccaggaagcactgcattccctaagcttgatgtgacaaccttcaaccaaaggctgagcttttgttattaaaaaaaaaaaaaaaaaaaaactgggcctaatgattgcagcaaacagcgttgggattttattgatgtactctatgtgactgtgacagtgttgacatgaaatcaaattcaattagcaggggcttgctaatgacttacactgcttcaaaaactcacaaggacaaagcacttggccagaaatctcccggctactgtctggtttccaactccttttggttgcttctcagagcaataaccaactgccagattgtctccatagattaatgttaaagaacttcactaatgaaactcttgacaacatctgtgtgtgatgagagggaaagggtagggaagggagacggaatttctgtcctcaggtgctcttgaagcaatttctaaaaccactgtggagcacatcgaaagaaacagcaactgtgtctctggaggataacttggctggacagggtatcaaagctgcaaggggaaat

SEQ ID NO: 133392 - DNA, 1015 bp, Homo sapiens
ttctgcctgccgggttcaagcaattctcctgcctcagcctcccaagtagctgggactacaggcacctgccaccatgcctggccaatttttttgtgtatttttagtagagatggggtttcaccgtgttagtaaggctggtctctatctcctgaccttgtgatccgcccaccttggcttcccaaagtgctgggattacaggcatgagccaccatgcctggccgcaagtagtactttttaaactagacaggaactcttttagcacataaagataggcctttggagcaggtgagcctggggaaggatctagagctctgaccctcccttgtccttgctgtctctcaggtggtgtgcctgtaccagactctggataaccccctcagcaagctcacaacactcaacagcatgcactcgcacttcatcctgtctgatgatgggaccgtgggcaagtatggaaatgaaatgaagctcagaaggaacctggagaagtacctctctctgcagaaaatacactgccgtgagtatcacaggggctcagtcacccagtctggttgcaggcctgctgaggtctttcatggtcttccctgaccatcagagctcactctcctagtcccctcaagctagcctccttaatactcttcagccaccccccttcccacatgggcatctcccctcctctctccctccatgtatccaatccaaatgacacttcgaggatccactaaagtcttcatccttccatgatccccccaaagatttcttcctctctctcaactgtcatccacaagtctgcactgtctgatatcctgtgttcttccggctgtgggttcaccatggtcaaggtgctcacttatcacctgcacagagtagaggccgaagttggcccctgccttagagcagccagagggattaagttaacatagggaacccgaagccagaagaaagcaggatataagaccgtgcagacttgtgggtgacagttgagagagaggaagaaatgtttgggggatgatggagg

SEQ ID NO: 133393 - DNA, 1052 bp, Homo sapiens
gtacttataacattgcttgacaataaacagtctctctgaggtagatactatttattatttctcattttacaggtgagaaatttgaggcttggagatgaaaaataactggcttaaagatacataggtaggaagtggcagtacaagactttgaaccatgtctgaccacaatgcaatacagtttgtcttctgttctaaagcattcttattaatgtcaacccattcttaaatccttcattacacaaaaaaaatcaagtttttctctttccctctcaatggcatttaccatttgtcttgaattttggatctaatgtcatcaacaacaaaaaatgcaagcaagaaccagttactcaattgcaaaaccaacattctggatgcagtacaaaagttagttaacttaatcactgatactcacatcacaaattgcttactttatttctttaacaatgaaatagtaataacacaataattcagttgtaacaaagccaccaacagagcaaaacaaaaacaaagctaattaagaagcattgcttcagctcaaattagttatctcctttaaacaggaaaaacgaccattagtctactggttctcaaccctgtctgcacatgagaggaatggagggaaacaggacaggtgtttaaaaaaatagttatatccaagacccacctcagaactattaaatgagaatctctcaagagtgaggcccaggcaaagatttttaaagtgctgtcagtgttgaaaactacaggtctaaagtaataaggaataaaaccatgcctcgaagcaattcaaaaccaagaagctgattatacaataaattttttcctctaatcctgggaaaacagggggaagcaggcaccgattcagttttcatttttctttatccatcttcagttgcccatagtagagcttaaccaacatcaaatattggaagctttgcaaacacgctacccaaattgaaattatcactactttacatttagaaagctcttttaaaacaatagcttttacaacaatcccgcccatcttaagtttgcatagatgttcaagtcag

SEQ ID NO: 133394 - DNA, 1115 bp, Homo sapiens
tcacaaattgtaaatattaaaatgcacagatttcatcgagtacatgaagtacttagatgagacaaaatttaaaatgtatatttgttaaaaatacaaaatagaagattacaaaatcttatatgagtttgcctttaaaacaaatttgttttctgaaaaaaacttaattttttctaagctattgatgctctttgatctctcttttttctctaaagcacaatgaagaattttggcagtataataccttccagtactggaggaatcctttgcctcctattgatctggcagacattgaagatttaagtgaagacaccctgacagaagcaacacttcagggcaggaatgaaggggctgaggttgacatggagtcctgatgtaaggagccgaagcagtgggattggctgatttgaggagatgtctctaagtgaattctcgtattcttaagggaaaagttattttccatacttgaagttatatttccaaacctgagaaatgaagaaagattgttctgacattaaatacctacagttactactgaacctcttaataaggatttgtcaaggatagagtacagttgtaggggaagtattttatgtatgcattcttagagcaaaaagttttgtttaaattctagaattgaaggtactgatcttataaaaagaaattctagcagttttagaaataggtgggaaaaactcaaatattcctcctatctgcaccaaaaagtttatttgtggtatataaaatgaatattgttttataataacttgttaataaagtactttctaatacattctattgactctgttagttgaacaaatagctgacttgaacatctatgcaaacttaagatgggcgggattgttgtaaaagctattgttttaaaagagctttctaaatgtaaagtagtgataatttcaatttgggtagcgtgtttgcaaagcttccaatatttgatgttggttaagctctactatgggcaactgaagatggataaagaaaaatgaaaactgaatcggtgcctgcttccccctgttttcccaggattagaggaaaaaatttattgtataatcagcttcttggttttgaattgcttcgaggcatggttttattcctta

SEQ ID NO: 133395 - DNA, 1061 bp, Homo sapiens
actccagccagagtgactctgtctccaaaaagaaactaacaaagactacaatcagtgacctaggttctattagaagaagctagagaaagaagagcaaagtaaatccaaatttagtagaagccaatgaaatgggaaaaagagaaactaagaaaatattccaacaaatgtgatgaatgaaatggacaaattccttgaacaagtggatctggtactacttacaacttagggtaaactaatttcaaattctacttctggggccttaaaaaaaaaagaacccagagcagcaacaaaaactcagaaaatgttatttaaaaagaaaaagaatattgtctacaaaaattataaagtgcctagggataaacttaacaaagatataagctctttatgttgagaaatataaaactttattgaaagatttttaaaaacttaaatagttatattcttgaacaggaaatgagcttggtattgtaaagataataattcttcccaaattgatctataatctcaatgcaattataaccaaaattccaaaagggtaactaaatgttacagaggatgctattatggaagaacaaagggccaagtatagttgacacactcctaaagaacaagatgtcaaagactgctctcaaaactttgatcatcttgatggtggttatggtttcacaggtgtatgaatgtcaaattgtacactttatatgcacattattgtgtgtcatttagacctaggtaaagctgttttaaaaacaaaaacaaaaaaaagcccggcaaaacaagcctgggcaacatagtgagaccttgttgctactaaaaataaaaaattagctgggtgtggtggcacaagccatgggcccagctacttgggaggctgaggcaggaggattgcttgaggccaggaagttgaagctgcagtgagcagtgatcacgccactacattccagcctgggcaacagagcaagacctggtctcagaaaatatattaagctgggtgtggtggctcatgcctgtaatcccaacactttgggaggccagggcaggcagattgtttgagttcaggactt

SEQ ID NO: 133396 - DNA, 1098 bp, Homo sapiens
tatatgactggggacaaaacccaaaaaacaaactggaaccctaccttcaacaagcttactttctagaaagggagacaataagagtaataagtaagtgaaatatataatagattagaaagtaatcatgctatgggaaaagaggggaatcaagagtcaggagaaatgtagagtgagttgcaattttaaataaggtggttaaggtagactcatgagaagtcacatggatctgatgctcagaggagaggtttatctgttaaactggcaataatctgccccaaagtttttgggatcaaatgagatatgtaaaagttctggcaattaaaaaattttaaactacttccccaccctacactgctgtgaggcttcagttagtctgaaacacacaagtttaaagataagcagaataagtttgtgtgtattcctttttcagtaagaagaaaaaaagtttcccttctttgttgttttgttgtaactaatgacttctgagttattatccacaaaattatgggatatgtagaataggtagaagatcctattacatcaataaaaaatgcatttagatagggcagggggaggggtgcaaggtatttatgttttacataaagtggtacaatgttagctcgaactagactgtgaaaaaataaagatgtatatgaacagtccttatggcaaccacattattaattcaaagaggtatagctaagtaaataccaataggttaacttaaaatgaaattcataacgataggaaggaggtagagtaacaagaaaggaaattttgaaagtatttcaaactgaaagataataaaaatacaacataccaaaatttgtaggatgtagcccaagcagtgctacagggaaagttacagctttaagtgtttattttagaaactaacaaagacggctgggcacggtggctcacgcctgtaatcccagcactttgggaggccgaggtgggtggatcacctgaagtcaggagtttgagaccaagctggctagcatggtgaaaccccacctctactaaaaatgcaaaaattagccaggtgcggtggcatgcacctgtagtcccagctactcgggaggctgaggcaggagaatc

SEQ ID NO: 133397 - DNA, 1010 bp, Homo sapiens
taatgttaaatttctaaattatagcatatgttttagttaattctgaaatcagttacttcatttgttaatttatccctcatatcatgaatattgttttttaaatgttctatacaaatttgcatcacttcttttcttacagcttttgcagttaatatattctaaacttgaaaatgtggtatcaatcaataatagaagtatcactggaggatttatttagctttgtatttcttaattttagtcctagctactaaagtatgtaagccttaaagtttaaaatgtttttcttaaattagctttatacacaaacattttcatttactttatgaaatgggaggagatagtccactgtgcttatgtttttttgtttaatttctatattctgaagcagtgcagatatagggtatgctaatcaagtgagcaaggtggaacatgtacaatataaggagaagctgtaaaaatcacagtataaaattatgaagtttggtaactgtaaaatgtactgtatttatatgtaactctcattctaaaagttgccacaaaagctgaattggaagcttcatgtctgcatgaaatttcctatatttttaatgtgtatgatgaaattaatttttcttgaatattaaagtctgccaattgctatgaaacgatagttgcttggttttcatctaaattaatgtaactatagatgtggggattttaatgagttgagcatatatacttttgaactcttggattagcctatttttatatgcttctaagaagtcagtaacatgaatacttcgccttataatatgccaggccttatactaactattttcactttgtttcattcaagttcactgtaataaagttagaatccattgaggaaaatgaataatcttgattttcagttttgttaaataatggaaaaagaactataaaaggaactagtagaagacagttctaggaccagccatcagtgggatgagcacttagatcttctgggttcattttcctgaatgattgtgatc

SEQ ID NO: 133398 - DNA, 1050 bp, Homo sapiens
cagactctcactgatagaaagtagagtaggctctggggaaaacaaaagggggtcggagggcaggtgtaagagggatattcacaatatgtccttgtgtactgcttcatctttttttaatcatgtgcattactataaagttttgtgatattttggctattgtgtttcagttcatttatttagaagcattccattttagaaacaataggtttgtttttaagaatgacgagaagcaacatattatagtagttcagagctcaagactgcctgagtttgaatctcagttccaccacttactagtgtgactgttctttgtaaagtgagactactaatattaatagtacctctcttatgggggtagttgtatgtaataaatgaatatgcttaaaatagtgcctgccactgatacatatgtgctcagaatttgttagtggtgtggtcatgatgactgtcatagtattatgattattgtttgcattgcaggtggaaaaagaatctgtattgtcaacatatactgtgaatgatctctctatgatgaaatactactatgaatgtgtcttgtttgtggtccgtaagccacaataatggtctcaagtgataccacctggaaaaaagtttagtaagaacaaatgctgaaatcaacgactcaaaatcaactatcagtgatgacaggacacaacctcaaatcagtggtgccttcttattcctaacgaaatttagaaatagtgtctattttcttaatatgtctattgctttttcagaaatatactatgccatgcagatttgtactacacaagtaaaaatggaggaaatgtcttgaagtatactttttccttgaagcccagaattgtgtttcagtaggaaaaaaacctaatctccagtgtcttcatgatgctgtccattgcaagtctgccgaattaatgactaatagtattgaagtacataataatcttcctttttttgttgttttgtatgcattgcacatgtaacttttagaagagtctaaggatcctcagtcatattcaacatctggagttgggactttgttcactt

SEQ ID NO: 133399 - DNA, 12571 bp, Homo sapiens
tcattcatttctcagttggcaactggtgcctgcagtctttctgaaacctgccagaattggtggttaacactagtttaaatttgaatgactattattttgttttaagtgattttaaatgaaggctagaagttgaatagaggataaacaaaactctaacaaataccatttggtaataatatgtagagattagattataatattagtgttattggggatgatttccaaattgattacttaatcagattattgatatcagtatttcccataaatgactgtttggttactgtaattataatgttgatcagaagtttagcttctgtatctctgtcaaatattaatactctgtaaaaggtaactggcagatttaaataattaattaaaagaaaaaagcaaaataacataacagatgcagtaatttgatttttcttcattagatacctgggactgtattgctacctgtttcttcatagacacagctcacaatgtaattgattatattgatacaatatggaaaatactcaagccaggtggaatttggataaatctaggtaagttttttagtatttactaaaattttgtatattaatctgagtacttacagctgtattacatttaacttcacagtctcaaatgtgcatgaacattagaattatgttgtaaatgttttaaaaccactacagtttcctttagactgcatcctggtggtgatccctccaaaggcagtggaagctcagaagttgtatattcacacttaggtcagtctcacagtcattgtaatttcagtgtatactaattgttgatctgatggtaggtaatcattccctcattatcaccatcccacatgctgagacagtggtccgttctgttaggaagagagtgttctctttttctttctataatgaagcatgcggggagattttacctcttccatggaatcttcctccctagtacatccatatactgggaagggtgtaggtgtgataacttctgtgattaccttgagtttaagaaagaatagaaacacaattttttttatgcaaaatttttttttactgcattctacttactactcgatgttagaaattaaatgttgactataacatggtccctccagtccagaatctaaaggaaattgccattttactcctttttaaaataaagggggtataatgataatattcaggtagatatacatgtattctttcgtgagatatataatctgtgttcagaaagacatcatgactagaacataaaggttttcaagataaggattattatactacataaaaggacataacgtacatggtcttgagcccttggccttccgggtgggtctagttttgtgactgatttctgacacctactctctttttaattttaatttaccagaaattttgccatttgggactaagccctggaggtagtagtaagtcttttgcaaacttctcttaagaattccttaggaccagatgaaagcagctgtacaatgcaatcataataaaataaatatcccaaactgtaagtcttctttaaaagtagttaccttgggaaatttttcccaaggaaaaatggaaagatattacctactgggtatttgcttactgtgggttaggtactgtgttggtcccttataaataccttgtggaatctcaaagcagccctatattgaaatggcactatgttatagttgaagagacttagagtcttgggttaaataactagcagaacagtcctgtagcttacatgtggcaaagacaggcttgaagcccagagccaatttcttgattaccctcagttaatttgtaagttagcattaacatgaccctgtgtttatataattaaattttttgacccccattactgagttatggtaaggttttatgtatttccagagcatgtgactttcatagaaacagctttttttttaacatttgttttattggtttatgaatattttattaagttatataatacaataattgtaactacctgaagcacataaagttggctcctgataagtatactgtttgataagagtagatgtactatagtgtgacttatgatctgtcatgggcatcagaagtaatggagcatgttggttaacaggaagtcaattaggagagctaattccattatggagtctcaaaacaattttgaaaattgtaataatggagaaacacagtccttaaaaatagttatttggaaggttagtactttataaagtattaacttacacatcttttgcatgtataagttaaagaatgtaaaaaaaaaagtctcagaatcagctttcttttaaatgttactgtgttctgggcatctaatctgtgtttttcattttttatgccatgtactcatttttgactccatattcctcctacctaatctcatggcttttcctactctttggattcccaatctgtatctctggtccaaacatctctcttgtgctccaagccagtatgtccaacttgggtgtaccacagatacttcaaaatccttgtgtctcaagaccagcctgggcaacatgccctgagaccccatctcaaaaaaaagccaaaacaaaacagaaaatgattccatgcctcccaatatcttttctattaatcatctactcaggttaccctgaagaaaaatactgggagcctttcgttaccccttttattaggtcactcaggctaccataacaataccacagattgggtggcttaaataacaagtttattttctcacagttctgatgactggaattccaggtgctcaccaggttggtgtctagtgagggctcttcctttgatttgcaggggttaccctcttgctgtgtattcacatagcctttctttggttgtgcatagagggagaaggagtgaatgagagcatgagtgagctctttggtgtgtctcttcttataaggacactaatcctattggatgaggaccccacccttacgacctcatttaccttaattacttccttagaagtcctactttcaaatacagccacactggggattagggcttcaacatgtgaatttggaggcagggggacacaaacagtcaataggacctctctttttcctcgctgtttgtctctagtcagtctaaaagttgtatctcctaaagctacttaatcgctcttgaatatccttctattccagggtttctcgattgtggttttgacatttgggctggatcattcttcagtgggagtggtgagggaagtgggggtctgacctgtatagtgtaggatggttaacagccttcctggcctctaagactccagtagtacctcccagttttgacaaccaaaatgtctttagatattgaaaaatgttgccctccgggggtggagggtgttggcagagtcatccccagttgagaaccattgctccaatttcatggtttcttgcctggattagcattaggattactgtagtaatttccttaaggacgcccctgccttcaagttgtcttcggcccttttcatttctccacataatcatcagtgaccttcctaacatgcaaatctgttcctgtaagactccctgcatgaaattctagctttctggaaaacctaaactcttcaggattatgttttttaccttcaggattattttttaccaccccttctctgacctcaagtgccagtcctttgacttagccctttctttctcttctgttttcccttggttagtccttatgtgttcttaaacacttagctcaggtgatcctttcgggttgggttaagtattctgtatttcttatgttctaagagactctgctgtaacatatacttcagtttggtattagcacccatatgcttttgtttccactgctagtctctaagctccataagggcaaagatctaatgcttcctagtcacctggtacaaagcctggcaaacaatgggtattaatgactgttacatgtatgtatgaatgtattgtttcaaaatttgaaaaagggaacatactaagatgtctcgaagagatgatgaagtgccatctatattggtaaattcataacattcttatggttttggctttaattatatagacctggaggcttaatttaccctgtaaactgagagatcaacctcttggggatgattttaccctaaccctgcttaggtagactagaacatcaatatattcatatataatgggaaatgtaatggccagccattctggaacaaatgacattggaggtaaaattatatatgaaaatgttgcccaaactgcatgaaatcagatttggtggggatcattaatttacaaatgctttaattaaggaggatttgatggactctttaacactacccagtttaaggaaagctagtaagccttttaagggaactattatgcatatgtcctttgggtaaggctatgattttggcaaagaacaaaagaatgcctgtgaattccctttttcagtttttcatcctgaccagcactccttaaacacatttatttataatttcttctaaaaagaaagtgtgtgtgtatgtatccactgataaatttgggagtcaggtagtggagggcaggcatttagctacatctggaagaattaataaaatgaatctaactacatctgaagaattaaaatgtaactacatctggtaaaagtaccaaaggagatctttgtaaagtgtactgaaagataggtcttatcagattttagagcattatgaagctacagaatttttttttcttttttttttttagatggagtctcactctgtcacccaggctggagtgcagtggtaccatctcggctcactgcaacctctgtctcctgggttcaagcgattcttatgcctcagcctctcaagtagctggggttacaggcgtgcgccaccacacctggctgttttttgtattttaagtggagatggggtttcaccatgttggccaggctggtcttgaactgccgacctcaggtgatccacctgcctcagcctcccaaagtgctgggattacaagcgtgagccactgtgcctggcctagaattttttaaaacgagattccctttaaaagatagatgactgaacacatacagccctttcctcattatagtagtagtaaaaatataaaaagatataaaacacatggacaaagaatggcaggcatgttactgggggacaaaataatgtgccagtttttagaagttggggtagataggtaagttttgcgaagaaaaacacatgtgagagccaccttacccgaataactctggaaaacgaggtgctgtatggaaaaacctaacttgaaaatctgtatatattgaacagttgactcctctataatcaagatgcctaccttatatgcccatttccactccatgctcaggtgagagaccataagtttaattctctagaaaaagtaaataggaaaggagcaggatttaggaaagcgtgtcctcatatagaatgggggcgaaatgtagggcagaaaagaaggggattaattaaaaactttggaaaatgctcaagcagtgaacgtcagcccaagccatctccaacccctaccctgcctataaaacgtaccaaggtttggccgggcatggtggctcacacctgtaatcccagcactttgggaggtgaggcaggcggatcacgaggtcaagaaattgagaccatcctggccaacatggtgaaaccccgtctctactaaaaatacaaaaattagctgagtgtggtggcgcacacctgtagtcacagctactcgggaggctgaggcaggagaattgcttgaacttgggaggcagaggttgcagtgatctgagattgtgccacttcactccagcctggcgacagagcgagactccctctggaaaaaaaaaaagaaaaaaaaacttaccaaggtttgaattccagatgttttgcacagatgcaagtcacatttcttggagtgggcatgtcaatatcactatatgagcttattttaaaattaataactgtttcttgtatctttttctgtctcttaaatctttatgcctaactttttagatttttcagcctttttgtggcaatctttatgttttaggtgtgtctcttacaaacagcctacagtacatttttactatccagtcaaacaatctttctctcttaaccagaacttttagagccttacaggtgtaaatggtttaaatccgcctgtcacagatttggcaagtggtttggcaaccccctttaagctagttcctgttctttcgacatatccctgtcactgtttggtacctcctttgtgaaacaaccagatattccaagcccatcttgtactttgtctgaccagccattatttccaaggattcctagttccttttaatggggaatggtttgtagaaatggaaaatctagttcctaccaccgaagtggtattttgtctaggcctttttggcaaacagggtaggaaatatatgtatatgtccgtctgtaaaaatcatgtatatgcgtgtatgtaaaaatcatcaaaggagggccttaagaaaaactaaacacacacacatacatacacacaaacatacagacaaaatcgtaagttcatactgataactttagttccaatgcaacactcagtataaaatactaaggtggcaggtagctttcaacacttagaatatatcacacccagtggcctctagtttccgtctttgctgttgagaattcagctttttaaaatgttgctcctctgaaggtattctgtttttttaagatttttaccttgtagttttatcaggtctaatattacatctaggtgtggagttctctttttaatactgtgcacagtttgttaggcttcttaagtctatgaattgaccttatcagttgtgaaaaattctcagctttgcggggggatcccctctcaccaatcataggtttagcattaaaatatgtaacaatagccattatttcttcacatacttcctctgcctcattctttttctctgtttcttctggaaatgcaatcaaatatattttagaacttctcatggtagctttcatatatctcaaccacttctcttgctatctttctcgccatgctgcactctggatagtttcttctgaccgatagtcttttatttgaaaatactgagcatattatttctgataattctgacatctcaagtctttgcaggtcattttctgctttctcttgcttttcttggttcttgttcatgattccttgtttctctgtgctgttgactttgagtgtttattggggattgttcatgagaaatcgcactttggatttcttaaggcctgggttgaagtgtttttccccaaaggaatttgcatttgccacttttaaagcatcagatcttgcaagaactcagtatcctgagaacagcatggggggagccacccctatgatccagtcacctcccaccaggtccctccctccatgtgggattataatttgagatgagatttgggtggaggcacaaaggcaaaccatatcagcagtaaactatatttttagattaaaaaaattctttaaagggggaacaaagagaaaactacccagcaatgaaataggctgtacaacataaatatgcaagttattttaataataaaaaaactggatgacgtagctcatgcctgtaatcctgacaactcctgaggtcaagccaggcagatcacttgaggccaggatttctagaccagcctgggcaacacagcaagacccttcatctctaaaaaaaaagtttaaaaattagccaggtgtagtggcctgtgcctgtagtcccagctacttgggacctgaggtgggaggatcactggagcccagaaattcaaggctgcagtgaactatgcctatgccattgtacttcaacctgggtgacagagcaaaactccaacactcagtaaaaaaatgaaaaaaagaataaatgtaaacaacctatatacagaaaaaaatgttcattctcactgttaagtaaataaacataaatgtgctaccatttttcacctatcatattcactaagtttttaaatttgcttacttaaagcttaggtaagtacagtgagatgggatatgctcttgttctgttagtggggatgtaaaatgatatgactttcttctagaaaaacagtaacatgttataaaatagtgtgtgggaaaaccttaaatattcatacatttagtcaggggttggcaaactacagcccaatttggcctgtagcctatttttgtatggccctaccactacaagtatttcttacattcttaaagggtaatggggaaaaacacaaataagaatatatgctagacactgtaagtgggacacaaagcctcaactatttgccatctgtcctgttacataattaatccactattacctatgtttattagattaattatacttctagaagtctgtcagaggcaaataatcagatatgggcggactaaagactgatgaaatggacagacatactcagcaagaacttagagtgaacttatatttctaacagtaatggagtggacagtcataagacattcatacagtaaaactattttctagaaataatgaaatagagaaatgttcctaatgaagtataagatgtaaaactgtatatggaatatactgtacatcaaggaaagactgcaaggagataaatattcaagtgcttactctgaatgttagacttataggtgattttttaattttttaatgctttttcatgttatctcagcttcctagttttgatcttataatcaaagaaaaaaacatatctttgctccttctgttatggccactaaaagaatatgaagaaagctgcgtgtggtgttgcatgcctgtagtcccagctatttgggagactgaggcaagaggattgcttgagcccaggaattctaatccagcttgggtaatataacaagacactgtctctaaaaaaaaagttaaataattaaaaattaaaaaagaaaaaaagaacgaagagacatgagagttgagaaaataaagaaccctttgaggaatgtgtctctgttattcatcttcatatatatccagtgccagacattagctaggtgcttggtaaacatttgtttaaagaatgggcaactaggtcgtgaatatgaaaaactgctcagcctcaaagagatgcaaattcaaattatatataattttccccatatcaaattagcaaatattttgtttaataaaaattcttgttgtgttttttttttaagttggatttttttggagatataattgacatataataaaattcaccctttttacaaatgtacagtttgatgcattttgaaaactggataattgtgtaaccatggccactatcaagacagggaatcttcccatttccatcaccccaaaatgtccccttgtactccattctctcctcttactcctaataccatgctgtcactactttggattctgttactatagttttcccttttctagaatgtcatataaatagaatcatacagtatgctgctttttgtctctggctttcttagcataacacttttgagattcatcattttgttgcatgtactgttgtggtggtctttttttattgttgactagttttccatttgatatattacattttgtttatccattcactggttggtggacgtttgggttattcccaaattattatgattaagaataaagttgcattaaatatgagtataaatctttgtgtggctgcaaatttccatttatcctgcgtaaatacgtacctaacagaattgctgggtcacatatggtgagtgtatctataacttagaaactggcaaggtgttttccaaagtgactgtactattgcattcccacaatttaatataagatgctgaaataagtacttattgcaattgtgagtgaaaacttataactctttgggaaagcatttttggcattctgaatcaggtcagtaaaaatgtttattctctggccttcaagaaacatctttgtaagggataatctaaaatatgcacaaggatatttgtcaaagtaccattgtattagaagactaaaaatatacactccagctgttgtctttggtaaaatttataaattcagcactaagttaggcattgtggtgggttcaaaagcaacttaagatgtgttccttgacttacataacttgtaatctagtgagaaaactgtgctaattgcctgaaaaattttcactgagcaatgcaacacagcattaaatgagtgttaaaatatgccacattaagaagaatgagcagtagggatgaagacttggatggatttcagcaaggttttgaagcacggctaaagcttgagttggagggttggagctttctaggtggaacacaccatgactagaggtaaaaatggtctaagtatgtaaaaatcattggaatatatgtatgtatgtagagataataaaactatgttattggaggctcttaatggaacaggaacagcataatctttaaaagctggaaagactctgctgtgaggctctgcattcttataaaagctttgggtagtctaggaaacagcagtgctcaggaaatggtagaaaacaatcatttttactggtactaatataacaaatttcagcttgatagagtagtttgataaggaaccattgttatcttttgtaagtagcactaacatatacattatattcatggtcattttttctagtcgtttatgtaggatacagaaaggagagagaaagaaaaacttttttaccctgtgatccacagaatgttaagcctcttggtagcagaacctttgtcttgttattaaatacttctgtcttccatgattagcacattgtatggggagtaggagtagagagctggttgcaggatttataattaacccaatgaaaggtaaagagaagattgtctagattagcctgaggtatatataactgtgttaagtgataatggttcctggatgaggttgatggattgggcaaaatgatagattgaaagatttgaaaatcatgctttaaatcatatgtgcatttcttgaatgtatagaatgagcaaatagtaaagggaggatgtcatataaacagtgtaatacctgccatttacttagtgccttgtttatgacaggtgtaatacatattatctcacattaaagtcatactacagggcacacacggtggctcacgcctgtaatcgcaacactttgggaggccaaggctggtggatcacttgaggtcaggagttcaagaccagcctggccaacatggtgaaacgctgtctctactaaaaatataaaaattagcctggcgtggcgacaggttcctgtaatctcagctattcaggaggctgaggcaggaaaatcacttgaacctgggaggtggaggttgcagtaagcccagatcatgccactgcaccccacccttcctgggcaacagagtgagattgtctcaaaaaaaaaaaaagtcatattgtagatgaagtggagttattgaattgcccacagacacacaattattagatgttagagctgggatatgaacagtgcacttaaaaaaataaaagccagctctaatgttacttcttcctttcaggaaaccttccatataactcctgtccaccttttactacctaggttaacttgaggctcctcctttgttttcatatgatatacagttggtaactgcagttttgcatttgcttatggaattataattgcagaatacatttggaatttgaggacttagcattctctgattcatctactccttcagtaacttgcaagttaaaggtgaaggcccatggtgtgaatcacagtgcaaggcaggtatgccagagggactcactcctcatgagtgtaggcccaactcttgagatactaggccaaattttcagaggtctgggcattttcagcaaatgcccagactttttatgtttgtctcatccagtacctaacttactcaacttggaattcagtgtaacacagctatgagtgtatgtttatattcaagtaattcatagtatctttaaaccataggtcctctgctgtaccactttgaaaatctggcaaatgaactttccatagaattgagctatgaggatataaaaaacgttgttctgcagtatggattcaaggtagaggtaagaatggaataaaatattgccaaagtttaactcccaaagcacctcaacagaagtgttgatatcatggctgttagtgactatttgaattctctgttttcttatctataaagggaagataatacaggttgagtatcccctattcaaaatgcttgggaccagaaatgtttgggattttggatttttttccaattttgcaatatatgcatatacgtgacatatcttgggaggggactgaagtctaaatgtgaaattcatttatgttttatatatgccttataagcatagcccgaaggtaatttgatacaatattttaaaattttgaccacctgccacatgaagtcagatgtggaatttgtcacttgtggcattatgtaggcgctcaaaacattttggattttgaagcgtttcagattttcagattagggatgcttgacctgtgttccttagttttcagaattataaggatttgggataatgtgt

SEQ ID NO: 133400 - DNA, 1143 bp, Homo sapiens
aaatcaagcgtttaaaaagtcttgtcctttattctaaatttaatgagctagttttatcctaagccaaggtttagatcattcattttgatggtagaacataaggcatatgtcagtgtcaatttagaatgttttcaaggtcgtgtacaaggcagtgataggaaataagaagtgtaagatatctacagtcaagaaatttagaatctgttgggcccattaatactaagagataccatgtaaacaaaggttaaatgagtaatgaataccaaaaaaatgaaaggttattagtgtaagaaggaagctgttcatagtgaggctatgacttgaaggttgagagaatagcatttgaggcagacagaagtacaaagatatgaacaaggtgattggggatggcagcacagctgtactggcagggaaagaaaagatttaatgggagatttaatgagatttaataggagctattgctagaaaagtgaatttgttccagatcatggaggacttgtatagtcaggctgcacagttgacttcagcctggcaaactgttgaagaaatctgagctaggcaggagagaaagggagatggtaatagggaaagtggagagggagattggcactaaaaggaaagcaaaatagaataccgagggttcagcaagatcattgagtcaataggtatttgttgagcacctactaagtactaggtatttttctaggtgtcaaaagagaacagtgaacaaaacaaaatccctgtccacagagaacttccaatagagaaagtgaggcaataacaaatacaatattgtaaggaagaaaaaataaggcagggaagacgggttacagagtgactggggagaggctgctgctttatatagagttgtcagggaaagcctttctaagagtagaaactaaaaaaaaaaaatgtctagtagagaaccttgaaagagtacacagacaaaccactgagatatttgaaggcaaaattttgcagatggggaatggcaagggaagaggatcagggagtagagtgagtgcttgctctgctcaaggaggagctaggctgtagtaagcaatgggtacagtggtgagaggtcagcctcgagagggtttgatgaggcaaacttgttggcaggccatagcaaggacttggaat

SEQ ID NO: 133401 - DNA, 1347 bp, Homo sapiens
ctaagatagttgttcagggtgacagctattaggaatatgagtgactttataagtcttgagatgtaaggggactccttttttctgaaaaataatttttgaggggtaaaaccctcatctgatatcggaacatacataataattccttataccttttatttttgatatttagaagtatttcttgattgtgagaagtcagagtcttagcttattcttattgagtaaatgagtaagtttttagttgttaatgtggattttgtcttttcctttttttctttgaggggttggacataattgccttatttcatttcagggatccttctaaagtaaatattctggtacctggtgctggactaggaagactggcctgggaaatagctatgctaggttatgcttgtcaaggaaatgaatggagtttttttatgctcttttcttccaactttgtactcaacaggtatttaatttattttttgctggaaatagtaatttctcagaatcagattgacttacctattttcttgaacaattttgaatttgaagataagtacatagcatttgattattatatatatcacaaatgtgtcttatgttaaaatcaaagtacttacacaaattatcacttgaaccaattgcctagttattagagtgttgaaacaagatgggtaagtgactttatagaaagtgactgggcattccatgaaatgatttctgtacaaaatcttcaggactaagtatgaaccaggaaggagtatttctaaatttattccttaagcttctttacttccttgtttctttagttaaataagagtttagtttagcaattataactttttctccttaatcaagttcttataaaatggccaagtatgctctcatgactgagttggaaagatctctcagaacttctgtggcctcttttggaaggcagtggaaaacaattgttatttttaaagccagaagatgtacattgagtagctgccttgtttaaataatatgttgtctcggatggcagtatgagttttaggggattggtgaaaaagggaaaaaagaagagggttatacaaaaaatagcaaactgttttagttgaaaccagtaccattttaaaaaacctcgttggactgttattacttggttttgaagtttagaaatacatttttaaaaatctgaatgaacagcacatttatatctctgaatttactttttttttctgtctttaatccattgattggttgctcatctacatgtatatgtacattttcagataattagggaagctgtaatagtgactctttaaatattaattatatatgcaaatcttcaattaaacagtatatttttagtatttaaag

SEQ ID NO: 133402 - DNA, 1064 bp, Homo sapiens
tgttgttaacattatgtcacagctttcccttcagggtagcataatttctaactcctgcatggtaatattttactggggtcatcagccatttggaaattgattgctggttatttttatataaagatttaaatactatatgaatttacttccaaatccttttgctttctgttgcatgagtttgatcagataattaaaaaaaaaattctaaactgagaacagccacttgctggggtaagggtagaaatgcatgttatgattggacagatgggaactgagaaaagaaaggtaattctccagagtaggggtttcggtgggtctggtagggagtgagaaatgagagagcgttaggtctgagtaggatgccatcatggcagttcccttatataaggaatagcacagagtcctagagctatgagttttcaaaagccccatagtgttctttcttattttgaagtgggacatgcaaaggttatatgggctactagtaaagtgccctgttgctgcttggagcatgccaaacttaaaggccacatagttaaagataaaaaaatcattagtaggagtagatttggaaattggatttgatttgtgaaccaaatttaggaaatacagtagtgaagtttctttttacttcctgacatgatattagctgattgtatacattttcctttggcttcttataagactacaattttagtttcctcgggattatattgatttgccaaaattcctgagaaaaagccttgttttggtaaaacttttagtggtttgaaagtggaatgatggatcttacgtgaaggaaatatgtaatggcagtgtggtgctagtaggtagagatcagtttggttgtgaacctctggtttggtgtaatatatttgttatcatgtatgtttaattagagggccgtttcccattttccccatgaaaatatcccctcccccaaattcttctgtcaactaaaatatatagggatttagagatatacctgacacattaaactctacatctgtttaatctaacataaacaattgagttacatataaaatttagaaataaagttatgt

SEQ ID NO: 133403 - DNA, 1038 bp, Homo sapiens
gaggttgcagtgagctgagatcatgccattctagcctgggcagcaagagcgaaactccgtctcagaaaaaaaaaaaaaaaaaaaaaaaagaatttcttcctttttttataagagagaaagagttttttttatctcttatactcattttttgattttttaaaaaatttctagcacttacatatacatgcacacccctacacatatactctgtctgtacccaaattccctatctctttgtatacatgatctaccttttgcactacgtgctttaacgtacttttcatggttattttaaaatccctacctaatgattcttacattctgtttgtgcgactgttttcttgaaggcttccttataacaataagttccacattttcttgcttctttgcatgtttcttaattttttttattgaatgccaggcattgtatgtaaaggaatagtagacaataaagtaatattaatgaccagaaaaaaatcatttctccttagtcttattaggccactagtgggctggggggtggggagaagggtggtgctgactgaatcatttaagtgattttaatttgtaatatatttgcatgtattagctgcttctactaatcacttatttgtccataagccttgcatctagaaatatggcaatataggaatattactgctttctgaagtttcatatgcttctcaccttttattttatgtttgatgattttaatatttttcctgcatcagagtagtaggaatatctttgcaacattaagaaatacttggtatgggttacttacttacaccgaaaagaaaaaaaaaatacttgggttgggcatggtggcaaacaccagtagtccctgagtcaggaggactgcttgagcccaggagttcaggggtgtagtgtgctgtgtgctgtgattgcacctctagtaatagccactgcaccccagcctgggcaacattgcaaagacttacctctaaagttaaaaagaaaaaactttttaaaataaggtttttatagttttaattcctaagtttaggtctttgatcc

SEQ ID NO: 133404 - DNA, 1061 bp, Homo sapiens
tcatttttataatctggcacaggctatttgctctactcagaaagttttaacttaaatgttcagtcatttgattaggcttaatagccagagactggatctgttcacttgttttccttttttaagtactaatataactgttgagattttgatgcattttgacataatgttctgttttggaatacagggttagtgacttaaatttttaaaagcaactttactagctagaaattaatttcccttgcttaactcatattttttcagtgtcttgtatctattgctgttcatcttttattgtaagaaattgttttcacttataaatctcaagggactggcagtacatagaaactgaagtcctctttttgtatccacaggatggatacagttgggccactccagtgtgagcctctccatgctgccccatcaatgacctggagggactttcttccctctcttagagaggatgttcggtctccatagcagctcagtttggtcctctcctgagtaaagactgcttaattatatggtggttttatgattaatggaccttaatcttttgagggtagcagtgagaccaccaaactcttttcatttaggatctcaagctgcacttgaaccccagttgaggtgagaggctagtgatttatccactaaaccacctatatagccccttagtagcatgtctatttaaccataatataagtggattactctctcagaagctaattgatgtctgttttttaaacaggggaatggaaagattatgccagcatctacatttgacatggataagttaaaatccacgctgaaacagtttgtgagagactggagtgaaactgggaaagcagaaagggatgcctgttaccagccaatcattaaagaaattttaaaaaattttccaaaagagagatggtaaatagtacctcatttttaaccaagtttttaaagtgtatgaacacttgagtttcttgataaaatgtttcacagtctcgcttcattgttatagttgctgtgtgcctgtatgttttacatgtgtaagtgttaacatttgttattggatgctc

SEQ ID NO: 133405 - DNA, 1048 bp, Homo sapiens
cttgagttaaggggcttgtgaaggccaaggttcttgttaagttaattgaagcctcctaggtagcagccctcagagggaagagatactaaatgtcactttttagactttaatgttatcaggctctcagttaatctctcctggatccaggaaaggcctagaaaggaaggcctggttgcattaatggagattcttgacagatgcatatttcccctaggaaacatggctttgtggggccattgaaatccgttggccatgtggcagccatttcaaaatgtcaaatatattttggggtaaaatattctgatttccttctgagtctgctatttgtcataagatgccataccagagtcaggttggaaagtaagtcgtattatatagggttaataaaaacctgtccagtgagatttcgtaattagtaaggcatgactccccaggcctcttagtgaagaacttggagaagagagaaaatataaaaaagatcagcgtttagtcttcacatattattgtatgagctgtaatttactcatttcgctgcattccactgtataactatactgtaatttcttcattctatagtaactatatgataatttctgatagtagacctttgggttgtttccagatattttattccttttttttttttttttttttatgagatggagtctcactctgtcgcccaggctggaacgcagtggtgcaatctcggctcactgcagcctctgcctcccgcgttcaagcgattctcctgcctcagccttccaagtagctgggattactggtgggcgccaccatgcccagccaatttttatattttagtagagatggggtttcaccgtgttggccaggctggtcttgaacttctgacctcaagtgatccgcccacattggcctcccaaagtgccaagggattacagggatgagccactgcgcccacctgtttcttatctctaacagtgctatgacaaagattgttcatgtttcatggggcccatttgcaagagtttctaggatataattgctaggtcataaggcaagtaccatgcta

SEQ ID NO: 133406 - DNA, 2020 bp, Homo sapiens
caccccacctacgagctcctcctccgcctcccaccaaggggccttggccccgcccttggaagcgtggttgtgacgtcagcgcgctgtctccgaagcccggcagcaaatgagcgcagaccgcacgggccctccgcgtaccaaggcacacgcatgcgcattggttctgggagccctgaagacctggcggagcccagcgcggatggaggcctgagggtggcgggggcggagcgcgccgcgagctgggggcatgtccgcggcgggcgccgtctagaggaaggccaagcagccgccaccacgctgtcggtcgcggagagacgcaagcgagccaggccgagggccgcggcggcgatgcagcgacggcgtcgccctccgccgcccacctcccggctgcccgagggctgcgggggaggaggcggtggcagcgaggaggtggaagtgcagttttccgccgggcgttggggctcggccgcggcggtttcggcggcagcggcggcggccacgcgcagcaccgaggaggaggaggagaggcttgagcgtgagcacttctggaagatcattaatgccttccgctactacgggtaaggagcccgtggcggaccccggcccagaccgtcggggcgcccactggtggcggcggacccgccggaacgggggcgctcgccgtcccgccgccacgcctccgaggcgtcgggacccggctgctgcagctgacctccgggccccgagtcacctcgcaccaccccagcccctcccggccctgcacacccgcgtgtccgccgcgccgtctgctgcacagcctcgtgtcttctgacctcaggatcagattagctctcctgcctccgtcctcgtaaaggtttggctttgaggccgatgggggtgaccagagaagcgctgtaacaatttcagatagaagacgatggtggtacaatcgtccactgctgggctgattggtgtgtgtggtcgatgtcctccaaactgaacacacggagagcccaagttcacctacgcgtgggatgctgtaggacgtattttcccaaactgttaccagtgcttgtaagagcagtttaagatttccacccacccctctttggcgctgtgaacgcacttgcacttttgtgtgagcgattgaatgatgctgctcagtgtctttaactggtgggtgattaagggcggaagtggtccggatattctaaaatttgctaattattaggagagatgagagaagtcacaataagagctgcctttacgttctttttttctgcaaatctgtatctaattctccctggtgtgctaggcactgtggtaggacctttatgctcctcattcataaaaacagctccctaacttccacgtttcttctagatagatgttaaagtagcttaatcacaaaattataattccaagagctgaaagggacttaaatcaactggattttcaggtgaagataacacttttattcacgtaagagatatgagtccaccggtgactatgttctgaggctgcagttggaatcagacagacatgacctcctacgcaggtaaacctgttcccataggtgggttcctgctgtgctttatgcaaagtttttttatattgttcatcttatgtattatagttgtttttataaatctcttgctttgctgtgacctcctcaagggcaggggctgagtcttttttatttttatgtcactagtgcttggcatatgttgtttaagctctatttttaacaaaacaaatagtagcaaagaaatacatttctcattcccaaatagtctgtcaagtttttgactgatagttaaattagtttactagtctgaatttagaagcttgcttagtgaaagcttaaagttatttggaatctgattgtatatgtgataggaacttttgaacttcgaagatcttgatgaaataatttactgattaaacccagaaatagggaccagggacagcattactttacggagcccaaaagagaagtttggatattttatttctccaggtttagtagtaacagagggag

SEQ ID NO: 133407 - DNA, 1037 bp, Homo sapiens
cccagaccactgcattgtttaagaagcttcccaggtgatcctgatgtataagtatgttgaagaattactccttaagtgacccttttgggtgaacaccttcagtgcacctaaagtgccgtatgcacaacaccactttctttcttctgtttctttcctcctttcttctttctttctcttctcttttaattaaataattttcacataagccagtgtggatttatctgtaacaatccaatatttttgacctattatagctggctagcatctatttctttctttaatcactattaatttccttttaagttatggtcctgggtgccttggttaaacctattggcatttacaagagatgttgggtgtcaaagtaaacattgtatattaataagcctgttagcatttgaactgctctcttttccccttcgtagtgtacctggatggaacaaaatctgaagaggacctctttttgcaagtatatgaagatctaatacaagaactagcaaagcaaaagtgtaagtattgtgctaacaaagtggatggtagaggagaaacagccaggaaaatcattcattacatatgaaagaatggaataccagaatgctagtgtaggagtgattgtgctcatccattctttgctttgaggataattcagaatcagaaattctgggggggggtttggagactcaattattttgtctgtttttaggggtaaaaccatgtaccctttgttacatctcttaatgctatttatgtgatttactttaaaacttttagtagatggctgtaccaaatgggactggaagtatcctttgggcacagtataattaaaatgctgatgattttttttagtatgtccagagctccccttttcttttattcccttaaagactttctgtaaaatttctactttccaaatacctcaaagataaacaaaagattttaaaaagtattatgaagtgtttgtttaaggttttcatattggacggcactgtttgcaagtgacagggatctgcctaaatatggctacagcagaaagacag

SEQ ID NO: 133408 - DNA, 1060 bp, Homo sapiens
aatcaagtcaaaagagcacagaattgataaacaaggctcctgagttttaatcctctttcttccatttcctaataacacttcctactgattctaggacagcagcgaacatgccttctttaagaggcaggtagctatgctgattgttctttctgaatacaggaagcaaaatactcccctcatccgatcctacataaatacacacaagagaaccaaaattattttcaggtatctttaaagcagagtgatctacaaaatgtaaaaatgaacatcaaatgcttccttttgcatttttgtgactttgtttattaaatacttgagtaatatcaagtgtgcatttaactcaggtatgcgggtttgtttgtttttgtttatacttccagttaattactatgttattgccttattgcttggcttggtttccctaaacacataattcagcttcatttaatgcaagaactatccatttgattttctgttactttttatccacattaagtaaaggaaactgtgttgaatgccctggtactcctgaagctgggggactgtggtgaatgagtggcttcagtaaatcatttgtgtggcaattccacattgggttaacactttttattttcaatctagtggctgagcaggcagaatccattgacaatccattgcatgaagcagcaaaaagaggtaggtgtgattctttttgactgaggtatgcagtacagtaaaaggcacggatttcaattagctttgacaagtgcatacacccacgtaaccaacacccagatcaagatctagaacatttctgccatcctagaaagttccctttgcaccttctcagttaaatccctgccttacagtctgtcccaacatctactaccctagagaagtgtgattttagttttaaaatgtcagtcaagaaacactgttgtggggagatgcaagtcgaaagacatggtctgtgacttccaaagcacaacatctggcaggggagagagagatgtaacagatcattaaaatatggtatgataagtacagcaattgaaatgtgtttgacaggccgtagaggccc

SEQ ID NO: 133409 - DNA, 1017 bp, Homo sapiens
tattgggtcatctggcagcaagagaaggggaagaggttctgagattctactttttatgagtactttaaaccaatatctctgttttcccacccatgcctcatgcctgccctagcacctccaggaatctccaattcctaatttttgccaggcttctgcatgttcaaatctgcttccttcctcctggatctccctccgcaggcatgtgcttttcagctcgtgctccaccaagtcagcttgtactcctccatcctattccatctcccaaaaatgactcctctcccatctcttgagtctcctttccttttctctttggaattttatgtggttctataactttgttcccattttaggtttaacttttaggtttaactgggttaaacctgaattaacatgtactttcaatccaccctctatcttaaaaatggtactttctctttttatcactatagaacaagttgggagatacagctttgcatgctgctgcctggaagggttatgcagatatcgtccagttgcttctggcaaaaggtaaagtttgtgctgagtttatctggtctttgcttgccctgaaaaatagtctatatcaacttacgccatttgaaatggtaggaagaataatagtcttatttcaaaatagggtttaacctttgctctgcctgtgtatcatggaatagttatgataaaataaaattattgggggttggtttgtgttagtttttaatataaactaaaaccatggcaagctttaacattacatatattacttttagtaagaactgtattgtatgtttctgcaggattatagagccttagaaacaaagaatgtatgtgtacacgtgtgttggggagatcctgtctgagaaagctgtataggtaaagttgctgaggcccctgttctcacagggaagtcttgacagataagcaagaatgatgcggctgcaatgtcctgctttgagctgagcaggtgctagatgtaaagtgaacgagagaggatatcttgatcccctgtttttataa

SEQ ID NO: 133410 - DNA, 1057 bp, Homo sapiens
gcaggaggttcacttgagcccaggagttggagaccagcctgagcaataaagtgagacctctgtctctacaaaaagtaccaaaaattagtcagacattgtggtgtgggcctgtagtcccagctactcaggaggctgagctgggggatcacttgagccctgggaggttgaggctgcagtgagctgtgatcgcaccactgcattccagcctgggtgagagcaagaccatatctcaaaaaaagaaaaccaaaaaaaaaaaaaaaaaaaaaaaaaaagataaactcttcagatgattctgaagtttgtttcaatatccttgatcttaatgagaacccccaaaataggacaccctcaattaaacagaaattagacaagaaacataatcttttacctttattgtgtgtttcttttattccttgcaattaagttctaatcaccctgctttccattacagtccttttcagagaacgatcatcttcattccctcatttaaatatgtatttatgagtgattaccactaaatatttttaaaaataacatttaatagctccatgattatattttatttctgttttaaatgaggatatcagtaaactgtaatcaaatttattctagactttgctaaatcttctggactttattcatagtattatgggtggttttttaaaatagagtttaaatgtacattattattatttttttagatggagtcttactctgttgctcagcctggagtgcaggtgtgcaatcatagctcactgcagcctcaaactcctaggctcacgtgatcctcccatctcagcttcctgagaaaatgggactacaggcatgtgtcatcatgcccagctaattttttttttaatgtagagataggggtcttgccatgttgtccaggttggtctcgaactcatggactcaagccatcctcctgcctcagcctcccaaagcactgggattacaggcgagagccgctgtgcccagcctccttttgttctttattctagatatgtctttgttccagatttcttttctttttttaacttcagtttgaatatagtgt

SEQ ID NO: 133411 - DNA, 1002 bp, Homo sapiens
ccctaaagaaatatttaatgaagcaggttttactcccaagtttccaaaatttcctactctgtacacattagagtatgagtaagtataagagaaggaaagcttagatcagcacctattcattttgctttgagtttacattgctaagttcagcagttctctcagagagtctgagagctcctcacttctgtgtaaccatgaaaataaatgcatcccttggaagggtcaggggatgtggtcttacctgagtctgggagctcgatgtgtacatggaggtaagtaacttcacaattcccaggcagtgctgctgtgtctgtcgccagtggccagcggcttgggtttcccagcaggctcagccctgtgggcaactgggagccacagggaggccaggttcctcgcggtgcccggaaaagaacactgaggaaatccaaaggtatacattagacagcctgacaggaagcaggaaggaaagtggaaggaatagacaaggagtgaagaggctgagcctcaaaggaaaaatggttaccttttctaaatgacccatagttctgacagaaattagtagaatgcttcgagaagtggtgaggggtatgggctttggaatcacactgtctggattcaagcctgattctgctgagtgacctgcgacaggttacctaaacacccagattccctagctgtgcagtggaggaagtggtagtatctactgcctagagttagaaggattaaataaaatcatatatgcaaatgacttagttcctgaaaaactctactactgagcagttgctcagttaatgttgggtataaccatgaacagggaagtctgcattaaaaccagatatgtgtgttatacaaaggagtgtgtcaacacgtttttcagtttcaccaccaatattgaagagcagaatttcctaaaatactttaaaaatgagtggaggacaatgatgttgccttccagtcatttaggtttcttcatatgtggtagtagagtttttctttttcttc

SEQ ID NO: 133412 - DNA, 1029 bp, Homo sapiens
catactctcaccttctcctaaattgaaaaactatcctttaaaaaacccattatttataaataatcatctagagtatcaatttatttttcttatattcttatctgtaatttctagggcctttaaacacacacacacacacacacacacacacccattctcagccattacttggattaaactcactgtcaaatctactacccatatatatatatatatatatatatatatatatatatatattttttttttttttttgttctctacctccttgtaaaaagaaaacaccaaaaaccactctccaatcccttccctccatgaaagaagtggtctttaaaaaagcaaataaagcaacaaggaatgagaagactcgtgttgattttggaatgagagtgtgacagtggatttggtgcatattattcaactctgaggatgcactgaagtcaaccatgtcaatcagactgtttgtgtagccggacctaatcaggaaacagatcctggtaaaaccatgtttagaaagctgctaaattctgctactctcttcagatattgtaactttttgtaaggtcttcataggaatgttgttctgtgggagtgctttcagcatatccatcgggtcttttttatgaggagacagtatgaattctaaattatatgtccgatacacacacacacacatatttttccagtagacagctgctcagatgttttcagatgcatctaacttcagatctaactttaggcaatgacatcaagcttgaacccagactcccattgcagtctgttgagtctgccattggattgtggtatcattctgatgcagaattggaatcgtggcttgtggaggcctgatgtttcaatttgggctgctgagagtctgtctctgtgctgccaaagccagcacaccaccgcagactgcatcacacctgaatcagggaggtttgagagtttcagttgatttagtaccaccatatacatgcacgtttagagtagaactccatggactaccatgggagaggtggtgcttggcat

SEQ ID NO: 133413 - DNA, 1047 bp, Homo sapiens
tccatgccatgatgaaggaggaaggaagtaaaatctccatttccttgaattctgatttaatggctcagtaggctggaagcaaatatctggtctcagttcacagatatttagttcaaacgcacctagctttcttgactttaacaagggcagaaacagctgttacctttctgaattaattgagcagaactggtatatgacagaatctggcatagcgagatgggagaaattgtcaccaaatccacttttgaacaagcaaacattgcaatgtcctgcaacctctgcttgactatttacaaaaggccttatagtgaagattcatggcttctcattaaaaataataatgctaagaaagtttacatacaaataacaccaaggatgatttattgtggttttacagcgccaatgaggaaatttagtgcttatagaggttacagaggaccccttgaaccagtgtaaaaagatcagctattctacagtggagagcatttcctctgtagatcaaaggagcttaagcctatgctaagtctttggggtggtaaatggagttcacacgtgcaatatcattgcactgtacaggccaaatgtatttcttattcatcctttactgctctgacctttcaacactttagacatccttttgttattctttccatcagtaaaccagctgtggatcagctgagggcagtaactaatttgcagatgcgtctggaatgttctgttttttacccatttgggcttggggtctcatcttacgtgttgcaaattggaactgaaacttgttattatttctgcagtcatttactatcctggtagtattttttatatcttcggtatgatattctaggtgagtaaggtagtaaattttcaccacagtaaaggtatagttttgaccatttgctcagaatatcaatgtaatgttttgtgtagcatcttagcatttgaaagtcacgagaggtaagatttctggccagggcatttctatggaaaataatagctgtgcctcttctgttaaaaaaaagatgggatgtgcagagtaacacaagaaga

SEQ ID NO: 133414 - DNA, 1034 bp, Homo sapiens
taccacttacagtcctacggttgagtaggatcagctgtgtggttttcacttggggcctcccatactttgcagtcagatgtccactggggataaagccatttgaaggcttgactgacatggaagttaatatggctttttcattcatgtgaacactaagagaattttcaatctgatgtgtacgatttagttattaatgtgtgtttgtcatagttgagttatctgaaagtccttctgaaggacatatatctattgcataatggtttaccccgtaatagctagaagcaatggcagttacattacagttatactacatctgtaaactgtcgaaacatgtattcatttgcttgtgtgtgtgtttattttttaaaatttccaaccgtgcttattcaatgccttttagatactaagtctacatctgggaatgagaaaacacatgatctagtcttcataaaggtgatattcaaatttgggcagatggatactaaacaagtaggcaaataagacaaactataattagagatcatggtaatagttatgaaggaaataaaaaaaagaccttgcatgacattaagggaaatgtgttattaaatttataccctgagttctttacagtttttctgttactgagctgacatttattcaataaacactgaaacttcattttggaaagaggcttttataggcatcaggcaataaactctggccatggaagggcaaatcagagcaaaattgaggttcccaacctattgtcatttaaaatttaaaaacaaaacaaaacacatttccacatttcaaataaaaatttggaaacaaaaaaattacttatgacaaaaacaatccacactgtagtatgtgtgatgtttaaagagcatgataatttgctattgctatgatatagccacagaaaaataaatctacttacaaggtaaaggaaaaaccatctcacttctgacaatcagcaaaatcaattctgatagctactaaaaagaccactttaatatcattccttttaggctgaataaaaataattgtcc

SEQ ID NO: 133415 - DNA, 1032 bp, Homo sapiens
actccagtccagcttgagctctgtgccccattagcccggcgtgcatgctcccctggcaagccccgtggatcattcagtgggtgtgtgccgtgggtcaatggagaagtcctagaatggactttcctttgctcttcccctgccctcccaccctcttggttctccccttggcctgtataccctgcctaacaaaaaggcaaattgaatattcacagcaagtgatttacttccataaagagcatggaggtcgagtgtgtagggagaagccaggtgggcttgggtcctttgaaaatgtttttagatgagagcaactttagatataagcctatatactatgacacattcaaagtctgcctgtgtcaaaatttttcaaacaaaagcttatcccagcagattctttcttcagctgcatctgttagaattataaaaagctgtcttttttttttttttttttttcctgaatctcccttattgagttttagatttagcttagatgtactggccctctgttccaaattttggcctcgattgaaaggtgaaactttgcctccctttctaaatttaattacagatgaatatctctgcttctaattatggccttaaatggagagaaggtatactttctaatctgcaaaacctatggagtcctataattaaatatattttaaatgtagtgtttatgcttcagtcatttctgtcacttccctacccaaatgttcaatgacagactattgacatttgtaaggcatcatggtatataaatgcatctgtgggttgcagtaaaaattacacttttgcagtgaatgttttacattccagtaacacccaaccacgtgaaccttcttccttcattcaaaagaaggtacagcctttggagttagacagagctgggtttttcttgacttcactgatatctgtgtttcaatttagaaagcctaatttcctcatttataaaatagatgtaatagtatatacctcacagggttggttggtacacgtattaagatcacgtacagttacatacttagcacagtg

SEQ ID NO: 133416 - DNA, 1219 bp, Homo sapiens
aattatattccaaggcaaatctaaatgggtgtagttgtatatgcacgatgtaatttaatgctaaagagtacttacagcttgagggaaaagcataaagttttagttaaatagccttcatactgtggatttttcctcctactaactaatatgtgggaaattaagattacagatgctttgggccccctcaaacagtacattgctacagttcactgtagcaacagatttggtggtgatggggggatagaggtagaagcagatagaaggtaattttaaagttaatttattatgaatcattttcccctaatctgcataaatgaattagaactgattttaataaaaatattctgtgtaaaaagtactcagaaaaacatctaaagctgttggagaagagggactcatataaatagttggattgcgttttgctttttatttctttataaaaatatgtcaaaaacagtttttaattttagaaatcttatacttgaaagaaacctcaattatcagtggctttatgaagtaaagttaaaaacaaacataggaaatgtgaaaatatttgtgtttgttttgtctgactaacttgctgctaaatgctatctttaggtgtgtgaaagttctttgatatgttattgtccttttacatcttgttaaatagccattgcttttgagaatcagatagtgtgttgtttaggggttaattgtgtctatatctttcaaaaacttttatattatgtattataagaagttacagtagtaccattttgattagtctgaatgttttcaggccttgaaataaattttgactaagtgatattttttctttccctgtgtcagcttgaatcttactttatgtatttcgaatttgttggctgattgctactcttaagtgtgtgaagttgcctgaagagcaagatataggtggcagctgtagttctacaacaaagggccttgccttcaggatcccctgtgttttatgcctgcaacacagtgactgaggtttatttggagagcaatcacagggcatcactactaaagtccacttcctgagagtaagggttcctgttacattttggagatagaagagccagaagagtatagataggtctgggttcccttgcataactcctgccccaaaacagagttctgtaaccttcttgtcttttgccaccaaccccataagcagcaacttagaactcgtttgcctttctctgttgcatgctgg

SEQ ID NO: 133417 - DNA, 1062 bp, Homo sapiens
agcccttgctcactgcttcttttctcctggcagcgctttctgcgcagcacaggcaccctcgcctgtcacgcctccctctcctcttcccgtctcccagcgtggatgagggcgcctgcagatcccggctagggcacggaccgcctaggccgaggtaggttctgtaggcacctggcatgctgtagatgcatataaacgttgccctgtacaccctttgccttgttatttctttctgcagaaaagagagtcggttttttacacataatggggcaagaggccaattgggaagatatatggtgttcaaagaaagccgtggtgccttgagatgagaatgcggccacagctttttgtgggctgaatttgatgggtgggaggtgagagacgtggtctggaagttgtctcttcgtctggcattctgccccccttccagagctgttctgaaaggccggtttgttttatagaggggaggaggagggcttagtagtttttaaagatcagtgtaaattacctgctaggagcttaggcaattccaggcaggcccccctgctggaggctttcgtaacagatttcagttctagcagggaggaaaactcagactgtgtagatacctgctttttcttaaaggaatttttttcgggcccttaaaatggtagttttgggaaactgatttcttagaaatggcaaactcctttattttaaaatacaatataccaaactatgaatttacttttaaaaagttttattggccgagaggttgatattttttccatttcatgatgagggtttgacggtcactgccacctcctctgcccgtccttcaacttggccctgtaaaggatctccttagccttggccccaagtttgtactagattctatccttcattaattatagttcattcttgattaatgatagcaatgcttccactcactttttaaggagttactccttttccgtttgtaattgaattgcttaacagtaagaaaaacgtttttccctaaaactgggatcacaaaatccactttatccacatggactaaacaggtaatgcacaagagtgcttggt

SEQ ID NO: 133418 - DNA, 1029 bp, Homo sapiens
aaaaaatagccaggtgtggtggcgttcgcctgtaatcccagctactcaggaggctgaggtgggagaatcacttgaacccgaacccgggaggcggaggatgcagtgagtcaagatcgcacctctgtacttcagcctgggcaacagagcgagactttgtctcaaagaaaaaaaggaaatgagaaaagagaatgtgtgactgacaccacaaagaaatgtcagatgtctcttttggggttctgtgggtggccctccctcccaaaaaagtagaattgagtgaagggaatgcagtagagcgtgaaagaacacatacccacaagggtgaagctgcaggctctggttaaaggcagctttccactagatcttgacccttatgccccagggcctcagctttttcttgagttacagaggagggtgcaacttggggctagatggacttttttgttatggacttgccatatgctcttcttgtaagttttctttgtcatgtaagtttgagaaatgctgaataccatgtctctgtctttaaatatttacagtagacctgactgtcttaagggctaagaaataaggagccaaaccagcaacagagaatcttgtctttcttttcttttcttttcttttcttttctttttttttttttttttgagatggagtctcgctctgtcacccaggctggagtgcaatggcgtgatctcagctcactgcaacttctgcctcccagattcaagtaattcccctgcctcatattccggagtagctgggattacaggcgcctgccaccatggctggctaatttttgtatttttagaagagacggggtttcaccacgttggccggggtggtctagaattcctgacctcagatgatttgcccacctcggcctcctaaagtgctgggattacaggtgtgagccactgtgccctgcgacacttgtctgtctttacgtctttgtttcttgtaatttatgggaccacagactccacccctagcctgaagacctagtaattgctcccagagctgctgtttcca

SEQ ID NO: 133419 - DNA, 1017 bp, Homo sapiens
tatctctgggccaccatccaaaggattcctgaagtcccgggctcactccctgccagccataagtatgatctgtctgacatgcaagcagttgccaggtttgtcaagtggcagtactttgagggtgatgtttccaagggtgctccctacccgccctgcgatggagtccatgtgcgctcagtgtgcattttcggagctggtgacttgaactggatgctgcgcaaacaccacttgtttgccaataagtttgacgtggatgttgacctctttgccatccagtgtttggatgagcatttgagacacaaagctttggagacattaaaacactgaccattacgggcaattttatgaacaagaagaaggatacacaaaacgtacccttatctgtttccccttccttgtcagcatcgggaagatggtatgaagtcctctttggggcagggactctagtagatcttcttgtcagagaagctgcatggtttctgcagagcacagttagctagaaaggtgatagcattaaatgttcatctagagttaatagtgggaggagtaaaggtagccttgaggccagagcaggtagcaaggcattgtggaaagaggggaccagggtggctggggaagaggccgatgcataaagtcagcctgttcaaagtgctcagggacttagcaaaatgagaagatgtgacctgtgccaaaactattttgagaattttaaatgtgaccatttttctggtatgaataaacttacagcaacaaataatcaaagatacaattaatctgatattatatttgttgaaatagaaatttgattgtactataaatgatttttgtaaataatttatattctgctctaatactgtactgtgtagtgtgtctccgtatgtcatctcagggagcttaaaatgggcttgatttaacattgtttttgtgttatttttgcttgaaacaacgcacacattttcaacaaccaaaaaatgacaatttctagtttagttaatttctacaaatcatcttatgtta

SEQ ID NO: 133420 - DNA, 1180 bp, Homo sapiens
agatttcatatgttggagaaaagcctgacaagaggaggattgggttttaccagatttttctattataagaaacttgcatgatttaaatattttcagtatgtcctttgaggaaaaaagcaaacacagtgctacccaaatcattactaaatgtctctcatttggtttctcatgtttctctctctttttcttttctttgcagtattgacttgaagctgaaagaaaagccttagttggccatgctggaagaagaggatgcttttctggttcatggttctgttgaaacatatctacctgaaagagacagggctgatgttacctttttccactttgcactacctggtgccattctaaatttctaaggggaaaaatagaaagtttgtttactcttaagatattttatgaaattgtgtgtactttcctattttgccaattatgtgcctcaaagattttagttgagccttagcaagaaagtaggaccttccatttcaatacttcattaacacggtgtagtgatactttgtcccttagactggtgtttaccagtaagatacctttaatccactgttaagtatgagtggatttgtttccatagattagctggatttccttttggtgattgcattaggtttaaagtacacaggtctcaactctccccaggaaagtttcccctgtttgactccacctttaaaatcctaagcctgactaggacagccacaaaccacacaaggtgtaaaaccatcatcagctaagtgcccgttttgttcttgtttaccagaatctcctttaacttctcaaagggaagccgggctttctaatccacgtcaactttattttagttgtcaaattgggcattatattttatgtaaattggtcttttaacatcattttcctgatgaatgttggtgaccaccacattgtgaaatttaagaatccgtgttgcatgtttggtagctctctgagtttcaggccataaactcagctccagaggttaccttttaagtgccaagaactcaagtgcaaggtggcctactcaaaaatcatttggtagcattcagttattcatgaattcctctctcgcatgcattataaaaagtgatctgctttaaaacaccgtaatctgatcataggcttaaaattaaatatgagtattactttcatgtacaaaatatttcctttatag

SEQ ID NO: 133421 - DNA, 1868 bp, Homo sapiens
gagaatcgcttgaacctgagaggcagaggttgcagtgagccaagatagtgccactgcacttcagcctgggcgacagagcaagactctgtctcaaaaaaaaaaaaaaaaattatgggaggggtataaaagttgaggtgtaatgagtattcatcaagaattaataggaagcaaatttgaaatttgctcacagagaaatcacaccagtatatcaaaaacagctaatactacacaaaaaacataaatgccataaaaacacttttatttattattttataaggttacatttgttttctgggcatactcagttgaggtaaatggtaggattcatttgtatcacctggacacagctcagctgtatggagtggtaagtgtcctgttatttctgtaacaacaacaatgaggagagctgacgctgacattttttctttcagtgtattgggaaatcctcattctcgtgaaaactgaaaattaactgtgttcatgggtgaataaaattaggctgcttgagagggattttcctctgtgtgtattttattatttggggtaccaaaacaattttgtaatatgtcccctgaataagacaaattgaaaaggcagggaaaaatgaggacagaagagaccactggaggtgtttggagtttttaatctttgctttgtgtttttatatcatgggcaatcacttgtatttcaaaaccaatggtaagggttacagcttaatcttatcatctgttcaggtatggatttgttcagtattagcaatgggaccacattaaacagtttcaaatgcctcaaatctgttgtgctttcacagtggtgacagtggggaaatgttgactgcttcctattttttccttgcactcagaactagctgcctttacaatgatccagaaatgtcttctatggagaaggagtaagaattcaccatcaataacagctatgtggttacttgtagtgttgtatggctgggctctgaaagaaaacacactgaggactgggtaaaccctgtttagatgttcagctttcctgtgctccattcctgaaattagaaacctgaagctatatttgccagcttcacaccatttcattcacgatcaccccttaaatttctaaaggacaacctgtggacatggcattctatttttccaatccaaaaatgggaagaaaatgaatattaggaccagatgtaagaacatttgggcaagaggaatgcaattctgctttctgaatgacatcatctctattttaattagtggaagttggaacttccatttaatactttggtggatggagagaaaatgtgcttgttttgcaacatccaggaggaattcgagcctgtatgagactgtaggaatgatctatttagaggattgccatcctgtgagaagcagaaattggacatgtagtgagttcttaaccacgttccagactgtaaaaagcttcacacgcagtgtctgattttaatcctcagaataagtttatgaggtacatttcacagatgaggaaagagaggcatggagagacgatctgaccagcccactgttttacagctgtaaaaatggcccagagctggaatttggaccttggcagtatagctccagggccaatggtttttaaatcagaaagaggtggtcttaatgctagatgggtgtaccacttccaatttaatgaaagacaaaactattcacctaagagaacagagcgaattagtggccaagtcagtttcagggaataaactgtggtcaccagcaagctttcagagagaacttggtcatccgacaaggagcttccaatttggtttgagttgtggagaatttaacattgcccttgttcctagcaatcaggaagcagaggggaaagatcagttttaa

SEQ ID NO: 133422 - DNA, 1023 bp, Homo sapiens
atgattaattaattaaaatattctgagtctcagcttcagcatctgtaaagtaaggaagtaagttgcacttcctggaatggttctgagggttgaatgcaaacagggtacacaaagcacttgcaaagcctcccagcacagagttcgcaatccagaatcttatttattgttacacctgttgcttttagagactctccatcatatgggaaagttcaaatgagaagttaagtatacctaggacatttttcattcaactgcacacatcagttttcaagggctccatttgggaaaagttacttcaggaggaagggttctagttggaaaaatttttttctggagaaagaaatttaccaccattcatgtgctgcccacatgtccatgtgttctgttttctgtaattcatctccttgggatgtcctttctgccatttctgttactgaccttcatcacctcaatttcatgttttgcaaatttcaaatggatacgagccatggctcctttttatcactgaataacattcaaaggatctaatctcagccactcccacaaccagtcctcagctgagatggagcctgtcatcaaagggcttaaatgaaagaaaaacttgcccaacctagaaccaaatttataatcattggttacagttgattctcattatttgtggcagttatgttctataaagtcactgcaaacacttaattagtgaatactgaaatagtgttccaagggaaaatacaggatgttcagttcctgcaagcatctggtcacaatgttttcatcaatcaatcaatatataacctttttttatgtgtgtttctgtttaaatgaaccttacttagtatacattgttgatttatgaacattgaactcatggccaacagtattgtaacttgtgcataaacaaagcttatctaatacacatattttcttcataaggcacatcacagctttcctgcacttgggaatactagtattcccaatacagtatttcagccctatgcttggaagccaatttgaacagcaaaa

SEQ ID NO: 133423 - DNA, 1029 bp, Homo sapiens
catcatcaagtaagtcctgacagtttcagagatgtgttaagaaatagtactagtttgaggctgggtgtggtggctcacgcctgtaatcctagcactttgggaggctgagtggaagaatcagttgagcccaggagtttgcaatcagcctggacaacatagcaaaaccccattcctactaaatatataaaaattagccaggcgtgatggcatttgcctgtagtccagctattcagggggctgagatgggaggatcacctgatcctgggaagtcaaggctgcagtgagctgtgatcgtgccactgtactccagcctggtggcagtgagaccctgtatcaaaaaaaaaaaaaagtgtgtgtttggagaagtgggttggaaaagaggtcagttctggaacaggggaaatggcactatcttatttttaaaacaatattaaatatcctccaataaatacaattttttcctataacctatagataattgttgtgttcttttagatcctctttcacctaatcttttcctggggttatttgattattgttcatttttagcttgaactttactaccactttggaaaaagtaacagttacattggttaattggtatactgtctctactggttaacagtgtatcagtttcttgtgtcccccactctgcacagacacaagacggtcttagcatagcttggatttctttattgtcttatacaaagtaatttatctgcatgatgctaggaaaatagaaagaaataactctttctctgtttcttctaaaccttttttgtttgtcatgattaagtagagggcatttgcccagtggtgggtgaggtggtgaggaatggtttccttgctcaatagagggtaacgcagtatcagcgtcagcatcctgcatgggtactgaaggtctcaggatgatgctacaaaaactaggataaaatttaacaaaataaatacttggagctgggattttaaaacagggatatcggagaatgaacagttgtatctggtacattgttgcaaagaacgattgtt

SEQ ID NO: 133424 - DNA, 1013 bp, Homo sapiens
tgaacatgacgctgcaacattccaagggcagacagcatttacacagtgagctgaactgccatttaaaatgacatctgaagtactgtttataaacctcagtctttccctttcgaaaaaaatttcttagaagttcatggaaataaagaaagaaatcaaagtaactgagtggtcatgatcttgaaattactgtaacactctggagccagattgctacatttagaaaaacgcttttgaaaggatgctttcttgcttttaagttggattcattatgtctgttgtctcttttaatgaacgtctgtcttttcgtcatgctgaggatgaattgcttatctgtgcggtatgaggattagtatagctaagccaccatatcctttgtggatttccatttaattatgcatcttcagaaatgaaattattgtaacaagcaatttttgtattaagatatgtctcctcctgccattttccttcatattgcattctaaaaagtagttgataaataccctgcatattggaaaagatggaacgaaagcaaaaatatccagagaagctactacgttgctctctcacaaacatgtgttgcatcagttgaatacttacataggtagcatcttctaagatctgtagtataaatactgtatacaacaacaccgtatcaccacttgtagtataaatactgtatacaactacctcaaattagtaatacacacaaacccataattgggtatatttttagttagttttgctctcttcccccatatttttttgcagtagagtcacactctctttgtagaaaacatcttattaaactgcttttcaagagtgaattaactccatccaaatctatacacagccattactttactgccatgaaatcaccagtgggtatttagagttctgaaaaaactaacacgttgggttctgggaggactggaccaggcttaagcgtatgtcctgtcctcctactcaaagcttgaagaaaatctctttaatgattcaacagtccaaaactatat

SEQ ID NO: 133425 - DNA, 1050 bp, Homo sapiens
tctgagtctagtacacagcctttcaccccattagaaagacctgcaatctttctttaccctgatcaaggatgagttggtccttggaccactacccatgcaagacagcttaagttttgcacctagtctccccctcagcatggccttagcaatggatgtggttgttcagttaataaaagaagacttcattgagtgtactttatatggtcaggatagtgctaagctctgtaaaggctgtacaaaacaaggactttgatcaggttgtttctgcaggatgaaacaaaacaaaggctgcccgtaggagtactgtattgtaaagcttaccatttggctgtttagctgcactgtggaggtcttgctccttcagccttgctctgtgctttgtttccagaagatcccacagccaacaaagattctggccaagagtcagagtctattccagaatatacggccgaagaggaacgggaggacaaccggctttggaggacagtggtcattggagaacaagagcagcgcattgacatgaaggtcatcgagccctacaggagagtcatttctcacggaggtagtcgagctcagcatgaatctgggaaatggggaaggggcagccattttatttaaaatcatgaagtgagtctagacttctccggaacatgacatctcaaagaccctattctagagccaatattcagggaactatagagctaagtatatttcctcatattcaattcaataaacatttgaaatcctactaggcaaagacaactttccaatataaaacgggcttttcatgctacatatctgatagcgatcatcttgtgcaaatttattgaaagtcatagttgtctaatttaaatgtctgtttggcattcttatcagtccattgtacggttgaactgaacagagtatgtgacaccatggcctgtgtcataacactacccccgaggtgcttctcattacaaaatggccttttgaatcctcttcagaagctttggggattttttttttagacttagcctggtaattgtttcccctaactgaagtttgcctttc

SEQ ID NO: 133426 - DNA, 1110 bp, Homo sapiens
cattatgtagtttctgtttcagttctagccagggtggaattctctgaagttataatatttgaaagtgaaagcgagagagtctgggacacagctattgcttttattcatttttaaaattcacgcaatcttaaaagcaatacagtgccacaattaagtggtggcctgacttttagagacatgctaattctagcagttccactcctagaagagcataattagaaaattcaccaaattagctaattatttcaaccaatggtcattgagccgacatgagcagtgcagttcagactctaccttgacagagcttaaggctttatttcctcaaaaaggaaatggctaaacgacttgttttatagtctattatgcttaagtagagttttttttttccataagttattggggtacaggtggtatttggttacatgagtaagttctttagtgtaagtagagattttatattgcatttttatcatgtgtgaatttctgtagttatctgggtagttgattctgtaggttgaaatacacaaataggaggtgaaagaaggtctggaatttgtactatttcctgtcatcccagagagtcttcagcagctcctctatccatcccagttgcccctaccagctcctgctcctttcctgctaatatattgacaaaatcccacagaagactgtggcatgacccaactggcccctctcttgcctccgtatttgcttcctttttgtcaggagagctttgtcacaccacatctgaaccttttatttttaaacatagtaaaactgtcgagcaaagcagtggtggctgggcaagctggtaattaacactgccacttgctgacatggctcttttaatgtagttaacatagctgtgttgaaagaaccagtttaatggccacaaccctgttttaggtcttaaatgcaaaggacagaattgtaaactaagttgaatttttaaatctaccttaattttcaaatgaaagatatatagtcagaggttgaaactttgaaaacacaaagtgcctctgaatagctatattttgtaaacatgaggacatggataagtgactgtataagagggttggattataaatatgtttgagttctgaagtatga

SEQ ID NO: 133427 - DNA, 1139 bp, Homo sapiens
tcttaggcagataactagaaaaataatgtacatgtgcctttagaatatttcaggctcaataattcaatccaacatagtaagtggtagaactaagatttaaacccagtggctcttaatagcagcattttgctacttgacaggtacgagaagtttgatgtcaaggagaacacacaaaatgacaaagatcattgtaaggaattccaaaaactgcaggatcatgggatacccagacatctgtccctctaggtcctaggactttcaaaactggggcctggtgcagatcttctctttgcatacctccccaatctttgttgctgaataacgtggtttgattccacctatcatagtgtatctctgtttggcacaggttgtcttgttcctgctgatacattattgtctgtcttacatgccaacctcttgcatgcccctttgctaccagggcacaggtctagttttagagaacacacagggtcaaagccacaggaagaatgtggacaaagaaactccctgatgctgagcttttgaaggggtctcaggagttggtaggtaagtacacaggcacttacctctatccaggggagcagcactgagtttttgaaggtaggggtcattgtattagctccatcatcccaactccaccacgagaatgagacgggtctgttttgttcctctatatcctcggcacatagtagacacttaatagatatttgttgaataaatgaagcaaatgcagtaatcgctaagggtgcagattattttctttcatcatagtgctttattgacagtaggggatttgacttgcatcctggagaagcagattaaactccaaaggtttggtagatccagcgttacatagtgcaaagtacagtaagagaggcagaaggggactaaattaagaactttaacataaaggtttatcatgtttaaaattaggttagtgcccacatcataaggactcaccctaggtgaatgaaattacgtgaaactcacagagaagaaatatatattatggtaaatggggtcttactgaacaaaggtccagggatgaaaataaatcaagagaaatttatcgtgaacagtggtcagcttcttagaagaacatatagattcgtcacaattgcctttggtatttcctgttt

SEQ ID NO: 133428 - DNA, 1099 bp, Homo sapiens
cttttcaagctttttgttcctatatgctttgatgctttagcaatccagacgtaaagatatttactgtcaatatgaatctgggctaagaatgtggaaaattggttacccaaatcaggaaataaatttttgagcatagcataagtcaaatattccctttgaaacaataaaggccagctatatagtaagaatgggctagatcgtaatgtggtaacaaataactacaatatctcagggcaaaacacaacaaaagttcatttcttgtttacatttccagcaagctttcatcgaggcctctgctcatcagaggcactcgggacacagcctggccgagcccctccacagccacctatgtgggaagaggatgtggctcctcacacgcttgctcctaagccttctgctcagaagcgacatctctcccttccactctttcttcattagccaaagcaagtcatgtggctaccctaacttcaaaggggacaggaaagtgcaatactaccatgcactcaaaaggcagagagccagaaatacttggtgaagatcaatatgtcataatacattgatcttctaacacacatggtgttaatgtcacagtaccatccagcaaagaaaccatgaagcagttttaatacatcctctagatggagacatgtagctgtttcagccatagtacagcctgacttgtgtttacaactccctcaacctcttggttagctccattctgtataaagaaactcaaaattaagtagaggctacagatagataaagtaaaatacagacctttacactggactggtttgttacctaacagatcttgagaggcttcagttactgatcacaaaactgctgtcctgcttagtcaacaactgctgtttggccacttcatttctgcaaatgtttatgggcttaatgtatgaatgtggttgaagtatttacaaagagcgtgacttgggtttctcttagatttgcttctaggctattctggctcagctttccctctgtcccaggggttttctaacatgtccctatagccttctttttgggggggagtgggacggagttttgctctttttgcccaggctggagtgcaatggcaccatct

SEQ ID NO: 133429 - DNA, 1046 bp, Homo sapiens
gaaagtagaaccttgatttctgattcataatttacttagttggtttcatgtactttggccaatggtattgtattccaatagttaaccattttaattcagattaagagaaagtagggccaccctgcagctaagataacaggttgtgtttaaaggacaaataaaattaaataattagtctttagattcttttctttttggacacaaaacatcacagccaccatagcctccctttgttggtcatcatgcatgctggggacttaggctcatgccttggaagccctgtcttcccagctctctgctctcttctattcggctagagacacagagcttgctctctgcaatgatgcatcctggattatcattttcctcccgagctttcaccatcctggactatacccgtgagttctgataataccatctggacaacatcatggattttccatgtcagtttgatcacttcccctctttccttttcttagtacactttgcacagctttttcctcttccgtatgtccacatgctccttttcagcaactacagcgccattcttcacggctacttcttctgcctaggtagtactgtactgccttctagtaacttcgtaatgcaggttaaaaagctatgaaaaagtctttccatatgtcaccaaaatgcctaaggctttccctttaaattgggtatttctggcacctctggctccttatttaagacttctcttttaagttcacagtcacctttgagggcatgggcgtattgtcagaaagcatttttgaataaatttatgcatcactgcaccttatataaataaaatttgtatgtttctagaccttcagaaagtctagaaattgaaatccttgagcaggaggagataagttggccttttactcatgaaggaaatgaggtctcaatgtctggctttctgagaaacaagctccacgacactggcagagttcagcacctctatcttcattcattgcctttgataccagataccaataactgttggtatctggaaaagtcattggtagacttttgttctagtcatt

SEQ ID NO: 133430 - DNA, 1030 bp, Homo sapiens
gggccgctggggacgctgatctgcaggagggggcggggtcggaaaaaatccggtagctccagaccggtgtcccgttgccaggcgatggggaggaggcggggccgacaggaaagaggagccgggctcggcgcgaaaagggcaccctccagagccgcggccgcgcagccgcctttcctccctctcagggctgcgcgcccaggtctgcgccgcgctccgcctccagccgcgcgcagacttgcgcacgcgtcgtgagagcgaccgcctccgtctctcgctgggctcgctagggctgcgcgttgggccagcgggggcgccgcagctgaagccgccccggagccggtgaaccgaattacctcgagggaggggcgtggggaaggcggcgggaggaggagcgcacgggccggctgccgtgcccaccacggctgaggaacatggttttcgagtcggtggtcgtggacgtgttgaaccggttcttgggggactatgtggtggacttggacacgtcccagctctctctgggcatctggaaaggtaaggaggccgccgccgccgctccccggcctctcgtgcttcccggccgtctcgctgcccgagcggcgtcctgcgttctcggggcttcgagcaccttgctcgccgggtgcagccacctgccgccgcccgcctgtgggtcaagttacgtaaagccgggcggcagttccctggcctccgccctcgagttgtttatattttgggggaaaggagagggtcatgagtgcgggatgaaaaggtctatattttccgagcggagcggacttgccgtgggctccgtgggtctggcgttcaagtcccggcgaggggccgttctctacccctggccccgcacggtccggctttagccgcgcggggcgaggaggcgagacgacgccttcctgggctgggtcccatccctgtcctttgcccccctgggtttatgacgaaggccccagaaatcccccgcgtgttgcatgctgcctcgcacgtgaaggcagggcgctgtgaccggggacgcccg

SEQ ID NO: 133431 - DNA, 1020 bp, Homo sapiens
tgttacagcttttgcaattgtcctatagttcttagacattctgttctattatttttctcattttctttttttattggctttgaattgggaagtttttatttacgtatcttggggcttactgattttgcattaaataattttttctcaatggtttattgcaagtatatttaaatgtagtttactttttgcatgttgatcttgtatcatgctactttgttagactcatttgtataattctgattaaaatgtttgtatatattaacattgagctacaattgcagaggtcaaaagatacaattagtgaagatttggtcaagcatactctgttagactatgtagaagaatgaaggtgagataataagattataggcagattatattatctgttatgcacattatttatatatttttcctgattatgacaggaatgaagcatacatattaactttttaaaatgaaaaatatttgattgtttgaatcttttttttaatcttttttaggagctgtggccctcaagaatcttcaaattaaagaaaatgccctggtaggttttgactatgaaaaatttgtaaagttattgcatttaattatgtataattcttcctgattcagtttgtcaccttaaattatttaaatttgagaaagttttttgtaaataatttttgcaaaatgtaaattttgctaaatggagttttaatctccctgaaagcacaaatggacagtgtgattttttttctatttaaaaatacatattgttttaggctgggcatggtggctcatgcctgtaatcccagcactttgggaggtcaaggcaggtggattatttgaggtcagtagttcgagactagcctggccaacatggtgaaaccccatctctactaaaaatgcaaaaagcttcgccaggcatggtggtggacgccagtaatcccagctgccagggaggatgaggcaggagaatcgcttgaacccaggaggtggaggctgtagtaaatggagatcgtgctactgcactccagcctg

SEQ ID NO: 133432 - DNA, 1026 bp, Homo sapiens
gaaaactaatttctgctctgcaagtttttgtatggtttcagaaaatactgtgctttttcttgtttggtattatttttaccagtgtttactgtttatatcttaaatatattggttgagcagtaaatgattggaatttgaggttttaacatctttaataaaaacttatctgtcatgtttcttgtgttacagttttactggtttaaatattgtgcaagataatagtgtctttagttgggacttggagatatttttgttatatagatagttttgtggtaggatgtatacattgttattgaagctatactgttgtcacttggggaacaaagtattctgaaaggttacctagattacatgataaaggtcttcataattatgtgtacttatggttggtattagaccacataccatagaaaactttcatcatcatatgttactgacagtagaattctatcctccccactcctaccttttaaagactgtttactgtaagagggggagaatgtcacccatttttatctacctaacattttaattttttcatatttctgattatttacatgtgtacattttaaatacttacaagtttatatgtattgaaatacttgtaattatgctatttttacagttttatattttttcattagcgtataaaaaggatttctcataatctgagttgatttgatctcatttattctgtaccataataatccagtgaatgcatatttggatattgtagaataattttatttttccattggtacagaagtattacaatacatatttttatataacttttaaacttttaccaaaggtcattgaattttacagtgatgattgtcgtatttcagtgtatgtaaatttaacctcaattcaagaacagtcaaaaaatatatcaggagagtagatagactattttctttagaatctgcccgccttctcttttcttgcctaatcttgtttaaaaatgataaggtaatttttagtgataatataagatagtagaaagtacactgaactaaacccaag

SEQ ID NO: 133433 - DNA, 1068 bp, Homo sapiens
aaacaactctaaaagtgtatgaatcatctttggctcactggctatacaaaaataggctgtagcatggatttggatgattcctggactgaaggactgttgtgtaattgctcagcagcattaaggatgcacttgagatttatgacactaaagtgagacccagcagtatgtttttacccccggccgtgttcagctccttaggggcactgtggagttaagttggttactccacactgacgaagtgagaagttaaggagtctatgcaaaggaatgattaaaataactgatggtggaacttcagtaaggtggggatggactgaggatgtgaagcagaggtgaagggcagagaaaggttggaggatcagtgaattgtaggtccagggtagcttctgtcaccagccactaaatttatttatttcttctgcttttttttttcaatgtaagaagaaatacagaagaaagaacaagatctttaagcatttatttatattcaaatgaacatattcttgaatgtttaatgtttaagaaattaaatgttagtccatatcaatgattaaaataaaaggaatatatcatctttatatacagattagcttataatttaatgatggatctttgtctagattctgctattactggtcttcctctgaattgttcttattctttttggcaccaaacacaaagagttgagaggaatttatcttagattatgggttcagccaagcaggtaatccagagcaaactttcactcttcatctctctccttttaccaattaaaaggaagaacacagatggatctagagaaattgatcagaaattcagaaattataattatataatggaaaccagtgttaatcctcttagcatttctaatgttcattcattctgtaaaactgtgtacttgtattaaaactatttttttgattttttttttcttaaaatgtttctgcttttaagtatcatattggtattttgagggggagttcaatttgcctttattgtatttatggaagacagtgaattttaagtaggaaaaagataaagaatcttctccacacatggttcatctga

SEQ ID NO: 133434 - DNA, 1112 bp, Homo sapiens
tcagcttccctatcagatacactgaaccaatattattaaacctgtattttaaaagctaaaaatgttacggagtctatgcaggataatcccattttaaaactcaaaagtcttgttattccagtttttaagctattccctagtttctagaagttacaattactctttcagttgactatttcagttattattcagatgactaaatgttatttgccaattaatgccttaacagttcttgtgtagaactatatttaacaaaatggagtgattttgcttattttcacttaagaaagaggaaagattaatattgaatggattattaatgcaaatggagttgggtaaaaaggaagtactcagataatatatcattttcctaatctttgtattatagttatgtatgttgttagagtagaagcaatgtcagtaatgtttcatactgttgatttgagggtgttaaatgtttttctttttttaactaggtgggcttatgctatacatggcgttcttgaagtaaatgtttgccccaggttatggatgtggtcatggaagcatattagaaaacataggcaaaaagtgaagcaatataaagaactgtataaaaaaaagttaacaagtaagaagccacctggtgaacttctcgtgtctttggaggttagcatttaaaatgaaattgttgagtgttttatactacatagctccttattggtcttcagtgactgatactccctacctttcattccaatttttattgaccttttcatctcttttacttagacttttttgtgcttctgttcttaacttcagctgaataatacaagatttgttgaaattctccagtgagcttttgaaattcgagattattctcaatcggaaggaatttgggttcatgcaaatagtatgattatgtcatttttaacctcaaaagtctaaatagtgtttgctacattgattccaacttctctgtgttggtttcaaagccttttatgtgtcaccactacattttccctatgttacaatctgaccatgcactaatttaatgtttcctgtactctgtatatttaatgctcattcttttagccacgcctatgctcataaatgctacctgcctttatctc

SEQ ID NO: 133435 - DNA, 1018 bp, Homo sapiens
ttttcttgccttataccttagaatatatttatttatttatttgtttagagacagggtctcactctgttgcccaggctggactgcagtggtgtgatctctgctgccagccttaacctggcctcaagcaatcctcccacctcagcctctcgaatagctggagccacaggcatgcaccctcatgctagctaatttttgtggttttttttttgttttttttttttgatagagatggggtttcgccatgttgctcaggctggttttgaacttctgagctcaagcaatccgcctgcctcgacttcccaaagtgctgggattataggcatgaaccactgctcctgaccttatgctttggaatttaatgttacatatgtccatttttaatcctttcaaaaatatatgttactgacttgttctgtgatcttttttctgggtctgtaattgcatttattttaatttctaaggtagggataaatattgtctctttttttggggtcaatgtgatgattcttgaagaaataaaatgtccttaaaatatttggtggtttttgaaatgaatgtactataagaatatttgttatgcttatatatatatatatgttttcattttattcttctgaatataccttagtttgaagccttgaagttttttgtccacttgaaaagtatgtctattgttctaagagaaaatcatcaaaaacctgagctggtagatattgtaatagaagaatttagcaccttaattgtgcaaagaccaggagcacaagcaataaagtaagtattaatttatctttttttatcatatatgaaaaaacttcactgtgttcttagacattaggtcacaatcttagtcttttgtaaagagcactatagtttcatatatccttttgtggtttcaggaaaaaggttttttttttaattgttaagataatacatgttcaatagaaaaccacattccagtgaaacatagggcattaaagaataatacaaaaatgatcagcaactacactacacaaaaaga

SEQ ID NO: 133436 - DNA, 1028 bp, Homo sapiens
gccatttttattatattcactttatccttattggtagatatgagatatactatctgtcattttcctttgttctctttcctaagataaaataatttagatgagtcaagaaatcacattttgataagaccttcaggaaatgtctaactagttgtcttttgttaggcaatattataataggcatcttgattcattattaatttttcttttttcacagaaaagtgtgtgttatattcttcaaaatatatgtgtcttctctggcttttgctcatttttctctactatttttatatctgaatagttttaaattagattgtacatgaataccttacctctagaaactgtagggtttgcatttattcctgtattctttgttaaaatctgggaattccattcctagtttacattctgtatattggtatattatatactgagtagaaaccaaagcataagatcaggctacttctagtcagtttttcttgattgatagaaactcatagttaaatacaaattaatcatattggaaatccactatagacattcagattttgagattttttatctctaagatttatttacctcaacttttattacttaaaaaaattaccaaacagtaaatatccacaatataaagttcacatgttacagaaatatgttttagaaagtggaagtcttcagtattttaccttctgtacataataacctttaaaatttgaagtctgttcttccaactttgttttcttttctataccaatagtataaaaatgctaattctatgaaaaaaaatggaaagcttctatgataggtttttgcacttaatttttaaaatttaatatattttggattttttctagaaagttaaaatttacctatttgtgaagagactcatatatattataatgattctggttacttaggttctttccttccctcatattcctcctttcttccttttattttgttacattctcctctattaacatcctggtttctttcttgtattataggttgagtatcccttagcagaaatg

SEQ ID NO: 133437 - DNA, 1050 bp, Homo sapiens
gttacaaaagcaggattgttcagtaaatatgactacatttaaaataagatttgaagtaccaaaggtaggtactacggtaaaattaacatggcttaatttgtttgctgtttctatatttacagcttactatatagtctcattgttaagaagcactatctttttcaccctaattaaagtaattccagacttgctgtgtgattcttggtcactccccgccccccccttttttttttaaataagattaacttccttaatcaagagtgaaggatttaaatttattcagtacatgtttttgtgaaaacgattatttatgttgtgtgtgtattgtatgtctgtgtgggtataaaatctctcctaaattttaaataataatatatcaattgtatgtatacctcatatattcacatgtaaccactatgcacataaacatgtttttgttttatgtagtggtaatttcttttttctttcttctccaggttttgatcgagttttatcaccttgttggagattgtgaactatctgtggtagaaattcttgttttaggattgggtgcagaaattgagattagaacatacgatttgaaagcaaatgcctttttgaaagagttctgcttaaaatgcccagaatacttgggtaagaatctctattttttaaaataaataaattaatttcattgtttgactacctgctagagagttttcaattctttaggctctgaatcagtacatttgctgaaatattctcagagaaccattcctttttgagttaatctttaacttttatagttggtaatgtggggggcacaccggagataaaatgaagataattttattcattatggaaaatcagatgataatggttgaattttaaatctacttaactgagtattggaacacttaattagttttctattgttgctataacaatttaccacaaacttagtgcttaaaaacaacacaaatttattatcttagagttctgtatgacagaagtctgacacaagtctcactgggcaaaactcaaggtgtcagtaggacttccttttaggag

SEQ ID NO: 133438 - DNA, 1049 bp, Homo sapiens
ttagattctgatataacagctatatacaaaaaggtaagaattcttttaattaaataatagtacatcattaaataggattgtcctttaagagtggtcataggtatcatttggacatttgtcagaatttagtagtatggcttattatgtgcatgggttttggagtcaggcataattgggttcttagctctactccttagtagctgtgtgaccattagcaggttacctaatcttggactctgtttctttatttgtaaaatgaggattacagtatctcataaatgagataagtacgaataatgctgcaggaacaaagttttgggagagaacctagtaaatacctttttcactttttttttttttttttggttcatgtactctgaatcttgtaatgcattttagatacatttgagggtctgaagtctgaggaagtgagattttttataaagcttattgtcatcagcgatcactagtatcgttgttgtaataatgataagagagtcctttgaactggatgattagttgttgaaggttaggtaatttgttactggttataaaacagtgaggttcctgctgcagagttgaacaggcaacatcctacctgaagcaggcaggattatgtatttaaggaggttaaaggaatatcagatagtaggatcaggaaaaactgaagtacttgttgagtcaggaagtcagcatttggaatatgttgagaagaaaggaaatagataaatagattttgccagtaatactgtagtgatgaactgatttttatgtttaaaaaattcttatttctaatatcttcttgttatggcttatttagtgggatagaaaaacagttccaacatcaaaaagaagtgactcatagcaataaggaacaagaaattttccagaagccgtggttttatttgcttctattgcttttattttaaaaatcataagtatcagagtatttaagaaataggttatccattttattttccctatctagaaagtaaagctcacagaaataaagtatctacgaaaagttatacagaactgagagcatgatc

SEQ ID NO: 133439 - DNA, 1058 bp, Homo sapiens
aatctgataaggaacagaagtatagcaataggaggagactcctttgaagaatccagaaaaatctattcacatacctcaaatcaggaatagatttcagtaaggtgtagatatacagtgtttttcaaatttttgtcagtcaatcaagaaatacatggttactctcattacgaaagtatacttgcaaaatgaaaatgcatattcagatatttcctcttctccattaaaaaaaaaagaaaaaaagctggagccacacctactaccttgattttatgacccacaaaggaaattgccaccaccaatttgtaaaagtttgtagtgtaggttccaataaaccagttacagtagaattgttgcctcatttgtacttggcttgtgaatacttgggagattttctaactatgttttgttattttttactgttttatttttgtactgaaaatacatcatttcaaaaatggattgtgataattaaattttctcttattaaggctgtttatatcactggaaaagaagttttcagcttcaaaatggtttcttacatggatgcaactgctggttctgcatacacagatatgaatgtggttgacattcaggttaatttaatagttggttgcattgaagtagtttttgtcacgaaatttctatattctatattggtaagtattttattaaattattatttattttatactaattggaaattgctatatgtcaaatatggatgaagactagtaagaattccttgcttgagattttttctgattttttaaatcttctgggtaccatttattatacataataaatgtgtagttccttatttatataacatcgttttgacataggaatattctaattaattgaaatatatatttcatatagtaacattaagtttatgtgcattatatatcataaatatgttatatattaattagaaccttcgttttatatgtcattggcttaagtcttcgttttacctgacttgcaactataatttaaaaatactgaatatataattgaagtttgttttggtctgaagtcatcattaagaaaaggttatt

SEQ ID NO: 133440 - DNA, 1034 bp, Homo sapiens
taagcatattaaccatttagcttcagtgtcttataaatataaatatcaggattgcattagctgggcatgttggtacatgattgtaatcccagtttcttgggaggctgaggtcagaggttgagcccaggagtttgaggctgcagtgagctaggattgcaccactgcatgccagcctgggtgacagaatgagacccattcactaactacctaactaaataaatacatttcaggatcatattccatagacctaggactttttcgaggttcaaataaaatagttcatgtaaaacacattgtgaactctaaaatttttggtaaaccaaatgtatcattttttattctacatttgtaaaatgaggtgcttactaaccaaaaaaatccaaagtagacagataactactgaaagttcattttaaaggtttaaaattactatattatttggtacattaataacaaatagttctttattcataacttcattggtattaacacctaatttagttctatatttcacaagctactaaagagcacatggtcatttagaaaactgaatattcagtttgtaaaaatgtttaattggtgtggtagaggattgaaacagtctttcatttttctcctctgagaattttaactgcagttaaattctgcaatgaagtagcagtgctaaaaagaacaaatcttttttttttaacagttcattcttagtcaagaagatataacaactatttttaaaacattgcatggcaatatatggtatgaaaaagatggtagtgcctcacctgctgtaacaaaagaccaatacagtgccactagtggagttactactaatgcttcacaccattcaggaggtatgtttttaacttcaaatttctttctgctttcctctttctctcttttttcttctatcttcttccctccccttccttctgtcttttccctccttcctcccctctttctccctcctttccttctttctttccttctttttgtttagtttgggcaaaataagatttgtaaatctgtttctaatcagc

SEQ ID NO: 133441 - DNA, 1037 bp, Homo sapiens
catactcagtgattagttctatttttccttggaacagaacagaagtaggaacagaagcatcaagaggaaatagaaacaccaagtgttcaattaatattcccaaattattatggaaagagtcctaagccagaagttactgagttttacatctgaattttctaatattttattttcttgaatgtcattttactatacctgtttaataattctattaaatctatttcaagggtattttaatgagctacttttcatgatattttcttttattaaataactttaattttttcaaggagcaactgtggtgacagctgctgtggtagaagtacattcacgtgccttactagttaagacaacactaaacataagcttcaaaactgatgatctcaccatggtgctgtatagtccaggtcctaaacaggtaagtccaggaagaaaagaaaatgtattttcacatgtgaaatttgcataggttgatgtttttaaagtaacaaatgttaatatttaacatttattttgtagtatctgtccctctgagaaaaatgatctttttactttaataataattataactatttcccttttaaatgagttatctatcatatagctaatgtgaaaaataaattgtaaaattaaagtgatatgtatatatttttagcctttcattagagcccttcggagacagaattttgatgtttgttataagcagaggcaataatttgtagtagttcatatcatgaaatacactttagacttgtgtttctttgtaattttgtgttggtttctcctttcataggcttcctttacagatgttcgtgatccttctctgaaacttgctgaatttaaattggagaatattataagtactttaaaaatgtatacagatggctcaacattttcttccttctcattaaaaaactgtattttagatgataaaagacctcatgtcaagaaagcaactcctcggtatgtattgtaatgatgttctaaggttttacttgagaaatcgttgatatattttacagaattcatctccagaa

SEQ ID NO: 133442 - DNA, 2052 bp, Homo sapiens
aattgatagattggttgagtaactagaaataatcagtgcaattaaattggtttttacattctttaaattacattctctaatataaatctaatataagttattgttaatccatgctaattgcaatgggaagtacataaaaaattgaaaagaaaaaatatcctgagattcaaactcttataatttattgaacatacacttcctcatttatgatacatttgtgttccagaagtttgtaagtttgttatttggaacactttatggatcttcccaagagacatgacttcagaatgcttttttttgtcagtaaaagagataagaggtctttgagttttactcatatgtttgattacttctaagttactcatacataggaattgttgttattgtgttttccagaatgataggactgacagttggttttgacaaaaaagacatgatggatataaagtacaggaaagtcagagatggttgtgtgactgatgcggtctttcaagaaatgtatatttgtgcaagcgtagaatttctgcagactgttgcaaatgtctttcttgaggcctacaccacaggcactgctgtagaaaccagtgtgcaaacatggactgctaaggaagaaggttagttattggctaaaatatttaatatttgttttattgaagtgctacaacaggacttaaccttgattagccttttagatcatcaaagtaaatgctttaagaaattaaaattttatttttcagagtagaaggaaaaccttaatgtgttttcttggaggatgtatagtttgcattttttaaaggtgtcagtatatattgcatttaaaaattatgaaacctatgttagaataagtaattgtacttctcttcaggcagtaatttgaaggaatttgtctagtggaaaaaaacaagcagagcaaataatgaaccaaccataccttttcacaattaagataatatttcaatttaaagcactcatttatttttgttgtatttattcctagcttttaacgtacggtttctctattatctttttataatatgtgatttactgtggtatagtagaaagagtatcaagttgagagttagaaactagattagtttctaggctttccaattaaatagtggagatttcccctcatttaaaaatgttcttatgcctatagcttcttcaagtctttactaagggttgtagttgattcctttgggatctaagattcttttgttttactttttactattatttcattttaatattttcttataaataataaattattcataatatatagcaaatattttaatctatttttatttgttttagtacctacacaggaatcagtgaagtgggaaattaatgttattattaaaaatcctgaaattgtgtttgtagctgacatgacaaaaaatgatgctcctgctttagtcattacaacacaatgtgaaatttgctataaaggtaaccttgaaaatagtacaatgactgctgccattaaagatctccaagtgagagcctgcccgtttcttccagtcaagagaaaaggcaaaatcactactgtgagttaactatttgatcatctgcttaattgtaactattttggatgtagtgtataccattttaggaaacaaaaactacctacatgctttccaaccttgctctgtaaaatgtctttctctctgcttagagagcttaatttagaatattatttaccagctttgaaactctttcattcttccagatgctgctcattattgttagtatttgtgggaatattgtcactaagaagttgggttcatcttgacagttttcagttaagatctactttgactttctaaccatgtcaattccaaattgctctttggacttttaagactttctgccagttgtttgctgtgttgtttcaattttattgtttcaacttttttctcccgtttggatgtttttgctcaaataatgagtttttccttgtctccatgtaacttcatttgaaccttcagccatttgctttgacatacttcacattgatattttactctctagtaacctcttggccttcct

SEQ ID NO: 133443 - DNA, 1029 bp, Homo sapiens
tggttaacatctaatatccctaataaatattattgaaattactttatacttcatcagtttaataatatctgcaattcatgtatattaataatatcatgtaattcatggaataatatctgcaagattcatgtaaatatctgcaagattcatgtaaacacataacaagaattatggtaatttaaaaaattttataaacaataaattgtatcttctattttgtggtagtaatgttaattcagtatttaatttctcataatatatatttaatatttcttgacgtagtatgtttgaaagtgttttgtatagacttattaatttttttccatttaggtttcaccagttattataaatactatgattaccataacttcagcactgtatacaactaaggaaaccatcccagaagaaacggcttcttctactgcacatttatgggaaaagaaggatacaaagactttaaaaatgtggtttcttgaagaatcaaatgaaactgaaaaaatagctcccacaactgaattggtacccaaaggcgagatgataaaaatgaacattgattctatttttatagttcttgaggctggaattggtcatagaacagtacctatgcttctggcaaagtcacgtttttcaggggaaggcaaaaactggagttccctaataaatctgcactgtcagcttgagctagaagtaagcatatttttccagttttataacagataatgatacgtatggaatattatgacagataatgatacatatggaatattatggaatcttgtgtagctatttaagcttattgtaaatatgatattgggtcaaaaacttttagaaaaaagttttcaaattttgcccttgaataattgcttttatgtatacattccttttacttttaaagtacatgtccacattaagtttatatttcaactgattttatcaacttaaagataatatattattcgacagttgttgattagattcagaatattttttttaaagagttaaattgaggccaggcccagtggctcacct

SEQ ID NO: 133444 - DNA, 1004 bp, Homo sapiens
ctgtggtgagctgagatcttaccactgcactccagcctggggttcaaagtgagacccagactcaaaaaaaaaaaaaagaaaagaaaagagttaaagttgaatacccttttttttttaaggatatagacagaatttctgaatatgtggataataatctcttctaatagaaatatgaagaattagaaatatatgccttatacttttatgtaatgtagaatcaaggaaagatgcttaaaaaggggttttatctggactaaattgtgaagagcgaatatgtactatgaagttagccaggtgaggaaaatgctgagggagtgcttataggaagctactgaatggcatgtagactggtttttatatagaagaaataacagggctaaaaaacatggtgggaaacaggatggaagatcatttttaatttaaaaaattctctctgtaggtgcattattataatgaaatgtttggtgtatgggagcctttgcttgaacccttagaaattgatcagactgaggattttagaccatggaatcttggtatcaaggtatatctatatatgtctatgtgtgtatatatatatatatgtattttaaaagactttatttttttaagaacagatttaggttcacagcaaaattgagaagaaggaacagagatttcccgtataccacctacttctgcacatgtatagcctccccctttattaacattccctcatcaacgtatatttgaagactgaaaaaattttccaaaattgagaatgtttataccacactcgacactttattttaatcacaacaaggttcaggttgtctcatcatgagccttgcccacatgcttccttgtttgccctctgaatataattttcaaatctaaggccaatgttgcctatgcttctaatacaattatgtaacaagtattatgttacttgttacataatttagaacaatttagaacataatttagaacacagtttagacattgttctaaatattttaatccttaca

SEQ ID NO: 133445 - DNA, 2016 bp, Homo sapiens
gaagggactgagaccagggaggttaagagacttcttgaagtaataatagctacaaagtggaaaagatgggatgcaaatccagctgcagaggcgttaaatccactctaaaccactatgctataatgcctgtgtcatcatcttgtaggttgttgtctatcctgagtttccttcatcctttggatgtttgcatgtgtgcaggaatgtatattatttgtttgaaatatattgtggatttatataatcatgagaatcggggcctttaggtggatgaaattttgcttctgaagcaagagactgcagaattactcacgtgtttcctacctaataatgacttggtcaacctgcagacagattttcagtggcttaaagccagttaaagtaacaacagaggtgactagcttagcatgttgagctcttttcatattagatcacttaattttattttccagatattttagatgaaggatatgaaaaggaattccttggtggtttttaggttagaatacacatggtcagcagatctgtgactcctaaaaaatggtaaagggtattgattcttatgagctctaggtttataacactgttctgctactattgtctgcctttgtaagtctctaggtttctgttctttattattagcatgaccaatacattaagttacttttttctgtctgagtttttatgttgctttgaagtatgtgcttttatattcagatcccgggtacacatagtaattttaggtttttatttttccttctaaattgtgtctgccattttactatcactgatgatgacatgatttattttctctaatacttctgtcctttatgaccttagttggctgatgtccaagtaatttcaataaggcaatagaacttactgaaattagaaaagataaaatgtactgacctttctaatgttggtattgggatttgtctagttatgttgtgttcttagaatttttccttatatttctatgatttatcattttagatgaaaaagaaagcaaaaatggccattgttgagtcagatcctgaagaagaaaactacaaagtgccagaatataaaactgtcatcagtttccattcaaaagaccaattaaacattacattatccaaatgtggtcttgtaatgttaaacaatttagtcaaggtaagaaaagaaatttgaaactttaaatattgagatacttgtctgattgatctgtctgttgaataagaagtttaataacttagttgtcatttgtcctttactgttctccttgtcatttaattttacacatttcattttatttagcataactctttcttattaggcatttacagaagctgccactggatcttcagctgacttcgtaaaggatctagcaccatttatgattttaaattcccttggacttactatttctgtttcgccaagtgattcttttagtgtactcaacattcctatggcaaaatcatatgtattgaaaaatggagaaagtttaagtatggattatatccgaaccaaggacaatgatcatttcaatgcaatgaccagcctaagcagcaaactcttcttcattcttcttagtaagtagttgaaaaattaccttcctggggctattttgttttaaattacaatttacatgttattttactcttttgtagaatcttagcaaggttttttttgtttttgtttttgtttttttaaaatatcctttctaataggtcaagaactgttttttgtctttgcagtgtcttggttactattgttactaaaactttgtattccaaactctttctttatcctctgcattatttagagcatggcaatttactgctttgttgttgggaggaaaaatattagatctcgccctcattctgcttttatagaccgtggatgtttagatgtttgtgggggttcttttattcacatttggtatccgttgatagtattccaccagttttgcaactgaaagaattctaagtgtgaattcatgcagatggcaatttttaatggctttaggatttataa

SEQ ID NO: 133446 - DNA, 1049 bp, Homo sapiens
gtcgcccaggctggagtgcagtggcgcaatctcggctcactgtaagctctgcctcccgggttctctccattctcctgcctcagcctcctgagtagctgggactacaggcgcccatcaccatgcccggctaatttttttgtatttttagtagagacggggtttcaccgtcttagccaggatggtctcaatctcctgacctcgtgatacgcccgtctcggcctcccaaagtgctgggattacaggcatgagccaccgcgcctggccttatctatcttacttatatcgtaaaaagtatatgaaaatataaaaatgtactacaatattatgaaaggaggtaagtttgttattctaaagctgtaattatatagtttaatatgttttcctttaaaacattttaaactgtatcatttaatctcatgcagatcattcatttttctgaagccagaagatgagaactatcaaatgtgtgaaggaattgactttgaagagattataaaaaatgatggtgctcttctaaagaagaaatgtagatctaaaaacccttctaaggaatcatttctcattaatattgttccagaaaaagataatttaacatctctatcagtgtattcagaagatggttgggatttaccatacataatgcatttgtggccacctatcctgctccgaaatcttcttccttacaaaattgcttattatatagaggtatcggcaaactgatttagtgccttcctgtttttgattttgtagtttcagttttttaagattaagatcaataaaaactattttaaagatctaataaaaattagaatactagtaaagaataggtaatgcagatattcttttgcaacaagtatgagaattattattgaaataacatttaagaactagacttcagtgacaaaaaagcatgctacattatgttgtattcttttagtgctgattttcttaaaagattgtatactttgtgaagttgctttttttctttcatactctgtgtggtttcttcctgttgttataggaatccatacatcttaagattttatgta

SEQ ID NO: 133447 - DNA, 1032 bp, Homo sapiens
ttgaggcatattattctgcaacattttaaattttgttttgttttttttttttttattacagggaattgaaaattcggtttttactctaagtgaaggacattcagcccagatttgtactgcacagttgggtaaagccaggctacatttaaaattacttgactatctcaatcacgattggaaaagtgaatatcacataaagcctaatcagcaagacattagttttgtcagttttacttgtgttacagaaatggaaaagactgatttagatattgctgtccatatgacttacaatactggtcagacagttgtggcatttcatagtccttattggatggtcaataaaactggccgcatgttacagtacaaagcagacggaattcatcgaaagcatccacctaattataaaaagccagttctcttttcttttcagccaaatcacttttttaataacaataaggtatgcgatgtttattctgtttttcccttgtctttagctacttgtcactttttagtttttaaagttctgagtaataaatattatgaaacttggatagaaataacttgttaaatatttgaggccaaaaagattagaatttaatattataaaggtttagtgcattaacaatataatattttgtttatgctaaaaagtaatttatcagtttaagcaggaatttttaaaggtacctaaattgtgatgtatttggaatatttttttcctaggttcaacttatggtaactgatagtgagttgtccaatcagttttcaattgatactgttggtagtcatggagctgttaaatgtaaaggcctgaaaatggactatcaagtgagttcattctatgcttatcaagaaacttttattttaaatgtttctattaactacttaattaaattttataaagatgttatacataacagtttttgagctgttaatttttttttcttaggttggtgtcactatagacctgagcagttttaacattactagaattgtgacatttacccctttttatatgattaaaaacaaaag

SEQ ID NO: 133448 - DNA, 1979 bp, Homo sapiens
ggaggccaaggcaggcggatcaccaggtcaggagtttgtgaccagcctggccaatatggtgaaactccgtctctactaaaaatacaaaaattagcctcgcatggtggcgggtgcctgtagtcctagctactaaggaggctgaggcagaagaatcgcttgaacccgggaggcagcgattgcagtgagccaagatcacgccactgcactccagcctggcgacagagcaagactccgtctcaaaaaaaacaaacaaaaaacaacagtatttgattttcagccttcctagttttaaggactttttgtggccacacttctgaaaaactgccaaacgtcttcaaaatagtattcaagtatttacttaaccaaaaatgtttaaaaccaaaagtagtcttattttgtttacatcatttgcttctactgtgttataaagaataaagttgtgtttagagaagtgctttcagcattcacctgaaaaacaaatatgttctctgcattgacaatcatactaggtagatttagcttctgtaaggaacatttaaggatccactgagtgaactaaaacaaacttatttctgagtggcaagctatgatgataaagttatgcacatatattttctggtaacattttaaatactttcagaaaatttttaaaagtttttaatccttcaagattcatcttaatttgactcctgatgtttttttttcttaccactggtgattttttcttcctgcttatcagtaggtggtattttctcattgtctttcagtgctgctgttgaggagtctgctgtgggtattgtttacattgtatttaagaggattgcctataagtggcctttcagttttaaaaattcattactattagatttattcaggaaaaaaaattgtactttgatataaaaagtcttattcatttgatctgttgattagtactttgcatatttatatcatagtgatagtttgaagcttataaagataaatcagacattcactgtaaaatattagaaagacttcagtgaaataagttagtcttcttgattctcaatgtggttttagtgatatacatatatatacttagaaagtattacaagtaaggtaagtatccccagataattattttatggtaacaactcacagtttttaatttctgtatattgcaacgtgaaggtatactatatagtaaaattttctgaaaatcagaatattaactagaaattaatggctgaatattaattatgagaatttgctatgtttatcttgtcattgaccctcaaaaccctgatatcagcacatttatgtgagattcctgcagaaatagcctcatgatgaatatacatgctttgtagaacatacaattgagatacaagatattttttatcctgtttgattcagctatgaaaggaaatgtgaatttcaaactgaaacaacttttaatacatatcacattgctgtagtcttagaataaagcagaaaaaaatactttgtgttacagattagcctacgtgggaaggttcaattttattaaaatgtttaaattaaaaaagtaaacaattggcctgtctttatgagtaataattttataacagataacatcaaatgatttcaataatgtaaatttgcaagtattctacaaatattaattcatttagttgccactaaccccatgaagtaggtgccattaatagtctcattttataaatgtgaaatctaaatttcatgttctttgggaccaaattctaattttttggtttttttttttttttggtggttttattctaggatatgatgatgcctatagatttgggggaaaagacaatatatttagtttcattctttgaaggtttacaacgcattattttattcactgaagatccaagggtatttaaagtaacatatgaaagtgagaaagcagagttagcagagcaagaaattgcagtggcattacaagatgttggaatttctcttgtcaacaattacac

SEQ ID NO: 133449 - DNA, 2059 bp, Homo sapiens
gatggccccactgcgctccagcctggctgacagcaagactctgtctcaaaaaaaaaaaaaaaaaaaaaaaaaagaaaagaaaactttcttttaagatactagatgctaatgatctgttctttgggttagcaggaaacttaaaaatgttttattttttcactgtactttctttaaatattttatttttcctttattcatttttattgtggtaaattttagtacatttatgtaaaaagtaatgcagtgaagctttgtaagaattatatgaatatgtgaattttatggacatgggatattaagatctaaatctaaactaatacaaatatgtagcttactgttttaaaaagtttttggcattaatttctaattctagtcatttatagataaattaattttttcatttggggggacatatttttcaggttcgcctaacccctactggtcataacatgaaaattctgcagccgcatgtaatagctctacgaagaaattatcttccagcattaaaagtggaatataacacatctgcacatcaatcatcatttagaattcagatttacagaatacaggtaagtctttctgaaaatataggcaaaattgtattctaaaggaatgcaataagaaaccagatctattcccatggtctgctttatctagtattcagtttcaatgttgtgctagcctttttttttttttttttttttgagacagagtctccctctgtcgcccaggctagagtgcagtggcggaatctcagctcactgcaaaccctgcctcccaggttcaagcgattctgctgcctcagcctcctgagtagctgggattacaggtgcccaccaccatggccacctaatttttgtatttttagtagagacggggtttcaccatgtgggccaggctggtctcaaactcctgaccccagatgatccacccgcctcggcctcccaaagtgctgggattacaggcgtgagccaccgtgcttggtcaccgctagactttttgattctttttgttcctcaaatcctgttattctggtcaggttgtataattgacatattaatatactgatgtgtttttattttcttagatccaaaatcagatacatggtgctgtatttccctttgtgttttatcctgttaaacctccaaagtcggtcaccatggattcaggtttgtttttatttttagatttccataaaagcagttgtattagctatttgatttactttactataaaaatatgaagtgaaaccattcttgggtttaatttttataggataattggaaaattaaactgcttgaaaaaggaccagcaagtactatacacaactaactttgataagattttgagtgaatcttgaagaaaagattgattagaaacatatattgaaatttttagaaatactaatttaaaaagcagataatctgtaaacctgcgatttaaaaacctttaaagcctttgaatgaacaataaggaagttcaaatctagagtgttttctaacagcagaaactgtcctatgttctccaaataagaataacggacaagtcctttctacccttttctttccctttgcctttcttgtttcctgcatatccctcttccccctactttctcttccctcctcactaccctacttaactttcttctccccttgctttcccacctccaccccacaccacttcttctaaactatcctggggggagtactctttataactcgctcagaagctttttggccagtataatgcgtaagcccttccacctagaggtctggagcaagtccccagaatctgttttcacaaagtttccctgatgattctaatgcatacttctaaactgctaattgtagaattagttatcttcagagtaactatagatagttttaaaaacaatgctagagtctgaaattaagattgtagtagattttgccaatatcagtaattttaactgatatttattatttagtaaatgatttaattttccattgtggtgtatattggaagaaaatgcctagcttttgcttaaagcatcatgggagtaattatatttataaccttt

SEQ ID NO: 133450 - DNA, 1022 bp, Homo sapiens
tgcctttttttaatggtctctgtaaattttctgggctttaatgtaatgccactgtgtaaaaaaaaaggaagaaaatagtaatagccatttaatgttttatatttatcattttaaagatatttttgtcaaatttcttttaataataataaacatatgtaatctaaaggagtgtgaatttgttgttctatccccaaatcatatagattgaactgctattataaaaaacagtcatggcctctcatggaagagtagatagtaaaataatttatagtctgagaatgaaaaagaccgttcttttatgtctttgctttactttttaccgttttgtttcacatattttttgtgaaacaatgaacaaagttggttttaatagtcattatattcacttattaatttgtatatgcatctactatatttctattatgaattcagaatatttggaaacttctatcgtaaacataactatatatattttttctgtgtaatattagggaaaatgttacatatatctctgaaagatccattagtaaatctattttatgttttgtgtaataaaggtttttaaaaaaatttcaacatagatgaaactgtcctatttctctaacatatcagacgtactttaaaaaattctctaaaaagtatatgatctttggtagttagaatgtttaatccctatgactgctgtgcttttggatcaacaaaggaatatttatcttgactacagcagaagctcagtataagcaacaggtgatttaatttaactgattcagcacatgatttctgagtctcctctaattcttaggtttatcaagttttatttctataaatcattctctatgttttttgaaagtgactactttaaatttgaaaatattgagattactgcaaaaaaaactgaaaaaaatcagcttttttgaaatttcttcctatgcagaattcattcaaattaaatagaaatcaaggttatgtatgtaaaatttgtttgaaaacaaacttactaatatgtaaacatcataaagttg

SEQ ID NO: 133451 - DNA, 1045 bp, Homo sapiens
tgatattttctatcataattatctctctcatttcttccaatagtaatagcggtaatattgttccattgaatatctatgcacctagctcatctcttagaaacatcccacatagtagcatcgtattactctctggtaaaaagaaagattaaattaaaaggactctacacagtgctgaatttcctgcacctaaattattcagttatcacttgccagtattagttgatccttcaggctatgccaagtgccccctcatgtaggcctctgtattaaaaagattgggacaaaatacttgattagtttgcctgtagaagctcaaagtgtgtaccaaatacattgacagtggatgctttcatggctcagccaacacagttcagaggaatcttttcggcttccagggcattgcttgttaccttttgtcaggatcaacccaaatcctcagggatgctgtttttccacactgtaagtcctaactcattagtgggtcatgaaatcaacttaacagctcaagaccagtatattttaaacgtgaaataataaaaaatagaggaacaatagagcatataaaatggttaagtattggttcctgaaatactgtttcagctaaatattctatttactgtgtatactgggtcacaatataaagtgtttcctgttatgaaatgcaatttaaaaaaagaaagcttgaaagactgctgcaggaggcaccggccatccagtgattgttggaagagtctggattgtgtggagcctgaccttagataaggagcagcagatccacaactcaggaagtctagagatgcttagcacttcttcttttgagtgagaagatggaatcactcttggtttctaaaatatttttcttctctgctgtgtatcgggcaacctcacatgattcagtgggaccagaaaaagcatagaaaaattagatccacacacagcacccaaaaaaggccatagtcttttgtttacctagatgtattttaacctctttaccactaagcattttactataatagaactggggacatacattgtccttttgagt

SEQ ID NO: 133452 - DNA, 1067 bp, Homo sapiens
aaagcttggggtggtatagtacctagtaaattctctttttttttttttttttgagacagacagtattgctctgtcaccaggctgcagtgcagtggcacgatctcggctcactgcaacgttcacctcccaggttcaagtgatcttcctgcctcagcctcccgagtcgctgggactacaggtgtgtgccaccacgcccagctaatttttgtatttttttttttttagtagagatggggtttcaccatgttggccaggattgtctcgacctagtgaattcttaaccaccgacattctgtctcttaaccttagaaaactccgcatgactcatttccccagtaagtaatgagaatattgaatgaagggccaggagagaattttctaccagcagaatcagtattggcagaggtaattaattcacctctgacattgagagtctagcctttccatgccttaagaaaatattgttaccaccctttgaatgacttatttaacagccctcccacaaccaggatatggaaagccatcattttcttatatgctttaagtagtcagccaactataaattaacaaaaactcaatgcaagaaagtgcttaaaataagaaatggaattcttcatggtttaatttcccagatgactggattctgttgaaccctttttatgttaattggctagtgaaacccagtccatagcctttagcccatcgttggtggggaggggaattgtcttgtattttctttgtgcttctagatatcctaaagagctccattcccctctctctgttctcacgcaaaactgtctcggctatttctggactttactgttctagataaattttaacatcaatttgtgaacttccacaaaagctgttgctattgcatttatctcttgagtgaggattcatatttttaaagctagatgttgctattgtagaattgctgcatatcagaataatttcagtctttttcagcaattggaattgttcccacagaatggggacacatggttccataacatatgtagccaaccgaggtgcattttatagactgatttgagacagatatttca

SEQ ID NO: 133453 - DNA, 1224 bp, Homo sapiens
tagggcatttatgagttgggtggcagattaaatgtgtacagtacaggctacatactttgtggggccagtgcaaaatgaaaatgtagggtccttgggcaaaagttatagagaatttcaagacagtaacagcagagcattaaacaaagcacagggcctttcaaagcatgaagccctgtgcaattgcacagatcacatgcccatgaggccggccctgataaagtttcttaaattgggaaagttgtgggtgtagtttgagtgtgaaggaaaaaaaaaacaaaaccattaatacaaaggtaataaatgagaaaaaaggaaaggcgaatcccatgaggaacaaggttgctttgtaagtgaagtgtggaaaagccatggtctatgctggagaggaggagagaggagaatgctacaggctggagagaatgacccagagatctgatgttacaaaccaggtctctcccaggggtgggtcgggagggctagtgggtaatattctagttgacagaataacatccatataaggcacaaaattgattggttaaataattgtaggattctgttttacaccgttcattgaaacccattggtagttgcatttgctatgcggtcagaaaatggtgaacaagttattactatttgttttgttcgtcttgggaaaagaatttagtctatagtgtggaggagtttcagagaattcacctctgaattcatggatagtgattccaatgtctttttaaaagatggaaacttgaacctcagtgaaatataaaggctatgagcataattcaagctttacggcagtcagcaatcaaacacagtactcatttattcattctggcaatatcattcatggtgcaaaaggccagtttcaaatataaacaggaccaggcagggaagacgtatgtgtgaggacaatgaggaccaatggtgactaaggcaagccagagagaatggggcctgttgaaaaatgctcagaatcaaataattgtaaaacatgatgcaggactgagcacagtctgtctggagattaggtttaattggctatcagtttgcatcccctgatagatgagtcactgggaaaaagcagacccattggtggccctggaaagcattgaagtaaaacattgttaccaagagtggagggcttaagagacaaacagtatcatccaatgaatgaaacccttccaactaagagcccggcaccagtgggcttccgtcagatgggac

SEQ ID NO: 133454 - DNA, 1170 bp, Homo sapiens
catgccatttctctcttgaatctgccataaataagaccttcctttctgagtaacccatcccagaatatttgcttctgttgctcagctactgtgtaattgaaaaatatgttaattatattactaataaaaatcaaatgaaggtgattaatcttttgtagaattatcttctaatccatttagtggtaagccattagtagtcttcatcaacaccactcaaaatgcacctgtgtttagaaacctttatagcaatttaacattgctgtggcatcaaagagtatttttattgaagactgatacatttatgaaatacaactgatggaaaattttaaaaattggttccttcctacagtgtttgagaaacacaagtacaaactttgatcctatggatggggtggcaaaggtccagaggagtgaagggactcagcagatgtcacggggccaggtgattagtagctaattggcagaagggcccagagttagtctgagtcttcatgttgaatttcctagtttctaaggcaacattgattatgagatatgccattgatttgaaaacagcctttcagaaaagcaaatgccaccatagtaaatatacacatcaatgcaaaggcatttcaccctcaaaaatgttaatttatatggacataagccttggactcaaggatataggtaatttacttttctctcttttttccttaccagatagtacaaatttaaaacaaagcaaaactattcaaatactatgtcaaaactagttattgacatagtatttgattttatgaaatcaatttaagtgctaaaattagactagaaaagaaacctctgtgtattgccatcagcccactggtttctgtttcaagtggtcttatatgcgatcttgaaaatagttacttcttggaatagcatgctgtcatttatacagaaggcttaaaaacataatagtgaccatgcactcacttcagcagcacatatactaaaattggagtgatacacagaagattagcatggcccctatgcaaggatgacatgcagattcatgaagcattccatattttttgatttttgggactcagggaaaatggtgggggagggggtgaaggctagaagactacacgttgggtccagtgtacactgtttgggtgatgggtgcgccagaacctcagaaatcaccac

SEQ ID NO: 133455 - DNA, 1432 bp, Homo sapiens
agaaaaggaggcagatgtctttaaatattaaggtgtatttaatattgctctagttaatttcttgaatttgttttttaaaatcatgcctttattctacagggctatgaaaatttcacacatgtatcctattatcccaggaaattgccacagcccatctgccagcattgtctctggtgttaaacatttgccaaatctcaccacttcttcccctatccaaagctgcaattcacctgcgttattgcagtgtcctcttgatttcccatctcccacatttgcccttctttggtccatttaaaaacttagatttatattattaccttacttaaattcagtgtcttttacttacacttggaataaatgccaaatgctttcctacctctcggaatgtacacagggtcattctcccactggtttgctgggctgaagccaaactcacctttgtgtttttcaaacacaacatttgttacctctgggtctttaagcttgctttttttcctgcctggaacattcttttctgttccccactcttgttccacatacatggctgtttcttccttatcttcacgtctcagctcaaaagttcatctcttgacaaggcctttccagatcacactacctgaaattatccttgcaccatttactcttagttgcctggttctataacttggctttatttcttcatagctgttatcttggaattgacctgatattcttatttgcttacttgttgacttgtctgcccccaaatagattgcaagctctgtgagagtggggctgtgctatcttgttcctgtatcctggcacctgaaccagttttgtgcctggtgcaatgttttaataatgactggatggtacagtgtgagcactgaaagccagaatgatacttgaccaatctgaaatgagataggctagttgactatcaaatatgaaatattcttccatgaatacatgttgatatacccatgttacagatagaacaagcaagtgctcatgattattcagagagagagtcgttaattacttcactataagactacatttgatatttaatatattgatcttccagtattttttcagaataaacttttgcatataaaaccagagagtagcaataaaagctaaagttttctagaatatgaacacaaaagaaaagtattacctatgtgatatgcctgctcctggtactctctgtattaacaacaaaaacaatttttcttttcatggtttactaaagccttggcctcctgggctcaagcaatccttccacctcagcctgccgagtagctgggactacaggcatgctaccacacccggctaggttttaaatatttctttggagatggggtcttgctattgcccaggctggttttgaactcctggcctcaagcgatcctcctacctcagccttcagagtcattggaatcacaggcat

SEQ ID NO: 133456 - DNA, 1109 bp, Homo sapiens
tttgcaatgctttgatttgtgtcaatgtatgaagtacagtgtccagaatataccaggagcttgacaaatgctggctctttgtatgaaaaattgtgtagtcagctgagctgtactgtattggtaataagcctgtttgatgtaaaattctcgcatttacccacaaactaggggagaaatgtttgtaggtaaattgtttgctctgaaagtcacattaatcagggtgacccgagggtcttctttatcttcccaggccattgctccaaccctcctcctaccaccttgaggcactgtctgacctctggaaactcccattttcatcttgcggagttgtgactagcatatccccttagtgaaaactttcctgtgaaaaatagtttctaaaccacacagagccgttcagaactccaaggatggacttcaaaacctctgatttatttcaatctgtaaagtcctggggcatagctccatttcttctcaaggaagagccaatgactcagaagtgacaggaattaggggaggatgtgcaccattttgtctgaagtcatgcaattcgagtgaaaaattcacccatctctctagtgggtagattagagcatccactgctcaggtgcctcagttaaaaacctcactttgcaaatgggagtttggaatccttttgtggagtatgggatgacccccaaagacaccatctctttcacaatgaagcatgcttttgcaaaaaaatgatgtgaggatgtttctgaagtgcagtatcctgtttctgcttaataaaagcacaggtcagtgtctactagggaaagataaaagctgttgtttggttaaggctaataattgcaagatgttggtgtgacactttctcatcagaaagagatggagaaaataaaggagatggttgaatttagtagaaagaaatttcttatcagttccttgcataaaagtaggacaaaaaagttctgataagaacattggtgagtactgatcagcatagggagaaagtgtcaggacaatagctattaaataagggaaaatgatgttttattgattttcctgttaaatgcagattggtgaagtgtggcttgttaattgggttgagtgttttaattctggat

SEQ ID NO: 133457 - DNA, 1271 bp, Homo sapiens
agcccgaggcagctgtatctttgtgcacacttattatatagctgaaacaagcatacttaactcagttgaacagaagtaagctatcactcccctgatgaagagcctacagtggctcccaatcactcagggaatcagagtgaaggccaagctaagaaataaacttagccttggctttcaagtcatctgtctgctttcacctatccacattttgtgaatgggtgggtgcctgggtgggtggatggatggtcagacatagcagtgttagggaaaatgattataacagatcaaatctgcagtgcagatgtaggcttcatgagcaatgacacagtatttattgaaccaatgatgattgaatacattagcagattaggtaacaaagtgtccctcttgtctcttggccgaaaggaccccagagagatgcccaggcagcccgagaattcattctgaagatgttcgtggacctgaacccagacagtgacaaaattatctactcccacttcacgtgcgccacagacaccgagaatatccgctttgtctttgctgccgtcaaggacaccatcctccagttgaacctgaaggagtacaatctggtctaattgtgcctcctagacacccgccctgcccttccctggtgggctattgaagatacacaagagggactgtatttctgtggaaaacaatttgcataatactaatttattgccgtcctggactctgtgtgagcgtgtccacagagtttgtagtaaatattatgattttatttaaactattcagaggaaaaacagaggatgctgaagtacagtcccagcacatttcctctctatcttttttttaggcaaaaccttgtgactcagtgtattttaaattctcagtcatgcactcacaaagataagacttgtttctttctgtctctctctctttttcttttctatggagcaaaacaaagctgatttcccttttttcttcccccgctaattcatacctccctcctgatgtttttcccaggttacaatggcctttatcctagttccattcttggtcaagtttttctctcaaatgatacagtcaggacacatcgttcgatttaagccatcatcagcttaatttaagtttgtagtttttgctgaaggattatatgtattaatacttacggttttaaatgtgttgctttggatacacacatagtttcttttttaatagaatatactgtcttgtctcactttggactgggacagtggatgcccatctaaaagttaagtgtcatttctttt

SEQ ID NO: 133458 - DNA, 1067 bp, Homo sapiens
ggcagtggtggcagttgctttggccatcagacattacatcagagagcaacgagaaggtgatctctcttgagctgttagtggcactgccacgagatgatagcacagaataatgggtgtagagagagtactggaaggaggaaagttcagtgaattgaaaagtcagtgtcatgaatacacaaaccgttaaatacctgactctcagctcagtaagtaacccttatgagaaaaggaaaggaaagagttaaggatagactgcatgtaagttaaggatagacttcggatccctgacatctaagcataaagtaaaaaaataagcgtaaagtatggcacataggataattggtaaatagatcagtgtgctgtgcagtagactttgaaaggaggtggttggtcacttaactgaaatactaggaaatattaatccgttcatctctgttagtcctacctctgtaagttctaggactgtgggcttccacatcggaaagggttacacatttgtcctgttacctgtcactcacgttctggctctctactctcctttgtctctccttgatccccagtctctcattctgtcttccttttttcctcctacacttttctcctacaacacactctgatttgcagcagttcactttacaagggcctgacatgtgaccgcgacttattgcttagtaaccttagacctggaggtaataggcaaatatgttctatttcttttcttctctaaacatcctatgcaggtagaatacattgatgcatatgcagaaactataacattaaaaccttcgccaaatttgatctcaaataattgcttgcaaagatttgcctagactaagaaaattatcaaggaaataatatctattcagctgagtttgacgttcttatttctatcccggctgtgtgatttggatagcaaaagtgcaatggctaggaacctgtctttaattatttctcactccacctactccatttgtatattgtatctgttgttttcttggtttgctctggggttgagcgtattgagcatctttagagattttgaagatcctcccctttaacgggtggag

SEQ ID NO: 133459 - DNA, 1153 bp, Homo sapiens
atacactctttcatggctctgtgccgactgtggaccctctcctgctgatgttgtttgttttttttgtttgtttgtttgttttttgttttttgtttgagatggagtctcactctgtcatgaggctggagtgcagtggcatgatcttggctcactgcaacctccgcctcccgggttcaagctattctcctgcctcagcctcctgagtagctgggactacaggctcatgcccctacgcccggctaatttttgtatttttagtagagacggggtttcaccgtgttagccagggtggtctcaatctcttgaccttgtgatccacccaccttggcctcccaaagtgctgggattacaggcgtgagccacggcgcccagcctcctgctgatctttctagtagcacctgctatagtctatgattctgtactggtgactgtgggacaactctccctcatcttttacccagcattttttcccaacagaatcactggcatttgtccatgtattcatctctccaggttttccctcaggtctttcaacgttgtctgctttcttcatgatgcttgaatgatcttccatcccaccccacagtccttcactatagaaggagctgattgtgtctgatttgtatgtttctgttagttgtatttaaaggtgtgtttttgtgttggatctatcacccatcgcacttgtttaatagctactggaagagatcttttaacttcctaacacagtacaattttcttacctagtggaacattggtttttttttttcttttttgtcttctgactgcgtaacttagtaataggtcataatgcaaacttttttaaaacactttatttaaaatgttgaaaaattattctgcaaacttttcttaaaagagtaaagagaagaagaaaactcttatttggggcaaaatattgaaaccttcaaccttaacactttacagccatttctcagtttttcatgggtgtaattaatactttttgtcaaaaaatgcgtagttcttcctaaattctataccatttttgccttctatattagttagtcacatgtgcattatatggaatgctgcgtttaaaaaggaggtacagagaaaaagcccatttttttctcaaagcttgttagtgcaaagctgatcaagcactttacagttt

SEQ ID NO: 133460 - DNA, 1054 bp, Homo sapiens
ttttgatacactgattttccttcttttgggtatatacctaggagttgcattgctggatcatatggtagctctatttttagttttttgaggaacctccatactggttatatctccatagtggctgtgctaatttacattcctaccaataacgcatgagggttctccacatcctcgccagcatttgttattgtctgtctgggtctcttaagttgatgtacttggcaggtcttggaaccatctttcctattaatgactcctcttgatccccagctcctgtgcagaacacttacataacaaaatacatcacttacctggtcatgacaggatcacattatatctgccattgatattctgttaatacacctaaggaagagtgtgattatgacagaacaagggaatctgcagctcataaatgcctttttgctctgtttactggaataattaaaagaaacagctgttatgatgtgggaacttgttatgagtgttaaatgagataatacatataaaacacctacttattttgtcaagaagtacagatggagtgtcccaggaactatgttagatgcttgggatgctagtgaacagggtattgcccctgttcttaagaagcccctggcccactcagggagacactaaaatggcagtcagaatgcagtgtggcaggaaagcattttcatagcagttaagtacaggtgctgtggggacagaaacaaaaggcaccaaacctgtcttgggagagaaccagtcctgaggaaggcctgcctatgtgatgcctaacagaagcagcagagactccagggtgccatccacgctgaggctaactcagagaggccttgagtgctccttttaatttggtttctttacacttctccagcatcactttcaacagtcccatcatcaaagcttacagggaaaagactcagattttgctttcaagagaagttttttccctcaactttatcccaacacacaaacaagagaaagtgattttaaagatgacttcctgacaggcaagcaagtacacagggtaatttaatgttgttaaatatcccac

SEQ ID NO: 133461 - DNA, 1131 bp, Homo sapiens
taactattagcaagtcttttcggctgggcgcggtggctcacacctgtaatcccagcactttaggaggccaaggctggcggatcacgaggtcaggagatcaagaccatcctggctaacacggtgaaaccccgtctctactaaaaatacaaaaaattagccgggcatggtggcgggcacctgtagtcccagttactcgggaggctgaggcaggagaatagcgtgaacccgggaggcagagcttgcagtgagctgagatcgcgccactgcattccagcctgggtgacagagagagactccatctcaaaaaaaaaaaaaagtattttcagagaatcatagagtatgctagagtccagcttagtatagctttatccacaatacaggaaactgcagatgtaggcaaggtattatattgcccttgtgaaagatctttggattacagattaggaaaacaaaattccactaatctacccattgaccttagggaaataatttaatatctgtgatttggtgcctttatctttaaattaagagattgcattcagagatgatccctgagtttcatagtatcatatagaaattcagtccttcaactctgagactagaagcctgaaattcacctgactcaatctcactttcttgtttaggagtataggtttgtatttggtttttgatcataaaatgaatggaagttcctattaaccttttctcatggcaagggataaaatctatgtaccagctcactgctttgaaactttttgcaactcttatttcactattgttagtactaaacattccccaaaatccaagccttcgaagaaaacaaaacaactaacaaaacacaactattttgtagccatgtattgccgaaagaacaagaaaagctcttttgtgggatatttatataggcttcctagagcagcttgccatgctaatcatttacagactttcacaaactgtttctcacctgtcttctccctgagtaaactgcctctgcattaccagtgtgctttgcttcttactccatgtttgtttacagaatcatcccagcagacaggacatttttgactttgtgtttgtacagctcagtcgtattcacagtaacagtttttatttacccttgtaatgaatgta

SEQ ID NO: 133462 - DNA, 1042 bp, Homo sapiens
gaaaagtattatttgtgtaagtgctgaaaaataaagaagctttggtttaagaaaatttcttttacaataagagaatgaaaaggtttaacatgcccaaaaaaagggactgaaaacaatatttttaagatacagctactaatatttataacaagcttgtccaacccatagcctgtgggcctcacgtggcccaggacggctttgaatgcagcccaacacaaatttgtaaactttcttaaaacatgagattttttttggcgtgtttctgtggtttttttgtttttgtttagctcatcagctatctttagcattagcgtattttacatgtggcccaagacagttccttctcttccattgtggcccagggaagtcaagagattggacacccttgatctataacatatatttgttatctgtttacatgttctattacagtgtttgtattagtcatggctttgttgttgaaaaaagacaaaaattctcacagactagctgacgtaaccaggaagaaccagggtgaagatgctttattagtaccttgaaccaggagtttggttgggaatctctttctctcttctgatttttgttttgtttctcctcaaacagtcctgaattgtacctgctcagccttgcaacccaagagaaaagggagtttctattccactccaaaatggaaaatcccaccgaaaggggatgtagtactaggtttgtctcagtgtaaattaatattgaccccagtggtcagaggcagaatgtattccaggaagattgggggcagggagcagagcacacttggtggagaaaaacaatggccaggtaccaatcttttccaacctgggagtttccgcacagcagtgaattgggaccattattgggcagtgaattccatatgatggggtcatgagcagcatctttaaaaaagtgaaataaatacatttaaatgaaattgaatagaaaatgttaaaggatatcacagtcaggtgaattattgtttcatgaaactttcgtttccattatatttacatgtgtgtgggttgggggacta

SEQ ID NO: 133463 - DNA, 1181 bp, Homo sapiens
gattctgacagcttttctttctatcccaggaaactgtggaaaatgcattgcagaccacagacaaaagcagctaagggaagcattttagattattgcttttgctttttaatatttctaaaaccttataaatcttcataattttatgtaggtctgcttttgtctgcctagattctcagcctttctattgtttggggaatgaatttcttttttccttcaaagaaggaaatacattatcaaatagtggctagaatacccagggtggtagagctgtgttgatttgcgtattccctttactgtcttattgatgtgtgtattccctttgctgtcttattttccctgtgataacacaccagcatggaatccactattctgctgtaatcctttcatgggtatgttatttcagtgctcctgaaagcccaaagcacacaataagacatgcttataacatattttagtttatcagtgtgtatccaaacactgccttttaatctttatttttctgattttctgtttcatgaatatctgagcactactacaaagatgttttctcagacattgtctcaatgactgtcttccaggctaagctctttatagaatctcaaagactgagacctttttctcctccatgtcctctttgaatgtgagctttgaatttattaatcatcttgaaatggtcatgaggaattatgttatcattttattaaaacgtcaagatagttctccctaccctaggccctccttgatcaaggtggattccctgaccttggtttccataaacatgtattcatccttcaaacctgatttttgaagttgctcaattgataaaaggaaagcatagacgtttataataccttagcactttatacccaaaacttgctgaagctgctactcatcagaatctaccagctgacctcaccgtggcggggacagatcaggtttgctggtgtgcgtcataacgatgaggttacaggaatgaagagatgaaggcctgtggccaaggtcactgaaggccaggtcccctgcccttccagaccagctttctttcccttccctcatagtgtcttctagatgttagagacaaacttaaagaaaaagcaagaggagctataaggcagcaaagagggtggaagtagaatgaaaatcctgccctttcatgaaggagttgaaataactctcctcta

SEQ ID NO: 133464 - DNA, 1047 bp, Homo sapiens
tccccgtttgctgactaaaataggatctagcatattatgcttttaatacagtacattttttaggtacacaagaattcctgactggttcttttaaatatttttctgccagtattaatatctccattaaaatacatatccaagctcctatagtatttcttttatgtataggattgataaagtttccgtgaaccaatgtctatatagaaccgagagtcacctgttcatgcatttcggaatcattcctgagttacaagtatattggctttggagttaaccaaataacttctgtttaagaatgaggcttgtttatcaatcagttgcccccaataactctaaagcaaagtgcctaaaagcatgctacaatatatgacagtaagttaccaagatacaaggcagttactgtcagaattttagctatgatatctttatctgtatatctttatgtctgtgcttgtttgttacataatccctggatgtagtattttaaacatactgcatattttgggagcagatctattctaacacttctgatttttttgaatgttgtgtcaagacaaaaaaatattttgagggcttccctactatatgctgggtaccagagtatctaaaaagacacaaaaatggggaaaaaaatcaactctgccctagaagaccttataaacaagatatgcttttggtcagaataagccatagggggaaaggtaagcctttgttatgtaggttgtcatttctcttctttaatttgccatccagtaaaataaaatttgcatttatcaattacacaagagatgtaagaagcaaatgtgaatttatttctgatgtttacattatagctagaggaggacaagtgtttatcaatacacattttccacaagataaatgcattatatatatatgaagaagtatatgtcatgatgtaatacttatcaatttaccacttcaaaattatcaaaatagaaaagaaagtagaatcctttggcaactcatcagctaattcagttcaaccgaattgaatctggttcttcagttatctgaacattacagatc

SEQ ID NO: 133465 - DNA, 1079 bp, Homo sapiens
tacacactacagtataacagctattcacatagcatttacattgttaagtaacctagggttgatttaaactataggagaggactatgcatacattatatgcaaatactgttccattttatatggaggacttgagcatccagggattttggtatgtgcaggaggtcctggatccagtcgctcacagatactgagggatgactgtatacatacatacaatatatagcatatgagtatataacaacggataaaattcagtaaggtctgtagttttgttaatagtatttgtgtcagtgtcatttccctggttttgatcatgtactatgattatgtaagatgttattgtttggggaagctgggtaaagggtacagggaaatgttctgtaatatttttgcaacttcttgtgagtctaaagttatttcaaaagaaaaattcttttaagggaagggaaaagtatcaagtatcatataactagataaatataaagttaaggtgtggtgactccaaacattgggaatatctgaccttagacacattattactgcagtaactagaaatgtcatggcttcacattaatcatgaatgacttaggctctggacagaatttaggacactgtagcctgctgtcttctcttaggagaatagtgaaattcattccaggaagactctgatgttctgcaaaaaagagaaaaaagaaaaagaaaaaaaaggcattctgaccttatgtgcaactctctgttgtcttaaacactatttgttttaaactcctgctttgacaaccaaacctactaaacaagtagagaataggaaactaatttgaatttctttttctcccaccccttgcctctggggagtatgagttctaattgataataagagaagaaatgagaactatggtgtgtatgtaatccatagatggataaccttccagtaatggaaggttgactttatctttcttttccacagactcctctaccactttctgatatttttctttctcttctttacttctctgttaggactcatttttgtccttccctttccgtagacagctttggtgtgatggtgtcactgacattct

SEQ ID NO: 133466 - DNA, 1051 bp, Homo sapiens
gaatggcaagcaaaaactgcagcttccttttaagttaaccagaaatttatgaagcgtctttaatggccatttcattgctgtgaactgtgttgatacctgggcaatgaacagacagaacagagcctggcaggcatcaggtgctcagtgttatttgttgttatgctgttgttgtcattctctgtgatctatactgccattgaaaagatgaagaggaaaaagtattcttgcaagtatgagtgtcttggatattcatttcagtaccctgaacttaggagtgataccactgacaatttttttagggtatcctctaaccccttgtaagtggaaagttttctagtggcaggtatgtgcctgattccatcttatccaagcaatgtgacaggtaatttcccacttcatgtgctggttctttaaattctcctgtgctaacactcatctgtgctttactatggagtggcaatgagtaatctgttaggttcatctccagaaaacagaaaaccacactttccctttacctcaggaacaccacagcaccttccattacaagaattaacagccctctgttctgacctctgtgtacggcattaagcgagtagagatggtttatcaggcaatatatttctgagcagccttgccagtggaaatttaaagttatttgattcctctgaaataagtttttgtatacagtagttaaatggtgaacttgtggatttcgaaatgtacattcaggtttttcaaatcaagaagctgataaattagaaaaccccatccatacagagtagctatctgatttttgttgttgttgttttgaattacttgatttatttattttttcttttttaaatttatttattattatactttaagttttagggtacatgtgcacaatgtgcaggttagttacatatgtatacatgtgccatgctggtgcgctgcacccactaactcgtcatctagcattaggtgtatctcccaatgctatccctccccccacagcagtccccagagtgtgatgttccccttcctgtgtccatgtgttctcattgttgaa

SEQ ID NO: 133467 - DNA, 1258 bp, Homo sapiens
ctgaggcaggagaatcgcttgaacccaggaggcagaggttgcagtgagccaagatcatgccattgcactccagcctgggcgacagagcgagactccatctcaaaaaaaaaagaaaaaaagtaagcttcttatgaacaaaatgcctgttaataaatgctgcacatccttgaactctaacacgtatgtcaggtatcaaaaaggaaaaaggaaagttgatttgctctctgcaaaatgagctttttaggagatggaagtgtttgtggagtgagcaatcttgtgccactaaccatcctaaccagattaccagccaggctcctgtcagccacaggatttgccagatgaggaagggactagagtaggttatgctaccaaaacctctccttgactctcccctcaagataccagttttgcagaactgttacttcttcatttgtttttgcaggtcactttacaatttttttttcacttttttcctttggacttttgtggtcatatagcaactgcacgataactgtgtgtttctgatttctctttagcttccagtgcttttgatagtgtcagacaccgtctcatggcatgatctagctttcaactccccaaagactgttcctctcacaatgaggtcttcttaatttttttaaatgaagtcgacctcgtttttctaaccttcttttcaataattaaaaatgtgaagacctacccagaatcattttctgtgccataacttcatcttaatatttgacgtgaactgcaaatttgttataaatgcagcctctctataggaggcccttacataggggtcaaagagctccccaacctccaacacacaccccgtgtcatgctacattgaaagccccaagatgcgatttcatttatcctattgtgtctggttggatttgcatgaaatttcagagatttctgttcctacttaactatccacaggtactttttgccttttggtgtgattactgagggttgtatgcctctaactttaatatatgtatttagagtcagggtcttactgtgttgcccaagctggagtgcagtggttacaccctgaaactcctgggttcaagcaatctttctgcctcacagccttccaagtagctgggactgtaggcacatgccgccacacctggcttataaaatttattaaccctagctataatgtgatatgttttacctgccagctcatatctctaaattttaattttttgtttccttcatttaagagaaaacaaagcacttgaatttttaa

SEQ ID NO: 133468 - DNA, 2081 bp, Homo sapiens
aaagctcttaaagataaaaagataaggcttaggtatgcttaactctactctaaccttcattacagagaaggaacaggaaaaagggctgggtttagccccagtttatcattttttcactctgcctaaagggcagggtggatgtgggcaagtcagtttgctgtttgctcacattttatcaggacgtttatttggactttgagtagtttggcctcttctttgtaggcctttccacagtctttactcaggatgatgatgtgcctagctaaagcctattaccgtagaacagggattagcaaacctgcaggccaaatttggcctgctgcctatttttataaataaagtttggttggaacatagccatgttcgtttgtttatgtattgtgtatagctgctttggacccaacgggagagtcagatagttgtaacagagatcatatggtccaaaagtcctaaaatatttatatttactatctgattttcattctcacacacacacaaattcaaacccctcttagaggtgaagaataactattaaaacacagtagcattctgcttatgctatttagataaaacctagtttaagactctgatgctctgaattaacccagagatatcttttagagtactgagtgaagcaatggcctgcattccttcagcagtcctctagagatactgctttgcacaatgaaacgtttggtaggaagtgagcaacagaaagttctagatcatatttcctggacgtaccactaaatgccacacaaagaatgtctggcataaaaatggcatgaatgaccagaaatgttcattgagttgatttggcttctgagtgcaaggattatgtgtcatgtgagcttgactcatagtgtctggtatggtatggtagtatgttgcagctgatgagagggtttcataggatttagcaatcaattgaagcagagataggagtgacagtcttttgtaagagggctaatagaacatgcacatgattataagacaaccccatcccacttccagtcacaggagagccaaagaatcttgctgtctttatgtaacccataaggtcattcagcaccttttttgactccccacttcccaagaagccttgctgactctggtattcttgagttcattatcaggttaaagtcttttcagttgaaaataatgaattgaattttgatttataattagtttacgttaactcatgttagcatgaccagctctccagacctgatcatccttgtcaaaatgaaagttctaatctcacagaagcaatatccaaattaaggtgacataactgacatgaccatgggagacccacttaaatcagtatgacctatttattgctcattgctcttggctgcaatcactggaagctctcttttgacccatattacatctgcattgtattacggttatttataacacgtttttcttcattgccagactataatctccttgaggacatgatttgtgtccttttttctttgtagttcacgctcagcctaagcctagtgcctagcttactgtagactttccgtaaaagttgttgaatgaatgagtgatagaggaaaaaggaagttctgtacctttcctaatttcttctcatctgtcatctgtcctattctgcctgttcaaatcccattctgtctgcacagagtaacccatccccacctctactgcacactattctccagtgactacagttcataatcatctctcccttcctattgcattcatcattagcagctcacaatctggcacttaattgtttcttaattgattcatcggtgctctctttgcttcacaggtagcctgaaatccctaaaggcaaagaaggtattttaacatatattgtgccagttctctgtgccaatctccctccatctaacacactgcattagaaattaatgtataacagattcccaataaatatgtgtaaattaactgaattaagcatcgccatccagtttcaaggcaggcagaccagaattaaaaagtaatcttcagctatttcttgatatgttttagaattgtgtcaaaattaaccaatagcttggaaagttatcatatataaaagatga

SEQ ID NO: 133469 - DNA, 1894 bp, Homo sapiens
cacacacacctacttaaaggttgtagtgtagtagcagttctctccacaactctagtggttgtgagattcagtgcaagcgacttaaaaaaatactgggagcagaggccaagcatgcctgtcttcttttctctctgatgaactcctattcatcctttaagacccgactcaagagtcaccctttctgaaagccttgcccaacaccagtaacagtaagtcactatgtcttctatcttaacactgtgtacatatctcttttatttccgtcatcacatttactacagtgcctctcccctctaccctctgttcctgacagcagtgctcatgtttgactttcacaagtgattgtttcatgaaataatagaagtgattgtttcacgaaataatagatgggtaatttctactattttaatgaccatggtataagcaccagtctctctttggctgttaaatattatgaagctttagagccgaaggcattcaagtcttttttcctgctgttgttgaaggtctgggatatgaaaagccttatcaaagacaataatagctgctatttactgaatatttaatatatgttagattctgtgcttggtcatttacatgtgttatttcatttaatcctcaaagtcacctacaatggtacatagttattagcatccccgtctaacataagaggaaactaggattcagactgaataatttgttcaaggccacatacttagtaagtgaatggaggaggagttgaattcaaatttgcttattccagagcccaagcttttaaccactgaaatacagcctcacacaggatggatggatgcatgacagatagatagatagatagatagatagatagatagatagatagatagatagatagatagatgattgacagtttttagataagatagatggatagataggtagatagatgaatcagtagataaatacctatgattaggtgttttataaatcacttaccatgaagaacaaattattaatctttaccaacattgtctacagacagtttcatatttataaagtcaagaaggaaaattatataaaattgactggaaaacaaacccaataggtttttggttatcattatgaaaacttagccatgtttagctaagcagcaattatccatactaacatgaaagatgttctaagttacagataattcaggaatgttatttctttgttttaacctacagtctttatctctcaacccctctcccccaaaatccagacaatcactttttactggaaccagtaagaaggacaccataaaatgatttgagcttcccttctactttgattagccaacttgcctatcatagtaagtaatcagatgactcaaaggacaggcagcaatgatagaaccacagaggtaggaaattccagataatggataagcagttgtggatacatttgcaattggccttaatttggtgaattcttccaattctatttaatgaaagaataaaaagcattctaagatcctagggagttgtgtagattactttattaactttttcgttattgataaaaagcctgaaggctctgaaaatgattaaagagcacaaaaaacagatggttgtaggttcactttttttcccctagatttcaccacctgctttaatatactgagaaatcaggtcaaatgagttcactgcctacagtaccaaaagctccctgacattagccagaagacacaagtctcaatcacattggcgtatagtgagaaaaggcctcatctgcaggctttggctagtctactgtagctgtgtttgccttaagagaccaaataatttctaatcttacttcaccgaattcccctccagggagctgggtaaatcagacaccttcttgaaatttccacatgatccggagcccgtaa

SEQ ID NO: 133470 - DNA, 4152 bp, Homo sapiens
gcccttctcacacaagagaaaggaaggaaggtaaaggcctaacatggatcacatttattaaaattctatctgcttaatactcttgtgaaatgaatagtttggccatgatgtcatcatgatagccattccctaaccttgtttagaagtttgtatttctatacaaaatcaggattgtttcagtaattatcagccatctgcctccagtgtccaacacaattagttatttgtgcttagttgcatatttatgtatatatactttgtgtgtgtatatatatatgtgtgtgtatatatatatattgcattccataaaccttagtttgatttggattgttaggcagtcgtgtattccggctaatttgagggttgaccataaaatattttcattgcaatcttatttttaaaacattttaatctctttatctctttcctgctaaatgaatatagccaagttattttacattgttaaaaaattgaatagggcgtactcaatctggtaatatagataaggcagatacaaaacaaatattttgaaagtttgggtgcataagagtggaggggtaattgtcattgttgtccagattaaattattactattaattgttcttctaatggttttacgccctgtcctaaaagtgaactagagaagctaatcctgattagttgaggattctgattgagtttctgcttagacatacaacacccataagctggctatattatatgtttgattataataaactataaacatagaggggataattactcctgcctccttttcttttaataataacattttaggattatgataatatgtgaaaatagtggtatgtgtaagcataacattcttattgttttgatgggagagctgaatacgccaccttcctctagtttcctctaatcaattctaagtagcatcaaggtttactctagagggaaagatttgggactgagttctctctaagaaaaacaaaaaatatgaaacatgactttattgtaaaccagtgtaaagaccagtatatgaaggaaggtgttacctgaattgtatataatgtaatatgcaaagcaaagaaaatttggaaagtaatagggtattaaaactgcctttttttatttaaacaggctcatgcacaattagttcgagaagttgatgtggagaaggtgtctgcttttgagaatccatatgtagatgcaataaagagtttatggaatgatcctggaatccaggaatgctatgatagacgacgagaatatcaattatctgactctaccaaatagtgagtatctttccaggtggccctatggatttttctctttacttccatgtggaggttttatgattatcataacttctttattctgtcctgtatatgtcatatatgattaaaactttaaaagttagggaatatagatattgaacttatgccaacctcataaatctaaattaggttataaaggactggtatcatgagtcagggagaatatttcttttactgttttctgtttgaaaaacaaactgaagactctaggaatctgatttcaccaacctgtctcctcccccaaattgcaaactagcaattctcacatatgccattgtgatttgaaatcttgtaataataatttttgatagaaaatccaatcttattcatgtgctagaaaacacctacacacattagaaactgcaaacaaaaaatatgtttgattatggcttcttaaaacatcagacttcctggtttccagttttcagacccagaacttgactgctttctgagagccactattatgttgatggataggttttcctttgcgtgaaaatttcatgtgagtctaattttgcatacattccagaattattttgtgagctgtcagtcagactcatgtcctgggaaagatttacatcctagaaatctattacttctctagaattaaatctcacctaacagaaaggaagtaaagatttggcaatcattggattaatgtgatcaatgtagtcagcaatgtagataaccaggcacctgaatagtgagttttcttttggtggtatttagccaggtttctgtgtacattagttatattaatacagcatctgcctcttgttttggatctgggcagacagaagaatgggtggaaaataatcagtaaccttatgccagttcatatgataaagtgatccactggatgagagtgggcccttggggaaaataagaggccctgataggctgcttgacatcactcaaaagtgcatggaatatctaagagctatatgactctgttttttcagtaaaattgtcatgcttttactctaattctaggcatttgtataagatatgattcacatcagccacagaaatgttgcctgatcaaactatttcttgtattcttatggtaaatttgaattatgccattctgaaatgtgacacagtgctcatgagcaccatttttgtagtatttaatattttaactagcattaacccccttgtgtgcctctgaaatgtgtgctttcttcattcttcctttcatcatccttcttccataccttcatatagttcttctcatttctggtctttctcttctgctgtcctgcatgcctgccttccattctgccattctccctccctctgtccttcgtccctttgttccttcctcctgggctcccactgtataagtttctgtgagtacagagatgaaaaagatgcattcagctcttgcatgttctaaattctgccccctcaacctttgaccagctgtcttttttactcctgccccctctgtccttctgtttcttttgccatttcagattccatctatctccccatgttgctgctgtctcatccatcattccctgttcccattcattatgtctctcctgtctgcttatttaccctccaccctcagttttgaatctctctggctctctcttaactcctctctgcttctcactttgctactgtgatgtcttgccctagcctttaaaactaactcatcctccattataaagttacatttactgataaattcttcaccttgcatcatttttcttctaacctctatcttttaacttttagtttcagtcttatctcctcccctccctacctggtctactctttacctgtcaactgtaactgttctccctacggagagtcctgctactgggtagtcagaggcccccattatctagtaattatgtgcttactagggttacgtctcccccttagggtttgcctcctcctcctgggatagaccctctgagagagtcctctttgcacctaggacacctgtattggactatggatatgttcttgagacaagacttcatcatatctctgatgacataccctcagtttagatttgcagatttctagacatggacccattagttagtatgaggattggatgctgccatatctaacttgcttagggcaagagctctcccagacagtttctctagacctgtcagtgctgtgatcctgggaaaagctgctatcttagagttctgtcagtgcaggcttagtctgccatagaaacgggcacactccttacgataaagcaagaccaaaacgtggggccctctagcacaggctgatctaaactccttcaaatgattattctttaaatagttctacatttccctagtgggaatgaggataaattgattttctaaattatatatatgtgggccaggtatggtggcttacgcctgtaatcccagcactttgggaggctgaggtgggtggatcacttgaggtcaggagttcgagaccagcctgaccaatagacaggtgaaaccctgtctctactaaaaataccaaaaaagtagccaggcgtggtggggtgcgcctgtagtcctagctactcaggaggctgaaacaggagaattggttgaacccgggaggcagaggttgcggtgagccaagatcgagatcaatcatgcccctgcactccagcctgggtgacagaggaagactccatctccaaaaaaaaataaaaaataaaaataaattattcttatatatatgtatatatatgtagacatacgtcacctaaatcttttttaatcacattttatgctgaagtaataaagtgaattctaacaacatgtacttacatccttagacatcaatatgtatcttttttaaaaaagtaggacattttcct

SEQ ID NO: 133471 - DNA, 1949 bp, Homo sapiens
gtgatgattgcccatgtcagtcactttccatctgttgcagattgtttatactgtgtaaagttttacagtaagtgtctttgctgctttcagtgtttctggatgaggtggtcgtctttctgattataaagagatggttgtgagatgctgaggaaggatagatacaagccttatagtgaacttggaattgtgttctttatgtgcttatggaattgtgttctttaaagtaactttgggggttcatatgagaatataaccctgctcagaagaaattacttttaaaataatatccacaaaggaactggttagattttctcatgtgttctgcagatatttaccaatgtaacctacattttttcttgatgccagatagattgtaaggaatttgcattattccatctcaagtgtataatgaaataatacactgaagcaattcaccaccaagagttttgtttaaaaaaggaagttccagctccaacttaggttcaacaattgcttctgacacttgccagtggctcattgtaagaaacaaacaataaacattaccagtggagagagaaatgtaataccattttagattttctgacaagaagtagtgccaaggacccctgcaaaaatggtttgtttttaaaatctccagttctttgagttatatttccaacgagttacagtattgaaatgctttaaaaaaaaactaatttcatgttagagtagtactttgcagtttagaaactttcatatatagtatttaacttcatccccatagttttgtaataagtaagatagtttttaaaaagatttctaattttgttttatacattaaaaataggcagattcccagtacttgggaggccgaggcaggcagatcacccaaggtcaggagttcgagaccagcctggccaacatggtgaaaaccctgtctgtactaaaaatacaaaaaattagctgggcatggtggcaggcacctgtaatcccagctactcgggaggctgaggtgggagaatcacttgaacccgggaggtagaggttgcagtaagccgagatcatgccattgcactccagcctcagtgacaagagcgaaactccatctcaaaaaaaaataacaaaataaataaaaaatgtaaaaaggcagattcagagatgttaaataattttctcaaggacacacagcaggtagtatattgaaattctgattcacatcttccatttttaatttcttcctacagtttgtgattttcagaatcttagggatccatcttatacttagcagctggttgaagcctggaatcttctgatcagaattttttctgatggtttattttattcctatgcatttgtctctggttatatagagaaataatataaagaaaaatcctttaagccaatataatggatttttcatttctagacatgattttaatggaggaatggcccagagtggatggggttgttgaggaagagaacagtgggccccttcatggcctctttcaatttgacgtggtcttgtcctcttgcccaggagtgggatcattattttagatgtgaagcccttggtagtttccattgttttctgctagatgaaggcttaaagggaccaattagtgcaccacaaccttcttggaagtccactgtcatgataacttgagattagtgttctgtttcaaatcccaggaactccaaacctggaattttgtaaattaccccaaaaagaaattgaggccagtcctgggagaagtgtcttttactgtctccgtggcagattgcattagagtaatttggcacttattggattctgccagaatggtggggtgtggtcagcataagaagtttctgagttataaggacctgatatgataatgaacccagacacaaccctctgagccacagacccatccaggccctcaattaaggtccttgagatggaactgcaaatgggctttaggtggcttagt

SEQ ID NO: 133472 - DNA, 1108 bp, Homo sapiens
tctagtgaaatagcttgaagatctgtgagagtggtttgaattccgacatgtgaaagtatgtgctttgcttgtgaagtggaaattgccctattcaagtgggcttatgagtcccctttgtcacttagcttgtcactgaacttaaaatctttgttctttactttcaactttactgagggggaagaatttggtgttaatagatgtgaaagctctgtagaagatgttactggacacatcagagaaagaactgtgatttttagactcttggcagtggcttcacagtggccccaaggagacaggggtaggtgggactgttctcattgatcgtgatagagacagtgaagcagaaaaccacttatgtgatttgtctgaggtcctacctagctggctgaaatccagagcatccaacacgactacatcacctaacatctaaaatgacattgccttgaagggagagaaactgaaatggacagatacttaagtgcaggtctgctgctaccatagagtgcctttgtgcaaatggaaaaggcatctctaggccccatgggcaggcagattacacaaaggtgcttcttagtgactaaccaaggcacacagcttggtgagcagaatgctgactggttccaggccccaggttgatctccaccacatgtccctttgcacaaggcccaaaatgcacaaccacatagggaggccctgcatagacgtttgccttgacagtggactagttcatagatatttgtagccagttgaccaaatccttattttacctccccacttttcattcccaaggtaaaaaataaagttcatctattaaaaaactaattgtatgtgccccaccttaacagtattcttaaggagctctatttttttaaccacttttctctccctgtaaattatactacccacccttcctttttgatatctgctgtagcaaattgtaaggcagcactctgcccacaggacgtggtctttaaaggagtcatttcctcttccatctcctccaggccattcccatcgtgtttttcgtggcactggcaacaggaaggcacactgaatagcagtgctgaaaaggcactttgttgtttatgttattactgtgggtttgtct

SEQ ID NO: 133473 - DNA, 1035 bp, Homo sapiens
aaaaaccaaaaagagtacttttctagaagcaaacttcatagtcctctatattatgtacttatggatcttcatgttagagttataaaaatatacaggatgtaagagaggcatgtgacccatatgaaataatggatctatatttgggttgtaggataaaaatcagaggttcttccaacttaggatcaaaaatagtttgagcccctaactcattttttcctatagcagtggcttgtcatcatatcaacagatttcaggaacctctgtcctctcgcctggaggcactccaaaattcatttaggtggtttatgtaatagtggaacgattcttagaaatgggacagggtggatataaggtaattgcttttttttcctgatgaaatagtgcctgtgggttttttttttttttttttttttttttggtagtaatttcacaaagatcctaaattgaaatccgctggaataataggacacacaggagtagccgctgttctctattacgtacagcatggctgtatctgtgacctgtggttgtgcatattgtaggtttatttttcacactgccagttaagatttcccagagtttgacacaaaatctacaatcactgagcctctactgatatatttgtattgtccggaaggctgtcgagttcttagtcaagagaatggcttccatggttttctttcatagtgaatggttttggaaataaaattttatgctcatacttactgaggtcagaatcctgaaatttcgtccagtggtataaataataataatatgtcacaaggtatattaaccatttgccttgtactaggccctgttactactatttatatacatcatttcatgtagccctgtaacatccctttgagataactactcttatatccttattttcagatgaggaactaagaagttaaaaatatgcccaaagagccacatagtagcattaactccagctcagagctgactcttgacagctgccaacaaattctctttgttcttctgggtggaagaccatgaaacaggaaaatatta

SEQ ID NO: 133474 - DNA, 1810 bp, Homo sapiens
tattattcattcagcaaatagttggtaagcaagatctatgagctgagcctaatgtcagcagtttagctatagtctgtgttatgttccttattctcttgactagaaggtttattgtgttatgtatatctatagatacatatacattaaccaaagtgtgtataaaatataagaactaaattaaaatattttcaatgaaattataaaataacaatagatgctcctgttagagtcacttttttggttatattatagccagtcatgacttttatagcaaatggcagagggcttttttttttgagagttcattttattgcatttttattggtaggtagtgaaactgactttcactaggaaattaaatctcagcatctttgccttgaaatactttaatagattaacatgagtgatggcatttgttttcttgctgtgggtaatcatatttatttctgcatgtttaattacggggtttttattccatcatagacatgggctgtgttttcatataaaacagaccttatttcaaagagctcaaagagggcgaaaaaaagatgacataattgggctagtaatatagatataccatgcaaaatcaaagtataaacctgcaaagtcattttttggggaactgcgatttaaaacacagcttatatctctagccaggaagccacaggttctttcgtttgcttttattgatttttattttttacaagggactttaaaaaaaataactgctcgttggcctttaactaggatctctgcctttcttttaatttatttatatcctctgtaattacttttcctttctttatcctaatttttcttgattctgctgcattacaccaattttcatgtctcctcttgtttcccttctaaattttcatttatgttttcagataaatttattcactatgatgtcatctgaccattcttgtgatgcaaggtagtgcaatttctttaaggcttgaaacaagggcacactagggcacactattgatactgtcatatgttgccactgacgtcatttctggggtaagagacagttgtaaccagtaaaatatctgcagagctttattaaatattctcttctcctacttttgaagtgcccatttcccagaaagactggttatttgttctttgaaaatgtaagcttttttcaattaaacttttccattccacacgaaaccctgaacttctaggtgagcaaatcttattgtaattatcctctcttcatagaaaagcaggatcgataccattgtcctgcatagcatgccaacctataaattatactgtctgtcctttggtccctgtagattgcattaggtacactgctccagcagagtttgaactttgtggttgtgctggttatagtatatggagagaggaaataagcttgccttggccttagcttcttaaacggcattcacacgtttgtttatgaatgagtagggcagaccagggcagagaaaataaggcatttgtacatcttgctgatttgtttctggcttcaggggccatttaaagagaaagagtaagcatgaacagaccaaacctgaagcaattaatgagcagataacttcccaagcatgagcatcactgccacttaacctgtgtttagtcttgccccatgacaaatctttcctgttttccttcctttttaacatttcctgacaatagcacatattttcagaattttgattttgaaattgatgtgacctataattcctaaacagtaagtaggggtatcagttgcattaggtcaaacctcaaagttgatcaattcttatttctcataagacattgttctttagcc

SEQ ID NO: 133475 - DNA, 1049 bp, Homo sapiens
tgtgttaggcaaagaagtaaaaacagtccaagaagctgacatttatagctagtgtgatggggcctaagtatggagatggaaagacacgaatggaaataggaaagtacagaggcaccaacggaaggagtgagttgaggtgaggtgccttcaggccattacaaaactcaagtgctttgaagagggcctgagttagggaaggaagagacttggctgttagttgtgtacaggtgatagctgcagctcagagaatggccaagatggtcagtgggctaatatggagaagtagtgggctgggcatggaattctggcagatgattgcacgtgggatcagtaaaaggaaagaaagagccaagcagagaaaggaagcatggctggagaggctggtggagaactaggcagcatttccaagaagaagggggtgactgatggcgtcagacactacagaggagggtgaagactgagaagaagccacacgtaggcttttggagacctctgaaagagttgtttccatgtccactgagagcagaagattgattgagagagggtgattaagggaatagggagaagtaaagacaacaacttacgatctggcagtgaaatgaaggtagtagtggtcactctaaatggttgaggggggctgattggggcaacagaaaaccctcccttctttgattcactcattcctatggatttagagcaatggtcttcaactaggtcagactacgtattgtattgaaaagatctcccaggttatgtggtcaaagtcctgtctctgcgttggaatcccagtgctggaggataaagcacagaacccacactgctgctgggtctggagactcaatctcatgattgtgccagtgctgaaaaccatctcctgccctgaaatcctagatactcctcatgccagggttggggtgagcagagagagctgctgtggaaagcaggaaggggagattgaaaagcatggtttgtaatggaaatgctgcagtaactttcctacttggtacttgctctcatccatggacgctttgtaaatcagggactggaac

SEQ ID NO: 133476 - DNA, 2169 bp, Homo sapiens
ttccataatactatgattgggaataatccatattggatgggccagctcttaatggtgtgcaacctcacttcttagaaaggactgcaattgagagtctggattgttctcctgcacatatgtacttgcatgtgatgcttccatacacagttactgttgctcttcctgagggctgcatacagaaggattggtgcctgggtttaagcccaagcatgctctccttctgcttgactttacttcattcacacactttggagtttgtttcagatgagtgtataatcttaataaattatgatttgactgcaaaattttaaatcaatcacttaataatgttttattaagactctaccatatatttagggcacagccctggtcctttttggaaatctttaattttgtttttctactttgccttgatccaagaggattttaagtggtttacaaggagcaaagtaatataagttggaagtattacagtttagaaaaggaaaacagtaatttggggatctggtccaggcttctatataatttttcatttagttgagggaatacaaatgaatttttcaaacaataaaaaaagtcctctgttgattggctccagtgagtagcacagtgagcactctttgagagtccaggagagttcccaaggcggggggaagtgggggccaggggcattgtagctgggatgctcaggcaaagagatggagtttgagctgcttcttaaagtgaagggtagggaagatgatgcaattgatctctgaacagtgataaatgtagaaaggatgttcagaacacactctgtcttactaaaggagctctcttttcaactggtacatttttcatgctcagtaactacctactttaaaattcagtagggaaacatctttttaattctcagtttaagatgcaaagcataaatatatttctttaaagacagtacattaactaactatagaaaataataaactccagatgacgactgtgttttaataaaaatcataactttatataccttcatttaaaaagtttgtattttaatttagacaaaatattggccaaattttataacagctaatttccaagcttacattcattttcaactcaagatagtgttgtttaatttgcatttcaagaactactcagttgttatttttatattctttttataactcattgctgtatgcatctaaagttactgtgtgaaatttctagagaagtactcctgattgggttattttgtccatcagtatgattagtacatgcaactgataatttggtaatttactcagctatagcttttggtaaagactgacaagatatcacaagtaaccgtcttagctgtgatgatttggtttagttttaatttttaatttttaattatttatttattttttgagacagtactcagcttactgcaacctccgcctcctgggttcaagccattctcttgcctcagcctcccaagtagctgggattacaggcacctgccaccacacccagctaatttttgtattttaatagagatggggcttcaccatgttggccaggctggtctggagctcctgacctcaaatgatctgcccgccttggcctaccaaagtgctgggattacaggtgtgagccaccacacccggcctaaatttttgttttttttaaatcactgcccaactttattctaccagctagtgataaatattatgaagcagaattcatcaagtatggttgcttctttctttctaggaatattagactgaaacacaattgtctgtgtcctcactgaacttcatgtaaacatctattatagcaactttctcagtttaatatctgttcctcttcttaacagtaagttcttcaaggatagggttactgtatcttaatcattatattcctagcactggaaactgtagccagcacagagtaaatctttagtaaccattgactcagtgaaagctttagtgagcattgctacaactaattataatcagcctcacccaactctgtattaccattttgcagcacttgccaactcagtacttcatagactcatacaacacgagagatggagtgatttttaaggagacctaatttccttttttacgggtgaaagaaagctgagatccagagaaaggattgacttgccacgggacagagagactgtgactggcagagctg

SEQ ID NO: 133477 - DNA, 1825 bp, Homo sapiens
ggctctctgccgttgtgcagctgacattgtaatgtgtgtctgtgtaggtgtgaatatattgcccgttttggggggggtgcggcataaaataaatggtaaacataatttgtgtagaaaaaggtctatattatgggaacaaaatagatagtagtgtcaggggcttgggacatatacagaatgaagtaagatgtcagcctcactgagatactagcatttgggccaagacctgtaggtagagagggagcatgctaactcctatggtgagcctggcagggacgtgctgtggtccagaacttcaaggtcttcaagctatttttgcacacccataagcataagcccagaatatattcagtcccagttcctacttcgctcgtggtcctctaaagcactgtcttcagcctcaaacctgtcatgcagggacagaccctgggaagcatgtcctttccatgcagtgaaaaatactccatgcagtgaaaaacacactccaggcataatgcgtatcagcaggggcaaactaacagaaaatgagttgttccagaaggaacaaaacatacttcatgatgaaggcaaattgtttttcacacttagctaaatagaatttgggatgtggggtgccatgtgcaattaatgaagtaggctttctcaaatgaaaatatgccaccctgggcaacataatgagaccctgtctcaaaaacaaaaaaaacaaaaaaaaaaaaacagaaaaaatcatccaggtgtggggcacatatctgtagtcccagccattcagaaggctgaggtgggagggtcgcttgatcccaggagttcaaggctaaagtgagctaggatcacaacactgcactccagccttccagtttaggtgacagagtgagactctgtttctaaaaaagaaaagaaaatacggtccaccaagatatcttgacttactggctgtcttacctgtgtgagaaagggtataaataattccactggagagtggaactataaacattattacaaattcctaaacactaaagaatcagacaggacatatttctgagctctttccttttttatggtggggaaactaaggcccagggagttcagtgaacagttcagctgcttctcacagcaggtccctcctggggccacggtattgccatcaagcttccttgttcattagaagagctgactgattaatacatttctaaataccatcaattatgagataatttcctatcacctttccttgatgtgatgattgattttctactcactaacgtgctgtgtggcatgcttggacactaaacaaattactgaactttgtaattttcttgaaggaaatgtaatgcacacataatgaaaaccagacaggggctgtaaaatacagctaactgggattttcaagcctcgccacatttcagaacccaaagggcagaatttacttttaaccttagtgaactggttaggtgagatttttcagatatggtctgttttctttctagtcacagtctaagtctttcggttgaatctcaccgtatcatatctgcctctcaagggactactttgcagtactttgcaaaggcattaggtataattttaaaaatattttaggccttattcacaaatatccattagatatcaagtgattgccaagaaagtaatcaacaaaactagaagatatgcctttgtagtaagtctggacagatattactcatacgtccagtaagaaaaatccagcatcggctgggcgtggtggctcatgcctgtaatcccagcactttgggaagccaaggtgggcggatcacttgaggtcaggagtttgaggccaacgtggtgaaaccca

SEQ ID NO: 133478 - DNA, 1054 bp, Homo sapiens
ctggctttgcagctaggattcctaactcagattcctaactccttattcaccattatgggaagtcgcacttttgttgcagcttgcttcgttcattgttttctttcatgctttaaaattttttcccgcttgaaataagccttcttttggtttcctaatagtcgtttgcattttctcttcctctgaaatatagcagaacagagaagtcaggcaaaatggccagcagactgattagagacaactggcacatagtggtcctcaaggcagctggctcagcaggcagattggattagaacaagccttcacacccccacaggggcttgccagaagcaagtgctggaggagtcacctacacagcttcagagagaatcttttttcccctcccagttccaaccctgagagtgtttctgaagctatagaaatgctagtagctctgagcatcttcttgggctggctgtctctttttgtcagttgttgcattatttgcttctcacccagagcagccacccatcctgagattttatctgcagttagagaattctccctccatttctgttttgagggcatacttgttggtcaaagacatcctcttgtcttcagttaaacctgtttttctgaaataccaaaatcttgagaagaatttgagagcctgtgacagtgttaaataaacttggcagtttctacttcatgaattatcaaaactactttggtgggcaatgaacagggaacagagactagacagtttggatttggagtaagtggaggaagcaaagatagggtgtgaccacatgggacagagcacattttcctagagaccaaaaactctgattgtaccctggtccacagactcagtgcagaagcaggtatattaaaacccaagccttataatagatactgggaatgccaaaagcgaggagagtgggggcgggggcaagggttgaaaaattacctataggttcaatgttcactagctggggaatggatacactagaagcccagtccccgccagtatgccatatacccatgtaaaaacatgcacatgtactgcctgagtcta

SEQ ID NO: 133479 - DNA, 1053 bp, Homo sapiens
tttttttttttttaagagcatagctctaaatttaagaaatcaatttaataaaatgtgaaatgtgtaaatatattttctgacagatttctccagatttgtttaattttacaaattaaaaaatggctgtgaccgggcgtggtggctcacacctgtaaccccagcaccagaactttgggaggctgaggctggtggatcaccagaggttaagagttcaagatcagcctggccagcatggtgaaaccccatctctactaaaaatacaaaaattagccaggcgtgcctgtaattccagctactcaggaggctgaggcaggagagtcacttgaacccaggaggtggaggttgcagtgaaccgagatcgtgccactgcactccagcctgggtgagagagcaagactcttgtctcaaaaaaaaggtcctgcctttctttttaaatgccagggagactgtattagagcatttaatagatcactgaattatattacaattttaaaccttaaggggaaggcttttatttttatatcagcatttattgaatttgaatgtagtttcaacaaaagacaaattttcatgttgataataacactttttttttttttggtccttgttcttgttctttctcttcctagttttctctttcaatctcattaaaaaaaaaagttttagggaaatgtaagttgtccaaaattatgagtgatttttagtgaatttggaaagaggcttttctttccatccgtactgagacagtaacctcagatttggggcctggtatttcaaactcttaaaagcaaaggattgtttttgtgggctgtaaatgtagaatgctgtagctactgggaaagttaaacagaaatctaatttatacttttctccctttctgaactcagttgctaaagcacagttaactctcagagagttgtgctggacagggccgaccctgttggtatgtgtttgcttttttctccccttaacaaatagaaagaaaatagttcattaaaacctactaccctcacttttcagcaaagctcacttagaattccagtttgttcttgg

SEQ ID NO: 133480 - DNA, 1252 bp, Homo sapiens
ttatgaagtctttcagtcaaactctcaagttttttaggggtctggaagaagtactgtggaggattctaggagtatggtatgccaacccaaataaccaatacaaagatatgtgcgaatcggcaattacattgggaacagaattaagatacattataactaagataaagtatttcaaaatttaaacatttaaaataatttttaataaagaataaagtagaaaacttacaaacccatgtctatttgaaggattagctattatgtgttttgtaagcgagtagataaaaggagtaactaacttgtagttttacttgtttttagtatgcatattatagaatgtttgcatgtaaaattaatacaatttgactttgacaaacatttcggataactggaaagatggaagcaaaagcttcatttgggatgaaatgtcagtttattaaaatttctaggccatgataatttaagagtttgggaaaaaaccaaaagaacaggtataaagatagttgtgcatttggttagaaataagcggtgacgtattttgacaaagagaagcatactaattgaatacagtgggcaggactcattagagactgtgataataaagggaagagaaaaaacaagaaacatttctgcctggtatcaagaaggacttaacacagcaaattggaaatgaacttgcagcatcactagggatctggaaggatcaacatgtgtccaataagcattggacagttgatccttctttgagaatattctgaaaaccctgcaatttacagacaaaagcaagatgctagaaacagatcagaaatgaataaacatcataatgagacattaaacaggattaaggattttttttttttttttttttttttttttttttttttttgagacagggtctggctttgtcgcccaggctggaatgcagtggcaggatcttggctcactgcaccctacgcctcccaggctcacgcagtcctcccacctcaacctcctgatgagtagctgggactacaggcacgcaccaccacacccggctaattttttttttaaaagatgggattttgccatgttgcttaggctggtctaattcctgagctcaagcaatcttcctgccttggcctcccaaagtgctgggattacaggtgtgagccaacatgcccagcctcaggattaaggaatttttttgaaatgtttaattcagtaggtatggcatgactaagtaaagtgaaggaatcaaaagttgttttgaggtgta

SEQ ID NO: 133481 - DNA, 1042 bp, Homo sapiens
ctagtacggctttcaaagctctgacctcacatatctaatagggcaagcaaaatggaaagacagcgtatacttgggggcagtgagtgggcctcaaagaagtggcaaaggcagggccctcaggctggggtgttgaggaagtcctagatgacaatcgtataatacattcatataaagacagagcaatagcaacatgtcctcagccttacaaaaggaacttaaacgtgaaattttcttccaaattatgtggtggcaaggtcagtaaattgctttatttttaagatgtaaaattaaaataaccatttcccgatctcctacttcctcccctccccaaaaaacaacctattttaggtaaaggaaataattcaacaaaaatatacagaaactatttaaacgtgcagagaaaagataagaactgctgctacgaaagagagcaagagatggagaggagaacgtgtgatagggctggctactgagaataggcaagaaaaagaataatttagatgagaatatgtatgaggatatataaatggcaaaatggatacagtaaaaaaatcaaaataaggaaaactaaaggttctcatttttgcttaagtgctgacttcagtgcattttatatttgaatattatgttaatgaattagaaagttaagccctgaaacaaggatacataaagtaagaaacagattatggaaatttaaaacactctcttgctataccatatcttttgcatttcttccttctcctactcctccagggagacagagtctcactagcttgcccatgttggtttagaactcctggcctcaagtgatcctcctactgggattgtaggcatgagcaactaaacgtgccccacctataccatgacttttgagtaagatactaccatctgacgagtctctgggcaaatgattgaaaactaagtatcctgatcatgtctcctcaatgcatttttgatggaatttttgttactagagctatgctgttgtttttttagacagagtttcactcttgttgcccagcctggagtgcaatggtgtgat

SEQ ID NO: 133482 - DNA, 1081 bp, Homo sapiens
gtgccttcattgagctaatggcatgataaaaggggaagttgaggaggagctgttctgtattaaaatctagaagagacaaaatgttgttagtgcatgtcctttgtttgtatcctgattggaacaaagaaatgagaaaaaagaaaagaaatataatttttaggtaactggtgaaatgtgaatatggaccaggcttgataccaagaaattattctttcttttgttaggcatgacagttggcattgtcgttgtataaaaaaagtttttattttattgctgcatattaaagcaggtagggatgagtgacagctttaggacagataggacttcctctgaaatacttcagtaaaacagttttaaaacgtagaataaatgaagcaaatagtatagtatggtaaaatcttggtgatttttgaaaggtttatgggagtttattttataattctccaaacttttatgtatgtttgaaattattcctggtgagtgttttaaagtaactgagttctagaaggaaatagctactgaagtttattaagtaattcacaagtgttccaatttagcttcttttgttgtaaatttctacttttaaaaatggggatcatgtattaactaggtaagtgctaataaactgccccctgcccccagatttgtaaataaaatctgtgatcaggcttctatccagcatgtcttctaccactttgtaactaaatgcaaaattttaggtattttctaatttaggaattgtatgagtccattttcatgctgctggtaaagacatacccgagactgggcaatttacaaaagaaagagcttttattggactcagttccacgtgactggggaggcctcacaatcgtggcggaaggcaaggagaagcaaatcatatcttacgtggatggcagcagacagagagagcttgtgcagggcaactcctgttttttaaaatggtcagatctcatgagacccattcaccattatgcgaacagcaccggaaagatccatcctcataattcagtcatctcccaccaggtccctcctgcaacacatgggaattatgggatctacaagatgagatttgagtggg

SEQ ID NO: 133483 - DNA, 1347 bp, Homo sapiens
cgggaggctgaggcaggagaatagcttgaacctgggaggtggaggctgcagtgagcccatattgcactacaacactccagcctgggcgacagaacaagaccttgtctcaaaacaaaacaaaacaaaaaaacgggtgagtgagatttggttggtacagcattgtttataatagtgaaaatttggaaacaagccaaatatctatcaataaggaagtaaattatagtacagctactctttggaattcttttcagctgaaataaacattgaagtagaactatatgtcctgatctagaaagtaatgcatgatatattatgtcttttataaagcaagttgcaaactatcaggtataatgtaatcctgttttaataacaatatatgcaagaaagaaacaacctcaaaatgtatatgttgtaaaaaatactagatggatataataaattcttaatagcagtttatttctgagttgtagaatcaaggatcaatttttattttgtttcccatttgtttgaaaaaactcactttttcctgctataaattgtattctctactcttttcacttgttcttccatctgtccatccatccatccatccatccatccatttattcattcattcatcaatccatccattaaatccagatatttaaggagcacccatatgccatgcattgtgctaagcagtgcatctataactaacagataggttgctcttgaattgctaacctgctagctgggttacaagcaagtccatgggcaatttataatacagtgcagtaagtgttacagtaggagaaactatagcatactctgaataggcaatagcctagatgggagggacagaatggctccctaagactttttattattttaactaaagatgatatttattgagcatctgttctgtcaaagctttgggttgatttaagcccagtcactgtcacccaagagcccaaaagctattggagagggatgatggcaagctggtaatatattgtgccttttattagcattaagtaacagtaatgcacagcatgtgggataatgacttcagattgtagagaaagagggagaagagcctggattatccagtgacagaacagttggcctcttggtaattaagagtggttctatcgtttctacagatattactcttccatagactaagggtatatgataattctgaataaattttgtcatcccgctttcttggcccttcttacaattcactttctttatcttaaatgaaggatttcttgcattgcttttttttttttttttttccagggaaagtgttttaaaagttagtgaacaaaagttcactaacttttgttgttgttgataatagta

SEQ ID NO: 133484 - DNA, 2063 bp, Homo sapiens
gtgttgtcgatattggcctccctgtgaggtggtgaaacgtccttaaaaacagtgcttctgtggtaagagttcagttaattaggtgattgtgtgtgcattctctaaggcactagcctagtctttcttctcttgaccgtcttctagccattttactatctactgggcagctggtggatggcaacaggatgagatcatgtagctgtttgattgtattaatggaacactgcagtcaaagtacctcactaaagttggggattaaaatacttttagattcacctttcagttgaccttgatccttggcataaaataatcaataccatatgctttgtgggtggcgtgtatcagtgttgtgcagtttttgccagccatggaggagaatggtggcccagaggaaggggtgcctttttctctctacagcactctctttttgccagactctataaacagaaagtggagaggtgggtacattattctcatatgcacagaagtgccacatattccagtgatgacagctttgggtcttcctaactgaatgtgaggttgagaacattgattttgtgttctagagtattgcttctcgaacttgaatatgtatacaaatcatgtgaggctctcattaaaatgcatatttgtatttcagtagatccagggtgggcctgagattctgctttcctcacaagctgatgctgaagcagcccaaagtaaaggcctcttggaagtaactgactctctgccaccagaggcaatatgaaatcaccagtaggctaccttttggagagaagatcccagaaaatacttcaataggattttggccatgagacattcagcaaattatttaaactctccatgctatgccttgtcggaaatgtgaggagataatagtattcactttgtatggttagtgtgagcattaatgacaatatatagatgcaaaacttttgggacaataacatcaacatagtcagtgtctactaaatggttgttgaattcttcccagaaagtgctaggtcaggagaaatgtatatctgtttggggaaagtgcacagtatttgagaagaaattgcttattgtttaaagacatacaagaggctatgatccaagaatgagacttgggttccatgatccggtgcaacagtggtttcttgggagcagtggctggcctctggtaggatttaaggcatcagaatgtcaatgaaagtgggggcccttctgaaggggttcatggatttctgtcactgctgagataaaggagtcttaacttttttcccttgactgcagggtgtttgtaaggtaaggaaggaggcagatagtcgaataacgaaagaggcaaagggacagaagaaaaagggagagaaataactttagccaaccacttctgggcctttttcatttaatatgctccaaaatgtgaggtaagtagtagtgttctaattctacagatgaaaaatgtttaaaatacctgccccaaataactcaatttttaagtttatggggctggattaagcccaacccagaattaggcttaattccctaaaggcagctcgtatacttgactccataaacacctttggcacctaggacacatgtatttaattttcttgtgcaaaagagtaaatgcagttacctgtggccactccagctgtctttccaccacttcagccagctaaagttactgccgtgtccccaggacctagcaaagggcctgacccacagttaggctcagtaaatactatggaatgaatgagtcagtatttaatcagagagccgattacatgataccactattattatggatcttttaaacttttaactctgataccacctatttgatttctccttcttgactgtacactccttttacttgttctttatgttttttgttaatccacacacttcacatcgacttaaataatttttaaaatgccaccaagtatttttcatttctcttcgagccagaggaagtgtaagacatgtactttgcttatggggacttgcagtctcattggagaggcaagatacttaacaaaattatttagttctttaatgtgcagtcaaggcagagt

SEQ ID NO: 133485 - DNA, 1649 bp, Homo sapiens
gttactagttatttcatatttgtttgccttattttctcagattgaaaattatcttacagtaagcaagcttcttcctttataattctttatctcctccgtaacatgccagacatgttgtagaagcttttgtttattgagtgaattactccagatagcggatcatagtatcctttgatagttggcttataatctctatgaactgtgaaataagggtggtattgtggcaatttcaaagtattgataggccattgctctctttgccagtcctgggaagagaaaagaatctgatacaatgcttcttcatgtagtgaattttaagacagttgtctaagagaactccgcctcaccttgggccaatgttgagtggacagttgcacctttttttttttgtaaaccagtttttccttttagacttgaaagtcctgataaccagggcttatttagcaccttggctgcagctgtctctgacaaactagccaggcgttttgaggcctgacacctgtgtttccctttcgcctagcatggaggggttatgagaggatgtattgctacagtgccttttgtcctctctaagcaattctgagaaagaacttgtcacaggaaagtacctcgttaaacacatttgacactttctgaattttctgtacttcctgaataatccaaggtcccagaagccatttttcattttcctgaaaaatgtagccaggattctggaaaacttgccaacttattgttgcccttgatcaaggaataaaacattactactttgtgcaacatgagtgaattttcttagtttacaaaatgccaaaaggctgatttcattttagtatttcccacctagataataaatacataatagaggcagaattaataaatacatattcttatctacccctctgaagagctctatcagtcaaggttctctgcttgcaagcaacagaaaccaacactggctaacttaagcagaaaatgaatttatctgaaaatggactcactgggagaagggagtagaagctgaaggatggcctcttagaaactagggcaggctcagagaactcatctgtgaaatggatgaactctggccatttccaatcttctgtcacccacctaagattcagatttctgggaaaaagtgccgatttggagcagcctggattctgtgctaagtctttagacaggggaaggctcaacaatatgattgacagcccctgagggaaatctgggtacagttggtggaagaaggggaatgatggtgttacaaattacacatcttcactgcaaaaatacacagcgtgaaaaataaagtgacacatggattctccatagaagcaagccctctgattttactgtttgctaagtctttgttaaaataaaatttcttattctggagtggaaagaagtaaaggggttagtgacttagttatatacgaagtagctagctgaatttgactctaaggattgaatataataagcttgggattatcccatttccacaccacccccacccccgccagcttcaattgttttaactctctaagccttgaatttctccatctgtgacaaatagtaatgggattatttcaagggttaaatagataatgtatgtgaaaatgtctcataaatggtttttgaaagttttgaagttataa

SEQ ID NO: 133486 - DNA, 1090 bp, Homo sapiens
aatcctggctaatcaacccagtgtcctggaagcgtttcagatattctccagggaacagagctttatcaagttttatcatgttcaaaagatgctgttgccattgtttcttgcaagatacatggttacaaatcactatcaaaattcagtgctgagtggtttccaaggaggtgacgggtttgggtttttcattgttgttgtttgaggtcatctgcctttgaaatagactctctccctctaattttgctaaatgttcaccataggtagtgtttccaattctagagtcgctcctctcagcaggctatctggggatgttaaatccaaggcatggtatttggtttagttatctgagagactgagatggcactgtggtctgatgagctgctattgttcatctttcagggacaggagagagtggcaagagtacgtttatcaagcagatgagaatcatccatgggtcaggatactctgatgaagataaaaggggcttcaccaagctggtgtatcagaacatcttcacggccatgcaggccatgatcagagccatggacacactcaagatcccatacaagtatgagcacaataaggtaggtgcgactcttcattggagcagtcagctgaatgttccaggtgttcacaataatgtgacaacacgagtagcctcttgacatgtctggagtgcataggggggtttggaaatatacattttccatcccatcataaatgagacttttaatagataataagttattgataaatgtctttttcttaaacctctaaagttatacctataaaaaaccagatttgtatttttagtgatatcaatgaaaggcatatttggatgttcagcaataaatattttcaggtttaaaatttggagaagcacattatgttaaggagagagtttgtaagtatcataaattggccaaaataggggatttcaaagaggtggtggccttgctttttaatacattgaaaaaagagtgaaaacaacctaaaactattctgtctggtttaattttgaattttgtgattttctttcagtagtaccacaggcttcatttgatttcaaaataggtccatctgtcacttc

SEQ ID NO: 133487 - DNA, 1355 bp, Homo sapiens
ttaattgtattcaactcttgccctcaacagacagtcatgaaaagacgggaagttatggcaactttggtcttagagctgctgtgtttcaaatgcaggattttaatctaagtagaggaaaatgtgcagaaaacagaatacacatattttaaagtagatatagcctggaatgtggacaacacatggattgagttttgactcagtgttattgaatacttttttctttgcaggtgtggattgatgatgtgcttattggtagaaaatttctccttaaaatttctagttctacttcatccaagtgtatgtgaaagtagcccaagttcagatgaggtggtgctgagatttcatgtttcaaactcctagcttaaaccagtggacctgaagtacagttactctataattcagctccatgagtcttgggttttgttcttggctgttgtttatctgggtgctgaccaattaagagagtggggtgggggcattcgtcctgagccttcccattcattaagatcttcagattagacttctgatagtttgacaatatctccagatacagtcatgaaaggccctggcagtgtgaaataaatatattcattgtgtaactttaaatgccacagttttggtaactgttttggcataacagagacccttgaaaaaaaaaagtagaagtggtatgggcttccctcagtctgtgagaggccctggtaaggtgtgttttctgcccccacccccttttttttcttcagagtaaagatgataaaccatgtagacccttgaagttcctggtagtattcagtgattgttttccagagcccttgtatggaaatgggcaccaccatccttcggagcagtggcagtaataactgacattttttaagcattgagcaatgcttctgtatatgtggtttggccttggcagctcttttgataacataatagcccaagaagccagtttaagtgagagaaggaaccaatgagtccacgattgctttcaacaataaatgctaatttattaccattaagaaggtacatatgattggatttaaaatggtcattttactatttgcagactatatcatgcaaataggcaaaataatcattgtaaacatatatatggcttatgtgaatcagacacatagagtaaatacagatttttggcagaacttgtatgtgggaatcctgttgtgttgaaaagatcttggggggaagaaaaggcctaaaatggaagcatcagattgtgtgagagtgtgtgtctaatgtgatgtattctaacagcttacaaattgatgcactgtatcatagtatattgagtttgtgtttgatgtttgttctgatggaaggagatgtgaatgaactgg

SEQ ID NO: 133488 - DNA, 1043 bp, Homo sapiens
tcactagatgccttaatgacttttttatcttttctatgatgaaacatttcagggggaaggttgcatataagacagttggtttctgatcgtttttttaaagactaaaaccatgtttattatgcttcctccaatgttatttttatgtattattgggtcggtgtattaaaaataaggtctgagtatatactgctataattcagacagcatttgttgggtcatgaggcctaaaccaagaactaatccaagagccatacattatatcttgggttatgatatctcttcccctttaactctagtttttgcttcttggatcacttcatgggttgtagaacaagaggagaggctcaatttaaattaagaggcaaattggtttcacttcctcgtttttcaggcaaatggtaggaagtcatcatatgtgcaggctttactaaacattaataaaatgcaccgatgtactttctttaactttactttctcaaggagtaattctggttgtaagagtgtcctttcttatttcctgcctgcttgttatacatttcaaggtgtgatacttccgagcaaagagatccttccctttgcaggaagaaggcatatttccatgtgcaatttacttagtagtaaggaaacccgcatttatttattttaggcttaggttgactattgctgtttctgaagaaactgaaggggaaagatgggaagagagactcctgctctgttaccattttgttgcacgtctgttcctgtcactggattgaatactggaggaacatagggcaatcaggtgaaataaattagaggacaaaatttaaattaatgaaacagcccatagggtaccttttttaactggctggtgaaatcgtcttgacatcaaaattggtggtaccagatgttgcgcctgtcttttggacagcacatgtggaacacacaagaagcatctttggactgctttggagtaattataacctaaaagaacagggacatttcatgtacctatcttcgaagttctctgagcattcgctaccaaggggcaacttcctatctcc

SEQ ID NO: 133489 - DNA, 1015 bp, Homo sapiens
ataaaagactgtaaatgtgtgtatttattcaacatttctagaaccttccttgcccctcattccatatccttaggaaggtcatggggacacacctgatataggagaacagtgggaaagaagtgacactggaaggtgggataaacttgatttgtactggtgtctctcccaggtcagcctgggcagaccctcacacccagagaaccctcaaggctgccctctcctccttcatgcagccatttgctacattgcagaggggcagggggccctgtcagtcccatctgcctagttccactggtcctcccaccacatctaaaaccttccatcaaccagtatccagatgattttgtctcctgctttgaatattcagttgtgcatacttagcagcgtttcccttccaaagccccaggaagaagctttccagaatcgcgcttctagcctgtatgccctgaaaatgcgtttgacaacgtaacacagctaaaagtggcctatcagcttcacacttcaccagttttccttctggaccttccagtagtgctaaaggtgctcccattttctcggattcccaggttcaagccgtgcttctttcttggtctcctctttctctcactgcagcacagactacagccacaacctgcctgttctatcttttcaatattaagtccttccttcttgcccattttcaccacacaatttcaggcacttacctcctgtgtgggccttgcggtagctttctttggtcccatttatttgttgtgtttcttccctgtaaaattgaactgtttgtgccatgccagtgtcttcttcatgagtcctatgatgaagttcttacctgctcagaacttttcaatagcatctcataggctgttggatctgatccaaactctgtcatgtgttacatagagaaagaacaaagcggttacatcagagcccacatataaatatatatagttgatcttctgaatccataggctgtgtggattcaaccaatctcagatgcaaaatacttaaaaataag

SEQ ID NO: 133490 - DNA, 1071 bp, Homo sapiens
caagctgatctcaaactcctgagcttaggcagtccactcgctttggcctcctaaaagtgctgggactacaggtgtgagccgctgtgcacaacctaggtcctatttttaaaggattgtttgttatgggagttcatacactttttataatctgtaatatgcactataagggatattaggactgtgtactactgctaatattcagattttttccatgccctatgttcttcacctttataacttctcttcagctttttagatgctcttttacaaccttcttctattccagaatacttttaataggatcatatgtatgtcccagtttgcctaggactattgtggtttacacatattgtctagtataatttttaatagtaccccttttactcttagaaattattgttttaggatgataaattatatgatcaccctaatcattaagtgtcaggacatcagcgagtacataactgtgaggtaacccaatcagaactactttcttggatttggtttaaaaggggagggtgcagaaatcaggcttgccacacagtcttatattcttaatatgcaaaagagttcaatggccatgtttcaaaacacccaacatattatgattataaaatattctctatatggcattatctgtttgattcttgctaattcttgttggacagaataattacctactctaaaattaggttgaaatcaaaattccagaatgagttttttcacccagttgattatctgttatggctattgacttgtggtttggattttttctgtttttttctttgctttctgtattattcatttctggagatgaattgggagagaaaaggggggaacttatttagtattttagaattattcatgctttatactatctcaaggtggtgaaatttatgagtttatagtcagcaataggttgggacatcaactgtactcttcagttttagtaaaaataaatgagttttcaataaggtgactaaaatattcctagtgaggtttgagtaaacatatttagttcttcatgctgcaggatcagaattttcttatcaaactgaaggcacatgactc

SEQ ID NO: 133491 - DNA, 1066 bp, Homo sapiens
tcacaaggctggtcttagaggaattccaagtacagccccaaactacctcaccttccacatcttctgacttaaagaacatgatcttttaactctgttaccagttctgttacatctttgaagtaaagtccttgtaaggggatagaccttttttttctcccagtttcttaacaactgttttatttttacaaaatataccattttaatttgttaaattgggaaaatacaagttagcaataggaaaaagagaagttactcatcctaccacccagagataatcactttcaacactttattatagatttttctaccctacctctttctatataatactctgtgtgtgtgtgtgtgtgtgtgtgtgtgtgtgtgtgtgtgtatgtatgttgtatgtaagtgcacattttcgagaactggtatgaggtttacatatgaatttgcagtccactctttccatttggcaatatattgtcaacagttttatttagttaaacgtaataaaacattgtttctcctagttgcgtagtctctcatcatatggatggactgttatttattttacccattccttatcgttgaatgtttaggttttgattttttgatgcttttaatcaactgtgaatacacatccaatagctaatatttgcaacatacatgagcatttccttggggaaagttgctaaaagtggaatcactagagcagaaacgtatacaatattttaagatatggtacctattggccaggcatggtggctcacgcctgtaatcccagcactttgggaggccgaggcaggcggatcatgaggtcaggagatcgagaccatcctggctaacatggtgaaaccccgtctctactaaaaatacaaaaaattagccaggtgtggtggtgggtgcctgtagtcccagctacttgggaggctgaggcaggagaatggcgtgaacccaggaggcggagcttgtactgagccaagattgcgccactgcactccagcctgggtgacagagcgagactctgtctcaaaaaaaaaaaagatatggtagctattgttgagtttttttagaaagctttgtg

SEQ ID NO: 133492 - DNA, 1116 bp, Homo sapiens
ctttgtgcttccccagccgccttgctgaattctctgcggtgggttgagacccctggtgttcttggatgggacagcccacatgagcagagtggctctcccttgtttcctttgctctctttggatttatatccttccagaactagctgtttcgtaaagtatttagactctgaatacctgaattattcagatcttcttgtcactccaatcacaaacaggtaattatggaatcacagctgctttaaagaggcagtgtgtcatcttgtgttcactgaatattttactgtactttacacagttaatttcacactgggcaagctaagttagtgtcaaagtggcagaccagatttctcttgcgttacaatgagtggcagaggttggagcaatgcctcagtggaagaaatggtggttcacagagttatgtgaggggtcccatgaacttccacctactcccaaacatattttctactgggcctgaccagaggggcctcagaggttgctgaatggtaagtttggtggaggagggaataggaatggtttggtttctggtctaaagaggatatatggggtgaggcggcttgatggtgcaaggatgattgagtgttttaaatgaatggtttaagtgacaacctgcatcttgtatacacagcttcataaaacagcctctattggttgtttgatggagccaggtgatctggtatggcggaagatttgtgagccccactggaataattctaaaatgcttttattatagtttttgattatgaaagtaatttattttcaaatgtaccagatttttgaaatactgaaaagattaagaaaaaaagtactagtattgccattagccagatatcctattgttaatattatgtatgtattctgaatgaatcagtagattttgaacaggtatcattcgttcatactgcctgcctgttttctcttctaatatatgaggaacatattttctcactattgaatgttcttctaaagcagtattctggtagttgcctaacaccacatgggacaattttaaaataagaagtcactggctaggcactgtgtctcacgcctgtaatcccagcaccttgggaggctgaggtgggtggatcacctgaggta

SEQ ID NO: 133493 - DNA, 1216 bp, Homo sapiens
actgctgggtcatacgcccaggttttgcacgttggtttgtggggtgcaggcactgactgactagtgctaagacgtaatgtgcttttgatggagtttcctttgcctgggtgtttttggggtttttggaaatgtggaatcttaagaggaagaaaacatagtatttatagagctggaaaatgttctgcttattctcaatcctttattgacatagtggttactctgctgttttggttggcagtgtgattctcttagtttaagcaaaaatttcttttgtcaacaggtagattactaataaggatattttactcaccaagaaattcctaggaaccctttttctggacacatcagacttcacaaaatgtttctgtttttctttagttcctgttgcttctctcttcttgcagtatccactagcagcatggtggttgttctgtagatagtgatgttaccacttcaccatttggtcctctctcctctgcgtcagttaacttcccatctaatattttgttctgtgaactattccaggaatgattatcaagctctcgtcctccacttaaagtagcaaggcatgctagcattttctgtttaggactgaagaaatgcctgcaattcaggaagtgtggcaaccttataagtagtgggaaagttagaggatgtaaacttgggtgattcgcataacttcagtagacctcagtttcctcatttataaacgaggaggcagtctagagcctttagatgcggcctctaagggtcccttggatgaggtgtaaagttcatgttcttagggaacttcaccactagtacttggctgcctttaataggtcttaatgctcctataaatttaactatattatcccttttgcccatttatgatttattaatagctttaatgaattgtgaatgacagtttaattagatcatccatgtataattagggcaaccgggtttttttccctaagaggatatatttttcatccgtgagtatgtagcttacctctaacctaggtaattaagcattttaaggcattttccaaaataagaaggctttttctgttttcctaataaacactttattgaaaagccacatgcataaaataatggagggccgttttgacctaggttttgcatgtaatcataacccagacagacacaacctgaggcagtacatttagtttagtggtaacaaagcagtgtggaatttaagaaatctctctct

SEQ ID NO: 133494 - DNA, 1038 bp, Homo sapiens
gaaaggtccaaggggaaaacacacctctcctccatgtaattttgtaatccagtttacaccaacttttggatactgtcttaaagacactgaatgattttcaaagcatacaaatcattttctttgtatcataaacatgaaaataacataaacacccagagatgattttgttgagagacatgaactaattaggggttcttgcacttaaatgcactttcagatcatctcaagaacttgtgtaaatagacctggtcctacatttcctgggatgggctatgctgagggcacctttcagataggctgggtgtaactcccagaccagcagcagcagcttaggagcacttggccttacctaacctcttgggacctctgtttctccacgtccaaattgttagcaacgatttccagctagtaggcttcacagagctgctgtacttggaactgaacacaacatgatactttattggagtgtattattttatcaataatgtagcttgaaaacaagttttctgtgtttattcaaacctctgtgtagtgaattaacaacaacaattgctgatgtttataggattctcaaaaacatacttaatatttccctgctttcttttttggaagtgtttttcatgttttcccagtttcattcttgtcttggtatgagtcactagcatgaaacctgatattttgttttattatttattaatgggcttcttagacatttaccaatgaataattaagcaatacaaggagtgaaacagatgttgggtttagtagtcaactgacactttctgatttagcatggtaaactgaatttggaagatgctagataaatgcctaatggctattttgcattgaaatttaataaataaggagtaacttgatgaaagctaaaacttaacttttttctgcaattcttaatttttcttcatttcttaactgttctaaggcaatcatttgaaaacaaaatgtaataaacttaagaataaagtttggaataacagcacagttggatactgctaacatacttatttacttttttattat

SEQ ID NO: 133495 - DNA, 1035 bp, Homo sapiens
tgtgttttaaccctcccaacagatttatcagttaatagctactctactattcctgtagatgaggaaactaatgctcagaaatgttaagtaatttgtccacattgcctttataaaggcaaaatttgtattttaagaaacctttgtaaaggtgaccatagatgaataatatagtatttgatcttgtaagaaaaatgcctgccgtttaaaatgtgtctcttctttaagttgccacactatgtaagttgccaggagatagacataccacataagccacgtggccagcagaaatgattagtagcgacaagcacgtgcctaaacatatcctgccctctccctttctgactagacttgcctctgcacttccacagttccctccctccagcaggtgcagaatggcctgtttctccttcatcctatgatgctagtggccttcatcctgtgatgttaaataagatggactcgcttttgcctgtagcctcctccttcagcttgcagatatatctgacctttctttcactcaaattactcatgaaatcccattgcctctgtgaatctgacctagttggaaaaaacaagcaaattccccttgcttttctcctgctgttggagcattcacttctcatcagttgctttccatgcaaaggtgattctgcgccttcctgtgtgtagtgcaaagttacgtaatgaatgcctccagggataggggcaagcaagagctgtaactgatgtggatattattattaagggtttttttgtttgttttgtttttgtttttgtttttttgtttttttttgagactgagtcttgcactgtcgcctgggctggagtgcaatggcggaatctcagctcactgcaacttccacctcccgtgttcgtgcaattctcctgtctcagcctcctgagtagctgggattacaggcacacaccaccacacctggctaatttttttatttttagtagagaaggggtttcactatgttggccagactggtctcgaatttctgacctcgtgaccgcctgcctcggcctccccaa

SEQ ID NO: 133496 - DNA, 1057 bp, Homo sapiens
acagtaaaagtgtagtttgggaaatgagatactagcaatgggaccttgggtaagttgccctatttttctaaacctgtttccttatctgtataatgaagataattatattaatacaaagcaaccactctcaaaggaccattgtgaggcttagctggtacagtttgaataaagcacttattgcagttcttggtacccagtaagcattctgtaaaagttggctgtggtgagttagagaattgctagcagtgagagcttagttgtcagaatgatttaaatgtgactgtccaagatttatttacggcacttaaatgttttcgtttgctgcaatacaattttttatcccacttaatcctgggtcaccaaaaaagtgttgagttacttatgtacagaggattttgcaaggctctaggggatgggccctgtagggaacttgtattttggctaactaggtaaagacacaatacaagacagggagcaccaagggccatctgagcaaggctgagtcgatccattgaggggttgtcacagtgggctgataccaaactaagacttcacagtgatccactttattatttggcaggtagaattttatagtttgaatcattccaaacactgtacaagaatatttcaagctatgcaacaaagtaaaatgaggatttacctgagtattttgtatgaatcattataggagcaaggtgaacagcagcaatccgtcatgctttgcagtttgtattaattaaaccttagaacgtggggtagttaggttgagccatcctttgcatattttttcattacagagagtcttctcagctggccttggggcatgcagagaggtggagatctgtgtgagcagctatagcactaggcagccttgcatcctgggtgttgaaagtgcaggccattatcctcccctctgacctccaagatgttaggtggcctttctgtgcctcagttttatcatctgtaaattgggtatgattgtactagtgcctagtacataaggagtgctgcaaagattacatgagtgtctttaaagtccttacaacagtatctcaca

SEQ ID NO: 133497 - DNA, 1049 bp, Homo sapiens
gtattacttttcatataatttaagaaaaaggaagaatttcagcaaattgtagatgtacagtgtcaggaataattttccacgcatactatgacattactgttattactagggtaccagggactgctgttgccactggtggagggttctggtttccaaagaatcaggacaagggggttaagttggggcaaggtgacagataactacacccatgatcccattcaggtattcaactggtttcatggttggatcctgatcaaaatatggcagaagtatttagatagaagaaacataaaggaaagaaccccactagccttcttcagacttgcaaagtgaaaatgttcctcctataaggggctgctggggaagcccagcaccctggctaatgctccagggttgcagaaccccgcttcttgttctgggatgccatggccattctggagagtgcatgtctgcgttgcctttgttttctctagtctgaggagtggctgagcttcagggcactgacttcctcccaggaacttcctgaaaggggaaatttcgactttgctgtatgaacactctgaatgcctgtgggttgaacaatggtagctgctgttgtttttttttcaagagggagctcaattttgttttgaccttgggaagtgtggatagttgtgttcatggcgcctccatgtgggcggtcaaggaagaaagtcttggggtaggagcccttggagaatgaggacttgattttgccatttttgcttttggccttaatctgtgttgttgtggagacagtagtactgagatggggttagggtggggaatggagtgtggagaagggccagggaaggagctaactagagggttagtgccaatagctgaaggaagcgctctgccttaggaggctttataaatagttgcctttatccagtgtgtctcattttgcctctctcaggcctaatttctaaataatcccatttttcaagataaaggagataaaaaggggtactctgagattctcccagcaggtgtgaaatcctgcctaataattgtagctgcagatttct

SEQ ID NO: 133498 - DNA, 2284 bp, Homo sapiens
cctcaggaacctaaacacagaacagagcaccctcctcaaatctatcaagtcagttaattgttaaattcataattccacagtttgtaatcactcttatggatggttaggcagttaactagccatatggaagtgatagggaattccaatcaaggtaaaattgagcagcagagtgaaaatgcaaaagctttctagtttttattctatatgggaagatgagttctggagctgcgaagaacacctggttaatgagttcttgagacatgtctaatagcttttccctaaggctagggacatgagaaataatcatgaaatttgagagaaaggagatttaagataaggttgtcaaaagggataagtattttaaagacacctcagcctactggacttttggttgcatgcaaaatagagtatacagcctgggagtgcacagccagctatgaacttcctgattcacagtgaatgttattttttgcctctgcatgcacctcccttgctctgacttgccctgctgtgccgtggccttccacaccttctgcatgactggactttgccttcagcgtcttcacatggcctgtagggcacagcctcttgcaaaggaagtgctcagaaggtatatttagaaatgaatttcctaaacagttgaaagtatccttcataaacaaaaggactgattatattttttcctctctttttttgatgattaaaagcattttaaatactattttttttgtcttgattgattaaaggaaatactatgtatggcagaatattggcagtgagtagaaattcaaagcaggcttaatattgactttatggagagatagggaaaggccaattaaataatgaaagtaaaggcttacataatattgtatactaatgtaattaaataaatgtggaaaaatccgtgtatttaaatggggggtctgaatctaacacctcaccactcactttctaatagaagctatttttgtaagtgtgtgggagtctggcaatatcctttcagatagaaatcattgtaggtttaaatcactgatatagcatggattaagcagatgaaagcaatgaaggaagagcctgtttagattccagagaataaaattcatagaactgtgagaggtggagcttgaaatactgccacagttttgaagttgttttagtgacatcatgtttctatgcatgattcttacatatgtatcaaagtgtgggagtattcatcttccagaattctagaattcatgattttgtaatctagcctatcaagtgattcacatacaaagcctttcttttttcctgaactgttgaatttggataaattgtgaattgtgttttttttttaaactagtaaagtggtatcttttggaattgcttcttaattgtctatggtaaggcataaggcacgttgcatgttgcttttcaaaatatcttgatatgataaagtgcagttcagaactgtaataaaaggggctattttttaatatcccagagagtttaattataaaataattttgtagtaacatgatctttgaccaaatttccgtctagcattgtagatcttcattttgtatattttctttagttttatgacaagaataataatactcattctcctcctcatattttcttaggacctgagtaagtactacagcttgatgctcagtcctcacttactgtggctaattcgagagacacttgatactgaaatgcaagatctggtgttactcagcactggtttatgagcaccaggggctatgctttttgctatatacacatcacagtctgccttcatagtacccctgcagaggaggtggtattgtgcctgttgtacagggtaagaaacaaaggttcagaaaacttcagtaactctttcaaggcttgaggtcacaccacaaagaacgtagtttatccaggatttgaactcagcattctgttaccccacagccgttgctctttctgttgtgcagcattgattctcttgtaactttgtctattttcataaattaatttgtctctaggaacaggcagctttctctcttctagatgttatgacctattttctgtctcataacatggccaagtacataatttgagactgtgttttttattgtttgtcttacgttgtttttcagcaaataaacattaaccaaaatcaggtagccaagatgccaaatcatgtagcaaacctacacatagggggaacaaagaaaaactgaacatgctaagtaagccatcttttcacctagcgtcttaattgtgaggcatatatgttgcatgttgcttgtgaaag

SEQ ID NO: 133499 - DNA, 1452 bp, Homo sapiens
ctgaagcgggtggatcacctgaggtcaggagtttgagaccagcctgaccaacacagtgaaaccccatctctactaaaaatccaaaaaattagccgggtgtggtggtgcatgcctgtaatcccagctactcaggaggctgaggcaggagaatcgcttgaacccgggaggcagagagattgcagtaagccgagatcatgccactgcactccagcctgagccacagagcgagactctgtctcaaaaaaaataaaaatagaaaaattaaaaattatactaatctaaaaacacataatcagttactgtgttttaagctgtgaagcttaacaccttgtacttttatagggtatgtaatatttgaatgacatacaactatcctctacttggggagtaggaatttctgcaacagtgactgctcacaattaatgtcttcagtctcctccattatatgatgtgatgtggatctctgtaaaaggaaaaccaaaacaaaacaaaactctacaaactcttttgtttgttggttggtttttctgagatggagtctctctctgtcacccagattggagtgcagtggcgagatctcagctcactgcaagctccgcctcctgggttcatgccattcttctgcctcagcctcccagcctatagctgggactacaggcacctaccaccatgcctggctaattttttgtatttttagtagagacggagtttcaccatgttagccaggatggtctcgatctcctcaccttgtgatctgcctgccttggcctcccaaagtgctgggattacaggtgtgagtcaccgcgcctggcccacaaactcttttgaaaaccatgtagggggaactagtgtatgtccatgccataaaattgccatttccttgccatagtatcaggatcctcaaatggtagtccattttgattttgtaattctctgctttctcctctcacctcttaaatacctgaatagatgttggaggattgctccattcttcactcgggagcctggtccctttgtcagttataataagtgaatcagggagtttctctctctggctctgctctgtgcattgtaaagcagagtttctcaaaatgtggaatgaacccctgcgttagagcacctgcactgaatccctgggtatacttctcttaaaactgcaggtttttggttatataatgttataccaagggaattttttaaaagagaatgttttaaaaaggtatttcaagacaataaggagctacttgtttgtaagagttctacagaaaccaaaaattatgcgaattcatacttttgggaatcttatcttttccaaggactttgttaactatttcatcaactctaaggcagttaagaataaacacagttaaacaggtacttcaggctggatgtggtggctcacgcctgtaatcccagcactttgggaggccgaattgcttgagtccaggagtt

SEQ ID NO: 133500 - DNA, 1033 bp, Homo sapiens
gctggagtgcagtggcccaatcttggtttactgaaacctctgcctcccaggtttaagcaattctcctgcctcagcctccggagtagctgggattacaggcacgtgtcaccatgcctggctcctttttttttgtatttttggtagagacagtgtttcacaattgttggccaggctggtcttgaacttctgacctcgtgatctgcccgcctcagcctcccaaagtgttgggattacaggcgtgagccaccgcgcctggcctatctgcacttttatattcttttttctccttagattagtacacataaatcaacaatgtgtttatattccatttgtttgctttgctttacttatactgaagacaaatgctgaaatatctgatatagtctatatatattatatatcaactgttaatattttctgacagctaattaaaaaattgaataccaaagcatatttctccattagagagaaggcataccataaatgttgtggtttagacctttagagcctatttagagctgaattaagttgacttgcactgaatttaattagtttctaatccaaaacaaaggcgctgtgttttatatataaggttaccattaagatagatattttagctaacaatattggaatgtgttttgtagaggatagggaatgttctgatattacaatagaaaaataataaaaattaattcctcctaatatctgcatctttccttttttatttttgagatagagtcttgcccctgttgcacaggctggagaatagtggcttgatctcggctcgctgcaacctccacctcccgggttcgagcaattcttcttcctcagcctcccaagtagctgggattacaggcgtgtaccaccacacttggctaatttttgtatttttagtagagaaggggttttgccatgttggctaggctggtctcaaactcttgacctcaggtgatccacccgccttcagcctcccaaagtgctaggattacaggcatgagccaccatgcctggacgtcgttcctcttttgtttca

SEQ ID NO: 133501 - DNA, 1072 bp, Homo sapiens
tgtgattggttggtgcatttgttctgtttggttattaaatattttgaatctcactggggattacatacttttaaacatttttttctgtgagggtttttggatgtgccatttaagagaaaaggttattttagtaagttctaccaaattaaaagatgaatagtaagaacttgctagtatcctgtttatggctgaatctgagcaggcgtttacagttattttctaaaataatcttgagttaacgttaatggaactatgtattatcagtcccacactggaaagctaattattggtatgtaatcttagcagaattactatgcttgttggtgtaatccatgtcagcaaggtgacacattataattttatattcattttccacttacttttctcatcttctgcatgtatcatcagacaagctttctttattacagatgtggttattttaggggcaaccacttttacttgaattgacataaaaaccatccctcatctctgggccacatggtctttcctgagacgtaaatgtgatgtagcatctgccacataatctttcttaatgatatgtgtgtagacacctgaaagttccttttgtttctgtgtctgaactgttaggtcatcagcttacttaccagaggactgatgtgtttcttcaggttctgctggcataacatttggggcctatttttcaccgctctacatttgatttccctatagttttaaattcaggaaaaaaaattgaatttttgatgctaattaccctctttttaattctatcatttgtaatttaagatgatagattagattttggacatttatagtttatgttctctaatattttaacctttattagatggctttctaaaataagtgtctcgtacaagtaaatttctcttttaatgtgtggttttagtactttctaagcatattaacttcatattttcttaagttatgatctaaaactgatgagaaattaacctgttttggctcaaggaagcctagatactccctaaatgttaccctaacttagagctttaataacattttttcctactagggaactaatactgttatagga

SEQ ID NO: 133502 - DNA, 1094 bp, Homo sapiens
agacactaattccccacccttcctacatttttcacattgctctctggttacttttcttaacccatgttaattacagttgggtgggtacagtggctcatgcctataatcccagcactttgggaggccaaggcgggcagattgcttgagcccaggagttcaagaccagcctgggcaacatgaagaacaccatctctacaaataatacaaaaattagctgggtgtggtggtgcccacctgtggtcccagctacatggggtgtgggaggatcgcttgagcccgtgaggtgagggctgcagtgagtcatgattgccccactgcactccagcctgggtgatagagcaagagcctgtctcagaaaaagagaaaaattgtagttttgtcatctctccaaaccattaattacattgcattcattgtgaaataaaggccagatatgtttatctgtcagtcaagtttatctgatcccaccccctcttctagccttattccttactgcttgccttgaggtatttgacagtttagccaaatgaggacactaacccttttccttcccctcctcagatatttgttgctttcctctcttctctcccacccctaggatgctttttcctccatcgctctctgtgcaaatcctaccgtgtttcaaaacccatgttaaatggtgcctctttctcattgccttttctgatccctctagtggtcaaagtttctgttgactcctatgacgttttatgtttgtttatgtctgagtttttttgatatgtgcaggaggtattggtatgcaagtggagaagtgagatagctaagggaaggcagccaataaaggtgcattattaaaccactaatggcaatgggcagttggaggtcaagcttggggagaagctctgggagatgatgtcacgcaggacttctcaaactttcatgttcatgagaatctcctggggaccttgttaaaatgcaggttcagactcaggtctggggtgagacctgagagtctgaatttctcatgagcacctggtgataatgatgctgttggcatgggtccagagaccccacttcggagaatggtgatgctgtaaatttgtcccacctga

SEQ ID NO: 133503 - DNA, 1012 bp, Homo sapiens
gaatatcttcttttctagcctcgatgattatagctcgttgaaatgcctgaagtcatttttgatttcttctctcttgctcatgagaattattccaaaaaaaattttggccttcacaccagtgtttaaaaattgttctgtacctaggtttacagtggggatacaccatcttaaatctagttaaggttaacaagatttatattcttttctggagagttcagtcttggaagccaacctgagtttttaaaatgtgctgactgcatgtggataaattacagccctgttcccagatgtgtgggatctcacaagatagggattggatggagaagtatccctgatttgtcaaagtgctagtctaagagagctgcctttgttgtaagtatactgcttgtgtaatttcaatgatcaagattccctttgagaaaaaatgtggttgtactgacatttactttgagcaaatgaagcataattcatatctgttgaaattgaaattaataatgcatggccatggctatgtgagtacttttttcagccttctttgtatgttcttgcatataaatttttagaacccgtggtaaatcagatggtgcagaggctgttcgattttttttttttcttccttgttttctagtgggtggcttgcttgagcaagggaatgcagtgaataagtttatcagcgttagaatctgtggttatgaaattatatcacttattaaaaactaaatattttagtcaaggtttttaagtgtcctttgcaaaaaaaaaaaaagcttttagattgctctttacttgtactttcccagctgaaaatgaaagataagggacaaatattagtatcaattcttttatttgcatgccttttctctaatggttgttccttgccttttagtccttgtgtaatgaatacgttagaggcaaatgtcacctatcttgaaaccataaagacttagtttctgtactactactttttaggtacaagtgcagtctgacttctgaatgtagaaccagtcatcag

SEQ ID NO: 133504 - DNA, 1030 bp, Homo sapiens
ttcccctctaaattcagtgatgagaacattatcccccaattaattccatcttcagtcatctgtttattagaaatctttcattgagctgaaatctgtcctgtaactagcttcagattctattcctggggaacacggagagactggaacccactggaacacatttgtttctcccagtaattgaagttggcctcatgacacccttggggatggctttcttccttttatgaaccatcgtgagttcttgccatcatttctcataaagcaggaatgaaatcttgttccttaatatcctgattgttctcatcttttaaaaattacctgtaatgaaacccagcacttgatgtgtgccttgatgaagtcagagtagataattctgtctttcctccctgacattcgtgtgactctagaaatctttgtctttttgtctaaataaattatcccaacaattacagcaattttagtgcaaagggcactcaataactttctctaccagtaccagttcatgtttgtttcatttttcttgatacagcattgcactgctagtcctgtttttgatctgtggtcatctgtgatgtgtacatagtcttctgcatttttccttttccctttatcatgtatttgcttggattttttttcaattctgagagtttttactgctattgaatttcatcctaattctgggaacatccttccaagatcagattcatttaaactttattcccaatttctagcatttgtaattctaccctgttcattctctaaaggaaagtagaggaacctgttacaataagatttgtagttagatcagggaaaaacaactatttttgttaatactgtcagtaaagatagggaagtttttagatttcaagacagattgccatagtctgtcattctgtatctccagttgattccaagtctttattactttgttgtttacttacttaatgggcatgaagccaataataggctacccacatttgacttcaccacttgtgttggtataaaagggaatagagaaatcaagagagag

SEQ ID NO: 133505 - DNA, 1105 bp, Homo sapiens
gaggtggaggttgcagtgagctgagattgtgccattgcactccagcctgggtgacaaggtgagactccgtctcaaaaaaaaaaaaaaaaagaaaatgcctttctgtggcatgcacatattaataacaacttgcatgggtatagaattcttggattagacctcttttttacctaccttgcttgccacgtagtagatttttctccattgtttcccagcagatagatttgataagtctgtggccagcctgaatattttttctttgtgatttgcttttttaaaaatttggttatttgtttctataacatgaaagcttaacaacgtatccaggttatgcttcagtgttttataatttttgttatttatcttgaagcactgaacccactccatctctataatattctttcatttcaaggatcttgcctattttatcattgaattttttttaatattccacaggaattgtttttcttctttaggtacaccaatcattcataattgaatttttgttgtttctctgccaaagctgttagcttccctctaattgctgtatctctccattatttgtgtggtttgcccaaatctcttgtctgcaatgctgatttggcactgttttgaatatcaatgtcaagtgccagtaagtaggtgttaaatgaatgaagtacctgctatctctttgatgcttcagattcatttttaagttctgcagtattattgttttttctccttatttcctttcttagttctgacaatttttgtttcaccttattttttagaatgtcctatttcaacaatgcacattttgttacattttcttgatatagtgcaaagcaattatagtccatttttttcttctgttttctagagtaaacctttcaaagcattctcttcatttttcttttgcatgtcctttgccttgtcttcatttgtgcttaggaatgttccaaattttgtctggcccttgtatttgtccaaaaatagggtgggtggaatctcattgacttccttccctatttgtcttgggtctgtttgtatctttcccttagcacttgagctggaggactggaagatgatggtatatattctatttttagctgttcagttgtct

SEQ ID NO: 133506 - DNA, 1002 bp, Homo sapiens
gttttaaatggtgatgaagtccagtttatctataagaattgcttctgctttttggtctcatatggaagaaaccattggaaaaatccaaggtcacaaaaatttacgtctcttttctactaagagttttgtagttttaggtcttacactttgagttgatttttgtatgtggtgtgatgtggggtttcaacataatcctttgcgtgtgaatatccagttgtcccagcaccatttgttgaaaaaaacgtattcttttctcattgagttgtcttgacattcttgttaatttttcttatctttattacttttttcttggaatttttctaagtttattttttactttttcttgaatcagaattcttagattattttaaaaaatattttctcaatttgaattagtagtgtttaaggctttgcattttattacatgtccctatgtagcattcttatccttttacagatattctaaaattacaatttttatttttgtttttgaaccaagattgtttaatatagtttaaatttttcaagtggttgtagttttttttcaaccttagttatttattctgaggtcattttgatagaatgtggtctgtactgtttctactttttggaatttattgtagtctaatatatatagtcaatttttgttttatgggtacataaaatgcatatgtgtgtttgtcttaaaaccataaatatatgtgtattatttaattttatgactgatatttgctgctaatctgcttccttatattgtgtgtgaatctgccaagtactgagaattttgcagaagtcttccatgactctggtgtttgtggcaatttctcctattccagaaattttgctctatgtaagtacagttatgtgttgcttaacaatggggataccttctgagaaatttgtggccagatgatgttgttattgtgtgagccttgtagagtgtacttacacaaatctagattgtatagcctacaacacacatataggctatgtggtaaagcc

SEQ ID NO: 133507 - DNA, 1109 bp, Homo sapiens
attttttgtgttttcagtagagacggggtttcaccatgttggtcaggctcctctcaaactcctgacctcaggtgatccacccatcttggcctcccaaagtgttgggattataggcttgagccaccgcacctggcctaaaggttcctaaagtctctaattatgaccgacattcaaaatgaagctgcatatgttttggttaatttgaataatttttaataatttgagagaaaaactcagtagtgcagaaacaaaaggtacttgaaatgaacctttatatttttatttatcaattacattctaatggtccaagaattaatgaattggcaagcactatctcctattggagtcaagtttggctctgacatggagtctggaggtggaaggttcttgctgtctttcagagctaacgaatgggtgtcctctgaacattctaccttctcctgttttgccatgggttaccatctaagatgttatccagatcacgttagaaacgattacaaattttgggcacataccacttcttgtagtaatgagtcccatgcattttctcatcttatatgggagaaaatacctgtatattgctttatcattttcagagaaacagtttgtgtttccttatccaatacatcttggtaaagagtggcattttaatggaggaaattacaggacttcatcaatatttctttagggaaatcctgattcaaagtatattttcatgaaaatcactagctctgtcctttgagaaacgtattttttgtagggctttctactctaggccatgcttgttatgagaacagattcttctgcagcgggtgggaggatgtttctaaacccctggagtctacctatgaattgctactcaaattacagtgtatccatctcagaattaatgtgttgtgcatgcctagtccttacttgtgggttgacacaatgatttctattaaaaatattctttatgttttatactataatgtatccttaagcagtatgctgtggcctgaatttaccttgtcttttattctctttttggaatgaaataagagcacttgagatactgtcatttggtggtttggttgtttgtaaaatagtaaaaaaaaaagtttggtaag

SEQ ID NO: 133508 - DNA, 1497 bp, Homo sapiens
cagaaacctcctgtcatatcagcatgggtctcttgcttcctgcaggaagggcgatatcctgggaggcacagaggtggagcccgagagacgcagtgttccagcgctgctcggctcaggactgggtcttttcttccgtatcctcaagcagcttcctttgacttactacttctttttgtttgttttttcttcattgggctttaagcgttgcttctctttagtgtatgtgtgactgaagccaaacacaacattgctttccctttgcctgcaaataatcttgttgcccaagcccatctctgccattttcagtgacagctggctggccaatgagcctgagcactgggaatgcccagcagggcacatctagggggctgctttatatttggagctagcaggtctcttttctagggctttccaggaaagatttagaattaaacattggatggattttgtgtgttcatttctttttccatcactgtgcctttattttcttggggctttcattaaaagcagaaaaacagataatggtagaaacatctatagcatgcatacaaagaagtaaaagatttttataattttttgccttaaaatatatctaatgctgtggcctctgagccattctcagttggtatgaccatgatcagagaaaccttaagaaatcagctttgccaggtgtggtggttcacgcgtgtaatcccagcactttgggaagccaaggcaggcagattgcttgagcccaagagttcgagaccagcctgggcaacatggtgagacctggtctctaccaaaaatacaaaaattagctgggcgtgggtgcccatgcctgtggtcccagttacttaggagcctgggtggtcagggctgcagtgagttgtgatcgtgccactgcactccagcttaggtaacagagtgagaccttgtctcaaaaaaaaaaaaaaaaaaaaaagcagcttcctgtgttcctcgtttgcattctggacaaagactctgtggccaaagaaagagcagctggactctcatgctagttctggagaaatgtaagaaaagcttaattccactggaggtgccaggcaggcagttggcattcctaggcccactttactcctggcccagggccttctcctcatcaacttatcagcgttgggcttccttaccttgacctcacatttgcagttgaatgagtgccagggaaaagaacagacatagggtaaagtagagtaatagggagtcccgtggggcttggaagggcagagggtgttgttgccaataggggtagcgccattgtgtctttgctgggctctggagagaaggagagaagagcaaaggagaggtgcctgatgccttggattgatgttctcaatcaggaagagccagaccaatgctgcctcttctggccgcctccaccatcctaccacgtgttttcatcctcattgtcacatccactgtgcccttcctcacccagatggtgggttgggagatgagcaagtaagtgtagacgcc

SEQ ID NO: 133509 - DNA, 1749 bp, Homo sapiens
tgttaccggaagcgaacagtgatgtttagacacatagttacatatatttctaggagatagcctcattttttttccctttggaaaactaaaatcatgaattaattgtgctttccaagaattttttttttaatcagcatcacttgctaaaaaatagaaatagaatttttttgtttcttttttatgttgaaaaatttttttcatttttattgtttctttcctacattttcttttactgtaggggcaacagggtgattggtgagatcttctaccaccatgtatttactggtaactgcaggcatctagttgcttctaaagaggaatgcttctgtgatttacccagtcccttttcagtctaccagtgatttctgtagcccccctacccatccctttcatgtgaataccacccacccatttaattcctcatcacatctttcttaaacagatgctaaagaggttcctcagattctctgacttgcacatttgcatacgatttagagaacttccaagttggtgcttctgtgagacatcatgtggctgtgagctggtgagaggggaagttgggtgctttaatacattcaaaggaaggaatttgtgagtgtgtgtttaggcaatgattaactttcttttgcaatacttactctggtccgtaaagcaaaaataaattgttactgaacacaatgtaaaatcctccttccttttccagagggcagggacttgagattggttcatgattaccagcagagagttagtgagccagtgctggataatctatcacggaccagtgggtttcagaatcggatgcagtgcgtatgctggaaggggagaaggtgctgtaggcatgtgtaggcatcttcctcacttaatgatttgaaaaccctcttctcagtgacttgcaagccttaacatctttttctgattgtatttccatacagatagttaagggtgatggcaatagcagtggcctttacttttgttatacccaatcagcctgagtacatttttgtggtgggtttgttttggtattttcttgccatgtgaattgatatttaggacctgcgctttgcagagctccttcattatagtatgcgttctttctgcagatggcaaatgcaattttcctcttgtcctagagagatgacccatttcctgtgacttgttctaataatacaagatgactttaatttttgttcagtttgcctttaaaagattgccaggtttaactctcttgtctctgtaactcttgtgatatatttttgagcattggtaagacatgtaataatttaaaaacaatggcagactaattttgtgaaagttttttattttttatttttggctaaataagcaccttttatggctgtgcattttggattcgttacatatatcttttctaaaatctgtgactgaaagtggggtgaagtattcctgccctgcttactgaatctttttttcccacataactaacctcagggtattttgatcatttgctttttctataaaaacctgtagaatgaggagattgcagcagatgatctctaaggaccatttgaactttgaatttttttctccttcccctttgcagctttggcgtctcggccactttctgcccaaactcacccctggatgaagggtctaagcttgctgctgtctccagcagtgatgggctctactaggaggcattgccaggtctggtgggctccttcgggttggcctggctcttctctttgacctctgtaataactctgagtgccc

SEQ ID NO: 133510 - DNA, 1714 bp, Homo sapiens
acagaatttcaggaattgcagttagaacatttttaatatgaaggatatgcatttgtactgaaagctatacagttttagaccaagaaggggcttggaaggctggaagtgctgtagccaatttaagctgtatgggaagttaatttctacacatctggaaaagagcacgcttcccactgctcctcagtagggttcactggagtgggtatgttgattgcctgaattaacctagaggtcagtgccatctaggatggtgactcagaaccattgagtgaaagccttggtctaagtaacctcaataacagcagctccctaaaaatagcaaaatatggtgtttatgagactgctttaaggaccaacaggttttattttttgctactcttttagcttccaagtgttgaatatgtttctgaatgtcaggatttatttggatacagttcccttttttgttgttgttgaaacaaagtacttatagtttatatcagaagaacaaagtgggaacatccctcataaaaatcaaaactgtggctctgactgtataacaaagccttcggaataagttttttgcattgaactacgtagattcatcgtctggatctccatataatgtcccatccttacccctatatgctatttcttcatatggcaaatctgacacaaattaaaaccctgctgaacagtgaaaatattgcaggtttatctattcacatattctaaagtaagtttagaaaggagaaccagaagactaatttagtagccattttaatataaataaatttgatagaatctttttcattaaaaaagaaaaccatctcagctctactttaggagaaatggcttatgttcagttttcagaagtgcctattaaaaacagttacgatttttattacccatgaattttttaggacctgaaacagcctttgcagttgtgaggctgcgtgctatgctaaacttagcagaaaaaaggaacagatttttctttatgatccaggcacacttacacttgaaaagaaattaacaagattctctaaggaaggttttgattccagcattcatattaatttttctttaaggggagttattctactaatattctgttaatattagtagaaatgttgattggatgttgtagagggaaaatagggagctcaaagggtacatcttggaagagacagaagccattttataaggaggttaggattgctttctccctcagaaggtggagggaatctgtttcctctgtattgggttgaggaaaatacaagtttgtgaagcaacaaattttaaagtcaaatttcctggttggaacgggaggcagtcacatttttcaaaggaaaacttttgtaatgccttttaagttatgttaagatctctgcagacttaatcctagtgaagtgtgaaatagcaatagaaggtaaaatgtgcgattgttggtaattaaatctgtggcaataactgactacagtaaaccgtgaacgtttactcttgttctgccgaatggagtaacattaaagaaagagctgctctcagacccaaacactattttgtgtgaatagctgttactgataaaattataggaagttgttcaacaatcacctttgatttgttacattaccgatatgtaaaaaataaaattataggaagttgttcaacaatcacctttgatttgttacattaccgatatgtaaaaatctgtctgatttctcatctaacatgt

SEQ ID NO: 133511 - DNA, 1045 bp, Homo sapiens
tttgaatccaggacggttgatttcaacaaggaagatattagggagggatttcatttgaggaattcctgattcgctgctttgatgagtacactgaatgttctggttccttctatcatttaaacaaacctatctagaggagattataagatgtatccattcacagtttaaagatctactaatatttttaactagtttatggaggaataagtattttgaaatgaaaatcaatgtaaaattgttttcaaagtaaattttagttcaaggcttgataccattttaatggaagaggatttgtttgacagggataaaagtgggtacccttgcatttgctcatgtaattatttacttttgtgtattaataatatggagacatttaaaaagacaattagtgggtacctgactagatgaaagtatggcagtaaaatttgggctatgttgatttatattcggcaactatgccagtcttccaaatttattccgtatgcttatatattatatatttttattttaactttagaaacgtgaaccctgaaatctaccactataagaatattacattaaattttgaattattttcttgttgtcttttaacttattcattctttgaattcatttatgttagtgtttgacactcaaaacttactctttgtattctatgtagatatacaagagcatacttcattttaacttggttaatgtttttatatattttgtaggtataaagcacatattttctttaattgattaattttcatgaatattcactaaatatttctgttggtggtacatagataacctcatttaatataatttgtaagtctgtgtaatacaagtggccttgagtgcctgcttcatgttacatatagttatcctgaaatttttttcagttcctagaagaaacatttttttcctgttaacctgttcttattttacacgtttttgaagtcttttactctttagatcttaattatcaaataggaagacttagtaaacccctttaattgattgaattatcgctattgaaacaggcaaagtttaggccagt

SEQ ID NO: 133512 - DNA, 1878 bp, Homo sapiens
ggagcgggcgcgccgggcgcggggagccgtcggcggccgctcgctgcggggacaccccggtgaatgagctctcgccgccaggcgcacggcgtaggggagcctcgcaggcggcggcggcggcggcggctcggggggcgaggcgggccgcctgttcccggggaaggaggcgcgggcgtctgagcgaggccgggcgcggcggccttctctcacgcgccccccgagccagcgcccgcctcccgcgcccgcctctcttctcccgtcggcccagactatccgctcccaccgcgcccccggcccacctggtggccccggccctggccgccgcccccgcggcggttcccggagctcgtcccggacgcgcgcccgggcggcgggggctcggcggccaccgctgcctcgggggagcgagggcgggagggtgtgtgtgcgcgctgtgagcagggggtgccggcggggctgcagcggaggcactttggaagaatgactctggagtccatcatggcgtgctgcctgagcgaggaggccaaggaagcccggcggatcaacgacgagatcgagcggcagctccgcagggacaagcgggacgcccgccgggagctcaagctgctgctgctcggtgagtaccgtccggggccccgccgggcctctgcgcccccagcccaccatccttggccctgcggggcagctgccttcggcgcccccgccccccggcgcccgcggttcgcccctaccctcccgggcgcgcccccggccactgccttcacccgcgcgggcgcgcgggcgcgttacacacagacacacacacacacacacacacacacacacacagcgacacacacacgcagcacaggggtcggggctgccctgcccggtgccttggcttgttccttttcgtgtccctgagggctgtaccttatctgctgtgcatctgctaaatggcagatcactccgaccagaggcgcgggggtggaaaggtgggcagaggggttgaacttccagtgtcgtggccgcggcaccccatggggtggtggcgtggggagccgtgtgtgtggcccagcgggtggcgagcggagccggggcacgttgggggatggcctgcggtggagtggccggtgtgcatccattatcagtgccctatggggtcaggagggaatgggggaacggtgggcagactcgcagctggattcccggagcactcatggtgaggaagccaagtggttggccctccaaggaaagggtctgtgtactgggggcgaggcgggagggcaagcccaaatgtgtcacacaagtgctgttctctagccaccagaccatcgaaaggagggagcctagaagagttggccagtggatggtgacaggcgttattctcgtctgcaccattccttctagataaagatgagggtaggggagcgttgtgctgtgtggttgttgacagcgaccggtatcttttgtttaatgaggcaacctagatgtaggcctcagttcacaatagttactaccgaaaaccagtgcagtctctcagttactctcttggcaacaaatagaaaccttttgtttaaaacagatagcattttaatgtctttggaatctgggcgagaaggaaaaacgggaagcatacaggaaaaatttccctctagtcttgaaaaaaaaattctgcttcaacactaagttagcaagaaaatgccatttctcaaatagaaatttattgatgattatctctgggaggatgttcagaatcaagcgatcagggttcatatacaagccacagtgacagaaccctgagctactgtggcaggaagagcaaacagctttgcagtaacgggcctgaaaaatgtctgcacttgtgttctgggtatttgcatgtataataaatgtgtt

SEQ ID NO: 133513 - DNA, 1078 bp, Homo sapiens
ccagggagtcccattcctatgttcaatgtcagtgacacccgctgaggtgcaacttttgcgctttctgtacaaccctggcaaactgaatgatagcgcctgggttaatacctctgtgagccctgcgtttgtgcacaaagcactaacaagtttccctagtaaaaagatcgtccctcaccattattcagctggttagcttttctgcctttacattctcccatgtggacaggcattggggaaggggagggagcacagtgctgaaacacctctcctggacccgtgcccatctccactggggacaggtctcatactagctccctgagcataaaaatcctgtctgattgcttcatctgctatgcgtctgtggggatccgcaaagatatgggatccagttagtctctggtgagtcgttaccttggccggatggggacatgttgcctgctgcacccccctcttcgcgctctctcatttcatttcctgcagtgtgccagcaggatggcccacaagccatctactactcggacaagtacttcgacgagcactacaagtaccggcatgttatgttacccagagaactttccaaacaagcacctgaaactcatctgatgtctgaagaggagtggaggagacttatgtccaatggcgtctaggccgggttcattacatgattcatgagccagaaccacatattcttctcttcagaggacctcttccaaaagatcaacaaaaatgaagtttatctggggatcgtcaaatctttttcaaatttaatgtatatgtgtatataaggtagtattcagtgaatacttgagaaacgtacaaatccttcatccatacctgtgcatgagctgtattcttcacagcaacagagctcagttaaatgcaactgcaagtaggttagtgtaagatgtttaagataaaagctcttccagtcagtttttctcttaagtgcctgtttgactttacctgttacttttgttcaataaagtttgtatgttgcagtaaagaaaaaaaaaagatatgggatacagaaatgactgtctatgtcaccaaagggcattccctgagctctttcaagcca

SEQ ID NO: 133514 - DNA, 1182 bp, Homo sapiens
aaactgaatacccatcattgaatttgatttttccaaattgaaatttaaagtactcagtcacccattagaagaaaagccaggactagagacctcaagggatgagactcccaggctgtggtttttttcatgtacctgaggctcaaggacttctcaccaaaggagagtttgtggcttgaaagagctcagggaatgccctttggtgacatagacagtcatttctgtatcccatatcttttttttttctttactgcaacatacaaactttattgaacaaaagtaacaggtaaagtcaaacaggcacttaagagaaaaactgactggaagagcttttatcttaaacatcttacactaacctacttgcagttgcatttaactgagctctgttgctgtgaagaatacagctcatgcacaggtatggatgaaggatttgtacgtttctcaagtattcactgaatactaccttatatacacatatacattaaatttgaaaaagatttgacgatccccagataaacttcatttttgttgatcttttggaagaggtcctctgaagagaagaatatgtggttctggctcatgaatcatgtaatgaacccggcctagacgccattggacataagtctcctccactcctcttcagacatcagatgagtttcaggtgcttgtttggaaagttctctgggtaacataacatgccggtacttgtagtgctcgtcgaagtacttgtccgagtagtagatggcttgtgggccatcctgctggcacactgcaggaaatgaaatgagagagcgcgaagaggggggtgcagcaggcaacatgtccccatccggccaaggtaacgactcaccagagactaactggatcccatatctttgcggatccccacagacgcatagcagatgaagcaatcagacaggatttttatgctcagggagctagtatgagacctgtccccagtggagatgggcacgggtccaggagaggtgtttcagcactgtgctccctccccttccccaatgcctgtccacatgggagaatgtaaaggcagaaaagctaaccagctgaataatggtgagggacgatctttttactagggaaacttgttagtgctttgtgcacaaacgcagggctcacagaggtattaacccaggcgctatcattcagtttgccagggttgtacag

SEQ ID NO: 133515 - DNA, 1070 bp, Homo sapiens
taccaccgttagggctaggcatggtagctcacacctgtaatcccagagatgtgaaaggccgagatgggagggttgcttgaggtcaggatttggagaccaacctgggcaatatagtgtcatctcatctcttaaaaaaaaaaaaaaagccaggtgtggtggtgtgtacctgtagtcctagctagtaggaaggctgaggcaggaagattacttgagcccaggagttcaaggctgccactacacaccagccggagtgacagaatgtgaccctgtctctaaataaataaataaaataaaaattaaaaatacaccgctgtaaatagatgatagatcaagtaggcagaagattaacaaggttataaaagacttgaacaacacaataaattaactagacctagcaaacatttatagaacgctcaacccaacaatagcaaaatattcttctcaagtgcatataaaactttctccaggatagatcatatgctaggtctttaaaaaagatattgaaaccctcatacattgctggtggaaatgtaaaatggtgcagccattttgcaggacagtttgagggttcctcaaaatgttaaacatagacttaccctgacccatcatttcaacagctggatgtatactcaagaaaaataaaaacctgtgtccacacaaaaacatatacaaagatgttcatggaagtgtatttataataccaaaaagtggaaataacccaagtgtcaatctactgatgaataaacaaaatctatcaatgaaatattattcagccataaaaagaaaataaagtgttgatataagtgacagcatggatgactcatgaaagcattatgcaaagtaaaagaagtcactcactgaagaacatgctatatgattccatgtatatgaaatgcccagaataagcaaatttctagagacaaaaagtagatgagtggttgtctagggctgagaaggttcctgagaatggggaatgagtgtaatgtttttctttaggaggaggataaaaatcttctaaaattggattatggtagtggttgcacagctttgtggatatagtaaaaaccatt

SEQ ID NO: 133516 - DNA, 1007 bp, Homo sapiens
ggactttagttaaccaaaataatatcaggaaccaggccaggtgcggtggctcacactggtaatcctaacactttgggaggccaggagtttgtgactggcctgggcaacatagtgagactcctgtctctacaaaaagtaaaaaatattagctgggcttggtggatctcttgagcccgggaggttgaggctgcagtgagccatgattttgccactgtactccagcctgggtgacagagcaagaccctgtccatgaccctccccctacaaaaaataaaaaaaccaggaaccaaaataaattaaagatgggagggacctcagagtcaaggctagcctactagatcttgcctaatattttgcactgaatgtaagaaaaatgtattacagaccattctcgtcagatattcttcactgaaccttctttatctcttgcatctagtgggtctaggttgtagattttaacctcctacatattgcttgtccatccttaattacattttgcctggactattgcagacgctcctagctagttttgctgccgttgagcttggtttttctcagttcatctgcctactttggttcaagtgatctttcaaaaaggaaaagacatgcttaaagtggcatgcccacgcaggaccagtgtgtattggttgcttgtgttctgcacagaggcactgaaatctcagctgtgttctgttaagcctcctggggttagttggtcttgaggaaggggagctttttctcatttcctttatctctttgatactccaacagtgaggcacatttttctaacctgctaggggtatccttaatgtgtcagtggtagccctgatcctcatcacctgtgaggtaaaagtgaactctcctaggcttgcttctccctgcctctttgtaaatttctgactcttccggctacggctctgggctttagtcggatccacctgcagttttccagtgcccggcaggtgtcaggcttagatgcctttgctctcgctgctccctctggttaa

SEQ ID NO: 133517 - DNA, 1035 bp, Homo sapiens
agggttgggatcatggaaatagtcacagaaggtgactgttcgttgggatcctgaagtcttgtgttcgttgtgtgaaatagtggtctggaggggtaaggaaacctgcatttcaatttgagggagcagagagttaaaaggcctctgtcttctattgttctagtacattaggtgctctagtataacacctaataaaattctgggtttatagttgacactgaattgttggttaataacagattgaggtctgctcttggaaatgaaaataggaagagttttattttttttatgtttttctttcagatgtctcaaaaagtatatagaactttactgtggtctggagtaaggttgcaatattcagtctattcaattttggcatctaaatagaattgaactattgcaataaactggagtaactctttgttactgacttattttagaatgtaccaatcagttgcttaggtagattgtaaatagtgattttaagaatacaactataaaatagaaaagatataagaagagcaaataaatcaagactgactaggttgtatatgctcttcatcttattgtatgtggtttttttttccattttagttatttgtcaaggtataaagagctctatcactcttaagacagtcaacttcacaggatgtaatctgacatggcagggagcagatcacatggccaagatcttaaaggtaactttatgttccaactttcatgaaaatgtgttatatgattgccacacgttaatattttgatacaagacagcagttatttttgtcttttgatacatatgggcattgcagttttagttttgtttaaagaatgtgaccaattttcagcctggggttctaccatttattaaaggtagtatgcttaatcttagaaatagaagacctaaaatataataattagatttttctgtaaatacagtttgtaaaacagtaattttaaaggtgccttaacaactttatagtggttattactactgtatttaggataaaattacataataatgtgacatgaagccttttt

SEQ ID NO: 133518 - DNA, 1071 bp, Homo sapiens
gtttctgtttgatttgtaatatacataaaatatgtatatagaaattcctgtatatagtttattaataaataacttacatgttaaatgtttacttgtgggatgtccagtcaagtgtttagagaccactggaggacagaatgatatgatttagaggctcagcaatgatagaatttagaaccagtaccttcacttggcatataaagaaaataaaattcttagaagttaactaagttgtcagtttacataaagcaatcagtaacaggtcattagtggttagggtcacatagctagtcagtgacagactagtatctgggtcactggactccttactcaaaatctactatttaatcagtctgtcagattaacccacctggcatatgtacctggtgtgtgtgtaaagctctgatgtaatcagctgtacttagttccttttagtgttcctatctctttatccaagtgtattaatttcatcttattaaatctttgaagtatcagaccatgagaaggcatgaagaaacctgggctgagagtcttcgctataggagacctgatcttgactgtatggctggcttaagacgtatcacactgaattgcaacacacttattggtgacctaggtgcatgtgcttttgcagactctctcagtgaggatttatggctgagaggtaagttaaatgaacttgtaaggtggaaaatattgaattttttgatattaaatatgcttaactcttggcacagtaatgttgtccgaaggttttttaaaaagcctcttttttctaataggttttattttgtttttaagcctttataaaagttatatatattctttatagaaaataccaagtaacaaaaaaaaaaaaagtacatataatctcaatgcctagagataaactgttcattttggtgtatacactttcagtattgttttttcctgcagatacatttgtgtgcttagagttacaagaacagaactatagtgcacttaccattttgtaaccctgctttttttatttaatgatgtatcatgtagtactctattatattgaggcataatagtttaattccctactat

SEQ ID NO: 133519 - DNA, 1500 bp, Homo sapiens
ctttgggaggccgaggtgggcagatcacaaggtcaggagatccagaccatcctggctaacacggtgaaaccctgtctctactaaaaatacaaaaaaattagccatgcgtggtggcgggcgcctgtagtcccagctactcaggtggctgaggcaggagaatggcgtgaacctgggaggcagagcttgcagtgagcggagatagtgccactgcactccagcctgggtgacagagtgagactccgtctcaaaaaaacaaacaaacaaacaaaaaatctgtatagaattagcaagtgaccctttgtctttcatcgaaagctcttgacctgcaacagtgcggcctcaccaatgaaggagcaaaggctttgctagaggcccttgaaaccaatacaactctggtcgttctggatataagaaaaaatccactcattggtatgtcgctacaatattttttattgactaacaaatagcaaaagaaaaagaatttctcatgtattgacagttttgaaaacttaatgtgtttccttccctaatcttacacttttgtaatcttgcactttcttatgtttttagtagataatttactgatgaaaagagttgtacttaaattgctcttggctgctactctgaataggagtgaacctagataataaatctgcttccaccaagtgcattattttcttcttgtggaacttctgaattcttggaaatagtatttcattcatttgttgatttgacaagtaatttttgaatacttctatctgctagatactggtttaagcactaaacatacagcagtaaaccagctagacaaattcttggtctcatagagcttacattctagttggggagttatacgtaatgtaatttagatagtaggaagtgcaaaaataccgtaaggtaagaagacagatgggggcaggtgggactatattagataggttttttaggggacagcttcactgaaaaagggacatttgaacagagacctgattaggaggggaacaagccgtggaagatgcagataaagtaccttccaggatgaggaagcaatgaatatgtagttacataggtggcagggtggatggagtatttaaggaaaagcaagaaggccaatatggttggggcactgagtgatgaagagactggtatgctacaaagtcagacaactagccaggggcctgatcttgtaaggtttgaaggtcacggtaaggacttagataattctaaatgagctgaaaaccatgggaggattttgagctggtaagggttatattccaagtagtaattcaatcagatgacttggtgtggagaatacacttgtagggggctataaaagggaaagagggaggccagttaggagactcacactggttcaagttagagatggctatggcttcacttagggtggaaggttggaggtggtaaaaagtggttgaaacaaggtgtagctaacaagacttgtggggtataaaggaaatagtaatttttttaaaaagtcct

SEQ ID NO: 133520 - DNA, 1101 bp, Homo sapiens
gaagttagaatactcaaagggggaaaaggtatttaattacattatgtggaattcatattcaatttcatgggaaaaagcaataattggttggcttttgtttttaaatgggaatagccactcattgggaaataattactataatttcaatttttattttactttagatcattctatgatgaaagcagttatcaaaaaagtcctccagaatggaaggagtgccaaatcagaggtatatcatgttttatttctccagaaagaattcttatttaattgcttttcttctgggatctcactgtactgcccagcctggcctcaaacttctgagctccagtgatcttcccccttcccagcttcctaggtagctaggactgtaggtatatatcgttgtgcccagcttttcgtctgtttttaataaaatgaaactattaaggcacttttctgccatcttaaatttacagtcaaatcaaatgtcttttctgtttttgtaaataccgtatgattctttaattttgggtcccagaactgctgattgcaaaccttttattaacatagagtatcttaacaatttccatttaagatgtagccctcataaatgatctgtaactgaaatatagtgtttattctgtctcttttagtaccagtggataacttctccatcagtgaaggaaccatccaaaactgctaaacagaaaaggagaactataattctaggaagtggtcacaaaggaaaagctactattagaattggtaaccttttctgtcttggctttttaatgctactagtgttctagtgtgttaaaattaaaatctcttctcattgtatgatattgacagtaacaaccaatattgactccgtgcatattatgaggtctgtaattgttctgataagattatgagaatttatggaatgtagaaatagtaaatgaatcattaggaaagggatgctagtgcttccatttaaaaaattacccttatttgtttttcatacaatattcatcattttggatatgttttctgattcatgattacttttgatactttgcaattgaaatttgggatgcactttgatgacagttttagcagtgcttttgtatgattttg

SEQ ID NO: 133521 - DNA, 2194 bp, Homo sapiens
tttgtgaggcctccacggatgaattttttctcctaaaaatcgtcctgtctttaagactctgtgtgtgatggtagagaataaatttctcatctgcagttgatctgagaaaaaatgtttatcctgcctccttgcttggtttatgtgaaaaaagtgtaataaaataatatgggttattttcggaaagattttatgtaaaaaagaaaaaaaaaatatgggcgattccagtattaattataaaccttatatgagagaattatttcagtgacatagcaagaataagttagtgtctttttactttgttattgattgtgttagactaaggagtagtgatagacatttatagagaatgacttaacacttcagaaagatcactttgattagatgtcctttagtatttggtattcggtttatattattatacaatcttgtcctctttttttaagcaaccaggttttcctgtgactgtgacagtagagagtccttcatcctctgaagttgaagaggttgatgattcttcagagagtgttcatgaagtgcctgagaaaactagtatagaacaagaagcattacaggtacaaagctatcactttaaagatatggagaagatcatttcaaactctagttagtttttggtgaaagcttgattatgaactggacagcttgcatgggaattctgttttcgccttccttctatctcatatcccttgaatggttctttatcttagaacaaggtaaaagggaggacgtctgcactctaagaaataaaaattgaaacatgtcatcagtaatatattttcctttccttagaatcatagaatattaattagatttagggaaggccttaataatcataagataaactcaaagaaattaagcactgaatgaatgtaaccagctgattcagggctctttgggaggccttatctttttgtgtgtgctaggaagtccacaattaatttttaaaaattaatacaattttcttttatatgaaacttacaaatatagaagtaattatcctttttttatatacttacatgtagcttataaacaacaggaatgtatgtctcacagttctggaggcaggagagtccaagatcaaggctcaggcagatttggtgtctggcgagggcctgctttctggttcatagatggcttttcaccatgtcctcacatggtggaagggcagttatcttatttttatgtgactatggaaatcactttttgattttcaaaaaatgaagcctgattttcattttttaaattaaaattagtgatatttatatagagaaattttaagataattacaaaaatgatagaatattagagggaaaaatctatagataatgtagaattgtccctattataaatgagcaccttttgtttgtagcacctaagtggtttattactaagttccagaggaaaaacaaaatcctagaatgtctgattcatgttcattattgttttaaatgtgttgtatttattttcttcaccaggggattaggaaattttattctaaaagtgattatagccattggggagaccaagaaggttaggaaatacaacttgggaatttctgattcaagatgcactgagaattctcttagctcttttctattttaagaactccataaaacgatattatcaaaatttctaacatacgtaagcctacaataatcaagataattgaagagatttcaacatatttttgaaatagagatgacagatggaaatgagtatgaaaccgatgcagtagaacagaggaaaaccatcgcctagaatatacacaggggaagcctacagctcagagggtatctaatctaactccagaaacagctccatacacagatatgcatataggaaaaaggaagggagctagaaatgtgactaacatggagggagctccttgacagtttgtatatggaagagttgactcctagccttaccttcactctcctgaaatgagatcatttggctttgaaaaacagtaaagtaactggggagaactagggtagatagtgtggattttgcaccctagaaaagggtagctgagaatatcctgccatactggctacccacttcttcatgcataacagaagctagtcatcagctcccagtgatcctctgctcccttattttttttttttttttttttttttttgagatggagtctcgctctgtcgcccaggctggaatg

SEQ ID NO: 133522 - DNA, 1052 bp, Homo sapiens
gtagatagagtaattggtagctgtgattcttgttaaagaccaaattgaaggtagttttaattgaaagtattcaggaatgtataggaatttttcttttattcactttgcttgttaaataagtttgaattaaaattaagtttgagatattaaaattgttattaatctgcagggtagatatagatatagatatggatcagtggtcctcaaccaagaatgattttgctgaacgaatatactgaaagaaagagttggagatagataattgatagagttatgttttgtaggtgaacggtttggtgaggaaaggaacaaacatattcttgaggactggaggaaaggtggtatagatgtgtggggatgaaggtgagaggcagtaggtgtgtggtagaaattgcagcttctactgagacagtatataaaatacggaataagtaaggaaatgaagtcaagaggtatctaatacattgttgggggaagagacagtgcttaaaggattggatgatatgatatggtttgtctcagagaataaatgtgggaaggtctgagaaattgggagggatgggggtgtagtctggagtaggataatgggttttaagattttagaagtatttaatgattgtaggtttggggaaatgtaagctgttcttatgtgcttctagtaatccttgccttttcctccttttcttctctcgaccaggcttgggcagcttgccacaatggctgggatagatcagtcagattttcaattactaggtcatccccagatgacttctactgttagtaatccacctaaagaagaaaagaaggcgcttgaagatgaaaaaccagaaccgaagcagaatgccctagggcaaatgcaaaatatccaggtaaatgaatagaacagaacttagtgattctacaagtgattagcaaaaaagggaattactaagtcagagagaaaagaataatgatctgtgcacatgctcagggaccagaagcatctttggggtcctttccaagactgagattagtaagtttgtgcccatttccttatattgtattgttgtaaa

SEQ ID NO: 133523 - DNA, 1153 bp, Homo sapiens
aatgacctggaaatcttctaagatcacagaataacattgacgttttgaactcgatttttaaatggatggctttgtttgtcactaaatttttgttttgtttttccttctagtttcagaaaattacaggtgatgctagaattcctttgcctctcgactcctttcctgtcccagtttctactccagagggcttaggaacttccagcaacaacctaggagtcccagctactgagcagcggcaggagtcttttgaaggattcattgctagaatgtgttctccttcaccagatgcgacttctggaactggaagtcaaagaaaagaagaggagttgtccagaaatagcagatcttcttcagagaaaaagaccaaaacaggtgaatataccaaaaaacactctgataagcaacaccctggaaaggacctgcattcctgatctgactgtcctgaaaaccagaaaagcaaagaaactagggaaactagttctttggttaatgaaccaattaaaagtaggtctttgaaaaaatacgtttctgtcaagaaagaaaatagaatagtgactgtttcatccaagacaaataaaagtaaatccagtccactagaacattctgaaagtgatactcttggatgtgattttgaatttcaagaaagcatccattctctatcacacctttcatatgactaaatcttttgaaactatgtttttacctttaaattttaataaattttcttatgtttttattatggcatatggtgtcttaaaatataggattggaagccactaaaggaagatttctctatactttttattatagtgaaatttttggtctgtttttccctttgatagtttacaacattgattcagcaattgtttactgaggggctagtatgtataatatcattctgggtgctatggctttcagcagtgaacaaaacaaagcctttaatctcaaggaactaacattctgtggagggagaaaacagaacaacaaagcagagtacgatgaatagaaagggatgggagtgaataaatggaataattttaccatttggttaaatttggaaataaatatatatcacatggccagaagccattgacatattctaatatataaccagagcagcaaacatgtctagatgcttaagcatgttcatgga

SEQ ID NO: 133524 - DNA, 1359 bp, Homo sapiens
attacagggcctatagggtcttcctataggcctttatagatacatttttaaactttaatagcttgggttgcatgtctgatagaaaccattttgaaaatagcataaatgctggtgagaggttctgacatctcagcttaccctgtcataattggtttttgctaatcataggatttaggatcagaagatactgtatatttgcataacagtgcctccaaacatttataatattgctttacattcaatttacagtttttattatacttaaatacaacctcattaaagtttaaaagtacataagccttttatgaagacctcgcacattgataatcttattaagtttcccctatattttttgggaagaggacctctgcattctaaaacttattttcttttatttttggcggttctgaagactgcatggtattaagagaccatagggttaactatattgcttatttctgttaaattttgctcctgttggtttgggacatatacttagatttctgtgaagtgagatcacagcatggaattttgtgctccagacctaaagggcaactgttgcacatggattcctgtttgtgagaaagagatggtaagaagaatcacagagagcatcacggagtgatgaattaataaataacttgctcagtgaatgtaccacttgaaaaatccttctgccatgactataaagctaaaatgtttgcaatttgaaaatcagtttgtatggtcccctaaactaagtgagccttggcccacaatttgaatgcagaataactgaaatttccctgtattgttgtttacttgcaaatttcgtaggtatttctgttcatttggttttgagctggaatatttgttattgttgtttatctttcctttcacagaaatgagtcacaggtcatcagattttgccaagattattaacaatacagagaatcttgtgcgggaattgctgtaagttttaaaaagaccaaatcatgttacttttgttagatacttcctaaatctggatgtcttccagtattttctacactctattgtttgttcagaatatttcataatttaaaataatccttgtaagattctctccaattcactattagtacctaacgctttttatttgttccccatcccgtgtttatatgtttttgtttttattttatgtgatatttccaaagatttgaaatcattgtatctaggaatgatttttcagcactgtggcagttaaactggtgtgaaagagatgtaaatgacacagaaatggtcatctttgtcagcataattgactataaactagttcaggtgttctcgaagtttgagtctcatacgatctgtcagagtcacctggttagggggaatatt

SEQ ID NO: 133525 - DNA, 1052 bp, Homo sapiens
tactgcctgtagccattctcatcattatcttactttttcatcctggagtcaaagaattttgctttttattttgatgtataatagatacatgatttcatgggtaggcctaaaacattatcgaaaccccctgcccaacatccacctggttcatagcatgttgcataacacaggattattggttgcaagttataggacccccaactcactggcttaagtaaaaaagaaatgtattatctcacctaacagataaatgcaggagaatttaggtgcttctaaatgactgcaggaaggtgattttcccccatcttctggctctgctttcttatgtgttctcttcattgggtggccaccattggttgcaggattagctcctacaagtttcttctttccctcaatagaaacagctttccttacctagaagtttgagtaaaggtctcagtaccaaattccattggccagcctggggcaggtactcatccccttgagccagggttgaccacagttgaaccatgtcgactgagagtggcagaggggtaatttcctaaaggaacatcaggctgttgtcactaagaagaggaggaagagcttcaggtcaaacagtaaccctaggctttcaacacagtctccagtaaatagttgtccaaggattgcataaataaatgagtgaattagggaagacaaagtagtattgtaacattaccatatttcttgtagtaaatccacccaagttaaagcacttggtagagcatcacttgttctcaatctttgaccacatgagtttatgtattgactgttacctatgcttctgcccagagctgttccagacaactataaggtgatttttctgcaaggaggtgggtgcggccagttcagtgctgtccccttaaacctcattggcttgaaagcaggaaggtgtgctgactatgtggtgacaggagcttggtcagctaaggccgcagaagaagccaagaagtttgggactataaatatcgttcaccctaaacttgggagttatacaagtaagttctgggagctgagctgggtggtgacgt

SEQ ID NO: 133526 - DNA, 1593 bp, Homo sapiens
tgcttttgaactcctgacctcaggtgatccgcctgcctcggcctcccagagtgctgggattacaggcgtgagccactgtgcctggcctatgcatactcttcttgcagaagctagtcagtagttagtagtagtttttcagctaattagctgaaaaagtccaggggctggtttggctttagatatggcttgatcaggggccccaacaatgtctccaggacctggtggctccacaggcagaaaaagctgtccctttcttgaaaggtggctgcagctgctcctgaccttatattctcccaagtttcaatgcctttatggagcattcccagtaacggtctcatgtcctgtgccccattctgaatcagtccctgtggccatgcctgagttgcattctacctctgggctgtaggtttcattggctcccctggaactacgtgggctgagagtaggtgagggctggggttccaagaagaaactactagtccatcaatggatgtaggatagatggatactgggcgacaagtaaaaactcagatatctcccatgccttttgaaaaaatttactttattttattttgttgagacagagtctttctgtgttgcccgggttggagtacagtggctcttcacaggcaggatcatagcacactgtagcctccagctcctgggctcaagtgatcctcccaccttagcctcctaaatatctgggactatgggcacataccaccatgcccaccttcccatgccatttttgaagatgatttgttcccagtaaaagtcgaaaggttggatcgctcatcctctcaggatgttgataacgatggtaacaaaggatgaggctgggaggttgctttcactcgtgcaatgctttggagtcagttagtctttccctgctaggggaggcctgtcagtctcctggttgactcccatctatgtaaggaaagaggagagtgaaaagtgcaaagtctcaaacttgtcttctgtgatagaaattccagatccaagcacctggaacctcaacccagatgcctcctacgtgtattattgcgcaaatgagacggtgcatggtgtggagtttgactttatacccgatgtcaagggagcagtactggtttgtgacatgtcctcaaacttcctgtccaagccagtggatgtttccaaggtagagtataaaaggcagggtgaggggaacccactgactcggtgtctgcagggacattttaatatatacaagagcgggaagaaccatgggtgtttgaggcctgcagaacccctgagccagtgcagctgccagtgagcaggctgccaggtgcgaattcccagctgttgcagtgcctgagtcctgctgttcccagcctcgtggtgatgtttgcctcacagggtcccactcgagtccttggggaactacctgcttttgagagtggttcttagaaacgtgtttggtcaacagacggggagagacttgtcttcaagagcagatgcagattatcccgagcccaggggacctatgtgagggagcttccccttgcctggtacccacctccaaaagcatcaacaggataccgttttatgagtggcttgccaaggcagggcagt

SEQ ID NO: 133527 - DNA, 1794 bp, Homo sapiens
ttgaacccgggaggcagaggttgcagtgagccgagattgcgccactgcactccagcctgggtgccagagcaagactccgtctcaaaagaaaaaaaaaatgtttcttctcttggtaaccagggagagttagaggccccacgttaaagactcctttctactttgggggtagaaaggaggtgtgcagagcgaatgtgaatatgtgccaggactttgcagtgatgggcttgggttagccccatccaggtgaggaccaggctgacggatcatcctcaggctttggaactctgagtatgggtttgctgtccacatggagattgctttagagcatgaactgctccctacacaggatagagtcatttccttaaaaaaattgtgcttcgggaagagttgggaagtttgcatacatgtatgaaaaatggccaaatccttcttaagcagcatgtctttctctttttaagtttggtgtgatttttgctggtgcccagaagaatgttggctctgctggggtcaccgtggtgattgtccgtgatgacctgctggggtttgccctccgagagtgcccctcggtcctggaatacaaggtgcaggctggaaacagctccttgtacaacacgcctccatgtttcaggtaactctgggagtcagtcttgtggacccagggaggggtctcactatttttcatcaaagcggaggttacattttaaaataaaacatgtaagcctgggcgcggtggctcacacctgtaatcttagcaatttgggaggctgaggtggatggaccacttgaggtcaggagctagagactagcctgaccaacatggtgaaaccctgtctttaccaaaaatacaaaattatccaggcgtggtggcacatgcctataatcccagctactaaggaggctgaggcaggagaatctcttgaaccggggaggtggagattgcagtgagccgagatggcaccattgcactccagcctgggtgacagagggagactccatctcaaaataaataaataaataagcaaacaaacaaacaaataataagtaaaataaagtaaagcatgtttccaggagccggtgatcaaatgccccagatatcctatcagattctctgcccagctcacctctccctctgcaccatctctttaccatttgatcagcttttcctcttgttcttttctggggatgttgttttttgtttggtcttggtaatccaggatccggtggttcaccattaacccaaaagctctctatacatgaggtgctgtggcctgcatctcaaacagccagtgcagctttggagaagaactttcaaaagctgggcctcccctgccttcatttctttctctgtcgggcctgcgggaagctggctgcctgacagaacatactggcttaaatacctttctgggttttgttgttgttgttttttgagacggagtctcgctctgttgccagcctggagtgcagtggcatgatctcggctcactgcaacctccacctcccaggttcaagcgattctcctgcctcagcctcccgagtagctgggattacaggtgcgtgccactacgcccagctaatttttgtatttttagtagagatggagtttcaccatgttggtcaggctgctcttgaactcctgacctcaggttatccgccggctttggccttctaaagcgttgggattacaggcatgagccaccacaaccggccaacatctttctgtattttagcctaatctgaaggggtccttttagcctggctctcattcgctgactgggggctgcgttgcagcacttc

SEQ ID NO: 133528 - DNA, 1948 bp, Homo sapiens
gggaggccgaggcgagtggatcacaaggtcaggaaatcgagaccagccagaccaacatggtgaaaccccgtctctactaaaaatacaagaattagccaggcatggtggcgggtgcctgtagtcccagctactcaggaggctgaggcaggagaatcccttgaacctgggaggcagaggttgcagtgagccgaaatcacgccagtgcactccagcctgggtgacagagtgagactgtctgaaaacaaaaacaaaaacaaaaacaaaaacaaaacaaaaaccatgcaaggttagaaaatcattgctcacccaatgagaacaagctgcaaatggagacatcaagatgtgtgcaaaatcccctccccagtccgtgatgtgaggctgatggggtacctggagcccttcagaactttgtatcacatagtagagttcttgaaaaggcctcacttttgaaaagacgcctttttttttttttccccacagagtctaatgaccataggccctgggaactttgatttaattgtgctggataaaactgccttcaaatcgttgctccgtagccctgagtgatgaactagagtggaataaagaacacactgctgttctctttaacccttcagtagaacacactaaccccaattagtgcatagagaaaaagatccctaaacttcccttctgactgcacaaaatattttttacttaccatgactaactgaatacacaagcatacgtttgttttagctgcagtatgaggtgaagtaactaataaaaatacaaaacaaatagaccattaatcttaggccacctgttaaaagaatgagaacaggccaggcgcagtggctcatgtctgtaatcccagcactttgggaggtcgaggcaggtggatcacctgaggtcgggagttcgagaccaccctgaccaacatggacaaaccccgtctctactaaaaatacaaaaattagccaggcatggtggcacatgcctgtaatccaagctactcgggaggctgaagcaggagaatcacttgaatccagggggcagaagttgcagtgagccaagattgtgccattgcactccagcctgggcaataagagcaaaactccatctcaaaaataataataataataaataaataaaagaatgggagcatgcaaattaagtttgtgggcctgtttggaaggcttcactggtcccagactaccttctcccagtgggatggggatgcctggaatcctggaattcacagaggggtgtgtagtggagccagttttgggagctttcctctgggaaaagtgctcaactcagtggctacattcaccgattcctgagaaaactgtgccataacatcaacttcagaacctcatctgcagagctggagtcttagaacagccagggagagttttccaggggactttctggtgtccttttctaagccctggtgcacagggactattttgtattgctttaaaaaatttataacagtgatatactcttaggctgggtgtggtggctcacgcctgtaatcccagcacttcaggaggccaaggcgggcagatcacctgaggtcaggagttcgagaccagcctggccaacatggtgaaaccctgtctctactaaaaatacaaaaattacccgggcgtagtggcgtgcacctgtaatcccagctactctggaagctgaggcgggagatcacttgaacctgggaggcggaagttgcagtgagctgagatcgtgccactgcactccagccggggtgacagcaaaactctgcctcaaaaaacaaacaaagaaacaaagaaacaaacagtaacatactcttagcaaagacttgcaggtgggcagagtcaccagggtagccactgttcactgcttgctttgtatcctaacagactcttaactgggcatatgcaaatatacagagtcatatatttaatcatgcaaatggaacttg

SEQ ID NO: 133529 - DNA, 1146 bp, Homo sapiens
ggaggcaggacctcttatcctgtgttaagtagagccacaggggctagacatcagtgctctgcagagggctgggtgggaggggaggcaggacctcctatcttgtgttaagtagagtcacaggggctagacatcagtgctctgcagagggctgggtgggaggggaggcaggacctcctatcccagggatgtcttcagtcttcaggacagcttgcttgcttctgagttgtctgcctcttgtttaggcttcatagagccaagttatgggtgctggctccaggcagcccctaaaagtgggtgagctttctgctggccttgcctcctcagatcccattaagaaagccagagatcatgggcggcgagtgtgagcacagcagtcagctaggggttcaggcgtcggtactgaggtctggctaggacggtggacctgacatgggccttgctgcactttggatttagacaaaccaaatccacagtgcagcaagggcccatgtcagctttgaaaccctgggctaacacagagcttcaggcaaaagggaagcttggtcacctggaagtattgttggtgacctgggctctgcttggattcaatcacatggcagggtgtgtttctgtggttctgtgtggaggtggggggtgaacaggctgcaggtgtgggagaggagcagttggaagtgaagtgggaattgcagagcatctgatgaacagagggctgggcagcctcgtgtctggaatgcacacccacgtgcatgtgtgctgtgtgctggacttggccactgtcactggtgtgtggtgatagctctgcagtcccactcgcaggggagctagtggctggagccctgcagcccctggcaaagcagagggcctgcatacttgtgggaagagcttgcattcttggagtcagacaggctagagttggagtcctggctttaagctgcttgccagatgacttgaggcaaagttaacctctctgagcctcagtttcctcatctggaaaatgggatgacggtggctctaacccgaggattattgtgatcaataaagataggctgaggccacagtagacttcaggaagtactcattcccttctcttactttctctcttctgtctcttttgtccctctgacttcttggacgttagccagagag

SEQ ID NO: 133530 - DNA, 2550 bp, Homo sapiens
tagcaccttcttaaggagaggggttttcagactggggaaaaccatgcaccgctcctcagtgtttcatattttcagcttaagtttgaagggactactgactgccatttgtgtggcccacctgccacgtgccaggccctgtgctaagcgttggtctggcaggaagaagttgaaatacttggttcagaaagggatggtcctgagctgcgggaagggcccaggtgcagctggacttcctggaaccagggacacaaatcctcctccatctgctctccacttctgatcctggcttctctcagcgggaatgttggcttcattttcagatgggccttcttcagatgtttcctagaaacatgatcccctagggctctcatctcctgtctcacagttgcactaatattctgccgctttttctgctctccccactctttctccccacacccaattcagaaaatctcagggaaggccctgattggcccagttaggtcctatgccgaactctgagaccagggagccaaggggccttgctggacctgcatactggctggagggtggagttgggaagagcagggtggataaaatgccaggtgtccaccacaggtaggtggatctcccggttccagatgggaaaaccgaggtgactaattctgggtagtctgttagtgagtggctgccctacaatgggagtcaggactgggagggggagcccgtccttttaacccctcggccacagtgctctctgctggctggaaggcactgtgctaaggatgtgggtagaaaagatgaacagcgtgggcttctagccttccaagaccacagaggccaaacaacaggcacacagaaacttaaaagagcaagtggaaaaaaactatgcaggtaatatgggcaaggcgctctgggagttcaggaagtgaagagctcgctctgggtaggggtgggattggggtctgctgatgccttctggtggagataaggaagtgtgttctggctctcaagaagagtttacattagggcttaagctggacaaggagggactgatatgatgtttagtgaaaaatctgattaaacctttttctgaatggccctcagggatctagaattgggttgaccctagtccttgcttgatgacatgctcttgttcacatgggccctgcttttgtcttgtgtattttctttctttattttttttggagacaggatctcgctctgtcacccaggctagagtgcattggtgtgatcatagctcactgcagcctcgaacccctgggctcaagcattcctccctgctctgcctcccaagtagctgggactataggcacatgctatcacacccaactaatttttcaatttttatggagacgggtcttgctatgttgcctaggctgctttccaactcctggcttcaagcgatccttcggcctcggccttccaaagtgttgggattacgggcgtgagccactgcatttgactatcttgtctatttcaaataatgtgtttaagtctgttttaatgcaccttcaacagcagtttgcttgaatatagttctacttttgcaaagatgagctaaacggattttttaaaaatcttcattttagcatctacgtcatgggcttggttctggagtggattaaaaacaatggaggtgccgcggccatggagaagcttagctccatcaaatctcaaacaatttatgagattattgataattctcaaggattctacgtgtaagtcaatggattttatctcctattttgcctcttgtgaatttaaaactgtgtatatactgtgtacctttgaaaagtggacatattcacctttctctgagacattaaaatactggtgagtgtgtgtggtcctgggccccatgagcaggggagtgggtggtgagttcttccctcctgtacctcaccctggggctctcaggctttgggacctgtgtcccagtgggtggtgatgtttctcacaccaaagacatcgccctggggaagaatctcagttcactccctggggtaggtcccgtctactccctcctttgtatatcttctgggaaaaaaacaaatgtactttctgaaatgtgtcaatttaaggactcctgttagcgatctttgggacaaatactcctgtcctcctcttctgcgttatttccctttttaagaaaattcactcctttccttattataagacagatgctgttatcccagagtctgtgaatggaattggctttggcatgggctgactccagtttaaatattcccatgaacaaatgattaatgagtatgtcttaaccactgcccctgcacctgggaattctgcagaaaatgtctgggtcttgtattagtttcctggggctggtgtaacaaagtactacagacttagtggctcaaaacatcagaaaactgattctcactcttctggggccagaagttcaaaatcaaaatgtcagcagggttttggtccctccagagagccatgccttgcctcctttagattctagtggctcagggtggtccttgatttgtggctgcatcactccagcctccacatctgtcttca

SEQ ID NO: 133531 - DNA, 2473 bp, Homo sapiens
tttgccttacagccactataggaccaacttattatttctctgcagccttgcagagaaagaggtcactcacatttgccgtgcagctgccatgtgttggaagcttcatatatgtagtaccactaaaccgtcacaactagtctgaaatggagatattattattcccagtattcaggtgaggaaactgaggctgatggaaattaagtacaagtcatacaaggggatgataacccactgttccatatgcaagagtttgttttccctaagtaaacaataaatgtgctggggcagattttttgttttttgttttttaaaaaatcttctgcttgcatctaggaagtgttaagaaaaaaaaatctgttgatttgtttatgacaacccatacatttcagaaaagtagctggaataataaacatgtttttcagttgtccagtggagccccaaaatagaagcaagatgaatattccattccgcattggcaatgccaaaggagatgatgctttagaaaaaagatttcttgataaagctcttgaactcaatatgttgtccttgaaagggcataggtgagtacatctgcaatgcacgagcttggcaaagaattagcttagtttttcaaatgcagaataaaacaaatctataggagcctgcttagcttggagtagcagttatgtaatttgttgggccaacccagctgttataaggatgtgccttcttcctgttgtttatggaaccctttgcataattccccagctgagagtataatggagctccatcttccatgagggttttggcaaaattacctttgaaaatctcttacactgctcgtatagcacagaggttgccattccatctctgatgaggccagcaccactctgttctggaggtagagaatcattattattccaactgaacatcaaattagtagctagtcttgcatgctctatgaaaaataaatgtcctcacatgagaatagcagcagggaatgtcctcacatgagaatagcccagccccgatcttgctggcactgtcacgacaggctcatgaatgttgaacagaatcgctatcttcttccaacttaccttttcttccccacatcttgcttgctttctttgccaagagtgaatagttcgaatgactctaaatgtgagcatggtgaaccttcacagcttaagggagaattttctgatgactgagacgtgtgaagctctgtgccaggtgtcgggagtttttaggtaggagaccggaaatgatggtctcaggtgctgcaactctcaggagccagtggctagaaaaaggtgttttgatgcgaaattagacgtttttgttctcaatgcctggatctttggtcattctaggtctgtgggaggcatccgggcctctctgtataatgctgtcacaattgaagacgttcagaagctggccgccttcatgaaaaaatttttggagatgcatcagctatgaacacatcctaaccaggatatactctgttcttgaacaacatacaaagtttaaagtaacttggggatggctacaaaaagttaacacagtatttttctcaaatgaacatgtttattgcagattcttcttttttgaaagaacaacagcaaaacatccacaactctgtaaagctggtgggacctaatgtcaccttaattctgacttgaactggaagcattttaagaaatcttgttgcttttctaacaaattcccgcgtattttgcctttgctgctactttttctagttagatttcaaacttgcctgtggacttaataatgcaagttgcgattaattatttctggagtcatgggaacacacagcacagagggtaggggggccctctaggtgctgaatctacacatctgtggggtctcctgggttcagcggctgttgattcaaggtcaacattgaccattggaggagtggtttaagagtgccaggcgaagggcaaactgtagatcgatctttatgctgttattacaggagaagtgacatactttatatatgtttatattagcaaggtctgtttttaataccatatactttatatttctatacatttatatttctaataatacagttatcactgatatatgtagacacttttagaatttattaaatccttgaccttgtgcattatagcattccattagcaagagttgtaccccctccccagtcttcgccttcctctttttaagctgttttatgaaaaagacctagaagttcttgattcatttttaccattctttccataggtagaagagaaagttgattggttggttgtttttcaattatgccattaaactaaacatttctgttaaattaccctatcctttgttctctactgttttctttgtaatgtatgactacgagagtgatactttgctgaaaagtctttcccctattgtttatctattgtcagtattttatgttgaatatgtaaagaacattaaagtcctaaaacatctaagcccttgt

SEQ ID NO: 133532 - DNA, 1917 bp, Homo sapiens
agtcatgctcagagtcagcctcccctccttcctcaccctttcatatgtggttgcacatccctgtcatctgtatcagacctgtgcttctcaaatatctgctaattttcattccattgccatgtcagctctgctatgtcagccctcagtggattattcagcagtctcttctctgcccccatattcccctcccaccacagccagttgaactatgacttccccttgtgctctttgttgatgcatacaaagtccagtactcccagcctggcagtcaggactttgtagcatgggacatggcctcttgcacctctcctgcatttgtgattcttggaaagtggcatgcatttgcccacactatgacataagcctggagtttctgtgcccactcaggaagaccagatgacacccgccaacctcttcctaaactcatttgtgtcctttccattgggacaatgttcttttcctttgttttcaccagggggatccttttctcccattataccatctctgttttgttctttactatgccaaggtggctgcatatgtgccttccccatacagcagcatggaaagaacgatggttctctacctcaagcacctagtgtcctgccttgcccttcgaggtgcccagtgaagtctgttctttttagacacagggtctcgctttgtcacccagactggagtacagtggcgtgatactagctcactgcagcttcgacctcctaggctgaagttatcctcctgcctcagcctccccagtagctaggactacaggtgtatgttactgtgcctggctaactttttaaatttttttgtagagacagggtctcgctatgttgcccagactagtcttgaattcctggctgcaagtgatccttttgtcttggcctcccaaagtgctgggattgcaggcaagagccactgcgtctggctgaatgaaaaatcttaatgtaggtcacgttggtctttctgagtaccataaactgagcttggagtaaaggcagagaggtatgatctgtcacataacatggaccttttgttttttttgatggagtctgtctctgttgtgcaggctagagtacagtggtgtgatcttggctcactgcaacctctgcctcctaggctcaagtgattctcctgcctcagcctcccaagtagctaggattacaggcacttgccaccacgcctggctaacttttatatttctagtagagacagggttttaccatgttggccaggctggtctcgaactcctgacctcaagtgatccacctgccttgtgctcccaaagtgctgtgattacaggcatgagccaccaccacatacgtggacttttaatatatatattttttcaagagcttagtatccaatttcgttttctactaaaatggtcaaatatgattctgtggttgaatgaggaaatttagtgtcttgtgagttcccccagaaccatctttataaatctgaaagcttttggaaaatggttaactaccacatacggacaaggggtaatcactggtgtctggccaaacagggaggttctggaatagatattgctggaaaatattcatcagagcaaaaaacttgacctttgtatgtctcgagggaatgaactgatgccaacctgctgatcacgcagagaggggtgaaaaggggagataaagatacaggcttctgggtcagcaagctgcaggagtcagaactggttggtctttccttgaagattaaaatggaaagcaaggtagattgacaggtgtctttgcagccttgcagaggctgggagaggggctgcctcatattcctttggagcctctaaattgtacttcttccccaaatggaacttggaacttttttttttcttttaaaattggttaaggccgggtgcagtggcccatgcctgtaatcccagcactttgggag

SEQ ID NO: 133533 - DNA, 1051 bp, Homo sapiens
aaggcaggaggatcacttgagaccaggagtttgagaccaccataggcaacgtagcaagagtttgtctctaccaaataaataaataaataaaataaaataaaataaaataaattatcagggtgtgatggcatgcacctgttgtcctggttactctggagatgaggcaggaagatcgctttagcttgggagtttgaggctgcagtgaactatgattgagccactgcactccaaccttagctatagagcagactctgtatctaatacaattttgtgatgtcaatacatttcaatatgtgtggataataaacaaatcagtagactaaaaacttaaatacccatataggtaggatacattgattttccttattcctgattgaagattagctgattttaacatacgaaatttaggaattatgtatacataaagcatagtcgacaggctataaacagagctgagtagtgttttattctctcccatctaaggggctatgctcttcagtgtttacttaattttcttttctctttactctgcctccttctcatctttatccatctcttcttcccacttctttccaaatcaacaagcatgtggtaccaaatgcccacactgtggtattcgattaggatccacttgactgtacttatccagttccttggaaatgtgcagcctttgttttaactttccacatgcttagtacttataatagaaagagacaggaaccaagatgtttgctttttctagtgagagaaaataaaacaagaagacaatccaaaggaagccatagtgagatcatcagtagataaacatttcacaagagaaatgataaccactattatgagaagcaaatgcagcttcttttttcttggccatagaactttaaaacagtctctgaaaacatcccgttatccctcagctagcagacacacatcttccaatatttgacaaataccatcttgaatctttcttagtgcaggtggtgctaactatgtcatgctgttactctcttctcagttaaagtcacatttctttttcaaattccttctgcacagg

SEQ ID NO: 133534 - DNA, 1091 bp, Homo sapiens
atgacaggcagtccatccatgtgaactgaactggggaataaaagttttcagtttgtttagagaatcccagggatgggtgaacaaggtggggagtagggtttagtgggagtgggaggggagcagcaatagtgaggatggcctttaaaatgacctcaggtcaatttctaggtgagggcaacacaatcaatattagcaatatgtaggattgatttcaagagcagaagtttaacttgaatgcaatcttgcagatagttttccccagatgctttaacatttgttgtttggagttattgacaattgtctgcacttcctattttcacttgaaaatttctagtctctctccacttagtcagaagcaatatttcctctaaactgtgtggttttaccagtcttcaattaccaccgcctaaggcctctatttgtaatcagccacccactctgcttttctggcaagaaaagcacacctgaaatgaaaataagcctctaggcaaatgcagcatactgataagaaaacagccaaagcttttgactctgggtctgcacaaccaatttctccatggtgacaggagaatccaagagaaggatgacacttctaagaagcatgaagatccaagcggaagcaacttgaatggtataaaaagataagactgtgtgtgtctgtgtgcatcttttggtgagtgtgtgtgtacacctgtgcgtgtttgtgtgtgtgtgtgtgtgtgcatgcatgtgtgtgtgtaggcctgttctcatgcacattaaagagaacaatgcagtaactagattttttttcttagacctactttgtttaacagctgttcccataaagatcattaacgtagagaatggattttgcaggcctaagacgttatgcctgaaaacagttcttcctgcttaaatggttctcactcttaacttttatctgcttctttctttctcaagttcattcttttggtgtctattctttctgtccatgcttgctttcagtccattctttggccatcttctctctctctctttctctacccaccctcccccttttctctctgaaaggatgttcctgtggcccaggccactgtggtatcatgccc

SEQ ID NO: 133535 - DNA, 1582 bp, Homo sapiens
ctctgattggttggtggagacgcctaccgcaacgggggtgggcggggcgcttggagagctcgccagagcgctcgcatggcgggccggtgattgtagtcaatctggccgtattctcaggcagggtcgcccggggcggactacatctcccgggatgctgcgcggccgccccgcggaagattgtgaatatgtatcagaatgttaatgattagctgctgctaaatttggtcaaagaagtcacctacacagagcgtgttgttagagctgtgctgagcgggtgtttgggttgttggctgctttcttccccctttctcacacacttgtatattattttgaggtggtgttcgcagagtttgaaaggagagagaattaaaaaaaaaagccgcaagcgtttcactcttttatttttataatccccttcaatttggggttaaaaaaaagacaagaaaacaggaaggaagagaaataaggaaatgagatgtggtaaaagaagctaaaaggtgccttttaaaagatcgttgctgtgaagtgaaaaaaatctccagagaaaccaaaaagcaccgccgagacctcttccgaaccaaaggagtttgtgtttgcttttagggaagaagaaagatcattcattcggaggaataacaaccaattaaaagacaaataaaaaaagtttggagtgggacgcagagcgagcgagaggagctgccggcgggcggtggggcgcggagcccgcactttcccggccgggtgagcggcggccgcggcgccgggctcggcgggtgcgcctcggcggagcgaacgtcggagcgttgccttgggagacgcgcgccggacaatgcccgcggcgggccagtgacgcccgcggggaatgcggagcggcccggcagccggcacccagccgccgccgcgcgttcctgccgcccgtgtcacgcgagacccggcgggggccgggaccgcccgagccgcccctcagaccgagccggccgcctccgctgccgcggccgcctcctcttcggggtcattaaagccaatgagccgcgcgcctctgccgagcgcagccaactaaatcggcttggatgattcgcgacctgagcaagatgtacccgcagaccagacacccagtgagtgcgggcggcggggcgcgggctcgccgggtgctgggggattccccgcgtcgccccctgcgcaccgagttgtgtcttttggccggaggggcgtggagagccgcccgaaatcggcgccccgcgccgggagcagcccgcccgccatcacccccaccccccggcgcggtggccctcggagggggtgcggagaggcaattgagttgtagccattttcttattgttgtctttgaagcccctggaagccgcgccgagccgtttgcggtccccgcgccgcgactcctcgagggggggtggcgagcgatgaaggaggcgcgactccgcgcccgggcggggagggcgccctcggcagcggcgctgctgggctggctgcggtttggaagtgcggggcgccggcccctcgcgccgcgggccgccggggcgagcgggcgaacgaacgagccgagagggtggcggccgcctccctc

SEQ ID NO: 133536 - DNA, 1043 bp, Homo sapiens
gtaggttttctccgtctccctgcttcgcctgtgatgtgggctaattaaatattttattgttgttcttcaggcaccgcatcagcctgctcaaccctttaaatttacaatttccgaatcctgtgatcggattaaggaagagtttcagtttttacaggctcaataccacaggtaacgatattgactttagctgatccttctgtttgcttagctcttgtctccccgacaaatacacacaaacacttaccctcctccttttttgtgggggcgtcacaaaggtattatttttttttctcggtgggcagaaagggcaaatcaaggcctccttccttaggcaggtgtaaataaattaaacatttcttctaccgtaaataaaaagaaggcagaacaatcgaaactggggagacttggaaaacgctgaggccaaactttcgatattgatttattggggccgggagaatgaaaggttgggaagattctggggccttttgacatccttggttctttattactccggacttgattccttctcacttttttctgccattccactgaagagctgagagcccagggaagtcggagtgagcgatttcattacttttatgctaaaaaaaaaaaaaatgttttcatcttatagacgatttttagacttagggtgcctttgagacatttttctttagctggctttttaatgatgcctaattcttatttcataaatgcaagaaccaaaacaaaccactgaacccgattgacactttgcccctgggtggtggtattcaacttgtctgtgtgttttggagggaaaaaaacaagatatcattcataagacatgcttgattcatattttcattaatctctttgtagaacattaaagaaattcccttgtgacgttttggaggacttatttgtgcttgtatgtgcagtcattattgaagtttattttcgtgtttgttttattaagtgaatattcaattctggaggaagttcctgaattaaactgattagaggatttgtttccttaaaacttaattaaaaaaaaaatccta

SEQ ID NO: 133537 - DNA, 1262 bp, Homo sapiens
aaatctagcaattagttcagtagcaaaaaaaaaaaaaaatgattagtcagaaagcactgagagatacgactcaaacagtcttctttttgtgcaggagactgaataaaatggtttggcttaaatttcctagacagaagaataatagcgggtatatctatctatatatatatatacacacacacaaatatatatacatacatatatatatataaatattgtttggcgatagtaattcctctaggaagcatttatttttagtgatctcctagtggaagcacttcaggtctcatcagccatttcagaataggtgtgtatgtgtttgtctgctgggaaaaagacaagggaaaacttactgcttttcatttcctatttatggtcaaggtggatgtcattactttctaagttgagaaaatatgaaatgagcacatactattaggccttcactatttatggattcctttttgggtatagttattttctacatgctcagaacatcccagatagtagatctttaagagatggctgttagacaataaggcaatctgatgaatagtattggaaaacaaaaagttggaaaaaaatgagacgttgcttacattgaggacttttaatttcagatactgttttactttgtatgctatttggttatgtcaatattagcattatagtatagtttgaatggcctgttgaaattaaattcttattttggcatctttgtcatttctgtttagattagtaatgtaaatatcttctgcttaaacaaaatctgttcaatcttgtggatggacttctcttagttctaccttacaggaataaattacatgagagatattgtttgttaattatcccattacatttcctttgaggtctggatcttgtgtatgtctctttttttgtctgcaccccactccccaaaattaattagtgtctttttaaagattggaccagatgattaatttagtccctttatttctccttctgtatcttgtttaccctaaccacttagtttccaggtctccttgtaccatctacatttctaagaggcacatagcttgtatttggctgtatgtatttctttttcgagggggtatgtgaaatcccttaattttacacattttatactgctataattctgtcatcttcttgtccagctagcctcaaatgccatccatttaaaattgagaacagtacattttccctttttttcgtttccttttaaattcaatcatatcaagaatcctgagggcagtttatcacattat

SEQ ID NO: 133538 - DNA, 4700 bp, Homo sapiens
tagaattagtggattttttttttttttaaaggggaacttggtgatatgacgtggaattggaacataaaatatgaatctaaatttctggtaatctttaggattgatagagctaagcagatgaagcaaaaaaaaaaaaaaggatgaagtattctaggctataatgggaattaatgctgtgccattgtctcaagttctagcataaaagtgaagatgacaaataggacatggttagaaatggcacatgttttagtgtgacgtcttcaaaatggaatttttaaaaatgaaagaacataggcccttattccctaaggatttccctaagtgtatggtttttgttttttgttttgtatgagacagctgacccagggtttagttgttaagtttttttgctgattgttcttctttgtaaatacagtgtggcttctaaatgggttggtggcttctaaatggcacagtggggtgatgcatggagttgatagcattactaaatgctgcttcttcccatctttcacctgtaatgctgtcattaaagaagtcctcactgatggactctgacagcagtggttaccattctaaaaagtgagtattggatatagattaggaacagtaggtatgtgaattcaacctataggaactatatggagatgaacataccatcttttgaaaaggggagcatgagaacatctatgacttccttatagttagtattctacaatgtgaaagcttcttcatttgaattttagtaatcatcaggaaattttagaaatctaaaacgcatagaatctgaaagtaagtactgcacatttatgtatgttttatgtgtgtatttttatatgtgtgtgtatttgtgtgtgtgtgtgtgtatatatatatgtatatttaatcaaagcaagaaaactcctgtttcacttaaagccatgtaaattttattacgagacttgggccacaaccatttgagtgctgctaaaatattaattgaatagaaatgaaagggccttgccaactgataggatatcataatcatagcctctttggtcgatggtaaatgatgataaatgacattaggaaccttttagcaaactgtaataactacaaggagggaagcagtatggatttgcattgtatctgataccctctagtaccaagtggattgccaatactgcttgtttagcattttctaagggcaataagatattgatttctgacttacaaggaacagctctattttcaccattgaaaagtattgcaggttgttaagaagaaattgacttgaagaggccgactgctgcccatcatggagcaaataaagcaaaactgccgaagcatggtggagcagcgagacgggccctcagcaatttgttgctattaatttaccatgctcgacagcaaatcaatcggcatctacttcatctgctggagaaaatgctgtccagggcagataaaaggctcggcatggtacagagaatagactggattggccaaaagcaggctgcagttaatgtgtaaataagtgaaatcaaggccactgttgcagaggaagctgttgttaattaggttggtgttttttagtgaactattttagaaagcagctaggatttggagagtaagaagagatttattgagattgaagtaatacatgactggcatgacattctagccttgagtgtacttgaatctagggtgcagtaaatttatttggggacactgcttgctatgaagtttgttgaaagttcattttagaccacatttcccttatgataactttttttttcaaccttgccagttttttgcacatcttctgtcttattgtgtactcttagatttagaagagtagatggaggagtaggtgttttagtatggaggcacaaatgtgtctgttatattcttacccagtgcctttttttttttcagagataggtataattgaactcttgtataataatgagagtgaactatcatggaagatggggtgttctagctgaaagtaactaataaatgaagattttgctgacagaactttatcttgcttcagaaatattaggaaataacaatctagagggcctgaatagtgggtagatactactagattataaaatcttaaagatgacaagtgaaattttgatgtctgcataaacttcagatacaattataagactatgtgtgtgggggtgggaagggttcttgtgtttttggttttcattaaggtttaaagccaccttttctaatttaagattatttacacgctgataatattccacaattaatgttaacggagtgaagggtattggtggtgttttttcccctttacctctcatttgggcattttaaaataggaggccaacttcatttactcctgtttagtaaatctaaatgagtgtaggttttaaattagattttttcccaaaacccttcagaaggtctagtattagggcagttgataagtaagtggaagcaccttgggcaggacccagtgacctgtccttttacttattacagcacctgcacgggaagcagatctggaggatgaaatttaacctgttacagtgtgtgtatgttttagggtgtgtgttttccgaatactgtggggagttccctttttccttctcccatgatggattcttttgtctttctagagataccataggaggatatctggatttttcacctaaggcagtgattcttgagtgaaattggaatttcctttcaatagaagtaaacatttattatatatctggcttgcgcttaccactggtctgggcacactgccaaaattcttatcgttagttctcataatgatcctaagacagggattatatccaatcaaaagttgattaaacagggtcagctctgcacaaggtgatacagctaatagttggtggattcaggacttcaaataaatttatgtgggaggatatctcctgggagatgggtttgctatgggttagagattcaggccccagttcattcctgaaatagagagtccctgaactttaggctcatacgcagaacctcttgagttgggggattctctgcaactgcctagagtccatggatggctcagcctgccctctgcttgcagactgctttcagtgggtgagagggtgaggttgctttcactcggaatctcccacatgtgggctagggaagctgcttgcttatcaagatggaatttgcttcctccctaggcaacctatttctcatttgtttacaaacttgttcttctctttaacttttatcttttcctgtggcttatgagagtgcctacagacaaggggctgtttgttaatcaccatcttgtgggcttttgaagggggaagctgggaggggaaaatgtgatgttttgtagcctctttgtagtttagaaagaggttcgtcgatgcaggaaatcacacaactcagttttaaatgaaggcagatgttttgcttttactgttaaaagaatttctttgcagcattcaaacaaaaggatagttccttttcactgccccttaatccctgctggatattatttatttgtatttattattttgatgggcaaagttctttgtatctaggtatatatcactttgatctgtgtaggaatgatggaccggactaatgagctacatctctaggtgctgttgcagcactggtgaaggagacaatacaagcaccagcccattgttcttcacattcttcatttaatctttgctttcctagaatacatcttttttatttcttcttttttttcttgtgttataagataggtagaggaaaccagttgggaattaaatgtttaaaaaatgcatttataagttatttgtgtttgtttttaatgtggctttttttttttttttttgcctttgatgtgattcgatggtttggtttaccacttctggacagcaataatgtatttggtggctagagaaaagagggacagggatgtgagttctagaaggcactttcttgatccctctacacaccctcttaaaatgactccagcgttccagcaatggtggtaggttcagtggtcctatactagctaagttattaccagttttgtaagctgggctgttggagagaagcaggggggcagcacatttacgcatgggcaatggagtatttacactgataatgacagtttgcaaggcttaggacttgttcaaagtaagtatactgcgaacagtttatgaaattattactctaaagaggaagggcctcagaagttttagtcagaagcaagagttagagctgttttgtctttgccttagtaatagctctcagtggtagttgttttctatctatggagagggatttagctggcattcatcaccacaaatctatataccctctctcttttcattggaacttacccagcatttatgccaggctgttgctatttctatatcattgacccaaaacttatccctggagagctgcacgtgtaacccttattccatccaggggtgacacatgggcagggtgtggattttcttagctggttcatcaaataagcagaagagaagtactctgggataccccttaggtactctgtcctctggtgagtggatcgcactgtcatctcttttgaggatttgcccacacacatttcaagaattgtatggtggaggcagcttctgcgtttcacggaatgaaaggataacttctctcccggtgcgagacaatactctatccccaacctgggctggctgtggtgtgct

SEQ ID NO: 133539 - DNA, 1865 bp, Homo sapiens
ataatatttcacttattcttacaacaatcttatgagattatagtagtagtattatttccattttacgtatgttggggctgagacacagagagcttaaatagcttgcttgaaatcagctagccggtaaaatagatcttgggtttgactcaaggtcagaacgctggtatgacagatatttctgccttattccagttgatatgtttggaatactccaccatcagcatacttactaccttcccccaaatgcttgactgattccggagcctcagattctagttctggccttgctagtcaccagctttgtgatattgctgagtaccgtacctttaagggccatgcttttctcatctttaacttagggcgtaagtgaacgcccagatctcttttagctcttttggttaaaatgaccatttcagtttggtttgttgctgtgatccagtgaacagaaattgaatttttttttttcagtcttagaaagtctcttttagcacttattttcagaatttttaaaatccaaagttacccaatgtgcctaggagtagaaatgtatatttatatactattaatactttattttttataaggtactttctcatccttttttttcatgtaaaccccaataataaagcattccccccgtcctgtggatgaacacagtgagacgcagatgttagatgacaaagttcttcacttaattagtaggtggtttacaattcactgattctcttatggccagcgttcaggctaaagtaatgttgacacagaagtagagcaattttcataaaacatgtaatataaaagtatatataacataaaatatatcagtatgtctttaaagtgattagtttttgtacttttcctttggcatatattagaaaacttaggctgggcacgtggcttacgcctgtaatcccagcactttgggaggctgaggtgggtggatcatgaggtcaggagatcgagactgtcctggccaatgtggtgaaacgctgtctctactaaaaattaactgggcgtggtggcgcatgactgtaatcccagctactcggggggctgaggcaggagaatcacttgaaccagggagtcagaagttgcggtgagccaagatcgcgccactgcactccagcctgacgtcagagcaagactctgtcacaaaaaaaaaaaaagaaaagaaaattgtgtgacttctgaaattgtatgaattataaagtgatccaataattttcttccaaagatgtgcaaagggactatgtagcagtttattacctgttgtgtaattagctccgggggttactcttctagaatctaaggtaggtgtcagtttctctagcttgaggtaaagcgtgtctgtaaactgtggcttacagtgagcttgacatctcaagtcctcaggactttcttgctttgtcccatcaaggaccctttccttagggaagataaattcattgtaaataaatgacttaatcataagtagaagaagggagaaatgtttaatcttggccttttggagtttataaatcaaagacacagtagagatcaagttccttcattaaagtgtagttccaaaaaggaagaatgtggttttggttttaaaaaatttttttatttttaatttttaagagtacatagtaggtgtatgtatttatggggtaaatgaactattttgataccggcatatagcatataataatcacattcgggtaaatggactacccatcaactcaagcatttccctttttttgtgtgggttagaaactttctagttatactcttttagttacttttaaatgtacaataaattattgttgactgtagtcactctgttatgctatcaaacactataccttattcattctgactatatt

SEQ ID NO: 133540 - DNA, 1920 bp, Homo sapiens
actagcacctaaaacaatgcctggaatatagtagaagaaatgaatgaatgaatgatggaacagctaaaggagtggtttaattttttcattttattgcatttcatgtagcatcacatattctgagtatcagccacctttatataagctgtcttcgtttctgagtgcttagggagggcctggctttatgctgagcaaaaaaggcctagataggcaatcagagagtgggagttcttatctcagtctgctacaggtccttgagctgctgattggcatttttaaaatttagaattggattcatactttgccagatgatttatttctaagatatctttcaactcttaacatcatatgatgtttaaatgaccagcttaaaaataaaattcatccctacttccattgctcggtactataggcatgccattttagtaagttaagttttaagataatttttataagaggaaatacagccaggtttttttttgtttttgtgtttgtatttttgtagaatctcactttgagcaatgttaggctattgtgtggacagctaaaacaatcctaatattgccagtgtttcacaacctagaaccatctgctgtgttgctttttttgcagttgtagctgcatcttcctggtccttctataggctaagagcacatcagtaagtacatatagttaacagatttttcatatgtatatcttgggcaagtgttagtgataataagagcagttaaaatttatcgagtgcccactggataccaggtaaagcactaaatgcttcagatgtattaatttgtttaatttgtaatcttttgaggaagggatctgattatccttattgtgtatgaggaaactaaggtaaagagaagctgagaaatttgcccagggttatatatagctggtaggttacagagtaggggtgtcaaggccaggcattctggcttgagaacctacattctggttttgaaccactggcaataaatgtctcataagtgactatggtaaacttctttgtttatccttgcgtgtgtgtgtgtgtgtgtgtgtgtgtgttttgagatagagtctcgccctgttgccaggctggagtgcggtggcgtgatctcggctcattgtgatctccgcctcctgggttcaagtgattctcctgcctgagcctcctgagtagctgggattacaggcccacaccaccactcgcagctaacttttttgtatttttagtagagacggggtttcaccatgttggccaggatgggcttgatctcttggcctcgtgatcccacccacctcggcctcccaaaatgctgggattacaggtgtgagccaccgcgcccggcctatccttgttttctaaatgaaaaaacaaatcgtctgcttctgtgttctgtacacagtgagcttaaatgttaaaaataatagctggtatcatttgggtattttgttttgcaaattaacacactagattagtggactcattcattggttcatcttttatcacagattctactgtttgtccgtggctggataaccacaggcctctagatatttttgtacctctgactgtgagatttctaaaacaggcatggcaccttcttttataaccacgtgtcacatgggaatgttcagggaactgtaaacttttgagtgcctgcctggggtggaggagagatggaggttcttggctgggtttgaaaggttctatatagttctggaatttatatgcataattgtgtaccttttttgtgggggcagaatccatagcccttactggttcaatgaggaaactggaacccaaacaaaagaattagggaggtactgtgctagagcagtggttgcaaactggagcagttcctttcctcagaggatgtctggcaatgtgatgatatttggggttgtcacaacttggagttgctactggcatgt

SEQ ID NO: 133541 - DNA, 1044 bp, Homo sapiens
gagccagtagtcctggtcacctcagagggaatgcaaaggctcttattctttcatccagctaatgttaattaacctcatactatgtgcaggttgctttgagggctagcagttaggaaaggtaggaggcttgcctccatggagaatctagtctttttacttcatttggaccactgtaaaaaatataaagcagtgcagtggatacacagttgtgacataggtggaagagaagggggtctttctggctccttgagtgattaaggatgctgttacggaggaggtgggcacagtttagtgagacctcagaggatggggagcacttaggcaggttgaaaggaaagggtaggattccaagtggaagccacagagactggaaactgctgtgcatattcaggctgtgtttagtgtttccagctttattgagtggtagaggagagaataattgggaatataggtttgggatgcattatagaaggccttgaatgctggtggtagtgcttgggctataaaaagaaagcaaaggggagattaatcagtagttggtcaagggaccatatctgttttgctaatttgttcagcagctagcatgaggcctgagaacaaatgtcagtgaatgttgttgaaacgatttgagtggagaggggcgtgactggagagggacagggtggaggaagtgaagtctgaactagggaagtagaactggaaaggaggaatccctatgacttgacatttcattgggtgaggagtatggaaatgcataggaggaaaggccctaagacattgatgtctgcagagggacagagtcatggtaccattcattgatagaaaaagatactttagaaggggagaacttggtgttgataatgctgccaggtgtggtacctaggaaggagggagtgaaagaaggaagaggaggagggaatgaatgagtttgttgcttcttttgctttcgttcatcaccttactttcatctctcctgccaaatttataatccttccaagaacctcaaggattctttccacatcttctgtataccacagtggactt

SEQ ID NO: 133542 - DNA, 1025 bp, Homo sapiens
atgaaattaaaaaggccatagagtacatttttggtaaaccaaaatattgcttggtggcataaagccacagatccattccaaaaaaaaacgaaaaccgaaatgtggttttgctgtctgtcatgcagtctgtttcaactgtcagaaacatacgttgctttatgggatgtttttttcaagtctgaccgcagcttttaatttccttcattccacccacacctcctaccacacacccatgtatctagtactaatttataggcaatttgaatctaatgacataatcatcagcaagcaaaagggtcagcacttgtggcaaaagtttctttcttggtgtgctaattatcagttctacactcttggaaactctaaacagtcagaacacagtgattgtccttgttcatggacttttcagtctaagttagattgaggcctttaaaagatgggtttgaagtgctttgtatttttgctaaaaacataatattaaagaaaattaaacaatattcagtgaattttagaaagcaaaagaaagaaactcactcatgttcctacagttgtgccttaactgctgaccaggcagaggcatccctgtgtctccatcatatatgctgtgtctgatggagatcatgtcacccaaatgaaaaaatacttttctagtctaggttcaaagggtgatacataaaatacataccacaaaaaattaatgatacaatgaaacctcagatctttaaaattattattgacttattggtaactttacagtttcttcaactccttataggcaatacgatcctaaatatttttaaaaatctagtcctaattcagccagtaacttcctgtgacattggtaaattatttaacttttctgagtctcagttcctcatccataaaacaagggtctaggactggatttttactttttataacatgttggttcccaggcccctgatctgggccttaggcatcagtatttttctaaaagctacagaggtgattttgatgtacagcaaggttgaggaccagcgaactag

SEQ ID NO: 133543 - DNA, 2488 bp, Homo sapiens
agcaaaacataaatactgagaatgtcttttctgggtaaaagtgcaagaaaagtagaaaaacagcaaattttctggggctaggcctgtgagctcactccttccaatcagtgaggaggcacttgtcttctgccactgtaccagtgagtctggcatccccatcccactttagatctgttccctagccacctcatggtccttgcagcccttcccctgtgtagtataaattagtaagggatgctttcttaattgagagacagaaagagccctaagcttgaatcgatacctaacaatacagccactcaatttgtagcactatctaatctcagttctgtcttaaaacagaactacttaccttaagggattttattcgtaagcctaccctcataaatatttctgtcagccagatatggggcagccattcttcccatttcatgattatagaaatggagtccagaatcattttggagtttgcttattaaagtcatggtttagctagtctagaaattagagtcacactaggatttgggactgcacagctgtatagttcgtaatatttggtgttcttttcagaatgttttgtcacttgattctgaattcttcccatgcctttccataattgtcccctaaccaaatcttgacacgagcctgtgatttccctattttaatgaatggtaggaagcaccatatcatccaggttttacacactggaatcattgattccgtactcccctggttgtctaatctagtgaagccacatagtctgctagttctccatgtgcagcctgcctcctttccttgctctcaccacggtcaccatcactgaccatcagaccttgttgtcatactagaggctatggtggtctccaggctttttgtctgcagcctttgccttctctgttctcttatctgggcttgctggacctcccggtctacttttatatctaccttttggtgttgggtcattttttagggtcccttctctgaccttggaaaatcctaccagtatttccaatatggctctgtcctcttctctgcttactttgcccttttatttaggtaattttattcactctgagtagatgaatctcagggttttttttctactagcccagacccttcctctgagaccattgtatgtcctcatttgccttgaatgtctcatagatacttaaactcaacaggtcccaaaatgacatagtccccccacaagcctgcttagtgattcctatctgaggaaatgccaccaccatccacccaatttctcaagccagaaacccatagaggcagctgattattgtccttccctcttattcattagccacacccagtcaaacatgaggtcttctggtatcaactcccagttactcttgcatttgtttacttttctccagctatatgatcatggtaaattaaccactgtatgattctttggctttatctgtaaaatggggacgagagtaatcctcttaaaattgttctgaacattaagtgaaatatctggcacagagcaagcgttccatgaatgttaggatggtgaacacccttggccaccatatttaaaaggactcactggcctggcgtggtggctcacgcctgtaatcccagcattttgggaggctgaggcaggcggatcacgaggtcaggagatcgagactatcctggctaacacggtgaaaccctgtctctactgaaaaagaaaaaaaaaaaaaaaaaaaaaaacttacccaggcgtggtggcatgtgcctgtaatctcagctgctcgggaggctgaggcaagagaattgcttgaacccagggggcggaggttgctgtgagctgagatcgtgccactgcactccagcctgggtgacagagcaagactccgtctcaaaaaaaaaaaaaagaaaaaaaaaaaagactcactacgagtaatgcaatagcctcctaactggtatgtcctggatagtgataattctggtccactaggttcttttggatctacttctccaccttcaccttgtgctgatactaccctttcacttttttatttgaacgtcagtgtcccatgctggtatggcaggctttgctgggaatggtcttacccttttctctgcccctttctcctttgtgtgtcagactcattttaccctcagttactcagggaaatagtcctctaaaaagcatttaaaaataccctgcattctgtatttgtttcaatgtctgtctcatttgctagattatggactctgtaagtcctatcttgttcctgtactgtttttttcagactataatgcagtatatggcagagtagcagacaataatcgaaagttatgaaattaatatggctcacattactctctccccaaagccagaagggttttcttcccctcctcactcttagatttccagggctcctctgtgtagtagctagggcacttaacacatggcgtttgttattgtgtttatttatatttgatcttccccccccagattataaacacctcgagt

SEQ ID NO: 133544 - DNA, 1113 bp, Homo sapiens
atctttcatcctccatctttcctcttgtggtatgttttgtggttataaatctcttctttccgtccacaacattaaatataatcagtgccaagaggaggatggaggacagaaatgcactgtggtgtcttgacctgtctggtacttatcataactttcctaggaattgaccttgatgggcccttactgccttctaaataaagttcaaaccccttagtgtggcattcaagaccttccatagtctgaccccagtgaacctcttctgtccttattttccactctattttttattgcatgcatcctgtgctctagcttaatggttttcaatcctgcctgcacattagattcacctggggagctttaaaaactgaagccagggtcctgtctttggagattgtgagttaattcgtctggagtgaggcctgggtgtgggtgtttgtgaaaggtccactagtaatgctgatgtaaggccagggctagaaactactgacaagctcagtgtttcccacggaatatcatctcctctccgaattttgacgagaaagggtcccaaagtcaaagaagcttgagtagtaattgcttttaatgtgctcctttccaaagatgtacaacgaacactatcaaatgaaaggctctaagatacccaacagtaaagaaaactgtttaactttcttcatagtgtgtgaggtcgtctgataagagacacttttatgtatataatacttgttaataacatctgcaacatgtggtatagaaaatgtttttagccacttctcaacttttgagtcacttctttttttgtccttccctgatcatgtcatccaaatcagacccacctcctgccccagggctctctcttacacccccaattttgtcttcatagcacttctcagtatctgaaattcctctttatatacttgtatgtttgcttctgtctccctccacctatgatgtgagctccatgaccgcagggatttacttgtcttgttcacccctctgtcttcattcagcatctacaatagtcctgacaaatagtaagtagatatttaataagtatttgttgaatgggcaaaaatacacgggcagtaatgcattcgtggtttaggctttttctaa

SEQ ID NO: 133545 - DNA, 1004 bp, Homo sapiens
gggttaataagcacgaactcgtctacacattgtagtgtgtataattcctgagctccaccaccacaccttgaattatcaggaactgaccttttacttcctgtggacctagtgatgccgtcgcatgagtaggccctttccttgggctattaaaatcatcaagttggttcactcgagataacattatagagatttctcatgaacgctgtatacaaggtgctctcctagggtgcttctaacaaatccatcagtccagtgggtcaggtgatcagcaatctggtataaataatctcaagaaggaggttgagctgcatttcctttattatattttaaaataatctttaaaacacatattttgccaaggtttcagataggaagctttaatcatttattcacccatcaggaattgtccagaatgaatttgcatttccttttgttgcacactatgataatttattattcttttgaatagcatggtatcctaaatgccagaaaagatgtgtgatgggaaactaaataaaccatatcagaatttaagcaagttttctggatagatattcctttatggttgatatattaatgtgctttagctacaggcataccttgttttactgggtcttgctttattgtgcttcacagagactgtttttcacaaattgaaggctgtagcaaccctgaatggagctgttcttccaatagcctgtgctcacttcgtgtctctgtgtcacattttggtaactctcacaatgtttcaaactttcttattattactttatctgttacatgatttgtggttagtgatctttgatgttactattgtaatagttttagagtgccgtgaactgtgcccccatcagacagcaaacttaattaatgtgtgtgttctgactgcttcatgctattcccccttctttccctctcctcaggcttccccattctctgagacaacagtattgaaattaggccaattaataaccctacacgggagggcctctaagtgtacaaat

SEQ ID NO: 133546 - DNA, 1774 bp, Homo sapiens
agtctgttttgttttgttttattcctgtatccaaaattcctttgtctttaggtatttctcacatcattttgatcatacatatatgttgggaaaaatcaagatgaataatctccgtttactctgggaacaaggagtatcttcttccctctactgtggctaagtatggaaaagcttaattgtaaatcagcattcaaagacaaccaaacatttatttatgtcagtaggaaagaggaaggtgtgtgagagagagaaggaggaggaggaagaagaggaggggagggagagagaagagaaataaaatgtaaagcaggcagctggcaaggcttgctctgacacactggctgaggaaagagctattggtagaacttggatgtcttagtaatcagagtaatcaggttctctgaccggttccaccttgttctgtgcaggctgaaagtaagctctctagagaaagtaattttctttctctgctccttctgacatcccacttttccctcccatccttcctttctattttccctgcctctcccctctggtagaactgagtataaccgtggtaacattggttacagtgttttctagacttgagaactgaaatgatttgaccttgtacaagtaactggatgtctggcacaatgatcgtcattctcaaccttgataatttatctctctcgatcactgttaacattggagcagtatttaaacacaataactagagcccagaatatgcatgtaggcgaataggcacctatctaggatttctcttaaagatatacctctagagagctcacatggtaggaggaaaaagagggtgctcttttttttctttaaccattgtaaaaatgcttcagtaaaatatagcttgagctctggggatagactggaatagtaccatgaaatgtgggtataccgtgattctcttcaagaaggactttgttctgcttattcccacatgagcaccacaaacagtagccccatgtatcttgttaggacaaataaatgggacacttgagaatatccagttaactgagccgcacattgggtactttaaagcacacttaacatgcagtaaaatagcataaatatgagttcaaaacacaaaccaagttgacattgcttgtggtatcatcattagtagaatcattgctttggttaaactccctgggggaagcagtggaagggaggtatgggggttgtgaaaagagattcaatattgacactttcacattgtttaagatgatacaaattaactactctgttatagacagtatccttttctcactggagtaagtaggatgggcagagcttttaaaaacagcaagtcttagttttaatcagtcctttaggaacctgatagatggcctactaattcgattcttataatgttatcaactttgttttattgctttattaagcagtagtagttgttttttttttttttttttttttttttttttttttttttaacaagcacttgaactgaaataaagcttaggcatgtggtttaccaacttgctagctatactgacgatacctttggtctaaatctttaagctttattccagtcaggcttttttttttttttaagaatacctaagattagtgtgtgtgtgttttttttttttttttaaatactttttaagttctagggtgcatgtgcacaacgtgcaggtttgttacataggtatatatgtgccatgtggtttgctgcagccatcaactcgtcatttacattaggtatttctcctaatgctatccctcccccagtccccca

SEQ ID NO: 133547 - DNA, 1582 bp, Homo sapiens
tttttgtctttacatttttctgagatattttatccaaaccaaggttttctttagcagggatggtgatcatttttattttatttatttttttgttggagaatggtgtaaaggtgggtaattttgagagagaggaaatagaatggtagtgagttgagggtaggaaaatacatctgcaacttttattgttttttaaatgagcatcttgatagggaagatagaatggaattgtcaaaaattgttaatgtgtttgacaaagtgtggctgtcagtatgatctttttgttacattttgacatgaacaattgtccttttattggggctgttaatgctattttagaatatcatgagcatctgaaggcaatagtttagcagtgtccataaagcatcaaataccattataatatctagtaaccctaacagcaatatttcagaatccctgcctgtttaaatgggctatctgtgaatgtacttgctcagggatgcatgacccacatcacctataaatttgattggaagctaacagtactggcgtagcctgatggatagcagattagagccctgattaaccatgtgattcaaagactgggaatatattgtctaagcaagattcatcagatgcaatcagaatttcaagtggtcagatgaaattcaaatgtgtgttgtggcttttcctcccctattgcttttcctcctaggttgcctttttttccttctttccccaaagctgaaaaatacttctttgatgaatctgctccttaccctaaagctgtctgtctgttattcatcagaaagcaggtcgcagttcagtgagcagaagaaaagattttaatagaagctgtgccaagggctgtaatgcatcattttagggccctaattacattacaatgacaaatatcaatggtgacaacagcaataacctacatcctttaatggctgtgctggaaaaggagtttgggccccacgccattatattagactcagtttcaaaacataggccattagaagtgtgtgtccacagtgttattggctgatcgctaaagcccagtggaaaggcctgtaaataaatgatgcctccctaaagctgggtcctgtgggacaaaagaggcgaaattagatgaccatgggagcagcagtgtttccgaggcaactttagatttcaaagtgaagaatgacctgcttaattttatgaaatcacacacacaccccacccccccactgccaattagcctgaccatgaaaatccattggcatgacaacttaaagaaattaagaagtcttttaaacaaaaggagatctttaacggaagtttggaaggtttctgccctcccgtttctgttgtgtgtgtgttaacctatgtgattgaataaaaaggctcttctcctttttacatttatttttaagaaaatgtagaatttttttaaaaaatagttgctcagacttaatacagcctaggtccaaaattttatttcaccagatgaataagtttccttagagtcgtttttattgcctagattatgtaggcgaactaaagaactcagttttcttatgtgcccacacatttttcagccctcctagcaagggac

SEQ ID NO: 133548 - DNA, 1044 bp, Homo sapiens
atggttctaagcattagaatcatcagtttggtctgccccaaagtgtctcattatcttttattctctccccctccacctctccctgcaaaaagcttaacaaccaaatgcatttgagatgctgtactttcagcctggtgaatgctactctatttttattgctcaccctggaatttcaccccataaccactgtggtatgttcgtccaggtggagagtggtttggtgattcccattgcagctcttcatggtggcttaagcattcttaaaggatggctaaatgctccatggggccagtgcagtaaattaaatcaggtcagcacagttgggtccttattcactgcagcttattggtgctgggtttttgtccatactgttaggaatgcaggctggaatggaaagcttggatttgaaacttcatggtgaatttgtgttttcttttggctggtaaagtttttaaggtgctggcatttaaaagattgcatagctacacagttagaagggttgctgatgaaagaaggaagcctagattgcacaagtagagtgtcactgtcattctggtaatgacttggcaagaaaaggcattttgggcctcacataaaatgaggaactgaccctggatggaatttaagaatgtcttagggatagtaattgctttacattttctgcctttcaattcttcttagctctctttcctccattccatcattaaaatataaactattttgtatgtacgtgtattaaaaaaaactgtgtatttatacatcacaaaatatacaaggcaccatctgaaaaatacaaattaagataaacattggtaaaactgtgagtaactttttaaagaaaacatgtagtggtggtttttcttttaacttactgtagcatcttattggtttaaaatgtctgtacttataaaaattattagagaatagactgttctttgacattgttgggacttttgcatatccacagtaaaaaaaaaaaaaaaaaaaaaaagttcccaaggatagtttccagatacatacagattgcttcctgctaagtgtaat

SEQ ID NO: 133549 - DNA, 1046 bp, Homo sapiens
cttaggaaatatgccagccaaattataaagtatgttttaatatcatcctgttaatatttggggaatctgtaaccagctgactgttctctttattgctttcctttcccttattttttgcaggcagagattgtcaagaggctgaatgctatctgtgcacaagtcattcctttcctgtcccaagaggtaaggtagttgattttaggcactggactagaagttgccattttagtggttttgcagaaaagggattgtagaactgactctctggccttgccagtctcttggtgtttgtattttattttcatttctaagaaacagtgttctcactccaacttgtataccttagtaactttctgtgggatataatttatatgtgtttacataatggaatattttctagttgggctaagcaaaattcagtcgttaaaatattttgctatctttgtcgtgttgctcagaattatgcttgtttgtcataatggtacctaatagggtagactgaaaaattgccaggaaaacaggagcttactctgtactattgtcattgggcattaagaattggcagaagacatatcaaatggaaagactttttgtagtaaacaaactaatgaagcttttggctagctacttttaaacatttacttcttgtttcctgattaagtctttatattattgtgcttttgggaaaagacctgcaagatgaactcattgaactcgtttctctgagtgccacttttctcaaaattaggctttggtgatggtaggcttagcacattgctaaggcctggcatgcggctcactagttctcttgctcacctacaggggaagtgcatgccatcagcaaacaggcacaggttggaataaagcgatgcatttctagtgcttgttggcttccttgtggtttttttttctctccctgcttacttttggtagttacaaagttgaagtgagaatactggaaaaagataattttttgcttctggattactgaatgccttcatttgctcaggtaagatccactctaagaaggaaggagctaatgaaat

SEQ ID NO: 133550 - DNA, 1987 bp, Homo sapiens
gagaggttcattcacctgcttgccagcgggcatgtgccaatgttatgtggccaatatttgagcctgcatgtgtattatagatatgcagattgctgtatatgatttttttctttggtctggactgggttagacttgagtaactatgggtacccttcataggtatatactggggagggggcactcatattcacaaatcttgttgacactctgaattcacatgctcttttgggtcttgataaacaaagggtatgttgtcttttctcctcctttagctgtgaccacaaaacctaccaccagtcatgtccccatttgcctgtttttacttaggatttgcttatggctagattagatggcttggtgaatgagagtcaaggggtgtatctgcatttcttttggaaacctgactgccccctgcctgatccagactagtgtgtattttttactttaagcagctctgctttatggagatggagaatgggaagaatgtgtgacctacagagctgtaaccaggctggggtgtcatgttctaaggtgacagggaaaagttcgaattatccctggggtggtattagactttgggcctctgtaggcacagacccctgtatatgatcgctggtatggctttggtctcatcacatttctgcaggatctgtgggttgtgttcagaagtagaaggttgtcttggggatgttgatgaagctgatttgccaatgagttgttttcccacatgaattatgttgtttgtgtgagcaggcccagtgggaacagaatgtataatggtagtggtgctgagcaagactggactgaaattaattgtctaaggaagttgtacctgtaggtgaaagccatggggagatactgacaactcatttgctctagtctgggaagaaaggtgtcatacttaactgttgtcataccacttaactatttatttcccaaatactttgacatttcttggttgaaatccttgactcacgtataatgatttatgccaagcttgtgcaaccccagggcctgtgggccacatgtggcccaggatagctttgaaagtggcccaacacaaattttaaactttcttaaaacagtatgagatttttctttgcaattttttttaagctcatcagttatcgttagtgtattttatgtgtagcccacataaaatgggatgtgtgtgtgatttcttcttccagtgtggcccagggaagccaaaagattggacacccgtgatctatgccatggttttctaaatgctagttctgtgtatatattttcttttgcttactttagatttaatttactcatctttttctagtttcctaaggtatgtgtgtatcttttattgtgtgagacacaaacatgtttgtttccttcaaatcagggcatctctgatgttttttatctgaacatcgtccaccttgtttcttcttctgtgcattctgtgagcattggactccttgcttctgccctgaagccagatggaccataatctggagggaggggaggagcaggttagtagaggaagatgaattctgtttcctgtctcttcagaggcatggaaaatcactcttgcatggctgtgagcatcactgtgccaggactgaaggctcttaatctgatcttttaacaccggctctctgtgtgacagtctcgctaccaaaacggcagctgctgcattagaatttattttaaaatgtttttatttaaaaattaaatgatcgtatttaggaaaaagcaaaacaattcctgaagagtagtgcataagctaacagaacattggctggagcgattgtgagcatctgaagtcaggctttttggagtttgacaggaacaaggggtatatttacatactgttagatgaagtctctttttaatttagcccccatgtgttgattaatatacctgcttaatattgcttgcgtctggtttaccgcatttttttaaacttaaaaaaactatatagtactgaatgataactattaaatttagc

SEQ ID NO: 133551 - DNA, 2065 bp, Homo sapiens
ctctagctttgactatgtaattagcacatctcatgtttttcagttacataagatataaaataatgcatagttcttgttatagaagtctcttccttaccattcgaatgttggagaagagtcacccatcaggtattatttatcattcatacattcataggggatggaaaagaacctacatgaacagtatggcctctgtgggctgtctatatttgtgtttcttatgaccagtggcttcctaattctcatttattaaactcatggtcattgttacctttagagaaatggcattcatttttaaccttgttattagcagacttgtttctagtcactgggtgccaaggaggatggacattttcctccttctacactcctgtaattccatgactgttttttttggtggtggtggttgttttttgagtcgaaacagaagccgagctgctcagaggctgatggaggagccctgcaggctagtcctcacagcaatgatgaggagcacacctgggggcctgcacttgcacatgaacggagctgtttttcccttgcatcagttattttaagaaaatattggtttaacaaatgaaataaagaagacgttattctttttacaatatttaacaatagttctctgatcattagaatattgagaatataaaagggaaattaggacctaaaaatggaaaccttccatttttatacttattttacctggggaaaagggaacttccataccaacctgaatgctttctggtgcaaatttaattttaacttaaaacttggtttgtattgccctgttagcttttctaacacgtagtaccaagtagtgtttgggcactctccattgcatttatttggtagaaaataatagtcaattacataatagtgataatatgagtttatttgaattataaatccaacaggctagaaaagctagtcacatcaaacgatacataaactcctgttttggacatgccataaatttggtccatgtaatttgatggaaaacaaaccccttctactacattgtgatatatgagtatatctcagatgctgtttacttgggcatctcggttaatatggtactgaattacttggagccacattttgcatgtatagaataattgtgaaatgaaagttgaaaaatgtgatcagtcactttcatattgtgccttcgggaggaaatgaagaaaatacagtggttatatgcactggtggaagtgttatcgccttacagtcgtgccaggttaacttgtcttattgcttgttaactttgcgaggaatcaatggcttgtgataacaggtttgatataggagagcatggttaaaattgcagagatcccctggcaagtatgcagtgacatccctaagaccatcttcagaaagtgcttgtgttaagtgccagcagcctgcacagggcacgtctgcttcccagttggagccattttgtcagtcttggtaatatgttatgacagtgccatatatcggaagaatgtcctaaaatgaataatagacatggattggggcttctggggatttggcccagttttctgattttcacattaggttgtgggcatgggtaacttttcatttaaaaaatatatattttctcataatactgaatgagccatcagagagcgtaattctgtcccatattccgtggttgactgattggcttgctgtacctgaccatgtattttggtgacagttggctgcttggtgagattcatctggtggcatcatggcctgtttgacctcaagaagtgaaagatgattctcaggaggtagaacttttttcctgtggtttaaatgtgggtctctatccaaaggcagcaatgccaacctttatctgtatgtctcaacaaattaatgagtgtttgagaactgactcatttatttgacttttagttaggtagtgattagattattattagtggagctaagtttgaaggtaccttgagtagagctgcattgtccaatacagtagtagctatgtaaagttgaataaaattaaaagttcagtttcttagttactctagctacatttcaagtgctcagtatccactcatat

SEQ ID NO: 133552 - DNA, 1125 bp, Homo sapiens
acctgtgtttgtgtacgtgtatgtatgtgtctaagtaatatctaaagtaatatctaatttcttgggtgactgtgttgggctgttcttgcattgctataaagaaatacctgagactgggtaatttataaagaaaaggctttattggctcatggttctgtaggctgcacaagcatggcaccaacattacttggcttctggggaggactcagggagctttttttactcatgatggaaggcgaagtggtgaaagcagaaaaggagagagagattgagggggaggtgtcatacactttttaagggccagatattgtgagaactcactctctgttgcgaagacaacatcaggccatgaaggattcacccccatgacccagacacctcccaccaggccccacctccagcattgggaattacaattcaatgtgagattggagttgggacaaatatgcaaactgtatcagattaatgtttctttgaatactgtataggaaaggctgatttggggagattgggttaaatttaagttgatttgtactagcaaatttaatagagttgctgaaaaaggcttttagtgggattttttatcctgacttagcagacatggagcgacactttcacttgaatttgatctgcttggccatacctggagtaatgtgcactacaaggagactagccagaaggatggatgagtgggctagagcccatgacacagagaaattgttgagtgaccttaggatggttaacctagaagagataaaattgagaacatgcattatgcattgtcatatacttggagtgtcagtcaatggaggagaatttaaagacaaaactgggtccagtggggaagaattaatggcagggtagatttcaacttagtattagggctcattatcccaaaatggaaaaagcttgtccatgaggtagtgaattgcctttcacaggaggtgatcaaggagagactggttagggtgtgacagaggagattgattcattggatagagtagtggcctttgggctgtggttggtactgtagttccgccatcccaatctgctcagccccggcagtgtttagaaatttgcgtgcttttggtgatagggagagtcttttgttgattggttggttgg

SEQ ID NO: 133553 - DNA, 1103 bp, Homo sapiens
agaactgatagcacatagctgcttaaaattttttaataacatctcatttcctaccaggataaagtccaacttttttgcatgtcatgcaaagccctttgctgtttggcctcctcctgtcttgccagaattcatttcccactaatacttggttctttaaagcatttccatgctacactcatgtcttcatccattttcctttatttttctttgtgtgcacaccctttccactttaaagtgttcttgcttatgtgtcttatcatacccaagaaggccctatgaaattctactctgcttgtctgcagctgtgtcccctacctgctctccctcttccagccacacagacattcttgctcttcctataaggcccctacccagttctcttccctttgcctggaattcttttatcctcattcttcatctacagaattcctggaaatccttcaggtctcagttgtcaggtcagcttcctaagggaatcttcccctagccccaatattagattaagatatttccctgataaatgattgggtagcatcctgtaatttttcttatggaaattatcctccagttgtaattatagagccttttgagcattaattcactgactgttttccttgatagagtttaaattctatgagatcaaagactatggttcttgttccttactctaaccttagtatctccctaccacagtgcctggtgccatagtaggtgcttaataaatatttgaatgaatggatgaaaaaaacaaagccttcccagatgccgcgggaagtgcgctggccatttcctcctaaaacttctttctgttttatatcctgtattcctctaagatgtgctctgtgtatgagttcatcacgtgagaagcagggccattggtcttactttcacctctccacatgttggagactttaattaatattgttcattatgagaatcctagtttattttgtttcattttatatctatctctacccttatactcttttactaccccagtcaatatggggagtactttttaaatgtttttttaaaattttaatttataaaattttgaagcatactttagagagagaatatactgaacctacaggtacccatac

SEQ ID NO: 133554 - DNA, 2287 bp, Homo sapiens
ctcatgataggggttaaaacaccaacaatttgcacatttccagaagaaatatgtatgttgcattatgtatgtccttccggtgtcttcgctaaccgttatcgggagaaaatttaaaaataattacttccaggaaacaatttttaaaaattttaatgtagatagcaaagagaaaaggtagtgagtacaaagaaagcaagtgggatgggttctgttttgtttgttagtactaatagcagatgggtggtccaagtgtaccataacttttaagtgaaatttaagctgttgtaaaggagcattcttcatggggtcacagagatggtacctgcagttggatgcccagtgactcctcaactttgtggacccagatgtaccctagacatctagtcatccatcacctcaggcttgtattggaaacctggagatcccccaaatgctgttttgcatgtaactgaagttagaggacatgttaggaaaagctgttcttgactgagtagaaaacaaataattgtattctgtttctgatcttcatttatagcaccagcaacaagtggtgcaggctgtggaacgggccaagcaggtgaccatggcagaactgaacgccatcattggggtacgtggcctttccattttagctctgatcttagtgtttgtcatcagctctctcgctctctctttttacattttgttccgccaaaggggcaaaaagcaatagatgactacaaaatgaaattaagcactttgccttcaatctcctgtgaaatttgatggctgccttagaaactttggatcacattctcaccaatttaagtggatgtgttcatgaaaactctcctctaaggagactggatagctctttttcatatttctttgctttgcaatcagcttgtgttgctaacctaggccaaaaaaaaaaagagatatagattgccctgacgttaaaatgacctggtttcttttttctttccttgaataatcatgtagagtatcttactatcatttttaatgaggtgtacattttcacatctcccgttctacttattcttccttcccctgtcatgagtggctcttatgggttagtgtccatttgaaatagaaataatagatgaactacactttatttttaaaaaaatcagtggcccatttagaaaatccttcctggcaatagtggcattaatgttgcatagaaattgtgctggaattcatggatttgggcagtcacttcaactctgcttatatatgtatgttttttttttctcagattaatgtaacaggcaataaaataatgtgctgaaacttagaaataacaataaaggcaagaaatcacagctgtaaagagcataatattcacctctctatttatgcagattgtacaagcagttccttgggttattctaatgaagacactacaactgcactttcctctttctgtcccctcccaaatactttcttttgtgtatagattatacacaaaagtcttttttttttctgtcagtgtatcaaacacactttgaaatgctaattatttcgtttactttcattaaaattcaaattgctgagtgaagatgtggataagggtcgcctgataatcaatctgaagtgaagatattgcttcaattattcctctgtcttttaacaaggaaatcagaactctgggatcactgctgatgttgagggcgccatagtctgattgtagcttgttttttaatggggtatttggagctctattttatgtccctctgaccaaaaaaaaaaccaaaaaaacaaaaaaaacctggtaggaaattagcagatgtaatgaatggaaaagagtgacctttatttcctccagagtgccccttggaaacaagaggctgaatcagaagaagccatgtagaatcatgaataatgtttgtcatacattttgtgtgatgggcaggggaagggacggatagtagagacgaatacatttcgcaattggttttcgtttccaaaaactccaggaaacagcagtatattaaatttttaaaagttgagaaaggtttaattttaaagttaagtgtgtgtgtgtgtgtgtgtgtgtgtgtgtgtgtgtatatgtataaaccagctgtgctccattgacgtgtgtgcacaagtgcaggtgttgtattcactgtggatatttttgttaccaaatcttccaggggtcagaagggatagaacctacatttctctactgtctctactgtttaccatggagagaatgtgcagagtgatccctgataggagaggttgctgggtcatttttagcttagcgtttactgtttgt

SEQ ID NO: 133555 - DNA, 2597 bp, Homo sapiens
ttctaggaaaacagaatggattattattatttttttttcctttttttgagtcttttaatgactgtacagtggagagattaagctaaataaaaaacactttgtttatgtgttggatgttgcttaatatgagggaagatataaaatcagaacaagttcccttcacttcacatcaagaatatttttaatattgttttatatttattcatttttatatactttatttggaatggaatggccgattgccttttcttggggaaatgaggatttattagactgcagccaagttactgacatattgtgtttatatgtatttaattattaaaataaagctaacttaattttgtgacctaaaaacttaaagaactaactcagcagtacattctgtcaaagcagcgttacgtgctatcaacgcggcatatacttggatatagttggatatagttggatctgatgagtcttccaaactcttggtatctgagcagaaaatggagtcggaaatcacattatctgactattctggaaaatagattgcagaaataggaaaacaaacccaacagttttagagaaccacaaaccaagtgagaaggaaagagctcagttacaaactcacttgacaaatttttgctgctgaggttctctttgtctttttagccatggtagtgcttgcatccagtagtttttgcagttgtaacattgtagtattttaaaggcacttgctgttctctgtcccttgagcgtagatggctggctgagttggtggtattttgacacgctaccaaaaacaactaggggtcagtttttagatttttgttacttggtttttagaatgtagtcagcagtgattttctgcactgaaggaatgacagttttcctttgagaggcaaagacccatctaagcccctgcagaccctcatttatttatcactacatatgtgtctattttatatgtatgcacaccatccagacaagagcaaatgttcccagatttaatgaaatctgatgaagcacctttttaactctgcaatattattctaccttcattggtaaatgagccaaacgagtgatccatgcagtttaaatgcaaaatgctgaagtgatcccgtaatctggagaggcggctgttctcttgacaataagctggttgtgtttaatggaatgaaacacagttataatgatttctttcacaggtcatgttcagtttaaaactgttgatagattgaaataagttaaatatcatttatcttttatttataaggaagaaaaccaggaaaattcctgtgttggtttcccatcgttgatattttgtgttttgttttgaattggtgatattacacatttccttcaggccttccccaagttccctcagttgggctaggggaacgttatggatctagtttgattttgtcatgtgtcctgctagccactgtgtttttaaattagaatctctgcgagatcacactgttggaacaacacacaaattgtagttttaaatcagtaatatgatctaattagaaatgatgttttcatttcctgtattattaaattgagtcacctgactatcttaaaatgctttttaaatctattacactatataatcagtacatgctgtgtgaatgtggttatgcttaataaaggaggctgacttggaacctcataagaatttcaccaaagaaactaccattaagaaaaaaagtttagtcagtgtgaatagtggaaaagaaaatgtttggcttataaaaatagacgatgtgggttcctttggaaaccccctaacccactttttaaacctaattctgaggaaaaaaaaatgatagaaatgtatgcgtttggaaaaaagctcacccccatccccaataaacccttaggaaacaggtatgccatggtgttgtaggaattgcagtttagcacaagaaatgctgaacctcaatttttagcagtgacattttaatgataggaagtctgcaaaattatttgccatcaattgtgaaggcaataacaagccttggtggtttttcacactctctgtgttaagtgctttcagaatgacagcgtaaactgtgttagagaactccaaggaagtaaaactgattaaaatgttcatgcttgaatggtgctgatggaatagttcatttggactttctctacctcctgcagctcaagctgaaatattaaaattcagtggatttaaatctctttcctctcagctcaggaaaaaaacattacattttaataggttttaaacccataattcattggattggagcagcactattaaatctatttaaatattacttgtattactaaggaaatgatttaaatgactttgcctttaccatcctatgtgtttgagttagtttaaaaaaagaaagacaatacctttgcggtcccccccttagtattttgttttcttgtccttgtcatatgattgaaccttaaatgtgtgtgtgtgtgtgtgtgtgtgtgtgtgtgtgtgtgtgtgtgtgttttctacattgacaacgtggtaagagggtcttgcagtatgactgtttaaaaatgtatgtctcttcttttccgttatagatttcaaaactgccattttaactttcaaaggcatt

SEQ ID NO: 133556 - DNA, 1149 bp, Homo sapiens
caatcctctcacctccaaaactgggactagccagcaatgctacaatttttctttctgtttggagctgagccatcctttcctttcccccagtgaatgcacttccatcgctgtagagttgagttcaaagtgttataagagttgcagaatgtgtctgggtagatgtatctgaggaagggatatgggcattggcttccactgagaagaaagtagttctcccagatccacagagctcggcaggctgagcttatgcagaggtctgaggaatggttatatagaaaaacaggctaaaacagagaataaggcaacctgcaagcttgcagttccagagtgttaccccattttataggttgttttgttttggttttgtgtcacttttgtaattctctgatgatttcctgccagcagtgtttccacaagcagcatcaccaacttccgtatagtcagagacctttttccttgtggtgtcagactgctttgtacccctcgaagctgagagggagggaagaagcatgggctataagagacagtctcacaccaaacaggcaactaaagggttattgacagtggttaactgtcaagcacttaggtgaggtttttaaggacttttgttgcctgttctcaaagctccctaagaaaccagtttgggaatccttctaccccaaaatgcatgtgtggtcttaagtgttgtccttaagacctttgtgaaaaggttagaactctttagtgaatagcaagagttatttaatgattatgtccattcattcattcagtaaatatttgagtactttcaccaatatcctattaaaggggcatattttattttcattttgagtgatattttaaattgtcttctgaaatatattctgaaatgatcctcaagttacatttaaatcattctattaaaattttggtagctgtcagcttgctggtattacattgtacttacaaataatcaacttttaattaacgcattttaatttcaataaagctagtttccatggataacagagtaaagagaaatagttaataaaaaacataagaatgaagcagcatacatttacggatttgtatttttttatatttgcagatacattttcagatatttggattaggaatttagaaattcattattgatattctctattacat

SEQ ID NO: 133557 - DNA, 1689 bp, Homo sapiens
ccctgggtcactccaagtgtgttctcgactgagggtttgtgcaccagcttctctgtcctctggatagcccatcctctggatcctagagtggtcttccttatgcctcttttcagagtgtcagctcagatgttatttcctgaggaaggactttcttggctggcactctttttactctttgcttctaattcattctctgtcccattaacctgttttattgtcgtcattgcacttaccattgatttgttatgcatcactttcccttgactagctagtgaaatctcattcacttttgtagccatgaagcctagagcgataggtatctcataattttcaatacgtatttgtatgataaatattcagtaactatttgttcaataaatttgcagtaatttgttcataataattttccatagatgtttgttaaatactatgctctgggatattttctcatttggatattctccgtacaattttgagccaagatagaaaaggaagcgcatggactggtagaaaatatacagttctgggtttcacttatagtatgatattaggaatttcatttaggttttttcatctgtagaatgcaaggctggagctggcctatttattttgacgttaatggaatttttattttaaaacttggggtccttttgtgtcatagttatttttctaggtttatcacctccctaggcttgtattcttttcctgaaaaaggtaactaaatatagtagatgttattgaatattcgctctgtgttaagcatttacatgcattactttgtttaatcttcacatcaacctcatgtggaaggaaatactgttccagctttacaaataatgaaaccaagggctttgaagaggtaagtcattttctgaaggccacacaaaagaggagtggcaggactgggatccaaactccagctgacttcagaactcacacatttaaccattatgctacacttgtctcttatttgttctcttgactctgttctttctttcacactgtcatcaataatctctttatcttgagatccactgataggattgtccagccagagctcagtgttggaaggaaaatggaaactgggtatgctgggtccacatactaagtggttagtctaaattgtctgaattatattagttccacaggtcagttggatactcttgactcatacgttgttgcttcctgtctgttgtatcttactcttatgaacaagaactgaaagttgttataaacacagctgttaaggcaggtgttttaacccagtgtccttggatcttctggaatttcatgcttgggcattgggctgtcaattaaatgcctgaattgcttgcagaattgcctgtgtgtgtgtgtgtgtgtttggggttggtaggagaggagtatgtatagtttttggaggagagtgttcacaaagggtcctgtgacacaaacaagtttgaatccatgccttagtagaataggattgtgcaaaatcctgatatgaaatagcaaaatatcatgtggggtgcatgtagacaaaaaatatttgcccgtagcagcgtggggacacattctaggatggttgttcagaaacttggaaatcaggagtttacttttgtaggagggtttcttgattaagaactattgttggtactctagttgcaggcagcagtaggtgaggcaggggacatgactggtggtgaagac

SEQ ID NO: 133558 - DNA, 1023 bp, Homo sapiens
caggagatataaacaagttagaacttacagggattgccattatgttgtggggagttctatctttgaaattacttcattgctttgtgataagctctatacttctctgcttctatttctctatcttgagaaaaccttgtatgcctgacttgtgaataacaattatttcatgagatagagtaatattgcaaacttaaaaaaatggttttgactaaatagttagagctaactgtgcctttgaccccaacctcttaagaaaaactcagaatggtacattcttgaatcctttttaaggcagctctatagctagtctgacccttgtgattctcatgcttttttttttttcttggtagattcataaaaatggtgagagtttatctttgctcagattgttttctgtgaccatcaagggcagtgccactatggtcccgaagcaaagtggcagtaatgttgctttttttctttatttccctagagtgtttctgggttgactcaaagcaatttgtagacacagctctgcacaaattaatatctgggagaagaaacagttgagaggaaaaaacagtttaagttgagatctacttggattgaaagctcagaggttgttcttgggtttctttcagctaatagcttcagaatggcctctgagcaaagatagatgtcgaggcaggctttgttgtttgttggttctcccttgcaggcagaggctaccctctgctatcaaggctaaagcattccaggagctctttgcaggcttccttacagaagaactgtgggcaagtgaccctatccaggtcagcgagatataaaaagatgtggttttcttcttaacagaaacccatggagagagaattatcctcccttctgcattttaatatggttatgtgaaggcatgaggtaatgtgtggagctgtggcagccatcttgtgatgggaggggatgggatttgagggatgccacatgaatcagggacccagagccctgataatgttaggtcatctatccatccctggacttgtagtgtga

SEQ ID NO: 133559 - DNA, 2705 bp, Homo sapiens
tgctttggttgttacttgccatccccttaagaccagtccagagatttggaggactacagagatctgtggtttgtttagcttgagaagcttatcctttcagtgataatcttacttggattgctctaaatgcatgtcttctccctatagtaaatctcatgttgtaagtcatcaggaatgagttacagataagcttagtttgaaaagtttcttcctttgttctctttattcttgcttctttccatatattcacttaacctttagctttttctagagatatttgttaaagtaaggtaagaagggcacatcttattttcccagcctctacaactacagagaaattgaatgaatagtagagcaaacactgtatactcgtcacctagatttaccggttaacgtatcgtcacttttgttttctgtctctgtttatatactcatacaaatacatgtgcactttttggaatgtgctgaactaattgaaagtaaaaggcaatcatgctgtttcaccccctaatatttcagtgtgcttcttctatgaacaaggacatcttcctgtataagcataataccattaacacattcctataccagtgtgacagctcataatcatatttctccaattgtccacaaaatgtccttaatagcacttttttattcaatccaggattcaattcaaaaattgtctttgctgtcatgtctttttactcttctttaaatcacagtgtccgaaagcattttgctttttaagatattggcattttgaagattccaggccagttttctggaatcttccacagtctacatttgtctgtttgtttctgattgttttctcaagtttagatttcggttaagtgtttttagtaggaatactaactaggtgatgtgtatttccagttgtatcatattactggtgaagctaggtgatccatggggtgatacctgggcactatgaataacctgtttccctgcaactttttacccagtggttgtaatatcgatggttgagtctgtcttgcattagttaatacatttgacatggtaaaacagtaaattttaagttatttctttcctttcaaattaatattctgtaaagaagagcttttcctgttttctcctctcctcgctccctcactctctgtgcatatgaaaatgtgggcttctggtacctttccttaatactagcagtcaccatttattgagtgtttattatttgccaaacactgtgtgatatggtttggctgtgtccccacccaaatctcatcttgaattatagttcctacaatccccatatgtggtgggagggatctcgtgggaggtaatttaatcaggggcaattttccccatgctattcttgtgatactaagttctcacaagatctgatggttttatgaggggcttcccccttcactcggctctcatgcttctgcttcctgctgccacgtgaagaagggcatgtttgcttccccttccaccatgattttaagcttcctgaggcctccccagccgtgcttaactgtgagtcaatcaaacctctttcctttataaattacccagtcttgggtatgtctatattagcagcatgagaacggactaatacgctgtgctaagggttttatatggatcatgtcatacaattcttccagcaaccttgggaggtagattttgtaactaactgttctcgctttttacatgaagaaacagagcatcagaaatgttaaatgacttgttcaaacaggtaataaggattccagtgactctgaggccacttcattgtgatgcttcccaaatgtcagccagactgtgctttctcacacctagcccgacttacagacaggagcgaggccagcagaacaactgtccatagtaaatagtgtcttcacaagccaaggagtatggctaccagcccagtcctgggcccttccctgtgcttgctgctctatttcagagtctgttgcctcttcctttttggctcctttcaaggtctgctgagtcttcccttacttctctcctagaatggaacagtgtctcctggttggattgaggcacacgtgctcagagcgagcagctcacagcttggctagctcctggtggatgagtagtatggttgtgggcttgggagacagccagccttgaacttaggagctggcactggcctgagagtcattatctgtctctagtccttggccccagagtgccctacatcttcacctattttcttggggtaccaaaaactccattcctgaaaatgttttttgaaaatgtgttataacctataaagtcattattcttaatgatgctgagattgtctcaagttttgccagtggggatcccttcaatttggctcattgtccttttgacacaatatccgttagtctagatagctttcttgatttctggcacaagatatagcaggttcaccttgcacttgcactttttttagaaaccaaaatatgagcacaaagtgtgctcattgctactgagatgttgttgtttctaaggaaggtgcgtgttttttgagaattattctgctgttgatagcgtagtagagttggagtgggggtgaacaaggaaactgctgcctggccttcaattggaaatgcccaaaattcctagggatgtcagtgactgcagctctgtccttgctggctcctgcttggtcaatgacttgtcagtcccttgtcatcaagcagttggggacctttgattac

SEQ ID NO: 133560 - DNA, 1435 bp, Homo sapiens
attaattatcttaatggagtacttacttgcttaagtttaaagttcactccattttaatgtttattttcttgagtggcccatcaaggaaataggaagaagtagtttattttgtattgtggtttgagataagagaggtttttatttattattaattttaagtaaggcacccaaagataataaaggcctaggaaggatagtgagaagaattttgccatgatacatattttcctcaataggtcttcctcagtggtggttatgtatgtacgtttattttaatactctagtctatgccctctttaattctttggcttgatctttgttttgtttttcttctaaagcctatatatatatatattttttttaacctgctagtttataatgtatcttaaattacatccgtaacaaatctgtgttatactgtgtactcttaatgtacatttcccttccttttggtctttaaaaagcaaggggttttatgtttcttagtgggactgtaagataaagtagaatatctttgcaggttaattgctctgtaattaacccagatggggcagagggcagaggacagttttgacttaaccctgttgggaaacatcagcaagctttcactttactgtagagcaatccattagattatggtactctcagctacttgactaatatccagagaaaccttactccttttccagggaatcctgagttcctctgttgataagatgacttaatagaaatatatttttaatgaattcttgacatttgataaattaaggccatttattttagcagagaaaaaggtgaagttctacttagccattggtgacttactacttttatttaaagaagatgttttctaatatgttttattgactaacccttatcagttataaaatacctgctactctagttctaggctagttcctaaggtgaaaatttgcaaagaagcttaaaaatgaccactaagtacagaaaggggtctcatttattaatgtatacattttaaagcctactgtaatattttaatatctctgtcatatgccttttggtgacttaatttcattttatcttatagtttaatatttttaaaacacttgataaaaattgctcccttctacaggatgcctgagtataatttttctgttttgatattttgtatatgtataaaacggtgactgataaacatgaatttatggtagctgcctctcatttattcttctttaagatcaaggcatatactattaagcagtatgcctgtaggttggttgttaccattcataaaatctttgaaaggactttataattttggtataataacaaatgaaaaagcttctctaaatgcaacgttgtatgctggtttggattctgggacagaaaaatgacattagtggaacaactacagaaatctgcataaagtctctagtttggtgaatagcaatga

SEQ ID NO: 133561 - DNA, 1049 bp, Homo sapiens
atagatacatttttaaaactatcaagataatgtgtgaatatttcagggtctgcagttagctaggatttgtgagatgtagactcatagagcttagattctaagaagggaggtaagaaagatgagcatgcaggatcttaataaatgcctgctcattgacctctgatctgaggtagaaagtggctgtgtgtccaaaacatacacaaggagtattaggggaatttagaggagaaagaattggagctatttctgtttttgaaacaaatttgccatatatttacttcaagtccctattttgttttcttcatagacgttattttctgcactgttaggaaatataattttgtgtgcatactttttgatccccactgaataacagtatgtaaagaattatgaacatgattttggccacttaaatgaagagaatcaccttatctcaaaactacccagttaagaaaaccttcagcaggacttggagcgtgggtggggcttggttggtggagtatctggatgtggctcccattttccattttctgcttgtaaacttgcttttcaaagtgttcatactttattctattgactatattttaagtgcatgtagccagaacataggtacaagtcagtaagagaaaagaactaattaatactgtacttggacttttgtagtcaaacataggaagacatgtgggagtggaagaaaataaacctaatttggagaggagaaaaaaaggtccactttttttctctgaggtattaataaaagcattttgagatttttcttggtggaatgatcgatctctctctctctctctctctctctctctctctctctgtccctgtccctatctctagatattttgtgaaattttgcttggaaagaaaattatagaagggactatttggctatcacaggttaggcctggaatgtgatttctttaaaggcaaaaactaaaattcagtcactacaaaatttaacctgagaattactcaatacttgttgtcatacaatattgctaagcagggtttgagttgaagggattcctattgagtaa

SEQ ID NO: 133562 - DNA, 1147 bp, Homo sapiens
tatcttaatgctatggtacagagttgatgcatgattgtaaatactttgaaaaagtctataaggagcacagataataagaatgtccagctttggttcttctgaaattgtgtcaaaggtagattggtactttatgaatttggttgtgcagtattaataattaattttacagcacagttgacatctgtgtaatttattatttagcagagatcaagtttgataaatcagtatgattttatgtaaactaactagtacttttcttttcttcttcccaccactttatctgcttgtgttgctgctgttttgcatatagacagagactccatcaaggtaggactcaaaatttacagactaaggaatggcttaaaagggctgtaaatgatttgaatgaatctagtaaagaattctttgagatttagagaatgatttcattggttagtagtggttaactgcatttttaaaattactttcaggtgtgtggttgattttttttttttttttttaaaggtcccatttctctatcagaatcagatttgttgacccaggttgaattgcaagatctggcttgcattgctcattttattatttgccatgtgaaaaaaaaataactgcttttcttcacttaggctttggctgtaagataacaatgaaatgaattaaataaattggtttgtaaagagatacatattagtttcatatttgaggaaacagctccaacctacaaaaatatttgtttaagtgaatggtgcatttttttttttttttaccactagaaataattttctcttttaaatttaagtgaatttttttcaccaacttttctttcaaattaacattttggtatctggtataacaagttaattctctttaggttttgcatctgtcttatctgccttttgtatctctttatagacaagttgtagggaaagaggaaaagtatttaaggtctaatgatttgggtatgcttctatacctccagaatgggatgtgctaaggatacctgaagttatttagtaagcaaacaagaaaaataggctgccatggcaggaaatgagtaaggcatgaaaattaatgtgatcacttatgaaccagacacaatataaatacaccattgtaggccgggcttggtggttcatgcctgtaatcccag

SEQ ID NO: 133563 - DNA, 1525 bp, Homo sapiens
attttgccttgatttattatgggatggcatctataaatagatgttttggttgggtaccattctcaaatttgaagttgtattacgtcaggtctgggactgtcctatagttctacaaggtgagatagtttgcttatttttctgaatgtgttctgtgatgctcagagaagcagttgtagttgcttgttccatcgatcgtcctcccataagtggttcctggttaagaggggctttttatgattgtctgctgtgtgactctagatggtttttatcagccagagcgtgccagttgcctgcagctggagtcgagcttgtatgaaataatttatttatgcaagataatgctccttaacatttaacaggtaatgaacgtgacataaatttccttcttgcttttaatttttccctttcctcttctaatgtgcaaacaggcagctctggtactctaaataataagtaatttttggccatctgtcaaaaggaaatttcaatacaaatttaaattaatggtgcctgaaattttttatagctcctctaaaagcctctaatgtgcagaaaattcggaatctgctggtagtaattagtgttgcatgtaatgaggatgtgggcaatcttatacagccccagtggaacattttgatatggtagcaaaattttgatttatacaaggttgtagatgggtttgattgtgagagatactttaaaatgttttcttgacgttacagattgttaaacagggcagatttcagaatagcttataaactataaatttaaacttactgtaaagatttaagtaatttaggtactttacctttagatgccaagtaaaattcacttgttaacatgttgggccttttttttcctttgtctttctcttctgggaagttctgtggccaccaaattgcacgctgttggctttattgatctctttttctatagctcctgtagccaagttcattcctaagcctgttatttgcagacctgtatctgaagtttttcaacaaaggtggagaatgtaaatatggatctaaaggagaaaacactgtaggagcccaagaatcagtttccttgatgatgagaaactagaccagtgtgtgttgtagggctgttgaagtcaggagccatggcacctgcagccttccttgcttgtcacttggctgtccagtgactccatgtgcccaacagtaagtcccacatttgaggcctgaaaatgacaagaaacacagactgtgatccactctcacccttaatggtagggcagaaagcccaaatttatctctccaaaaagaatccaacgtaggctaagggggagtgttctcaccatcttatgtagtatcaagaaccatttctctcatccctagaaaagtcgtaagtgacaccaaggaaatgttttctgaggtgatggaatcttccattgcccaccccctctcattgagggctgaggggtaaaagtgatgggctctaaaatggtgtcagaggggacattcccttgtgctgccaggagcttcccacttgatggaggttccag

SEQ ID NO: 133564 - DNA, 1205 bp, Homo sapiens
actccctaactcataatttccttctcaaactaatcttcgatttgtcctcttatacaattccacaaagcagattaagactcttcccctcaagaagctaaaaatttaggggaagagaactttacttagttagggcatggggaatcagggataccacctaataaggaaatagaagtacttaatatatttttaaaatcatattttaaaatatgtttttaaaagcctatcttgagcaatacttatttggacagtggatttgtatttcaaatacatcatagcctgtgtttcaaggttaaagaatagaaatagaactctacctttttacggtcagcatacatttctagatatcttactcccttgattattggtaaaatccatttcattgttcatcaccaatgtatacagacaaacctagatttcattctgtcccattctcccatcataaggaaaaggcttttcctggtgtaattcaccatgaagtattcttgacaccacaaggaagcacactgaaacatttagaatatgagccattctgtaggaaggctatgccaggttctgcaacaatcctctctaccactgggtaagctgaatatcaatagacaagtcacttaacctccatggatctcaaggctgtaactcaaggcattcttccaagtatttggaatgtagctattttcttatgtgttatttagtcctgtcctagaaacaaattttgaaataaaaatcttataccataggttatgtttcagcaataaagttggccataccattagccaagtaaacacagtggttagaagtgaggaaatcatttgaggggttcggtggtagggtgataaagtatgcctttcaagcatttaacgttataactctttcaatttcccaaaataacaaaataagatggtaatttgaaattaagtgttttagcattgctattgctttttaattatttgtttacaagacttttaggtatttatttctaccatgtattttactatttacagttatcaaggaacagttaagaagttttgttctatgaatctatgatgcagtaatttgttcagtattaattgatacctgcctctaggcatgtaaactgtgtgaaacgtaacaggtgtcctaattctagaaaaatgtgtggtaattgtttgtttgtcaaacagatgaataaatatctttagggcatagctggtcctcaggtggtgagcata

SEQ ID NO: 133565 - DNA, 1178 bp, Homo sapiens
acgcttgttttgcagcaccctcctccgccgatcgctgaagcagaacaaatactaattaacaggggcggcctggttggcaggttggctttctccagctgatttggcaaaatggtttattcctttccctccataaaccatccctcttagttattagacattttcatactgatgtttagttaatttctaattttcttaattaggatgcatttcatctcttgcaaaaatattataacgtttatagttaacatttttaaaaatttagaggggcctaagatttaagttttaatagttgacgcttgaatttcaaaaacatttgtttctcaaaatgtagataattcttccaatggaattattccaaagaatcgttcaccatcttttttttgtattcttacagtaacactaaccccactctggaaaaattataaaatcactcatggggtagtttaatactcttgttcttctttcttgaattatttctgcaacactttcctctgtccaacttatgtattttgttctgtggtgatttgaagtagctcagctatcttctgggttaaaagactttctacgcgtaggacccaccactttaataagggctgtaattttggacttagagagtcatatctgattactgccatggcaactgccttgtgaaagggttgaagagaattcaggcttcatgagagagtaatagaaaggaagtttgctgaggagctgagtagtactttctgaaagagtttttgatgcttttaaataaggttgctgttaaatgaagataatacagttatttcaaaactcagtaatgctgcttagacttggcaaatcaaaacttgaaatgttagcattgaatacttagttgtttttctttgaatctaaatattgaataaaataagtcacattgctttaactttatcagattattcattatttagaaccaatccaattatttttgtatgtaataaattttactgcttaaaaacagtgtaagctgagagttctagtattgtaatgtaacataagaaattcccgctcatttgtgatagttggaattggtggttaagtaccctcctcctcccaacccctgggttcagttttgcctctagttttccttcactagaaactggagaacaacacacacatacatgtaatccgctcacgtgcggtccacctttcttccttca

SEQ ID NO: 133566 - DNA, 1602 bp, Homo sapiens
tagattttttttttttggtcacggaactggttgagcaatataaacatgggtcttcccaaaatggacccctaagagatgcaatttaatgtttctagatagaaagttgtggcagttttggggggaagggaggagtgcttgaaagctatgcataagggtgctctttataatactcagaaggttaaatgtggataaacacaaaacaaggcttcagaaaagccacactattattatgcagcgtttctcggactatagtccccgagacgcacttcataaagccaataaagcgcgcactggtggtctcccgttgccctagcaacgggccacggggcacagtgtatgtgaaatgcatgaacatctgtgaattaatcttttttagtttgttcttttcttggcactgattggaccactcgggcttgtgcctgtgacactgcgtgcagaggggtaatctggagcagtccccagggccttgccctaaagtggatagtggaatggaaagtgaagggagatttatcccggcagtgcattcagcagtgcagggatttagcctgacagcactctcagcgggatgttattagcttactttctggtgcatggggaaatgaataaaaatttttctagtaaatctgggcattattgggtttattgggttgccctgaaaaaataatctgcagagaaaattgaaataatcacttgtgtttgtaccacagttatcaggacttgaaagctgagttattccacatccttggcccagcccccgcctcagggattataaccaaaccatattggactgtcactgctctgaatgagactcctgaattggatgcgtaggctggaatctgatttgatgataaaatctgttagtaacctagtctgaccttatttagggaaattttaaactaagctggtgacatttttgcctttgggagaatagagcaaataatgactaaatacgtaagcgtccaggaacagtacttttgttagttagtcccccacccctgacctcttctgttctttccctcctcctgcctcccgctgccacttcttccctccctcttttcaaattgccatcctccttctagacttcagcatgactgtacagactgtgttcagttcctcctgtcaataccagatgttcacttgtaaactgttttgctcacccttgtcattttcaattcccttctcttttcttccttttttctctttgtgcctccctttttttttctctctccattcttccttatgggtcaaccctctttcctggggagaaatgaaagaagaatattacatatgaaatgtttcacgatggatgtagtctatttggttaattgttagggtgaaaatttcctttataacaaatgtattaaaacagaagttcgattgcattagtactgaaaggtatttaggtgggaagaactccttgtcaattctgtatatgttttcctttgattattaaaaaggcacagctatacctctgtatgtagctgagagatttttctgatttgttttttgttagacaactgactaaaaattatattaatggttcctgactttgaaacctgttggtattgacagatgaacttgcagtccaaataaaatatttaa

SEQ ID NO: 133567 - DNA, 1025 bp, Homo sapiens
ttctgagtagaataaaatatattaatggatcgttcctcttcatttctcagagcttctggtgagtcctgaattctttaaaatgtgcatataaaaccagtttatgatgatgggaggactagctctgaaggcagtcttcccaggaagctgcccgggctgatgtgcaaatgcatgcaaacatgaacctttagcaaacactgacagtaatgccagtggcaacgttctgtcgactcccaatcgggatatgggccttttactcgaattcagaaagtgttttgtaggaatcggcaaaacaattgaactacagagctaaaatatttatcatctgattttttggcacttgaataccctcacttgcttttcaggtggtttctctgttttcaaaattagtaaataattttatttgtttttttgctgctcccatttagctctgatgatattttcttctttcaagagtatttttaaaaattgccagctttctagttgttacttgaagccagcttcagaagtagaacagttaacacggattattagagacctttagaaggaagtaaaattctcaaattttatttctatgtcttggactgttatttggtttttgaaagcacaattttttatgccaagaactaaaaatctgtagacactggtggtaaaaagtagaaattccacaattacaagtggcagtgagtaaactggctagagtgagaagcaggaatgaggtggaatgagtatgaatctctgctgtttccttcatctgtgtgtgtgtgtgtgtgtgtgtgtgtgtgtgtgggtggggttttttttttttgttttttttttttttttttttttgagaaggagtctccctatgtcacccaagctgctgctggagtgcagtgtcatgatctcggctcactgcaatctctgtctcctgggttcaaacgattctcctgcctcagcctcccaagtaactgggattataggcacgtgccaccacacacctggataattttttgtttttggtattttttagtaaagatgtggtttca

SEQ ID NO: 133568 - DNA, 2705 bp, Homo sapiens
gagcaaggtaaagatagtgtggagcttcgaagtcaggattttctacacgaccccaccctcaatctggtccacatagtaaagattggatgctagtgaaaatgccaggcaagggttaggcctaaaaggattagtcatgaagattcgagattcttaaactaaagattatcactgggaactaactcgggtcatgatttctcttttcatctgcctttgttccttttatgcacttccacagttggacagctggaagtgccacagaaatatttgaagagccctatttagtagtttacgtgaaaagtcgttgaataattcacataacaaatgattagacaagcacttgtccatctgactgaattattctacatgtttgcccaagcaacaaaggagaacagcgtttcctcctacagagggtatacagtggtggtattgacccatctagttactgggtgggtttcagtcttttgttgacattgttgttaatgaaagcagcccagacgagctgtgagcagctgggctggataattgtgaaggattcatgcttgttgctgttacccccagtgtttgcagtgggttgtttgctttgacttttgttgaactgttgacaaaagcattagatacaaatgggaacaaataaagtggtgagatgccaggagggcttggcaggagtagtggttttctttctgactgaagtggaggatgtcggaacgtatctagatgggaagtggaaggtgtattcggtgtgtgtgtttagcagtttacccttccgataccaaactggaaaattttgttgcttatgtaccttggctcacagaggtgagagaatcaaggaggtcaccgtatcttgtaaccctcaaaaagccacgctctttaccatgccagtcaggtggcttgcaggccaagaatgttacaacagaaatagtttccagattccccctcctcaacttaaaacaaaattttaataatagaagtattttggactggggagatgacaggcatgacgttgaggtggggaggattaagaagaacagtatatgctaaaatagtatagctagcaaatggaagtcatctactggaacgcttttaatttgctttaaacaaaatactcttttgtatattcaaatggagagtagctcagctgttgtgaagccagaaaattaatggtatttttagtgaaatagcaaaagcatgtcaacaatgtagctgcagatgataatgctggcattttattcatgaggaattatcaatgcaggttactggacaacatagtgtgactgaaaatgattgagtgtcggagaagcccgccatccttctgctcgattatttcattttgcatttaggcttccccaggcttcatttgtgcatgtattttccctatcacaaaccaaaatataaagtctccctggcttaggattgtatgcatattttttcttcctttaaaatgtctccaaatgaaagttccccttgagtattgactcagaagctgaggagttcattttcagtgcacacatggtcagtggaggtggttaggcttcagagataggtccctctgaacagtttatctaaataggtctatggcagttgtttaaaagccagcaaaactcaccaccgtttgatagatggaaattgtcacagaatatgccttctctgacaagtagaagatttggaataagtagtgaggccagaaaaatgtttaaaaaacatgggcaagaataggcagaaactgtatttaggcaattaaaatgtcttttggaagagtgcgtttcagtgatagttgaagagttactaaaaatatatttgaatagtcaggaaaattaagctatgtctttttttttggcctgcagttttggtctgaggcgctctgggcaccatcactcacattgttttgttggtattatttcacctagtgtctgagcaaggaagaggctaaggcttcctttcaacattctgttctccaacctcatttattggattcccctctgctactggtgacaaaaagaatggattatacctttgtgtaattgtgcttgttccagtacttcatgtgaccaaatctaggaaagaataggaatttactgagtttgttaaaagtgggaatggcccaattgttttagtctttgcagcatcttaatcctagagagcagtgaccagtgagaagaggtcaggattttctcagaaatgggggcatgcgttacatggctgtgctccactcaaaaaagttacatgaatgctccccacgtttcagctctcagaagatattttgcttgtttcagtactagatggtcaaatggtaaaggcctagatctgaagttcatgaggaagaaacccctgaaatgacagacactgaatggggataaatgcatctatgtgattaagtagttggtagttcttccagggtttattactcaagagaggaggtagggaaatcgtgcaagtagaaaacttgaaaagactcaccttagaggggatagctaaagagtaaaatgagtaacagttaaataagaaaaaaaaaagaaagaaaaaaaaacttgagaagacaataaggcaagaagtttatcaccattaacaagccagaagaaagaaagagactacaccgacttgactcagcatgactccaaaattatgagaccctgggcaaaagcacaacaaaaggctcacaaatgaaaagaatgagttcaagagaaatttacttaggccacgtcaaaaag

SEQ ID NO: 133569 - DNA, 1306 bp, Homo sapiens
atttgaggcggttcattcttaccaaccgccagacctttgtttttagagaagtggaatcttcaccaaaggcccaagaagcctttgtggggtcagctgtgcttgagaattcttgaatctttgttactctttatcacctacctgagatgccacttttgcttgcttagctcaggtttggaatttgatttaagagggattcacatttctctgtttatcagaacttagcatcaattgtgtttctttgtagagatgtatgttacttaaaagataagggaaaggagcatgtgtttctgtagctcagaaaaccctaagaggaaggaccagataaagtggaaactttctacagcgacaattagagttatgttaaagaaacaagtgcaagtgagggcaggtggagcatagaaaactctcagcacagggactcaattaaaaatgcttttaaaatgtaattccaatcaatgtggatagtcttagaacattgcaagatgtgtgaaaacatgctttaaatgccagcaaccagtgaaaagggcacggttttagaaaccctgctataaattatgtgcctttggctttcaggaacgtggaggatacatcgctgaaatattcagaataaatatcagagagaattgtacagtcttttcattctgcaaggaatgaaatttttaaagagctagttgtgtttggcgtaagatcctgaaatttttttatagtgtcacaacatttgttttgggagatgtacaaatcaaatctgattataacaaatattataacaaaaatatccctctaaccaaacaatttctagaccccaaccagtggtccacttatttaaaacaatattgaatgtaacccaattccattaaggcaaaataatgtgagttagtcttggagtttttctttcatgagttccttaccttttggaattcatataggcaattggcagtgattccaaaaatgtttatttacctttggaactatatgattttaaaagtgtagtttatctttcaaattattttctgcatagttccattttacagtatctgtttttgtgggaagagactactccaaatgaaattctggtttctgattggtttcctccttgcctattttagtttcttatacttttatacctaaaaagtttttcttgcatttaacagagtaatttccccctaaaaactattgaagtagtagcataatttacatgttacttcttgtcaaccaccaaaaccacagggtacaacctgatcaaatacactaaatatgaaacaaaacacaggctcaaaatagagtagatggccattgctgcatgtga

SEQ ID NO: 133570 - DNA, 3226 bp, Homo sapiens
taatgtttcctgactcaacctgtccctgggttcagaacccagggatcttcttcctcctaattacccttgccctctttagtcctcccaggcttcaggcttccctccaagtggggatcccttcccagataaaagagttgagaagtggtttattgcttttctcaatgtttaaggaaaaccactagaaggctgcttagtatagagtgaaaaccatgtgctttgtagccgttgccatgggctctggagacagctctgcccctgctagctttatgaccttggacatgaataataattagcactgtgggtgcatatactctgtgctgtcatcagaacagcccattaaggtggagtttgctattatctccgtgttgcagatgaggaaagtgagacacagtgagactaagtaagttgcctctggttcacccagaacataagtgatgagctgactaggattcagttagtcttcagagcccatgctcattatctctattctagggtcagttttaaaccctcatctggatgtaccttacttgatgtaggcaaaatgcaaagattagagataggaggagccccagcaaggggcctgccacgtaggaaaatacttaagattataggagcttcctccttttcctgtcagatcagcaaaaatccaaagtatcgattttgtatatgtgtatttgtagtagtgctgttgtgatgtgttcttttcatgtgacttgtctgtcatatgtccttagagtgtaaacttgtcacgtggggcgggatgttttaatacttcacaatttttaggaccttcaaagtggcggttcaagaccatttcactttggagcattttggaatgtcatcacacagtcccgtgcgtgtttttgtgttaaatttctcatatccaacagatgtatcctcctcttctaccagttcagaatctgctatctgattaattaaaatgtatgcagatgaaaaatctgacaaagattttaacttgtagcctcatcagtttgctggaggttaataggaatattcttgcagtaacagaatcccccaatttggattttctagcttgatgtcatttttatttcatgaagaaaaaagggtagtttttgtttggttggttttttttataaccactaaccagatgtagtgataatactttataacttaagtgtctataatttttaaatctctttgtcctttctgcccttccctaattgatgaacaagcacttacacttgcaatgttttggctcttgtttcctatcagctgacttttggagatttacagcatggattaagtagggaccacttgcttatcctacttttctttgttttcctttccagtattccattccctttttccctgccatctcctcctgaccctccagaaaaggacatcttagtaccttagttgggtggcagtcacagaagaaaacttgattccagtgctatatcaaattgttggggcagcctaaggaattaagttgagggctgcatatcatagtgatttatactttaagaataccaaattggggcccatggctttacaaaggcattttcttatattaatttgtgaatctacatgaaaacaattaagacatggaaattaaatttcatttattcttcatttaaccaaccactttaaaacaaacataaaatcctgaaatcagtatatccttaaaatccagaatgtgtaggcattaactatttgtgactggtggcttaatcattttcaaggttcttctttgattcactaagcactgtcactgccactgtggttggtcattttgcttctcttttaaacacagtcctcagctttacattagggagctaaagtgaggtgagagataatgtcttagaatcttataccagttaagtatcccttatccgaaatgcttgggactagaagtgttttggattttggtttttttcagatttgggaatatttgcattatactcactggttgagcatccaaaatctgaaaaatctgaaattttaaatgcgcaatgaacatttcccttgagcgtcaggttggtgctccaaaagttttggactttggatttcagattttcaggtgtgggctgctcaacctgtactggccactttgaactgattagataacaggcatcacacaagatgcttgaagctagattgccctggtagagtgacaataagggataatgactttacactcgttttatactactgccatatttgatgatctgttaattgccagtcatgtttgtttagatattgtttagtcactgtgcctccccaaggcctttctggcaaagggcacaacaaatagagtaaataaattattgcttttgttactactgaaactattttggctcaatactctaaattaattgttttcatgtagattcacaaattaatataagaaaatgcctttatgaagccatgggccccaatttggtattcttaaagtataaatcactatgatatgcagccctcaacttaattccttaggctgccccaacaatttgatataacactggaatcaagttttcttctgtgactgccacccaactaaggtactaagatgtccttttctggagggtcaggaggagatggcagggaaaaagggaatggaatactggaaaggaaaacaaagaaaagtaggatatgcaagtggtattgtattttgttttttaaataaaatatgtggaaagagagaaaagccaaccagaaatatggtagaaagagcactggactagattcaggggaggcgtggccatcgtctagccttatctatgacgtctgttctctctgagcctcagtttcctctactgcataaccacttaggttcttctgatgtatgatggaccctatgatttattttacttgatatttaatagcagagctttattattttaaaaaatcctcaaattattagtttgagctaaatgttattctatatagatattctcagtgaaatgttggagctgcctcagacatgtaaatcaaagatgtgttcagtattttaatttctttcatgtgtttgaagatgcatttcccatgcatccatggttttagccatgaataaaacatagtattatggaaggtataatggtataaaatccagaaggatagatctgggctcaaatcgcagactagagatagatgacttagcaagttactcagttttccccaactagattctttttaatagtaacagtagcagcaataatatctatcttattgggttattaaaaga

SEQ ID NO: 133571 - DNA, 1461 bp, Homo sapiens
cctggcattttactcaattctcagtaaatgtatcatgtattcaaagtagtaattttggctaattcaaaaactatttgcatgctaaaagttgtagtgcctagtattaatttagttcgtggcctctgtatgattttctgtccttttgaagatgtatccatgacagaagtaataataagcagactgctagagcatcctgagcatgtgtcatgggccaggcattgggctgtgtgccttatgtatgttgtctcattctaagatttccttctctttttcttcaaaatgttaactctacttagttgaaagtattggactatgataacagcagagacaagatgccgtggtagaaacttttttaatttttttgaattggtaatcatgggtcctgataacttgttatagttgtttcttcattttttttttttttttgtaaaacaattctgcgttttgaattgtgtataatctgagatggattcaattttttttcttttgtggaaacaaacttaattgagcttatactattccagaagttttaagatgtggcatcttcacaactatcctgtttgtgaattttgtaggcttgtcattgttttcacatctataaaaatgtggtcaatttgtggatgctcttttacttatagaatcagaagtgggtggtgtaagagattctacacatttatcaaactatggaactttagaaggaagagtactgaaaggttagccttaccaggtacttctggcgtaatttctctcttctattttgaatgcttctttatgtataaagatgaatatcaaattcagtagcttgttaacaaagcaactagtgagtgatgtcattgctaaacaaattcagtacgctgttttatacgtatgcagtctctgtctcagttaaagaaattagtagatatgtgaactataaatatattaaatgaggcagaaaaaaatcatgcatagcctcatcaagcatctagatgcataggtccacagataatgatcttcatcaagttatgtacgtgaatctgcctgttcaataattagtaccattcttttgtcataatcctgactttataatgaacctaatgcagtaaggccaaaaaactttgtagatgttaatctatgtacattgtatttgagtaaatgtccttgtttatcagcagactttcattgcaagcttgaattggaaaccacatacagacctttccctaatcctaacttcatctttttttttaaatcagagaaaaataatgaatttattctatcaataattcttaaaatagcttggtaataactatcatttataaagattaccactgtatctgagaaaaaacaatacacagtcagtaattctcatcaaaatcacctgaacgttgctttaggtttcagtggcactctagtttaaggaagtactttattattgtttttcttttttttttattattattatactttaagttttagggtaca

SEQ ID NO: 133572 - DNA, 1602 bp, Homo sapiens
ttttaaaagagaaaataaatatacaggctctttttaagatcaggcaggcccacagtcttttatccactattctgaaatccagaaagctctgaaaactgaaaggttttttttgcatctcattcataacaaaactgaacctggcttgaagtgatgtaaaagtgtattaatgtttgattatagactgttattccagcccctgttagagtatatgcatcatattgcctttaggaaattccccagatactgaattctaaagcacatctggccctcaaggatttcctgacatgccttttccaagtccagccttggaacttgtgtgcttaccttatctctaactctcattgaaaagaggcaaagcggtcaaaaaccttgtccttttcagctttgagccttcctgcattcctgtgaggggcctgcgttgtagtagtcgtttgtcataaatcagtgaagggagggaggaatgttcaggcaggtgttccaaaccagtcagccagcaatttcctgtccagtgtcctaggcttaaattaagccatgaaactcagttgcctgatgaaactgaagttatcaagtaacaatttaggacctttccccggcatttaaaatcatgagaatgaaaatgctcaagcatctcagggtggtaaaatgactcttggttggggttgcagatcacactatgcccacagccattatctcacctcctggatcctattgagagcatcctaagaagagaatgccagaaacttgttatgatcgttgtggtgacagtcttcaggttataaaaaaatgtaggaatacactacattctcctgctcttacatagacaaagggatgagtaaactatggcccacaggccaaatctacttcccagtttgtttttctgtggcctgtaagggaaaaatagtttttacatctttgacagggcataaacaagtaaacaaagaaaaaaatgtacaagaccttatgtgggttgcagagcctaaaatgattgttgtcaagctgtcaaacactttacacaaaaagatttgccgacctttgatgtagaccatcagtttaactcccagccttactgctcctatttttaagattgattctttccttctccattcctattctcctttgtcttcaagagttggctgactctgtggtcattcagggctcatagttacttttttgcatgaaatgagaaccctaaaagatggtttatgtcccctttttgaaatgtacacaggaagaaactcttaggtagaattaaattgagcgtaaacatgaagtttaaacttattttgatattcaggtgtggagagaaccagttaaagagtttacatggtacctatgccaattttacaaaggcaccattactctggtcccttaatcaacaatgatccatgtctaaattatgtaattctggaatatcagtataatttaggaatcatactgtgagccattctatttttttctaaattatgtaagttacatcaacatacaactttttatatcttgccttttaatccatgaactgataaggtgtggttaatctcactgatcttgaaatattctccgtattttgtattaggagattagtaaaaatcagttgagacctag

SEQ ID NO: 133573 - DNA, 1543 bp, Homo sapiens
ctagcttgactcctctagctttgtgaccttaagcagtcacctaatctcacaggagttctgtttgctcattaacatggcagtaataatactatccaaataaagttttgtggagggcatgtacaatgatgaaacgtgcagaaatggtattggtgaagctgtaatgaacttatgacgacagtttatcatttatacatatactgactcatttcttaagatatcacaaaccataattccatagaaagcctgagaaccaaaaggaatgaggttgctttttaatttacattattttcatctatttctaatatggatgtcttaaaaatgagaaggagtatttattcctataatgcatatcctcaattaaatggttatattagttaacaattactacctaagaacttcctctaaaccatactggtatgaaatcgaaagcatttgctacatctgattggtctctgtgttggctgcggtggaagcttttctctctaggctgggcttgaatttgcttatatgtctgcagtcagctgggtggtctagaacagggatccccaaaccccaggccatagaccggtactgacctgtgtcctgttagaacccaggctgcacagcaggaggtgagtggcggctgagtgagcattaccacctgagctccacctcctgtcacatcagcagtggcattagattctcataggcatgcatactctattgtgaactgtgcaatgcagggatctattgtgaactgtgcaatgcagggatctaggttgtacacttcttatgagaatcttaactattgcctgatgatctgaagtggaacagtttcatcccaaaaccaaaccactaccgccaccccacctccgtccatggaaaaattgtcttccatgaagccattccttggtgccaaaaagattggggactgctggtctagaacgtcttcagctcaactgaccaggctctccctcatgtatctatggtatccctctagcaggctagccaaggcttgttcttttggcactagtccagagtctaggagagcctctctttgcatcatgtgtgctactgtgccattggccaaagcaagtcatatggctgagtctagcatcagtgacagagccctaccaaatgtggatacagggaggtgtgaaaaattgcagccaatattgcagtcagtctaacacagtagttttagaggtaaaggaaagtctgcccaagtggtgactggcttgtagcctggcacatgcgtcatggttgggcccgtgtgcatgcgaacggcttggtaatttcagtgcttcccttctcatttctcatagctgcactagaaccgtggcagccttaccatctgactgcttcatgagaaatagcccacgcccaaatacacacctcttgtgtttgaaataacacaaagagtattgtttccaagacgactttgatgaaatgtcagctttccctgggttctaaacccatataagaagcattgttaccctcattcctgctgggtaatttgtatactgcaatagtttgtttgaaaacatgcccgttgttctttaaa

SEQ ID NO: 133574 - DNA, 1074 bp, Homo sapiens
ccttggcctcttccttgccctcttttcttgatgttgccttactgctctttgtacaggctggtttcttttcacaatacacaagtgtaatttgctgagcctcctataagaggcagtccttaaaatcagaggcctgtcttcaactatcagccctttgtgaccttgcatgagttacttcgtcccctaggattcaagtttcctcctgttcaaagtgaagaggttgaggtagacaagtgcttctcaaacttttaatgagcgttaaaagcacacgattcagtaggtctggcagtgagactgggattctgcatttctaacaagccctcaggagatgctgttggacagtggaccacacttttttgagtagcaagaggctagatgatttctctggtccctcccacctaaagatgagaacttccttcccttgttccacgttgagaaggcccaccttgctggtcttcacattttaatagtctcaccatctctgcacactgtctaccaaaggaaaggtcacagtatacttcgtgctgtcctatagtgcttataaggacctgccatctgcagttcttattttatagcttggccttctccccttcaacccccgaaagactgaaaacccactatctaatgcctaattagaattagccttcaggttacatagtttttgtgactgtttcccttggttatctgccattccttcatttcacagtaatggtagatttataacagtcctcataactgattaaatgtctcaattcttttgctttatgtggcgttcttgggcacttaattatactacattaaatggtgtcttgttgctgtcagtgcagttggattgcagtatagatagcatctttggatattttttaatatgttcctatcatacactttaagcttgtaaatagaagtgctgagcatgcataaatgtgttttaagaaattatttctttattactgtttagctgaactgatggtgacactaaacactgaggctttgatgtttatacgatattcttccccactaattaactgcactaatgaagttaattgtggggaagaatgccgtataaaacatcaaagc

SEQ ID NO: 133575 - DNA, 1828 bp, Homo sapiens
atttctctaccctctaattttattattagcttgacccactactccattttcctatatgtttccatatgttgctcttataagccacttctctaatttctgataggcatatttccttgatgaattcagactgcaaaaccaaggaaatgtgtatgtgtgtgtgtgggtatgtttaaaggcatagggcgtatgtaagtggaggctttgcaaagttgataagaattcttaaatgaccagtagtagaacaagaactccttctcaggtcaatttccctgtggtgtgtgttacatcaatttttattgttgttttttttttttcttaatcaggcagggtttacaatagcaataatgtaattcaaataagcaattattgtaattgaccttggcgatgagtatccttggcttttaccacagtttgcttaatacctgaggatgggcaattatctcataatgcccactttattgagattattgttttaattatggcactcaaaatacatcactttgtcagcattgtagagtcaagcatggaagcactgcattcagtattcagaagtgcgtaaagagcatcttgcctcatcttatgacatggttatgattgcgttttttctctctcccaactgtggttttgaaatgtagttcatcctgacgtgactggcttatagggagagaaagtctgggatttgttgctgagctaattgtgctctcagaaaggatgaaggtgacttgtgctgataggtaagcaggtctagttgattaggagtggtaattgatagcaatcacagtggcttgttgattatctgaatatgccttaggtcagaggttgtcaactttagaatcacctgggagcttttaagattgcctgtatccaggccacttacttaagcctaccctctctggacagcgtctgatttaattgttctggggtgggttccagatggggctttttgaaagctccacaggtgattcttatcccctgacagaccttagaaccactgcccggtcctttgaattatttactccttgctgatttgtctcattccaaccatgaccccatcccagattttaagactccttttgggggtccttgttgctctataccttactcttcctctctttctttccagacttagcctaagcctagccacctcacatgcacatgcttgaaatagcctcagtgcagatttgggtcctagtaatgctaattcttcccaagcagttccaggtctacccctcccataggaagtgtcagtgggtaaatttcacctcttcataaacgtgaagtgtcatttcttactaatgcctcattatgctcttacaattcagttttctcttggtcacataaatatggcttaacctttatctaagttttttgagtaaggatcagaatttattctttaacatctgtcttaagtactgggtaccactttgtggaaatttaattctggttgattagatcagtagttatgaagttcctagttgtttctcaccttctttgataaacctggaggatactgttcacacgcatcttgcagtcccttgattccctaaggataggaatattcttttaggttacctaagactcctgcttctttttttttttcttttttcaaatttttagacgggatctcactctcactcaggctggagtgcagtggcaccatctctgctcactgcagcctcccaggctcgagatcttcccactttaaccttcccacaaggtagttgggactataggaatgtgccaccactcctggcttttttttttttttttttttttttttttgtattttctgtagagacagggtttcgccatgctgcccagtctggtc

SEQ ID NO: 133576 - DNA, 1025 bp, Homo sapiens
acccttaggcagaatctcccccacccaacctctgtggtctagctggccctgtcaagcctgctaataacctctccagtctactctctattctcagtggaggaaggtcagtgggtatctgttttagaaatgttgtcagtggctcaaatgtctgtgacatgccatttgtttaatcccatgctcctggatacttgcttgtacgcattaggttgtgggatcttctgcgtttcaattactataccctggaagtttataaaccataagacttaccagatagcagactgttggctgtgttagcagagagctgtcctgcggtgggacatgcatgcacacatgccacacgtgtgcatgcatggaaagagagagacaaactcaaccacaaaagttgtacctctgctttgagttattttaatcttccttcatttgttcagcaaacacttatgaattgtccttgcattaaaaagtgcatcatgtccttcgaaccatatttagtattaaatagcaaaagcgcatcactgagctagcattctttttaataaaatagtgattgatcaaatggcattcacctcatttctctgtgtggtgagtgagagtattttcttgcagtccattttcagcatgctgctattactgcaccacttagcttgatgccaaattgcagttggctccattcatttctgtttactgagtagcgctgtagtgattaaatgtcactgggtacaccaagtatacaaaagtaattaacctaaaaggacatgttagaataagggtcaacaacctctttagcccacagtgccaccagcaagacagagtattgacagaggtattgctggcagggcaagggcggaggggggagtgtggagaacggaaaagagagaagcgaatggaaggagaaagagggagagggaaaggtcagagaaacaggagcgatagaccaggactcacaattgtctgaaatggcaagtagaatggagctaagatatttttcatcagtcctttataatttagttctctgacctgtgatcttt

SEQ ID NO: 133577 - DNA, 1042 bp, Homo sapiens
taaaaatttacgtaaagcaccaggtagtcatctatgacttaaatatcaaccaatgtaaacatcttccttaaaaaacaagtattatatctgtctgccttatatttggctttttctttcatcatctgtgtgtggtgacttactaaccagaaaaaaaaaaaagcaggggggaggactaaggatgtttttccttttaccacatacctccttgggggataaacatttcaaggagctccccagggtcactattctctaaatgagcagcacagaaaaactgctgatgcgtgcattcttccctgggtctgtcaggcaggattcctttaaatcctgtcttttcagtggtcagacttaagtaagatttgtttccctgtggtcacagacagctgaggagtgtgtgatgagagacaaggaaagggataacctgttgaaaactttccctcttataggaaagattaatttctattacaatttttaaaaaggtggccttcatacatttatccaacaatgaatattcattgcatgcccacccagtggccaggactgggcactgaccttgggggaggggcctgcatccttgattggtgaggagagcagcagtgaaaaggcaccagctttaactgtcttttcaacatagttctgaaaattatcttgtcaccctattactttcaaaattactatttttgaaggctgcctccctcctttggtgtgcctacaaatgcatatctcacacacacacacacacacacacaccactgttcttgtattacaggcattatattaagcactgaggatgcaaagaaataagacacaatagtgcatgacctttaggaatgcataatctcctatcttaatataatgaacataatatggtaacatgaagcatacatgagcagaaccaagttttgtgcccattcatttgttcagcagctgtcaattaaaacaccgaagtactggattttcgtggtgatccaaacgggcgtggtccttgccttcatggagcttctagtcaagtagatgagataaataatcaaaagagtagccacag

SEQ ID NO: 133578 - DNA, 1021 bp, Homo sapiens
tatcctaagtattttgactcaaggagccctactgaaaaacaaggtgtatatttcattcttcaaggtgtgtattaatattttattcaagacatttcatgtgtttctgtacttagtgggttaaatacttgttgaatgagtccataagcagacaaaaaatatgcggttgtttccacatttgccaaaagggaatagctgtctatgggggcttactagtactagatgctaggttgaattcttctttatccttatggcaacttacaaggaagtgctgctaacaccctcgtcttacctactggagaaatggaagcttaaagaggttcatgaattttcccaaggtcacatagcaagtgttacagcctggtcttgaacccaaggctgtctgacttttatacctgtagcataaccattgtagacactgcctctcttctgttattcttctgactgttggttcctctggtttgataatattttgattacctgcaaaagaaatttaccttgatccaggtttctcttaccagtagagaagcagagacaaaaacaatagaacattttaaagaatatattgttcatgaaatgttacagaaggtgaaacatttgttaagaatagattcattactttatatggagattatattaaatcttcttttaacaagggcagggctttagaaagtcccagtcatttttgaaggtgagttttgatttatgttaatttgaaaaaagcaagttctgtgagagttttatacagattgtgcttttaatgacttccttaatcaagcaggttataaaaaagaaaaacctcttactgtgatgagcagtaaactgacaccagtgactggctcagtcagagctctactatattcaagttttttaccaccagcatgctataaattttaagttcatttacataaatttacatgtgttatgtgttagtatgtgagacttgtgcattttgaccaagtaattttcattttaaaggttttatatttacttttttccaattgaggattatttcttatatata

SEQ ID NO: 133579 - DNA, 1162 bp, Homo sapiens
ttgtctttccctttatatccctgttttcttcctttcgtctcctccgctttctcctatctcctcttaacagctttgcaagtatatgctaaagaataaaaagaaaagaaagtctcaagtgacttaaaaatcactcggctaaatagatgataatttctcaaccatgcttcctctccttctaattccagagctcttcagtatccccatcagccagtttccgaggtgctgagaagcacagaaactccgcagactactcctcagagagcaaaaagcagaaaactgaagaaaaggaaattgcagctcgttatgtaagttcattcacctttgtgttaggggaggccagcttgcctttttatctgcagccattttaccctttgactattaccagccaacacaggaacacaggataacatcctttaggagacaaaaaacatttattgtatttatagctctgtagccattggctagctgaagtcctgtgtgtgtacagatgcatgtgaggatagaatgcttcattgggcagctaacagaagacctggatgatccatattattgtttctataggtgtatttgcttccccattcatttcagagtggttggattttctgtggttagctggaattgttaagcagaaaaatataaaatcataaaaaatgtgtttaaatgcctagatggattcatgtgctgaaggatataccaaatgttgtggaataaaacatggagagacatccaagatcatccctagcctggaatgaagctcattttcctttagtggctgggcaggtcacaggagtgagatgggggagcaagctggatggagcagtgtggaggcaggcggcccctgctctgcttccctgctggtgtcctacagggccgcaggcctcatgaaaagctggaaatctggatttttacctcccaatatgcagttttttaaaataccaacaaaccagaccacacctatctgtaggccggatttagcctgggcctgtcagtttgcagcctctactctagagtaataagccaaccatcagcttcaagtttgtaactgaaaaatgtaatcaggtcaccctcttggtgcagtgggtagtgcatcagtctcataatctgaaaaatatattacccacctccatagcatcatcatgaggattaaagaaaataggacatt

SEQ ID NO: 133580 - DNA, 1116 bp, Homo sapiens
catgggaaaaggcaaaccgcttgttttcctctctgatggttaagcaaactaagagcccatacagtgactatgagtgtgcacctaaatatcatctgtcacatgtaaagagtaacttactgcctcatgtggcaaatactagatagcccctcagctgcttcattggccttttcccttgagttccttaggaaatgtcagtttagtagaatttttgctatagcatgaggctacatcagttgaacataattaaatatacataagattcccgtaacctcatgagctaggaggaactttttttttctgtaacttaacactccatgatcaagtcttgcctctggtgcagctttcatcaaatgcatgatgccctttagtcacgtaatgcaggcccaggcaaaaggaacagactgccagggatctaccccctgaaactttcttgacatcagtagcaggacctttcaacagcagaactgagcctgagtctaccaaggttccaagtttggatactccaagactgtgagagctcctgcattagtgtacgtgtgtatctgtgtgtgcaaatgatgcaagcagttggttaatttggtggtggtgggagtgggtctagagctttgcattttgatgctaattaagattaaatatctcagtactacattttgtagatcaactttaagtacttccctaatttcatgtaattttctagcattaatccactttatcattgtcataagtataaacggctcattaaaccaggagggaacacaatacttttatggatttctgctctcatgttaatgctgttttcctttcctcatgagtaatctcttgatggtttttgtctctacagaacagggataactacatccgttcctgcagattgctccctgatggtcgcaccctaattgttggaggggaagccagtactttgtccatttgggacctggcggctccaaccccacgcatcaaggcagagctgacatcctcggcccccgcctgctatgccctggccatcagccccgattccaaggtctgcttctcatgctgcagcgacggcaacatcgctgtgtgggatctgcacaaccagaccttggtgaggtaggttagcaggatctgttaccaggt

SEQ ID NO: 133581 - DNA, 1009 bp, Homo sapiens
tgcttctaaccctgttttctcctggtgaccttggtacgttttgccatgagtgattcctgggccagtagttcacactgagtgtctttccaggtgccttacttgagagcctcgccttccgtcttgcacagccacccacagacacattgctgctcactggcaggactggtcctgtcgctccctgtgccatccccagtccttctttaaagggaaaattaaattctctctccctcataccacagtaatagaataggtctcagaatatatctttagttagtgcatatatgtgtaggcgtgttttcttttgttaatttcagagatttttttcccattagtaatatcagtcatgttttcatgaaaaagtaatttgaggaattcctaagtattcaaaaccaagcaaaaagtacaggacatgtggcatctctttgtatatgctttgttattactttgaataattagaaaccataataaaccaaaatgaaatctacaaataaggcctgcattgaaattgaatcatcaaggaattctaaattgattttaactaaaagctaacttttcaagggctttccctccattttgacattttcaggcaattccagggccacacagatggagccagctgtattgacatttctaatgatggcaccaagctctggacaggtggtttggacaacacggtcaggtcctgggacctgcgcgaggggcggcagctgcagcagcacgacttcacctcccaggtatgatccgtggctgaggcattttaaagatacggttttaggctgaggtgggcggatcaccaggtcagggaatcgagaccatcctggccaacatggtgaaaccccatctctactaaaagtacaaaaattagctgggcatggtggcatgtgcctgtagtcccagctacttaggaggctgtggcaggagaatcgcttgaatgcgggaggcagtggttgcactgagctgagattttgccactgcactgcagcctggcgacagagcaagactctgtctg

SEQ ID NO: 133582 - DNA, 2385 bp, Homo sapiens
cgtggtggctcatgcctgtaatctcaggcataatttgggaggccaaggcaagaggatctcttgagcccaggagttcgagaccagcctgggcaacttagtgagaccctctctctacaaaaaaagtttgaaaattaggtgtgattggacacatcagtgtcgtagtcccagcatctcaggagactgaggtggaaggattgcttgagctcagaaggtcgaggctacagtgagccatggtcacaccactgcactgcagcctgagtgactgagggagaccctgtcttattaaaaaaaaaaaaaaaaaaaaaaaaaaaaaaaagcagcagtactgtccatgaccacctttcacctttccttgactgggctttctgtttggtcaaggagcacattacatttgcatttgctctaagtcctccatactcatgggattttctttcagtatttaacatttttgattatatgtttctttcctagtccaaagaatcctcatcggtgcttagctgtgacatctccgtggacgacaaatacattgtcactggctctggggataagaaggccacagtttatgaagttatttattaaagacaaatcttcatgcagactggacttctcctcctggtagcactttgctctgtcatcctttttgttcacccccatccccgcatctaaaaccaaggatttcagatactcattgcagttgtggagtttaatcccctttcttaacctcacttcccacttgctattgaattgtgaatagtcattaaaaacctgtgataccaaatcttcagctgtctacttggaagaacatggaataagcatacttaacagtgaaaagaatctttaattatgtattatatctgtaatatatttattttgtttaaagaaggctttctaacaatgactgactaaataaagctgtctgctcctgcattgataatgaaggtgcgttgtatttgatacccctccccccctttttttggcaaaggaggggaaaggaaggtttaaaataattgatttaaaatgtcactaagtgtagactgatgactgtatagagatgtgaaatgtataattacacatggaagcaatatgttgctgtgttgttattaggttttttttgtttttgttttctacatcttttaaagacttttggaaatttggctgaacaattagaacacaacaggccaactcatactcatttggatctatttagacaacgttaaccaatatatctatagctttagattatattcgataaaagtaattggactttttttctttttttgactcgttgacaagtgtctttgtaatatgtttttagttccctttttttgttgtattataggcagatgaacaaattaaatttggcctcaaagagagaacttactcccttctggatatttttgccacatttctttgcaaaaggagatatatatatctttagtcagttttgttgttatgagaaattatgggttattttgtggcatgctctttgggagctgcacagttatggggaggactcccactgctgtgcaagttaagtcttttacaaaacaaggacagcagaggagggtttgcagagacctccctctgaaaaacacaaagaatggactctctcctgggatgaggacttgctttctttacctccggttctttccatgtcttagttggatgtccctgaaatggacacaggctgtgccattgtgccagaaacattgtgttatcttttatgttgttgttgttgctgttaaactataatatgtgacttctttttttattattttttgtttgaatgctttaaaaatcttttaagtctgtggatctgctgatgtacagtgcctttgctgctatggatcaaaatcaaaagaaccgtgtagatatactttattgtataagtagaaaattacttaatttcatactagaaatggatggatgctgcaagttgaaatggactgtccattgacgttcctaatgtggtagcagaaaaaaaaaaatggtgtcttaagtgcttagtgtttgatgtcattaacagtttcgtaaaactctacagtgtagaaagattttgatactaaactgtgcgttgtacatagttctaatgcattgtattgaccaccagtacttctataatggtagattgtttgtgaattcagacttttaagcattaaacataaataacttctagtatgcttatttttctaattctttgtcttgatgacattagtttattttttatctttggctgtgccactcctatatattaaaaatgcctagttttttcaagggagattgttgttaaagtaaagtggttttttttgttgttaaagtaatgtgggtttttttcactgttgctgtttttgttttggttttgtctttacttgagaggagctagaa

SEQ ID NO: 133583 - DNA, 1044 bp, Homo sapiens
tgggccaagggagatattttagaacacaaaatttatgtcaatttagcctgctgttttttatatattccatggtttgtaaatatgatgaatgtgtatgtatgcacacatatatagagaaagctgagatatcaatacagaataaaacttttcaaataaaaataatgcagaagcagctgctgttctctaaataaaagaaacaataagcttgattttaatttttaatttattttcatgtaattttatggctttcaacacttccttattctgtcgttaaattctcagtttttatagtttaatggtatattctctgtagtgcaggcattatatagctctttttctgtagctattcatctatattcataatacttataattaggaaattgttagaagacgttttcagtatgaagggaatcaagttgaaaattatgtaggaataagaagggagagaccaaaaattggatgaaatgagtcacttatcaagaagagtaaaacagtgtttccaaactataatgtgatcagaaagaaccataatctttggaaactatgaaattaatattgttaaagaaatttttgatcctccaaattttaaaatgtccaggaaaacagatactgtgatgaaaaacataataaggtcattaagtttgggttaattggtgtcttagctactgacatgattaatgcaagggattctgaaagtcatacaaaattatacaatatagaagaaaacaatttattttacagagaatctttttattcaatagtttttaattctccactgaaattctctttactttgctattcttgaacatattaagcacagctattttaaagtttgtgtctgttatctctatctgattagaatccttgtaggtctgctcctctgggatctttttctctggattttcaatcacactgtcttgtcctctcatatactgagttttgattgaatgctggacattgtatataaaaaattgaagagataaattgactttcgttaaaggcatcttccttttgaaaagaattacatttgcatctggacataaa

SEQ ID NO: 133584 - DNA, 1007 bp, Homo sapiens
tgatgttgtgtgtagtgacccatatccttctgcataaaagacagtcgagaaagacaaagctcttggtctttgggtgagtgattcattggttgattgcctggagttttccacttgggagcaaattccttctgtggtttccaggctttaagagacattagtttgcttttcaatttacatggccattctactgaatccactgcacagctctctgccattgtaatagccctgatacataacttcacatttggaatgtagagtgcaaccattcttaatagtttactttaatggccactcttttctttcccttatggtttcttgtatagtattatttttttaagcagacagccattgtagtgccaccacattctgcatttagcataccctctgcagcgaaaatcctttaaaaacaactatagttccttggaaagcaaagcactcagtatgaagaacattgattggtggggaaagaaaatgacctaatgagcccttgtctggaattttcctttctttttttctatctaagaaaagtgagcatgatgtctaagacagcgcacgagcaggtggtccaagccacagagagaggagctgtgtggaccagcgggattaggtagttacccgcatgatggcagtttttaaggtctgagccaggcctcactacccgtgtatttgttttacttgaatgactagtttttgaaataaaggaaaccctgttgtgtttcttttaaccttcttagaaagtttcaggtcacttccaattccttttcttcttgacccccttctgctgattgagggagttgcagcctgggctgattgtcctcttcaatgccgtcgtttgagaccagcgaagtaagagttcttgctctcagatcttgggggggcagcacccctgatgccgttgtcagggaaaccagtttcagatgggtgcaaagaaggtaaaggattcaaacatctcatttgaaataatgaaataaaaacgcaacccataactctcccctccccctcaccta

SEQ ID NO: 133585 - DNA, 1006 bp, Homo sapiens
ccaccacctcctccttcacgaccctccccctaccttccccaaaactagagtggtttttagaatcctgtaggttaaggtgtgttctctgttatatttacatatgagtttgtttaagggatttgtacattgaagaatgtatagttttccttcagcagtgtttgatctgtggcacatattctcaccatctaatgcaggagtaggagatgattttttgattcctaaataaatagaacttgagaaatctgcagaatgtcactaagagtagagaaaagtcacagctcctctgaaagttcatttatttaccccgcaccagagagctcaaaaaaatgcacagatacctcagtgatacccattttattcctcatcctttaaaaaatgaactggtggctgactagatttgcagacttttgaaataatgtataaatggcaactttgtagattgtgaaaagtattttgatgtccaatgtctgaatgtagacttgttttggaaaaaacagtgtttgccattttaaatgctttctggtggtagaattgttctttcgatcatgacttggcatttattttttaccttgttttgtaataaaaataattctactcagaaaactaggacagaaacagaaaacaagcatatatacttctaaatttcatattcctgttaacattttgttgagtttcttagagtcttgctgttttcactctttcccaacataagcaggatacaatttttgttctgcctttttttaaaacttcttagagaaattctcaaatacatatgagtacagcaaatgtccaagcatttatgaaagcacagagaattgtacaataaatgccacatgcccatcgctcagcttgaagttatttggccatatgataactctcgttcccacccccagacactggattattttaaaataaactctagcagcatatcattgtatccataagcacagccatgcaccatataaccttttagccaaggacagaccgcatatgtgacagtggtccc

SEQ ID NO: 133586 - DNA, 1048 bp, Homo sapiens
ttacactgacctcccctcagcagctctgctagttgccttgcacagcatctgtgctcagcagatccctgttggctgatcgtttctgatggcgatttttgaatgaagcacaaggttctttaaagaacaaccttgtgctccgcttggaggcagagtcttgctgaggtgcccgtgggtctgcctcagcaattacctgtgtctctgcccaatgcctctgaggtcaggaggccggcatgcgtgaccctttgtctctgggagtccagatttcctaatgcagggctctttctaacacagaaagcaaggttgagtaaatacatgagctcatgctctgttggcacgtagggcattgctgtgttgattcactcatggaaacaggaatgcttctgtacaccctgtgcttgtaacgtccccatttctttctctcacggactcaggcctgcacgattaaagaacagacctttatcttcccataaggaatacaatcgggattttgtgtgtttgtcttttattttctatttaacaattaaacacttttccagacctggaaagaattttaccttccagacggttttgtcagagtagcatatttaagttctgggtagtgacctgcagtggcattccatttctttagcacttggatcgtggaaaacagggaaagacaatcgcaggtgctgtttcccctcctcctcaggggaaggttagtttgatcttgcacatcagcagacactggcgggatcacacacacacacacacacacacacacacacacacacacggtccaaaactaacaacacaacagtgtttaccttgagctctggcaggaaatcattattcaatctggtttgttttatcaggcaattccagggccacacagacggagccagctgtattgacatttctaatgatggcaccaagctctggacgggtggtttggacaacacagtcaggtcctgggacctgcgcgaggggcggcagctgcagcagcacgacttcacctcccaggtgactgagtggcttccgcctgccctggagtctgggaggtggctggggt

SEQ ID NO: 133587 - DNA, 1061 bp, Homo sapiens
gctgtgtgcccagtaaatgaaaagccccttgctcttaatgggtttttatatcattcatgttttacatctgtgaagtcgagtgggctttattcttttcgattctgacaccagacttcagaagcagaagcgatcctgatctgtaggagcttgattcagaaagctaggtgggggctgggtctcagttctgaggctttctgagatgcaggtgggcttcgctgtatggcccctaaggagggatccaggactgactgtctgccctgcagtttgccacgattctatccaaacgtccatctctactctttgggcgtttgttctagtctttgccaactgccatttcccccactctcacctttgatgacttaagaattttgtattttttgttgcctcatcactgcccttgtgctttcctgatccccaccctgcgtcttcctccctttccgcattccctgacccacatacttgtccactggttgagataaagccctcaattcaacgtatcttcacttggcttttttttaagtcgtggtggtgcgataacaatactgtcatttcctgaagactcactgcaggtgtcaagtgctgtgttaagtgttttgcagctgttaccactttaatccttacagcaacccctgcgacctctgtgttttattattattcctatcttatggatcacgaaacagacacattctagactgcaggctggctgattggcaagaccgcagttgacgtagccagagaaccagagagaggttcatttaacagcaaagtttgggcacttgatttgcctgtggacctaatctaatgtgttaactggttacgagccttcccctcgacttcctcttgaataagtaaatgaatctaaactttaaatattggaataccatacacatacagaaaagtgcatgaatcatacatgtctagctcagtgacttttcaccaaaggcagccacctgtgtaaccagcccttggatcaaggaacagagcaggatcattgcccagaaacccctcccatgccccttgcagtcaccaaggttaaccaccaccttgactttcaatactgc

SEQ ID NO: 133588 - DNA, 1173 bp, Homo sapiens
tacatgctgtccttaacgctgcacaaagtagggaatccatgtatgaatccttaagcattaaattagacccatgtatgcaactggggatgattttgtcccttgaggacatttgataatatctggagacacttttgattatcataactgggggtgggagggggggcaggtatggattcctcttggcacataaacagtaggggccaggaatgatattcagcatcctgcaacgcccaggacggcccctaacaaagaaaagaactgtttggccccaaatgtcaatagtgctgaggttgagaaatcctaatacaacatactgctctgtgaacttgcttgcaagtctaagggaagtatttaccatggggaagtggttctcagtgcacaaatagatcacatctcctctctacctcccaaaaaggaagtgggtcttgtggcgttcaggggtgcttatattacctcttgcatagtaattaaaaagaaaaacactaggccatgttactgttcccatttatgttgctttggggatctgtgagtttctaatgaacagtattgatgttcacaaagtgcctgctgcaataaactgagtctgcaatgccttatttttgtttccaggtggggtttgatcctccccctcacatgagagtacctaccattcctccaaacctggcaggaatccctggggggaaaccgtaagtacctcaaagaccttggttttgttttaaaggtggttactcagtcattggtattagcagactagaattccaaagggagtacaggcttgggcgtttccaaggagatttctggtgtcttttcctgaggagtgttaacactttctataaataggcagcttgtaggtgtcatgcctctgtcttctccctgggggtgatctccttagttatttctggagagaaactgttggagatgaggacgaggtgggaggaaagagctggaggtggctggccctcttcgcctgacccctcagaaagctgctctgctctgctctgccatttggctagagggcagctgctggagattcccaacagtgctgtgctgtgggcagtcagctgtcacgaactcttgcaggcttagacacttttttgaaatgtgtcatctctttactcagctctgtgccacctttttcttattttggtggaaacaagagttatttgaagggta

SEQ ID NO: 133589 - DNA, 1011 bp, Homo sapiens
gcttatatcaagaacaacaatgaaagcagcgtcagggctggaagaagtcaggggcaattatacacagaaaactgggttcatgggagcaagagtaaaaggaagcggtctgtttttggtggggtagactttaggtggaaagcctgccgggcgtccggcagctgcgtgggccagggatccctgggtctgagtgtggtgtttctgggcctttccagcccacactctgctgccttgttttgagtcagttttacagcatcaaaggtatgatgaggcatcttgttttgtaacttgttgaagtctgctgttgaatggggcccattttcagataagcaggggtgctaattactagccctgtccaccacatttagaggaactttcagagcttttcaaaacctattcagattataagcttcatttaagccgctcaagcggaaattacagtagtaactttgaacacatagacgcagaggcctcaaagcttgacagtcttaaaggtccagccacggaaaggttattgtttctaacagaaattgtattgtttctaacagaagtgtagtttacttttacgttcacagtaccatttgacatcattaaacgacaacaacaaaaaaaaacaagacattaagaagctgtcttggaatggccctgtggcttggatgcgcagtgctgatgacagcaggagggcttggaaggctgtggagagagacttgaacttaaaactggtcagcacacccagcctctgtgccccattttgctgggcacttgggcggatttaaagttgaataagatacagccctgccgtggatgctgcacagagtctggaggaggagacctcggggctgaagtaaactaggaggggtgtatttaaacacgtttcccatgtgtgaacaagcagctgctgccccggcccagcttttcagagggcgtgttagcactttgcaagagttaggtctcctgcagccttgtcagctgggggtctgggttggaggggttagcttttagcggacatgtatc

SEQ ID NO: 133590 - DNA, 1051 bp, Homo sapiens
taaataattgtatttattgtctgctccagagtttgttttgttttgcctggaggagggtagaagggccagctacaaatgagagggtggtgacgaaggcatcgtggttttagcaccctgtcctgcctcaacattaaccggccctgtgtgtcacctgcacagctatctttccatgagtcctcctaactgagtcacccacctggattctacagtgatgagttgcaaaatcgagttgcaggaatgcactggttctttcccatagtttgcatttaaactgtgtgaaacatcaatgtgtgcccttcagactggctgcacaggcagggttctgagatatgatatggttgccagtggacagattttcaactttgtccatgttgttaacaagtggggatctcattagttttatgggttaaaaatacattagttgaagtgttaggcagagtacgtgaatgaccagttggaccgtagcaaaaagtgcagcgcagggtgatggcttgattgacaccaggtgtagatggagaaggcacacagatgtgatggggtgcgtcgttacctaattgttttaatgttcaccgagaagttaattgtcagtgtggagtgtgctagtaaattaggttcctactgccttagtgtaactgaggataaatgaggtgtcacgagtttccaatctgtacctctgacacaaacacttttcctgcggggaggagaaagttcccaaggggaatcagcatggcagctaaagaaatccatttgaataatgtgctttatttttgcattagggaaacctgtcttgcttttgctgtatgcatgaatgggttttcctttccattttgctgctggtggtttcagggttcgaacttgttggcagagaagttgcttggaggtcttaggattcatgaaggcctctgtaactagtgtttgatagcattgacagggcagcattttattaaagttgcttttttttttttttttttttttagtagtttctgaggttactttccagaacatgttagtagatgtgaacaaccattactgttaaattgctaaagaaaag

SEQ ID NO: 133591 - DNA, 1079 bp, Homo sapiens
ataagggggcataagtgcctgggtggtgcatgagacacccacccagattactgggtcttcctttccaaattctattccttagtgatagtattttggttttgtctcatcatactactgtggtaagtcaatgcaagggtgtagggtgaaatggagttacctggtgacaggttgagagtatggctactatattgtgggatgcatccccacccccattttaatccctctgaaaacagcgtgagtctgaaaatctgtggcatcttagattgagtgacatgctggatctcatccctggaggcgcataaagacagaactagctcatgtttacttactgatgtagccagccttgcttaataataaacagctcccctctcggagtgagtgataccagaaagtgacagtgtagatgtgaggattatattttgggaaggtgggagaggtaattgagcaggtgaaagcttttgatgaactgaaagcactaatcgcattttttcccctttcctccctctctttcttggctccttttgtgtgtttgttgaacctcctgttctgtttccgccttcccctcctgtcatgtctgttttcccctggatgccgcctccatcgccatcactgtcaccactacctcctcctcctcctcctttttctctctcaccaccaccaccaacagcagcagcagttgcaagctcagcatctttctcatggccacggacccccagttccccttacgcctcacccttcgggacttcagcctcctggaatcccgcccctcgggggcagtgccggccttcttgcgctgtctagtgctctgagtgggcagtctcacttggcaataaaagatgacaagaagcaccacgatgcagagcaccacagaggtgagaggccgggcaagccagattaggactttgtcctcatactcttacagtgctgcaaagttgtgtgcatcgctaaagagagccccaacctatacagagagcaaacaatgagataagaggaactgtcgcaaagctttccactgaaacacaggtcaccctggaagtttgcagggtttgctgtgggcatctgtagatttctcgatctcg

SEQ ID NO: 133592 - DNA, 1085 bp, Homo sapiens
atttgagctgcagtgagccatgattgcactgctgcactccagcctgggtaacagagtgagactttgcttcaaaaaaaatgcatgtatcggctggtgtggtggcgcacgcttgtaatctcagcactttgggaggccggagtgggaggatcacttgaggtcaggagttgcagaccagcctggccaatgtggtaaaacctcatctctactaaaaatacaaaaattagctgggcgtggtggtgtgcacctggaatcccaggtatttgggtggctgaggcaggagaatcgcttgaacccagaaggaggagattgtagtgagccaagattgcgccactgtattccagcctgggcaacagtgaagactctgtctcaaaaaaagaaaagtgtgcataaattctcctgattggcagagctattgggttttggctatatagtagtatcagtatcactttttcctaaaatatattcaagtagcatccatactttttcctttgttgaaggtgataagtacaagattgtctcaggtaagccttgttgagaaaaaatgggcttccaaagacagatgggacagaggagcgctgtccttttggagatagctgttttactcttctagatttggaccctctactcatttaaataaatatgttatcttagaaatgacactttgtgtttataatgttaagcatctacttctgagaaaagccagagccagcactgttaggcttgattcttcttgacgtgcttctttggaagagagctgggggcaagggatagtgtccttttgcagatgtaggacaggcattgagaaggggggacaggagatggtactcatgcagtctaagcgtaaactcccccgtcactgccattaggcctgttggtgagggtggatttgtctctgtgtatgtagtatcaggtgttctcaagagcatctggttagctgagcagtgggggaaatgcgaagtctcagtagagaatggctttgcccttttcctttcttattctggagaacatgattgagctgctggggttacaggagaaatcttgtcctaggaaacaaaaggtttgtagccctcattctggctctgagc

SEQ ID NO: 133593 - DNA, 1060 bp, Homo sapiens
tagtcctttttattgacaattaacatttcatcaatatactgcagttgcttattcattcataagttgatggatatttaggttatttccactgattggctattttgaataatgctgctatgaacatttgtgtacaggtttttgtgtgggcatgttttctcttggatttgtctctgggagtagaatcactgggtctatggtaactttttgagcaacagccagactgttttccaaagcggctgcatcattttacattcccacaatagcgtacgagaattccaatttctctacatgatctctggcatttcctgtccatcttttttattctccgcatcctaatgggtgtgaggccgcatctcccgtttttgatttgcattttcctgatggctgatgatgttgaacatcttttcaatcaaaacctgtatagtttttgtagtggatccaccttcacatggcttgtcatagccttaatggccttccagggaaatgggatgagcaaggcagtggtcatgcaggaggagttggcctatgtggattagctgaaatggagaaagaataaagacaggccaggcatggtggctcacacatgtaatcccagcagtttgggaggccaaggcaggaggattgcttgagctcaggtgttggacaccagcctgggcaacatagcaagactttttttccactgaaaatcaaaaaaattagctgagtgtggtggtgcgtgcctgtagtcccagctactcaggaggttgaggtgggaggattgcttgagtctgggacttcaaggctgcaatgagataaaatcatgccactgtatcccacctgggtgaccaaatgagaccctgtctctaagaaaacaaaacaaagggctgggtgcggtggctcatgcctgtaatcccagcactttgggaggctgaggtgggcggatcacctgaggttgggagttccagaccagcctgactaacatggagaaaccccatctctactaaaaatgcaaaattagcctggcgtggtggcacatgcctgtaaccccagctactcaggaggctgaggcaggagaatcgct

SEQ ID NO: 133594 - DNA, 1035 bp, Homo sapiens
gctaagaaaagaaatagtaatttaacggtttagacatctattacaagtgtgaaagatcatgaaagagtaccctttaaaatgcaaatgagccgaaacattctcattccctttaaggtacaatcaaggagctttactgcttgcttgacagggctaaagatatttctctttatcaaacctggaaaaagtaaatcatctcaaggacatccagcttctaggttagttcaaggtgtgtcttgggcctgtgggtgctcttcgaggagacagagagaggttgtattttttctgtgcttgttgagtgaattaacagtccccatttctcaccagcatagaaattgtagttctcctgtctgacaaaaaatactgaattttaattctttctcaccatagcacctgccttcaacttacatagagtaccggtatttaagaaaaataagcttcttaggtatttgatactggagagactattgaaatatttttgtagacctttttttaaacagctttgacagcaaatttgatgactggcagaataataactacagccctactttttgactgttgcttcttaccaattcttttcctattaaatgtattgtagtcttgtcacaatgaaaaggataatttatagtgcaaaggtgtacaaaatatgtacaaggtttatttggtttgacacacagctcacttaggccttagaaaacaagtcgcattgtgggaggggaacttactcatttgagaccttgagtttttagatcaggatcgtttttacaccataagcaacatttttgtttgttttttaaaatttctattaagaatgatcaaaacaaaattggttattaaatgttgtaacatcttatttgtggaatggctaatggctgcctgaatgcagggataattgattgaaagactcttcaagaccacttctccactttattatttggggagtttggaactaaaagctctcttctacctgctctgatagatattgaataattgatttcagttgggattgggattttaaataattattgttctctttac

SEQ ID NO: 133595 - DNA, 1244 bp, Homo sapiens
gctgttgctaatgccctttcttctccttgttttcaaagcatcaacaacaggtggcccaggctgttgaacgtgccaaacaggtgaccatggcagaattgaatgccatcatcggggtacgtggcctaccaggtctacctcctacagtgtgtataaccagctttcatttcttattaatttgatggctttacgtgtgtgtgtgtgtgtgtgtgtgtgtgtgtgtatcttaacgttgacctatttgataagggtgggaggaggagaggaagagacttgggatgtgctaaggtatatggaggaagagggcttagcataaggaagatgacaggagaagcattttaggaggggacaaaaaatctattaattaaaaaaattctttttaaacagaccggggtcttggtattttgcctactctggcctggaactcaagtgatcctcctgccttagcctcctgagtagctgggtccaaaggcaggcacccccttgcccgtccctaaatctacttttaagtgggaaaataaatgtagttcatcctgtgacacctaaaccacccttgcttcattagtctagtaaaagctttaggttagaattttaaatactttcctcacttctgtcttacaatgttagatcacagtgaggtcaaaatgggtctctgaattatcatttcatttagttatccttgctttttgccttttgctttctggggtattcgaacctatagaactgttggctcttgttctttcttgtgcctctttcatgaatttttaagtcacacaccaatgaaaagagcgctctcttgccatggaagaattgttaattgtctgccctagtgctccctggcttttcaccggggttctgctctcctctcttgagttcagttagtgctccgtgctagccactggttgtcaatcacaagtcatttgctctgcattaatgaatctggtgaaccgtgcattccatcccctgcatgagttcatcctccgccccccactgcaggacctgggatggttctcatgtgttcgtccccttccacactaagccaaagaaggagctgaaacaagggaccgtcctttctgattttattcatatgtgagtgccttgagcagattcaaatcactcatttatcaatttatgttaattgcttgtgagatgatgccctgctggtctttatagttccctcagacactttgtaatgataattagacatgctgctgtacggattaagagtgccatagtccaatgacggc

SEQ ID NO: 133596 - DNA, 1049 bp, Homo sapiens
gtggcaaagaggtcagcaggcctttcttctactctatcaccttaggcctcatctttgaaaggtggactgctttgacagtgctgcagctgcagtggcttctgacacccgcttgaatgaacttgcaataatgacataaatgtgtcatggtgtgccatcattgaaaaagtacacttggctgggtgcagtggctcacgcctgtaatcccagcactttgggaggccgaggcgggcggatcacgaggtcaggagatcgagaccatcctggctaacacggtgaaaccccacctctactaaaaatagaaaaaaattagccgggagtggtggcgggcgcctgtagtcccagctacttgggaggctgaggcaggagaagggtgtgaacccgggaggcagagcttgtggtgagccgagatcgtgccactgcactccagcctgggcgacagagcaagactctgtctcaaaaatacatatatatatgtgtatatatatatagtcaccatattaaatgatcatatagccttaaaccgcctagattttccaactcaatcaaactactcatctcttattacaatgaagtgtgcagttgtggcttactttgcaagtgggattaatatctactgtttatttcaagataagtattagtaacataacctggggaaaccattttatacacatttccagagcaagggagaggaggactgaagtgttaggggtatgaagttttacctttctgaactgattgtgaagtattctaaacatttgtgtggctttgtctttatagactgaaatcgccaagagattgaatacgatttgtgcacaagtcatcccatttctgtctcaggaagtaagtaaaattgttcagctgttaaagtgcaattatgttgcttctctgtttgcaaattagctagttttaagatgttaattttatcacaaggaacaagtgtgaagaacatctgttacagctgaagtgtgtaaaccccctgctagtctatccaacacatctgagggcacactgtagaaatggtgacaatagctcaacccccaaattaattt

SEQ ID NO: 133597 - DNA, 1131 bp, Homo sapiens
ctttttatccacatgtctattagacagatggagatgaaaattggtctgaggtcaagccatttgcagcgttctcacagccttcgattttcctctcatcctcaccacagatcatctcaaatgattcagtaatgaccaaaagtgcaacattgacctttattccctggtggattactgtgtttcacagtccaaatggcaggaagtcttttctgttcttccagaaggagtgcagcattattgagccaacccagccctgtgggaaccacacaaatgcagaccagtgtaacagaatacgtgggttaaatttggtttctggtgctgtgggaaacgagaattgacatgtcctggaacccacataattaatggaagactatctaggatgttttctaaaaacacacaggagcatataaattgatttgtccacttgtaaaataacttgtgaattacaggagtggtaacttctggtggcccctggtttataaattgttcttgtttccattatcttcagttcctctctccttatttaatgcttccctagtatatcttagacaatactgtaaggctttataattttaaaattataaattgacatgactgagcataaagggatgaaggccttttttttggcatacttttaattatgtgtatttttggtcagtccctgtaactctgaatagattctgtcccatacgacactttttttcccatcctgaaagtaggttgattgttatcttggaggaatggtgattatttttctcttacttagattcctctgtggattgtataatgatgcagtgattggggttttttttggtaaagaagtaatttgtatttaaaatgttattcctgtttgcctccacatgcatgggtgagtcaatattctgtgaatccatacaccatggcacctgtcatctaggatccttttgcttactctcttctaaatacttaaaataatcttttccaaaggttatgctttgaaaaatttagctagcatcccagatttcattttaatcgtgactaaaatgcttttgagaaaataaaacttcttgactgttaactgttcacaggttctttttctgcctcagtggctccaaattttaatccctacccttgcccaccacaacttccaacttc

SEQ ID NO: 133598 - DNA, 1118 bp, Homo sapiens
gggatatgtacacctgtggggagtgtgtgcatgtagttttctttttgctctgtaaagtactgtgcaaaagttgtgagtagagtagttgtggtgctgtctttcttcgtctactccatgggcttgagatttttgttgacagtcaaggttcacagctgctgctgatgtactaatatttggggaagcaaaaaaaaaaaaaattgttgggaggctgaggcgggacaatcacttgaacctgggaggcggaggttgcagtgagccaagatcgcaccatcacactccagcctgggcaaaaagagtgaaactccatctcaaataataataataataataataataatttattgcaggggagaaaggcagagccattgggattggtcaaactggaagtttaggctgtttactcttaatcccaagcacaatgcagtagaaacttcttgtgtgtctttgtaagtatttgagataaagcagggcacagttcagacaagttgtgccagtacctgctctcaaacaagctccaaagttggccgccttctgatctgggtgtgctgagaagctccgcgttcatggctctttctgcttagcttgagaagtggccctgacaccctgaggatctgtaggggaagcactaggttcttgacaaccccctagcctgccagttggcctgggtcccagaactttttccatttgtaagtgggctggctcatttacagtgcttgggccatgagctccctcagagccaatgtctctgcacagctactgaggagattggaattggaccattgaaatgtatccaacttctgtactttttagctgaccaaaggccaaaatcataccactaacttaggaggggaactgctgacatttgaatcttataagaaatctgtattttataatcgactaccctagatgctatgatatttatgaattaaatggaagtataaggaggaagtataaggaggtttcaaatactgactggatttttctgagtatatagattttttttcttttttttttttgagacggagtctcactctgtcgcccaggttggagtgtagtggcgcaatcttggctcactgcaagcttcgcctcccgggttcaagcgattctcctgccttggc

SEQ ID NO: 133599 - DNA, 1033 bp, Homo sapiens
ctctctttgttctgacccctcaatgaaacttgacttatactttacctttaagatgtaaccagtatatttgctgggggaaatattgttagcaacgataggtaagaaaatagaaataattttgcaaaaggactctgattttgaactttgtgtgtatggaattgtcgtgatggagattttcagttggcctcagggaccttgggtggtaagggggtaaggaccagaaacaaaacctcattgaggaccccagtgtgtggaaccaggcccttcaatgctgtggccttccggttgctcctcaggagcatagtctttgtttcctcttggtgccctcttgatgccttgagcaaacagctggtcagagcttcttataagtacagtggccagccagtgtattgacacgcacagacacaatagaaaactgcattagaaggcaagccattgggatttgcagtaaatgtattacagaacacaagtgacttgctgatactgcttgtttagcagtttgcaagggcaatggcagtatggatttttgaattagaagggaagggctgttctttctctgtgtgggaacatctagttgatggctggggagaaaattgatttagagaacaaaatgcagccaccgttatttgtgccatttgaaaggcctctatggattagtgagtgaaaataaaaaggttgctttcggtttaggaaagagggtcttaacattgatctgcgtcttggtctggtatggagagaataaaggatggaccaccagatggagaaagggcatccaggccccatgcagcctgcagatacaggtacacactccattctcacatagttgtctttctcagctctttggctttcagaagtcggctttttgggtttattattacagtaagcttttccaatgacaacattagagttgtcatagcccccatccgtggagctcccatgtgccctaggaattggtccgccagaagccgccccctccccgtgtcaaccttcccagcctccctttgtgtggatactaattattccaccttgaaaa

SEQ ID NO: 133600 - DNA, 2234 bp, Homo sapiens
aaagcttttgggtgtttacctagatagtttatggcttttccaaattggtctgtgtttttacttgaagtgcaaatatgtgaggcagatgttaaaacaagtgacataatgtttacattaagttgcctgttttgttttcctagccttaaattggaatgtgagaaactggcaagtgaaaagacagaaatgcagaggcactatgtgatggtaggtatcaaagattggactttttcctttttcatatgatattagcaaacgtgttagcagagtgtaaaaaacatgagttaatgaaatgcttgattcttttttctctttacagtattatgaaatgtcatatggattaaacattgaaatgcacaaacaggtaagctttagttgaacttcaagctgaaatgagacatcagttcatatgatttaataatactggctttgttctcagtagtgggctctaggggtgggggtttgtatgctatttttctgccttggtttcctgtcctgtggattgatggtagtattctgcatcaagggttgcttcttgataattacaagtgtttaaatgactaggagagggagaggtgttttggaaatataaactagcctctttattgacagataggaattaagacttgagtttactttttcacctgtatagatttatcctcttgaaagggctgggtatcttctacagttgctgaagtttagaatagttaatgtttttgtgctgttttgcaaggaagtgtggacctgttggggggaaagaagggtattcaggagttttttttaatcgtggtaatcaaggtatatgactatctgtggagtattctttatgctttggggctgcatgaagcaatagtcaggattagtggcttattagcaaacaaatttttgaaaaatttctcagttgttgcaggtgtggatgtgaaaaaagcatctttttatggccagagcatatgttgggagttgcttcagtcctagtggtttttaaagcatgaaaagattagtgactggaaagctctagcaatgactatgagtttgcaagttcccataaaattcacacttatggctactataatggtgtataaaaagagtattgagctggaacaaggcactaaggacctcataagagaagaaaagctaaatgattgctcagcccaaaggaccctcgattgagtagtcattgtctgccaaagaaagcattaatggcagggtgtaagtattctggagatacgctgacattcactttttcatcaagacgctggtacaataagtcttttagaaatcgattgcctcttaaaaaattatcatcagatgaagttgcacagttggacacatttcaaagtgcaacaatacaattcttacttgatgtatatgtgctatttcatctcaaacccttgtttcattaaattaaagagcatggctgaccggctggggcacagtggagaaattgattagttcagccttcagatcttccttatattcaaagactttcattaagcaagtgtgtttcagagttgaattctgcttttgtaactccgcactctttgatttttaattcatcatagatttcataatgttaagttatcgtgtacattagatctgttctcagatttgtgtttggaaagagattgtgattttcagggccttttattaataatgtaattgggcctttaaaaatgcagattttactatgatttacaaagttggtagcctactttatgttgggtttgtgcctttgtttttgtgtgtttctcagtggctagtgccttattcaggcacttgtaacttcttgatagtaaatgggctagaagatctgtggctaacatctatcgtcatttaagtgaattatgcaaataaacttggcctaggcggtttaatctttttttttttttttaatttactctgaagggcacttttttttggataacagatattatggaagagtaagaggagactgagctttttcttaaacccataaactcaaaggatttaataacctcattgactcttttacaagggaacaccacctcagtgtgatgctatatgctggtgctgggtttattggaggagctaaaagaggtgtgtaattcttctgggttcctgtaggttatgtggcgggatgacctcttctttatcatgtagggagaaggggtgaagtgggtcagaagcaccatggtgtgagaatagttttctaatgagtttctatacagagtgaggcatttgtggctatatactgtctg

SEQ ID NO: 133601 - DNA, 1489 bp, Homo sapiens
cgccgtgggggaaggggcggcgacaccgacaatctggcctggtcttccctggccgccggggagcccccttccctttggcctggtgacccgggcgcacttagcgcaatccgccctggagactgggaagagcttccgagcctctttagaagccggggcccggggagggtccgctttccccctccccatagtgaagggcaaactcgagtttggggcctcgttttcagccacttctaactttatgtttatgtcccacccgttcttgccttctctgacttactgctttattcatccgcccgcattcccgtccctcggtccccctcgctggtcgcccccagacgccgcaccaggctgcaggccagcccttcaagttcactatcccggagtccctggaccggattaaagaggaattccagttcctgcaggcgcagtatcacaggtgcgtgtccggccgcgccatgcgagtggtcgcgggcgtcccggtgccccttgcacccagccgggtggcggcggcgcctgtacttagttcttgcgtccaggcggtggcgtgtggagtctcagttaagacctgtcattcaagttaccccctttcctggttcttcccgggccgcctcttctcttgtctcctcctcctcccattgtttcccttttgccggtttgcactgttccagggagtcctttttcatgtctttaggagttgcatgagaatcgtcaatatttgcacttcatgtatttatttttcagcagactgagctgaaacattggttcaatcgatgtctcagtcctggagtgtgggttcagggaagcaaagccatgttgaaatcgctgtttgccatactagaaaattgggttttctgaggcaaagtccattaaggaaggctagatgcttataacattgcccatcattggtgatggtgagggaggtgggtataatagtataaagaagaaagctcacctgctttggcgtcatttcggattggtttgggtaggatgagagagtggagtcacatttatatccatctcagccttagtttcttcaagtaatgagacttaccttcaaaggacttataaatttttgtaaaatactttgccaatagtgaacttcccagaaaggttagtttctttcccttgttcctatgaagttttacctgattctaactcagaaataactgtattgacattttttgcttttgtcatgcttgagaaaaagcacacagatgaggcgaagtggcttgggtgtgaattttcttactttgtcaggggctttctcattattgaccttttgtctacttgtagataatatctctgcagcttgaggcatacttgcacacaccgtgtttacccagcagggagaacttcaacccactttattgcagtagctacttgacatattttggcagggatttaaaaaccaaaggttttgaaagggaccagcaattgtaggagtaacttaacagataggattttcaaacctagagaccgtttgagttgg

SEQ ID NO: 133602 - DNA, 1078 bp, Homo sapiens
tgaatatttgcccttttctactgattcttggggctatcagagtttaatatcccaagggtcttccacagagttacttctgtatgatccctgtgcctctaccttcattgcatgtaacatgctgttctggtttccagaccggaaaagtttgcagaaggaagcagaagaggaaagaaagctacattcttttctgaaaaggtgattaatcattccccttctatcctgttcccaccgccttcttttttttttttttttttttttttttttttttttttttttttttgcatgttctattcatttcagggattccttgtagcctgctgtagttttgggagtgggtagccataggaacggatatgtgaatgaatgctttgaggagaggctatagtgaggtcatatgacctcacatacggtgagctcatggatggggggtaatgtgaagcaggattcagggggccccacccctgccaggctaacagatcctcatttccttgttctgatcctggctgcagctttggacctcctgtttcctgcagtcccctgggccagcatcatgataccaccctctttcgtcgactgttatgcccagaccctgtctgtcgggtgtgtaacagagcaactgctgatatccagcgactgctgtcttgggagtccctgaaagatgctgctccctctgtgtcccctttggcttcttcagcttctggggctgagtcatcgttcactctggcttccaccccctcagcaaccactccagaagacctaatattgtcctctcggcctaagccctctccaccaccccccttaattctctcacctgacctgatcaccaccttagctgacttattttcaccctcaccactgagggaccctctgccaccacagcctgtttctcccttggattccaagttccccatagaccattccccaccccaacagcttccctttccccttctcccaccacatcacattgagagagtggagcccagcctccaacctgaggccagtttgtctctgaacaccatcttttcatttggctccaccctatgccaagatatttcccaggccgtgaatcgcactgatt

SEQ ID NO: 133603 - DNA, 1046 bp, Homo sapiens
cttcctctcttgttgtcttttagtgattaagaagtgattttctctggtgatatacttcaattttttttacatttgtcttttgtgtctctagtacaggtttttgctttgtggttaacatgaggcctacataaaacaccttatagtcataatggcctattttgaactgatagcaacctttgatcatattaaaaaatgttacacttttactccaccttctctttccttcctgcatttaaattttttgatgtcacagtttacatcttttaatactgtgtatcttttaaaaattattgtggctattatattaataattttttcttaccttcaccctaaaggtataagtgatttacatacaactattgcagtattacagagtactctgaattgattgaatctgatttgcttttaccagtgaggttttatatttcatatgttttcatgttgctaagtaacatccttttctttcagcttgaagaactgtctttaatgtttctttccatacaggtctagtgatgatgagttccctcagcttttgtttgggaaacaacagctttatttttgaagaacagctttgctgggtaaaatattcttggcatcttttcctttagcacttcaaatatgtcatcccactcatttttggtttgcaacatttctgctgagaaatccactgctagtcttactattcccttgtgggtgataagcttcttttctcttgataattttcggatcctctctttgtctttgatttttgacagttttcttataatatgtcttgatatggtcttatttagaatgaatttgattggaaaccactgaccttcctgtacctggatgtttacattttccctccagatttggaaaggacattcctcttggcactgagtctaacttgtgagcattgatgactgatgagtagtgcttgtaggttagtcagagttgagtcttgaaacacaggcacacatggagggactatggctcaggggtacaggaaagtaatggcattatttattaaagtaaactttctgtccctttgtctctctcttctt

SEQ ID NO: 133604 - DNA, 1052 bp, Homo sapiens
gtacttctcagtttcagaatttttttttaaattcaatctctgttaaatttctcaatttgttccatgtattattttcctgattttattgaattgtttctctatattttcttaatgttcactgaacttccttaaaacagatattttagtttttttaacacagttcttacatctccattttttggggggttaactagtgggaaattattatgttcctttggtggtaatatgtctctttgatttttcatgtttcttgttgttttacattgatgcctgcatattttttggagcagataccttttataggcttaaaggctagtttcagtatagaaagaacttcccctagaaggggatgtgagagaactggctgagtagggtgcagaaattctagcaccagtgaggacacagctgtgtagtctctatgcaggtctgtcagctgaggtcagtgttgagaaagattacaggaatcctcagtggccaacactgtggatgtctgcagtggtgatggggttttgggggtctttggtagcaattgctagtaaggtcttcctgatctcttttccttccactttggaagctgtgcctgaggacatttctcttggcactgggtctaatttgtgagcattgatgactggtgagtggtgcttgtaggttagtcagagttgactcttgaaacacaggcacacatggagggactatggctcgggggtacagggaggtaatggcatttgtgcttggtatgcaggctaccctcctgacatgttggtaacaatatatgatatacaagtgcttgtgaagcatctagggaactgagaacaggagtataggtgtgcacagagtaatagtggctctgggaatggggcagggacctagctttttatggtggctaatttggtgcccagagcatggacatgctcagagggaccttggctccaggccctggagtgtgaactagtttgctgtggtgatgcttgtgatgtctgagacatggatgactttagtgtagccacagagcttaggtctagagtatgggtattcatggggcagccacttat

SEQ ID NO: 133605 - DNA, 1027 bp, Homo sapiens
ataggcaataacagaagtggcatcagtggacactttttgagcacttactatgtatcagatattgttctgttgcccactcaccaactcacttattccttacaaaaatctgtgagtaggaactatattaattcccattttactgatgaagaaacagacttatggaaaccaagtagctgatcaagactgctagctagtaactgtgtggagctgtctagaaggtttgtctccagagcccgactaaactccatgctgcctgtggctggttgaaatcattgtggttacctgatagaagtgcagccagtttctagaatcctttaccatcagtcagttgtgatttcaggagtgtattttttttccctgtcttttctgagggttttctttacctgctggctttggcttatgccaaggcctggtggtctcttaccttagtaaaatgtcatgcaagttacagagccatggaatccggtcctgaaaaaaacaaaaacaaaaacccagacacaacgtgacttctccaggtattgtttgtttgtagagaaacagttatatcatgttcacaaatgttaaggtccagcgagagctcagtggtgtgaggagtgggccatgcacaaggctgaggggccagctgctgggcagaaacattttctttcagctggtgtcagtggctcttttcataataataaaaattgccctaaagtaccagtatgtatctccccatattaatctccccattttacacgtgtcctccctggttctgatacgtttacaaatcttttattgtactgcctgtattctttaggtatctctgatctcaaatgtagagagatattcacataaacccttacgtcagctgtcccctggtcctattcttcaaaccctccaaagaacaaaattcccctcagataaaattattttaagaaatttatatttttgccaaagagaagacagatgaaatttacgtagcacgtgctacagtgtttcacaaagaaatcctcctgagacaagtaaattctctccttcctggcgcaaa

SEQ ID NO: 133606 - DNA, 1962 bp, Homo sapiens
cattcgaagaatcattgaagctttagaattttatacatgaggataccagcttttatagttactcaattggtcagtagctacacaaatcatctaattctgaactatctgtgtgtgtgtgtgtgtgtgtgtgtgtgtgtgtgtgtgtgtatatgtatatgtatatacacacacacatacaggtttttctgcatgtacgtgatcctctaaaataatggttgatgtttattaagcttttctccccctcccctaaagtagagtcgtgatctatttgacatgattatttaggtacaaactagactatttaaaataaactgctaatggacttttaaatatgttggataagtttcaagaggtgggcagtgtttttaaagctcagtagatcagcatatgttataaaaaagcaattaaaaaattttaaaagtcatgtgtggcagggactggcttcctttagagttggattaattttttttttctttaatagctacagaatccagaagtcagatttcagcaacaactggaacaactcagtgcaatgggatttttgaaccgtgaagcaaacttgcaagctctaatagcaacaggaggtgatatcaatgcagctattgaaaggttactgggctcccagccatcatagcagcatttctgtatcttgaaaaaatgtaatttatttttgataacggctcttaaactttaaaatacctgctttatttcattttgactcttggaattctgtgctgttataaacaaacccaatatgatgcattttaaggtggagtacagtaagatgtgtgggtttttctgtatttttcttttctggaacagtgggaattaaggctactgcatgcatcacttctgcatttattgtaattttttaaaaacatcaccttttatagttgggtgaccagattttgtcctgcatctgtccagtttatttgctttttaaacattagcctatggtagtaatttatgtagaataaaagcattaaaaagaagcaaatcatttgcactctataatttgtggtacagtattgcttattgtgactttggcatgcatttttgcaaacaatgctgtaagatttatactactgataattttgttttatttgtatacaatatagagtatgcacatttgggactgcatttctggaaacatactgcaataggctctctgagcaaaacacctgtaactaaaaaagtgaagataagaaaatactcttaaagctgagtatttcctaattgtatagaatcttacagcatctttgacaaacatctcccagcaaaagtgccggttagtcaggtttgttgaaaatacagtagaaaagctgattctggttatctctttaaggacaattaattgtacagacacataatgtaacattgtctcaacattcattcacagattgactgtaaattaccttaatctttgtgcagactgaaggaacactgtagtataccccaaagtgcatttgcctaggacttctcagcttctcccataggtagtttaacaggcattaaaatttgtaattgaaatgttgctttcactgaaaaagtgtcttgatgtttcagttatttttaatcgccataaaaaaatagaactatcttttgggtttatctgttttctcatgcacaggcaatacacaaatttaaaatgagttgtgagccaattgtttctgaagtgttttggtagttctattaagaaatagttaaatattgtgcttttcagagcctcagagaaagggggacggggtgggggggtggggcagcggaatctgtcctggatggggccagcttaaataatactggcaaccaagattctgttaggatttctgtgcatatagtgtagtaaagaagtatcattcaggggtgaaaaacaaagagccgttttaatgatgttgagtacatttggctgttttatagcctttttcttccctcccccaaagaattctgtttgcctaactccca

SEQ ID NO: 133607 - DNA, 1214 bp, Homo sapiens
taaatgtgcctaccattttactcagtgagtggcagtacacagtgaaaatgggtggaggcattacatcttttgttgccttgggcatgaaggcttacttctttcataagggtgggcaatattaagtgccgaatatgattctaattaattctttgcagtcttggaggaaaagttggctcagtccttttcactttatggaatttttcagcagtaattttgaccatacgtaatttttgccttaagttgacttcagaagctagctcttcattagacaagattttactgtaaatgcagaatgtttaaactcatcagtcctcttttcctggtatatgttgggcatgtacttttagagatgttttagttttaaagttctttcgtagttcagttgatacataatatgtataatcatttgtacttggtgaaattaaacacagtgcatattatattttaaagctttaacttttgtttaagtatttttccttaatatgtcttttttaaaaacaaactttcagctagtatgttcaacacaccaggaatgcagagcttgttgcaacaaataactgaaaacccacaactgatgcaaaacatgttgtctgccccctacatgagaagcatgatgcagtcactaagccagaatcctgaccttgctgcacaggtgagtttgtaattgtattgaaaaagactgtgcagtgtgaattaaaataacctaatcttgtaattgtgattttggcacatttgtgttgtgtatgatatcttaatacactagaaaaataagtaaactgtgtctccaattttttagaccgtgtgtttctttgcagtaaattaatacttcatatgtaattaaaacaactttatctctgccattcattgactagaaagaagtgcaggtttagtttgtttctacatatgttgagttaggagacaagtacagagttctggaatgcccactcttttgaagataaactacttaatgaaatgtaaatcttgaaagcaattaagagcaatgttaatacatttgaaatacttttatttagtagatcactcagattataatagtcatgctcagaatggcagttgtaaaatagcatttattaaagacgggaatttgtcagaacaatgttctccttctttcaactattgattcccctgctgaaaatcgtatacaggtcccttattaatgtattcctttttctaatttgtttctaaagagaccacag

SEQ ID NO: 133608 - DNA, 1040 bp, Homo sapiens
ggatattgggaagcaatgcattgttaggccttagcagaggatcgaatataggatatgtgcacctatagtaggacctttgtgttagagatgaagtaataatcatttcttactaacatcaagatactgacataaaaaggatgcatctctgtattgttttgaattggggattttttgttttgttttgtttttagaggcgggatatcactctgtcacccaggctggagtgcagtggtgtgataatagctcactgcagcctcgaactcctggactcaggcagtcctcctgcctcagcctcctggaacattgggattatggtgtttgaattgtagcgtctgtagtaggggcctctatgaggtacctgtagaaactagactgtatggtgctgtgcaaacaactgtaatacatacttattttatttttatttagtttaaggaagaaatctctaaacgttttaaatcacatactgaccaacttgtgttgatatttgctggaaaaattttgaaagatcaagataccttgagtcagcatggaattcatgatggacttactgttcaccttgtcattaaaacacaaaacaggtatggttttggaagatgtacagctttaaaattgtggataaatgttcgtacttctaaaagtaactagtgttggctgtaaattactttccctgtcattaatatttaaatagttaaaattctttccttgctgtcgataacaatttttttaaaaagtgtgattccatgttaatgcttacgtgattgtcagataaccatttcatattttacaaggttcattggtatttagttattatacctaaattatttgcattagaacaggcaagtttttagcttttcttttagtaaggaaatttttagacaaagatcatgagtaacttatctccttagcaaaccacgaattgataatcatatttctttaagtctaaggaacttttttttttttttttttaagagacagagtcatgccatgttgcccaggctgggctcaagtgatgctcccatgtcagcctgggactgtaggtg

SEQ ID NO: 133609 - DNA, 1064 bp, Homo sapiens
aaatatttactgaagtatagttttgtgttatctttatgcttttttggttatttttcaaaatgttagcaatgtgtatgggagttgacaaaggtaaaacagattttttaaaaatcagttgtttatattggctgttgtaaattgattatggaaaattttgttcatacacaaatgtagagtgttaggaactttcatgcacctatctctgattttcaacaatgatatatagcttatcatgttttttatatatgccttcccttccttgtccccacaagattttttaaatctcagacattctgtcatttaatgtctttccgtttatcgtgacaaccagaagaatgcccctatatatttccaaaacaccttcttggcagcaatttccttatctgttgagatccactgctgtgggacagtgaggtagagtggtttgaagatgtgattcttttctgaatttggactgatttcttgagccagtcttttaatgtagattcctgggcccactctgaagctttcctatttggacagtctggtaaagcctaagcatactggtgattttggtaaagatctgagaatagtataagtaagtgtttctttatagcatgatgctcttttctcttgtctggttttatgtgtctggtccctggaaagcctttcttcaggttttatcggctactttctttagtagtctttctttagttttcacttagggaaagctttccctgacttccctttatgcttcctttggacttcatggttttacttgactctcattggactgctcaccttcagggagagttgtgtcttttatctttgattttccacagtactgcttgttaataaatattgaataaagtaagtgggaaggatggtcagtataatacagattaagtatactttatccaaaaactttttttttttttaaacagacagacttgggaccagaagtgtctcagatttcagatttttttttctttttttgtttttttggattttgggatatttgccttatatacttaatggttcagcattcctaatttgaaaatccaaagttggaaaatgctccaatg

SEQ ID NO: 133610 - DNA, 1022 bp, Homo sapiens
agttatgtctccataaagcttaaaaaatactattttttggtaggtatttgaaaggatgtaagaatagatgcatgtctttttttttttttgaaacggagtttcgctctcatcgcccaggctggagtgcaatggtgcaatctcggctcactgcaacctctgcctcccaggttcaagcaattctcctgcctcagcctcctgagtagctgggattacagacatgcaccacaatgcccagctaagttttgtatttttagtagagacggggtttcaccatgttggccaagatgttctctatctcctgacctgtcatctgcccgcctcggcctcccagagtgctgggattacaggtgtgagccactgcaccccgcccgatgcatgtgtttaatctagtatcttaccttcaaatcctaaaatacaataaaatgctatataactgtatgttcagtaattaagtcacttatttcagaataacgagggatatcaaaaattttggaaagcatttctgagtttaaggttaagaaacacaaatctagttttaccctctcattttgcatatgaaaaatagttaatctggataggtttgtctttgaagtcaaatctaagtttgaatcctaactaccagtttattagctgtatcagtgtgaggggaagggagacatctgtaacctctttttctgtgtctgaaataggattaaaaactctcttcctcgaaaaattgttgagtattaagagaactggcatagtagtagctaccatttattgactactgcctatatacctgatgtttgcatttatatacattctcgtttaattcttacaaaccatgtgttctgccattcattatattactatttcggataggtactaaagggaaaaatgagatgtctaataatgggagtatagttaaattatgacctgtttctagatatagaatatcatgcaaatggtgttctgtgaagattttctgttagttacttggaaattgcttatcttagataaaaggattatatatcataggattt

SEQ ID NO: 133611 - DNA, 1070 bp, Homo sapiens
atggaggggagtttctgtgtaacttctaattagcttattctgggatttcatagactgttaggttatgtgtaaaattttgaagtacatttacttgaaatgttcaggcagtatatactctggttttagaaagtgccttctgtcagtgcaaacttctgggaaaatattaatatacttagacataatttaaacgtattgagtcaaattgagcctttctttgataaggcaacttgccttagggtcatcatcacacacatgatttaacgttatactgtatagtgtggatctagaactatactgtccactttgataccatcacccacatgtggttaagtacttaaaaagtgagatgtgttaagtgtaaaatttataccagattttgaaaatttggtatgaacaaaataaatatcttaatacttttgatatattatgtattgaaatagtattttgcagatcgtgagttaagtaaaatatcaaaattaatttgaccttttattaaaaacttttttttcagtatggctgcttaaaatttttaaattacttgtggcttatatatatttctgctggacaacatcttatccagaaggttggattgaatcagtatagcaagatatctgagaaaaaaaatgtctgtgagatcattgttttcttatttgctttgttctaatactggacagctgaaaaactcgttatttaatgattctgattaacagagattgcttagctttttttaagaaagagcgtaattgaagtgtaatttgcctaccatacagttcaccattttaaagtctgtaattgatgtaatacattcacagggtcgtgtagtcaattttagaacgtttagaaccctcaaaaagaaacgctgtaccctttagcagttgcccttcgtttctccctgggccccccagccttaggcaactactgatctattttttgtctatagatttgcttgttctgggcgtttgttgtaagtggaatcatgtggtcttttgtgattggctttcacttagcatagtgttttcaaggttcatccctgttgaagcatgtgccggtacttacttcctttttattgc

SEQ ID NO: 133612 - DNA, 1021 bp, Homo sapiens
aaacaacgtgaacagttggtgacaggaaacaacaattcctgaaatgtacctatcagtttccccagggacagtaggtgattggggtattggtttaacgagttccaaaggtagtgtattttgtgaagcagtgaggtgtgtaacatcaaatgagagaaacttttaccaccaacagaattatcacttttgtttttgtctcccagtgcttgtaaaaattttccttaccatttttgtattttcaagcatgcggaaagttgaaagaattgggaagtggatacacatatgtccatcatctacaattagcattttacggtattataatcgattatcaagttcatttaattttggggagcaattcagagtaagttgcacgtatcagtagatgacaccagtacatgtcacttcagcattgtgaacttatttgcctaagttcaacttcattttttacgtttttttgacgtaattttggcagcagtgaaatgcatatggttgccattccgtgagttttcataaatgcttacacctgtgtagcccaagctcttatcaagatatagaacattataattgactagaaagttttttcttgccttttcccagtcatttcagtcacttggcctttccatcaaccacccagttttttttttttatgccctaagttacagagttgcctgttttagaacttaacattaaatgggatcccatagagcctatagtactgtgtgtatttttctgggtaaggcttttttttcccactcagcataatgtttttgagtttcgtctttgttgcgtgtatcagtagttcctttctttttattagtgtgtagttttccactgtatgtgtataccataattaatctattcactgttgaaggtcacctgggctgtttgcagttagttactatgaacagtcttatacaagtctttttgtggtcttactcttttatctttcatggttatatacttagacttggtttgagtaggtcatagggcaattgtatgtttcagttttgtgagaaactatgtt

SEQ ID NO: 133613 - DNA, 1013 bp, Homo sapiens
tactttatcttctaagactgttcactatagaaatacccttggaaaaatagtccaggccaggtttggtggctcacacctataatcccagcactttgggaggcggaagcgggcagactgcttgagctcaggagaccaagactagcctgggcaatgtggcaaaaccccatctctacataaaatgcaaaagttagccaggcatggtggcacccacctgttgtcccagctactcaggaggctgagatgggaggattgtttgcacccagaggttgaggctgcagtgagctgtgactgtgccactgcactccagcctgggccacagacaagaccctatctcaaaaaaaaaaaaaaaaaaaagacaattgtccagaagaaacacaatatattagtttgctattgctgttgtaacaaattaccatgaacttagtggcttaaaacaacagatatttattaacttatagttctggggatcaggagtccaaaattgatctgaaaaggctaaaatcaaagtctgtgtttcttctggaagctgtaagggagaatcgattgccttttccagtttctagaggctgcccacattccttgacttgtggccacatcactccaacctctactttcattgtcatatctcttctgactctctgcctccctctttccttcataaggatctttgtgatgatgttggacccactcagataatccaagattctctccccatcttaatattcttaattgcatcctgcagagtcacttttgcatgtaaggtaacatattttcaaaggttctttttttctttttttcttttcttttttttttttttttttttttgagacggagtctcactctgtcacccaggctggagtgcagtggcacgatctcggctcactgcaagctctgcctcccgggttcacgccattctcctgcctcagcctcccgagtagctgggagtataggtgcccgccaccacgcctggctaatttttgtatttttagtagagacggggtttcaccatatta

SEQ ID NO: 133614 - DNA, 1036 bp, Homo sapiens
gtaccaccatgcctggctagtttttttatttttagtagagatggggtttcaccatgttggccagcctggtctcaaactcctggcctcaggtgatccgcccgcctgggcctcccaaagtgctgggattacaggtgtgagccatagcccctggccttatttgtactttagattcccttatgctttcctcattctgctcttgataattcctttccagaaatgctgtgttgtttctaagccaataatttgtttcatctagatgtatttgttatgggttattttttatgttaagtctataaatatatatcaatttttaggttttttaatagtgctattaaatcaccttgatatatgcttttaaaataaaatagctagtagttttaaaggacataaattactattctaccttttcattacacaaaagcagtaatctgaacattttttgtagttatagtaacctgtgatttgattttggacatacttgtgtccccttgacttgctccccccacctcccaaattatgtggaaccaaaaaactagattatgtggaactcatatgcttaaaatgcaataatatcccttgatatgggtgggatttactaggataagacgttccttaagctgagtaaattagtaattatatactgaattttaacatcttaaacctagaaaagtaaatcagatgagaatcctagaaaactcttaaatgacttctataactcataggagataattttgaaattctttcagtttcgtttttttttttttttttacatttttgtatgttaaattccttcaataaagtttcatctttgtttctttttcatttacagatcacattagtaaaaagactgaggtaagtcttattgtagccatcttgtagaaaacactgatgattttaagaataatacttaaatacttagcagtaagtcttttttgagacataatcatttaaaggacaacccataggtttgtcttgagtgaacccagtcatgtttctgccattatataaggatgtaaaatgcattgttgtagaataa

SEQ ID NO: 133615 - DNA, 1133 bp, Homo sapiens
tgaacattccagttcagttgtctgtctatacagaaataattagtttattggtagaactttaaactttgagattgaagagcagtgggtataaagcattaaaaaaataggttaagagtgggataatgtgaacaaccgctacgcttttgagaaggttgaggaaagaagccagcaaaggaaacttagcagtagtcagaaatgtattaagaaaaccaagagatgcttgaaaaaaataatgtgttttggatatggcaataaagaggagattgaccttaactttagtatcagagaccagcagaagccagatttcagtgggatgaggcaggaaattgctgattattgtcttaaatttggtcttgaaaggtagaaggtagcaatgaggagggggttataggccaaggtatgactttttttgttttcattttaatgtttaagatgtaagggattgagtaaatgaataaagaggtatctctttatacaatttggctagcctaaattttggttttttatttgccttttatctttaaaaaataaactttaagaaacatattacctgttggtgagtttattttacagtttgtaaactgaacttaattgttgttggtaattctttttaggagtatgaagatgctgaaaatacttcaactcagtccaaagttatgaataaaaaagataaaagaaagaatcatcagggaaaagacagacctctcacagtatcactaaaagattttcattcggaaggtaatgtatatacaatgctattatgctaaaagaactattctacatctgttttatacttcagttgtaaatgtctttctaatttttaaacaataagtaaaagttattcatgtatcatgtagaatgtaaaaaatgtaaacctttgtcttagttcgttttgtactgctgtaacagagtacctgagaatgggtcatttataatgaatggaagtttattggctcacagttctggaagctgggaagtccaatatcaagatgccagcatctggtgagggccttcttgacgagtcatcacatggcaagagtgagagcaaaagggggccaaatttgcccttttataaccaatcccacctgtgagggtggagctctgatagcctaattacctgttgaagatcctac

SEQ ID NO: 133616 - DNA, 1020 bp, Homo sapiens
ttgcttgaggccaggagtttgagactagcttgggttaacacagcaagacactgtctctaaaaatttttttttaattagctgggcatggtggtgtgagcctgtattcccagctacttgggaggctgaggtgggagaaccccttgaacccagcagttagaggatgcagtgagctatgatcatcccactgcactcctcctgcctgggcaagaaagggagatcccatcttaacaaaaaaattcacagcattgattttgctagttatttatagttcaagggaaaaggaaaaaagttgctaataaagtgggctgtatatattatatgtgtttcatttccatatccctttctgttacctcaaataacgaagaatgaactgtaaccattattgttacatacccatttagacacaaagcaggaaaattaacaaaaattgatacagctagttttactatgatttaatcatttaaatggactgtcaggttacaccggaaaagtaatcctgtcttgctcaattaggagataaaatttatcaaatagaatattatacaaaggtgacttcttgctgttagacttatggatatatgtctagattctaaagctagaaggattacctgtatccttagaggagaaatagagtaaatagtgttgataaaatgtcgtactcccagccagtgttctttgcacagtcataggtgtagtactcaaaatcattgattttagccgacaataatgactaagagaagggaggaacttcttttgtgtgcaatgggtagtttgatgtgatgacattgatgggtagtcattgagataaaagtcaatattcaataaaacaacttttaatacaattgttttagcctaaggatttttataacagataactaaagtttgggatggcattttctttttcttttcttttcttcttttttcttttttttttttgagacagagtttcgctgttgttgcccaggctgtagtgtaatggcgcaatctcggttcaccacaacccccgcctcccgggttcaa

SEQ ID NO: 133617 - DNA, 1060 bp, Homo sapiens
tcgatctcttgaccttgtgatccacccgccttggcctcccaaagtgctgggattacaggcgtgagccaccatgcccggctggcttaaatcaacactttaaaaccagatatgcttcctagacaaaattggttgtggcaattagtttgttagaatagtacttaccgtaatgaaacaactttgaactgctaataattgctcatgcacatctgcgttatgggaattgaggattgtctattgtgcacttcacatatttctttttctacttgtagagcacatttttcactgcatagacagctgtgtacttgaagaatgtaaacatgaagaaaacactaagttcaataaatgtgtcttctatgtgccagatcctgtggtatttgtaagggatagaaactcttgtctttcaggatcttgaaatcaggatcataggggctaggcacaacaataaagagaatttttttggagtccattcaataatagtaagtttaaagtatggaaatattacagaggagggaatgtttaacttcaggaacaggtcagagaacgcttcatagatatgctagcacctgagcaggattttgaggaataaatggaagttttcagtggaagagatagatggcattgtagacaaaagagaacagcatagttaaagatatgaacaagtaaactaattgtgtgttcaagaaatttcaagttgttttttcttggagtacatgcaaaatctgaagaaagagggttgctagagaaagccctaacgcatgctattacatttaataagtcaaataattggctttttgggtatgaagtatatgtaaaataaagactttgttatatttttgacattgctgccatcttttttttttctttttcttctttgacaaagggtctcaggctgtaacccaaggtgtagtgcagtggcacaatcactgctcactacagcctcgacccccaggctcaggtgatcctaccaccttagcctcccaagtagctgggaccacagtcatgcaccactatgcctgctaactgttgtacattttgtagagaaggggttttgccatgtttc

SEQ ID NO: 133618 - DNA, 9867 bp, Homo sapiens
gttaagattaaagcccttgctgtagtgaaccgccactacaggtcaaactaggaggagagtgtgattcttaaagtgttaatagattaaatcttaattatgtgtggactccttaggaaactgcttggttggcagtttattgtttgatcacaggtcacaatatgaaggtacctactaatactaaattaattgacttattttaccaaagggtgctataaaatctgtgcttagttttattttatacttggtgttatttctgacattgagtactccaaactatctagtcctcacagcacttagaattatattttgatttttggtttggttttggcctggtcgtttttacaaccccaaatagatttttattcttataacaaacaggttagaggattttttagcaaaatctaagagcgtaggtagctattaattttagggaaaggcaaaataattttttgtctttgtatcttctccagaatgctggggcagtgattggaaaaggaggcaagaatattaaggctctccgtacagacgtaagtattaagagtttaaactactacacgagcagcttcagtttatatgtctatagaaatttaaagatttacatcctagaaatcatttcatagtttagctacaaagacatttgtaataatttattattacagaattgatttcgaagttatccattcctgttttaacaaaagcccagattgagcagggtgggggggtggtttctttcaaacctcttcacattttaataagagtccaccaaattattcacttcatcaagcaagataacatcttaattagaaatagcgacaaagtgtaaaaatccttgattgcaccatttcctgtgtgtgaatcaattacagtattactgaaaaccattgcaggtggctggttaaatccagaaaaatttttttgttttctttgggaagaaaaatgtccatctgttctttaacagcttgcacatggagcacaaagaatttaatgttgaggttgcatgatttaaatatgggtaaagaatagagtaggcacttaatcttataattgggaaactgttcgtcaatgcctatgatttgtttgagtcttcattttacagtgggttgactcttgtgattagacacattaaatgttggcagtgccagaagtgagcacatttataggacttggctacaccaaaatttctaaattttttttctcatagtgtacacatttcttaatgtttttcttgctaaaaatgaggcaaataactttgtgtcgagtacttatttgacagtatttcatttctctcttggtcgcagatctttgtatgttcctcttgattactgtaaactgaacttgaaaatttgtttaaaattttacaaacttgcctgttaggatctaggaatgcatttcaaaacctccagaaaaccaaaccagtcttattagttagggtttttggtggtgtgggaatttttgttttgtcttttataaacctctctcctcttaatccagatgttctgtataattatctgggttattaatttccccatttcctcaagaatttcagtaaactttgagtcaggttttgtgtctaccctcatgagccagcctgctactgaaacatcgtttgtttttcttaaaaaataaaaaaggctagaaccatcatttgaggtccttaatgttaagccacagtcagatttagagaagtccattattgtgttagtcttcagaacaacttaagcttgtttcattgagagtatgagtatagtttgtattaaattaaaatttattgcttttcccccttttccctctccttgtttttttggccatatatctccgttgcccatgtactggatcgacttacccctgcgttgcccaccatgacgttggcccatccgcccctgaacgcccatgtgaaaaccctggttggctatgcccaaaaatgtgctcgttgccaaacgggtaccatacttgacaacttctgattgaatgcccatgcccaatgccaacatccacgaacgccaatgaccaatgcagtacaatgccagtgtttcagtcccagacagcagtggccccgagcggtatgtcccaacagtttatgcctcactgcctgattagaaagagagaaatgtattttattacctgccttttatataattaaatagtatcccctttagacggtgtattgtttttcaagtttctgtcttattttccccattaagtctttttgtcactgaacttttaccgtgagttgcccacccaaacgatccactaattttatttcgatggaaggagcacagcttcaagtgttgcatatttgccgcattgtaaatcaaattgttaccaaaatagtctctcgctctgtctttgtggcccaccttgcttcccaacattgcctgttcataattttttctgatgaaatgctaactctggttcactttccttcacttctcatttgtgttgtctttgttttgtcttgcatttgtatttgttttcttgcagagcccattagtgatctaatttctaactggtattcataaccttactccagatacaatgttcaccacttgcatattcccccactttgcctaagagaaggtgtgccagttttaccaatgtaacagcaagggtatccttaactcagtggtggcggggaacataaatattcaactctgcttcagttctggtcagtttattgcccacttaatctgagcccttccaaaagcccattctctctgtctctctgcaagtctcctaatattgttatcatgtctgtattgggtataaaacaaaatgcatgtgagaaatctataaataggctactttaaatggggaatattaaataatcatgtgttacatctctgtgaaagtttgtatgatttggtgacaaacacaaaactcatttttcttttccaccttttttgtactatctggtatttgtggtgtttgacagcatattgagtatcagtgctgatattgaaacaattggagaaattctgaagaaaatcatccctaccttggaagaggtaggctcatttttttttaaatgtatttgacaatatgaggggggaatgtttaaagtatgttgtattggggtatgatgggggaggtggagagacaatggatatgacagtttgtagcagtatcttaacctgctacataattttgtacatgcgtaatttgtttttttttttttaaaaaaaaaaacaggctggccactcctggagtaaatgtgaacttaacctgtggtcatgtgctttcatgggtttagtatgtattttatgggctttagttatcagaaagatttttaaaattagaatatttgtgggaacatgttgaaaaggagaattagttagatttagttaggattttaagactctacataattcactaggtgtatatagagaaaaatattttatgttttgaatcgtcttaatgttgaataaagcagtttctcattatttaataatatagatttaaaatatgttgtagtagctttaccaatatatgcgacaatagcctgatcacgctagacacttaacctattactcttatttttctactttcagggcctgcagttgccatcacccactgcaaccagccagctcccgctcgaatctgatgctgtggaatgcttaaatgtatgtcatagtgccattgaaccccactgaagtatggagcctggcccataggatcgattatatttttaacatagtgtgcttttcccatctctatagaaaaaggcttaaaaacatgatacatgaatggtcttacaactcactgttgaccctgctccatgctgcagtgggaattaactacatttgcaaagtgctttgcagtcatttttattatggtgttatttgaatgttaataataattttgtggtaacagcgacatgctaaatggctgcagtgtgggtatggtgttgcaggacctgaaaataaaatagttttttaaggtggtgcagaatgtcctttttgggcctggctattgaggataataagcacataactggtaaagttattgaaatataaattcaggttgctcactgcaacagtatattattgttatgcttatagcagataagtgtgtattggggaattgttgatttgagactaaaattttataattctccctccacagtaccaacactataaaggaagtgactttgactgcgagttgaggctgttgattcatcagagtctagcaggaggaattattggggtcaaaggtgctaaaatcaaagaacttcgagaggtaaaaaaaaaaaaattctgccgtattctttgctggaaagtaaattttcatatagacttgtttctgtgagcttctctcgcttcccctctcagttccctccaaagattgcttatcgcaaatgacaaaaaatgtctggcactgctagacatgttattttgtcaaaatttttataccattgcaaagccctgtgataattaatgaagtttttatattgtggggggttaattgttgaattcaaatgcaattttcactgaacctaggaaagctaattttcttctaattattattatttttttttatgatcttactacagaacactcaaaccaccatcaagcttttccaggaatgctgtcctcattccactgacagagttgttcttattggaggaaaacccgatagggttgtagagtgcataaagatcatccttgatcttatatctgaggtacttcagaacactttttgtttacatttgattttatgaaacaaagtgataaccttctgcaaaagtagcttcagagcatttagtctaatagtctttatttgccctttccctagcaattttctatcacctggcttcagccatcactttaatttaaaaatggttttgaaaaagtggagagtggtaatttgttggtggtatttctatagcctttgagcctttgaatgaatttcctatagtgttgcttgtgtctttgtaactatgctgcagggcttcctatctcaggtgcctcagtatggattacaggcttgccaagactgatctcttcagcccttgttgtgaaatgtgcattgtagtttgtcatgtgtaaaatgggagggctttgtggtttcttacgatctaagtgtaagagcaagctattacttctccctgtataggcaatagaactcacttttgtttagcatttgccaaaagtattggatttctttggaatctttactttgctacttttagcgttgacataattcctgtttctgtctctagtacctcctgatgggggaatgacttacattttgtttgatgatgatgttagaaggattggtatgaagcaggactctttttcttcagtctgtaagtttgttccatctctgtttttagtctcccatcaaaggacgtgcacagccttatgatcccaatttttacgatgaaacctatgattatggtggttttacaatgatgtttgatgaccgtcgcggacgcccagtgggatttcccatgcggggaagaggtggttttgacagaatgcctcctggtcggggtgggcgtcccatgcctccatctagaagagattatgatgatatgagccctcgtcgaggaccacctccccctcctcccggacgaggcggccggggtggtagcagagctcggaatcttcctcttcctccaccaccaccacctagaggggggtaagttgttttttttgttgttgttgttttttcttcccccatctatgaattattaacctgcaagaggctgcacttagtggtagacaaggtagactttgatttgatatgtgtggcatgtaagcacgtttagattacaacaagtactatgcttgcagagacctcatggcctatgacagaagagggagacctggagaccgttacgacggcatggtaagaactttggtttattaccagtgtgttgggtatgtgagggttgtcacaatgtagttcacgttttgttgaaggttatagtgattaaaaagtttttcttacaagtaaattttgtttggattactagttaaataattctgttatttgctgctggaggattacgactttattgagctttgttcccctcgattacaaaattgctgcctatatatgtaccctcttttgttttaatgtaacatgcaaattaggcatattaaaaacagctctataacaaaatacaatgcgggttcatgttaatgtttttatctctaacaggttggtttcagtgctgatgaaacttgggactctgcaatagatacatggagcccatcagaatggcagatggcttatgaaccacaggttgagtatcatagttgttcgtgtgtatatcagtgataatttaagatgcttacctgctctccagtaagttttttattcccctgaggatacttactgaaaataggatacaggaggactttggtttcctgaagagggattttatgagattaaaatacttgaatagtgaagctgggtgcagtggtgctcactcataatcccaactacaaaagagtctgaggcaggaggatcacttgagcccgagagtttgagaccagcctgggcaacatagcaagactccattttattaaatgaatttttttaaagtaccggtagtaattacaacggcaaagtaattttctatttttttctttctgtttttagggtggctccggatatggtaagttctctcctttgtgaagtcaaacattaatttcatactttttaaatgaacttactgctcattatttaaatcagattattcctatgcagggggtcgtggctcatatggtgatcttggtggacctattattactacacaagtaactattcccaaagatgtaagtatctttaatactaccaggaacattttatcacttttatgattattcctcctttctgtatattttttaattcagaaggttttaacaaaaatacacatttaggattgaggttatgttaatgggctttagtgagctgggttttcagctgtttgagtcttgtcaagtgatcagtgctattaataaaagtagttaagtaggttttgagcccttaactaactaagggaaacattagtaagtgtgacataaatacattataactcaaaccttgacaggtttagggagcgttagatcatcagttaagattctgaatgaataaaattaataacttcatgctccttgaaaatacaggtagtaaatgttaaaagtatatcgtaaacacatacttttaaaaaatcttttcagttggctggatctattattggcaaaggtggtcagcggattaaacaaatccgtcatgagtcgggagcttcgatcaaaattgatgagcctttagaaggatccgaagatcggatcattaccattacaggaacacaggaccagatacagaatgcacagtatttgctgcagaacaggtcagtttaagtttagctttgtgttagcttatacatactaaaacctttaaaaagcttttcttctcaattgatttttttcttttagaagccatggtgtctcaaccttttggggacctaacttctaaacattctaatagtttgccttaatttttcttctgctttcttactaaaaatgaagacattcaatactaatcttgctggaagaagccttaaccaagcaaacttctcatttctctggtgaaaactgctgccaaaaccacttgttaaaaattgtacagagcctgtagaaaatatagaagattcattggatgttggcctagttctgtgtggaagactagtgattttgttgtttttagataactaaatcgacaacaaatcacagtctgccatatggcacaggccatgcctctacaggacaaatgattggtgctgtaaaatgcagcatttcacaccttactagcattctttgtcttttctaccaaatattaacaactttcaattccgttttcttaattctgttctactaatgtccgatttactactcatcatttttcttgacacttaacattgctttaatttgtaattgctaatggtttttgaactcttctaattgtaatggacgtgtttatcattttaatttagcattgaaattgtcttgatgttgattaagatgttacgagcaaaaattctaattcgcacttttttttcttttcttttatagtgtgaagcagtatgcagatgttgaaggattctaatgcaagatattttttcttttttatagtgtgaagcagtattctggaaagtttttctaagactagtgaagaactgaaggagtcctgcatctttttttttttatctgcttctgtttaaaaagccaacattcctctgcttcataggtgttctgcatttgaggtgtagtgaaatctttgctgttcaccagatgtaatgttttagttccttacaaacagggttgggggggggaagggcgtgcaaaaactaacattgaaattttgaaacagcagcagagtgagtggattttatttttcgttattgttggtggtttaaaaaattccccccatgtaattattgtgaacaccttgctttgtggtcactgtaacatttggggggtgggacagggaggaaaagtaacaatagtccacatgtccctggcatctgttcagagcagtgtgcagaatgtaatgctcttttgtaagaaacgttttatgatttttaaaataaatttagtgaacctatttttggtggtcattttttttttaagacagtcattttaaaatggtggctgaatttcccaacccacccccaaactaaacactaagtttaattttcagctcctctgttggacatataagtgcatctcttgttggacataggcaaaataacttggcaaacttagttctggtgatttcttgatggtttggaagtctattgctgggaagaaattccatcatacatattcatgcttataataagctggggattttttgtttgtttttgcaaatgcttgcccctacttttcaacaattttctatgttagttgtgaagaactaaggtggggagcagtactacaagttgagtaatggtatgagtatataccagaattctgattggcagcaagttttattaatcagaataacacttggttatggaagtgactaatgctgaaaaaattgattatttttattagataatttctcacctatagacttaaactgtcaatttgctctagtgtcttattagttaaactttgtaaaatatatatatacttgtttttccattgtatgcaaattgaaagaaaaagatgtaccatttctctgttgtatgttggattatgtaggaaatgtttgtgtacaattcaaaaaaaaaaaagatgaaaaaagttcctgtggatgttttgtgtagtatcttggcatttgtattgatagttaaaattcacttccaaataaataaaacacccatgatgctagatttgatgtgtgcccgatttgaacaagggttgattgacacctgtaaaatttgttgaaacgttcctcttaaaaggaaatatagtaatcttatgtatttttttgtgtgaagtgtttttctagcatttataagtgaaagctggcaggggtggtagttgggctcataattaacgtggtaatttagcaaaatgagagcctagtcatccaattttttttttcttatagtcagccagagctttcctcattacctatgagaaattttgagtgagttacttggttcctttctctaaaatagctttagtttgatgtttgagaatatcggagataatgtaaaataactgcagagtatggttcccggctcatatttctgaagtactacttattaacctccagctgtccagaaagcttgaaaactgtttttgttttgttttgttttgttttttgagacagtgtcttgctgtttttcccaggctggagtgcagtggcataatcttggctcactgcaacctccatcttctgggcaca

SEQ ID NO: 133619 - DNA, 1940 bp, Homo sapiens
acggtcagggctgcctcgatggctttgtctcgggcagtggggggaggatgcgggggatgagacctcgggaccgcgtggtgggtgggggagggggtcggcgctcggctccgcctagtagcacgtagtcgccattacgcgggccgccatttcctgtcggatccgggtgaggagaggtgcggtgcttctgctgtcgactttcgctttttcccgtcctgttacccggctgtttttgatctcggtgccgggaggcggggaggggagggcgcgttggcgctcggccagtggagcacatacttagcggatttttgaggcctggggactagtgactgcaggacccgaagggtgaacggcaagcggcaacgttattcttacagataagccctgctgtttttgcttaaactttcttatccaactcttctcccaccacacctcagaaattgcgtgctgggccggaaggatgtcgtttcagttgtcgttaggagagcaataagtcgaccaacggtatgggagaatgggaggcataaatgtgcctcgcttgttggctctttgctgtctagccaaccttctagtagaggccgcttgtcaactcctagtcccgacaagagggaagcttaaaaaggctgtttgtagtcctatcgaccgttttggcacgtagacactttagttttcgtgttacaggcatgattgttgtgttgtactcccttaagcctaatttaaaataatccgctagtgactgttagttttcaagggctccatttgtttcgctgattaataatagactggtattgtggtagtttgggtctggtcctatattagatttttggatttatccctccggtagattgttctggttgttggatgtgttcgcaattgccgttgtatttgtaaactttagagatgtcacataagatcgcttcaagcatgagtcgaaagaaataggaaagcaattggaagttttaatataaaattagttttcccagtgaataagatgcattgtaacttttcataaatgtatgctttgtggatgacatttatcttttcagggttttgggaatgtgccgtataaaacaattcattgctgtggtgggacttaatccagtggctaaaagttattgttctaacttagcaaaaaatgaaaccaggctcccttgaattttgtattttttaggcagtcatttgaattgtgaaaccctaaaatgaagaatcaagttttagaaacagctggttttttgggttcaaatcagtattcactgtgatcggaaacaaatattcagtaataagaataaacaaaagcaaaactgatttgtgttggttcttataggctactgcagcactggggtgtcagttgttggtccgacccagaacgcttcagttctgctctgcaaggatatataataactggtacgttctagaagcaatgtcttttttttttttttttttttacagcttgctttccaataagccaaatgtactagctgctttatttttccacagattggtgtgcccgtttaataaaagaatatggaaactgaacagccagaagaaaccttccctaacactgaaaccaatggtgaatttggtgagaagaaattttagttttaacagtatttttttatcctgttaataaattgcctttttctgttaattattgccttaggagtgtgtggtgaatttttggtattactgtttatgtaattctgcgattatcagtagttacatcttagcttttatttatgaagtagaagtaactgatttgcatataaagaatttttcttgcattttgggatttcaaatcctttgaagtattttgtggcagtattttgtgtttggtgcattttactagatggaagcataacgttcaagtctgtagcaatgcctttggtcttttcaaaacatgcctaagattagcaacaagtctcttgaaacagaatggagttact

SEQ ID NO: 133620 - DNA, 1067 bp, Homo sapiens
ggaccattacaaacaacgggtttccgaagcgtgggcccggcccagcggacgcagacggcccgcacttaccgcgccgcagctcgtcccacagcccacagaccacagcccggggcggggtaaggggcttcgggcacgagtgtgggctgtgaaaacacgggcataagtctgggccgagcaccgacctgggcgtcccgcattttcctcgcgcaacatcggtccctgggcagcgcaactgtaaggacaggaaccgccgcggcgcgctcccagttccttttttacctcttcccgcccgatttgccgcgcgctcgcgcccctcctccaaccccaaaggactccttcggggctggaaaacgccccttccccgccccctccctgtgcgcgtgaactaggcagttgttagatctcgcgagaggttcgccccctagccgcccctccccccagctagtgagtgcgcgaacgagaaaggaggagggcgctccaggcgacagcactgcagacgccattatcctctgtttctctgctgcaccgacctcgacgtcttgcctgtgtcccacttgttcgcggcctataggtaattggagttattggagcttgggtattgctgattcgggtaagggttggggctccctgaaaggctgcgtttacttttcccaagcccgggttttctcgagcccttagtggcctcccagcccgaagggaggcgctggcgggaggcggggttgtcgcctcctccgtcgccttgattgacgtggcctcgggccaatcgcttcgccctcgcaccatcgctgaagccctggcagccaatagggcgcgacggcggggaggacgcgagaaggcgggggaggggagcctgcgctcgttttctgtctagctccgaccggctgaggcggcgcggcagcggagggacggcagtctcgcgcggtgaggagccgggttgggggagcggctcgtggaggtgagggtcggagcccagtttttccgcttgagggaggcgtcctgggagccgctttggtgtttggccgcttctccgagtgggaacgttgcccggtgtcccctcccccacctcc

SEQ ID NO: 133621 - DNA, 2096 bp, Homo sapiens
agtgttgacattttatagatgaaaaaactggttacagaagttgagaattttatattaggtcacatatcttgtaacttgacagagccagctttcaaacctaggtatagctgtctcaaaccttttgattttctcattttaccatctgattatgtgtagtgtttcaatttcgaccatgtaagatgctgaagagtgaaaaatctaaagggtgtgcctgtctgtgcattgtagagaattacagaagctgtattcaaatatactgaattatctaaatttttttgttttttgttttcaggtaatagatgcatattatttcttttatttaaaagaaatgaatgtgactagtattgcattaagagctgaaacttggcttttagctgcatggcatgttaaagtacctccgatgtggctggaagcttgtattaactggattcaagaagaaaataataatgttaacttgagtcaggcccaaatgaataaacaagtgtttgagcagtggctccttactgatctgagggatttggagcatcctcttttacccgatggcattttagaaattccaaaaggagaattaaatggattttatgctctgcagattaattccttggttgatgtaagtcagcctgcatactcccagatacagaagttgagaggaaagaatacaacaaatgatctagttacagctgaagcacaagtaaccccaaaaccttgggaagcaaagccttcacgaatgttgatgctgcagctaactgatggaatcgtacaaatacagggaatggaatatcagcctattccaattcttcatagtgatcttcctccaggtacaaaaattttgatttatggaaatatatctttccgtcttggtgttctcttattgaaaccagaaaacgtgaaagtgttaggaggtgaagtagatgctcttttagaagaatatgcccaagaaaaagtacttgcaagattaataggggaacctgatcttgtagtttcagtcataccaaacaattctaacgaaaacattcccagagttacagatgttctagatcctgcattaggtccttctgatgaagaactcttggcaagtcttgatgaaaatgatgagcttacagcaaataatgacacttcctcagaacgatgtttcaccacaggtagttcctcaaataccattcccacaagacagtcaagttttgagccagaatttgttatttctccaagaccaaaagaggaaccatcaaacctatctatacatgtaatggatggagaattagatgacttttcactggaggaggccttgcttttagaagaaactgtccagaaagaacagatggaaactaaggaattgcaaccattgacttttaacagaaatgccgatcgaagtatagagagattttcacataatcctaatactacgaataacttttctttgacttgcaaaaatggaaacaataattggagtgaaaaaaatgtatctgaacaaatgactaatgaagacaaatcatttggttgtccatctgttagagaccaaaacaggagtattttttcagttcattgtaatgtacccttagcccatgattttacaaataaagaaaagaacttagagacagataataaaataaaacaaaccagcagttcagatagccattccttaaataataaaatattaaatagagaggtggtcaactatgtacagaaaaggaattcacaaatttctaatgaaaatgattgtaatttacagagttgttctttaagatcatcagagaatagcattaatctttctattgccatggatttgtattctccaccctttgtctatttgtctgttctaatggccagcaaaccaaaggaagttacaacagtgaaagtgaaagcatttattgtaaccttaactggaaatctctcaagttctggtggtatttggagtataactgcaaaggtgtctgatggtactgcatatctagatgtagactttgtggatgaaatacttactagcttgatagggttctcagtaccagaaatgaaacagtcaaaaaaggatcctcttcaataccaaaagttcctggaagggttgcagaaatgtcaaagagatctaatagatttgtgct

SEQ ID NO: 133622 - DNA, 1052 bp, Homo sapiens
tccctactttgaagttttgggtatacaaaaagttctttgctgactttgtccctttcttccttttaggttggatggatcatgctagttactacgggatcatctcctattgaatctgtagttgcttctggcaatatatttgttggacaagtaagttgtaatatcaacagaacaaaacatctgttgaaatggatcgtctctttccaaaaagccaaataagaaaataacacaatgttcttttagtgtagagaaaatggtgtcaaaataagaaacccccagtattggcaatgtccggattccagggggagaagagagagagacagagagagagagagagagagacagagagagagacagagagacagagagacacagagagaaattccttttaacagtctgggtatggtatgtagaattgggttcttgagaatgtttatgaagaggatggaaggttgtcattttattaaggcatagacatagagcttctcatatagattctcaataaatctgaatttagtgattgtgaggtttctggtcaactcttcagaggctggtagctcttccacttgaatggatttcactatctcgaaatctccaagctacaaacagcctcccattctaaactataatgcctgtggcaatggaggagaccaagaaagcctttccaccaacaaccatgcaactgcgtaaatacttgagcttattctcaacttgtctgaactggccaatattctgtctttgctgagcctgaagaaaaatgcttttaggtttttctcttctcatcaaaaataagcttttagacttcaattttcacctccctgttccatcacatggagaaacgctcttttgcctgaagcccatttaagcaaataaatatcatgccaaggagtgtccctcaaaatagcagcatggctaaggggtggatcagtaagaaattgtaataagcccctcatcactccagatatgcagcttcaggcagaatggagtcacacgccacgaaaaccaggtatgaacgcttgccagcaccactgcccaaggaaactgaatttgaagca

SEQ ID NO: 133623 - DNA, 1051 bp, Homo sapiens
ctttttttagaggatggaaaattaattttacagggaaaacttgtataaatttcttgttacataaaaaatgccttggagcagtgatttaatgatttaaaaccatttgctctgaagtttaaacttatgtattggataatatgccagtgttgtattttgtgtggtctcctatagatagacactatttaaaagtgtctaaatgggaatgctgtgaagaaggtttagtggtgtcttagttgtgctggagagtaggtcaggtggattttctttatctgtatggtctgttagaattatgggtaatgttgctaatattgctatttacttgaaagggaatgtttcagtagcaataagttgcccagcatacactgacatctgggatagagcagatctatttctgatgtttcctcttttccctttgttggtgcctgtgaacatttctaagccagaaatgaacagggaggagtggtggtaaattggggcttaaaataactcaaaaaacctcgtcctggttcctgcttggccagctgatccttgatgtttcttcaggggaggaaagatctttcattctccaattataaataaagcttgggagagggaccaccccacagtgattttaattcatcctgtggggtggttctcaaacttgactgtgtgccaaaaactcctataggacttgagaaaacacagattcctgggctacccctagagtttctgctttagcaggcctagtgttcacctgacagctggcatttctaacagtttctggagaatactgatcctgcttgccctggttgttgtgttctctacacaacagtgtagggaatcactgttctctacaataaacatgggctgccaggcccccttcagaatgtgacaagatgttggtagagacatcgcaaaccaaactcacccacagctttgcacacattttgggatccccatatctcaactgcacccaggcccaggctaggcggctgctctgtgtgtgccgcaccctaccatggcatttggcggttctcatgtttatcaggtgctttccttccttagaggcact

SEQ ID NO: 133624 - DNA, 1020 bp, Homo sapiens
gccactgcactccagcctgggcaacaagagtgaaactctgtctcaataataataataataataataattacaaaaagactaaagggctaagtttaaaaaatacatagagtaaaaaactagtgaaataaatatttagaaatatgtttaccaccttagagcaggaaagatcttcctaagcaagacacaacttaaatggaaaagatggacagatttgcttttataaaaaggtaaatctctttggttaccaaaagacactatcaaaaagtcaaaagactagaagaaaatatgagccacaaatatcatgaataaataaatatatatatataattggcaaagtatatctataactcaacaataaaaataaacattactcttatttttcacatgataaagatatttacattcattattaatcaatgtatcatttaaactcaaatagccaaaagattgataatattcagtatagatcagagtaagaaatgaaagggtatccttacatactgttagtgggagactaaattggaaaggcatttatgcaaggtaatctattcacatttaaacatatatatctttcctcctagcaatacatttccaagtatctatctttatacagaagatattatttgaaaattacttgaaataattttctgaaaacttggtaaaaacataaatgtccattaaaagaagaaaagtcaaataaatcataatttgtcaataatattaacaacattacatatttatagagcaattactaagtgtcagaaacattcccaagtggtttatatatataagctcagtttgtcttcataacaaccctatgggttaggtattagtattgtcccattacagacggaaataccgaggcaagagaggatgagatatttgctcaaagtcacatagctcgtaagaggcagagccaggtttcagatccaagtagcctgatatcagacaactgggaaatactattaaatggaatgtagtagatagctaggtactgataaagaaaaatccgcaaggcaa

SEQ ID NO: 133625 - DNA, 1032 bp, Homo sapiens
tataaaggaaacaggtttaacggacccacagttgcacagggctgaggtctcacaattgtggtggaagatgaaggaagagcaaagagacttcttacatgacagtgtgcaagagagagcttgtgtaggggaactgctctttataaaaaaaaaacctcagatcgtgtgagacttattcactatcacgagaacagcatgggacagacccacccccatgattcaattgcctcccatcaggtccctttcaagacacatgagaattatgggagatgcaattcaagatgatatttgggtggggacatagccaaaccatatcactctgacaagatgcatgctacctgcaaattaacagtaaacagattcactgggaatgccaactaaatagaaaataccttctattgataacttagaggcaatattttctggagatgaccgcacatttgaaggtatagtcagggatatttagtgttggctccagatgcagtatttcatatgtcaacagtaaagagactgtggctacacaatagagaaaaagattacatcattacacaccataataataaaggatctcaccagaagtgcagggcagacttttgtagtgagtgtgtgattgtatataatggttttgtaacaaggtggtagatattaaagctggaggggaggctcagatgattctctgtcctgtactattataatatttctggtctttatgcaattttcatttacaggcaatccaggaagcaagtgcaggaaaggctcagttgggtggttgactatactcaagtcttgccaggacttctaaagttgacaaccacaaccataaatagaaacaccacttcattctcaacattctccctccccacagcaccctcaccccttaagtcacctcccccttccttccttacactgtcgctgaagacagagatgactcttctgcttcaatccaggatattaatgtctacaaaagacttaaagaattgaaatagagatcaggtcactagctcactggctcattctctctctcattctctttgt

SEQ ID NO: 133626 - DNA, 1067 bp, Homo sapiens
caaagcaaacttaacattattgatttttgagagcccatgccaatgaatgggattatccaagactatagcccttattttccattcttaggtttccattatgcaagtctgtacacagcagatccatcttttcaaacatgctggttttctggtaatatctgagttagtgtctctgagtttgctaacccataagcattttaggtgatgggaaataaatcagactagaataaatatgtactattgagcaatttgtaaagagaaagagctatatgacagtaatgaagaattaagaagaatcgaattcccagatatttgggggaaaagaggtagaagacactgtttcacaacatgcaggaccagaggagagagagacgtagtatggggaaatatgtgggaagaagataggagatcccaaaaggtgacagccaatcaactattttccaaaatatagagagattaagaaggggagatgaagcactgtgacactcagtcattcctaggctaaatgtgtgagacagaaaaccatattttaggagatttggataattagatctccactatcaccatcaccaatggtgattcaagaaagattaattcagacaaagacggcaaagtactattaataatttgtcaggaggacaataaacagaaaaatcaagtgctcttttctctctgcaaatacatggcctcaaaaatcttgagtcttaaaatcttagtttcatccttatcttttcagccaaaaggaatgctatgcaaaaagcatggatgggttctacttaatgtttaaccattgtgaggaggaaaaataaaattctcacaatgtctttgttcactctgaaaatgcatcagctgagttttcagtgtcatttttctcccaatagcaactaagatctcaagaagagaaaattttactcaaattatattagccttgcaattaatgatataatatcccaggccttagagtagattagactgtataaaaggaatcaggctgaagatgagaagaatttcaagaaaaagtcaagacataagtcaaagtctgggtcctatccctttctagtctcaagtgg

SEQ ID NO: 133627 - DNA, 1050 bp, Homo sapiens
aggtcttgcaaaaaagagtttctacaaacaaacctcttgcatgatcaaactacctttactgtcgaaaaattgctaattatgactgttttgcaatggcttgctagagacagctcgtacttctttgtctaattttcaggacttttttgagctggctgacttcatggtgggaatgtttacaccgcggaaatcagcaaacattacaaattaggaccccaaccccactgtatccttgagtactagttcctgaacatttctcagcatactattgtcatatgctgtgtaaaactattcgtttttccttctccaaactctcttgttctttgagagctgagaaacactctgagtcaaagaagaaatctgttctacaatatttctgaaagtttcaggctctttgtggacacccagagcaaagggaaattaactgttttgcatgataacccatttagggacaacaagactactgtattagaaaatgattattaaccccaatttatctctgcttttcttcctactactattttccaatcttgtaaacatccgttagagtttctccagagttctctgaacggtgtcacatctctcatcttgagaataagaggaggttctgtactaaaatgggacaaccaacactaggaagagctaccagtgactctactatttatgatgcacaaccccacttgtttcctttctataacttctcttttcctgtaaggggcttaactgaatgcccagactggaagtttcccctcaaagtttctgatagaaacaaccatgagtacaatctaggtattaggaaatatatcttccatggccaccagaaaatatttattggtcctaaaacccaatgataaagatgttctaatacctattaggaggagacagttctctctagcacttctgtatatctcacaaagaaaggtactgactgccctttgttttggattatcttttcaaagatgtttgtatagtgaacagccttccaaaataaagtgtctccaaaacaaagagcaggcataattactgtccattttaaaagattcagattcccta

SEQ ID NO: 133628 - DNA, 1096 bp, Homo sapiens
ttacagcctgctaatattagactgagttatttgaacttgatctaacccagtggcagtcccacctcccatcacaccccagtcttccaacctccatctcctcatgctgccaagtcttctttctatagcatacacttaattagggtactcctccatgcgaagtctttgggataaattctgtccatactgtcaactccctagcccccttcatgccctgcccccacaacccagcagtctcttctcccaattctctacccccgttctctgctcaagccaaaccagactcctagcaaatgtatgaatgccacacattttcttacactttcacatcttgggacataaaatttctacctggaatccatccctctctcttctccatgctctttccccaactctcacactctgcaaatcccaaagcctccttcaatgcccatctctgaggaccattttctaggcacctttcaaactctatttaaagtatccactgacttcacattttccctccaaagtgtcattccctgggaaataggaccatctaacccaatgcctgatacagacacatatctgaaagtgaataaaattaagttgaaatccctgacagtagatactaacccttcagggatgaatctgactcaggaaatgtctgagaattattcagagccaagtcaagtaaagaacgtgagtgatcaagctgggtaaccctgtttagagtccaaaaccatttcaacaaaatatacattgcaatacagacacaaaaatgtgatacagatacaaaaatacattgtgataaagagcactgtcaagaagggaaagtcaatccctagacacacaaaatgtcccttcacaggtcacccttcacagttcttctaaataaacatctgtgagaggcaatgtcattaagagcatttgttgcattatattttaggggtctctcatgctgggaggtgggacagcgagaggacattcacagtaggagaacagcctatttcttatcaaagaaacaagttctggaatatctactggaagcttcagtagtttctcttgatctctcatatgtgagaagtattgtatattacacttcttacatttggggaagtca

SEQ ID NO: 133629 - DNA, 1151 bp, Homo sapiens
ttttgccttataaccacacttctttctccacatgtacatatagcaggctcacctcaaacatgtaatgtgaatagtaaatacattcatcagatttagaatatagatcctctgtcttccaactatcatgggtgatcaaaatagccagactggtacagcctatttcagcaaatagttggtttttacctatgacgcaagttttggttttgaatttaccattcctgttgtttaagggcctgtgtgatggagggtgggaggaggagtgaggaacaatcctttaaaggacttctgtgatatgatttgcatttttaaatcactgctaacatcatctgttcagaggtctcaggggaagtacaataagaggataaagaaggtgctttctctagtgaaatgcatgaacttgaattaaatagaatttatgactctctggtttctctctgtagttcccaacctcctagagaaaatgaattctactgtataaatgggttcaccaaaaacactttataaatgttcagttctcaaggaaactaaattgcgagaagaaaaaaacactcactaaggatataaataaaccccctaaggacttatttttccctattgatctaaattaaaatgttaataactcagatggatggttttctagtattttgacttgtactggctattagacacttttgtcatcatatgtgggcatgaattagttgaccaacattaatttattaaacatcttctgccctcaccccctcaggagatgtcactaaagggaacagagtccttagctggcaccttgcatgtgtgtaccactaaataagtatttgttgagtgtgcagcatgtgaatgaagagttttaaataagcacagagaaaatcgatgtctgaatggaggtcctctgtctctcctttcttcatacacgtacccaaatgtacacaggcacactcatgtgtcctcaaagagtgactatcaaactctacccctgtaacatgcataatctaatttcacttccaccacagcaccatgaagaaagagtaccattcccattgtccagaagatggaaagccagcaaagaaaggtgaggactggaactagagttaacaataacatacagtttcaaatagctgggaggaagatattgaacattcccactatgaagaaat

SEQ ID NO: 133630 - DNA, 1050 bp, Homo sapiens
actccatctcacaaaaaaaaagaagaaagagatggatatgatgccatctctgccctcgaggaagccttccacgtgatagtggggatcaggcaaatgcaccaggctgtggtgattgttgtctttcttggtatcatcatctatgttccagggtctgtttctggtgctttatgtgaaataactcatttaatttctataacagccatgtgaagcaagtttcattaccatcctcattttagggataaggtaaccaaggctaacagagatgttaagaactcttcccaagatgaaatacccggatggtggtatggacagtgttatgggctcagttgtgtccttcctcctctctctgtatccatatgccgaagtcctaatcccaggaccttggaaaatgactctatttggatattgaatctttaaagaggtaattaaattaaaatgaggtcattaacatgggccccaatccaatgactggtctccttataacaagaggaaattaggacacagataggtacagagagaagaacatgtgaagacacagaaagaggatgaccttctacaagccaagcagggaggcctcagaaaaaaaccaaccctgctgacaccttgatattggccttctagactccagaattatgagtggccggacgtggtggctcacacctgtaattgcagaactttgggaggctgaggctcatggatcacctgaggtcaggagatcgagaccagcctggtcaggagttcacgagttagtgaaacctcgtctctactaaaaatacaaaaattagccgggcatggcgatgaacacctgtagtcccagctactgaggcgggggtgcgggggctgaagcaggagaatcgcttgaaccctggaggcggaggttgcagtgagccgagatcacaccattgaactccagcctgggcgacaagagggaaactccgtctaaaaaataaaaataaaaacaaggaaataagtttctgttgttgaagccacccatctgtgttatgtcagcctcagcaaactcacacagacaggattcagacacagactggc

SEQ ID NO: 133631 - DNA, 1038 bp, Homo sapiens
ggccttccatgtcattgtaagactttggcttttacttggaggaaaatggggagctattgcaggcttttgaggggaggaggcatatgatctgacttatgctttaacaggatcagtctggttcccacgttgagactcaagaaaggacagaagagttcacaggaagactaggtaggagcccataacaggaatccaggtgagagatgatggtggctcagacctaggtgggagccatgtgttgtgagaaggggtgagattttggatatatatcgaaggtagagaatgctgttctttgatgaattagatgagaaaaatgagttaggaataactccaaggtttttggcccgagtcactggaaagatggagtttgcatcatttgagatggaaaggttgcagttggaatgggttttgtggggaagagccaaagttcaggtttggacatgctcagtttgaggagcccaccaggtaaccaagcaacgttgttgaataggctgttgaatatatcagtctaaagttccaaagaaagaatgaagctggaaataaaaatttggaaattgttggcatagagagcatgtcctatgtgccagatatcatgctaggtgctaggaatacacggtgaataagattaacgcgaggtcttgtgcaaagttttccaaactatgctttccaaccatggttctgcataggttaatgagtattctgaggggggaaaaaagctctatagtcaaataaattgcagaaatgttatgtgtcactctttggattcataatgcatatgaacattttaaaggctttgagaagttctgcactaaagaaatctgtttaaatgcgtttaacccagatttccccaaatttatttttcattgcgtttttaattcccttttgtaggcatgtgtattaccctctgaagataacaaatttggaaatcctgaactggcacaattgataatgcaaataactaattatgttgtgatgtgacaagggtctcaagtgagatgttcactaagttttattgaagacaaatgtaatatatttctactt

SEQ ID NO: 133632 - DNA, 1176 bp, Homo sapiens
tcattcctgcttacaacttgggtcaagaatttcagggcttcttcgttcagtcgtagaactgctcatgggtaaatgctgggattaggacttgaatttattttagagataaaggctcagaactaaaaacagtactctctctgtggttaagtggctttgtggtataattcaaaggaaattatgcatttggaacatgcctgggatggtaattttagaacgcggatatgtccgtcagtccctttcttgttccatagaatgcagtagctttaaagactggctgatatctggaaaacagaaaagatccttccaggcttctgaagatagctgtgtggcattgcttctagccttgtttattgtcttttggtcctaatgctgaaggcttagtgagttttgctgagagccctttgctgcgtgtgtagttaaagcattcttaattgattcaacagatgaccgcggtccattctcagtgcctcccctttctctttcttgaagctttgctcatatctgatttgctctgtggtttgagtttcagacaaatattttggaaatatgtcatgagaagaactacatgttctaatatttaaaatttagattgtagtttctttcaaaatattaatattttctcagttgagtaaatcattacaaatttgcttctatgtatttattttggttcttagtcagaaatttcaaactcagtttagcaggttttgtttgactccaaatagcaaggggataaggaaaaattactgtaacaggcatgcccttcccaggttagggtgcaaatggcttcaagcccagtccttcccacctccgtacatcacctgggtacccacatctagaaggaaatacagagacactggtccccttcaggttcctaatgcaatcttgtttggttggagatctgtgaatgtctggaggggagatgcctggtcttctttggtcctacatggctatgctaactacaaagtgaggccacagctgctcggatgacagaggcctcagtgagctgggcccaagtgtggagtccttgccttccagaacagtcccagtgctcaggtggctgctccctcatggtagctcatcttcattgatcagctcctctgccccgcctccctcctgtggaaggatttttggctgaatttccagaaatatttagcttacagatcttccaaatcttta

SEQ ID NO: 133633 - DNA, 1022 bp, Homo sapiens
tactcgggaggctgaggcaggagaataacttgaaccagggaatcagaggttgcagtgagctgagatcacgccactgcactccagcctggcgacagagtgagactccatctcaaaaaaaaaaaaaaaagactgtattttgaaccccaatcttccttactctatagcttaatttctctcaaccagattattctgcctttaatagagccagtgattgatgcctctgcaacatgtaacattaactgtacagcataaatttcccatttagaaatatatagcactctagtttttgaaaagtcacaaatatgattcatttaatatatatgcataagtgttctattaagcaattctaactcagatcttttcatggtttaatatggcagatgaaattatttgaaacatgtattttcgaaaaactttttgtgctattttttatagtcacaacattaaatttacaaatttaccccagtgataaattcggttattaataatattgcctatagcttttagtctactttagaacatcataaaaaccagtactgataccatcagtaatacatattcatctgcgctggctaatagatttgaaaaattagctacagatggtttcgtgtttatgaatatccatgcacattttctagtagttaatgaggatcaattttggatgcttgaatatgtgcctgacaggtatatgggatgcagaacaggtatggaaatctatgtctcagtttccatgttctcccttgttccagttccattattaatcacttaataagtagtatcactcagtaactctgggcctagcgctgtgaagagctttacttgaaggtcaagcacagacacagttcctaccctcaagggctttacagtagagttggacagataaggtgaagtcctagaataagtacctcacatggatcatatagagaagatgatgtgttgtaggaatttgaagtttgaagagatcaccaagggctaagaaggtcaggaaaggtcttatggacacagagggtgagcaggatttg

SEQ ID NO: 133634 - DNA, 1027 bp, Homo sapiens
gggattacgggcacccgtcaccacgcccagcttatttttgtatttttagtagagacagggtttcaccacgttggccaggatggtctcgatctcttgacctcgtgatccacccgccttggcctcccaaagtgctgggattacaggcgtgcgccaccgtgcctggctaaatcctttcttgtaatgaaacctacctgggttttagccctcttgctgcaagaatgactttatttttaaataaaataaagcaaatccattgactttggataagtgttttaagaactaagtttctgatataataaaacaacctccaaaagatacctcattgcagattttcgccaggattcaggtgcttaggttttggcacatatcttcctcactttttcctatagtgtttttaacctgttataattggaatgatagagatgtatttcagaattttgcatggtccaaatcaatgatttttctttttaatatgtaaagtatttcattaacagtgtagattctttctgatgtttggggagccatgtttaaaaatgtagtatggagcaattgaaaaaggggtctttttccctagcctaattcttactaatctcagaaaacaaagatcaaatagactgtgaagttgaactagtcctcttagtgtagtaaccaaatttaggaaagatcaggataatttaggaaggaaagtaatcatttatttaattatttataattataaacaattattttatgttttgtatattttatgtataaaacaattacatgttttattatagttatacttcttcagagagtagattatggagccaccatgtccatacagttagttgttccttggtattcttggattgattccaggaccccccacagttacccaaatccacagatgctgaagtctctgatataaaatggagtagtatttgcatttaacctatggacatcctcctgtatgctttaaatcatctctagattacttataatacctaatacaatataaatataaatgctctgtaaatagttttattgt

SEQ ID NO: 133635 - DNA, 1031 bp, Homo sapiens
aatcatcaatcatttcttcaatgcttcctgattccttttggtggaaaacggtatttatatgtaagcctcggtgctagtagttatttattgcttttgtgatgttactgctcccaagttctcttggtagacagagctatagaatatatttaagtatttacatacatgaatttatatatatgtacacacatgcatatacatgcatgctcaaataaagacagacataacctaaaaattctgagttcacagtgatatgttccattctgattctacacctaagggttaagtctagtttttaaattaaatgtctaattcccttccttaacagtgagaaacctggctgtcattatcttgaatatttttttcttacttgatcaacctgcctgtgtgtaactaatcttctgtctcactgctctctctcggatgccttcctcaccctgcttaggctccaacaatccaaagggagggagctttttaaaaattatttttgtaatctcagtgtctttcatgtagtagctattcattgaccaattatgttctattaatgagtcattgtgtttaggtatttattgcaacctatcatgggcagagtgttgagctagaatctctgcaaaagtagaagaaatgggaaatgagagctcacgtcctgaggggagtcgatagtatgatggaaaaagcacagtttatgtttgtgaagtggcatgatagtgttataaaagagtacaaaaataacagttaaaaattacatagacatttgaagaaaaagagtgactgagtgaaggctggatttatctgagagagtttttcccaaatcattaggttttagggtagggcttgaaagataatagtagatgaggtttggtaaagaaatagcagctgaacgtgaaggaaacaaagttagcaatggaaaatacagtagcctccttatccttggcttcactttctgtggtttcagttaaccgtggtcaaatgcagtccaaaaacattaaatggaaaattccagaaataaacaattcataaattttaaattgcat

SEQ ID NO: 133636 - DNA, 1059 bp, Homo sapiens
acatctcttaaacttgttagctgataagtgtgtgagtctcataatattttagtctttttcaccctcaacaatatttttatcttactgagttttaggctgtcagtattctttatttttattgtctatgaactaattcagaaacatgtataacctttctaaaacttacaaattaaaaggtcaaatgaaggttctaatgaagtcaggtcatatttcctagaatatttgggagttggccaaactatttaaaccaaaaagttgaaaaatttaaaaataactgtaaagtcatgtgcttcatgtagagtaagtaacagttgttaaagttcattttcttcagttaccgtgtgccataggaactcacttagtctggtcactgaaaagcagttttaaaatactttctcttgaattgatatcagctgtaatctacacctacaacttatataggtgcaagaattttgccttttttagggatttatttgtatctgaaaaataaatgataaagaaggagtatattaatttgtaggccatttttatggttttatgtgataacatttaacttttggtaaaccttatattacttactgagaaactattttttaaaaaagatagggaggttaagataaaatactctttttgctttagtagacaaaatttgaaatgagcattctgaattgacatggatcataggaatttatttgaccactacttcattggcttagatttgattctttttttgacagttacctttatttgctttttactgatcaatttctcttatcatacagtagaagtatctataaagtaatgttcaaatgtacatattggagccttgattttaatactataatatttcaacattagcatacgaagtagtggattacaagaaatactaacaagctcttgttaaaatacagtttgtcacatgaattctacaagtaacgtcacaaagtgttactgtattttttccccctagtgtgatggtgaaaatagtttgcatcatagtgaaagagaatagacattttagaaattgtcttttaggacagtttcctttgtgacttaaaa

SEQ ID NO: 133637 - DNA, 1138 bp, Homo sapiens
tgtcattttccatataatactgtaggtatacagtagaggaagtaagagtttatttatatggggaagaagaatttctttgacaacatctaccaaagtgaaaaagagaaagtagtcctggcttttaatagaatttctatagtattttcttatcagtttattacttttttgagaaaaaaaacgaagattctttatttatatgtaaaattcttatttgaaacaagtgttttaagagaattttcaaggaattatattagtttcattatccttgatataaatttattaatggtatatgtcatagggtacactattatgattttatttttaaaatatgtagttattaaaacaagttgacacaacatatcaaaatggattatttagaaacctcctttaaaatgttgaaaagtctaagactaagtctaggacttatgagtaagaaagctaagtaaaagcagtggtccaatacccttttcccattccatttgaaattaccgacagacttttacaggagaaaatctgtaccaaatctgaaaactgggtaagaggggcatggaacaaatacagaacattcaagagatgtggtggagctgtgagtaaatgcaggagcagcatcaagcctccactccctcttctaggaatgcattatcttctgctaaagttgaggtgccattagcaccagtttggagggacaatcaggaagcagttggaatccctttctttcctacatcaacataggattatgggggttaaatggtggttctcactggtggaaagctggtgagtcttccctgtgctgcggccagtagtaacaccaggaaggaggtgggataggccccagcaagttctttatttagtgtctggattgacggatagagaaagccgacctctagtgcagtaaattcaccaaacacgggaacaaacaagaaattatatttttcttttagttcctttgatgcctgcttctcagaccaatgagtcactggactagaaatgcatatttacattgactgacaagccttcctgattcagatgggagaggagggttctaatagcaagtgtatagatactaggaaaatactctcattctgttttccattattccttcctcctcctcctccttcctccccccatgtttcccagg

SEQ ID NO: 133638 - DNA, 1036 bp, Homo sapiens
attgaaagtagatgtcacttcattagtacctggggacttaagctttttttccttcacatctcctaaatctaagccacagactactttttgaattattgttgcttgtagtattctttgtggaaatatgaagactggaaaaatatatgaggaagtataaattatttatactgagaaattttaattaattaactacaaactatgcatttcaataaatctaacattttaaaattcttttgtaacattaatttactctggcttataagtgttatagaatttcagaaatttctttgtggtaaagttctaaaaataactcttaaataacatttggtaaaaatttacaaatgactttgcaccaaacttgactatatcttttaatctactggaaataataagaaacatacacaatgggtgttgccatctgaaagaactgggttcatatcccagctttccagtgttgaaaaataaacatcaacagaaaaaaatgttctattttaggattagaaactgtcagaagtacttttatttggtttaaacagttgtaaacaactaccagtagggagaaagagtttctgaaagtactctaagatttttacaattttgaataaagaattagctgtagaaaggaaggtcttatgagttcattgtaagtgattgcatgtaagttattatattagttttctagggctgtcataacaaagtccaatactgagtggctcaaaacaacagaaatttattgttttatagttccagaggctggaagtccaaaatcaacttgtcagcagggccatgctccctctgaaacctggaagggagcatccttccttgcttcttcctagcttctggtggtttgctggcaatctttggtgttcctaggcttgcagccatagcatttcggtttttgcctccatcatcacatggcactctccccttttgtgtttgtcttcacattgtcttctctctccttataacagcaccagtctgttgtattaagggcccacctactccagtatgaccttgccttaactagttacatctg

SEQ ID NO: 133639 - DNA, 1102 bp, Homo sapiens
ctcctgtctcagcctcctgagtagctgggattacaggcacctgccaccacacccagctaatttttgtatttttagtagagatggggtttcaccatgttggccaggctggtgtcaaactcctgtcctcaggtgatccacctgccttggccccccaaagtgctgggataacaggcatgagccaccatgcccagccatgattaactttttgaattcacagtagttattctactttttggtgatgccaaaaaattctgctacagtaagcattggtatttaaaagatatttagagtattttagggttaatagttgcaaaataaacttgaagatttataaaaattgtgtgaatcgagatttaaggttgtttaaacatatataatgtctaaaaatgaaaactattgtttgagggaagatgtgcatagaagcttttactaatttgaaaatgttcttatatggaaataacacatattgactagtatttgactactgtgtgaatggtgtacagtaagtgcactaatcacaggatgctgtgattggtttatgtattttaaggaggagtattagaacagaaagcataatttgaactgtctcaaaagatcttaacattaggttgcaaatgacattatgttaggtttctgcgtttttgtagctccggattttgataagtttcctggctgattataggtatttttatagtcatacattgcattctgaagcgacccagtagaagcacatagaactcaaatgttctctttttgtttccggtgttatcttgtgttgcccataatgaaaactttccattgtatggcttctgtgatatctaatatatagaaaaaagagttataagtttttaatatcattaacatttttcttttagattatctgcaattatgaaatgaagtaactcaagatgagcaagttaaaagtgataccagaaaaaaggtactgtaattctgaatatcagtatgcataagttacagaaataatgtatgacagaattacttgaaactcaatacttgacaaagtattatttgtgtttaagtataatatgttatatttatgtaattaaaaatgtttattaatgtttaacttttcagttaaaat

SEQ ID NO: 133640 - DNA, 1019 bp, Homo sapiens
ctcccggcgaggttctgcctgggtccgggccggctctggcccgggagaggtcccagcgagctctggccagatgaagggctaccttgattgacttcggtagctgccgcatggggtcctgggctgcgagaggggaccctgaatagtgccttggtcttttgtggctattattgaaagttggaagctctggagttgttcttttcgggccagaggtgagatggtttgtgatttttcttcttaaacagtaggaaggcaaaatgtttatgggccctggtaggtggtgggctaatagtaagcagcaggagtgttaattgacgtgcgatttgattgcattaaggttattctttgcagtactgtccttagactcagaagagttctgctttaaagagtttagttaagacttcatcctatgctgaaacaaacacccatttctgcaaatactcttgccctgaaagctacatcctctctcttacatcagtattaattttacaggcataatggttatgaaagcttctgtagatgatgacgattcaggatgggagctcagtatgccagaaaaaatggagaaaagcaatacaaactgggtggacattacccaagattttgaagaagcttgtcgaggtgagtctgatttttggattagaagttcagcatctggaaggggtagaatgacgattgtgctttctaaacttacctcattagatgaaatcaacaggtaaatgtggtttgttgagtttgttagccacacttattctgtatcctctaattttaactttaaagcaaatgtatatttgatacagcattaaatacagatgttgaggcagtattttaaaattgaatttttcttgctttaacaggttagagagagcagtaatttctaactgtggaaaacactttgttaatctaaaagataatagtatttttgtatgtttgaggtttcagtatgatcagatcacatcattccttgtttaagattgtccagtggcttcctgttgcaggtagaataaaatccaccctccttc

SEQ ID NO: 133641 - DNA, 1170 bp, Homo sapiens
aaagcaggctaaggggatataaaatggtggatggtgctgtcttagaatgcatggggaaaatctctatttgaggaattgacattagaacagaggctggaatataagggatgaaaccttgtaaatattttgaagaaaatcattttggtgtgggagccgtgagaggagaacgtgtttggtatgtttgaatgacaagaaagacctgtcagactgcagtgcagtgaatgtgaagtggtaggaaataaagttggcgagggagaccgggccatgtgatgtagggccatagaggccatggtggacttagggattttgctatgaggtagaaaactattgaaaggttttgaataggaaatgacatgatgtgacttattttcagacaatccttctgccttctggtggtatataaattatagcagggactagtgtggtaggtgggggagttgtctggaggtggttacaagagtgagcaatagtggtgacttaaactagagagagctgtgaaagggtgaaaagtagttagactagaatctgaagatagagcctacagtgttttctggtagatttgatacaggatgtagaaaaacgagaggagtagaggccaggttttcagcctgagcaactctagataggtagtagtgccatttagtggtatggtaaacactaggaagtaggcgtcaagctcctttttggagatgtaaaatttgagaatcctgtttgatgtccaagtagagacagactataaaagagaataagcttatatagctctgtaatatgatgagtgttttttttttttaaggatttgatcatgtaagtcataaaatacacctgagttctttgagaccaaggacattgggtttattttcttactgtttgtggggtatagtacctcacttgaatttgatgctcactgtttttttttttaagaatccagaaattgtgctgtagctccatccccttttgaaactattgttctgttattttaggattctatctacattttttttttgaggcagagtctcactctgtcgcccaggctggattgcagtggctcgatctctgctcactgcagcctccacctcctgcgttcaagtgattctcctgccccagcctcccaaatagctgggattacagatacatgccaccatgcctggctaatttttttgtatttttagt

SEQ ID NO: 133642 - DNA, 1032 bp, Homo sapiens
tatttactgttcacctgtgaatgtgagactactttgtgagaattattactgtgcgatattttcttaagcattacccttatatggcaagtgaacgtattaaattgcctaaggacaagcaattgaaagtaaggacagagacaacatttgaatatggtgttttaagtgtatgccttcaagaaaagcttgtgtgtatcctagcaatatttagacaagcaggatgacctcccatttctctttgtttattaaatagtgattttgtaagagaaatataaagaaaagttttatattttgccgctatttaaggttttttgctattcatgagcctgattatttcctttttgtataggaagattttcagtcaatgacttatggatttaaaatggctaacagtgtgacagatcttcgagttacaggtaaaattatttttaaagttaattcacaagttttacattttcatatgtttccttttaaaacttattgtttctttttctaggcatgctaaaagatgtggaggatgacatgcaaagaagagtaaaggtatatatgttttctgtttggtgtggggttttggtacacttctaaatgtcagtttaactttacctaattaaaaatgtgtagaaccacctttctcctgtatgtgctttgtattttttttttgtaatgaatttgaacactgctagaggagtttctgataaattaatgtcattttcaaattttagtatatgtgctgccgaagcgagcacaaattaatgtcattttcaagtacagccatccctcagtattctcagggcactggttccaggacccctgtgaataccaaaactcaaggatgctcaagtctcttatatacaatggtgtgatatttgcatataacctgttcatgtccttctgtatactttaaatcatcactagattacttataatatttaatatgtaaatgctatgtaaatagttgtactgtacttttaaaatttgaattttttaatgttattttaaaatttttttctgaatactttcaatcagcggttggtt

SEQ ID NO: 133643 - DNA, 1050 bp, Homo sapiens
gatcttcctgtagtaccaccctggtatttggtcaaataaaattgtccactataacatttgtattaagaaattgtgtattttagtgtaaaatggatcggtattgaccattgaactttattttttcataatgtgatttttgtgaaggttacagtttttttctaacagggttagttttgagagcatcaggaatttcaattaatatctccttttaaaggaaaatatactatgtgccatatacttctgcttatgttatttcattgttttgcttttgctgtttgaatacttaattcttttccatgatctttataatttatgtcaaaatgacctttctgtgtataggattaataggaggaatgtaaatactagacacggctttttttccccaactattttccccaaaaacagattcttgtgtatacttaaaaaatcagtgtttttccttatgtatttgtaatgtaatattttttcaggtttgtgtttaattcaccttttttaaaattttagagtactcgaagtcgacaaggagaagaaagagatccagaagttgaactagaagtaattgaacttattttctggtagataatatcagagaagtctacctgttaatgttgtagttttatgaactgcgttataatttatggaagccctttttaaggtatttctttaaaaattggacattgcaagggattttatttcccttgtatttattttgatagaatgataatacagctctttcaaatagatgatttcaaaactcttcagtattcctgtgaggtaggaagaaaaatacgatctttcacagatgatgcaccagagcgccacagtatcaaaagttgctgaacctttgtcgagattctaaattttctgactctgcttaaagcacattttaatcagtcctttttaaaatgcagataacatcagttttttgaggtaatagtgtaaattttgacttaggacaagatcagtgctgttgatatagaaacttcacattccgatttcaaaagaataggctttgttttgttttctgcagctcatttttcaggcttttaa

SEQ ID NO: 133644 - DNA, 1402 bp, Homo sapiens
tcctttcacgggctttgcatcttttaacttttagtcctttcttgtttttttagcaccaacaatgtttagcagtattcagcagagtgaaatttactcgtgtgttactgacagtgcttatagcctttactaagaaagaggtaagggcattcaatataatatgtctatttgttttagtgattttggctggaattcctgagtgaagcagttctgaaacttctcccttgaagtgctcctgatcccagatatacagaactcagcatttggtatatttataccagtgtaacactgatgactttctcaagaaatcacatgaattttgttttattttttacttatttgtaaataatacattagaagctgaaattacttgtaggttgttatattttgtgaattgaaaaggagaaagtaaaattttaggtaggcctagtcttaccttcagttacataattaactgttgggtttgtatagaaccaaaagcaagccctagatggtgaatattttttcctttttgtatttttgcactaattcaagtcaattacagattaatttgtgaataatttataagtggtgaatagggatccaatttttaccactaatttaatttctgtaattctatttcttcccattttttttttcctaccttgatgaatgacatggtagaattgttgaaaattttttcattttctagttgattgcttctttggtttttattgtgaaaaaaaaaaccaaaaatattttctattattttaattgatcctacaagttatagatgtgagtaaaaaaaccattttctatcctaacaggatctggacatcctgtattaagtgcatagtttatgaaaaccaatgtcattacagcaagcatttaatttcattattgtttataggattttcctatttaatgtatatctttcagtgaaagaatatgtaagaatgtttttggtgatttatttgctagaccagtgctgttgcagaagctcaaaaattgatggttcaagcagcagatcttctttctgccattcataattcattgcatcatggcatccaggcccagaatgatactacaaaaggaggtaattgttcaatttgctcctactctttcttttcttcgtttctatccaaaatatttagtgcttagcttgtactaaagttttttcaagtcagtcttgtaccttgggatgttttaatccagagacttacagtgtttaggctcttctctgtaaatatatactagactaaaaaacaatactgtagaacttggccgtttcctgtatattactatttagacttggaatatgtatcctgtcttatgtccatgctgtgatgttacagtctggcagcttcttcttgctgcccagaaaagccagcgcaatgagaacagcagagaaagagtttaattatca

SEQ ID NO: 133645 - DNA, 1366 bp, Homo sapiens
attacatctctgttccaaatgcattttgggctcattgagggttgagggcagtgctgctctgctctgctattcaggattattatatagctaagtttgaatggattctactgtttagtaattgaggggaagagaagcttatattatttgtgttcccattttacctttcttcacaatctcatggttaatgtatcatttcctctgttttgaaagaatatactgaccctattttatcctcagagttttttctttgagttcattttgacatagaaactcccctccatcaccactatcaccaccatgtaggtaggaggtacagttttaggttattaaatctacttgtttagtttttaaaaaatgtatatgtatagatatattctaaattataaaatctatttagaggattttgtggttagaatttgtttggaaaagctttttaaactggcatttttatatttaataacatttgcagtttaaaattcagagaaaagttgaaaaattttactttcatttttttctttttagatcatccaattatgatgggttttgaaccccttgtgaaccagaggctacttccacctaccttccctcgatatgcaaaaataattaaaagggaagaaatggtgaactattttgcaagattaatagatagaataaaaactgtctgtgaggttgtgaatttaacaaatttacattgtatcctggtaagtacaaatctctgttccagaatgtaacttccatttaaaaaaaattgatacataataattgtacatatttatgtggtaactttggtttaacaacagaataattgattgctttatagacattgaccaagggtaaatactactctttgtctattttctgtgatagctagaggattaagtggttcataaatactatacatacatactgtttaatcctcaaaagcttttacactattttagagattaagaagccgatgttgaagggttagataattcatccaagatttgttttgagacaggatctcactctgttgtctaggcaggagtacagtggtgtgatcttggctcaaagtgaacttaaactcttttttttttttaattttttttgtggagatgggggccttgatctgtcacctacattggagtgcagtggcatgatctcagctcactgcagcctggaccttctcggctcaagcaatccttctgcctctcagcctcccaagaagctgggaccacaggcgtgtgccaccatgcccaacaatgttttagtttaatcattatttttgtagagatggggtctcactatgttacccaggctggtgttgaactcctgggttcaagcagtcctcctacttctgcctcccaaaatgctgggattgcaggtg

SEQ ID NO: 133646 - DNA, 1021 bp, Homo sapiens
agtcatttggaggacatatgacactctggccatttgagttaccatagttcttgcctaggttctttctcatctctgtgtgtggatgttcctttaactgcagtgtagattgagtacagtcaatagacttcttttctggatgttttcactgggccgaggctttctgtagggtctttatttgaagctgacttcttgtctctggtttcaaagtggggtatgttagtgaggtacttttggtgttgaagctttggtgacacttaggcttattgatcacttggtagactcttgctcaaaaacctgtatcttttggtctttccctatagtcagcaacaatcagtaatgtgcatccagttgacttgattacttggaatttatttctgtgaaataggaactaaagttctgccatgacttagtaaattattattggtattatttttatggtatacaaatttaatattggtatccacacaattctatgattggtcagtttttttaaggaaagtttttagagtctagaattatccattgtcccttttatataattaaataatttctatagaaatgacctttatttgtcatattttaactctggtactatgtcatttccagaaggtctagtaaaaattacagtctgatgaagtgtttttagcttttatttaatctattaatgacattgctttttctttatatatctgttaggattttttctgtgaatttagtgaacagtcaccatgtgttctttcaagatctctgttacaagtaagttccacttagtatcaaaatacttatttaaacattatatgtgtattgacattgttttattgattgattgaacaaaaggtagatgcttttaaaggattttccagttagtgttgtgtattttttttttaattgaagtattaactttaagcattagacatccatcaagatcatatcctaggtcataaaacaaacctcagtgatttaaaaacaatcaaaatcctacaaagtatctttcttatcattttagaattaaactagtaac

SEQ ID NO: 133647 - DNA, 1033 bp, Homo sapiens
ggtataggtgatttataaccaatggtgaggagtggggatacagaaaaaattaggatcctgtatagtattttctttgtgattattattaggagcacagtccatgaggaaatcaattgtagggaaatatgtgacactgaagtagggtcatgaaaaagtagagctttagacttttccttttctctttgctaatttgatcttactggatccaactctgattgttcaaatatagacctataggaattggaaatatcacagatttattgtgtgaattacataataattgtaaaatatttcttaatctaatactgaaattctttaacttaggtatcggttccattttctcttttattcaccttctctgtcatttggtagcatctgcagtaattgctgctgcttttgtttgggctgaatagattttaatgatgtgactgttatcttgcaggtgctacctatataataatcaccaggctaaggactgtatcgactcctttgttactcactgtgttcgggtaagagctacaatttggattgtcataatgggtactttaaaaatcatgggctgtggccgggcacggtggctcactttgggaggctgaggcaggtggatcacctgaggtcaggagtttgagaccagcctggccaacatagtgaaaccccatctctactaaaaatacaaaaatcagcgtatggtggcgcacgcctgtagtgccagctactcaggagcctgaggtgggaaaatcgcttgaacccaggaggtttcagtgaaccaagatcgtgccactgcactgcagcctgggggacagagtgagactttgtctcaataaccataataataataataataataataaattgctggactgcaattccttcagtgtctgtgctttttttcatctaatatttcttgtttactttcagtgaataaataaaaactgtctcctcctaacacttgagtggatggttttatatcctaaggtcttctgataggttattagctacagaggcagccttggatgacctcccactgcagcct

SEQ ID NO: 133648 - DNA, 1046 bp, Homo sapiens
tccatatgaaattataggccttattatgttatgaaatgcatatatatttttatatatatatatatctcgtagatttgaagacttttctggcttagcagtgttaaagttctgaaaaattagtgtctggtagagaatgttctgttttatatttcatttattaaataaactcaagtaaattgtaaatgtgaatgttcttaatttttaagaatgattttatataatgccgataattttttatctttttctgattttatttgctttgtgattaaaagaaaatatttatagactgaactgaactgtgttctgatataataaaaacttaatgggcattcatttgatttgcatatgtacatgtataattatcaagaaatcttctggaaagttgtaaaatgtagaaagggaaaattaatccttatgttcatttcttgtaagatctaatctattatctaatgaatgatctgtttttaaagacctaaagcattatttgaaatatctatcgttaatatatgtgttgataaagctgtctcatttagacatctaccattaactaacattttgtatcctttaaggtatctctctgaattcctttacgcatggttgatgtcaacattgagtcgtgccgatggctctcaaatggcagaggaaaggataatggaagagcagcagaaaggccgtagtagtaaaaaaacaaagaaaaaaaagaaaggtgctgtggattatttttaaacttaagaacagagtgtactttaatttctacagataaatagatggagagctactcgtgagttggtcattatattttagttcttgttcctcttttcagaaactataaggtagagactgagtcccagtatcaatgacataagctttttggttcctttctttgctttcatttctttgctgttctgtgtatcagagaatctttgatcaagaagtagccacgtggagtgtgcaagcaagatatcggtgagggaacaagacagcaggaggccagtgacctattgacagagccagatagctcaggagggcagtagttctggagctgt

SEQ ID NO: 133649 - DNA, 1055 bp, Homo sapiens
gaggtgatataaatatctgctttgtataaatttagaagtcaatgcaaagacaaattacaactcaaaatcataaagaaggataagcataagatccagactgatctgattcatagctcaaaatgtaagcattgaaacatttctgttttaatcagtagtttgttaaaggggccaggcgtggtggctcacacctgtaatctcagcactttgggaggccgaggtgggtggatcaccttaggtcaggagtttgagaccagcctggccaacatggtgaaatcccatttgtactaacaatacaaaaaattagccaggcgtggtgcatgcctgtctgtaatcccagctactggggaggctgaggcaggagaatcatttgaacccgggaggcggaggttgcagggagccgagattgtgccattgcactccagcctgggtgacgagcgaaactccatctcaaaaaagaattattaaaatgtaactaagtcttacataagtatgaaaaatgaccgggtcagttatcaccggaacaaccttattccacttgaccatttaaaataaaggctactgcttttgaaaactctgagatatcaaaataaacttggaaaaaaattgtttcaggcttttggtattttaataatttaccatatccctaattttattgaaatacatttattttctaaaagttactgtaacgtgtacatactgttttgggaagtatatcttgggaccgcttccatagaggcgtagcttagcagtgtttgtcaaaaatcattaatgcttagagtcagcaattctgctttttgggatttatatagagacatgaacacatataggaagtgagagtgacgaatataagagtattcattgcagcaggatttctaatagcaaaaagtaggaagaaacagtagtatccatcaacaggggactaataaattatgatacattcatacagtggaatactgtgcagccttaagaaggatgaggaagatctttatgtactgtgatggaatgctccttatgatttaagaaatctaaaaagaaaggtgcagtttaatatgcat

SEQ ID NO: 133650 - DNA, 1139 bp, Homo sapiens
atcattctaaaaattttagttcagcagcaaaaaattagagcttgccattttgtcttgagatgtgtattttgttgagttaaaatttctaaagtctgcctatacgttttccatctccttgctgtgtaaattactgaataacttggggtaaaaaaagaaaatttatgtaaagaaattttatgggagaagtatgaggtatttaaaagtcatctgcctttgggaaagtgaatgctttaataatgaaagacttctttgtaatggctcagaagaggaagagtctaagcttttcttggtaatgttatatcatccatgctacgtcatcatttcagagcagagattctgcgctgtggagaggccagccgcggaggcaccgtgggggcatttgcctgtgtgtgttgtgcaccttttcttccattgtttcctgtgatctgccttcctcctctcctgccctggtttcctactgactgactctcatctcattgcttagttctatcagttacctggagctaaaaagtgtgctgacccctgatctaactgaatgcctttcctataatttttgactatttatcttttaactgttctttgaagatagaaaacagctggtcagcctgttttcttatgatcttcataaaactcaaaaacaaattaatcgtttttcttccaggttagttcctaccttttttgtcattaacctagtttttaaaatctattttgtgctgccttgtttctaagaacacaagaaactctaaaataaaaatagtctttgttttgtgtaccatctgaatatttgtagatacattaattgagtttcgtttttctttaacaggttcctcctgaatttgatttctctgctcataaatattttcctgttgtgaaacttgtttgagagagactggggaggtggccataaaggggcagagtcttctttcagacccaactcttagagggcacatcaccaggctccacatcacgggaagtgagatggatttcttgggtaacaactcattataaggaatacttttagtttgacagccttatatgacatgaatgaaaactgctgttttaaagtggtttattatgttccatggaagaaactggtcttattgaatgcattgatgaacgttatatggttttattacaga

SEQ ID NO: 133651 - DNA, 1377 bp, Homo sapiens
tttgccaaatgtccatgctcattctgttttcctctttgctttttcttttgattctttgtttcttgtcttgcctatttcctaccattcctttgcctttttttgtttaaagcattcagtaattaccagccagaaacagttttcattctcaacaaagtaactacatcagtaacaggtatactctttgtctctccataattgaagtttctattgtacaggctacttaaaaaataattttttttaagatttttcggttctgaaatttcaggacacctaatggctgttcttgaataacacaagtattaccgctcttggaaaggagagccaagagggctcattagctgcaaagaggggcaacaggaacacccttagcaagttcagtcaggttagctgctttaaagtactgccagaaaagtttcactatactatcatgtttttatgaaaggtaccaaatcagagttaagatatttgaagctgagaacccttttaaccacagaccaaatataaaactgtcactagtcttaggctaagccaccaaagccaatttacaccacagagtaactcattttgctaagagtattgcctgctacagaggacaaaaaggaaggcccaagaggcctagaaagctgccaccgcaaacatcagagcagacacaggacaagcaggaaaggaaggggagggcctctggcagcaggcacttgcaagcacagggggatgtagtcagtttttcaaagccagaggatactgaacagacacccatttgaaaatgtttcatgggttaaactgaatatgaagtaaacaaaaagtacaccacatttaaacctagtcctaaattttaatctatatacatttctatctgcctcctttttgcatgtcaccagcaaacaatgtataatcttttaaaagtgctaaaaggattttttttacacatctgtattcttacagatatataatttgtgatgtcatgacacataaaaatcacaattttcatgtaatttagaggccctcccaaaaatcccttctaaatgtattttaccaaaatctcatacaagtgtttaattaatcccttgatttgaaacttcttttggataacgtttttggaactactcaaatgttaaagagcatacaccttcttcagttcttaacatggacaaagacctactgtttttcatctccagcagtgcattttttttttgtcaagaaatttattaacctttataaacactattttcactcaatcattcataaaaaatgatttgtgattaaatctgtaataaaaccatataacgttcatcaatgcattcaataagaccagtttcttccatggaacataataaaccactttaaaacagcagttttcattcatgtcatataaggctg

SEQ ID NO: 133652 - DNA, 1635 bp, Homo sapiens
gtcttggaaaatgcaacatttgggcaagaagacaggagtccttgttctcattaggtccatgggcacaagcctgagggtggagcccttgccagtgaccctgcccttctctacccagcacttccctgtccccctcccatatcaccgttgccatcttgtccttgatgaggaatacaactcccaattacagtgttgctgtgggagatgcagtcctctttatgacagtttctagaagttgataagaaaatgggacctgcctagggctagtatctcatttaatactctatagaatattatgtgtttttcctttttagtttttaatgttgaagatcagaaaagagacaccataaatttacttgatcagcgtgaaaagcggaatcatacactctgaattgaactggaatcacatatttcacaacagggccgaagagatgactataaaatgttcatgagggactgaatactgaaaactgtgaaatgtactaaataaaatgtacatctgaagatgattattgtgaaattttagtatgcactttgtgtaggaaaaaatggaatggtcttttaaacagcttttggggggtactttggaagtgtctaataaggtgtcacaatttttggtagtaggtatttcgtgagaagttcaacaccaaaactggaacatagttctccttcaagtgttggcgacagcggggcttcctgattctggaatataactttgtgtaaattaacagccacctatagaagagtccatctgctgtgaaggagagacagagaactctgggttccgtcgtcctgtccacgtgctgtaccaagtgctggtgccagcctgttacctgttctcactgaaaagtctggctaatgctcttgtgtagtcacttctgattctgacaatcaatcaatcaatggcctagagcactgactgttaacacaaacgtcactagcaaagtagcaacagctttaagtctaaatacaaagctgttctgtgtgagaattttttaaaaggctacttgtataataacccttgtcatttttaatgtacaaaacgctattaagtggcttagaatttgaacatttgtggtctttatttactttgcttcgtgtgtgggcaaagcaacatcttccctaaatatatattaccaagaaaagcaagaagcagattaggtttttgacaaaacaaacaggccaaaagggggctgacctggagcagagcatggtgagaggcaaggcatgagagggcaagtttgttgtggacagatctgtgcctactttattactggagtaaaagaaaacaaagttcattgatgtcgaaggatatatacagtgttagaaattaggactgtttagaaaaacaggaatacaatggttgtttttatcatagtgtacacatttagcttgtggtaaatgactcacaaaactgattttaaaatcaagttaatgtgaattttgaaaattactacttaatcctaattcacaataacaatggcattaaggtttgacttgagttggttcttagtattatttatggtaaataggctcttaccacttgcaaataactggccacatcattaatgactgacttcccagtaaggctctctaaggggtaagtaggaggatccacaggatttgagatgctaaggc

SEQ ID NO: 133653 - DNA, 1383 bp, Homo sapiens
gcctctcaccatgctctgctccaggtcagcccccttttggcctgtttgttttgtcaaaaacctaatctgcttcttgcttttcttggtaatatatatttagggaagatgttgctttgcccacacacgaagcaaagtaaataaagaccacaaatgttcaaattctaagccacttaatagcgttttgtacattaaaaatgacaagggttattatacaagtagccttttaaaaaattctcacacagaacagctttgtatttagacttaaagctgttgctactttgctagtgacgtttgtgttaacagtcagtgctctaggccattgattgattgattgtcagaatcagaagtgactacacaagagcattagccagacttttcagtgagaacaggtaacaggctggcaccagcacttggtacagcacgtggacaggacgacggaacccagagttctctgtctctccttcacagcagatggactcttctataggtggctgttaatttacacaaagttatattccagaatcaggaagccccgctgtcgccaacacttgaaggagaactatgttccagttttggtgttgaacttctcacgaaatacctactaccaaaaattgtgacaccttattagacacttccaaagtaccccccaaaagctgtttaaaagaccattccattttttcctacacaaagtgcatactaaaatttcacaataatcatcttcagatgtacattttatttagtacatttcacagttttcagtattcagtccctcatgaacattttatagtcatctcttcggccctgttgtgaaatatgtgattccagttcaattcagagtgtatgattccgcttttcacgctgatcaagtaaatttatggtgtctcttttctgatcttcaacattaaaaactaaaaaggaaaaacacataatattctatagagtattaaatgagatactagccctaggcaggtcccattttcttatcaacttctagaaactgtcataaagaggactgcatctcccacagcaacactgtaattgggagttgtattcctcatcaaggacaagatggcaacggtgatatgggagggggacagggaagtgctgggtagagaagggcagggtcactggcaagggctccaccctcaggcttgtgcccatggacctaatgagaacaaggactcctgtcttcttgcccaaatgttgcattttccaagaccactctggcctgccatgccacccattctgtgcctataaaaaccctgagaccccagcgggcacacacacaagcggctggacgtcaagaggaacacactggcagaagaacacatcgaaagacgctggcaggccattgatggtggaacgattcggacgccaagggaa

SEQ ID NO: 133654 - DNA, 1031 bp, Homo sapiens
ttgtctgagtgttttatgtaggcatgattgattacaccatcggccacagggttgaactcaatctccactcctcccttccctggaggaggtggagctgaaagttccaactttccagtcatgtggctagttcctctggcagtcagcctctgtcctgaaactatctgacgcccatccttccccacctccaagacccccttattagtataaactcaagtatggtccagaggggcttgtgaatcgccagatatccactcaggaacttccaaggcttttaagagctctgtgccagtagccagggacaaagaccaatacatattttttttattattctacagattgtatgttaaaaaaaaattttctgcctaatcagtaaagttcactgttttagaacaatgggatgatgatttttagtgtgtttcttttggtcatttaattgttgaacacacacccgtgttgccctgtcttaagtgccctcttcagatgaagtgcctgaagcaggaagagggtctgtgtctcttatggaagtggatgtcaccgtccagcagagacacagtcatagacgtcaggcccttcctttgctttctttcaccaaaggagccagtgcatcaatcagatgaaggaggtgaaggaacagtgtgaggagcgaatagaagaggtcaccaaaaaggggaatgaagctgtagcttccagagacctgagtgaaaacaacgaccagagacagcaggtaactggggaatttttgccaagagtttctagaaggtacccctatcttcaggcattttgtttcttttatgtgccgcctggctttctctggattctgccctcctttgcgggcttggctccctgagatataacagagcagaacctggtactgggatgactggaccctaaccaagggttctgacctccagccccgcttcacaagctcagggctttacgggaattatcgtatttaaagctcgcagccagcctgggagagagttgctgttttcctgacttgaggaccccagccccatgggaggggttaagtt

SEQ ID NO: 133655 - DNA, 1047 bp, Homo sapiens
taggaaagcttgggccgaggcgatgggtggacacctctgagctgggctggagacacatgtaggatgcactccttttgctcctggcaggttgatacctagattgaaagctctttctggctgactgtgcctatttcactacttgtgcccaaggccgtgtaccagatatgcagtgcttcccagggataatgttcgtggagtgttggaagcaaaaaaaagctagttattcttcactttctttggattataggcccttttagagaatctgataaaaagtacgaacactttgttagcaaacttataaatggacacctgcctaaagtgtgcaatttgtgcaaattatatgggcctctgaaacatatctgcacgccctcccttaaaacatcctgtctggtctaatccttctatagaaggcagtgccgagaacacaaaagctgatggagaggccaggtttcctgatgtacaaggtagtgttctttccgtttgaatcagtcagcacacatcccactttttactctcctacacctgtggcaggcatcactaagcaatcactgcactccatccgaaaatagccttgcgttctttctccctgaagcacctggagtcagcacatgagatgaaccgctcgccatctcatctccctgctatgaggagacagtttccaatgttgacactggcatataaagtaatacagtgatggtcggtgccctgggtgatgggatcacctgccctgatagatccttgtacttgaacacattccatcagtggtactctggccatcaattgcaccagttagaataatcactagtggccaagtcctgtattcctctccaatttagctccagttagtgctggaatatttgccacttacatgtaagaaaaagccaacctaagtcctcaggaagaaacactgtcacaatctgcatgacctttgtctcagaattgaggatggaggtagtttgttcctggctctcaagttggaacatggaaagccccagttgatctgcaaggctgtgagataaaggctcttcgtacttgattttagcaggg

SEQ ID NO: 133656 - DNA, 1096 bp, Homo sapiens
agagtgcagtggtacgatctcagctcactgcaacctctgcctccctggttcaagtgattctcctgcctcagcctcccgagtagctgggattatgggcacgtgccaccacacctggttaatttttgtatttttagtagagatggggtttcaccttgttggctaggctggtctcgcacacctgacctcaagtgatctgctcgtcttcgcctctcaaagtgctgggattacaggtgtgagctactgtgcccggccagcctcttattttttaatttttaaatttaaaaaattacattacttgcattatatttaaaacatccgtatagctcctaattgtcttaaaaattaccattttggattatttccttctaaaaggctcatctgtagtttagcttgttgctgggtgtgaattgtcaaattgcattctgaaaggatttgagccatctgtgtggtcaccagcaacctgggagaatcagttgcctcacgtgcattgcgttcttcggcatttccatgttcctccaaaacattgtccacctgccgtaatatcttcctactaactttataaccacatacaactgaaaacatgaagccccaagtacacgtctctgtagaggacatgagcagccagtcaatagaagggaaatgtgattgtcacttgtgtgtggaatcttattcagctatgccagtggttctcacgtgggggcagtcttgtccccagtaggcctttggcaatgtttggagacatttttgtctgtcatggcttacaaggaggctgctactggcatctagtgggtagaggtcagggacactgctaaacatcctataatccacaagacagcttcccacagtcacgttttatctggcctaaaacatatacagtgctaaggttgagaaaccttgagttaggctcataattaaagaattgcatttagacagaaatgaagtacctcagtcttattattcatccttaaagaaaccttaatgcaaatatttccctcatatagattgaaacacaaaaagccataaatggcctcacttgataaatgttggccgagaaggttttgacctagctggcaatcagtcaggatccagtgacagg

SEQ ID NO: 133657 - DNA, 1047 bp, Homo sapiens
atgtcctccagtttcagaagaaccagaccaacctggagaggaagttctcctacgacctgtgagtacacctcagagcgcgtgccacagtgcagggtgcacggcacctgggaggcggggattaagctgagatgtaacctccgatagagcatgcaccttctgctccgtgcgggactctgagaaaggcacgggcccctctaggattcatgtcctacacaaatgcacaaggaggccagctctcagcaggaaatgaatttctcagcatgccttaaaatgtaacttaaaactctgtaaggcacaggtgtactggttaagtcaacaacataaagctttaaaaatgtgtttcataggtgctcatgcgtgagctaaatcaaattcgttgactaaaagacattttggcaaaatattgatatagtaatagtttattgcctggcgatcacattgtggacattgttttcttcagacttttcagtgattttcccaatttttacagtgagaatggaatactttgataatcaaaaccaagcaatattaaactattaaaaagtgagctaagccccgcaggaagatagtaaaagccagtttgcaagccagaggataaagttgtgtttattttttcctcataaaaacaatatagctaacgtgtgggaagtttgggattcagagagaaccaaccacccatggcccagccctcatgactgtccttttccctttgacttacctctctccagtccatgcccaagttcacatgaatgtttacttaattgcagtcatcatcaaaaaaatttaatcatttttttacttgcgttatgtacgtgtgtgtgtgtgtgtgtgtatatactttttttttttttttcttgagcggagtctcgctgtcccccatgctggagtgcagtggcacaatctcagctcactgcaacctccatctcccaagttcaagcagttctcatgcctcagcctcctgagtagctgggactacaggtgcccaccaccacacccagctaatgtttgtatttttttagtcgagatggagtttcaccatgtcagcca

SEQ ID NO: 133658 - DNA, 1149 bp, Homo sapiens
tttaattcattcttttatgttgttaacacaggctgattaataatttgggtctgggccaggcatggtggctgatacctgtaatcccagcactttgggaggccaaggccggtggatcacttgaggtcaggagttcagtcagcatggcgaaatgccgtctctactaaaaatacaaaaattagctgggtgtggtggtgcatgcctgtaatcccagctacttgggaggctaaggcaggagaatgacttgaacctgggaggcagaggttgcagtgagctgagaccatgccaagcactctagcctgggtgacagcgagactccatctaaataataataataatagtaataataataatttgggtctgaagacttccaaagatcctgggtcccctcttggctaactgctgttcagtggccagtagtggccacaaaggcttgggggtggcatcacctgccctctgaaatgcttggggaagagtctgggagaccctgaattacttactagcacttcgtgaagggaaaggcacatcttcctgctattgtgttcatttttgcttgccaaaagttcagtcacaaatagcttcattttcagcatttgcacttgtaacattctcgctcggctggtttctcgcagctgcacatccactttgacatttatactttttacttatttgttaaaatatgtgcattaatattgcagaggtgcaaaggtaatgttttagcaacagttcctttgtcatgaaaatagagttcttgtatctttcctgaaggggagcaactgagttaaaacaaaaagattgctgagtggaagaacagaggtgttggtgacttgcttatcgttttgtgtccagaagaagaaaagcttaaagaggcagtgggaaagtgcagggggcgctcagcctcactgttgtcatgcttgcctgtgtgacctgtacccatgtccaggtggtttcagggagctgcccggtttctcctcttgcacagtaacttggggtacgaggaggctctgaggtgtttacagtgcttttctcttgtaaagagctggttcatggagtgcgttcttgagtgtcttctgagcctgggatggggtcacttccctcaaatacaacagcatttgtttatgagtgacttttgctgaaagattttgcctcttc

SEQ ID NO: 133659 - DNA, 1049 bp, Homo sapiens
tcagcttccacgggagttcctgttctctgggcagatgaggtctgcttgtctggagttggagaactgaatctgttttcagaaattgtatctgctaaagagttgttaagtgctttgttagcagcgaagaagaactaaatatttgagcatcatcttatgccaggtaaagcatgaggcattctgtgcacttagcacatttaagcctcacaaaaacccagtgggaagtgtggtgtgagtgcacagagccttccttcacttacactgacagagaccattttttccagaagaaaccgctccagcttctgtccagttgacttaaaacacagccttgggcacttgtgtgtataagactggtgctggccctgggccccaaggtggtctttgtggagggcgctcaggtggtccaggctcctcaggtaacttggcatcagccctaatgccacggtctccttgtagacacggatcatggagctggaaggcagggtccgcagggcggctgcagagagaggcgccgtggagctgaagaagaacgagttccagggagagctggagaagcagcgggagcagcttgacaaaatccagtccagccacaacttccagctggagagcgtcaacaagctgtaccaggacgaaaaggcaaggcctgctttgtttcctctcagttcttttctaagggatggtgtctacattgtctgtttcttcttggcgggaggatgagcaagcggctgggtttagatttatgtaattatgtggaaagagcctattgatcaagctttgggcattctctccctttcccctccaagtccctggctgggcttgcggtgaagccttttgcagtggtaataaacaggagaaatgcagaagaacaatttcagattcatcctcctattggcttttttttttctcctattgggttttttcttcccactttccacaaacatgtattaaatacctactctgtgccaggcctatgccaggtgcttatatctcagagaaaaataatatttgtgccctccaagtatctaatggaggagaggagaggcagactctac

SEQ ID NO: 133660 - DNA, 1026 bp, Homo sapiens
cattgctgcttacagaaatgattaattctcaaactatgccgggaaggtgagtatggtaatgattttacaagggaggaatctgaagtgtaagaggaatcatgtcttgccccaggtctcgagctaatctgtggcaggtttcggggcggtgcctgctcctccgagcctgtcctgggaactggccacactgccctgggttcacagcaccatgggctctgtgcgtgccgttcacatactcttctcccttgacagctttgcacgtcaaggagaagctaccagcccacgcttcttggcaagactcctttcctcttggttgtaaggatgatacggtctgcttcggagatgataaaactagtattgatgtttatttatttgcttttacttggcagattctcagcgctgattttgagatgatgggcttgggaaacgggcgtcgcagcatgaagtcgccgcccctcgtgctggccgccctggtggcctgcatcatcgtcttgggcttcaactactggattgcgagctcccggagcgtggacctccaggtgttttgttttctttattgttatgtttattttatgtttatgttttgtttattttgttatgatggggtcccaggggtttgttgtttattgccagccagggcgttttgtgcagggcacacgcttgtaaggtgagtttagggctctgcacacccccacagccctgggccagaccccaagcagctttgggtgggagaggtcccctctgtggttgtgtaggattgcggttgtggtatccctccctgcctttcctgtgagttaacagcattcatttgagctactggggtggttctgggaagacagcttgcttacatacactggccatagtccgttgtttgcggtcctccggcgcccaagatatcgaagagtagtattggaagtgtgcttggatgatgggtgtaagaaatatgtttttaaaggtaccaatctttatcttcattacttaatgataataataattttaacttcctcatttaccggtgcagtcatgggt

SEQ ID NO: 133661 - DNA, 1161 bp, Homo sapiens
cagcacctacttttgtgtagaagcttcatttatatccatgtgactaaaagggctcaccaatgtgattcctccttgaactgatggaaattttcccttcaaaataaattccagcttttatcactgtttgcaaatgttagtactctagaatttccagccatcagatacatagatatccactgtatgtacatctatgattattgaaggcagtagggaaaatccaacaagggagaaagctgaacaagcgtggaaaatgagaccaggagaagaagtgaacagctttgtatttggatggagaagaaaacagcaaatgctgacattcgtcaaaataagacagagactagggttgcaacgaagttgcagtgagatgaaggtggccgcaccggttgtagatggttgagatggtccctggaagtggcaaggcttgagcaaggctgggagatagcagcagaacctcgatgtgcagcctcagtccggggcaaacgggcttccccaacaccccggctggttggatctctggctttgcatcctttctgatgtggttttcttctttgcataccttttgccatcactgatttactgacatctacattaagaagttggccctggagtgaattctgaaaatgactacatacttcttgaataaagaagataggactgtcagtagaagaatttcaaagctctaagggaccatccttttattttacactgtgatatggtttggctgtgtccccatccaaaatctcattttgaattgtaataatccccatgtgtcaagggtggaaccaggtggaggtaattgttctcgtgacagtgaatgagttcccatgagatctgatggttttataaggggcttcccccttcgcttgtctctcattcttctccttcctgctgccatgtgaagaaggacatatttgcttccactttcaacatgattgtaagtttcctgaggcctccccagccctgtggaattgtgagtcaattaaacctcttttctttataaattacccattctcaggcagttctttatagcagcgtgagaatagactaatatatattgttattaatttggagaactctatgaaatgggtaggatttcacccactcatagctaagttgttaaaactagaccctttggttcatgtttaaaaacgtttccaacag

SEQ ID NO: 133662 - DNA, 1035 bp, Homo sapiens
tcagcgaagaggacccagcaggaatcatgagggaaggaaaatgcagcactctaaatggccactcaggcgttcctattcactcggaaaattaggttcatttcacaggacacagcagtgtagatcaggcttcaacttaacatttaagggaaatgtcagatttttttttaatttaatgaaattgttaatgaggaaaaatttttaatatagtcttatctaccacacatccccatagatttaaggattttaatagaaagacatgatgtatgtatttaagccacgttaaaagaaaaaatataactatggaccggtattcagtgaatacagtttcatggtttttaattctttcaaagcacattaaaaatggtgtgctgataaaccccaagtaaattaaccctttttccgtataaatccattttttgttttgaagaggggaaattatatttattgttgtttactgaatcctggtgtgaaagcatatcagatatgtatgaactgctactgctgtacttccgatttacggacatcattttattgctatttgtagacgtgataacatgaacatgagtacctatttatgtgggccttcagtggatgggcagtgccactcaggtctctggggtttccctctctaattttaagtaaattgacatataactactatgcttataaaaatgaagtaaggaaaacaagtagtcctgtttgccactaaaaacattttcaaaggaaaaataaaatgaaagtactttttactttttatgatactcagaaattaggatgaagaacttttaaaattgctgaagatcaaagaggttatctctgccagtcacaagtgtggctggtgtcattctgggtctgactggagccctcctggactgtttctttaatttcaaaagccctgcagacatagtacctggtcagaactatgcctcggtttatttatcattttgaaataaaatcagaatttcaacctgtaattttatctacattattttctagtgaaagattcctaaatttcctggggaaaaaaaaaaaaga

SEQ ID NO: 133663 - DNA, 1778 bp, Homo sapiens
ttcaaaaataatcagctgcttcttcctctctcaaaattatgctgctctctcttgtttcttcagatatattgctcctttgtccacacaatatactgagtggagcttctgtcacaccaacagacagtctctctgtgaaagtttgaaaacagggctactgctttcaatttaaagtaggaacaaaaagtgctaatttcttttttaggaatgtctaaatcagattgtatgtttggatcgccctcacctgtcccattgaaaccaactggtttatttgttcaggtaaacctagctcaaacggagaaggaggcgtgtctgtcatctgttcactcaggagctgctccctgagtgctctcagctctgcaccatgtccttgcgctgtgctggcagtgcgggccctccttcctctggctgacctgcagcactcctgtctgtcctgcgcgggtgtggtgcgtggtgaggcttactgggcaccggatggcggggccttgtttcagaactcctgcccatggtcttgcttttcagttaacttgcaaaattctgccacccacatgccttatttcagctctccttggatatggtttcggttttaaggctgtttcagatgctcttcctttcgattttgtaaaccagtctatttcattttttaggcagtgcttttacatgaagacaaaaagaaacaaaaaacaacaatatttttgagtccccagtcaggtatgtgggttttaaaaaaaacaaatgtgtgttattttatttactgcatactttaccacatgccttttgagactttttctccaaatatgtgcttttaacagggattggacatcagaatcacttgggggaactttaaaacatatagttgcccatcctctacctttatttcctaaagctaattcttcagtggttaagcatgggcctgtgtgttttgtaaattccaagtgatgtttataccacccatgagtggcaaccagagtcttcaattatttgttccagtcccgtgctttttgttgctgctgtcttgccagcagtgttttctcctcctggagagtatttgccacacacaaagtaaggaaaaaaactaatctctagcctgaactccactgttacctctcagctacttcatttattcattctttcaacaaatagctatccagcctctcccctccctttccaagttcaggacaccagcctcaacactgaagatacagcagtgaacaagcaaagccccttctctcatttactctgcatccttttcagaagaggtagacaataaagagatacagaaataatatgtcatgtggtggcaaatgctaggaagaaataacaaaacaagaaaagggaaagagaatggttggctaaggaggcagcatctctggtaaagtaacatttaagcaaagaatcaaatgaaacaaaggggccagtcgggggaaattggtgttagactggtaaactcagagatggaaacaggtgttgtcctgcagcatcactgaggcagtgtggcaggagtggaacaggattggaaactcgagagacagaagaaatttgaaaaaaaaaaaaaagtggagcaggcagaagggtgagtgagtggtagaggtgaagtcagagggtggatagatctgggttatgaagcgccttcagcagtggtaggtaccgtttttgttggtttttttctccctcaaagtgaaatgagagactattgtagggttttgagccaaggagtgatattatctgaattctgttttaaaaggttcattatggctcctgtgtggaggcagggtagctac

SEQ ID NO: 133664 - DNA, 1185 bp, Homo sapiens
ggccatcagaatagagagaaatagtaagaagttggatttaaggttgttaaattcttgttttcctctttgatgccttttttttttctggttatctgtgctagccttcataggtgcattgctgttctgccagcattcggcttgatgccagccttggccaagcccagtttgtacatatctagaatctagattttccaatctgcttgcaaaaagtagtaaatcttttgctgggactagggggttaacagtgcttcctgtagcagacagctatctcttctcatgtaacttgatactcgagtttttcaggaaccacatttattgaaaacaaagcaaaattatgtcaaaaaaataatttcagtgagagaaaaatggctagggactagatgatcttgctaagaataatattatgttcttctgcattaatttccttatactttttattcttatttttaattgacatacagtttatggagcacaacgtgatgatttgatacatgtatatggaatgatgaaatcaagttaattaacatatatatatcacctcaccattttttgtggggagacatttgagatttactcttagttatcttgaaatatacactattattgactatagtcaccctgctgcgcaatagatctcaaaacttattcctcctgtctatctgaaactttgtaccctttgaccagcaaccccctattccctctgtactcccagtgaagacttttaaaatttaacgtaagtgtattgctttataggcacattcagtgtttgattacatctgtacatctgatttatggtagatattgatgtggcttctacaccagtgcttctgaaacttgttcgaacaaatcacctgaggattttgttaaagtgcagattctgattcagcaggtctaggatcaggctcaagactgcttttccagcaagctccctggggatgctcatgttgctggcctccaccttaattttagtacaaagaggctacaggctagaccattatctttcctttgttctgttatttttccttcagcagccacaactaagcaaagtagaaacacatagttttttttcttttcttcaatataatctgtatgatgcaaatcatgtttctcaattcattatgttttagccttttcatttgatgaggagacaaagcctgtgtacctggcctcaactccctcccacat

SEQ ID NO: 133665 - DNA, 1044 bp, Homo sapiens
tgagagaagtggtgtctcctcctggtgcctccctctcgcccctgaaattcagtccagccaattcagtgatggggcttcccagggcagaagagtggaggtaagctcgataaaccacagggcctggctgagtggggaggcagagcactcagcagcagcagagcctggtgggaagatcttccttcccaagggcctgagagccacgctgataacatcttttctacctccacagtcacagagcacaatagggagaaggggtactggttctgaacagaatgggttcccttcatagagccgatgtttcagaaaatactgctttttgttcttaaactctgttttcttactccccacccccagtttttttttaagtctataaaatgcaagataaattttaccattgtttgttgtctgtttttatctgcagcaggctaatttttaaaacatgaaatatagtaacatatgaagagatggatttttctttctttcttttttttattacagatccctactctgttaaaagaaatgtggcaagaaccctaaatagtcaacctgtgtttgaatatatacttcattgtttaaggacaacatacaagtattttgctcttccacacaaaattacaaaatccagccttctaaagcctctgaatgcaattacatgtatttcagaacattctaaagaagtaataaatcatcatccagatgtacaaacaaaagatgataagctcaaaaactcagttttggcccaaggtcctggtgctaccagttcagctgcaaatacctgtaaggtacagccacttactcttaaagagactgctgaaagttttggaagcccaccaaaagaagaaatgggaaatgaacacatcagtgtccaccctgaaaactcagactgtatccaagcagatgttaactctgatgattacaagggtgataaagtataccatccagaaacaggaaggaaaaacgagaaagagaaagttggaaggaagggcaagcatctgttgactgttgatcagaaacgtggagagcatgttgtctgtggcagcacac

SEQ ID NO: 133666 - DNA, 1048 bp, Homo sapiens
ggcatattcaaggagctaaaagaaaggttgtgtaagtatggtgaagggaccaagaaaaagaagagcaggagattaggatggctaggtaggctgggcttgactggccgaattgtgtagaccatggtaaataaagaatttggttttgacctaagggcagtaagaagtcattgagagttgtaaggatacagtttatgattttaaatggccctggctccattgcgaaacaaggattttaaaaagaagtgcaagactgactccgggaccagtaagctatctgttgcaatggtattagagtgaaaggtaatattgttagcagtttgacaaacttccagctaccactttgagacttgctgagaggcaggttaacctcaataattagttaaatcagaagttagttgtatagtaggtctcttgcccacatttgtcttcatttggtgttgatctgtctgtctttgactgacatatgcaaacaacatagtgagtaatttctttactttgatagcaatgtgcatttctcatttagaaaggaatttggggaacttcggatgactcttatatcagtgaagcaaaatcacttaggaataatttcatgtattcattgatttatttcctagatgtctcagccagatgtcctcttacttgttcaagaatgtttaaagaacagtggtaaggccaaattccacatttaaaaaatttttatgttgtctataatttggatctatcttatttctcaaactttgaaaatagcaaggcatgcttttaaaattatttatgtgggtaatatccaaagcaaatgcccatgaattattaactagagtcctgttagtagttctactatgcagaataaccatttcataagtaaagcttttagcttgatgacatcatcactatttataaagattaaatgagtcctagatgtgactaagaaatgcaaaatatgtaaaatgtactcttgagggtaaaactgaaggataatctgcttttatcaatggttaaaatcagtattttaccaacagtgaataggtgtaacccaaccctaattaatgaa

SEQ ID NO: 133667 - DNA, 1038 bp, Homo sapiens
ataagggaaaataatctcattttattatacatgtatttcctgaaaagtcagttgtaattctgatgatttttactgtaaaatttcatgtaaaaatgaatgtactttgttgtggaaaactgctaaaacccaaagaaatcacttgaattttagcaaaccttaaacaaacaagaaaaccaacccctgatgagaaaggatactattttggcatcatagtaaaacactgaaaataaatgctatactatagatagtactcatatacacacacatcttcctctgaagagtgaagtgtctgctacctatgtcagtgatattgtaattatttttcaaaagtttattgggattttgttacagcaaacgctttttgttcataatataatgagaaattcatattaaatatgtcaaaagattatttttattattgttttactaaaacctccttatagtaaattacaccaatgggtgcattctaaaaggtgaaaagaaacgtttgcattagctcttgaatatactatcaggtttataaatttaaacaaagacattctttttcaactggcacatttaaaaaaatattttaaatagtattttcttcataaaatgtgatatttagataatagtattttattcataaaatacatgataacgtagcaatttgacgttttacaactgacatgaagcgtggctgttaagctaaatcatagttgatgcagccttccctattaaattaagtgaagagcaaagagccacctatttctgtcctttgtttatgctagtcttgaatacaagtttgcttttgtgtgtaattttaattgatggttctgcttctgaaatagcagtgttttgttataacttttgagaaattctactgtatttattacttttatttatttatttattttttagattgttccctaagattatatgggtcatcctgtagcagattgggtttcaaaaattcggatgtaaacattgacatccagtttccagccattgtaagtacaaaatgaaatgctggcactttcagagtggtatggaaattct

SEQ ID NO: 133668 - DNA, 1037 bp, Homo sapiens
aaaatacataatactggtcagatgtattttactggttaatcttgtgaatttccttaagggcagcatcaggttatatgaagtcattgataggacccaggtatatgtccttatactagtattaaagcaaacaatgtttgtaagtgctgtttttaatattctttccttacactttctccttatgcccacctatcctctgttaccactgatccacattatgtgcataaggaagtatgtatatgtttgataggatgaaaactaacacagctaaaatgagaagggagggctaagaaaaagaaaactctatagggtgttgtcttcatgagtggtagaaggtcaaaactatgtgtaagtcatttttaatctcaacatttgatcttaaaaggagaagcaagaggaagagttgctcactacgttacccccaccaacaccctcccagataaatgcagttggcattgccattgacaaagtggtacaggaatttggcttacacaatgagaacttggaacagaggctggaaattaaacgtatcatggaaaatgtgttccaacacaagttaccaggtattttctagatttgtttttctatttaactacctaaaagtacctcattcatttctcctaccaatagtaattttcatcaaataaaaatttatttaccatgtcatgaagctcttgtgttttctatttttttgttttttgttttccctggctttccctaaggtaacaaggactttcatatgcattgtcattataaacctgtttccattataaattttaccctgtgtgtgaactttaagttgaatgccctgcattattggggcactgtgggactcttgtgtatgtatgtttccctttccgctcatctaaattgacaccatattttgagttaaaatcaagagaagtatcctgaagttattttcaggttattcatgtcaaaaaaaaaaaaaaagattttatttaactgtacttaagagaattgcagcatctaaaatgaactttgaaaactagttttaagaaatttgtattggattttgtgca

SEQ ID NO: 133669 - DNA, 1004 bp, Homo sapiens
agaattatagatatacttgccttcagagtataatttttctgttgctttgctatgctcagcagtataccaggaagagataataaaaatcaaattgtatgattgaagtagaattcttttaaattttccaaaaagatgatttctatggcttaatgtctacaggtgatgtgctcactgaatacagtattaaagcattttgtccataggacagctacctttccttctgctctgcatgcagatgtgatttattctctcacatgatttaatacatatgtaaggtctgctttttactcaggagtggcattatttaatattgccaataatatttttcccccaccttaagaaaacaagaagcagaggtccagacctaggaagccacggaagactagaaatgaggaaaatgagcaggatggagacttggaaggccctgtgatcgatgagtctgtactttcaacgaaggagctgctaggcttacagcaggctgaggagagactgaagagagactgcattgacaggctaaaaagggtaacatccttatatatatatttgttggttagaatcctggttttagcctcaattttgttgttaattgagtatgcatgctctgatcaattagatatcctactttggttatcagtatttaagcactacaagttaaaagtgatgtccagtgtgatttaataggattaggagtcattgctattatacttaaaatgactgttagggtagtgataaagggaacaataacagtagcaattttaaaagtgaagaagaagccaggcacagtggcatgcctgtagccccagttacttgtgaggttgaggcaggaggattgcttgaactcaggagtttggggctgtagtatgctataatggtatctgtgaatagccagttcactccagccagggcaacatagtgagactcctgtctctttagagaaaagaaattgaaggggaaatcatttcctggctgattttgtttatctgaatgtttggttttacttatgt

SEQ ID NO: 133670 - DNA, 1025 bp, Homo sapiens
gttttttaatagagatagggtttctccctgttggccaggctggtcttgaactcctgacctcaagtgatcgacctgcctctgcttcccaaagtgctgggattacaggcgtgaactaccgcgcctggccctcagatatttttaaatttgaaaattaagagtatatattaatatcaagtagcagaaacagaatgaagtgttataaaggcgttaagtagtagggagacataaaacttaaatctttaagctagaaatagcttgaggaattatctgatgcagtactctgttgtaatatatcaaaaatggaatcacagttttacaaatcaggcagctgcagctcagagaggttaaatttccacagacctgtttatgcagcgcggtaaatgaggaagtagaactaaaattggggactctgctactctggccattaactcagcctcgctggacctgaaatcctgacggcggagccgaatatttcttgataatttctgggcttttgatttgtgtttttctttattaaaaattgtgtatatttaagtgtttctgtattactgtccaggtgggatgtgggtatttaattttgttacctatagtcttgtagaagttgatcttgaaaaccatttcattttattattattattctcttttttgagatggagtctcgctctgtagcccaggctggagtgcagtggtgcgatcttggttcactgcaacctccatctcccaggttcaagcaattctcttgcctcagcctcctgagtggctgggactacaggcacgtgccaccacacctagctaatttttgtatttttagtagagttggggttttagcatgttggccaggggtagtctcgataccctgacctcatgatctgcctgccttgacgtcccaaagtgttgggattacaggtgtgagccactgcacccggctgaaaagcattttaaaaagaaagtttatagatcaaaaatttgcaactagacattaaaaggaactgttggctgaccacaaaaacttttatatgttttct

SEQ ID NO: 133671 - DNA, 1050 bp, Homo sapiens
atacttgatatgagtaatattctactatgctacagttctggaacctatagagcttctcttattcacacatttaatcttcatgctaaatagtaagtattaattttcatgaagaatattagaggaccaagcctcccaacctctagggtaaagcactgattattaagaatgtgatagaatttttattttaaaaaaatagggagtttctttcttacaggctttggggcatctgtacgataaattgttattttgtatacttgtatgatatcttgttatatagtttgatatttccccaaaataccttctttcaggtgcaaagtaagaaaattgaagtcaaagaccatgggagatacagcaaaaccttatttcgtgaagcgcactaaagaccgggggactatggatgatgatgacttcagaaggggtcacccccaacaagattatttaataatagatgaccatgctaaaggccatggcagtaaaatggaaaagggccttcaaaaaaagaagataacaccagggaactatgggaatacccccagaaaaggaccatgtgctgtttccagcaatccatatgcatttaaaaacccaatctacagtcaacccgcttggatgaatgacagccacaaagatcagagtaagagatggctgtctgatgaacatactggtaattcagacaactggagagaattcaaacctggacctagaattcctgttataaaccgacaaagaaaagactcctttcaagaaaatgaagatggttataggtggcaagacacaagaggctgcagaactgtaagacgactgtttcataaagacctaacaagcctagaaaccacgtcagaaatggaagcaggaagtcctggtaatgttttccaacttgtcagatcacaaccccagagtcagcaatgttttattctttttcatccaaatgagttttgttattttcagcaatttagtttcagtttttcacagtttctgttttaagaaatggtcacttagtgtgattattttaaggatagtaatcatgatatttgagcagctaaaacacatttc

SEQ ID NO: 133672 - DNA, 3088 bp, Homo sapiens
cccggaaagagctccccggagctctgcggaggccggggttgccgcgggcggagggggaggggacgcggggcggccgggccgcgggaaggcgggcagcgcgcggacgccgggccaggaagcggcgcgatgcgagagaccgcggcggcggtggcggcggcgaggcactgagcccaggaggaaggagccgccgcggccgcagcgcgagcagccggcacggggacagccggccgcacaacggatctgcaggcgcggagcaaaatgcacccgccgcgccgcgcggtcctgcagccccgccacggccccgcggcccgcacccccccggggcgacagtgagcctctcccgccaccaccgggggccgagcggagggctctcgggtgggagagcgggaccagatctcgacagctgttcatttccaggaagccaccgcagccagagcgaaaggggaccttctgccaccagcggggcatcagccagcggcgcgcatggatttatgaagacactcatgcaagaagtgggcaggacttggacaaacttttccaccggctccgcgtccgccgctccccgcgcctcgtctcctttcccctcctctcccggcggccgccgctgcccgcgatggtggccgcgctgctgggcggcggcggcgaggcccgcggggggacagtgccgggcgcctggctgtgcctgatggcgctgctgcagctgctgggctcggcgccgcggggatcggggctggcgcacggccgccgcctcatctgctggcaggcgctgctgcagtgccagggggagccggagtgcagctacgcctacaaccagtacgccgaggcgtgcgcgccggtgctggcgcagcacggcgggggcgacgcgcccggggccgccgccgccgctttcccggcctcggccgcctctttctcgtcgcgctggcgctgcccgagtcactgcatctcggccctcattcagctcaaccacacgcgccgcgggcccgccctggaggactgtgactgcgcgcaggacgagaactgcaagtccaccaagcgcgccattgagccgtgcctgccccggacgagcggcggcggcgcgggcggccccggcgcgggcggggtcatgggctgcaccgaggcccggcggcgctgcgaccgcgacagccgctgcaacctggcgctgagccgctacctgacctactgcggcaaagtcttcaacgggctgcgctgcacggacgaatgccgcaccgtcattgaggacatgctggctatgcccaaggcggcgctgctcaacgactgcgtgtgcgacggcctcgagcggcccatctgcgagtcggtcaaggagaacatggcccgcctgtgcttcggcgccgagctgggcaacggccccggcagcagcggctcggacgggggcctggacgactactacgatgaggactacgatgacgagcagcgcaccgggggcgcgggtggtgagcagccgctggacgacgacgacggcgtcccgcacccaccgcgcccgggcagcggcgctgctgcatcgggcggccgcggggacctgccctatgggcctgggcgcaggagcagcggcggcggcggccgcttggcgccccggggcgcctggaccccactcgcctccatcttgctgctgctgcttgggccgctcttttagccctcgcgccccccgccgttggctgcgggagagcccgcgtcccactcccgtgctcgcctcgaccccgcgccgggcacctgtggcttgggacagatagaagggatggttggggatacttcccaaaactttttccaagtcaacttggtgtagccggttccccggccacgactctgggcacttcccctgaagctcctctccggagcttgacttcttggacctcctcccccgccccaattccaagctccagaaactcccaactcgtctgccgtccagaaagctagctgcagtgttcaggacgtccgggaggaagcaagcatgtgggggacagaacagtagtcctggactcgaaagggaaggtgctgaccagtggggccttagcaatttgaagggttgggaaggaggaattatatttgcaaaggggctgtctattagcatatttcctttgagggggcaaaaaaaagtgccagtatcgacttttacagattgtggccagtgaggatattataatcctatgtaaacagaaaagtcccacttaccgattcattctttcactgtttgtatctgcgcccagaattctcagtgacgtgggggtgagggtgggtggcgattgccttagagggaacccctaaattggttttggataagtttgagcccttgaccttaatttcattgctaccactctgatctcttagcacatttcttaggattaagggtccaaaaatgctgatctaaggggttgccatggtgttgaacaatgcaactttttatttaaaaaagctctgcactgccatgtatgaaagtctctttatgatgtttgtttttttgtcatttttgttctttacatcaagaaattttatgtttaaatatgcggagaatgtatattgcctctgctcctatcagggttgctaaaccctggtacatcgtatataaaatgtattaaaactggggtttgttaccagttgctgtactttgtatatagaatttttataaattgtatgcttcagaaataatttatttttaaaaagaaattaaaagttttaaactcacatccatattacacctttcccccctgaaatgtatagaatccatttgtcatcaggaatcaaaacccacagtccattgtgaagtgtgctatatttagaacagtcttaaaatgtacagtgtattttatagaattgaagttaacattcttattttcaagagaatttatggacgttgtagaaatgtacaaatgcatttccaaactgccttaaacgttgtatttttatagacatgttttttaaaaatcctaagtttttaaataactatggatttgtgtattttttttggttatttgttttattaaaacatgtacatcagtaaagagttttaaacaatgaatatggtgtagttactttccagagttacattgtggttaacccaataatgggtgaggag

SEQ ID NO: 133673 - DNA, 1049 bp, Homo sapiens
ttttgggctcaataccaactatcaaccaatctaaatgcaactttgtcatcaccaagcagaatgttagtggagctctataatgggaatattggagaggttgcctcatcacctccctaagaacttgaccatgcagtgggttaatgggggtgggcatgtgctttatttattcatttcataaataccactgactcctatttttttaatcacactgtggtgtcaaccaatctcttctgtccttcttctctgaaatgattcaaagcacgttgctgcaagtgagttattgtaaattgtctcttatttattaaaacaggattgaatacaattctgtaattacacagcagttttgttttttttttttttgaagggagacatgactttattagaaaaataaaaaacaactgaggcgaggggttggtcttcagcggatgccttggtggatgaagctgcttttggctgcactggccttctcccgctcccgccgccacacagggtccaactcaaaacagtgccatagcctcggggtctcatctgctgctgcagatgccactgtggccccatctgggctcatggtcagagtcaggacccgggatgtgtgacctttgagttcagccaccttggccatggttgggtacttccaaataaccagctggttctgtgcaaagccatggcctgagatgagctccttgtagtggggagaccagagggtggagcacacctgggaaagggcatccacggcactcagacaggccccagagcacacgttccagatgcaaatgtgtcgatcactggtgccccctcctgttgccgggacattggacttccagggacaccatgctacggccttgacagccccttgaagggtgaatgtctgcagaggaacccagccaccctctccaagagcactaggccacactttgaccaagttatcattgccaccactggccaaatgtcgtccatctgggacccagcgcagcccacacacttcctggctgtggccactcagtgtggccacgtggtgttctgctacccgaacatcatggtggtggatg

SEQ ID NO: 133674 - DNA, 1038 bp, Homo sapiens
gccaatcacagacagccaactgtacaaactgtgtttaaataaggccaagctgtaaccagtcctgctgttcctgtgcctcacttcctttttctgtccataaattctctgaccactgggcagtgccatagtctttctgaacctattctggctaggaggctgcccaattcaagaatcgttctttgctcagctaaactctgttcaaaataatttgtttaaagtttttcttttaacaccctaagctacctctgctcacatagaaatttgcatattcccctaagagaatatgatcttaaccactggaaatttagggctttggggaaggaatgttgacttatttgtcttcatatcccagggtcagtgtgatacttgtcacaaaataggtcctaacacttgggatatctgcacagtctcagtgcagatactacttagcccaggggcctgatggccaggctgattctctcctttccgttcggagtcctctgccgcaaacacgctccgccggatcatcagtcaggccaagaagcatccgagcttgatcaccctctttgtatttattggagctttgtatttattggagatactggagcagcactgtatgtcttgcgtctggcattgttcaatccaaatgttagttgggacagaaagaataacccagagccctggaacaagctgggtcccaatgattaatacaagttctactcagtgaatgtggattacagcaaactgaagaaagaaggtccatatttctaaatgaaatgtttcactatgaagctgctttagaatgaaggtcttccagaagccatcctcacaattttccacttaaccaggaaatatttatcctctgaattcatgaaatcatgttgatgtaatctattggagattacactgattaataaataactgaaacttggcaaggtgtggtggcttacaccaataatcctagcactttgggaggccggggcaggtgaatcacctgaggtcaggagtttgagacgagcctgacgcacatggtgaaaccctgcctctactaaaaataca

SEQ ID NO: 133675 - DNA, 2569 bp, Homo sapiens
agtctaatatggctatctggattcagagcatacctccattgctgtagcagctgtgattctcagtgtaaaatctttcagtttctaggtaaacaaagaatagtttctttcggggcatctaagggctgattgctgtttcctttgactgtgtattagacagagtgttttgggctctggtcaactttagtagaaaacctagttttcatacatacatttaaaactgaatttatggaatttgactgtggtgtatttacattgtgagtggagtaggcaaaaggatctttaaacaaacaaaatatgtatttacttatatgtgcattgaaatatgtattttcccatatacatctgatgtcctgatacaaagcttcctttttctccatgaaaaggaaattaaaaaacacccacatcctggattgcctaatgagaattatggaaactaagcttaactaaatttttttaaaaattcaaatgatagtgtagaatttttttaaaagttactgtaacagagtatttctctaaatatttagtatcgactgaaaacatagatgggggcctgtgcttaggaagagctctctgtatattgatgatctggtgagtaaataaggaaagctcttcaaacatcacatttcatggatatgtttaagattaaagtttaagagtgtgtgggtgaaatatttggtttaactggaattaaataactttactgtggttttcagcaagatgagtggtatttggagttttcctttgggactggaagaaaaaagcaaaaaaataaattttaatttgatttgcatagtgtggcctgatcgtttaagtgttgttagaaagagagatgactaaaattagttgagattattatattatggattaagtatattgaccttattttcattatgattttttggtaccattatgtgttatgagaaagaaatagaaaaagaggcctccctgtggttggcgaagggagtttttgatctttatttcgtgggcgtgatgatgaggggagggaggtggcttacttatttgtcactagcactttgatttgctcagtgtacatttttgtgtataacgttctccccactgtgcaaggcaaattgacaaattgtttattaaataatttgtgtgacctaggaattttaaagaaatgctctgaaaaactggaagtctgaagtttttaaaaatgaaatgtacagactcatctatcttgtataactgctattgtttttgccaaaaaatgagtgaatgattgttttttggaaaatttttcaagtcctgattttatgtctgccttggatgtagccacttcctgaaaacaagtcctaatgtaaaatggacatgtaggaagatgctgcttatatgacatcacgtgtcactgagggaagattgggagtggaggcaggagtttggtggcaggaaaatggaaatgggcagatatgtggcacaaatgcaaggtcattctaagcagtgaattactagtagaccagtatctaagatttaagactttacttggccaggcgaggtggctcacacctgtaatcccagcacttttgggaggctgaggtaggcaaatcacgaggtcaggagttcaagaccagcctggctaacatagtgaaaccctgtctctactaaaaatacaaaaaaaattatctaagatttaagactttaattggccaggcgcagtggcgcgcgcctgtagtcccagctatttgggaggctgaggcatgagaatcgcctgaacctgggaggcggaggttgcagtgaatggagatcgcgccactgccctccagcctgggtgatacagcgagactctgtctcaaaaaaaaaagaaagaaaaaaaagactttacttatatatctttagcagtcatctaaataataacgattcacttaccttataaatgtagtgagacaaagtacatagccaggaggaaagatgggtttttgaagaagtagagtacaagtattattgttaatgttattttacttttaggaaaattgaaaatgttcgtatttgtgtgtactgcctaagacttctgtaaaagctctctgtcaacggtcaggaactttatagagtattgcaactattgcagcagtccatctgcagcagtaatagagcagatgggccactggacagataccctggtccaaaacctggctctgcaacttgccagttttcttgaacaggccatttacccactctgacactcaggattttcctctatgagaggtttagtgcttttttcattgctgttgtaaaaataatctaacttgtaaaagtagttgatcagcagtagagagttaaacaaatatagatattatctgtagactggctgagacatctgggtgccccaggcaagctaataacttggccggcaagtcaatattctttaagtttctgtttaccagctttgggaggggatgccttataggaaaagggtcatggggagaagggttgctgacagcattcagcctccactatgattctgaataatgcagccctggccttgagctggcacaccctccaagcagaagcaagtccctgcagcagatgcacttgttatctttagaagggt

SEQ ID NO: 133676 - DNA, 1049 bp, Homo sapiens
gctaggctggtcttgaactcctgacctcaagtgatccgcccgtctcggcctcccaaagtgctgggattataagcgtcagcctctcgctgtgcctggccgggactttgacctggaagaaggctgagtgaccagcattgcctcccttcacattttatccacctgtgtttagacaggtcaagtggctttctccaggcagctgattaaaaggtggcaagacatggacccagaacccagggccaggcctatttcattatctgtgctatttaggatttggcagttttccatctttgaaagccagatgaagttgatatttaagagaggtgaagtaggcagccatttggcgccaatttatttcagcatctgcatggagaaaatggttagggataaatagtagacccttcatggaaggttttcatttgaagcccagccaaaggcaacagggtctgccctttgagctcagaactttcgcaggccttaacgacacactgggaccttctttccttttccaaatggcttcagccttgcagtttggaatgatgtcaacatgtggcgtagttttattcaagtcccaagttaatggtttacctttttagaaaactccaaaaacactttcattgttatttaacttttgagttatgtaatgtctaagagtcttgtctctgacccgtgcacctacctgccactgaccaacagtttctcatttccttacgcaacaactagtctggctagcttagagttggtgtgtgattgtttgagactttatgtggaagataatatttaattgttttgttctggtttgttggggtaaattatacaaatggaatgcatcctttctcggccttgaaagaggttatatgacagtacaattataataaattcagtgtatgactttgggtacattctattataaacgaatttttttaaaggtgcagttagaagaaggtggaagaaaaaagaagttgacactccgattttccacatcatctaactaaaatggatttaaactaactttctctaactattaaatctttcttaggtaagtacagttg

SEQ ID NO: 133677 - DNA, 1209 bp, Homo sapiens
gggagtgtccttctgcctttttctctgccctatgtctgggacacagggatggcagccaggcccaggagcacccagcatcctccaagcaatgaggtagcactgcttctgacttttcctcaggatctggtctttttccatgacaatgaggtggggcccaaccttctcgaaagtggcattgtttctgcacagttgtaactgctctcaggggtgtcagtgaagtaggggtgggagggaagccatgggatgctgagagaatagggccgagaggacatacctgctctccagcttggcctttgatccagacactagggacgaggctgtcactgtgggtgcctttgttagtgtttgtgtgtttgagtagtctgaaatgctgtgacttttttttgttgttgttaataaagataaggaaacaaacagaaaaaaggaaattggagcttccaaaaggaagaaggaagtcttaatatagaattgacttcttcccaggtaagttttaattgcttctcatgcttgtagaaaggtgtatcatgtgttctaataggttaggatttaattatggcttaaaattagttctataggaagagcttggagttgcacctagggagaagaagcagagggttccagaattgtgtaaacggattgatggaaaaataggcttctggtgctgagggttcaggagccttgccagcatcacaacaaggtgtgaattagcctcctcgcactctgggaggaagtggaggaactgctggggtgtgaggctgtgaaaggaccttggagagccaagtcctccctgttcagacagggacaggcacagctggagacagcagttttcagctctgtggaactcttgttctctgggttgcacttcttcctgtgataataaagaggttgaagacaggaagacaggtgcttgaaagccggaagacaaggggaaagttgtttgaagcaggtgtttaaaaatccgccactttggggggatgaattaggatatcggtaacaattttatagcctatatggtttctttttgaccctcgaagataggtgggaagtggttttctatacttcttttaaaaactgggaaaccagagcttaaagaagttaagcttgaggcagcagagttcaatgcactggtgaattgaaatgtttgtgtgtgtatacatacatacctgtgtgcgtacatacataggtatatatacatactcagtataaata

SEQ ID NO: 133678 - DNA, 1482 bp, Homo sapiens
tgctctctgcatctaggtctatcaggaaggtgagctggcaaaagatccctaaagcctttaaacatcacttaaataggtgtgtgtgcaaaattgtcttccattaacaaatatgtcaaaacacaagcctaatgttttctttggacagtttccaaacactgagcttctttctgaactgttactggccggattattgggactattcccaggtgtttatttcacatcctcctctttttgcaagtgacatttaaaatacttcttcgaagcacacacattaagccaggagaaaaatcctaggatgggaagcaatcttatggctgagaccttgtctgcgaacaattgtttgctgaccaaaatgccgaagtcattaatcctcctttctactgactttgaaatggaaaattaaatttcagaaaccttttgattgcacacatgcatcccacaatgtttcatacaccaatacatatataggtagtttgaattctgtgcaccaagccacttgcactgacactgatactaatgtactgtgagagagcagcatactttaaacacttgccgatgtgaatcagacttgagagaacttgagcgtgcgtaagcaccttgatgtcttatccatttggaagcttattgttacagtgcgttttcttttctttctttctttttttttttttttgagacaaaatttctctcttgttgcccaggctggagtgcaatggtgatgtctcagctcactgcaacctccacctcctgggttcaagcgattctcctgcctcagccttccgagtagctgggattacaggtgtgcatcaccactcccagctaattgttgtatttttagtagagatggggtttcgccacgttggccaggctggtctcgagctcctgacctcaggtgatccacccgcctcggcctcccaaagtgctgggattacaggcgtgagccaccacgcccggcctaccatgcaccttttctaatccctcttcctggaatgctcttgctccagagagccacaaagctaactttcatctcctgcagcgtttgttcagatgtcactttctcagtgaagccaaactgaccttcctataaaaatcacctccgactcctgagctcaggcctgggcaacatggtggaaccccatgtctactaaaaatacaaaaaaactagccgggtgtggcggtgtgcacctgtactcccagctactcgggaggctgaggcaggagaatttcttgaacccaggaggcggaggttgcagtgaaccgagatcgcgccactgcactccagcctgggtgacagagcaagactccatctcaaaaaaaaaaaaaaaaaaaatcacctccaacctcacaccataccccattttctgccgcactatataccctggtatatgaccttccagggacattcaactggtaagggaagaatgcttcaagggagccatgtgtatgactccagtaaacacactgtgtgtgctcacctcccaggtg

SEQ ID NO: 133679 - DNA, 1016 bp, Homo sapiens
gaggttttcatgtgttttggaggccctctgtagtgcatcagtatcccccatcacatagtgtgtacgcagtcagccagctctgcttgatgggctgggtgtatggggagatgtttctgggtatggtgtggggttttgtgtgtggtgtgttgtgaatgtggtatgtgtatgtatacttgtgtattttgtatgtgtagtttggatgagatgtgcatgtgtgtagtatgtgacatacatggtgtatgtgtgtgtatgtggaatatggtgtgcatgtctggagtatctggcatgtgtgtagatgtgtagtgtgtgcggcatacatggtaagtagatatatgtatgtggcatatatgatatgatctgtgtgtgcgcgttagtgtgtctgcaggagcattcgagaatgccagcgaggatgcatttcctatcatctgttcttaatggagaaggatttctggaagcagcagatggtgtgaagtgtgcagctgtgaagttagaagaaaatcttggtaaggaccagattggttctgggcaggaaggagtatcctcataaaatcaagcccctaaagctataaacatcagatagcagggcccgaggcaagcgggggtttgagaggagtcacaatgtgctctcatttacaaaagtagtggctgccagctttttatccaaaatcccttaggaattacagttgttttacgggcccaaaatgctttgtaactcagcagatggcttgaagacttcagtatcttcccatttttactttaaggtcaaaaggattctaattaaagttaaagctacaatctcaatgtcattgtttaaatgaattcaccaagacaatagttgtggaatcttttcagaggaaatttaagatgttaatttcccactgaagtatagtctaataattgagctaaataatggcactaaagaatgacttgggggtttgccctcttggagtccatttattcttaaagaaagatttttccctttaattatcaaactaataatggccattggaggtggg

SEQ ID NO: 133680 - DNA, 2413 bp, Homo sapiens
gtcaatctgtagctgattattgtctcgaatatgtactcaaatgagctgtgtagtaggccatctgctgtctcctcgactcagctgataggccctggaaaagggaaatcctgccaaaatgcaaatatcctacttaactgataatatagggagaggagatacaggctgtgggggaatgggggtagggaagggaatggggcgtggggaagaaataagtgactgtcttcacccttcctcgatgtctttccatcctcctgtgtttcttcctgttagagaaagaccaggtgtggatcagtagaccccgctcacaattggagttgcggggtcagactggaagtagccagggaattaggctcggttgtgaggatgctttttgtagcctcttcatttgaattcaagaacctatagcctcttggtttccactggcacgcttgccatggtaggagcccttgttaggattaagcttttctcagtgctggagatggagttgttgcactcatagggctaccacctggattcctcagattgcctccgaatgagtctgtgagccccaccccaccggacctccctccatggcgtccctcccaagcatgactcaagggttctgagttgctgtgttgaatggattggctagcgatcgtttccatgggcatactgctccatcatttccaaatgctttcgtgttcactttcagtttcttttaatatttatagacaccccaaaaaggctgccactattcagttgaaatggtaatgctaaggaaactaaggctccaagaagacggtccaaggtctcatggctaaatgagtagaagaccaaaactgtgattacaaagctgtcaccagctctgcccctttagggtgagttactgatgaaagaagagttggctctgcagacagcagtgaggaggagtgaagccacccaggcataaggcaccggggagctgcgggcctgtgtccagctggagcgcacggggccatctgaaggggcagtcgctatgcattgggcgctgactgcctgcaggccgtgggccaacgctgccagctcttccaagtcttcatgcattgctgggaatcagagttttaaaatattgacagtggattcagttcttttcaaaacactgtgcccattgctctggatcaaacagacaccatcccacacaacactccagttgtgatcagtggattaaagcaacactccttggtgaataggcttcttttgatggtacttgcatttgaaaagagttttgttgaagcaatttagcttctaattaatgcattctgtgggggagatgttttttcatggagtcatcttcttgtgcctgctctgggtcccccagcttcaaggaatgttggctaaagagagtgggaaggtgggatgcagtgtgggtggcgtcaccttgcagcctgaccgtgcctcctccgtcctctctgcacaaggtgacaacccactaggatatggaaggggaaggctgtcacatgtaccttgtgtgatgcacccaagttattacaaatcattttctaaaaatccttgcagagtgggtaatgggtctctgagccatatagtgttggggctgttgcaaaactggtccacttccaaattgcaggccttgatcatttactccctgggtgggaaaggggagctctccacagtaaagaactcatttcttgtcctcagatgtgtggtggtctgatgtgatgagcagactttatactgagaaaggaattttagaggaatacagaatccagctaacttagtaggagtgattaaaaaatactggaggtgtggggcgaggcagattctcttgatagaggaaattctccaggtcacgtgtgtttttttaataagtagcatccctttgcattaacctcagtggttctcagccttggctggttggggaatccctctgaactttaaacactgcctgtacttgggctcagcctcagagattaggacttaattggtgtggagtctggtgagggcatctggactttcaacagctcccctcccccactgacgatggttgagaattactactccagtctgtgagttttagagttcactgtgcatcagaagcacccaggagctctttaaaatgcaggttgctgggctttgccccatggactgaatccagagttcacgggggagcccaggaacctgtatttttcaaagctctacctccagcgagactcaggtgatcattgacttatgtgcttcatcgcaggtgcccatatagaaatacgcagataggttatttcaatttgcaattaatacatataaatactttagtgtcctacttttgacaagcagttggatggaaaatcgatcttttgaaatggatgtcagtttaggctcaaaacgtgtgattacctaagttctcactgctggagaattcaagctgataggccatgttttt

SEQ ID NO: 133681 - DNA, 1049 bp, Homo sapiens
taaaggtaaaaggcaagatgcatacattcatagccgttatctcgtgctggcctcagcttgctggggatgtgcacgtgtgtttggagcccagcaaagagcttcacaataacaatcacagcaggagtagaaaaatgggcctcgcctcagcaccagaaggagtgcatgggtctgtgtcagcattgggtgctttatggggtgttgtgagggcaagaaaccttaaggagcgtgtggtttctgagatcccgatttcgaaaaaacaaagccctgagctggaagtcccaggcatgtcactgtacctccatggaggttacaaaggagtaatttgaggagtggcatcaatattatttaaatgttgagaatcaaatagattttgagagctagtgcagggctgagtggaaattgtccaaatttctgtacagatgaagactcataagtgggctgaacgttatctctccctcccgacttttttttgacctaacagcaaacacaaagtattccctttagaaaagagtgtacgaagagtggtggaaaaataggaataatttccttcaacctaatcatcccaaactcaaacaaaacaaccctcgcattctcaggcactaaggtgctccctggcaagggaagtcaagggtggaacagaaggtacagatagaatttatacctcatggggcccacgacagacccagctatgcctgggaggaaggctgtgaatgcagcgaagtcctgaaacccaagaaaatgccttccgtggttcaatgttttgctttttctctaacaagctcaggttagcggtagtcagatgtctcagtgtgagcatctctttaatgttagcattcagcattccaaacttgggtggactttgatgagttcattcttcatacacgtacacacacgtgcacacacgcatgcacacacatgcgtacacacgtacacacacacgggtcagagttaatgaaaatgtgtttgagtttgtgctaaaggcaagctgagcagatgttttcctgtagtgagtgtgttacttcattatctgtgctaataattataagaat

SEQ ID NO: 133682 - DNA, 1047 bp, Homo sapiens
cactgcacccggccaatttttgtatttttagtagagacggggtttcaccatgttggccaggctggtaccaaattcctgacctcaagtgctctctgcccacctcggcctcccaaagtgctgagattacaggcgtgagccaccgcgcctggccctggatctcggttttaattgtcctacaatagaaatggcagtgccctccttatagcactgctgtgagcacgaggtgagctccagggtatggaaacacaggatccagcccagtgcccagcaacctgcagctgccccataaatgggcatttcctttctctgccttgattgtccttttgccttctttggatcaaaactttgctgctcagtgtttggggaagagataatattctggtttgtccctcaaatatatacgggaatctggtatggaactcaagatcaacgaggcaaacctaagaagctgtgtgtgtacaactgtggttctcaaagtgtggtttctggacctgcatcattttcatcatcgcctggaaactggttagaaatgcagattctcaggttccaccccagacataacggaattggaaactcggggtggggcccagcggtctgtgttttaactagacttcaggtgatttgaatgagtgctaacatctgagagctactagtctctacatctaagttatcagacctccttgaatcttagacttccctgaggaacattttaaaatacgaaagccagggtcccccccaagagatactgatttaatgagtctggggcagagcccaggcacgaggatgttttaaaagattccatcagtgagccaggcacagtggctcacgcttgtaatcccagcactttgggaggccaaggatggtggatcacttgaggtcaggagttccagaccgtcctggccaacatggtgaaaccccgtctctactaaaaatacaaaagttaactgggcgtggtgatgcagggctgtagtcccagcttctcaggaggctgaggcaggagaattgcttgaacccgggaggcggaggttgcagtgagctgagattgtg

SEQ ID NO: 133683 - DNA, 1032 bp, Homo sapiens
ttcagtctccttaaccactttcaaaatcatcatgtaaaagtctgttgcacactctttccctagctgttcagactaagctccaaaagtccatagcttcggaagacgcatggacacctctgttccttggacacacactgctttcctcaaactgcatagttgtgcctttgttttcattttcccttctgaggggaggaacaaggactagcaatgaatggcacctggctaggcgttacccttgaacatcctgatattaagtaaataggcaaataaagtctctttgtaggcaaataaactctggtttgcctgagtacaagccatgatgatggaatcaagctgtaattaaaaaaaaaaaaacttagttaattttacttacaacaatatcctgaaatcaaaatggatttaaaattgcatacttatcatgaccaataattagagaatatggctccacagcctgtggttttggaggctttgcagcccatttcagctgtttgtgtgtagttgtagctcgtttgggttgtaaattggaatctgattcttcccccctaactaccctagttcccttctggcctgtggaagataagctgttctgggtcaaaagcaatgtggtcacatgaccagcctacaaaacagagtcagccttaaaacttccaggactggactgatttggaaacttggagaaactttgctacacaggaagatgtctgccaccggggaacaaaccagcaattcatctcatgcctttcatctggagtagatcatgtgccctgaggtcatatgtatttttaaacatttattcccactcattttctttaatttgagacactcgggcttaatgtagtaagacattttaactgaaatttaatttgaataggtcctcacatacagagtttggtgctctacaaaaaataaccaaggtttaaaaagaaaacaaatccaggaggccttcaaatataccacttaaaatgatcaactttatgttttttaacaaagattgattttgtactctgctggaatgtggccccgtaccaggtg

SEQ ID NO: 133684 - DNA, 1050 bp, Homo sapiens
ccatgttgaccccagctctgcagggtccaaggccacccatgctgggaggggtacagagctccttagcccccagcccactgcagatgatgaggaggaaacccagcaagaggaagggcttcccacccaaccacagcatgggctgtaggagaggtcattcctccttctcgcccactagtggacttcccatttcacccccttccctgccaggggattatgtttccatccacagagcttctaaagccccccagtgatgatcacttcatatcccatagaagtcatattccacacttttttggaagcagtgctccatggaaaggtcattgggtttacaatccctgcttcaggagataccaactccaaaccgcattcgcacaaattgtattttattttgtttagtgtttgacctgagacttaattagtgacacattctcttcaaaagtggcacttccgagagttaacgccatcagtctctttactgtcctggccgtggtggatacagtcttgccctggctctcacgataagctgcatgcttgctcggatcgggccgcgggggtgaggtcagcctcgtggctgacttccagggagttctgcttccactgagagaatactcaggcttcccgggagctccggtttctttttaacttatcatctttcagttttatctgagtggctgtcacttcaggtaactccagcagtgccattccctgccagcctcttcttgcctgccctgaagtgaccctgcggtcccctccccattttctcctccccctagacttcctccacgaggtgagtccccacttggttcagagccaaggtgacagatctgtagacatcatgggaaatggcttggcctagagcactgtaaaaaggattcttctttgctgggctgacagccagacagccactcactgcctccctgagacctgggcctgtgactcttgcaaccccagacacggaagaccccaaagaagcttggctaccctcagttgtattcagtctccagagcaggacagacctgtgaatggtgtctcccaagcatgttggccacc

SEQ ID NO: 133685 - DNA, 1122 bp, Homo sapiens
ggctgaatccatcatagatttgcctgtggcctctaggcagccctttcaccagtagccagaaggaggcagaaggagcaccaggcctgaggaggtgggtggcctcctctcccaggcctgagtcagttggtccacacccttctaatgggtcaatcccaggaaggtctgaatccacctgggcacctcccacctccacctctgtgcttggttcttccagaccatgaaggagcaggcactgtgattggcatcctgccttagggaataatctgaaagtgttgaaaatgcaaaggaaacagtgaatatagagtccacttccaggaagctgcccgtttaactgggagagaggaccaaagcacaccttcccaagaaaactggacttcagaatgcttcaaaaccaaaaatatgtaaggaaggaaaaaggttttgtggttaacagcaaccccaaaccatgtgaaatgccgaatgctattgcccctcgtggaaagggccagttagctgagtcctgcatagagcaccctgttgtgactctgtttacctacttttgcttaaacttgcttggccatgactccctttctccaagcagcatctctttatatgagctccagagacccactttgggaaatattcttccagatggatcttggaccttcctcctgcaaagaggtatcataggaacaagggggagtgaatgaaggcacccactgctatctttctaatctcccctcagtttaatcctcagccgctctggtttgtaaatttcttaatgataaagaggtatcttgagctacctgactctcagcatatttggtttccttgtccccacgtgcaataccaaaccagtgcgtggagcccgacccacgctggccttgggtcctcggttatgccaccttcttctcctttgcagtcttccaggagaccttgtccttgggaggatgctttcgccaagggaccgacctctcctctgctctccttggcccattgcgctgttcgcccttctctttctgcatctctttcctacctctgtgtgttgttctggttcccagggtgacggactgctgtttatcccctcagtaaactctgcttctccctgttggtgccgtggcaacctgagctgcttgctctaca

SEQ ID NO: 133686 - DNA, 1071 bp, Homo sapiens
cggcttccccaaaaccacaaagatccctgggtagaaataccttgagacgggaggagaggggagataatgctggagaagtgaccaacaaatatttggtacatatgacttatcagtcgcttaattataaacaaaataatagacctttttctgttctgtgtatttaaattggttaatattggtgctagaaatatgttgttgaaggcaggacttcatatatatttttttttaccgattccctggtctcaatccctcgtttttcaggctcagagactagacgtgcaggaaaagagtttgctggaagtgaggtcagatcacagagctccttgctgctgtcccaggacctgaagtgggagggaaggaggagaggacagaaatggagacatgatcactctttcaataaaatatactttaaaagtttatattccttgcagcattatttataaagaaacaggcttagtgtaaatgaatgatgataagaaacatccctacctaatttgttactttccacaattggaactttcctattcacagttctcttgtccccctctgcaccatgccacatcctcactcaaatcctgttttttttatgaacgataaagaatcctccatcttctcttttcagtggacagtttgcggttgtgaagaaatgccgtgagaaaagcaccggcctccagtatgccgccaaattcatcaagaaaaggaggactaagtccagccggcggggtgtgagccgcgaggacatcgagcgggaggtcagcatcctgaaggagatccagcaccccaatgtcatcaccctgcacgaggtctatgagaacaagacggacgtcatcctgatcttggaactgtgagtgccgcctgggccaggctggggagagggtgtggtgggcgtcagctggcatcttcgttccagctggaccacgccacagcgagcccgagagagggatcaggaattggttctgctgtatgaggtgtgtgagaacaatgccgtgctgcctgacctgaaacccagctgcagggatctagaacaaactctaaagagcaactcccatcactgtggttccacccagtttg

SEQ ID NO: 133687 - DNA, 1011 bp, Homo sapiens
tggctttccttggaggaaaagggaaactgcccttcactttacctttctgagtcagccacagtgggcgcctccctgaaatgatctcatttaatccttgcgtgcaactctaggagagtggtgttaccaccctgcaggtaaggaacgctgtgccccctctgtccacatataggtcacaggagccggtagagagatgctcattctcagacagtagcctcttggagagagaattcttttgtttgagttttctaagccctaggattctgctaagccactgtaggattttgcctgcaaggccccattgtctgtgggctggttggccagctttgctcttccttcttgagagtgactttcacattccagtggttctggagacacatttgctcctcctccatttgaaagcagtgatttagaagcttttgaaagccaacctggcctcccagggcccctcacctttctgcttccttctctagcgtggctgcattgttcttgcccctcatttcttagcatttccatgaagttgggggtgggcagaagatgttctagttttccagtgggattgctgaagcctaggagtgggatggcttcatgggggctctggtgtgatagtggcatgtgcctatatgccccttgcatatgtttctttgagggcaagactacgtcctactctggcacccacagcactgaagactgtgcttggcccaatacatggatgtcaagtccagatagagcaggaagaacagcaggatctgaaaaagagtcacgtgtggctcaagaaccagttagttgaccagggagaaggacagttttggggggaaacgttgatttacttgcatgagcttcagaaaactcttgactgagtttcctaaagagcaaagtaccccatcctcttgagtatcagggtttgggtcagtttgggtcctaccaggaaacagacggcccacacaaacagggaaatttgagacttaacaaacatgtgtgcaaggtttggagaacatgataagtgatggggaa

SEQ ID NO: 133688 - DNA, 1061 bp, Homo sapiens
catggacacagggcttctcttgggggtgataatgttctaaaattagattgtggggatggttgcataaccctgaaaatactaaaacccagtgagtggtacactttaaaagagtgaattgtatggtgcgtgaattatatatcaagaaagatttaatcttggatgactccctcctgcccgctgaatgaggtccatgattggtagagtggtgcagagcctttgaacctgtgtccaggcccctccccatattcatccatgtctcttccaccccactttgcctctgccctgatgctccacccacagagaatgtcttgccattgccagatcacacctgttcccctgtagaactcctactcatccatcaaaacccagctcacatgtcaccctctctggatttcctacccactccagttaggtttaattgtttttgtacttgtgttttcctcactttttaggcgtgtgtcgattatagcacatactgtactgtattttaaacatttatgtgtctctcctgcagtggactgtgagcttcctgaggatgtgccagtattttactgatttatttttctgtgccaaccttgtaggagaggatgtacatgctagcacactgtcagtgcccagtgaaagtggttgaagttgaattctgtcagggagactggctgggaaacaacagtaaggactctgaggaaccgcaatgaggagctttttcatggcaaggacagtggggtgaagagaggaaacagagccacaggcactgcttcccgaaggctctgccttgcacgtgacctgccatactctaagtagtcctctctcatgagaacggggcagtttgtcagcagggctgatttccaccctgggcctgagaggattgagacgcaggaccatgtgttcaagctggatgcatgggatgggaacgagctcaatagaaggacagtcgatgggactccacgggacaggcattgagaacctattatatggccggcattgttatgctagaggccaatgacagtcagaggtgggcggttgaaagtaatgctgctgattgtcgttgtcatctggtagag

SEQ ID NO: 133689 - DNA, 1032 bp, Homo sapiens
ttactttcctctgaatgcccctgttaacaagtgagcacaggtttcttttatgttggtaagaaaagcatggctagcaatgtaactctgtttccatcttggctgtctctctcaaggatgaggaagactcctttgtgatgaaagccatcatccatgccatcaacgatgacaatgtcccaggcctgcagcaccttctgggctcattatccaactatgatgttaaccaacccaacaaggtctggttctgttctgccgcatactggaggggtgggtcacagcgaccttgcccttccatatccaaggaaagaccccatctgcttctccattctcccttccaattggaagctccatactgtggggaaaatcacttctgtttagaaagtgatttgagttacaaataaggtctttgtgcattgagggccttccttcattcacgtattgtatctctacccatgaaattttagatcttctcatcctgctaatgaaaatgtccctgatgatgagaatccaaaaggggaaggaaaggttttatacccttccacctgtcttctcttcctgccacgcagtggtagctctatgtctgttgagacaggggaaggtgtgtggtaacagcaatcatcgtttgggcttttcctttcctaccaaacctgaaaattagtaatttttttcttgcctattctagcacgggacacctccattactcattgctgctggctgtgggaatattcaaatactacagttgctcattaaaagaggctcgagaatcgatgtccaggataaggtcataattgttttattgaaatgaattgaattttaaagtattttcaagtgtctcttaatcataggggtaacagaggaaaaaaatttatgtcctaacttgtttctcagtttcctgtaaaggaagatgagctgcttttaaacagcttggtacagcctgacacatgggttaaagaggcaaacatttatcatttatcctccccttggcgctgctgcttgacatcagcatttctttgtacactacccagattttacttc

SEQ ID NO: 133690 - DNA, 1027 bp, Homo sapiens
aggttgctggaagaattcatgctcagggaagtggttacctactgttagtagtttcagataaagtcagcgaggcacttattagaaagatgctgcaatgcacctgcacgaaggctctattgttcagacaagcagggccgatggtttcaacgggctcccgaaagtcaattgtcagtcatatgcttgagaaagccaaattcatcaaacacacaagtgttgaggaaggaaaactaatgaaagagagacatcagatctacctcttaatgctggtggctcacactcatgttgttattttattccagattaatatttcactccaatacctatgagctctttccctctgctgccttggttgcgtttctgccaaatttgacagggactctcaccttgctttatactttgtttctcattattgtgttctcctcctctctgtactcgtctccttggccaggaagaagaaacccccctgcactgtgctgcttggcacggctattactctgtggccaaagccctttgtgaagccggctgtaacgtgaacatcaagaaccgagaaggagagacgcccctcctgacagcctctgccaggggctaccacgacatcgtggagtgtctggccgaacatggagccgaccttaatgcttgcgacaaggtgccttatgggggaagactcatatgcactgggaagtgatctaggggtctagagggaccacaagactcctcagtttgtttccctaagataacaaacttgaatgcagcaaactgtaattaccccgtctcttctctgttccaaagattctgtgaacttttctatattgtatttaatagttaatattaatttatggcatataacaaaattcatgagttgatcaattgactttggtctctaaataatttttagcttttttagctttagagcaggtacagtgatgttcactgaatccgagacaattctcattgaggactgacattggcaacacgctattaatttttagataaacaaagaaatagatgttttacttatttctatcat

SEQ ID NO: 133691 - DNA, 1065 bp, Homo sapiens
ccgatgccagacctagcacctccctgctgaggaaaccctttgattcacatttcatgaaatacccaagaaggaaaatgcatcagctaatgaggtatggttgcaattttatggctgcagtgaaataatatcattcgagtgtttgctggcctgagagtaggctgactgtccagtctttgtgggacagtcctggactcacagatgagagctttactgacagagggtgattctctgaggagaccaagagggcctcatttcctggagatcatccagaggttagcaaaccatggcccacgggccatatcccgctgctggtctttgtaaatgaagtcttattgggacacagccatgcccaaggtttgtattggccctggcggcttccacgccaggtgtcagagctgagcagctgtgacagagaccatatgggccacagagccgaaacacctacttgcctggcccttgacggaaaatgtttgctgaccgctggggctaggatgtcgcctccccgaatgcactcatgttactgggatgtcattccctccccagaagtaataggtctgatctgtgcagtggggggcccagctctgtgctttctctgcaggcccagttattaccagtactccgcatggggtgaggcccctttctagggcacctggtcacccaccgcaaacgcacacaccatacccacatcaccctgctgtgcctgacttgctagatcttgttggccattgtcaagccctgcccagccatgcttgggcacaggttccagttactccctaatagagcatttatatgcattttcaagacgaagaaatatttttgtcctatgtgtggcctcatgaaagacccagccaggccattattgaagatgccagcagctgacgctgctgattcccgcagtgcgggttggggctgctgaaatgtgcggccccctctgtagggtccctccgtgagccgcgggcccctctgcccttgcccacgacatctgtatcagtggtccccgcctggctcctcctcaggtccctccgtgcacctccttgctctcccgcttgccaccgcaggaaaagc

SEQ ID NO: 133692 - DNA, 1334 bp, Homo sapiens
gtggcaggggaacagtgacagcttctgcctctcaggggtgacttcaaggactgaggcttgcagagagcactgagagctgggtcgagcacatattatgaggtggtgttcaataaatacttgctgtcatcgtgtatgttcatggtgtagatacagaaacaaatttattcagtgtgaaactgcagcctatgaaaaatctctaaataaaaagcaagcataaaagtgctgtggactcttatttccttgttttctgttcaccaaaagatctttcaatcaaaattgcctgtcaaactaagtatttcctttgaaatgcacagtaattaccaggagctggtatcatgcaagggctgggtttgtccctgtaaggattataacacagtagcttgcactaactagaatttggcacctgatgagaatctttactgtctgcctgattggagattggagagaggggttcaggacagggaggaaccagccagctgaggaggctgttgagttgtgattaaacctgtggacctgaaaggtgtcgctattggacaggaagacaccaacatgtgctttgttcctgcgtcttaccttcctgtcctggacaatcaagtgaaataaggattgcacagccagagaaacacaccgagacgtgctctttgtccacctggcttgcttctcacacctgctatgcttgtttctgcctcagacccacggaattggcgtatggaacacacacagctctccttttcagagaaaagaaactaatgcatttttctccaacaggacggaaagacggcagaagatcttgctagatcggaacagcacgagcacgtagcaggtctccttgcaagacttcgaaaggtgagaagttctgttataggtctgaagttctctacctgtgtttatgtgaaaaagtctcagtctttttccttatttgagaatgagcaaaatgaggctctagacagccaggttttaggaacagtggtccctgtcctgtggtttacatgtcagtcggtataaatgcatcagctccctatctgttttcttctctatttggacttggaaatcatttagcatgtttgcagttgccgtgcctggttttccttctcccactctctctataataaaccactcccacaaagtagcgggggatgaggacgctgactctgcctctttccttcttatgtttgagctccaagatggctgttaagctcctatttatcaaacattgttgctctgaggcttaaagaaacatgacaaaaataagtaaaggcaggtgcaccctttccagcctacaacatgacagttgtgtcaggagacttcacaatagccataccctttaatctagg

SEQ ID NO: 133693 - DNA, 1016 bp, Homo sapiens
gatgctgagggtgtttcttcctgcacccacagccagggggatgccactcctccctccggcttgacctgtttctctgccgctacctccctccccgtctcattccgttgtctgtggatggtcattgcagtttaagagcagaacagatcttttactttggccgcttgaaaagctagtgtacctcctctcagtgttttggactccatctctcatcctccagtaccttgcttcttactgataattttgctggaattcctaacttttcaatgacattttttttaactactatattgattgtcctttaaaaaagaaaagtgcatatttatccaaaatgtgtatttcttatacgcttttctttgttataccatttcctcagcttatctcttttatatttgtaggagaaactcccatgtatggaatcccactgtatgatttataaacagacaatatgtgagtgccttttgcagaagagggtgtgtttgaaatcatcggagtcagccaggagctgtcaccaaggaaacgctacctctctgtcccttgctgtatgctgatcatcgccagaggtgcttcaccctgagttttgttttgtattgttttctgacagtttttctgttttgtttggcaaggaaaggggagaagggaatcctcctccagggtgattttatgatcagtgttgttgctctaggaagacatttttccgtttgcttttgttccaatgtcaatgtgaacgtccacatgaaacctacacactgtcatgcttcatcattccctctcatctcaggtagaaggttgacacagttgtagggttacagagacctatgtaagaattcagaagacccctgactcatcatttgtggcagtcccttataattggtgcatagcagatggtttccacatttagatcctggtttcataacttcctgtacttgaagtctaaaagcagaaaataaaggaagcaagttttcttccatgattttaaattgtgatcgagttttaaattgataggagggaacatgtcc

SEQ ID NO: 133694 - DNA, 1051 bp, Homo sapiens
cagccatgtggcactagggctcttcagaggaaagagcattttctccatctgaagtgcaatgtcgtctcctgtgcactccacagatggtctgggagctgggggtggaatcctctgcccactctcaaccctgcctgccctgcccttccctagagggatgacgagatttcccatcgccttcaagcaactgagctctgggcatcccctttgggactagggactggggcccaggcttgtatcacacagctggggcctcctcctcacaaagggctcctgggggtgggggaggggcagtgggaggaggaggctgaagcacagccccgccctcagctcccagcccccagtccctccaccctcctgggtcccccaaatcgctccttcccactccagctgctcaccctgtcagagacagtcctcagtccattttctattctcttcccctggaacacaggtgtcacctggctctccttgtaccttggagatctaggcctgagcccacccatttcatagcctttgaaactgtgaaattctcctaggaatttaggtggtttcttaaggattatttcagaatctcctctgtttttgtaattttcccacaccttacattttctactttcatcaacccagaatagaactcttaaatttacaaaactaaaaagtataaaaattacaaataattaaacctccaaatgacatttttatattaggaacataattttgagttaccgaattatggagcttgctgtaaaaaaacctcaaacactttgacaaattattttcaaaacaataattaagcctttacttattttctttagatctttcatatgttgtcctgatccattttttctttctctgccccaaatacagtcctcactttcctaagttttggaacatgtgtgctccaccatgagccaggagtggtttggggtgatctgaggtccagctcctttgggtggagagcgggactgggcattccgtgccaggctcaagtccagtgttcagcagactcttctgagatcactcgtgtcctccgtacatattctttttttttttt

SEQ ID NO: 133695 - DNA, 1129 bp, Homo sapiens
tgtacaaggcaggtttccagatctctgtttctcaggtgagaggaggaggttatgtcaccagctcttgggccctccgttagtcagtagagggtttggcccaggtttgattgagagtccattcttcccttgggacctcccataggctctaccctgtgttgggcactggtgacacagagaaaccagctccagcccagctcctgaggacttaagtgtgctaacaagagacagaggcaacagggcccacctagtgtggttcgtgctgtgatagggtaccgggaggggctgctggaacacgaagaggggcatctttcacccctagtgtcattactcttttggtgctctctctcacccatgtcgaaatagggaatgtatttgactccctggagagttaacagggttgggtctctgtgatctggagatatgcatgatatattggatgacaaaagcatgttataaaattttgtgtcatctgggttttgtttggaaatattatatatgtgaatgtgtatttgtgtgtgccatatctgttgtaaagtctggtagaatacactctaagattgactgtaggatttttcttttgttctttttctgttggattttatgtcttacctgaatgtgtgcatgtgttttgatctgttaaatggttgtgtactacctgaaaaatccgaaaacagcaatcaggccattttgattttttgaggaagataaaagggcttccagacagccatgtgtgggataggtggagagatccataaggaagctggtgatatggtccctacatccagttggtcagcaattctgaaggttctaactttaaaacatactctagatttgctccttgcccaagtcatcatcaccactcatcagaatgacagtggcagcctccccactgctctccatagccacagtccggagggctttgtcaaaagtgtaagttaagtcatcggctcccctgcgtaaaaagccctggtggcttctcttcacacttagagcactatcaccatgtgcccacctccagctggcctctcccttttctctcattcaacacaacttcttaggcatctctccagtgaccagcacctatctagggtccaggagcacagaacaaggcagacacatccttccctta

SEQ ID NO: 133696 - DNA, 1273 bp, Homo sapiens
agtcatcaaatactgtagaagaaagcagaactgagagacagagagatagaaaaaaaaaagcactgtagatggtcctcatcgaggagttcttcagatagtagaatatacaggtgaaagaaagaaggaaggaaatcaagatcaaagtcaaaatcttggtccagagatcttcagccttattcgcattcttatgatagaagatgcaggcatcaaccaaggagtagctctcatggctctagaaggaaactaactcgaagtcgttcaagggatggagagaaatcctatggagttaagaggtctaggtcaaaaagcagaataagaagatctaggtcaaggccttgtctgtgttctcacagtcggagcagtgaaaggtccagccacagaagaatgcatagttggtctcgggataaagaacaacgtaaagtcagagataaagagaaaaggggaaggattaagggaaggacaaggattacataacatcaaatctggaatctggaaacatcaaagctggattaaaccatctgccaccagctgaagaggccaaagccagaatacagctggttcttgaagctgctgcaaaagctgatgaagcattgaaatccaaagaaagaaatgaggaagaagcaaagagaagaaaggaggaagaccacgccaccctggtagaacaagtgaaaaaagtgaaagaaatggaagctgttgaaagtgattcctttgttcagcagacattcagatcaattaagaagtcaaaaagttagtggaatctggtgaagcgaaacgtgcaacttcaacatcaggaccaacattagcaggtgttgatccacccagtactgaaaacgaaatacaactgagcagcatccctacttctatcaaataccaagatgacaattccctggcccatccaaatttatttatagagaaagctggtgctgagcaaaaatgattcagaggctaattgctctctgacaggaaagactaatgggcagtcctgtggcctaagtaatatacatatggttggattggatggccagcagaaacattggaaatgtaggtttttaaataccaatattaactttttgcccttaaaaagaattcagctgattatataaaaaggtaatctcatttcattcttctttcatgtaggcttgaatatttgttgatttgaattaacatgcttgttattaaactgtatattttaaactgtaatattgtgaaaattaaaacaaaatttaagaattcatgaaaatgttacactgttaataaagctaattacagattt

SEQ ID NO: 133697 - DNA, 1024 bp, Homo sapiens
ggggcgctatgcgggcgccgcccgctggacaatgctccgccgggccccgcgcgggccgcgctcacctgcgcccccgggcagaccgccgcaccgctggcccgcccgcagcccgcactccctcacgacccacgcccgccctgcgcgggcctcacctgctgaccgccgaggctgcagtccacaggcccacgggttccgccgtcgctcgttcgcgctcccgccggccccagcctgagccagacggcgcctccccgcccccgctccctcgccgcggacgccgcccgccccccaacagtcagggcgcacgcgcactgcgcccgccgaactgcgacggccgcgccgccccggcgcctggcgccgacggccgactgcgcaggcgcagtggggcggggcggggccggcgagggcggggcctggcccctctcacctggctggcggcagggcggggctcgagcccgggactgccaggtgcgcgccgggaatgggcggcggcaggcgcgcggggcacaggttcctgagggggcgcagcttttcctggaaggcaggcagcctgagaagggcttcgtttttgcgcagtaggacgttgaagaaaggacaagccccctttgtcctggacgtaagccgcaagtcgtcctgagtggtgcacaccgcgaagactgaggaaactggatcacagggctgggccgtgagccttgaacctcggagaacgtcgcattactgctccagcgcgccggttcagggccgcgggacgcgagccctttaaaaggatggatttgcttcctgtgactccctggaagagacgtcttcaccaccgcactgcgtagaggccggcgtcgtcgccggctcaccccgcttgctgcctccccgcacaaagcccagcccaggtagctcaggttagctggagccccggagcctcacctacaagtacctggcctgtcctaggttgtgtggggacgggatgtggcttctgcaagcccagaaacctgtttccactcccccaccacaaatggaactcacccagctctac

SEQ ID NO: 133698 - DNA, 1072 bp, Homo sapiens
acatctggatggaggggaaagcaggaacagaggcatgagaggagttaaagaggccatcggggatttcaatcccagccaaaagttagccccttgttacctgtctcctctcctctcctctcttctccttccttccctccttccttccttctttccttccttccttccttcctccctctttttctacctatctacctagctactattttctatctatcctcctttgtgagtgtgtttatgtatagcaggggacgagaacacctacctcatcaggggtgagcttaaatgaagtaaaatgtttcataggctcctggtgtacagtaaatgcccagttgatattgatgatgatgtcaccactgcctacaccacctgtagtttctttcctatggctgatctgtctagggatgaatttgggggccaccttttaaattctgcatgtaacattaaggtggttggtgttgaatttgtaggcagagggaaaccattgaaagcaggggcaggattggacctgtgttttagaacagtatgaaaggtgagttggaggaacctgcccatgtaggatctttaatctccagagtctagcctgttagagaagctggtgaagtcatttaaggcatggggtattggtctgaactcagaatatttaatgttatgttaaatgtgcttttttttttttttttcctgaagggaggggaggaggaagaatttactcaatgtaaatattattttatccaaatggtgagagaatacatgaaaagactagtaaggcatctttttaccatttgagatgttatagtagcgtgttaacaaaataggcaattttttttttaaaactaggttatatttctttgtagttgtttatgcttgggcctgtctgcaaatgatttaacaaatcatatcatatatttgaattactgttgcttaacctgacacaggcaataaggagagaaaagaatgtcctttttcttgcttttgggttttttttttttttttttttttttttttgagacggagtctccctctgtcaccaggctggagtgcagtggcgcagtctcagctgactgcaccctccacc

SEQ ID NO: 133699 - DNA, 1033 bp, Homo sapiens
gtggtgtgaccttggcttactacaacctccgcctcccgggttcaagctattctcctggctcagcctcccaagcagctgggattacaggcgtgcaccaccatgcctggcaaattttttgtatttttagtagagatggggttttaccttgttggtccagctggtctcaaactcccaagctcaagtgatcctctcacctcagcctcccaaagtgctgggattacaggtgtgagccaccatgtgtggctttatccagtgttttaatcaaatactcactgtttttccttagcttttcacaacttggacatgttgaggtcctttcaacctggttctctttcctttgacatgacacgtaatctctgaagcttttcttgctttctgacacaagatgtctaaggttcactttgtgcttttcctgccaaatacctatcaaccgagtctttcagcttgctttattgaggattagaatttagatacagaaatctgggtgttatatgttcttactgttagaatgcccatgcttttattggacagccatgggaagcatacagattttgatttttatattggtatttccagttcgaatttaacatcacagagtttttactatgagcttatccttttttctctaacgttgaaaatttacattcttagcaacattaatataattgcattatcttacagtataaatgtagtttgaaaataacactaataagcaactgtagctttatgtttggttatggttttttccttaaaatatatccacataagcatgtacagttgacattctaatttggaaggccatttgaaaagattttctctgattatgttatatgtttgataattaatttgggttgtttgcctgaaattcttcctttaagaattgctttagttttttatttaatgtatttttttttttttttttttgagacagagtctcgctctgtcgcccaggctggagtccagtggtgcgatctcggctcactgcaagctccgcctcccgggttcacgccattctcctgcctcagcctcctga

SEQ ID NO: 133700 - DNA, 1056 bp, Homo sapiens
ttaataggttttcacaagactgccctcactttggataccagctgcaaacttcgggggctcccatgttacttttatttctgaccaagtacaaatgtggaggtttccatcacactcaagtttgataattcagttaggatgactcacaaaactcaagaaagtccagtacttatagtttattatagcaaaaaaaaaaaaatacaaattaggaccaaccataagaagtgacatatagggcagtgtctgggaaggtctcagatatgaagtgttcatgccctcctgtggagacagggtattaaccgggaaagctcatgtgagcctctgtgtccagagtttttattggtgcttaactacatcagcatgatccattgaatcattggccttgagcttgaactcaatttcttgctcccctctctgaactttgggctgttatcctggggctcagagccccaaccttctaatgccatggttggtctttctggtttggccagccccccacctccacatcctgagatcttgttaacataaactaggtgctcaccatgaatcacagagatgccctgtccctctcaggacatttcagggatttaaagggcaccaactggagctgggacaaaggccatccagtctctctgttataccacagtcagcaattctgttttcagtttgatgcctaaggaccaggcctagtgatatcacgtggctgacctgagctgtgcctgagcgcctgcatgagaagactatgtgctctatcctggtggcaaatctagtcaagtgtcagctgatgagtttaagtggtattttgagctacaacaaatgcaatgggatggaaatatatgtgatttctattgttgagaagttggaagtactactactaatactgtggtttgttgcacgcattcatgatagaaggaagtgctgtacttcaggtagaggttaggaaagatgaagataaaattttttctcctgtccaaatccatggtccttataaattttgaccacgtattacacttgtattaaaacttggtgttttgatatttagtggtttagggtgtttaa

SEQ ID NO: 133701 - DNA, 1054 bp, Homo sapiens
ctccgcctcctgagttcaagtgattctcctgcctcagcctcccgagtatctgggattacaggcatgtgccaccacgcctagctaattttgtatttttaatagagatggggtttttccatgttggtcaggctagtctcgaactcccaacttcaggtgatctgcccacctcagcctcccaaagtgctgggattacaggcgtgagccatcgcgcccagccttgaatgaaattttctacacatagaagagttgaaactatagcagaatgacctaacctgtctacctgatatcaagattttaatttgcttacattttgctctactgttttttattattgaaccatttgaaagttgcattaaattgcagacatcatgacacttgttaaagtaaggttgttattctttgtaactacatgccatatttaagaaagctaattagcccttcatatctaatatctatgctctgtatttagattttagctatatgtttttttcgtataaatgtctgtgataatttatgtaatccccactaagttagaaaggagaaacaaattcttattctctatgctcatactcagcacaacacttctgtgatcaaatgtgtgtgggttttccctacattatctgtgtctcattttctctgatgactccagttggttgtcctacagtttaacttctcagagtatccacctggaaatagcatcacatcccacaagactgcccccatttctcatgccagttgcaagtccaggttatttattttatttatttacttatttattttttgtgagatggagttctcactctgccacccaggctggaatgcagtggtgtgatctcggcccactgcaacctctgcctctcgggttcaagcaattttcctttctcagcctcccctgtagctgggactacaggcacgtgccaccatgcccagctaatttttgtatttttagtagagatgaggtttcaccatgttggccaggctaggcttgaactcctgacctcaagtgatccgctggctttggcctgcaaagtgctgggattacaggcatgagcca

SEQ ID NO: 133702 - DNA, 1155 bp, Homo sapiens
aagaccctggcctgctgatcttcagccttgctgttactctgtcttgaacatgatttcctgtgctgcccccgtgctgtccttccactctgcctccccagtaacctcacacccctgtctcccacccccatactctgtttctttgtgtcccattagacagatgggccatgctgtctaaatcttctgtgaaatcccagcatccacccttttctgatttctagcagcaggatgctttaggataataatggggatgtcagacagcagctgtattgtgttccagttgatcttggaagagcttcacttttgggtcttgcacatgtcccaggcttctttttttaaagagtctatcacctctttttctcctttctactttgtcatgtcctaagaacccaggtcttaggaaataaagttaattgctttgggacaaaatgcactttagctaatacttttgcttaaaattttatgtttaatggctcactaggcataattttgctctcttgatgctctagtaatgaactgtttcactattttacagagtgcttgtgatttcacgtatttttgctgaactcgtaaaagagacacttggatggtggattaaccagaacactaacattctgtgaaaagtttcaaattggagaatattgaattttcaccctagtccagcagctccgctgctcacttaaatacagatgaatgaagaccccattcggaaagacacctggccagcggtccagagctgatgcaggtaggcattgcggttctacacatatttaaatatatactttaatataattcatttcaaacaagtgtaaaattgggtactttcacataatagctagtgaaaaactttgtcatttctagtatgttatacacatatgcatatattaagaagcagatttaagtttcttgaaagggaagtagtcacatgaaatttctgtataatcctttagcaggttataaatgtctagtaaatttagcaagtgaattgtaaatatctgttaataggattatagtaaaaggagttttttccggaagagttaaagtgaggtgacatgagttggatttagtgagatttagtgtactgagagcaacttttaggaagaaagataaacttggaatttcttgtgtttacttgaaagaagtttactggtgtggaaa

SEQ ID NO: 133703 - DNA, 2598 bp, Homo sapiens
gctcctgcctgtcagaacatctgtcacattgttagtctttttcctcctcaagatactttcgtatgttgtccaaccatgatgcttccagacccatgtaaatgagaggattccaagaatgctttcctagcttaagacctctctgggtagccacctctgtcatactttctgagacctgccgccctcatttctgcctgaatcctgctttcctcaccctgtggtcctgtcctggtcagtaaggattgtgtactcagaagggctttgtctttctggaaggaaggtttgctgggtttttgcacagtcccaaggggcttaggcagacctgggttttctggccttacagtcttgcacttaaccctgtgaatctcctcccagtctccttggttaggttcagacccccttgcttagtttttcacccccaggagagaagcttcccttctgcggcgagtactccttattgtctcttatggcctgttcccgtctgacttagctaaatatatgttaccagtctagagtaaattatttctatttagaaaatatataattttagttttagctgttacaacctacaataaattgtttctttaaaacttatttgtgttatatgtcagatattaatcacttttattcatggtgtacgaaatgagagctttatacccataaaactgtgggaagggaattcctttcaggtctttttgttcttggcgtatatcagcatctgttatcttggttttgaccttcagcttgcatccaagaagccagggttttaaggtgaaatgaagattttttcctgatatcaagagccaggtgtattatttataaacattctgtgtggatttttcaattgctaataataagccagaaaaaaagtagtttgatgtttcaataatttttaatattacattgttataaacttcagttttaagattatatgttttctagacaagtaatgtttctatagtgcattgatataagctagtctggacttcagtttaagagaaaattgtctagtttatttttattagttaagcttgtacaggcagaattatttgggcacgggaatgggtgaaattgaatagttacacatttctttttaacttgaagtagatattatataaaactatatacctgtgtgattattgataacatgtatttcacggatcagtccttctttaattaacttggaaaattttgagttgattgaattaaaataaactcagaaagctgataacctgatgcttaatagtagggcttaagttgctattgactagtagttttttctgcctatacacagttgaggtgcacaacaagctcctattactaacataccatgttacacactcaccaccactggtacaggggtagaggacaaccactttgagtcacctgaagcaggaatgtggcaaacatgagtttgtacatattttgggaccatctgtaatgagatcatgctagccagcggttatgttagatctaggcatgcatacttttgagataataccttatgtgtgtatatgtgtgaatacagaaaacatcggagcagtgtgggtccgagcaaacctgtttcccagccccggcggaacatcgtaggctgcaggattcagcatgggtggaaagaggggaatggccctgttacccagtggaaaggaaccgttctggaccaggtgcctgtaaatccttctttgtatcttataaaatacgatggatttgactgtgtttatggactagaacttaataaagatgaaagagtttctgcgcttgaagtcctccctgatagagttggtaagttctttttataatttgtgcattatatactttaaaaatgatattgaactggatgctttttttattttacattattaatacttcacttttattggaacacaagcacccttcttgataaacattatattaaatcaccgaaaaccacaaaaatggatcctaagcagttcaaggaactgtgtgagggatatagagatgtgtattttccccccaagaagtttgccacgtaataatttataatacggttatttctaacatttttgctcactgttctctggactctgatgggtaaggttatcagtagctgaaatatcctatatgttaatctcatctcatcagatacaaaagataagagaatgctgtgcctttagaatctttctgtgaaagtgtatctttgtgtacaacgtaaatgataattgtactttgagccaaaatttaaacaaccaaaacgtggtctttattatacacagagcttgattgaacaatgtttgtggaaatgaatggctctttttaaatgtcatacagtgccagttttgccctgcaagtgttccttaaggcataaggtctaaggtaaataataattactgattttattagtagggtgggatacacccaaactaatattacttttttttgaagtatttattttgaaatattttcttattacagtgatgctgctcttgtttaaaatattggtttatacttttagaattgtctttataagtctataccattaaataataaagtttcagcagatctagacttgggaggtaggaattttgggatcaaattgtcacaggaagaaattagttcagtctc

SEQ ID NO: 133704 - DNA, 1920 bp, Homo sapiens
agagtgtgtcctaatgggagaggaagaagagcagagtagagaacgcatgaacaacaaggaggaagatgggaaacctgagggcagaggcgtgaaggcttttagggcttgggggctatggtgagcagtttggttgtttttcaaattataaagggaaggcatgggaacattttagatcacacaatgtggtatcagtgacacaacgattactttggttgcagtgaagaataagattgtaggagcaagagagtaaaaacctatgccttaataaaaaaatggaaataagactgaaggaaaacaaacaccaatttctttaaaaaaaaaaaacaaaaaaaaaaccctctgtgccttgaatagcttttctaagttttaaataaacgttctgtggttatgtaagatgctaatacaggagaagcaaagtgaaccgtatacaggaactctactatttttccagttcttctgtaagtctgaaattatctcaaaatttaactgttaagtaaacaataacaaacagtattttataccttgaatgaacaattaaaacttttgatttgggtacagaaccaagagcagatgagtccagaaaaataaaaaatcatatttttttcaattaactgacttgggacaaaatacttctattctgttgaatccatctctgagctggggcccagtagtttgtctttggtttttgtactttttaaagctttcccagattctgatgcttgctaatacgttgcatggacaaaatttcaggtgtagccttctttagtaaattcagtcttcatagtcggtaatcagcgaaacactttgtcaactttttttttttttttttaatccccagcgacatctcgaatcagcgatgcacacttggcagacacaatgattggcaaagcagtggaacatatgtttgagacagaggatggttctaaagatgagtggaggggaatggtcttagcacgtgcacctgtcatgaacacatggttttacattacctatgagaaagaccctgtcttgtacatgtaccaactcttagatgattacaaagaaggcgaccttcgcattatgcctgattccagtaagtatatattggcaacttttatatgtgataattagaagggatttggacttcagtacaagatatttgattggctcttttgcagatacatttttatttttggatatatgattcttttagtcatgcacaaacacagcctttgaaatttttcatccagttgttataaatgttagataagaaaatatttgatagtcagttctgcttggcttctgtaataagatacaagttgttttataattattaacactactacatattacttcttgcttttatttaaaaacatgatggaatagggatcagtaaaatacgtccccgtgtaccctgctcagctttaacagttatctcatcgcctgtctagttttatctgttagtccccccagtgcaattattttgaatctaatcccaagacattgattatttcatctgtaaatacttgaacttcagagcagcgatcttcagcctttttgtcaccggggaccagtttcatggaagacagttttctgtggattgggggttgggtgtggatatggtggttttggaggcattagattcccataaggaacacacaacttagattcttcacatgcgtagttcacaataaggtttgtgctcctgtgagaatctgatgcctctgctgatctgacaggaggcagagctcagacggcagtgctctctttgccgctgctcacctcctgctgtgcggcgtggccccaggtgtctgggactcctgatttagagaacatcaatttcagaaaacgattgactgctaacttttcagtagcaagtggagtacagagtcagtgtttagacaggtgatttagctatttccacaactagtctgttcacac

SEQ ID NO: 133705 - DNA, 1059 bp, Homo sapiens
tgtttgttttgttttatattttagagatggggtttcaccatgttggccaaggtggtctcaaacacttgagctcaggtagtccaccagccttggcctcccacaagtgttaggattacaggtgtgagccattacgaccatgttagtccatatagttagtccatttaaaatgtgcatttctgtactttttaatatacgcacagatatgtacagtcctcaccacagtcgattttagaacattgtcatcacctcaaaagaaaactttgtatctgttagctgtcagtcctttattcttcgaaccccctggccttaagcaaccagtaatacttgctgtgtaaatttccctgttgtggacattcatatgaatggactatatggtgtgaggtcctttgtgctagcttctttcccttagcatattttgagatttcattcacgctgtagcatatatcagtacttcattccttttaatggccaaatacgattccattgtatggatatactacattttgattagccattcatccagtaaagcacatctgagttgtttccccacctcttggttattatgaataatgctgctgtaaacatttttgtacaagtttctgtgtggacatgttttatttcctttgggtatatacctaggagtggagttgctgggtcataatggtaactctatgtttaatcgtttgggggaactgccaggctaattttaaaaacggaaataccactttacatttccaacagcagtgtatgagacttctgatttctccacattctcaccaactgttactgttactttgattctggccatcctagtggatgtgaagtggtatctcattgtggctttgatttgcatttccctgatgagtaatgatgttaagcatctttcatatgcttattggccccccccctttttttttttgagacagagtcttgctctgtcgcccaggctggagtgcattggcgtgatctcagcttactgcagcctccgcctactgggttcaagccattctcctgcctcagcctccccagtagctgggactataggcgcgtgccaccatg

SEQ ID NO: 133706 - DNA, 1084 bp, Homo sapiens
taaaagttaagctagtatcatagtcatttaaaattgtaatagatcttaaccattttccccctcaccctaactctcttattctgccgccacaatgcaagcatagtttgatgttttcgttattgccttttttgagatgtatgtatctgtatctacctatatctatatgtgtgtatacatatataatatatacacacagatacaagtgtacacacacacaccacacaccacacacaccccactggcagtctttgtggattaggatgggggtgacataattttcttgagtttaacaggagtgctttacccaagtcagtcatggatatgatatcactgctctttatttaaaagtaaactttgggcacaggaaccatatgggaacattcagcttgtttaaaaaaaaaaaatcagaagttcagagcaccttttcaatctggagcccttaaaccataagtccaaatatgaattatttgtgaacagttaatgacccatattagaattttacaatctggtgaacaatctgggtaaaaggctacctttaattctaagcttcatttttttttgggggggggttacattttaatcataaattcttttttgcaaagcccaggttcttgttccacacagtgtaatgtaggtgtattttggacagcacatatggtccattgtgtacaagtcagtaatctggatttcagtacatggatttaaaaggcaacaatccatcactggtttgtgtgtttttggttaagtttctggaagaatacaatgcttttatattggaagtataagttttgagtggcattgttgccttctaacaagctctctgggacttttaaagttttattactattattgctaatgtatgattatggtcagagactttcaacccaccccttcctgcctacccctggcttttcctcacaaagaatgtctagacaaacagcagcttagtctcctgacacctcttgtggggtgcatgttcctgctccaggtatgctgttcatgtggattcattccattcagtggccccttggggtttgcatgccagtgaagcgttaccatagaagagccagccgtttgtgttcgc

SEQ ID NO: 133707 - DNA, 2451 bp, Homo sapiens
tagtgtgattggttgatcagcaaaacagctgctctcattttgttttggaggaaccctggtggtttgacagccaggagaaaggccatatgtgaaaccagtctcttgtggagattggaaatcctccctgatatttgggcagagcctaaacgtgcatgcttgtcactcaaacaccagaagtttgaatcagaggtctgagtgacctcttttgtggctgttcttgatggtttccaggcctcgttatgcatggtttgcttgatgcccattttttgtgccttgtgctgttggatggtaacgaccactcaccatgtaaacacagtacctcagttttctgtccacagctgcagtcgctctgtccctcgtgcttcactgtgggcagccagggacaagcttctgaaagcagtgtgatacccaagtcataggtgcttctcgtatgtgaacaggtgtcattctacagatctgttatgtgttttcctgttgactcttaagagtccctgcatgtaaatctcaaagctgagcctggctcccagagtccagactgacattacagcgcaagagtttgcaagtgtgtccagcatgcaccaactgtgcagaacttggctcggtaactttgcgtggaaaaataaagtacattttgaagtatcttgagggttgggtcaattgagacatttctagcattacttaatgacttgcattgtggtttttctgcaagcaactttaatgactttttttataccacatggtctcccagtttctagatgaatgcaacatgatgatggtgatgatgacgatgagtttaatcattgttcatttattgcctttagggctgagggaaagggaaggtttgtttttttttctccccattttcccccattctgtctttcttttggtgacttacaccacatgtaatgacgctatgactaattctgctcccaagcccttgtatcttgggcttcattttaggctcatgtgtcagatctgcatgcattgcttgcatttttctggtatctgaatgttggttccttgttccaggaattcaacattaatttccaaaagtatcatgggacttgtgacaatacaagacatgaatctatgtataaaatttatcggcctttctcatttacctgctctagtattattgtattgtgtgtgcgtgcgtgtgtgatgtcaggctgccacgtaaaacttcagagaaaaatcttaaaagcagaccatccttttttgcatgctctattctaagtagaatgttcaatgtaactgactaaaattgcatgttaaagatatttaggtttttttgttttctttatttttatttgttttcagtttcctgtatatttgcttactgtgccgttttagtggttttaggataaaaatgcactggtgaagcaaatgtagtgccaacagaaggtgattttccagttgtaaatgtcatgcagcatttgaagggactgtgttttcttaaaaaaaaatcacagttacttctaaaccagatttcatttcttttattgttttatgtgccaaaccacgaagtgcattgggcttcaatctctgaacactgtagacccattagaagactgttccgattgttacaaattgtagtgcctgaaaacactcttaagctgattgtcttaacaaaatgaaagttctccaaagacaaaacagaacaattattataacaaaataattatggttgaaatgtctgtggttccttggaaatgctgcgctctttgtgtttttccatcattagtgcagttggaatgaatgtgtataggtcagaggtcttcgtgttcacattttaaaattaggtaaatgacctcatctttcaagcttgaattcatttttaattttaattttattttatacaatgtgtagacagttccctgttctctgcatttagaagtatacacaatataaatctgttaattctgtaagtaatttttataattatgatgtaactctatcttatccttaaaacatttaaaataaaccctttatgtgcaactcctgactgtaaagtttgtgctgatgagcaacatgtgatgtgttaaacttgattctgaaaagttttttgggccaagtaaccttttcaccacatgtaaatgtcagatatgcatagaaagaaatagaatttttatttgataacattcaataatacctgaaagaagaggaggcagtcatcaatatcacacatatattaaatattgaagtttgcaatttgacattgagaaagtttaacttacaagatcttaaacttaaaaaaattcttttaaatataattaaataatgggtattttatacttttcacaagtattcttgctttgaatatttcttataatgcttttactcataaataataaacaatgggattctatagtgaaaaatcactatttctcaatgctaggatacaaaaaaatgaaagtaatataggctggtgcaaagtaatagcagttttgc

SEQ ID NO: 133708 - DNA, 1031 bp, Homo sapiens
tccatggaggttactgaggtggactgaaggcagggtctactccggcttaggtggaagaaggctgcagttcaaggaggaaatgagccattgggaagcacaggtgcctctcttgagtctgggttttctgaccttccttgctgaaggtagattattcgttgtctgtgttatctgtcatgggtacagctctgtaaatattgccccaaaagtataacaatgcaagtttagtctgaagtttgaaacttgataactagtatttgtaaactaatgaatcaactctcctatttaaagcagtcatcactctgttggagaatttttgttttttctcttggtacaattaaactctgtgatgacaaaagcatttggtactaataaagcattcataaatgcttaataagtaccttgccaagcactttccacactattttgtttagttcttaatggtcttttgaggaagaggcagagattgagtatctcacgcaggattataggggaatgaagactcggatctctattttgtgcccagactctgagctgctttatgaacacctcaattaaattacttcattggagtgatttgagtaatctatctatagtgtaatattttctatgaataattttctgtaaccttatttcataagttaatatctaaaaagtgtttatttccaaattgccaaataaaaggttttatattagtcattagaatgtaggcatctgtgtctctgtatgctaagaattataacccaaaattatttttgtgcttaaaaaataaatgatgtctccacgatggcacgcatatacttatgtaacaaacctgcacattctgcacatgtatcccggaacttaaaaaaattttttttccataactaaaaaaataaaaataatgatgtcttttttggagagaaagtatgctgaagaaattttaataacttttcatcacaagaatatagatactttattttaacttttaaatctattcatttgcttatttattttgagactgggttatgagactggctaatttttgtattttt

SEQ ID NO: 133709 - DNA, 1007 bp, Homo sapiens
gtgggccatgctgatggttatgctatacgctttaggacctcactgcacccggggtcaggacttaaacatcagctgtttgtctggtggaatgaacaaaacttttccatttcaggtggtagcacatagacagaaattcttgtgatttaatgtttttcatcctgccagggaaaaccattttccctttagagacgcttgtcctgacaacctatttgttttctcaaagcagtgatatttccagaatttgtaagtgcctgtgttgggggaggagggctgattggaaaggagaatggggacgcgcagaaagaggaatgagcttcccacaatgatttctgatatgaagagaaggtaaaaaggtaatacagtttagagttttctcttttaccttcaaaaagagcattacattatcttgggtcttttatgtaatcctctctcaggttgctaattagggggtgatttcatcgctgagctgctctccagaagccctgttgcttgggcttggagactgctttgaaagctgaagtttgtaaatgtggcttagctggagaagtgcccccacagaggccgtggctctgagctgagctcagcgcttcacagagaggaagtagctttccgattccacccactgagccagtgcacttgcagcaactgcagggcttagagcatccttcaaacccaaacccaaaggcatatgaatgtgggtttctctctttaaaaaatgggactattttacaacagctataatttggggatgaaagtgtcaaatagccaggtgcggtggctcacacctgtaatcccagcactttgggaggccaaagcaggtgaatcacgaggtcaggagatggagaccatcctggccaacgtcgtgaaagcccgtctctactaagaatacaaaaaatttagccgagcgtggtggcacgtgcctgtaattctagctactcgggaggctgaggcaggagaatcgcttgaaccagggagtcagaggttgcagtgagctgaaattgcgccac

SEQ ID NO: 133710 - DNA, 1039 bp, Homo sapiens
gcttcaaaattttccagatatttcagtgcccccagaatgacatgctaacattctgctggcatgggagcatgaggcagtttgtctctaaaacatgccagagaatctcttgtcactacctaggcaaagaaccagtggcaaggtggcagcctcccaaagagctcatccctaatgtgacatcctggaatcagatggcacggacaccggcccagccccttcccagctctgtgactaaggacaagtgacaccccccctcccccagcctcggtctcctcctgtgtacattcagaaggcagatgctgccatgaggccatgtgtgctatgtccatggtgcaaggtggcacgcatgccgagtcaccaggtgagactgccgctttgggaagggataggaaggatctccggtagccttcgtgggcaggatgcctcttatttgaatgtgcctttagccacctcacagagcctatttccacatccctgtggattcatccctgtggaaatcttgagaatcatttatcctatgctgtcatgaagcagcagcagaatggagaaggtttaaaaagactcatggacaggcaaagcggtcaaacacctcctggctcagacgcacttgccttcccacacacaagtctggaagctcaggatggtgttcacggaggcagatgctcggggccggggcctgagtttcctggggcacagcctccatatctggggttccctggactatgcccagatagctcataatgtcccagccttatttgtgatggagaaggacttggggaaaagccaccgggaagcagtaagtctaaccagggaagtgcactgacttgcatgctttgaagaagagaagggagaaaagatacaaaaccctcacctggtttgtctgtaacagttgttatttctcaggggagctgcattaatgggccaagcctgtgcagctgggtgtgtgaagcatgcattttgcaatggactgtctccaaaagcagagcgaggtcacccaagaaatctagagcaagggaaaatactcattagcaaaggaattttg

SEQ ID NO: 133711 - DNA, 2180 bp, Homo sapiens
tcacgaggagcgccatcaccgtgcaaggtcgacagcttccgctcaaagccctgtggcccacgcttccggcctcgaccgactacgtcatcaccaaaccccgtgatacctcactccaccttcaggtcctccgtcccaacggttccgtgtcctggaactttccacgttcctgcgcacgcgctctgcggcccttaacgtcccgacttcgccctcctctggccacgcccctgcccgttaagggccctgccacccccgtgacgtacctatcttccctcgggcaacctcgcaacagatctctgattggctgacccaggaagcggactttgcgaggcggcggcgacgataggctggcagccggccgacttccgcagaaggtgattggtcggcgctgctgtccaatcggcggcgggctgtcggattcaaatccggatcgttgggactgcggtcgttagtctccggcgagttgttgcctgggctggacgtggttttgtctgctgcgcccgctcttcgcgctctcgtttcattttctgcagcgcgccagcaggatggcccacaagcagatctactactcggacaagtacttcgacgaacactacgagtaccggtgggcgcctttcttagaccccgagccggctccctcagccggggcccccgcgggcggggcgacccaggcatagtagggtcgggggtgggggccggggcctggggggcggagcccggggccggagggcgagggccggggtttggggtcgcggccacctggcgccccgcgcagtcggacatggttgggtgcctggccgcgccgggccggttgggcctttgttcggtgtgcgcggagggtgagggaagagtgcccaccgggccgcatttagtacctgggtaggaaccggcgcaacttgggggtcatggggtcctcggcgacgcggagtgaccatcccgtcacttttttctcggccgtggccgaagtaattaggccgttcagtagctggtctcagttccagttctttgaaccagtccaggaaaacccacctggtgccgtcctttttcctttagcaaccgtgacacactttccctgtcgctgacggggtgatgcagcttttactagtttgtggtttagaatggtcaaatggtcattttcatctgttaacacagaggaacacttttctttttcttgtttttgaagtgagtggtataagaataagctttggaggcgaccccccgaaaaatgagcttgatggggattcgaaaatgtttactgggtatggtgatttgggccattataggttagccgcagtcatacaattgagggtattattaaaggagtttcattttaaggccgattaagaacttgagtggactttgggcatcattttctgctagtatacactggccaaattttgggctttgagaaacttttgcgtttgagtcctgaagcaccgtactagaacatggtggctgtaatcgatcagtaaaattagacaaattttaaatgtccctgtccccttccccccaattaaagtagattgggggaaagcgagtagggacatttaaaatttgttgtccttactgtatgcgggacacttcatttagggcgtggcttcagaaaacagtcaacccctttttcttaactaggtagcgactagaacgctgcgttctgggatactaccaagatttaggggagataaagcccatgccatcgttggccaaattgtgaccttgttttctgtctgctgcctttgtaggttagatttctccgaatgctatttaaggaagaaagaacaaaacagtgggtggtttctctttttctccccctccctagtagcatggaagtctgttttcacatgaggactactgaatatttctatgggtagtagtaattgcacccttttgtattcctagctagaaaaatagcatgtttttctggctgtaggtaaatttcaagtagattgtgttaaccttatagtaataataaactatactcgtgtaatatgctggcagtgttcaattatgcgatgttaatcaagagccctattgaggatatccaataatgaacacaatgtaaaccgtaataatcttactaaaacctagaaaattattctgaaacacatctggtgccaagtgtttaggataaggatttaagggtcggtacaagtttcttttagggtataatattgaaaataaat

SEQ ID NO: 133712 - DNA, 1035 bp, Homo sapiens
agtcctttttatggtaattgagtaaaaattcttactcaatttggggaaagagatttgttaggcaaatctttgatagaatgctttgggatactgttaatgatacagatttgtttttgagaatctcgtaaggctacaattatacatattgatggtttaactttgaaggttattccatgcttgcctaagaaactgaacaatgtaagttttggatataggtcagtaaattaactggaaaacggtgaggttgcacacaatgtgtatgtacagttagtggttttctgtttttaattttgaacaaagtacttgaagtataaagcaacttctggagcatacaaggactagtagctactacaaagctagtgttgagtaagaggaaacccaaattaactgtaacttagattttttcgttacataaaagtctaataatctggggcagggataacagctttacagtcaaggactaggctgggtccttacctcttgttgctttaccgttctcaatttacagttgcttctatggtcctagattcctgctctggctccctgatcatattaatgtgcattcaacaagaaggagaaaaagagttcagcatgttctttccctttgagaacacttttcataataagttacacattttcttatatcttgttggcttatgatttggaggctggtaaccatatgttcaacttatattttggggttctcttcctgaagaagattaaggcaactggtaagcattctgtgataagagaaaaagattaatcctatggaaaatgctttctgcttttggattgtgcactcttagctccctaatttgaacataggccatcatatcagaattaaaggtagtagattgcagttctcaatattaaagcaacagagttccttaaggtacatgtataaagcgacagttgtagaaaaggcactggactaacacttggctgtatcttgtaacaggcatgttatgttacccagagaactttccaaacaagtacctaaaactcatctgatgtctgaagaggagtggaggagac

SEQ ID NO: 133713 - DNA, 1148 bp, Homo sapiens
ttttctagactaaaacagtgtgggttaaattttatatttggattatcagtaaatctaacagcatttataatgctttgaacaaaatttgaagacatactatagaagctgaagtaggtggaattaaaactatcttctactctgctgttaaagaaaagcattgcatcgaaaactctaaaaggactcatcactttcttgggattgagatacgtaatcctattagaattcagtccagataatacaaaagcaactgaagaacttaagtgtagatttctgtgccccacctattgaaacagaatctatggggatgagcattagtatgagatcctgtaggtgatttgaaggaggtgtttttccctataaagaggtaatctttttacttttaatctatttactgtagacagtaactgtgaaaaaaaaatcattttggatacctcaaaccaattaatagtggacttagtttattttattctggcttagttgagaatacttttgaatttctgttgagtatatgaaaatcatattaaaatgattcaaaacattttctttccacagaaccacatattcttctctttagacgacctcttccaaaagatcaacaaaaatgaagtttatctggggatcgtcaaatctttttcaaatttaatgtatatgtgtatataaggtagtattcagtgaatacttgagaaatgtacaaatctttcatccatacctgtgcatgagctgtattcttcacagcaacagagctcagttaaatgcaactgcaagtaggttactgtaagatgtttaagataaaagttcttccagtcagtttttctcttaagtgcctgtttgagtttactgaaacagtttacttttgttcaataaagtttgtatgttgcatttatcactgtttcaagtttttgaggtatattttcttaatttgtgactattgaaatttgtgactattgaaattgatttcagtgttatagttttagctctgaggaagttaacttaccttaaagatgatgttaaatgagtttaaaatagtgcggtatgatctggataccatttaattcacttaatgaagaaattaattaccagggatatgtttaaactaaagccaaagtagattttacctcttgaattcctggagaattgtctagaacagg

SEQ ID NO: 133714 - DNA, 1029 bp, Homo sapiens
tgtagtctccctttcttattcagtgtagtctgttacttgcagcgcattagaaatatgatttctagtaagcggtgcttatgctcatatctcctgacagcgtagcagtttgaaggtcttaaagggtgtgtcatgactaggtttggattttttgcctttcagtgtactagtacattttggaatagctccggaaattaacagaaacatttgctggaaggaggaggttactatttgtattttaaatcagttgcttagcattttgtcattgtatcagctttcatgggaaaaaggttgaaacctgtagccttgtatcaaattggctaaaaaagaaaaattagtgttaaattatattttggtttagtctagcagcttgggataaattgaggcaatagcaaccttcaaagctggtgtccatctgttagtaaagtgtgtagttaacatccacggtgccgtgcggtgtctgctttgcgctctgaccctgttagtcagcaaagcgcaggatgtcatggtgggcttggagcagggaagggctggagaaaaccatttgcaggagccttggtggaggcattgcaggctgttgggtctccccgcagcagagagaatggtctttaggggcattttggccagggttgctgggagaggctttcccaaatacttggtagcaattgggtgaaaagctgctggagcatcttctggctctgttgatgtttcttacggacttccagctcattagtgaaaaaatagagtcaacatctttctttgcagggtgagaaagaaacacccagagattttatttggcttttaattagggattattccagtgctagagtgaatggtctcagaaatattaaatgttcagtttgaattagtttattacagaaaagcttcttggtttgcagtatgaaatctgcaactaaagtttacactttttacttaggcagaaaatatatactgaagacatggcctttggagcttcaacttttccacctcagtatttatcttctgagataactcttcatccatatgcctatt

SEQ ID NO: 133715 - DNA, 1032 bp, Homo sapiens
ccacaagaaatgaaagctctgtttaaggtgagtagtgatgttgttttgttgtgtcctttagttggttgctttaatgtttaaaatgtaaagaaatggtaaatttgtacatcatatttaagtatcatgtatttttttgtatttaaccttttaaaaaatgattgaattgtgaatacttaatattttgctgctttaaaccttttttatagtggtggttttatttcatgttgctttttaatctttcctgcagaagaaaacctatgatgagaaaaaaacgtatgatcagcaaaagtttgacagtgaaagggctgatggaactatatcatctgagataaaatcagctagaggttcacatcatttgtccatttacgctgagaatagtttgaaatcaggtaaaaataaccaacaatgtagtataatgcgagcctactccttgtgccccagaaacattcctgctatgtatacagctgtttctatgggcttgttcattgtgactactccaagaaatgagacctgggtctgacacagcttagggcgtcagacttcctgagcaattctagaggtatttcttcccagggatgggattattatttggtacctgttgcattgtgggatcttaagtgcctataatttgtattatttggtatatacatttttctcttttcattgacttcactcataaaccatctggtacaagggacgtttattaactgtagtaactgtggtcttataattaaatgagtggcttcatgtagctgcagcctaccttatccattgcatttcaggagaaagatggggaagaggttatgcgttttatgctacctgcttccctctagtttattccagcaaactgaaagatggaaagtttactagcacagaaaattcattagagtccctttaaatttgcaatacaataaaatgtctaaaaagaataattaaaatgcccagctgcacaatcaggttaaggtaactatttcatcagccttagaattatagtcatgcctcacttactgatggggacacattctgagaaat

SEQ ID NO: 133716 - DNA, 1071 bp, Homo sapiens
gggctgttgtatacgtaatccattgctgatcagaccatcatatgtggcgcgtgactatacatactcctaaatgtacagtgcattttggtttttctgcatgatggtccaaccagagtgattgatacttatggtcatttaaactttatacttttacaaaggaaggtgaacaacaccggtaagagttacggtgttttgacaacaacctgttgcatcaatagcaatagtctttgtactctgcaatttttgcttgcatactggtcatcaaacagtaactaaatttttactcttacttttaattttgtaattacagatggttaccataagcgaacagacaggaaatccagaatcattgcaaaaaatgtatctacctccaaacctgagtttgaatttaccacactggactttcctgaactgcaaggtgcagagaacaatatgtcagagatacagaagcaacccaagtggggacctgtccactctgtctctaccgacatttctcttctaagagaagtagtaaaaccagctgcagtgttatcaaaggtgaggtgagggtttctctctttttctttttcctttgtacactttaaattgtctcatttcaaacattacacattaaatcttgctgtgggctttgatgtccatggagctggggaggatgtattgggggaagcctttcattgtgcacttatatgaccttctttgtttgaacagtttataatgaggctgtaacatctagtgcagctattgttttatttgtgcgttttgttttgttttgttttgtttttgaaacggagtctcgctctgtcaccaggctgcagtgcagtggcacgatctcagctcactgcaacctccgcctcccgggttcaagcaattctcctgcctcagcctctcgagtagctgggactacgggcgcacactgccacgctggctaattttttttttgtattttagtagagacgggatttcaccatgttgcccaggctggtcttgaattcctgagctaaggcaatccgcctgcctgggcctcccaaagtgctaggattacaggcgtgagccacccacgccactgtgccc

SEQ ID NO: 133717 - DNA, 1058 bp, Homo sapiens
cttgagattataaatacgtacagtcttacgtttgaattgtttaaaactttgttcgtattttttccatgtcattaagtattttttgaaagcaacttgcattggatctctcatactgataggtataatttatttaaccattcttgaacaggtaagctatttctaattttttattggccttggtgagcataaaagttatgtttactaaaagaacaggctgtgttttaatattattttttattcctggactcatgttatgaattgacaaatggataaatttgtgaagcatatgaattttaaaaattattttaaatccattatctacttaatggattcaactttgaatcttttaatttacttttacctctggtgttagtcacttggaggagccttttaatatactcgacccccccatacacatagcgtcattatatgtcttatgtttaatatgtgagacagccttctgtcttcataacacagggcatacattgcaggcttacatttgttgtctttgtagacattttgatggactgttgaactttggtgtgtgcctagtgaatgatggcttttgcatttacatgggatcattgcagctttaagaattgtgtggtgcatctgtgccaacttgtaaagcttgtcagtagtatgttaaagtttttttaaaagttgccacaatactatgtgtggtgtgattccattatgggaatccgtataaaaatatgatacacaaatgtttatatcataggcaaagaagtagaaggatactaatgaagctatagatgtgggtggtgttttcctctagggagtgagatttggttgaaggaagtaatttaacttttcactttatgtacttatatatttggaaattttaattagcatatattttgcagattttaagaatggcaagggaagctatattttaaaattaaatgattactttgaaatggaaagtaactgcttaggcttttttaaaaaaatagattttatgttcgagagcagttttaggttcacagcaaagttgagaggaaagtacagatttcccatatgccccttgcctgcac

SEQ ID NO: 133718 - DNA, 1082 bp, Homo sapiens
tcacctgcctcacggtcctgcctcatacagcatttggaagactcccaggtgttctcgtgagagagggagagtagggaaggcaactgatgtgtttgtactccagaacggttttaactccatagacacctgcaagggtcatgggagcctcctgccacactgtaaggactgctcatctgtcctgtcctggccaagaagtaatattttcagagagagttccatgtaccctgctttgatatttttacagtagcttgtcctaacagagacatttttacaaaatgattccaaatttattcatagggtgttttcttttgtgttctcatgttcgatatgtatgtggttgagtaatggtctgtacttcacaggctgctctgaggatgtgtagttctctagtgaggggaacagtctgttttacccttgggggtagccacaggctgctgacaggtgttcacctgcctgtgtcctgatagatgtctttgttttgtctgtatatagagtttcatgggcacctaaaggagtagtgttgctgtacttatgcctctgttctaaaagaaataaattaccagttattgtgatagctgaagtctagtgatctttgacttctgatgttaaaggtacacttcaaggttagtagggccaaaatttgatctttagttcgttaattctgtgtgcttgccacgtggacatttattgtggattgttgttttttaactaaaactactgtttgtctacccacctccaacccccaggttaaaaaaccagtttccaggaaaattaaccttacaagttaaaagggaaaaaaatgcagcatgcatgccccaagaagaaaaacaagtttagtgactactatagtttccaagaggatgttttaaatgatagcctacatttaatgatgctctgagcagttacctcatgtaatgcatgtttgagtaactaaggaatttctattttactgttgagattgttcaacaattttggttatctttgagcagagttatcttggacaccaatgggttatgttgttcgacagacattatctacagaactgtcagcagcccctaaaaatgttacttctatgataaact

SEQ ID NO: 133719 - DNA, 1691 bp, Homo sapiens
gggagagactctgggaaaagcctcagacaggagtgtccacacctatactgttcccacctgaaggctactcatcttaaggagtaagcactcttcggtttgttggaaccctttggtcactttccagagggctgatatgactgtgtttggcagttctgttgaacttcgtggttgtttttgtgggagggaatggttgatcttcctctgttgtaggaaggaccctcctcaggcccggtgtcagtgctttgtgaagagttgcctggcagtggggtgcaggaggtgtagagctagagggcttgtggcaggttttgcaggagcccaggtgagatgctgaacttggtggtgtcattggggaccgggtgagtgagcacctatgagccatacagggttttccacgaagagctgagaaaaacaattgagccagtcacatagtcacatgtatgtttcaaaccccatgtggaaacaaggctccaaagatggaagcagctgtgctcactaaggccagagcagcctgggaggcaggtacagttgtcttggttgacctgtgcaggttacgttctgcgttgaagcagtgaatcagacagtcagacaggcgagatttagtgggactgcctgattgacaaagcaccaattattttaaaaacatgttccaaaattaaaggagggcaggtaaaatacatttggagaaatattgatgattgttgaagctggacgatggacacagggggtttgtttaccattcttttttctttggcgtatgtttggaaattttccagatcaaaaagtgaggataaaactatatgagaattaactgattacttgaaataactattgagatgggaaatagaacagaaaaggagaataaaattgaaatgttcagtagtaatcacaataatttactgactatgtagaggaattaccaactgcccatgatgggattttggaaaacacgtctggaaaactcaagagaattaactagaaatattactagaatcttatagtggccttataaggtagctagatacaagatacacatgcggaaaccaatagggccagcttccacaaaggcagtgtcaactggaaacggtggtggagagggacgtgttcacagtagcagcagtgagtgcagaccacctagaactgtcctgagtcagaaaatgagatccatgctgtattagactgtactgagaaacatgggagatctgattacatggataggaaggtaggtgttcctaaattacttgatactttttgggaatctcatccaaaagatactaagtttcatttggaattactgccaatgaaaagaatgtgtaagagattgttctcaaagatgagaagggttgtggggacaagctgggggtgacttggcaaactccttcagataccctgaggcagcccctgggcgagctgcgatccaagagctgggtggggcatctgggaggtgaccgtgagggctttgtcccactgcgtttcagttggagcagtgccagtcctttccaaagaatgtgcatcaggggagagaggccgccgcatgagtcaaatgaagaccccgcacaatcccttggactccagcgccccactgatgaagaaagggaagcagagggagatccccaaggccaagaagccaacctcactgaagaaggtatgtggggtgtttcagccgaagtgaggcactagaaaacttagtctca

SEQ ID NO: 133720 - DNA, 1013 bp, Homo sapiens
atcacaaaggatcaagaatcagagtctctggatttcaagcaagaccttcaaaatatgcctcccatgaatccttttctcctaaaccactggaggatgcactccaacaaaacaagagtgcagcccaagaagaagtccataaacaacaccttattgagagcagggtgggagccaagggtatccctgggtggcaaatgcatgaggtgcagtgagctgggaatgaaggtttcttcagcagatgaaactgcagaatgcctggtgtaaccgtcttagaggagactgaggcagctggctgagggcatgaggtttcattaatgctaagtatatagacaattaagcaaccaccacaaaacaagaacaataacccaaactatacattaggggaagtaacagcaaagcccttttgctctattgggaagatgacaaatacttaaaactgaaaacatgtgaagcagttgctcacaagcctcttacatggagatatggaggaaatatcccacagtgtggctaacagctgacaggtggagttgctaggaaaggaagggagcccaagcctgcccctcccttaacaaaccctataggactacttgaccctttagctgtggacatgtacaacactgacaaaaacagccagggaagcatgtggcctgtcctctccaatgacctggaaaggcctctgggcacacaatcagatgagtgggtcactgagatcccttctgtcatattctggtcagcggtgatgctggacccgtaccaagttaggacagggacgagctgctggctgggggcctcggacatgtcacaaaacttccaggctttagatatgaaatggtaactgggaaacatcatctttgagggttcagccccaggatgtggatgcattatctcaaagtgggactccgtaaagctgaatttgacactgcaggagaaaggaatgaggccagggaggggcttgtgagtgttccctagcctagatggagatgaaggacaggtgtccatgagcaatgccactctgc

SEQ ID NO: 133721 - DNA, 1054 bp, Homo sapiens
aaagactttggggctttttcttctgtttttcatgacaatgtaatttgtgtaactgttgaatctggaaattgatcagcattaaagggcacatgaagcagtgtctgcaggcgttcagtgctgcggagcctgttaaaggtcactcagatgtgcaggtgttaatcttctctaaaagcctggtgatacagctctggctttctgagcacactacggatctggaaaatactggaaaatgtgatacttagaatactttggctgctaaggaaacttcctctccattgcagaatagctgagccaagtgagtgagtttgcagaaagcaggtggtgagctcctgcctgctggaggttgccatggagggccattcctgcccggcaacagcaccgtcctgcagggagccacttggcagaagggtgcagggctgctggtgtcagagcaagagggctacagggaaagggccctttctcaggggatgtagcttttttaaaagatttgggaacacttggaggatttgctaaaatgagcctcagaaggaaaattggttttctaacctgtgactttttgaaatgaattattcctttcagtctttatttttcaaagaaacaatgtgtattgaagtacctagatttgtttgataatcaacaaatctttcctttttcaatgaacatattctgaatgtggtttctgtcttagaccaggaggacagagtttgctttcatattttccctgtaagtaagagggcttatttattttaaataaagagtaattattaaattttgtttcagactctggtgattttaggcttctcagtggtctctgtcttacttgatgattcctatgtcttaatttacctcctttggacagtctgggccctgaaataaaagggggccgcgtagtgggggttctgctatccccagcactcctaggtctggaagtagtgattgtcaaagcctccagcactgcacagacctgccggagccagatcctggctcaatcccaacctgcacttgcgttttcaccacagccaatggcaggaaagaattttcactgctttttgta

SEQ ID NO: 133722 - DNA, 1045 bp, Homo sapiens
ccactcagctcatccaggctaccttcccttgctcaaaacccacctcgtggatgtgggaaggtcctcttcttcgagagagtaaaagttaaaaaaaaagaaaagtaaaacgaagtacagaaagaaaatctctccaaaaacaatgcttccctcaaggaataaagttaaaaaaaaaaaaagaaaaagaaaaaaggtgagtgggctccggggagtgtttatgtctacatttctaaaagcagaaagaatgcatttagcaaaaggaagtttatccctgagaatcttaagcaacgtaagccgtattttatgccaaatatataacaaaatctggaagatatacatcttcttctaaatattaacacaactgcttctgtaactaaaaaaaaatgacccatgacataaacacaatcaaagcaaaatcctaaaaaaataattaagtggaagaaaaggttcgtgccaatctggacaacaggcgataagttaccaatctgataaactaaaatgtcatttccaatctggaattaaataatcttttagtggctgctacggggaggggaagctgaagggatgctcttctcagccaacagaggtccagccacctttcccccactacagaaagggctcaggaactccgtgccgcccgtgggccttcttcaagtactccgactgacttcggaacacaagactgggatgcaatgcttgtcatttttccaaaaggacaaagagaaaccaagtcacaggctcaacccaagagaaaatagacaagaggactgaggttgtctgcacgatgcgggctaacctacgcagcactgcacgagactcggatactgaacaggagaaacacaaaactctccacgcctggacacgtcgcagccgaggcaccagcggggatgcacagccggcctcagtctccatctgcgtctgagtcagcgaacttcagctcacacttgacgtcaaagggcttgtccctggcagaaaggtcgtcgatcctctgtgagtcctccctatccgtggggactttgctggtgatggtgtcttgctcggtctcata

SEQ ID NO: 133723 - DNA, 2072 bp, Homo sapiens
tgagctgggggggttgaagctgcagtgagctgtgattgcaccactgcactccagcctgggcaacagagccagaccctgtttcaaaaaaaagaaaaaaaagaaaagtttaggcaggaggagagtgctgagatgcactgaaaggccagtcttccttgcagccattagcagaagcgtctcgtgtctgattcaaagagctgacactaggcacagaactggcctctgctcagcttccccagcctgacgcgttttcttctgggacacgggtgagaaatgggatttctgctgctcagagctgcctccaatttctttgtccccatgggctgtcatccagggctcatctttgctttttggtcacgcatgtctttatctccttagttgttctggaagattccatgttgctacagtgggtgaaactcttgcgtcatcttgtgggtattttaaagaagttgttaaatagcaaatggggattgttgacgctgtgcacgtttattttgatgttccagataaaagtaaaggaagttaccggcagcattttttcaagcacggtggcacagcggaactgaaatgctcccaaaaatccaacctggcccgggtcttttggaagttccagaatggcgtgttgaaggccgagagccccaagtacggtcttatgggcagaaaaaacttgctcatcttcaacttgtcagaaggagacagtggggtgtaccagtgcctgtcagaggagagggttaagaacaaaacggtcttccaagtggtcgccaagcacgtcctggaagtgaaggtggttccaaagcccgtagtggcccccaccttgtcagttgttcagacagaaggtagtaggattgccaccaaagtgttggtggcatccacccaagggtcttctcccccaaccccagccgtgcaggccacctcctccggggccatcacccttcctcccaagcctgcgcccaccggcacatcctgcgaaccaaagatcgtcatcaacacggtcccccagctccactcggagaaaaccatgtatcttaagtccagcgacaaccgcctcctcatgtccctcttcctcttcttctttgttctcttcctctgcctctttttctacaactgctataagggatacctgcccagacagtgcttgaaattccgctcggccctactaattgggaagaagaagcccaagtcagatttctgtgaccgtgagcagagcctgaaggagacgttagtagagccagggagcttctcccagcagaatggggagcaccccaagccagccctggacaccggctatgagaccgagcaagacaccatcaccagcaaagtccccacggatagggaggactcacagaggatcgacgacctttctgccagggacaagccctttgacgtcaagtgtgagctgaagttcgctgactcagacgcagatggagactgaggccggctgtgcatccccgctggtgcctcggctgcgacgtgtccaggcgtggagagttttgtgtttctcctgttcagtatccgagtctcgtgcagtgctgcgtaggttagcccgcatcgtgcagacaacctcagtcctcttgtctattttctcttgggttgagcctgtgacttggtttctctttgtccttttggaaaaatgacaagcattgcatcccagtcttgtgttccgaagtcagtcggagtacttgaagaaggcccacgggcggcacggagttcctgagccctttctgtagtgggggaaaggtggctggacctctgttggctgagaagagcatcccttcagcttcccctccccgtagcagccactaaaagattatttaattccagattggaaatgacattttagtttatcagattggtaacttatcgcctgttgtccagattggcacgaaccttttcttccacttaattatttttttaggattttgctttgattgtgtttatgtcatgggtcatttttttttagttacagaagcagttgtgttaatatttagaagaagatgtatatcttccagattttgttatatatttggcataaaatacggcttacgttgcttaagattctcagggataaacttcct

SEQ ID NO: 133724 - DNA, 1048 bp, Homo sapiens
ccttctcacctatagtgaggccgggaagatgaccgggagtgccaggctcatgcatcctctgctgcagggaggagatctggaggtggggactgaacagcctccccactggctaagagaaacacgtgcagagaagcgctttgctggagggcaggcacctgtgggtgcccagacaggggagagagggatttggacctaaggcccagtgagccctgacatagcacgtggattctgcaggaaggtcacagacctgccttgtttgcctctggttctgagtacctctcctccttactgcaatgtcccctgaaggtacactctggctgcttcccacacactggtgcagaagcagaggccatgctcctggatgcctgcttgcctgatgctagttcttctctgtctcatacacgcagggcaacaggtttgtctatgctggctctaactcgggcgtggtccaggccccgctggccttctgtgggaagcacggcacctgcgaggactgtgtgctggcgcgggacccctactgcgcctggagcccgcccacagcgacctgcgtggctctgcaccagaccgagagccccagcaggtatggggcgggatgcgctgcctggggatgtcccccatgtgtgtgggtgaataacacgtgccggttgttttgcaggggtttgattcaggagatgagcggcgatgcttctgtgtgcccgggtgagtgactcctcgacgtcccatttcctttgggagtggcgaggtcttgtagccatttcacggtgcttcagttctgtggcatttgtgtgtgttttgtttttctttctccactcggaacagaggtcaagtgttctgtagcagactcgtggtcttctctgtctttttttcttgccgaaagagtacttgaagccacttagagtgtatctgcttactgggaagcagtctccttccaaaaccatcctgttttctttctgcttagcttggggctcattaagcaaaacctaagcctgttataaatggggagaaaggagcccatgagtgattaatcctcaggcagtgtaagggctgg

SEQ ID NO: 133725 - DNA, 1047 bp, Homo sapiens
gccacggtggctggcagcgcattgtggcctgcccttggagcctcccagccaacctcacatgccccctgtcctcaccgcctgcctagggcacttaccagtgacaccccgagggctggtggagcatgggagccccctcatgtggcacttagcctcaagtgtaatgtcgactgttggtgaggattcttggggtcaaccatggaacagtttattttccttggaaaaaaactggaataacccataacacttgggtttccagttgtctgttttgccaaagccttttcctttttttgtttctaatgcgaaatcatcattgttttctaagtatctgtggagggaatgacttgagagtgaagagtgtgaagtttgccgctgtggtcactgtccttggtttctgtgtctgggttagtgtcactgacctgtagctttggccctgcagaccggggagctctgcacaaagccatcagcctcgagcacgctgttcacatcatcgaggagacccagctcttccaggactttgagccagtccagaccctgctgctgtcttcaaagaaggtaaagtgacgcaggcagctggaccgggggcttctccgctcggtggctttgattctaggtgacaggagagttggcaagctggagtcgggctcctgggcaggcccctctgtctgtctgccctgggtgagccaaccttcagagtttgacacagagccattccgtgagctgtgggatctgaattggggaaggcaggaaggcagacctggggagacgggactttctcttcgaagttgctggaatgtcattgagttgttggtgcagctttacaggctgtggagaggtgggcactgctccatgaagacacctttttatgccctgagcttggggggtgtgcagactgcatctgtgggatatgatagtgatacagctgactcgtcaccgtggaaaatccacaagagaagtggttcgtctcatctgtaaagctgtctccacctgtggctgagactctggtctggcctgcaatactcccaagcagcccttggcaggggtgggtgg

SEQ ID NO: 133726 - DNA, 1076 bp, Homo sapiens
tgcgatctcggcttactgcaaccttcgcctcccgggttcaagagattctcctgcctcagcctctcgagtagctgggattacaggcgcccgccaccactcccagataatttttgtatttttagtaaagatggagtttcaccatgttggccaggctggtctggaactcctgacctcaggtgatccgcctgcctcagcctcccaaagtgctgggatcacaggtgtgagccactgcgcccggcctgtagagtcactttgaatggatggaaaaaagcccactttgatgtttgaaaatacttatggtttaggtttttgaaaaataatttaattttctccactttcacgagtttgatttttgctgctgttttatggtgagtgatggaacttttggagctggtcttccagactccactggtttcaggataaggatcacagtgaggatgttcatgaaggccccaggctgctcccctgctctctgaacctcccttgcagtctgagaattgatcatctcaggagaaacctctaggctctaaactctatcatgtgcttttaaaattgtgcatttttatactagtatctctttaaaagaatatgcactgatatggactctatcccaacaggtgtattggaaggtctcagaagacaaaaaagcaaaatgtgcagaaaaggggaaatcaaaacaggtaaatttcttttgcaagctacaaagaatcccattcaagtatttcttggttgttttaatctactgaatgccagcatgcctgcagtgcaggccagccttttctccaggctctgttcattctgctgggcttggttttgttgtgatgcgtcttggagctcatccctctattcctgagtatcaggattgggtttctcaaagcaggtgccaaacatatttggcctttgagaaatacttttttaaagtttatatgaattgaatgtattcagatggcctgaaactttgactacagaacactggtgaatagtgaagcccactggtgaatagtgcagaaattcagggtttgttctgcctccttgcacccagaggccttaggcttggaggagttgctagtcatgca

SEQ ID NO: 133727 - DNA, 1051 bp, Homo sapiens
gtagactggtcctggcagctgccctgctgggtgagtccggcccaacacaggtccagggctaggcatgtccctgcagagctggagtgttggtctccagggatccattttaattctaggaaaactgaagttggaacaataaactgtttattatgcttgtgacctagacagctcctgaaacccattcctgattcctgatgggataaggccattttatcctcagtttgcaaggcagtgacatcagcatcctaactggaggtgggagaggggtttctgggggcagaggacatcccagggtggggatactaggtggccaggtactggcagggcatggttggtgagggctgtggtgtcttctgtttcccagcacctggctgcctgcttccagctgggagggaagatgtggtgagtgcgtgtcctccactgtcctggttgtagggcctggagagactctaagctttacctgccccatctgggcaaacccctgagataagaaataagccagaacacgctcccccaggcagtagtttgcatgcagtgaggtcaggggtccaggtaatgactgcctatgttagattggccagtccacagctgtcaccagagatcccctttcagtttccctgggatgccagccagggcattttaatgccagtgttgcatcctgttgctggcagaagcactgacaccttccatgtggtagtgactggtgtcccctctgtaatctaccctagctgccagacagctgatcccaggaaggagccgagacacgggtgactggacagtccccagatggcattttggttcatggttcctgccttacaggacacttgccagcagtcactattcacatctaagatgcaacactagatcagaatgtatgttctgcaacagagtgacacatgcacagatgcacatatacacacatgcacacacagatgcgcacatacatgtctgcgtacacatacacagatgcgcacacagatgcatgcacgtatgtgcacatatagctgtgcacacatacatgtatatgcatacacagatacatatgtatgga

SEQ ID NO: 133728 - DNA, 1050 bp, Homo sapiens
ccagtggtggtcctcaacttgtgaccactgagatggttgggaagagcctgcccagggaattgttcagtgtgggggccgtatccctccatgacaggtcagcggtggtcagacggacagcagcaggccctcagtgacacacgcaggtgagaagggcctgggtgttggagccagcgtctcaggtcagccctaagccacccacgcctacagggcagagtccacccctcagggccaggcgggccctccacaggtggtcaccctagtggtgagtgcatccctaggggaaacacacctccttcctgggccctacgagagacagaacaatggccaggtagcccccctcctggagctctcagacctggaaggtgactgtgtggggggcaatgagtgacagtgactcaccagctcctccccacgtgtgacccgccacgtcgcacacattctgaatcatctggaaggtgacacactgctcggaaaatgagaacccccacatgctgtagagctggctgcttgctggaaggacagacaccgggatgggactttgcagggccgtagccccgtaggcttgggcactttgaagtcagccccactaaatgccacttgcaggtgctgctgaccggggggtggagagggggttccaggttaataggaccaggttccttttagcagtgcagggaaacgtgagtgagatctgttcccatttgggtgctgcagagtgaatcctgaaatattgggggtttgcttgactccttcagtggggaattcctacctgggctcctttcacactgagaggacggcaggggttactccccaggccccggctgtctcagggaggcaggggctgtggttttctgatacaggcatctcaccagggtcacaccgcctccttagtccatatgcacttgaccctcttctggcatctacggctatttggggttggatggacctgagtgactgactgtatcattttaggctgcccccctcttctgactccccaggaagggaattgagggactgccttacttgggctggaagcatctggaagagaggaga

SEQ ID NO: 133729 - DNA, 1041 bp, Homo sapiens
aggccacgtgcttcctgttttagggtcgtctgcccagctgggagcaggccatctcgctgcagcactgtccagcagctctgtgcatgctcacctcccaagtttgccctcattgctacctcttgactgagctgtcttcgtgattcctgagtccaaggctggacatgagagctcagagggccagagtgacttgcccagggctacatctgcttcctcgggacttcacctctagccccattgtcccgtggccttaggcagctcacccatcctgccatggagcccccagatgactgaagtagtggccaggcctgcagggtcctcaggcacccaggagcttgccctcgccaggcgacctgctgctccatgggtggacaatggtgtgcatggcttgggtgctgggccgcaaccccccacaccctcctctaaggcagcctttctcctccttcctcagccttgggactgggccctgccccacgagcccctgaattagcccacacaggaaaacaatcaggcccacatcgctgaacagccccgctgtttaaaaggaagagaatgggacagggttgttccacagcctgcggagaaggctcaccacgggaccttgtccctgcgctgaagggtgccttgttgtggctggagcagtcctggcctgagccccaactaataacagagcccttgaaacccctgcagtcaggacagacgtcccaggcgagcagaggccctgcgtgaggatggggcggcggggccagatggtgtcctgagtatccatcctccctggtggctgaggacacgctgaccagcgtggggtcaggagcatggcccctggaaaggtgaggccagctgggcagggtcaggggcttgggttttctttgtcatttggtaaatggtcttgtgttcccatttctcacccctcactggggttgagtgagaatgagctgagtaagtgggcttccttctaatgtgaggggaccaaatgaccagctgcccttctggacaaccagaggaaaaacacacttgagtggaccttacaggcttcactccaga

SEQ ID NO: 133730 - DNA, 1068 bp, Homo sapiens
cgaatatgtctcttttctcttagggctcgtgggtaccagcgtttgttaagaagattacatgggttgtctgaggattttctggcaggagttttcttgttttgtgtgtttgaattaaactcttgaacgtgtctagaatgcttttaacatgaaataatatgcttggggtgggggagggcaattttgtttccttccagtgtgccagcactaattagtcaataatccgtcctttgaccaatgaattgaatgacagctctgtggtctgttagggtctcatgtaaactgggttccgtctggggatcctccatcccactcgctggcctgcttgtctcttcacgtgcccacatcccgtcagtagcggctgcagagcaagtgctgatagctgggaggagtcccctcatgtgctgtgtgtgtgatgacgtgctttgtgagccgtgatggcaggagtgctcctgtgtatgcctgtatgtgtttgcctgtgtttctccttatgactcctgggcagagcatgataagggtgggtacactgtagctgtgctagaggggcagccagggaggaggccatggaggtggggagggaggccaaggtgaagcaggaaaacagagaccaccaggtggacgcagaattatgtctatggtaggtaggtataatttctaaaaggcaaggtgtctaggacaataaatgtaaagcaggtttattatggggggagcagtgaaaagagaacccttcgtgtcagggacccacccactgcttggatttcctttgggcatgagtgccctgactctgcccgtggtgggaggatgcatgggcatgcagtggggtgaccgtgtcactgcagcttaggtgcctgtgcctggcccagggctgcctgactctgggcccctgaggatgcccatgcccaggcacctctggcagctggcacctcgcagtctccaaatgctctctgtgccccatcttctgtggcactgctttagcagggcaggccacacctatgcagggagcccaggaggtcagggcctgcagttacccactggtgaccccagccccacccatgctgtggagggagggta

SEQ ID NO: 133731 - DNA, 1026 bp, Homo sapiens
ccagcagcttcccctagaagcataggataagacaggcagcaaagggctctgcgtcctcagagaaaggagcacaggttggcttggacatctgtctgggggagccagagagccacaggatacaatgctgtgtcttgcgtgtgatttcttagacccaaactcttacacttgcatgtgcttatggggagttgagtgcagaaagtgaattcctttgagtttggtggttgttttgataccgcctgcatttaagctcttccttcttaatttacaacaaccctgtagtctttataaagtgcactgtgtgggtgctgcccagcctccctagggtctgagtgtgccccactgcttggaggcagggctgcttcacctgcactgggatggagccctgttcataggagctgggctttatttttagcagatacagttccacgtctcacagagttgagagcaggaagactgtagatttaattaaatgacactgaaaggggaggtaattacttctgcatgtttcaggaggcccaggagggtgtcccaggtcctctgctgcagccctgtgaggctgttacctggaaaacacccaagatcccatccctgatgggcactcagggtcctgtgcattactctgactaatgatgaacaatgtgagctttcctctctgaagcctggctttggagataagccatgcagtctagagacagtgcagcaggtcacttcagaggaagcatggtcaagccgtgcatcccaaagctgctttaacaggacgggacacctggcgtggtggctcacgcatataatcccagcactttgggaggccgaggtgggtagatcatctgaggtggggagttcaagaccaatgtggccaaattggtgaaacccccatctctactcaaaatacaaaaattagccgggcgtggtggctcatgcctgtaatcccagccactctggaggctgagataggagaatcgcttgaagccaggaggcggaggttgcagtgagctgagatcgcaccattgcactccagcctaggcg

SEQ ID NO: 133732 - DNA, 1128 bp, Homo sapiens
agttgacatgtgacatcagccatcacactggtcagtgctccccagtgcacgggccccgtggcatgctatgttttataaaccagtgtgggccctaggtaaggtgtgtgagcttgctcaaggtgtattgtatgaaggtgttgccctgctcccagaagcctgccccagagcaggcagggcttgttattcttgcccagagatcatcgggccagcatgaggtggccgaaggttggcacttcttacattctaatggcaccaggagcgaggtccggggccttgtgcaagctgcgctcacacctcagccgaccttctgcttcttaggaaggttgcttcattccggtcaccactggccccatatttaagcatcagtaataccttaggtgcctctggggaccattcctgttgtcctccttccaaaaactgcttcattttccttcaaaatgtgacatggcttggacatgctagaggcatttattagcagaaagcctgggagctctgcctccatgatattttctttttctgggaaaaaaaatatttgtgcaagccatggtcatatcattgtttcccgctctctgtgagcctgctgacattggcctcccgtgtgcctggcgtgctcttatcagacctgtgtgccatcctgtgaattctaccgtaaacagtcacagcgaggcgggagaaacacagcctggtggtccacggcaggcttggtctggactggatgggagctgcctgatggatcagtaggggaatgcagaggggtgccagctccaggactggtaaaggtggctcttctctttcttttccatcaggtgcagtgttggagtgaatgaatgattgatgggtgaacaagtgagagagtggagctggtcacagaggtaggagggactcaggtcactggccgtgtggtgggagtggggagctgagcccatgccaaggctgtgacccatggaccagtcctggtgtggttgggctggcaggagtgggtgtttgttcctgggactggtggtcagcatgtgtccccttccctgcttctcactggctgaggctcaggatctgggggcccagcaggccccttctggctcccaggtgggtggggacatgggtctcagtcccacctgctttcaggccctt

SEQ ID NO: 133733 - DNA, 1051 bp, Homo sapiens
ccgcctagtgagctgcaaggggctggctctactggggttatgccagtaaaaacgtgtaaaggagagttgaactcgtggttgtcctctattttctggcttagtattttggggggtaggtgggagagtgggtgaatgggagtctgtaagtgggcagtttgcgtcaaatgaggcctggtgtcgagggctgggtcctgctttccggaaggttttccacatgaagttgctttgcttttgttttgaaaacctcactctgtgttgagcacatcccaggctcgtgggtggccaggcccccgaaggccaagctggacgtggggcctggggccaagcatctcaccctgctgttctgagtcttttcaaatccaccaggcgccacggaacggaagtttcctttcctgggggtgacgtgacaccagtggcctgtcacctcatatgtgtcctaggcctggggcctgcctgctggctgcccaggcgaggttatttgggaatgtttactgtgtcccagaaacaggcagctctggccagtgcaggggcaggattctggtagagatgataatgccctgattgtcattttgacagttggtgtctgcgtatatcatgtcttggtagtcgtcagccagaagaagaaagcaggcgggctcagcatacccaccagggaggctggggtgggaagatgagggatgcactggcctgtttctgtgagcaaagactgccctcccataaggccagaccttcagactgagaagagtgtacgtggtacactcagcgagtcaaacaaagaaatagaaacacatcactggtgccaggagcagccctggggtcccaggagggtgggccgcttaggagttggtagacggtggaactcagtggctgtatttcagagtgcagacaggcaaaaggccaccgtggggatgcagagccccagctgccatgccagcccaaggtcttgcagcacagcacaagggagggactccatgggagggggcccacctcctgagaagcacacccagagtctgttgaaaatgcagccttgcacagacccccctgagtgcct

SEQ ID NO: 133734 - DNA, 1048 bp, Homo sapiens
agcttgtctattgagagctggtgaggaagagggtgacagggcacctcttggtcctgggaacgggtgcttgactcagcagagaccaacccagggctgagggacaaccctctgggcctggcggggaggcaagagagatgggaggtgaggaggaaggagtggggagcaaaagtggggagaaggggagagaggtggaagagtgttgcgaaggtgaagaaagaggaggaaaaagagaagggaggaaaagaaaggttgggggagggaaaggagggaggtgagcaggggcgaggaggagggaggaggaaggaggaagaaaggggcggggccataggagggaagagaagaagggggagaggaaggggaagggaaaggggaggaggcgggaagggagggggagcggaggaggggcctgcgcgcccgccccgcgcactccgtccccgcgccggcctcagcgctctcgcgcgccgcagcatcccagccgccgctgccgccgccgggcctccccgccaccccctccccggcccggccgcctcccgccgctgccgccgccgccgccgccgccattcctggcgcccgaactcgcccggccgggagccgccgcgggcaggacgcgcgctgcaggtaagcggccgggctggcgcgggagggagggcgcgcggggccgggcaggtgcgctgggggcggcctggaccctccgcggagcccccactccacacccctaggctcctcaccggaccctcggggccctccccgaacccctgcaggagcctccttctgggatccccggacccctggactccttcctggatccccccggggcccctcctgggacgcctcccagagacacctacccggacccctccgaccccctggacctctctgctatccctccccggccttctccccttcccggttgcctccccagtccctgcgcgcaggtggctcctctgggcgcgggggagcgggggcgcgctgcatacccgggccagggagggggcggtgcgctcggccaggccccgtcgcgccccggcccgcccagtccggccccgcc

SEQ ID NO: 133735 - DNA, 1095 bp, Homo sapiens
ttctagcttgcccgtcttagcataggcatcactgcttctgaagtggggatgtctttgatcctggcagggcaggcagacctcttagttgtgctgtgacatcctagagtgccatgcatggtggggggacttcagaacagatgcatgggccccacccctgggtttctgggccaggtgcagctagacaagctgggcatgctctctgcagggccacccagctcgggctgcccttctgcatcgcagcgcaagagagagaacagctttgccagagagcagaaggagcctgagttttcacactgaatggtcataccgtggatgtctattttcctgggagttgctgggattgccagctctgggccctgggggtgttggggacattaaggactctgaggttccatctccagctactcggagagggttccttgtgtcattcatcaggcagcttgcttatcttatccctcttttagcaattgtcatactgcattaaagttagtttgctggtctctctattagcctggatgattttgcggttctggactctgttttattgaccattatgtctccagcacctcagaaagctttctgtgattggagtctttgaatgaggctgtgagtggatgacgagcctctgaaccgacgcgggcgggagggggctgctggccaactcactcaccgggccacctttactgtctgtttactgtctgtttactttaaaagaatgccttggtggtctgaaaaccttcctaagtgccaaatgagagcatctcaaagctggcagagcccctgggtgttatcagggtggagaatcacgttcctttcattctctgatgggagcgtgcatgtgtgtgcgtatgcccatcaccctccactggcttcactcatgatcgcagataaggggaaaacacttacctcggactttggattgaaaccagatcaggaggcttagtcaccccaaacgcaaccttagaaagcatgaagttaatatgaaacatcggcccgtgtaacgtagcaaaacctcccctgtgaatgagttttaaactttttttttttttttttaacatcctgaatgtttttgagcacatgctgctgccttcttag

SEQ ID NO: 133736 - DNA, 1025 bp, Homo sapiens
acccactggaaggtgcaagcagacggaggtggacaaagccctgggctcatggcagggcccctgcagtatctgcctggaggacctcaggcaccacagttccctctcccattctgtatgccctgtggctactctggacacagtccccataggaggtggtagttgactggggatgccataacaaagtgccacacactaggtgacttagaacaatagcaatggagtgttttacagttctggaggccagaaatccaagatccaggtgttggcagggccccactccccgtgaaggcaccaggactctctctgcccaaggcctctctcctaccttctgttagttccttggcttgtggcagcagagctccaatccttacatggcattctctacgtgtacgaatgcatctatgtccaaatttcccctttacataaggatatgaatcatactggattggggcccacccttgcaatcctatcttaaataattacctttgtaacagctctatctccagatctacacacacactcggagggacttgggggttaggatttcaacctgtgaattttggagggaacgtaattcaacctataactaggtgggatgtttacttgctgaaggaacagacagtcccactaggctgggaatggtagacccagagagggctggaggggagctttggggctaaaaagacagattacatgcaagccagcctcctgaacctgggaccctcagctcttcttcccactctgcttccacaggtctaccctgccctcacctggggagaagtgtggaggactcctccttggagaaagtgaaaaactcccagagaaaacattggcaggaattggcattggatgggtcctggcttgagactagctcccattgcatcagtctgcaagccctctgctatttctacctccccacccaaactccaatccacacttactttaatgtcccattctgcaatgtgagtgggcagcggaaggtcaccagaagctgtagagaaagtctttacatgaaagacagacac

SEQ ID NO: 133737 - DNA, 1053 bp, Homo sapiens
aaagacaattggagaagtgagagtttgaatctttttttacgttggaaacagtgttgcaaaatattttttgagttttgcctgacttagcaaagattcagtcgaactcaagtagagttcaaagcattgcagcgtgtagtaaaaaaaaaaaagagttgaagatgttgtgccatatctgattcttggtattaaaaataaaaaaaggaaccatttaatccctaagagttcctggaagaaatggaattgattctaccatctgacttctttgtcttagtagggacaaattcattgccttcacacaggcagcattttaattaaatgcaactaaatacattgatgtcctccttctccccagtgaaagtccgagcagtgcatagatagaattatattttctcaaaaaggcttaaatacatgtaaattattaagtgttttaagtgagaaatctttgtcagttgaaattattttatcaaatcatttttgttctgaacggcacttttgttttaacgtatttagaaaactcttgcattaaaacagaaattgatttgtattatcccctgtatttgaagtgcactttaaagtgtatttgaatgagagattataatcaaattacttgatttgtgtcttatcctcttactcttctaccttggatttgaaaaggttggatttgaacactaggaaaaaagagatttttctactgagggattgtgggaagatttttttttaagcctctgtatttgaagtgaaatataaaataggattttataatagtcttaataactagaaagttttaagctaggataaaaatggggtgtatactttaggtctttatctttcctgagagatgaaattggtagaaacgttattttattgctagatttcactttagaaatgaatcaccctgatctttgttaggcccctatttaatattctaaatgcaggtctaatctctctgcttttttttaatggaagacttcttagtagaacttcacttatttagcacattgtttgcccatggttataatccaatatgcttgtgccaagacgtattttggaatt

SEQ ID NO: 133738 - DNA, 1903 bp, Homo sapiens
ctccccctccttgagcttatattctatttttatttttgatgtgtcatagttacttctgttaatcagttcagtagaagtgctgagatactctgtgacaaaacagatcccatcgacatcatttttacaaataagaccagatgtcctttagccttgtcaacaggcttgggccatggtgaacaatgtctgcctctgaagtgctcagcagaccgtgtgaaagaagaaggtccgggtgtttggaaacaatggctgagtggcggtagtggtgcattgtgacctcattattctgcttttggtttctcgccttgtaatatgaataaggcacatgaggatttagtgtgtgtcataagataagtgactgtcacgttaagcttaatgtctctgtttctgtaactttctccataatctggcagtatctcatttcttcgtggccagtgtttgggcactgaaaaggtcaatcaatacatagaattgtgactcaactcacgctgaaaaaaaaaaaaaagcatctgaatcatggttctcctgtgaattaaatttagtagcaagaatcttgttttaatttggaagaaagggtgggtcaggaaaactcaagatagagactttcaaaagggaaagtccttaggataatgagtagatttccccccccagttgtttcatgatataaactgatgtggaccaaataaatacctgtctcacaggggtactgatttccagcattagctgtggcagctggagcattgctggcctaggtggcagcaactggccttcccttgggacctgtagttactgaccagtgccaccctctgccatccaccccaatgctgctgcatctccaccgaagataaagacttgggtggagacttggaaaacatatgtgcgttggagttgggaagtaggtaggagcagctgatgagtactaattttcctctttaaataatgtccatgtaatatgaaattgaagagcacaagttaaagaaggaaaatgcttccaaggcgaacatgcaaatcatcagcgatctttggtaggtgggaataggatgtgcaagggggtgagtggggaagcagctctatccaggccagtagagttgactctcaccacaccctctgaacacctcacagagtcccttgagttgtagcagcacaagcttgctttagcccttgcaagatccaaataattgcccgaagaatgagatcagccttattttcttccctgtttttcgtaattctttcctttgtctttcctgcaaaagttaaactgtgattattggaaaataaaaataattatgcagatcaacttaacagttttgtggatgaagaaaaacaacctgttgtcctttatgtactttagtcctcccctgcccaagggaaccggcaagagagtactgtgtcattcaatccgtatgagccagaacttgcaccctgggctgcagacaaaggtgagacttcctttcattcaagggacattcacagagcaaagtgcgtggtcacttgtaagtttgtagagttggttcacgaatccacaccacgtccgtgattgcaatacagccacagttagccatggaaacactcacatctagtggcaggcagcaggcaccacatgcccatgagcagtgatggtgctattgaatgaaatggtctttcccacctccctcacccaacgacgttggaaatgtccctgccactcttcagaatttctcatcccttgcaacattgatgctactctgagttcatattcccatgaagatcatgttcttggaaggatgaatcctggtgtggggtccagccccaggtcgtatgtttcttgactgcattgcaggcccccagagagaagccctacccatggacacagaggtgtacgagagcccctacgcggaccccgaggagatcaggcccaaggaggttt

SEQ ID NO: 133739 - DNA, 1044 bp, Homo sapiens
caacacatgtaaatatacacaaaatataacccagatcattactcattagagttgaaatagaaataatgactatttacagtatcttaattacattttttagatcttttaattaaaacatatataccaaaaagggcacaactcttagcatgcagtacagtggttttccacaaatgaaacatacccatgaaatcagcccccagatgaagaacagaaccccagaagcctgtttcctctgcacacacagccttccccaggggtgacccaactgactccaacatcacagattaagtgctcctgtttttatacttcgtataattgaaatcatacaatgtgtactccttcatgtcttggagtggctgttttgttttgtttgactaacacctttaaaaaaaaaaaagcttatgcatatcttgcatgttgtaggggatgaaaggaagtgaagtcaccgctatgttagagaaaggagagcggatggggtgccctgcagggtgtccaagagagatgtacgatctcatgaatctgtgctggacatacgagtgagtacctgacactgactgtgatgtattcagatgctctggaaacaggtgaaatggttgggcgtctaaaaaaaaggataaagttcaccttttcatgaatcaggaatgtgcccgctttctaaacaaacaacggtgggggctggtcttgctttagagaccttgctttctggcccatgcacttacatgtagtagagcctaaagagcaagtttagatggggactctaacccgagtgtccaaatttaaatgtcgataatggtggagagatggggcaagggcagtcaaagtaaaaaagtgtttgtaagagtttggggctggatgccatttttggcatagaggatggcagaagcactcggtaggggatggtatactttcctgactccctgattaccatgagcagtgaggggtgacctcggactctggccagctcacagatacattggctaaggttgcacttccctagaatctacctcatccttgaagtggtggcctcagtccaccctgactgcc

SEQ ID NO: 133740 - DNA, 1050 bp, Homo sapiens
attaaagttatgttcgtatttcttctcttaacaagattatgagtcagatgttgactatatctgcagaacatttgccaagtattttcagacacctgttttgctaaaatcacagagtgacagcctcttcgtgttgcctgtggcacagaagcatattgtgtgccgcatatctgaacctggggctaaaacactcccagttctaatgcaaaaagtctcctactttagggtggacatgaatcaccgggaggtcttgttaaagtgcagatatgggttatttaggtctacagtaggccgacactatttttgacagccttgtggtcaccctggggtggggggcacagggaccacgctgtgagctgcaggccctagagttagccaccagggagcagcaccactggtactcagcctgcagaggccctgcttgtgatcagcaatttttcacaagcacattgacaaacaagaatgcatctcttccattccagtgtggaaaacaggcccggattcgcagcagtggaactgcggctgcgcaattactactatgacgtggtgaactaaccgctcccgcacctgtcggtggctgcctttgatcacaggagcaatcacaggaaaatgtatccagaggaattgattgtcagccacctccctctgccagtcgggagagccaggcttggatggaacatgcccacaacttgtcacccaaagcctgtcccaggactcaccctccacaaagcaaaggcagtcccgggagaaaagacggatggcaggatccaaggggctagctggatttgtttgttttcttgtctgtgtgattttcatacaggttatttttacgatctgtttccaaatccctttcatgtctttccacttctctgggtcccggggtgcatttgttactcatcgggcccagggacattgcagagtggcctagagcactctcaccccaagcggccttttccaaatgcccaaggatgccttagcatgtgactcctgaagggaaggcaaaggcagaggaatttggctgcttctacggccatgagactgatccctggccac

SEQ ID NO: 133741 - DNA, 1039 bp, Homo sapiens
gacacgctctacagcacgcagtttccctgattaactaacttagaaaacatggccaagtacattcacagtgcacattaatctactaatagctccaaagagcactgcaaccaagatcttttcatggagcttttctagctcaacattctcctgacttcttttgccactaccactaggtgctcaatacctattagcatgatagagtgctgttccccccacactcactgggaaatgtgcttaaggagaattagggaggcatctctaaagggcaatggtcatttggtccaaccctgaaatcacaccaaggaagcaggtatctgtgttcttattaactggaaagccagccctgtcctgtcagttctcaaaggttaatttacacatgatatgttctttcactctctctctctcagatacatacacacacacacactctctctctctctctctctctctctctctctctctctctctgtctctctctctctccagggcatatagattcaatctttcctccaaagaaaaagaagaaacgatgacagcactttggtatagaaaggtgtgggcagcaagacacccaggtgccgaggcaagagactgaaggcacaagctgttccagtataataaagaaaataataagaataagaatagttatactagaaatagaatatagatatgattatatatgaatattattaatcattagtttgtagaattactctttgttctgttattataataatccctattctagaattataacctaggaataaccaggccatacggagttaggagctgaagggacacgatgagaagtgaccagaaggtaagagtgtgagccctctgtcacgcccagataagcgcaactagaggactccttggtctagtggtaacgccagtgcctgggaaggcacctgttacttaagcgggaaagggaatctccttttccctggaggaattagagaacactctgctccaccacttcttgtgggagtcctgacattagccaggcccacacacagccattcagaagcttgaacgtctc

SEQ ID NO: 133742 - DNA, 1102 bp, Homo sapiens
agttttttttggtttgtaagtttgtgaaatatattcagctataattattttattgagtactgcttatgcaccagatacttgttagtaatggctggaaatacagtagtaaacagagacaaacccccagccttcatagagcttacattcgaggaggcagacggatacataaaatatatactatgttagaccatagtaaatgtggtgatggaaaaattaagcagaagatgggagaaagaatgtgaatgagaaggttattagaatgggtatcgggtgttttcagatgaatcctgatggtcttaagacagaggtgggagggtgctgggcactgctcccatttctgctgggccgaatggaggcccagggaggagcaaggcaaacgcacagtgctctcggcttcaggatttcccttgactcctaagatgtgctgattggcccaggacactgacgggatgtgtagaaagcaacattttaaaagagtagcaagctgggggagcatgagagcaccttaagtgtacttcagcaggcacaggtgtagtgggattaaataggcaattattgtgggatgaagtttaaaagtacatttggatacaagaattgacattttaaatactttactataaaaattgaagcacatggcctattaaatctggaccatatgttcgttatcctaatgtctattttagttgtgacaccacataaagaatgtgtaggagcaccagcttttagaataacacaatttccagggggagctgctgttgtgtttccttatttaacatacaaaagcatttgatgcctgatactcacatgcttgtgcaatatatatagaaaagtcttggaattatagaaaattagaagcatatttaggccgggtacggtagctcatgcctgtaatcccagcactttgggaggccgaggcgggtggatcacctgaggtcaagagttccagaccagtctggccaacatgttgaaactccgtctatactaaaaatacaaagaattagccgggcgtggtggcgggcgcctgtaataccagctgctcaggaggctgaggcaggagaatcgcttgaacctgggaggcggaggctgcagtgagctgagattg

SEQ ID NO: 133743 - DNA, 1348 bp, Homo sapiens
ctcttgttctctcgagtgtaagaccaaggggcctagcccactggtaagtcctcagtgtgtatatttgaatgcgtaaattactgctcctggagaaaagagaatgagattaacttcaaaggatagttatacagaaaagattggagaattaataatatgagtatgttatttactttaactgcccttttttcattaaaattagctttatttatgtgttcaaattatgtaagtaatggaatctaattaattggtgattttggttatgagtattttaatttcctccttataacctcaaatttatgtcagtgtttattgctctcatttttaaaaattgctagtaacttgctctcttagaaaaaacaggttattcattttatgagtggcaggttactttcttattatccagcagtaatcaaggtggtcttatttacattttaatattctatagtgtttatttttgtatcaagttaaataaatggtctcaagaatcactttaagcagtctagaaagcagatgttgaaagacctacctttttctcagagtcattaaatagaatatgtagaaagttaatcaaggaagttaaattagttctgcctataaattaagaagagcggcagttcatttcccttatcttttaaaaataaaactgaattcactttttacaaaccttccagtttggtgactgcttttttgaacctctagtgcctgtaatgtgaaaaacagggtgtgaattgtttggacttaccatcagagagatatttcagtgtgtacctgtcagcatgccatccgacagacgtaaatgtcaagtctaatgataacaagaactctgatttggaataatagagttaagcttacattcctttaagaaaactgaacacactagctcagcagtaacatttatggttaaacatctgatgactagccatgtctacctgtggagtcgaataagtagctcatggcatgtgctttggagtgaggtccctcttggcttgtgatagagtttagatatttgtttccaccaaatgtcatgttaattgtgacccgcagtgttggaggaggggcctggtgggaagtgactggatcgttggggcagatttcccatgaacagctttgcaccgtccccttggtgatgagcgagttcacaggtgatctggttgtttaaaactgtgtggcacttccccctccttgctctcttgctcctgctctcaccatatgagatgtctgctccccctttgccttctgccatgattgtaagcttcttgaggccctcaccagaagcagatgctgatacagcacttcctgtacagcctgcagaactgggaggcaattaaacctcttttctttataaatt

SEQ ID NO: 133744 - DNA, 1757 bp, Homo sapiens
attatcctgtgtatctttctgtaattaatactttttcaataatattattcattggatttatctgtatttactcttaattctttcaccttcatgcttatacaggtaacattctatttataattatgtccttgttttattaattctcctatggatggatatttaggttatatccatttttttgctagtctttgtatgctcccttgaattttattgtacatattttcttgggtatttgagagattttctagggtatacatatctaagatctgatggatgctgggatatgtgctttgtcaactgaggttctcactcccctggaagtgtgtgagatcagaatgcccctgccctagcccttacttatattatgtatcagcatgattgatttgtaatagactaataagggtaaatagctgagtgtatgccttctatactgtaattttactttgttgttcgtctgtttgtttaattggggacccatcttttttcagattgttaattttgctaaagatcttctttgttctcagagttaattatcccttaaggaattccatgtgtttatttttctctgttccaaagttacgattctgtgctaaagtcataattatgaaatcatcagtttgttcatactttaaatctatgcttctcccttgtggttgacagtccccaaggcaggcatccatgaagtcaaaaggactgaccaaagtgtaatctgccctttttactgggttggcatttgtgctaatacactgcaaaagcagtggtggataaactgacagcaccttgcaaagcagcaaggtggtgtcaccaatttgtcattatttatgttaacattaatgggttcatttgtatttttaaatgaataaacatttaaacaatttcttagttttgatttctaatagagtaactatagatcagtagatgccaactatagtgtcttcctttaagagcgtgaaggggcctgagactggaaagctggagaagcaccgctttaagcacatggtagacgtatgaatagacaaatactttattcttgttgaacatggtcattgggaaggaaaactgaggtaatgtcattctattaaaagatgaattaggctgatcttgaagttgtatactaatcttaagtaaattttcaattctttgccttaaaattttgtttacaactagattatatttgtaaataaaatactttgcaggtgctgaccttaaggaaagagccaaaatgagttccagtgaagttggtccttttgtctccaaaataagagcagtgattaacgatattggtaagcactattaagttcttctttcagcatgccgaaggggttcttaaatgtcacatttaaaaagttacacattatatataagcattggttaaatatttatataattagataatcatgacctatagctgtttaacgtgacacttaatatatttaatttgaaaaattatgtaaaatatttaataattacagatgtcttatgtatgataaaatatgaaggtatttatttattagacaacaataataatttgccataagcctttgacttacaatatctatatttaactatatacatgcaaacatacgtttgggattcctttgttttttaaatatacaggatcatacttttttaagacttacagtaactatcaatttattttatttttaatttactgctgtatattaatccagtcttatccaaaattttatattatttcttcattaatgaacatttttttcctctgtttatgttattta

SEQ ID NO: 133745 - DNA, 1055 bp, Homo sapiens
ctctgctgggcgcggtggctcatgcctgtaattccagcactttggaagtcgaggtgggtggatcacaaggtcaagaattcgagaccagcctggccaacatagtgaaaccctgtctctactaaaaatacaaaaaattttctgggcgtggtagtaggtgcctgtaatcccagctactcaggaggccgaggcaggataattgcttgaacctgggaggcagaggttgcagtgagccgagatgacgccacctcattccagcccgggtgacagtgtgagactccggctcaaaaaaaaaagaaacctcaaaaacacagtgtaccgtttattgattatccttttagcctcttctccatcccttgaaagtcatcattttccctcttctttttcttctcccacaaaggtttctctgtatatattaatactgtattccagtgataccttgctcatttctaaatatttaaagcttagcaaatggtcttgcctcaaatttcttgagcataggaactcctcttattctttgagaatcatcttttacattctcagaacacagcaaacaacagggactcagcatttatttgctggaattaatcagcctttaaactgtgctttaattcactgatttttttcaggaatggttgggatataataagcagcttctctgaattgtctcataccactctcctatttactgatagtaaatttggctacatcttttttctaaaatgctaggaaaacagataaacattaaagagattcctacattgcattggaggttgggccaagtgatttctgacttctcagaaatctattatttagcattattaagtacttcacttacattttaagttttttaatcaatttttagtttaaaaaagtagcatggtaggtcaaaatgtatgaaaatgtatacagagagaactctctctaaccctacttcctctactttattcatcccctaatataaataattattatttttgtcctagtattttactttattttatatatatgtatatatatacacaaatacagtcatgtgctccataacaacattttgg

SEQ ID NO: 133746 - DNA, 1071 bp, Homo sapiens
tagactggtagtgagcagcaaatgcctttcaagaaaataggtggcagcttcactccatgtcatatatggagtgaatatttcaaaacgttgggaataagggcctgcaaaaggcagcgaggaggcacctcgggtcttgaggttcctgacaaccgatctggtctgttggtttgaggatgaaggggctccatttctgctgcctccctgctgagaatattctccctttagcagccaaagattcgctggaacggaggctgccctctgctgcctgttggggtcggaagacaaggggcttctgaaatgggagttcctgagatacaacaaaatgtgtgccttcaaagaaactgacagctttgtatttggtgaaatggttttaattatactccatgtgtattttgcccactttttttgggaattcaagggaaagtgtttcttgggtttggaatgttcagaggaagcagtattgtacagaacacggtattgttatttttgttaagaatcatgtacagagcttaaatgtaatttatatgtttttaatatgccattttcattgaagtattttggtcttaagatgactttagtaatttaactgtttatgttacccacgttgggatccagttggtcttggtttgcttctctctgtaccacgtgcacatgaggtccattcattttacagcccctgttacacacagacccacaggcagccgtctgtgccccgcacacattgttggtcctatttgtaaatcccacacccggtgtatccaataaagtgaaacaaagcatgtgattggctctcttgcaggttgtaaggatgcgaggcagcgggaggcagtgctggatgacggagacgccaaacggtgatgatttgagctgagccctttctgtgggtttgggaggtttgccctgagccaggagccccatgctaatggggatatcccttggcagataaatgatggaactagctccgtggcttctctctgttaaggtctccaatgcaggttagttaattgcagatggtgtgaagatggtctttggttttaatctcatcccctcctgaggtcccagagcccctga

SEQ ID NO: 133747 - DNA, 1037 bp, Homo sapiens
atgtgtgtgagagaagcttcgttcaggcatgagttatgaggctgttggccatgggttcaatgtgaaggaatcaacagtacacattgaatatggtgtctttaaacagaaacacacataaaccaaggttatgtattggttggttggtgaaagtattatgacgagaggctcacaggaatttgactctgtatttcccataggagcagtggttcagtattcactaattcagtgttccctgtagctttctagaagataattaccgcagataacaacctattttagtaggtgacaaaaatcgaaaccttcccttggaagagttcatagcagagcccccaggtagcccttccttccagccctcactgacgcttgctcttttgtgaccgctctccttggcaggttactttctgaattttctggagccagtaaacaatatcaccattgtccaaggccagacggcaattctgcactgcaaggtggcaggaaacccaccccctaacgtgcggtggctaaagaatgatgccccggtggtgcaggagccgcggcggatcatcatccggaagacagaatatggttcacgactgcgaatccaggacctggacacgacagacactggctactaccagtgcgtggccaccaacgggatgaagaccattaccgccactggcgtcctgtttgtgcggctgggtgagttggacagtgaaattgtgtgggttagcagatatgaaggttcccagccaccgagcaagaggtccagttgctatttgaaactgaacacacaccagtcagcacgaggggagagcaatgaaaccgttccctagggccttccccatgtgccccagggcccagcttgacctgttacccatttactagtaataagagaaaatagggcgaggcacggtggctcacgcctgtaattccagcactttgggaggccgaggtgggcggatcacctgaggtcaggagtttgagatcagcctagccaacatggtagtagttggccagtttagtagaaactccatctctactaaaaatacaaaatt

SEQ ID NO: 133748 - DNA, 1051 bp, Homo sapiens
gcaggatgtgttggtgaggaaagaagttggtagatctcaaaatactctgacagtaaaaataacaataattggaggcttaaaatcagagtgtatctaagcagtaggaagcagttcaatgtgtgtggtgtgtgtgtgtgtgtgtgtgtgtgtgtaagtgattatagctcatagcatttaaagtcttttgtaattgggggactttgctaaattaggtaagcctataaaaagtagttaagctagccacttatgtataactttcaaataagcagaggggaaaaatggagcatttaaaaatccaatagaagataggaaagaaaaaataaaaggcaatggaaatattaaaaataaaactcatcagttaaaaatgtagactcaaaatgtaaaattatatgccacttataagagttatatctaatacagaatcataaaaatgataaagatattaaaaagataaaagtagggctatgttaaccaaaggttccctgaggatggctataataatatcagataaaatgattttctaggcagaattgttgcttagtgatgtatggaccaaatgatgtaataaaactgaagttgggaatgcatccagccccatcatttcccatatatcaactcaacttgacagaattactaaaagctatttgacaaatgcaaagtctttgaatctagtagataaacatattaaaaatatgaaaaacaaaatcaacaagcttgatcaaatgggcacttaaaactctgccatgaatgtagaataagcacattcttactacgcatatgtggaccatcttcaggaagccgactctgcggagcatatctcagtggcttcaaagaattgtgatcacacagaccatgttctgtgacaacagtgcaattaaagcacactttaaataactcatagctaaaagaaaaatgtcataagatatattacacaatatttgggtctgactaatgatgtgaagattaattaattggatggctaaagaagagtggaaggaaaattttacacttaatgcatacatagaaaaggaaaaagatataaaatgaatta

SEQ ID NO: 133749 - DNA, 1032 bp, Homo sapiens
cagaaccaaagctttgttgacaagcttacctgtgaagctaggagacctgcgagctgcagtcctggagaagagggatgagcacattgccacagggtcagcccctggaggtcagatgagagatttcctccaccctggctccagatgggaaacacagaaggctctcccatgagaaatcagttgggactggcatctctggaagccagatttacattaccagcatgctataggaaattccaagccaaaaagttaagataaaacttggcactgcctgtcaagggaacccagtcctcaagggattccctcagaaaaaccagccttacaataaaaaaattacacagcacacttgtcgaggcccaggatgagtggcaagctagtaaacaatgaagccagaaggattaaagatgaaaggaggaaacagaaaccacatagaagaaaaagcagtggtggatttgaaaaggaaccaaacagaccttctagaaaagaaagatatagtccatgaaatgagaaacttgatgggtatgttacagggtagatgcacacagctaaagacaaaaagggtaaggagtattaaaaatagggagagagcacagtggaattatcatatgaggaaaaccagcatatacctagaaggatatttaatattttatgaaatactgatagaggttttatagaattgacagaaagcacaaatcttcagatttgaggaagagcactgagacctgaggaggctaaaataaaaataaatttactattaatgatagacaatttggaatggcaaagacaaaggaaaaatattgaaaatagcctaagaaggggaaagttcagaatacttgcaaagggaacaagaactgcaggacttccaacagtcaccatagaagccagaggacagtattgcctcaaattctatacccaacgaaactatcattcacgtgtgaaagtcatggatgttttcagaccaagactaagagtgtttgcagccttagtcctttacccaaagaatgaatgttattcaggatgagctcaattgaacct

SEQ ID NO: 133750 - DNA, 1043 bp, Homo sapiens
ttcggtctgagctccaggcattgctggcaacccttggtgcccatggtgctctgtggctgtggcggcatcactccatctctgctctttcttccctctaggtccgtgtctgaaattccctcttcctgtaaggacagtgttgttggattagggccctctctaatcaagtaggactcctcttaacttcgttacatctgcagtgaccctgtttccaaataaagttacactcacgggttgcggggatgaggacttcagcatgagtggctgggggacacgggtcaccccaccatactctcagtttcttcaaaggtacaaacactcttaggtggttttcttcatctcgcaagtccccatgcttctagttttccccgttttatctgactcccatccttcctgacactgcccctggttttctgcagctggctgcatgcaccactcaacagctcagtgggaaagcccgagtggagtggccactgttccacacccgcaacggatttattaacctggaagtatcttcccttgggaggagcagctttatgtccttcctgcagctctcaggatttccattccatgtgcccttccaggaaatttgttttatttcccgctaatcaaagcgccatgacctcatgatctctaatatgtaaagttttcttgatcttcctggactgatcagtgtgacctggtaaaagcagatcctcaatgcctaagtaatttgaccaagttggtgaatacttggatgattggctggatttaaaaatcgtaagtcggctggacatggtggctcacacctgtaatcccagcactttgggaggctgaggcgggtggatcacgaggtcaggagatcaagaccatcatggccaacatagtgaaaccccgtctctattaaaaacacaaaaattagctgggcgtggtggtgcatgcctataatcccagctactcgggaggctgaggcaggagaattgtttgaaccagggagttgaaggttgtggtgagccgagatcacgccactgcactccagtctggcgacagagcgagcctccgcctca

SEQ ID NO: 133751 - DNA, 1045 bp, Homo sapiens
cagtgggtctggggatggggaggggaatgagttgcttaagaaattctccaactctgaatttattacccagttaccaggacctccatctggagggcagtctgcggcatctggctacagaagtgtttgattttgccagccagtgctttggtttctttctctccctctccttcccgctctctgtccctctctgaatgaagcccaggctccactgacttatttccatacctgtgttgcaaagcccccgcatttgctattcttgtgataagcttcaaaatcacttttactgttacatcatatctttatatcactataaaatccctctagaggttaccataatgtcttatccctctgtgttttctacaaatactgggtagttttgctagaatgctgttgtctttgcataagaagcaaattaaaggctcctgaaaggaaaacttgtttaatacctatcctggtttctttttcccaggtgaagtggaggttctggatccgaacgaccctttaggaccccttgatgggcaggacggcccgattccaactctgaaaggtgagctgggacatgcaggtgctctccatgtcctccaaatgccctgtgctgaggctcatcttgcactgccattgcctgaaggaaggcgctgggggtcctctggccccttggtgccccctggtggtgggtatggtggaatgccaccttgattcctgtgtttcttgacttggagggcattgagggcctgttggggccacaggtgggaggtgacacgcagggaggcatgggtggacagatggcggcctggcagatggggaaagggcctgagcggagccttaggagctggattcctgttgcatgtgactccagaggtgtgtgtacgtctcagtgggcagatggacggccctcctcctcccagccacctggaattctgtcttgtggcttcagttcttcccctgggcctgtggtcagagccatgctcacttggcacaccttgcaggaatgcaccatagatttgtagggtcaatagaacaagtttcccccggatgcagacctgtg

SEQ ID NO: 133752 - DNA, 1040 bp, Homo sapiens
tctttgctattgacatacttctcctgacccaggtcccagactaataatggccttaccctttcgggactttatacgctgctccttcccaatttttaacttttcttccttaactgttgcctttctagcatcatgggtgttttcgatctgacgtgttgccgagctgagtagttgttgtggaacacatgagtgacatttgcacgtgcaagtgggacagtgggtgcacagagcttgctcgcagcgtagctcattgtgaaatctgtccttgccattcattcagggggtgtctggtttgcagcaccgtcactttctcaggctgtgctttttccctgccgtgacttctgttcttaaacacatcctgcaaattataccttcacatgaggacaaccaaatccaagaatgccaagctctggtgaataaaatacccttactaattaaaaagaggctgctttgaagttgtctgaacatcctgaagactgcatctaattgcatcacagtaagcataccgattcagatcaacaggtgaagagatgaatggatgaacagtctgaataacaaagcatgtttaaaagaaacgcaaatcaaaaccagaatagcaccatggactcaaatccaagggcataggtgaaacttcattaataaatgcttgcttaatggtgtgactgctgttaatgagagaatgattgtgatactagaggtagagccttggaatcagaacagacgtgcttgctactttgcagatataaatttatcttttttttgagatggagtcttgctctgtcacccaggctggagtgcaatggcaccatcttgtctcactgcaacctccacctcccagattcaagtgattctcctgcctcagcctcccaagtagctgggattacaggcacctgccaccacgcctggctaatttttgtatttttagtacagatgggatttcaccacgttggccaggctggtctcaaactcctgacctcaggtgatccacccgaggcctcgacctcccaaagtgctgggattacaggcatgagccaccacgccag

SEQ ID NO: 133753 - DNA, 1042 bp, Homo sapiens
gcccacagagcccagggtgtcagccccacccacagagcccagggtgtcagccctatccacagatcccagggtgtcagccccgcccacagagccagggtgtcagccccatccacagatcccagggtgtcagccccgcccacagagccagggtgtcagccccacccacagagcccagggtgtcagccccacccacagatcccagggtgtcattccccacccacagagcccagggtgtcagccctgcccacagaatgcagggtgtcagccccgcccacagagcccagggtgtcagccccacctactagtcccagtgtatcagccccatctactagcccagactgtcaggcccacctactgaatccaggatgtcaacccctcccactgagcccagggcgtcagcgtcccacccaggtacccaggcatagcttagtcacactggaacctcaaatagacattatcacaactactccagaagacagatctgggaagacacaaaaattgtagagtgaagatgtgccatgagaatttggaaagaaaaggtaaaacatgtgaaaatgtttttttttttttttttttccttgggacaaggtctcactctgttgcccaggctgcagtgcagtattgccatctcggctcactgcagccttgacctcccagactcaagcagtcctcccacttcagcctccagagtagctgagattactggcgtgcgtcaccatgcccagctaatttttgtagagatgaggttttgccatgttgcccaagctggtctcaaactcctgagctcaagcattccacctgcctcagcctctcaaagtgctgggattacaggcatgattcactgtgcctggccaaaagtgttctttagaagcatacagatcttccctggggaacgtgttcagtctcaagtgagccctgcaccgatgcccaggccctctgacccttgaggttttgctctggttttcttcaggcgccaactcctccagcctggggatctttgcctgggagtgccaccagcacttgttcttttcatggtctcatc

SEQ ID NO: 133754 - DNA, 1106 bp, Homo sapiens
tagtaagcttttcatggacacgagagccttcacatgaagaatgaagactcaaagcaacatttggagctgaacgcttctatcccagattgaacaaagagcagtaaactatggaaacatggcaagacagaggggtttgggctagggtggttaattatggagaagtgtccaattaaactcctccatgctttgaattctttacatatgaaaatgatggtgggagcaaaaatgtaagtgggggtgggagggggtgagattctgttccctctgtaggtttcatgcatgcccataggtagcagagttcccaggggcccttcctggctgcattggtctcatatcctcatttctgcaaaactttcccctccaagaggagagtgttccaggccttttctcctcatccactttttacatggtgtcagacttggcatctgttttggtaaatattttaaatagggctgaagcccatgaagggctccttgctgtctgcaagccagtgtgtgtttgcacaaataacgagtctctttggaagcgtggctgtgaactttactgtggcctcgtaactacacgtgaagcccgctgggaatggcttgggaggacaacagcagtgcgtgggcgtgatgcccacgtgctgtgctctggtccctcgccccttcctgttttccatcttgatcaggaagctgatctgcctcgatggcctcagttttgtgttaacatttttaatacagtaagctcagtaactcaaattagagaccacagagaaagaggggccacaaagaaattgctcctttccttgaggccacgtgtgtcctcaaggagttgacgtttctggacatctcaggtctctctccagtcagcaactgtcatgttcccatcgttggctaagagaggtgctggccaacagtgctttgcagtacaccacagatgacagaaatatctgcactggtattattctctctctctctttttttttttttgagacggagtcttgctcttgtcacccaggctagagggcagtggtgcgatttcggctcattgcaacctccgcctcccgggttcaagcgattctcctgcctcagcctcctgagtagctgggattataggcgtgtgcc

SEQ ID NO: 133755 - DNA, 1041 bp, Homo sapiens
gggcaaaccacagaggcatatgattgaggtgaattctacggtaaggagacagatgtacatgtgaaaaagaaccacaaacattggctccaggtagagagcctaatgctatggctttcagagcataataaattgagctctgtaagtcaacacagtctttggctgggtctctctttggtgaaggggtagaatgaagcctccctctttttattttttggccaaagtgggaattatctgaagacctgtaaaattaactatttttctttacaaggagaaagggacaaggcagaaagtcccacgggtgtgagggattactgggtttctctccaccaatagcacagttcacacacacccagctccaatccaaggcctatttcagtgggccccagtgtgtgcgacaggccacacacacgtgtgtgtggggggggtggggcggggaggacaggccacacacacgtgtgtgcctgaccctcagaggtgctgatcccgccttatgttggaaataacattcagtgttggttttcacagtcaccatcaatccgtggattagcttctgaggcctcccctgacatcccccctccccacatgcccggcccccgcgcaggagcctgaggatgtatttgttttaagattacctacttgggaaaaatagaaggatcgggtaatctcaacgacctgtttgctaaatccgcccgttttcttctgcatctctacttccaagagatgtgatgtagggatttcacacaaacacacacaaggagccgaagggattgtgtagatttcagcagagacgaggagtcaagtgaatggaacaccgagaccaagtttgtccagcctgtgggccacttgtggccaaggatagctttgaatgtggcccaacacaaattcttacactttcttaaaacagtataagattttttttttttttttgcatttttttaagctcatcagctgtcattagtgttagtgtattttatgtgtggcccaagacaattcttcttccagtgtggcccaaggaagccaaaagattggatatccctgact

SEQ ID NO: 133756 - DNA, 1078 bp, Homo sapiens
gaagttactaatttgcagttctgtgacacagatttgcgtaattagaggatttgatcgccaggcatgtgaaacctatacaaatgttggtccatgttcttggaaagaagtcaaactttgaggctgtttgagcgagtcatgattctttaaagttgccacaagctgaattgatttagtttggcagaaactacaaaaacaaacacggagtttagaaaaagcaaaggctcatgtgatcaccgctctggccccagagaaaaggaaatgcttcgtaagttgcattgcggaccagagcgtgttgaggctccctttcccccacctgataattttcagatcgtctggaacagctataaacaaaagctggagacgctaaaacagcccatagccccttcccctccctctcctccctctttcccctcctcctccctccccttaacaactagctgggcctttgttttctttttgcttttactccctaagtaaatcttaatcactgtcgttaaacccagccttgactttctttccgttcccatggataccagatggggcctcatattggcgaggtggccataggactgcaggacccaggaggccccgacgggtgcctggcaggcgaagggggtgctgctcctggcgctggtggccgggtaggatgatcctgagcatcagtgcctggcccagtacagcttgagagacccccttcactccccggaggagacgtgcacaggtggccaagctggaggagcctgcaagttgcaggggtcagatgtagcaggtggcagccatcaggatctgtccaagccgaaccccttccctggtgccttgaggtagagaccatctctgtcttgcaggtcactgtctctatcttgcacggccacctgcagtggtcctatagctgcattggtctgggatttaccaggagccctggaccccacgaaggtctcctgccttccttggtggaggcacgccagggtcctggcatgaactcagggtggggacagtccagttctgcccctccctgctgggtcccggccttccttctcgactctatttcagtaaagtcaggttggctgagagaaatgcc

SEQ ID NO: 133757 - DNA, 1051 bp, Homo sapiens
aggaaaaactcaagttgactgatttgaaaatacaggatgaggaaaacttttaaagataatttttgttgaattagatatgagtcataatgaaaattgattagggttttgtattcagatgcataggtgcatttagacactttaagaaaaccaaaccaggaaacagatgaaatatgtgatttgtgaagaaattaatgtgaacggcaatgagtagattttttactcaaagaaagggctgggctgcacatctgttgattgattaatgatggttcatttatttgtattacgttaaaaatatttattgtgggtgtggatcattatttatagtacctaactatcatttttaatgtttccattaatgaacattcatatgaatgaagattcgtatggatcttggttatatccgtaggaaggcgtcagctggtccagttccagaatatgactgtgccttcatttcattgctccctgctctagttatttacaactttctttcccttggtttcaggtaacctggaaatattcacagattacacctgagctcacagccttctttgagatgtgtgcttttttttttttttttttttttttgagacggagtctcgctgtgtcacccaggctggagtgcaatggcgtgattttggctcactgcaacctccgccttctgggttcaagtgattctcctgcttcagcctcccgagcagctgggattacagttgcatgccaccatgcccagctaatttttgtgtgtgtgtgttttagtagagacggggtttcaccgtgttgcccaggctggtctcgaactcctgagctcaggcaattcatctgcctcagtctcccaaagtgcaaggattataggcgtgagccaccgtgcccagccaacatgtctgcattttattacaaatgtgcccatacacttctgagaagggtagagcatgttaatctgtatgtctcactctggctgcactccgcggaagcgactgcctgtgaagtttaattggcttggaggtgggacagtgccatgatgtctagttaacatatatttaagttatacctt

SEQ ID NO: 133758 - DNA, 1084 bp, Homo sapiens
caggggctgtgtctgcaggggtctctttaggcatcttcagctccatcaccatgtgttgtaagacatgcctggcctcaggctcctcatccctggcccacccacccacagtgacgtttgtgcccagagacataaggcagggtgcattcctgtgctggactggaaaagcaatcatttcctggcagagtgcttggtcaagttgtaaagtggtctcacttgaacagagcccatgctatcgggttttattggagctgtgtttatcttgagctctgcaggagtcaaaagctcactggaacttttaggtaaaacctgtgtgtgtgcagatgggccacaccttccttggtttcaggacaacagttttgctcggctttaaaatcgcaagagctctcatttgggatccatacctttggagaaggtcctgacaatttgactccacttaggtttttcatgttggaatcttaagtgttttgatagatgggtccctttctcagtgctgtgtgtctgcatgaatctcgctgacctttgcttctcatggctgtcacagagcagccctgctgacgacgggactggtggggtattttgtcccagctattccatgcataaggtgtagagaatatgtcttctgccatggctagagttaaataaaggaaaattcatgccaggctgagttcaggattgatgtttgctctgtgtctgcattaaaaaataaaccacaaacatggttgtcctccagcagggctggtgttgagttagcagctgccaaatgacttgtggatggtgggtttgcacgcggggacgtggtcctgggcatctgtggcacagggaagggaggagatgaaacacagctggggctctgggcaagtccacccagcgatgctcaggaaagccaggacctgagtgggctcccgtagcccacagtttctggtcttgtttcctgagccaggctgtgcctttttctctgggtaacaagatagatttactgacctttgccatggagatcatgtactttggaacccgagacctgtttttactttccatttgtcagctggaacaaaagccggaatgagctttacagtctgcaggccca

SEQ ID NO: 133759 - DNA, 1088 bp, Homo sapiens
tgttgagttttccgtggactcatgtatttattaatgtgttaatcacttccatcactctgggagtgaacacccacaaagttccaggtcatccgtgcagatccctctgtattctgtgctttgttttgctttgtaaaatgaggataaaaggagcatacgtgagctcaagggcggtcaactgatgggccaatggccggggaatgagactggacccacgtgatgcctgtttcagtctatgatttggctgtgggtgcacaagctctgctgtattacatataaggagctgtttcagcttgtctttggtagttggacacagtcttgcaaatcatgccattaatgcatacagcccatgaccacacatctataatggtctcacatgtataggatacaacaaatgcatgcaatgaaatggctagagaatgaaacagagctggagcatggggtgtggatctcaggtccttgcgtaggaacaaggggctgccgctatctcatttggacacgcagaggggatttggatgctccaggcctgcctgggagacagttgagagagtcacccaggctggcatttggttctggccatcaccgcctcacctgtcttggttgttggtgtgtttgtctctcctcattccctgtgcgctgggcagatactgactgagaaagtatgggcggtgctgttgtagggccagggagcatggccagctcaggaggaaggcccccagctggggatccagcctcgctgcatgtggccccaggcctgaaagaggggagctggcatcaaaactggaaagaaaacgtcagacatctctcctgtctcagtgatgtgggtttattttaatgaacagaggcctccttgaagcaattgggtatggtgggcccgtctggagggtgcctttggaagtgtttgttcttgtctggggtctgtcactggaaggctctgggttttcagtgcactgcagaactacaggtttcctcattcataagaagagaaggttagaaagagaaagagaaacgggtaacgttatcccgggccgttgtggcattttaatgtcacacgtgtgttcctgtgcagctgctggtccttgctctcccgg

SEQ ID NO: 133760 - DNA, 1336 bp, Homo sapiens
taatctggagactgttttcttaagcagagtcccagagtaggagaggcgtcactgtaaccgagtgaagagcgctggctggaagtgtgtaacctgccagctgatgggcttaagagcagcaagtgccttcatgtggtttctttctttgttgtcctgtgaaagaactcgtggagatctcttaagctctttattgctgtgtagaattactgtatttgaaaagtatactgcaaaaaaaaaacttttagccttagctttcacattgaggattttgtagattacagagaactctattgaagactttgctgttgaggtgagcattttgcaaagtataaaacttcctggctaaggggagtactgtgtccatttaaacttgccacttgaagaagcccgtccgctaaagtgatgtgacagcactttatcttctgatcatccccctttcccttcagagagaaggaagatgtaaaggggtgtgcaacatctgcttaaataaaacatatgctacagttggaccgaccaagatgtaatttatcttgttactttttttctgtgctcaagttatggtgaaagttacctatctttaataagttattgtctaaaatgagcacatcctgaaaatatcctggccccctggtcccttctgacatgccagcatggacgtgggaagcagttgattcttgagactcacatatggaaggagagagtgggtgtgagtgatcgctctggcagggttgctgattgtcttgatttgtgttgcagtcctggccagaagccttccacatgctttgatctatggcagcgtctctgcaaaatttggcaagaaaatcctaatgtgtttaagtcataattaagattgtgtagcagggctggattgttcattccttctccatgtgtgttgacagtgctccttatcccctcccctgtctctgtccatggctcgtgttcctggcctcctgagggacaggtggacttggggcccagcgtgggcttgtggacttgtggcaggacttaggattctcttcattgcaagaaccaagccttgttctggccagaatcactgataggtggatggaaacaggtggatctctttccctgggtgcagtgtccagtaattcacataatctaacaggaatcctggggcctttcctgtcgaatttgaattcggggaacacagaggtgtgcagtggaaaaggaaattagtctgcacatgaggttaaggatgggacccttgcatatttaagggggtccaggagtttatctcccaaactaagcccgcctgcatcttttcctgaacccaccttattttccactttgtttctgcgtctgcttccttgtgtgtctt

SEQ ID NO: 133761 - DNA, 1016 bp, Homo sapiens
tttgggcttatctttttggggattcaccaaatttattttgtgggtttacatttttttgccacatttataaagttcttagtcacttcgtcactctttttttcttcttcttctgggaatctggggatataaatgttggaccatttcattttgtcccacagaagtgatctgtttatttcttttcaatttttttctcttttgttcaccttgtataatttttattgacacttctctgtccttattcccattgatccctttcattgaggtttttcttctagttattatatgttttccttctaaaattttcagttttctcttttttatattttctgggggttttttgttgagacattttatctttctgtttgtttccaaagtgctttacttgttggcaatttttataatagttgtattgaagtctttgtcagataattccaacatctgtgacatcttattgctaatgtccattgattgagattttcctggttctttgtatgttgagtaatgttggattgcatcatggagattttgaatattagattttggtggtgagactctgggtgttgttcagccgttgtggggaatgttgatactgttttacgggcagtcagtctgtttgggttcaggctgcaagttccgaacagccttccgtgtttgcagtcccaatgccggttctactttcaaagcctctatagtgctcttggatctgtcccacatgtgtgccacactgtggccagactgggacgggggtggtgttctgctgtgcagttctgttctcaacatctgcttagggtcagatacacacacacacacacacacacacacacacacacacacacacacagctcatgggtggtctcaggaacttgtaaacaactttaaagggtcacttttctgagttttcccttctccatcatctccctggtattttcaagttccttaaaacacccatttcagtcctctagcccaacatcttgggttttagttcccttgtttggctgcatactcaccttgactat

SEQ ID NO: 133762 - DNA, 1214 bp, Homo sapiens
ttcctcatttctactgaagagctgctaagggagttcttactctgcatatttctgtatttccagcccagcctctgtaatataataaaacgcacgccctgtgtttcagcagtcgacagtgctgcttcataagcaatgtgtagtataaggaacacttaataaaatggcctataaacacaccagccccaaggtaggacttgggaaatactagggtgaaagaagaggtaacttactagtagcctcataaaaatctgtacaggaaaaaaatagaacaaattctggctgtgtggtgtaaacactgcctgattcctcgtcaaggtttggcagtaaagtgaggaatagtcattggatgtattggaaatcttggggttcatggacatttgtcaggcttcccttgggtggtggtgcatcattcacagttaaaacgacgagatgcaccccaggacgaacggtgccagcctgagagtgtaactccgagtgtgtttacatgagtggccacaatctgaaaactttccttttgacataaactcaggttatatcataccaagagtgaggagtctcttttatgctgttttccaggaaaagggagaaaaaacaaatgagggtgaataagtaatgtaaatttttttattataattatttgtggagaaaatgaaattcctccacagatctgtttttgttatctgttgctgtgtaacaaaacactactgcacaatttagaggcttaaatggataatgtgttgttacagcacacagttctgtgggttgacagggtctttcctggggtctcttgcgtggctgtcgtcagatgctggctgcggtaagatgctggtgggggctgcagtcatctgaaggctcaactgggccagacatgaagatggcgcactgacatggctggttggtggtgctgttgggtgctgggggggtctctcgacccaagaacccatacgtggcctctccaggtggcttggccttctcacagcatggtggctgggttccaaaaaggactctctcaagagggagtgtgttaagggcagaaagtggaatttggccacttacaggcttcattcagaaccagcactcaaggccactttctttgcattctgggggtcaaagcaatcacagggcccactctgattcaggagagtggggaaacagactccagctcttgttgggggagtgtcggggacaccatatggagagcatgtgagatggaa

SEQ ID NO: 133763 - DNA, 1067 bp, Homo sapiens
aagttgttcagagtcagttagaaagcaaagaaaaaatgggagagccataaacatgaaaaaaatggaagagccataaacatgaaaaaaaaaaggaagaacctcaccaacctgcttcgtggacagcctgtcacactagagtgggctttggcagcagagaggagtgaataaagaaaggacattgcttcccgtgcaggacacagccagccagaggtctctgagcattgccagcccctttccagtcttgccagtgatttcctcctgctcgttttgtccagttgccccttgtttcttattaatgcacatggacacatgttttattctgccatttctgagcaagtggtgtggcctcgatcaccctctgagagcagagtggaagaggacgcatgggcagggaggcagaagtgttgattacagcttcaatcgcatcccagcctggcttcacttgttcctgggtaggacagagacattaagccaggaaggagttttaggagtgtcttgcagtagtggctagagatctaggatgaaatggtgtcttcattgagtcttgcaggagggtatcagcgtccagtggaagaggaggttgtgattcttacccaggtgtgttcctgcatctgcgtcctctaatctggcactatttgcttcccattgagcagtggtgtttgtagtccattgtttgtacctttaagtctttaaatccatgttcagctatgctctaaataaatggatctcaaaaatataaacaggcagttcactaggaggagaccttccaaacactcatgaacctgggaaacacagttaaaatcacaaggaagtaacatcaaattcacaaaagtctagaaaaagcattgatgccatcaaatttacaaaaatatagaagtctgacaatacgaagtgttggcaaaaatgtgttatggaggctgggcatggtggctcacgcttgtaatcccagcactttgggaggccgaggcgggcagatcacgaggtcaggagtttgagaccagcctgaccaacatggcaaaaccccgtctctactaaaaatacaaaaattagctgggagtggtggctcg

SEQ ID NO: 133764 - DNA, 1228 bp, Homo sapiens
ccagtgttggaaaagaacaggcctttatgttggtggtaaaatgattagaaagtaataagaaaaatgcaggtttggacagaacattgttttgtttaatcagttctaagcccaaatgaaaaaaaaagtgcccttagaagtaagtttaaaagggattacaacatacatgtgaacatttctcccatctagtttatgagtttaaactttaaggggaagggggcagataagtctcttatttcttggtgtccagtgaggcaatttctctaatgggaaccagaagcagagagagtaagaaacatgctgatgtgagcaggcacttttgaggtataagaaactgtcaagtgattattcacacttctgttggctgcgcaaaatccggatatggtgagatctttccagaagccgaaggaaaaacctggaatctgatcaccttgtgaggagaaatagggatctgaggagaattaattctgttgtttttaaagtggtgtttctgaagataaactggatgaggacagcattgtggggaagcgggggaaccaagattgcatctttgatgttcagccaagacagagtcagggctacaaatatacccagtggagcggcactggcaaggaaggacacgcagtctaaggagagatggtctagggtgatgctgctttttcatcttcacaatattgtatgcactgcgtgaatttctcttctagaggaaggaagacagattttggaaaacttttccagtaatgtgttctatggatttcatccttttttgcaacattaaccttgggcatttgtcaaagatggaggctgtttgaatatttttgaaagattgtgacatgggctcaagttttcttgatacacaagcagtctcagctgccacaggtgtctggtgggaggtactggcacgcgggtgacatggagggaccttggcttccctgtatcaccaaatgcctgaattaccaattaagagtagagtcatttttttaaatagatttatgtatttcttttttcttttttgagacagagtctcgctcagccgcccaggctggagtgcagtggcgcgatctcggctcactgcaaccgccgtctttcatgttcaagcgaattctcccgtgtcagcctcccgagtagctgggattacaggcatctgccatcatgcccgcctaaattttgtattttagtagagatggggtttcaccatgttggccaggctggtcttgaactcctgacctca

SEQ ID NO: 133765 - DNA, 1602 bp, Homo sapiens
ctggctgtacgtttgtcttgcccttgaatgggaacactttgtcatgtataaatcacacctccataaagttgtcatgaataaaggggtggggttctgtaggacgtcttggggttgtaatcctggctctccagtgtgttttttgggcagatcatttagtatcttgggtctcaaatgtccatctctgaaacggggacaccacttctctccccacagggttttgtgaggtttggggcatgggatatgcacccagcactaagcacagtgccagccacatggtgttatccagatgacagctgtcgtcactctgggctcttagttggccacaggtcacctttcctccgagggaagtttgggatggaagtggttagaaaggctctggacacaagactcatttgcagagaaggaaccagataacggatgcttcactaaattggcaaagccacttgagactttctttccagaaccggtgaccatgaggggatcagtgattgtagacaggcttgtgggagtcagagaggcccaggggtgtggcccgaggggttctcggggtgtgtggaccccgccgtggcaaggtcaggatggagcctgtgggtggcccgtctggtgctccttctcccttcctcttcagtctcaccttctgtggctccaggcagggggactgcactctctgtccacatgtccaccttcctcaccacacatcctcaggtggatgcaatgatacacacagggactccctcagaagcagacccgtcctcagggagggaagtcttggtgaccgggcctgggctgcctttggaactttggtgtggacatcccacttatttctcttgagtgtttttatttagaaagaagggtgaggcttggagtgaggcagcctccccaggcccctttgtgagatgcccctgggcctggaagcctgtcctcagcccacctgtcttctgctccacaagctcaccccacatcttaggctcgccttcacacctttggccaggtggttccccccacctggaatacccccccacccacttccaaatcctgttctttggtcagagcatcacccagtatcactttgttcttatgacaaaattttcctaaagccatggaaggttgtactaactattgacattatcaccaaccccatgagactattattataacgtttactaaccacataacttttggcaatgccttagaggagaacatgccagaagacctggatcaccttctttcctctgtacaagtgggataggcatgtcttccctgcttcccctttgggattattttggcctaaaacaagagaccatgtttgatttcactttgaaaattaaattgtataagtttaattgctaattttaataagtagcttgactatcaagtttaatgggactcgaaaactcccagcctttcccttaatttgggagcagttattctgatcacagtgctgtgtggggaagggtggggctccacaacccacccgtgcttcctatgcacttacggggtctacgtgtgcatccagctgccagtgctgcattgcaccgaacacggaagaggagctttcacgaggagcatgggccttccccttccttccctttgctcccactc

SEQ ID NO: 133766 - DNA, 1026 bp, Homo sapiens
gcctcatttccatttattttgggggcttgtgttgtagaagtgagttgatgcccgatgggaagaactggagcagatcacccttcccagactttcttgggcaggggaagccagcgggttggggtgtgggcatctgagacccctccatgcagcatctatctgggttcctcctgggccgactgcagtcaggggcacagaaaaaaaatcctgttgctctctggatgtggcagttttaattttccatgcactcatactttaggggagaacatgtattttttttatttgcttttgtttaagtatatgtatttttttctttatcatagtaaaatatgcatatcatggaatttaccatcataagtattgtttggtggcattaaatgcattcatattgttttgcaaccatcaccgccatccacagaactcatttcatcatccccgacagaaactctgcacccattaaataatgcctcccccatctcctcccccagaccctggcagccaccgattctaccttctgtttctatgcatttgaccaccctagggaccttgtagaagtggaacatgcagtctatgtccttctgtgactggcccggttcccttagcatgccttcgaggcttatccatgttgcagcatgtgtcagatttccattcctaaggatatggtttttaaatagtcatttgttttgccagtgcagataaaatgtttacatattaactccatgctgatgaagcggtttcttcttacagtgagcttaacagtgtccctttcttgttgcttcagttgagactgagctctccaactgatgctggatgtctcagggagggccccatggtgtctgttgggggtgggggcagggtcgcccaaggagggcccttggtgttaacggagatccttggcagttcaggaggtctcaggcggctcacagccacgaccacccagctccccatcgggaactgcttttgagatctgttttcagtaggggcctgaggcgtgggaaggccctggctgtgagaggtacaagcagggtg

SEQ ID NO: 133767 - DNA, 1534 bp, Homo sapiens
ctctgttggctcgatactgacaacagctggatcttccaggatgtactaatttggggtgatggaagggaaactccctcatggtcagtggagtttttaactgttcaaagtgtcagttttatgggttttcataatgaaaatataaggtgtttacattttaaggaatttgagtcacttttcttaattggcaccctccgcttgaaatcttagtgctgtttcctttggctctactgaatgtttaaaatctcagtggagctcattttgggtaatcttttaaatatgttattaattttatttgttattagtatcaattttgaattaccagtagagggatgctgaatttattttaaacttatttctttgagactgatattgtttatttcccactggtaatggcgtattccttgattttatgtaaacatcccctcctatagtgtaagtacctggtccctatctacctcctggggttgttgttttggggattaaatgagttaatggttataaggtccttagagccagcacttgacttgcagaaagtgctagatgggtgtttgttaagataactgatactaagcctgcttgttaaaaagtcattaaaacgttatgtttttactattacattttaaaaggccttctgagttgcatggtcaggagatgttctgattgatgttttctgtcagttgctactaaaacatctcaagctggatgtgctgcgggtgccccaggcacagctttaaatacaaacgtgtcccattgtctcccttggagcccttcctggcatagatagcgtccccaccactcaccatgtgaccaagatggaaaccagggagttgctttcaactcctccctccccccattgataatacagctgtgtcacctgtgcctccagactcagtttggattccactctctatcttatccaactttttgtcatagggttttgcggcatttgcagttcccaaaggaagttctttcccacaacaattagtgtcatcacaagtcctggatgtttccctgaagaccagatagtcacctttccctttattctggccccttgccctgtgcccacctggaggcagtcatgtagggtggccctgggtgtggggtggccaagctgacctggggtggggcagcatccgatccacgctgcagctgggtaacctgaagaccttgtgaggcaggaagctcatgactcaatttactgcattcttgggtccactgggaagagaaatgctcctgttaagtatgaggtatcctgataatatgccttctgtttaaggaatggattttggaggatagatctcaggaatttgggaagccagccccctttgtagacattgcagtgagtgggaagcgccaggtttcccagcagaggaggcccttcctgtagctgctcagggtgtggctttctcagaaagatgacttaattgactcaattttgatcccccttttaaaaatatcaccttttttcactgtgcagaatcccacttcagtgataacgaaagaaacttagggtttaacgtgctgatatcctaaa

SEQ ID NO: 133768 - DNA, 1035 bp, Homo sapiens
aacgcctgtaatcccagcactttgggaggctgaggagggcagatcatatgaggtcaggagttagagaccagcttggccaacaaggtgaaaccccgtctctactaaaaatacaaaaattagctgggcatggtggtacacgcctctaatctcagctacttaggaggctgaggcaggagaatctcttgaacctggaaggtggaggttgcagtgagctgaaatcaggccactgtactctagcctgggcaacagagtgagacactgtctccaaaaaaaaaaaagtattacatattttatgtatttaatgaaaaccaattttctttgaatatgatgcttctctttatgtagtttggatattaacctgttattagatgtatgatttgcaaatattttctttcattgccttggttgtgttttcactctgttggttgtttgctttgatggatagatgtttttaagtttgatgtagtccagtttgtctgtttttgtttctgttgcctatgtttttgatgtcatatctcaaagtcattatttaagcatagattcccatatgtaaaattagtaagtctcaaagatatttgggggtggagatactagtaatagtagtaataagcccagatattttggagttgtttgataagtctggccagattgccttcagcacacagtcatcaattcaatctccagtctgaaatgtctggaattgcctatttcacatcaccagtgccagcactgggcactgacatttaagtttcttttctgctaaattgacaggttaaaagtaaagattggctgggcatggttgctcacgcctgtaatcccagcactttgggaggctgaggtgggcggatcacaaggtcaggagtttgagaccagcctggccaatatggcaaaaccccatctctactaaaaatacaaaaattagctcagtgtggtggtgggcgcctgtagtcccagctacttgggaggctgaggcaggagaatcacttgaacccgggaggcggaggttatagtgagctggattgcgccactgcactt

SEQ ID NO: 133769 - DNA, 1031 bp, Homo sapiens
atctttgaagtccaggggaagttgccaggtggggaagagggagttctgtgggtaaaggtgaggggcagggtgggagcccagggtttccctcaggactccctgcagggagtgcatcagggctggcctggctgcgacaggtggggcattgcataggcaaaatgcttggcgagattaaagaattaaccaatataaagtcaggggagcatcacctgaacaaaataagctaacaggatttggaatccacgtaagattatccatgacttagaatttctaattccattccagggattttggctcctagcaagaacacaaaaggtgccaaaaagattagttgcgggggaaacaaatttccgtgattagatcaagacaactttggctgctaggagcagaatcacccttccctcccttcttccttgttgctttcctgcgtggaatgagttacagccaagatgtgacttcacatacatcccagggcctctgctgacagatgctataacacaattaggatggaggtgttagaattgtgcaacactcaattctagatcctgccagagcctaagccaggaacttggtctttgcctcgcctgcccctcattttgagaggtgaagccagctggatttctgggcggggtgaggacttggagaactttttcgttttataggaggattgtaaaatgcactaatcagcattctgtatctaggattgtaaaaagcaccaattagcgctctgcgtctagctagaggtttgtaaaatgtgccaatgactgctcagtaaaaacataccaatcagcactctgtggttagctagaggtttgtaaaatggaccaatcagcaggatgtgggaggggacaaataagggaataaaagctggccacctccccccgccccccacctcccccaagacagcagcagcaacctgctcaggttcccttccatggctgtggaatctttgttctttcgctcttcacaataaatcttgctgctgctcactctttgggtccagtgccacctttgaaagctgtaacactcac

SEQ ID NO: 133770 - DNA, 1036 bp, Homo sapiens
agcaccccaaccccagtgtgcacccacgcatctctctcccctatgcagctctacaccaggtacgctggttttgcccaatgtggggagcaccgttgctgtgctcagcctgcagaagtgggatctgtgcccgctgtggggagggttggccaacgttgggtgcccaggtcttcctgggcatgctttccagggtttctagcacatttccttttcagcacagatgatgctcttaaagattcggggtgtggcccaggggtgccctctcagtgaggacacacgagcttccctgccctctgcataatgtgtcagcgtccacacctccagtctgggtccttttttgtgacatggatcgtacttccccatgaactccagtctctttcttggcgttgtttctctgcacgtatcttcttctcgcacgtgtctgggtttgagattatttttcctatgttgatttttagatggtattggccaaagtgtttagaactaagaaacctacagacccagcgtaagggggtaaatgacagcacaaaaaatagaacagagagtctgtttgaagagggaatttgaaattcatgccagaccaaaaatggttgagctgaagcattgctcttaaattgtttaagggagtgggaagagtgcagtggggtcaggaggaaattaatgaacttcaacgaaatggttggtgatggaaaacatataagcaacacgtgaataaacacggggaattaattttggagctgctgggaaggagtaaaactaaagaataagcaaggaaaagcagagcgtctgtgggggcagggaacattttccactccagcatgggacaacctcgaccatctagtgaagcctcttctttgaaagctcttgagagaatctttctaccatgttggtggccgacttcacctttcttcctcctttgccagtttcttgggagaaaatggtagttaagtatttttgtatgataaggcttcagattctaagagcgattccaagatttttttcttaaattaccaggaaaaaagtccatatatgaaatccc

SEQ ID NO: 133771 - DNA, 1069 bp, Homo sapiens
agttgaggctcctttgggttttcttggacttggagcagtgtgaagcaactttgctctgtcctctgtcattgggagccacctgcatgggtgttggaatgtctttgggtcataagttgaattgaaaagaatgcccgtggggaccagaggcaaattctggtgctggttcttttgtgtctctaaacatgacttgttctggaggtgttgcctcagtctcttgatgggatagaacattggctgtgtgggatggaaccccctctccacgggttacaccttgatgcacttgtcttatcctctgagaagctgcaagggcgtccatgctgaccactggcgtcatctcgaagatgccatgcctttgcggagcttttaaattttcctctgtggctgcggtaacgttttgcaaagtggatttcactgtgcccccctcccttgcgttccttcacagaatgacaaagcctccagggtgggcacatttggaaactggtgcagcctgttttacaaaaacctgctttgtattttctaacatagtgtttctcaaacatatttgatcatagcgctcttttattttggggactgtgttaggggaaatacgggtgtggaggtttactgtttctgattctgtggagccacaaaaagtcaaatcgtgttcccatgcaggcacaaagccacagtgcccatgcttccttgctcgacagcatgaacccagccttctgcagagaaaagcagtgatactgtgcaggcatggctggttttcttgccagtctttctattcaacacctgtagcaaaataagcaggataattgacatgacggcttttcaacattcagtcctgatatttattgaactagtgatgtagatgaggaaagtgcagggtgcacattttctcctgtggagcttgcatgattgacaccactgaacgggggtcctccacttactatcatggggttcttcagaagcactcctcagcatgtgattcatgccaggatctgccctgctttttagatgaattatgtcatttagtctttgaaacagtctgtgaggggagatgctgtttgtcccttttacagatggg

SEQ ID NO: 133772 - DNA, 1450 bp, Homo sapiens
agtctgcccccagggccaagccccctgatgccaggcgcctagtgctgcccgtcctagggcctttgtttctcttacagggacctgggcaaaaacaaaaaagccaacaaaagcaaacatcctcatggcggctggaattgtggggctgtcagcaagtgtgatttatgcgggacctggaagccctttgaagtaggaggcaaagtggatgcccctggtctcctggggaggctgtgttaggaccaaatggaggaaggagctgccatcctcgccctgggagggtgtgtcagggagctctctcacttttgttccatctccaaagcacaggggtaggccctgaagcagtggacagaaaaagaggtgagctgcgtttgctcctccagcttttgtggagcccgcagggcaggggcaggggtgcttggccagctggctgctcctctgaggtttcctggtgtgtggcagccaagtcatgttgagtgccggaggtggggtatccatggagcggtgcaaggaggagatttgcaatgagcatatttgggggtgtcagtgtggacccaggtggccgccggggacttgggactggaaggtgacttttcacagatggatcctagtggatgctttagattgaaatgagatgcagaattctgtcttctgattgtattaacagtgctgtcaagaacgtaattatgtaagattcaaccagctttcttgacatctcagttttccttcaccatttgcaaaatttagtgtgtcatcattttagtttggaaattttattttggaaataaaatgtcattattattttcttttgaaagaaggaaactccattgttttgcaaggcagagctctgacacaattacgtctaattagtgaagtgttgtatatgttttcagagttcaaataaggttcacgtactctctttttgttgttgttgctgttttctaaactctgagctcatttcttttctttctttttaagaaaataataattttaaaagaactaagtcaagtttctcatagttgaccaaccacacatttctatggggccctaaaaactcagctgtttaaaaataaagcaaaatgaaaaagaaagaacaacagccaaatgagggtatacgttgaactactcaggattaagtttaaacaaatgcttttcataattgctgtcttccccagccagaaactaaggcctgctgtgtgctttgggtgtgtgggtgggtgggttgctgggggaagggtccttgtaatattcggggagttttggctggggccaattatttgttcataattctaagtatttaaacaatgctacgtattttctgtcttttatggaggcagatatctctaagtggcccctcctggtgctggggtatgatcaaaagggacttctgtaagttttcactggactgctttaattttctatcagaacagtgtatttagtacttgattaagtaaaa

SEQ ID NO: 133773 - DNA, 1184 bp, Homo sapiens
ggagatataaggatggaataggggaaggcaaggaagaatctggaggggttgaattggaattggaggtatcagtgtaactcatgctttcatttatatatatatttggtatatattatgttaaattatgcaccgtaatttgtaaaacatactctacacataacagttatttcttagcacctcattagcagtgagctttcttagtgcccagatgttggtttctcaatactgttgcatcttaaaggagctagagaaccttggagaaatgactgaatatgggatggggacagggaaaaatacacaataagcctgaaacgtgttcttgtgttagaacgcaagtgagtggtgaaaagtggtgggggcatggcagatgtactcaggggccaacttgaaggagttgcagccaagtctgggaccatttaggcatcagaataaataaagacaagcatggattatacaaggaacaaaataggcatccaggactcaccattgataataagtacataactatatgtatgagtttcttaggcctgctgtagcaaaatgccataaacggggtgacctaaaaaccagaaatgtattctcccacagttttagaggctagaagtccaaaatcaaggtggcggcagggccacgatccctcccagggctctaggggagaaaacttttttgcctcttttagttcctggtggctcatggtgcccttggtttggagctatatcactttgacttctatcgccattttcacatgaccttttattgtaaggacaccagtgattggatttagggaccactgtaaatacaggatgatttaatctcatgttccttattactactggaaagactatttccaaataaggtcactttctgagcttctgggtggatagggaaacactaatttactacaaaacctaagtgggaggggtggggaagagagggcacttcctagagcaaagtgccaactgataaatgggaggcgagttgggaataatcacattttacagcaataactgtacggattgatttgggcaggcgtcatgaatgagtgctaaactcattaaagaagacatgtttgatgaggagcaggaaatgtctgtggtctcaaaggatttccccacagattccttgttggcaagggacagttgctaactgtagactggcgagatttgcatcccaatacctgggtg

SEQ ID NO: 133774 - DNA, 2791 bp, Homo sapiens
attaatcccctttagaaaggtttcagctggtggactggcactcctttaaaatgcattccctgagaggccaggatgggaaaagttattagtgaaatgggaactggatgtgaaggacttgagctccctaatctgcaggacctggctagtctgttgtagtgctggaaatttgtgtactctttgtaatcctttcccttggagagttctaattatataattccacattgtagtcagggaaaagaaagttaacgctacaaactgttactccttcccagggtttataaccatcttctaaaatggttccttgatgacaggcctttccttttggtgtttatctggttcattccctgggaacctggaggggacactgtgaaggactccctcctcctcctcttccacaccccatcagcgtcttgtggtttccacgtggtgaagggctgggcagcccaattttgggtttaccttgaggtgcctccttgggggctcctcggggcgggctcttccttgctcttgcccattggttgtgactccatacattgtcattaggatatttcctttttgggagccccgtggtgaccaccaagtggagaataccaagcatgtaaggtttcaaagtaaagaaaccagggggctttgttttgcagtggaagcattgctagctaggtctggatttttattggttgcaccccagctgcatggccaatagcaatttcatgaagggactgttgggttgaagggactggctttgaaaacattacttctcagtgaccctttgggctcttaggttctgctttgccccacaacaccaccataacactgttgaggctttcagtgggtagtgtgggcttcttgagttttgaaagtaaaaatccaagcaacaagaggcgctccagcccattaattatagctgcaactggccggggttttgtagcagccgcctttttctagcatgtatttatttggttttgttgaagagcttgccaagttggaaacgagggcgggacagctttgcttgcgtgtgcagttgtcataaaatatgtctggggtgtaatctgtttaaaatcatattcgtagagtggccaaagaattgttgaacagtgttgggaattttcataaagcttttacaaaatagggaattttattggtgtggttggcactgtttttgggatttctgtgggtgttttctttttaagtcctatctctgaaaaaagcaaaaaactcaaaagctaaagggaaggaaataattacagaaaaatgtagcttaattcgactaagtagcttggtcctctagaaatccttaagttctagtgggaagtggtgtgtatgtctttaattgtcgctggaatgagcttcagtaagcactctgtcactttctagatgttatcagaggagaatgtggcggctgcttcaagtcctcctggagtgggggagggttcccctaaatcccaaatactcctagcctaatggtttccacaccctcctggagggatagttaacacaatgggcagttaaaataaggaaatgtttaggcctgaactcctcattgtaggcttgtgctgtggaatatagtagccaccaggcacacacagctatataagttaaaattaattaaaattaaaagaaattaaagattcacttcctccccttcactggcttcatttcaggtgtcagtagccacaaattgctatgcaaaaatgtcactgggattttagtagaggttgcattgaattggtagatggatctgagtagtattaacttttttttttttttttgagttaaggtcttgctctgtcacccaggctggagtgcagtggtgcaaacacggctcactacctctggccttaacctcctgggctaagcctctacctcctgggctcaagttatcctcccatcttagcctctgaagtagctggaaccacaggcacgcgctaccgtgcctggctaattctttgattttttttcgtagagatggaggtccacttgtgttgcccaggctggtcttgaactcctgggctgaagggattccccacccccaccccagtcctgggatcgtaggcatgagccacctcactggccatcatcttaacagtattgtcttcctgtccataaacacaggatgtcttaacatttatttagacctttcatttctttcagcaatgttttttagtttttagtgtatgagtcttttgcctcttaagttaaatctattcctgagtattttattcttttcgagctgttgtaattggaattgtgttttttaaatttccttttcacattgcccactgttagtgcacagaaatgtaacatttttgtgtgttgattttctaacctgcaagcttgtggaatttgcttattagctcaaatagcatttttgtagctcttattctgtatgtaaagtcgtatcatctacaaataggcataattttacttcttcctttacaatttggatgccttttattatttttggtcttgcctaattgctcagcctggaacttccaatacagtcatgggccaaataatgatgttttcagacgatggaccacctatatgacagtggtcccataagataacactactgtatatgactgtgccttttatatggttagatacacaaatgcttcccatcctgttacagttgcctacagtattcagtacagccacatgctgtataggtttgttgtagcctaggagaagtaggctacaccacatagcctaggtgtgcagtttgtgtgagggacactctatgatgttcatatgatgatgaaattgcccagggacacatttcccagaatgt

SEQ ID NO: 133775 - DNA, 1033 bp, Homo sapiens
tggtgtgacctcagctgactgcaacctccaccccctgggttcaagcaattcccctgcctcagcctcccgaggagctgggactacaggcacctgccaccatgcctggctaattttttgtattttggtggagacggggtttcaccatgttggccaggatagtctcaatctcctgacctcgtgatccacccacctcggcctcccaaagtgctgggattacaggcgtgagcctttgtgcccagcctcaatttttgtatttttggtagaaacagggtttcataatgttggccaggctggtctggaactcctgaccacaaacgatctgctcacttcagcctcccaaagtgctgggattataggcatgagccaccacagcaagccatctatactttcttgttcttgaactagaagtgtcatttatgactttacaaataaaaatgggaatgaaccattaagttccatagtgacaggcgtcattgctgggcgttggtacagagtggacattctataatgatttgttgaatgaatgaatgaataaatgaatgaatgaacaaagttttcatacttcaatttcagtatacttaagccatttgtaagatagagcctcggccgggcacggtggctcacgcctgtaatcccagcactttgggaggccgaggcgggcagatcacgaggtcaggagttcgagaccagtctggccaacatagtgaaaccccgtctctactaaaaatatcaaaaaaattagccaggcgtggtggtatgtgcctgtaatcccagctactttttggaggctgaggcaggagaattgtgtgaacctgggaggcagaggttgcagtgagccgagatcgcaccactgcactccagtctgggtgacagaacgagactccgtctcaaaaaataaaataaaataaaataaaagacagagcctcatacctctgaattcttgggcaagtatctattagggtttaaggctgcatctttctgagaaaatatcatgttgattgctaatctgaagtaaagacgttactattttcca

SEQ ID NO: 133776 - DNA, 2195 bp, Homo sapiens
ccaggctggagtgcaatggcgcgatctcggctcactgctagctccgcctcccaggttcacgccattctcctgcctcagcctcccaagtagctgggactacaggcacccgccaccacactggctaattttttggtatttttagcagagatggggtttcactgtgttagccaggatggtctcgatctcctgacctcgtgatccacctgccttggcctccaaagtgctgggattacaggcgtgagccactgcgcctggcccacaaagataattctttgtgtcctttactgttctcagcattcgggttgtggtcacggtggaacaaacagaggaagaactggagagagctgcgtccaccatcaaggaggtagcccaggccgtcctgctctaggcagagtcccgggaccatggcctcctgccacacaacacgcagagaggactcaagactcccgctggccatggagtggcctgaaagagagcaagaacatgtggatctttgataggattgttaccaaatggtgtcagtatggaccaattgtgtgaccatgagaaggatgcttattttttttaaaaagaaaacacatctaaaagcccaggaactgatttttttaagaggaaaactaatgacagtgtataactgatgtttaaattgtgcatttagtactatttaaatgttttcttatactagtattttatattcttttgttgtcgtttaaaactggagcttcagtgtctcttccctccctctaatagtaatggttcagtaagcactccttaactccttagtatttcatagaaaaatgactgcaacattaaagctaagaggaacacttcaacatatgtggtacaaatttatattgaagatctaaataaaccacgtattttccagtcttcgttgtgtgaagctaaatggtggctaaaaggaacactttttgtgtgattattataaactttgcattgtatttgaatcttagaacttttgtacacactaaatattgatgtcacaccatttctaatctgagcatccttagccagagaatattcattatacttcctaagtgagcaataatttaaatcagaagctattttattttaatgtaattaacctttctttacatttcttatgtgttcacctctaatctgttttaggaagagagttggttattatgttgatcccataatataaatcatatcctttatattttagaatatctcaaatgtattccttttttgtatggtgggtttgcctagggacgtgtaactacaggcttttactaagccaaggaaaaagagaatttttcttttcatcttacaaattccagatatctacaaaagatgtgaaagcactaaaaataccatttttaagcagtactttacctgttttttctttagcaaaccaggttatgtggtgtaaaggtttgttatacgtgccacaatatagcatataaatattatgccatcattccttctcttgttaaaggtagaagaataaaattgtgatttttataacctgtgcttattactcaaatggtcttcaacatctttttaaacaacacatactttttgaatgttcagtttctattttgcttgaggtattttgtacatatgtgccttgtgattgctgctgctttaaaggataaagtactctttgggggatgagtctggtttgttttgttttattttttaatgaaataaacctatattcctgattattagtctatttgcatatgtaatatatccaacagaatagtctcttaattttaacttttttgcactggggtagtattctttgttgtttggtcttattttagaaaataacaattaaatttcttagttccttttttcacatccaaccaaagaatatatagtatctgaagtttcctaggttcttgctgacctcataggactacaaaaatatcatggccattattttcataaataactgttcagcttcttttagaatactttctaagtgaaaatagcaacatcaaaataatgtttgtaataaactttttgaaaatatgatcaggagtttctgggaaagatggcggatcaggcacattatttcagtccttaaaaccaacattgtaaacgaaaggaaccaaaagtaaaatttttgtgttaaaattatagagtgaccacaatccagtaatatacaccacgatgaaatgtctactagaaacagtaaaatttggatc

SEQ ID NO: 133777 - DNA, 1178 bp, Homo sapiens
tgctttctttattttagtagagattgttttcattttttcttaatgttgacagatggttaatatataggaaagctgggtaaaactttgttaacgccagattctgcagtgcccagtggcaccatgcccagatgccacatgtggacatcgtttttgctaatatctgaagtgcagtggtttttctctgacgcagttctactggtggtggtggtcataagtccagcctgcaggactttgctcgcaccacttcctcatgtgctaactctgctttgtctaaatggtagtcactagctagctatggctgtttgaatttaaactaagtggaaataagaaaaggtgcaactgtgacctctcagtagcaccagccatatctccgtgtgctcagcaggcacacagggctcatggcgactgctgggcactacacaacagaggtatttgtcattgcagaaagttctgtggacagtgctgccaaggtggtggtgtagtattttggtgatatcttctagcaattataattggaaaagtgaattaaagctaccgttgcaggatttcagcgttcccccagtttaattaccaccatgtctgaagtccaggttgcagatgtcttctttttcttcctacagtgcatgaacagaagtattgcattaactcaggcgcgctacttggagaaagaagagaagtgtctccctcctcccaggtcagttgacgttaaaatatgaccttatttttttcccctactctgagctctatgaaatacgttatcttttgaaaaattttgaaagactatcataggctatggaagaatatctgtcattaaaatatagtacattacctgtcttctgctcttaaactagaagtttctaaaattttaactgaaaagctcccaaggactcactgagtaccctctcagttaactcagagaaatgtctgggagcccagcaatgaacttgggcaaactgagtttccatcagctcatatctgccacatctgaaaggtggcacatgccacaccaggagttcctgccacaaggaccgtcctgcagggaagatcggcagtgtggggtgggggtgggcatgcgcctctgctgctccttcagtcagcaacactcagtaacatttgagaaaaaacaagcaacagtggggaaaatgtacagcatcaagaaaaaacaccaaaagtgaaag

SEQ ID NO: 133778 - DNA, 1033 bp, Homo sapiens
gaagaaggccccagcagcaggcagtgctggagctgggccctggcacatgcagccaacacagggaagaacaaacattgggggcgagggagcacatggcaagggaatgacaggccaaggtggggcccagagggcctgtaaggaggcacagactccctggtgggaggctggggccatgagacccggtcctgcactcaggaagccacattgcaggcagacttttttagatgaggaagcactgcccagagtgcctcgtttccctttctttgttggaattggaatgatgcttcccatcagtcgcaagcttctgtacgttcactgtgccttgacattgtggacttctaacattatttctccgtgagcgatcttcaagcctggaagggacttacagctgtgtgtgtgtttcccttcttcagcatttctggattaaaagtggtgggggagtccctttctccagcctttcacctacaactggaagagagcactgggtctcgcgagcaagatgtcagactgcttcaggaaattgtagatcaagtaagtatccgttgacttgaggcatccccccacaccacttctgcccttgccccaagcaattttttaatgttaaatttttaagaaaagtctctttgccctgagagagaagagggtagaaaggaagatgctggtgacccgctcttgacatggaatcctaatcctccaggtccttcctagcttctggccatggtaacaggcagcaggccctcccattgggtcaatgtgtggctccctccaaagatattgtgttttgtaccactttgcatttaaatatacttggcctctcctctgaaaaattagccttgcagaaaactcacttgctcaccattttacaaagccaggctttcctatgtgtagttgggggaggcattgtgtgtgggcatagcacacattcctggacggctggctgtccccgcagcacagctcagggacagtccactcacagtcaccctgaagtcaggatgctcttgtaaacggaaaggaagaccgctttttataacat

SEQ ID NO: 133779 - DNA, 1072 bp, Homo sapiens
tagcttcggtagatgatttggctattttccactctttctgcttcatggaagcactgagtaaaacaaggcttgatcgtttcttcagaagttgagagtaggtctcccactttacagccatctaggcttggggcctttggtttgggaatagttgttgattatctctcatatatctatattattttaactttttatttatgtaaatttggttttgtgtgttttcatcatagtgtgttttcttatttttatgcactgtctcattgcactgtgttcttactcttcttcagcttcttacatttagcttttggttttatttcgtattttccaataaatatattaaagataaatattttcaaaggcagtatcttcaatgtttagttctgagtaatttttttgttcaatttttctctaatttctcacttctctcatctctgagattgagtttgggaaaggaagtcaacatcctatgctggtttgcctctgttttcattgtaatagagatagttattggtgtcaggttctccctatagactgtaagcacacagtggagaccgtggctaccttggtgattgctctgtccctgggagctagcccagtgctcgtttatccactgggataagatgatatgtttggcaaagtcttttgttaaggaatagtataatagactctgaaacacggcttcgctgaactcaagctataactgtgtccgtttggttttaattaaactcatctgacattcagcatctaggcaaccagagacagggcattttgtttaattccttctctcactagcatgtgaaatgagaccatttgatcaaaaagcacaagttagatctggacctcaggtgccttgtatttcttttctttttttttttttttcttttgagacagagtcttgctctgtcactcaggctggagcacagtggcgcgatctcagctcactgcaacctccacttcccagattcaagcgattttcctgtctcagcctcctgagtagctgggattacaggcacgtgccaccacacctggctaatttttgtatttttagtagagacggggtttcaccacattggtc

SEQ ID NO: 133780 - DNA, 1201 bp, Homo sapiens
gttcaagtgattctcctgcctcagcctcccaggtagctgggattacaagcatgtgccaccatgcccggctaattttgtatttttagtagagacaaggtttcttcatgttggtcaggctggtcttgaactcccaacctcaggtgatccaccctccttggcctcccaaagtgctgagattacaggcgtgagccaccacgcatggccaaaacttagctttttaatagtgaaagcagcataactgtttttagaaaccatgaccattgagatttcctttattgaggtgaaattcacataacacaaaattaaccaatttaaattgtacaggacagtgacatttattacatttaccatgtgtgcaaccatcaactttaggtcaaaaaccttttcatgactcacgaagaagacctcaaacccattaaacagtcactccccattttcttctccctctagctcccagcaactaccaatctgctttctgtctctatggatttaccttttctggttatttcctataaatggcatcatataatatatgaccttttctttctggcttcattcacttgatgtttttaaagttcattaacattgtataccatgtatcagtatttcatacctttttaatgctgagttatagtccattgcatggataataccacgttttgttttatatgttcatccacagatggatatttgggttctttctacctttttgctattgcaaatagtgctgttgtgaacatttgtgtacaggtatttgtttgaattcctgttttcagttcttttatgtatatatctagcagggtaattgctggattatatggtaattctgtgtttaacttaataaggaactgacatactgttttcaacagcgattgcaccattttacattcctatcagctatataccagggttacagtttctctacatctttgtcagcacttatattttccagggttttttgttggtttgttttagccaccctagtgagcatgaggtagtatctcactgtggttttgatcctgtttcccccaaatggctaatgatgctgagcctcttttcttgtttttttttttgtttgtttgtttgtttggccatgcgtatacctttggagacatatctattcaggtgctttgcccattttttaaattgggttgtttttttgtttttaaaagaattccttgtatattctggatactagatg

SEQ ID NO: 133781 - DNA, 1050 bp, Homo sapiens
cattacatcattcttgtgccatctgttcctcaccccatcttcatgatgatgaccttcattatagttgttttgggtaaaattgacagacattgaatcacatgaatgcagccatacaattttgaccagtgattatacccatgtaacccaggaatgtcagccccattatgatgtaaaacattcccatttctttagaaagtcccttaggccccttcccagttggaggtttggagggttttgtttgtgttttaatattctcagagggcctaattagtttgtgtgtgtggcgggtcacctagctaatgctgtgagctgaaaaacgtctgagagaagatagtactgttgttcatctcaaaataacccatcacaaacactgagctttcaattcattcagaatatttttttaggaataaatcttgtaaggtgaaagtgctggggaatatgtaacagatcttgtcttcagagttactgaaatgtaagatgtctgctttttctcttttaaagaatcctcgcaaggctcgtgtaactcggcgtttcattgtagtagaaggattgtatatgaatactggaactatttgtcctcttccagaattggtaagcaaccatgttcagctgtaattttaatatttggactatttgacagatgtgccttttgtttatgaccgcttttagtgtataacgtctgcgttgctttgcgcattaggcctcataagcatattttgctcagatcagggaagaagaacaacactgaatgccagtgctggccttcaaagagtaatcaagactgctctgttgcccaggctggagtgcagtggtgtgaacacagctcactgcagccttaccctcctgggctcaagtgatccttccaccttagctttctgagttagctgggactacaggcacatgccaccacacctggctgatttttcccttttttgtggagtaggggtctcactgcgttacccaggctgttctcaaactcttgggctcaagcgatcctcctgcctcagcctgccaaagtgctggtattacaggtatgagccaccacacctg

SEQ ID NO: 133782 - DNA, 1175 bp, Homo sapiens
caacattagggaaataagtagtttatggtatactcacaggcagaacgtctccattaaaatcatgtaatccgaaataatttagaaatgctcacagcataatgtttttaaaatcaggtcctaaaactacagtaaaatcctgattctgaacaaagtaatttatatgtttatacaagaaagacaaaaattatcaccgtgtggtatgattagctgatttatttaattgttttttgtacttttccatttcccaagaatcctacattgaatatttttaaatctaagaaaatgtttttccttaaagacaggcagaggtagcatgccctgtgtagaaattagggtggcatctcttcatccatcacttctaacatattgctagctccccagctttcagttgtgagttgacagagtaaagatgattgagcaacatcagtgatatgtactttttattcctcaacaaactttttttttagtgctactgctgtgggttgtaaaataccccttaaagcattgctctgatactttctaattctgatcatttctaattgtccattggagcagaaacttagaggcaagagatctctgagtaagaaggtaatggcaaactctatctgtggatctcagtattttttgcagtcccacacacctgaaccatgtacagtttcatacatgtgggagatttattagtgacttgctctgagcagagtgtgtgaaggtgtgtgttttttgaaaagatctctgccgggcgtggtggctcaaagctgtaatcccagcagtttgagaggccgaggtcagtaatcaagaggtcaggagttcaagaccagcctggccaacatggtgaaaccccatctctactaaaaatacaaaaatcagctgagcgtggtggcgggtgcctgtaatcccagctactcgggaggctgaggcagagaattgcttgaaccctggaggcggaggttgcagcgagcagagatggcgccactgcactcccacctgggtgacagtgagactccatctcaaaaaaaagaaaaggagacctctctaccccaccacctgggaacatcattggacaagctcatagtcaaattttacttgatccgataatacatcagtggggagtgaggagggaacagggttgcccctttttttgggaggtgaaggaaaacggtttgagttttttaact

SEQ ID NO: 133783 - DNA, 1050 bp, Homo sapiens
tctaaaagttttctgtctagctgggctgccagtattacttctcagggcaaaataatggcagagtaatgtgtcagtcatatcagagatgccactgatggtgaggcacaccagtattttatgtttcttagaaagagaaaagtatgtgaataaactgatatgtcatccatagtaagatgcatgctaatttcagagagattaatatatagtgagagtgtgcttcttggaatagattaaatatggtagttatgtgaaaaggactcatggatgaagagcaaacaatgatgtataaatattcaaacatgttttatttatttgctatgctcatgttaacaatcagtgattggtcagcttacaaaaacaagcattcctttttgagaatgttgacaagaccctttaaacccaatttggtggatctcttttccttgcagagatagagctgcctgctttgctattcagaaaggattacaggcatcccgtagtgacattaagttatttaagcataatgacatggctgacctcgagcgactactaaaagaacaagagatcgaagatcaaaaggtatgattcttttgaagaaaattatacagttcttttgtactttctaaccagctaaattatatatgaaatggtaatttgtcatgaaaacttgcctgtggatcacatttggatattaaggtgttcctgcttattaaatgtacttggtgttggagagccaagtctgattgtaattgccttgtcattgccgtaattacatatagcaaattggagggaggtaatccaagcagctttctgagagatcaagagaggctgaaaaacagcatgtgcttagtgaggcagggagatgtctactcatagctgggcataatgacaccaaaacttactaggcctttaatgacatgtacctagtgaattcagaataggcttattcataccagaataaatcatgtatcaattacatgaggaaagaatggcagcaagcttattatattaatatatgaacaaagtgaagccctttctccccaccccacctgtatcctgctctgagcagct

SEQ ID NO: 133784 - DNA, 1035 bp, Homo sapiens
ctatctccaaaaaaaagaaaaaaaatcatagtattggaaagcgctatgcaagtttttcccattactttttgtctgacagagttgtgagcgggacctagacagagagaggcaagagtctcttatgtggctcagtgttaggcagcaaccacagaactgaacaggccagacctagagaatagttggagaagggtctaggaaattgctctctctcctattgggattgtgggctaacaggcattttccaggaaagacttggcccacaaatgcagaaaagttaaccaggttttgagaatcaggctagtataacttttccatattttaagtcatatactcagtctttacacctgtctcttctttatattctgttagagttggaggaggaaggaaggagctctgtgggttaaagaataggaaatgtttgttttgaactcttaaagataaattattaaagtataattcttgtacttcaataaaggcagcagctttagcatctctaaagaagtatggcgtggggacttgtggacccagaggattttatggcacatttggtaagtttttgttgtgttctctttgagactactgctttcaatagttaagattcaattttaggctgggcatggtggctcacacctgtactcccagcactttggggaggctgaggtgggaggattccttgagcccaggaatttgataccagcatgggcaatatagggagaccctgtctctacaaaaaataataaaattagccgggcatggtgggctcatcctcgtgtgcatgtgtggggattgcagcgtgaggaacgagtgcagagcagcagtactctttatgcaggggagatggcctcatacttctgcccacagtccactgatgagagcggaacccctgccatgactagccacgcagggggctgagaaacagctctaggaagaaagtggagagcagattgcctggggtggagggaggggggataaacagtgtagttttttatctttctagaatgaagatgaaggatcattgatttccttgtgtatgga

SEQ ID NO: 133785 - DNA, 1395 bp, Homo sapiens
ctaaatcatatacttggtctttctgtcctggccagcactaccctgaattgtctcattagcaacaactgtcaggtttggtgaacatacccaccatgagaaacaaagattcctaccaggaaattccaaggatttagaggttcacctcaggagctgggacaaaaggcagaactcttaggataaggccaaattccttactacacaagcagttaacatttttttaaatattcacccccaataggtaaaatactgattttttttcaactttttctttccattctagaaattacagaagacatccccgtgaagactttgaatatgaagactgtgtatgtttctgtgttaccaacaacagcagacttctagcatgtacttatcaatgttgttcggtcagcccttccctaattacacctatcccctacacatacatgcacatagacacacacatgaacacactgaagatatttccttcaggtgtgtgtaaaatatgctgcttggattgaaattcaaatgggattgattagtcaagtaacttgagacctcacagtaatcttcacacttaaccttagacacctatgcagtcatgttgggagcaggttacaatgttacttcagcccacagtttatttctatacttgagttcttaagtacagaagatagaagtgatttaaatggcatagtatatatatcattttctggccttttaaaatttatttgagacctcttgatgaaatggacatattatatatttctgccacctggattttcctggataatttgatggaatattttaagtttcagtaaatcagaacaataaacaaactcagatataaatgtgttgaaagtaattcattctcccatagataaatgaaacttgaaatgtgtaaactttgaagaacataaaaacttcatggtggtttcttattaagacagtggactagacatctaataaaacttctttccaaaatcccaggtgataatttgagtcctcagagaagcagatgacatgacaaagttagatgtgcaagaatttattagaggaaacataaatggaggataaacgggagatggagcaagcgtaggtcgagagagccttcagactgcagtgtgggtctgacacctgtaaaaagagaaaatgaagattgattagcaaaaacttagactgcagtgcaactctaagatgaagtcttggtcaggccaatggagagttcccaagcaaggattccttttagtagagttcagaattgggcagaaatagcctggctttgtttctctgacttcctcaagtcagtttctgggaggagaccaaggggagcgtggccttcgcacaaatgccttgatggatctgaaagtaccaactacactcctcatgtcagattcttttgaagggagatctgaa

SEQ ID NO: 133786 - DNA, 1806 bp, Homo sapiens
tcacatctgctcctgagtcaaataacatcttctgactgtaattagcactttttaatgtaagtttttcatggtgaagcttgagattctgatataggaggaaattttaagaggagctgtattatacagagaaaatactaaaatagagaaaacaattagccctatatttcagattatgaatattatgatgtttgttttgcaacattgagatttcctaccattacatgtcattaaaggctggttttatagaaaaggcaatgtctcttgataaacagaaattaagtggaaagcattatcgtaaaaagatacatgatagttaaataggaaaaattgaatgacttcagttttgaatttgttcgttaaccctgaaagaattgttgttgttatttttagaaatacaaaaccaaactgacttactgagtcttagtggaaaaacactttgtgtgactgcaggatcggctccctctctgatcaacagttctagtactcttctttgtcagtatatcaacctacagctcctgaatgcaaagccacaaggtatgtgcctccccacagcaggcagactgtggggtgctgggcattgaagttgtctttaatattcaaatatgtgtgtatttctagtcggcttcaaagtattgctttaaagtgtgggctctcacgcaactttggggagcaaccacaggcttttcttttggtgtgttatagagaccctcatccatctggcatggttaggaaatgaaaaaattggttaggtaaaaattacaactaaattgtttgagtgccaaaacattttaatctcaaattttactttcttttctgaggaaaaatgttctgaaaacttctatacctccatgccttaatcaacagactagattgatagtgatttttttcctgatattttaggatcctcattgtgcacatttgtactgaagtcttcgggctcctcacttcactgtgtactgagtatctgctccccaagctgctgggcttttatataagttttttttttttctttttccccttccccttcacctctatgaaatgttgagagctgtttctgcatggactgcatcttcagcggtcacactcacgctcctggacgcactgctggcctcagcactgcctgttagagctgtccgcagtggccacctcttttggagctagagggtgaactctcgagatttaatccagtttgttctgtcttccacagagtgtttaatggggacagtgggcactctcctgcttgaaaacccacttgggcagaatggactcacccaccaaggtcttctgtatgaagcagccaaggtgtttggccttcggagcaggaagctaaagctgtttctgaatgagacccaaacgcagggtaaggagattgtggaccgtaagttttttatttttgttgaaagtagattttgatgccattaaccatttgtagcatatacatgtaagatagtactattgttatcctgttttgttattctttccccagaaatttaccataatataattttcttttctttttttttttttttttttttttttgagactgagtctcactttgtctcccaggctggagtgcagtggcacgatcttggcttactgcaacctccgcctcctgggttcaggcctggggcttcaacccaggaacaaggattctcctgcctcagacttccgagtagctgggactacgggcgcctgccaccatggctggctcatttttggattttagtagagacggggtttcaccatgttggccaggctggtctcaaactcctgacctcaggtgatccgcccacctcggcctcccaa

SEQ ID NO: 133787 - DNA, 1076 bp, Homo sapiens
gctgcattatagactctccagatttaaataacattttgctgagttgggaagaagtgtttctccttatttgattgtcatggtgtgcactgttcattcccacaggctttggtcctcttagatgtcactcctgaccagtcaatggtagatgaaggaatggctcgggaagtcatcaatcgcatacagaaacttcgcaaaaaggttagtttgtcagttaagaataagctactgttttggctttttgtttgttttggttgtttggagaagataggagaggcaggtaatataaaccatagtgatcaatgcataacaatcactaatccatagtccatttggaatgtattctgcagaaaagtcactcctcttcctctccccacgtgttcactcccaagtcgtagctttcagccagcctgtgccttttcccatccttttttttagctccgttgggcttctacagaatatcccctgtgactggagcagaaggtaatcagagctgatagtgtctttgcagaagggcagaggtgcagtcagcatagacaggcttctagcttaggggagattcccggatttggacagagttgggtagtttttccttattagagagctgaggaatatgcagggagctcatcctggagcgcagaggggctgcaaagcccctgctagtgagagaatcaggaatttcttgccctgtagagggcagtgacagctaacatacatctttcttcccagacggttcaaggtctgaggaggctgttccagcagatgagtgggtgcttgtgacctctgaatcagttcagagctttgtaagtgggttctaagtaatttcttggtttcaacattcatgaggtactgattgttctaggaaaagaaacatgccctatcccccaaagagtggtgaaaaagacacaaagttaatcatgtactgagtgcagttagtcttacggatcacccagcagggagggaagggtgactgcccttctgtgatgattcagcatgggatctgtagcccttgttcaacagtaccttccttcagttctgattaatagaatgtacttcccttttaaatttttctgtgtgtg

SEQ ID NO: 133788 - DNA, 1100 bp, Homo sapiens
gttcttatcagttcagatattagttaaataatataaaagtggaacggctccaactttaattctttttatcctgtttcctttactccatatgttataaggctcctatttattccttaaccgaaggaaaatctgctttgtacaaggtgctgtgcctggtgctctccatgcctgatctcatcacctccatcctgtgaagcagggggtattttccccagtttacagatgaggtttctgaggtgtgggacagtcagtcttctgtgcatattgacttggctgatacatcattaggtgctcctgtttctattttagacatccttcagaattctagaggtgctttgggtttttctatctacagtcctgcagctatgcttcagggatatgaggccatttctcattcacagggcatgttttgtaacctcatgctcattttggtgcctattactgtgtcattctctaacatgtttagttgtttctcagtataaatgagatcagttgttgatgactgcatataactgacatgatgtcctgtgtcttcatacaggctccctacacaccttttctcactgaattgatgtaccagaatctaaaggtgctgattgaccctgtttctgttcaggacaaggacacactcagcattcactacctcatgctgccccgtgttcggtaggactcaaatagaaataagcctcacctgtgccaaggaggggagagttgctcaagcatgtggggaagaggagggatttccctgctccagctccatctgtgccttgcctcccgccccagctgacatgaactcctcaggctgcaggatggggcccactttggtacacggtagcaaggatgcttggtgtggaacccctttgtagagctgtggcaggtggggtgtgggcatgccccatgggggctccttggggagatgccgggtgctgagtggtaggcactgcgctgcccttccccagtgcttcaccaggagggcctagccacacttctctagcctgaccctcttcctcgcttatgcatgcctagtgccttcaattttctcctcttaaatctaaactctttcatattcctacctctaccactcagagaagaattgattg

SEQ ID NO: 133789 - DNA, 1485 bp, Homo sapiens
tattaattaaatgggaggtgaatgagaatccttaaaataagccttgcctcagacaattggctaaacaccctttctttcctacttgatctctgagtttctcagggaactcttcaaatcctcctaattcctcaagaccttcactacctctgatgctgtttttactcgactgttttaatgtttagaaggccagttctattttattcatagcctgtgccagagtttcttaactgcagcactatgggcagtttgggccaggtcatcctctgtggtggggctgtgctgtgctttataactgagcagcatctctgggtctacccattagattccagtagcaccgtgctaccctccaagttgtgacaagcaaaatgtttctccaaacgttgacaaatgtttcccatgggataaaattgcttttgtttgagaatcactggcctatgctgtgcctcttagcatctgaattgtgctttttgtcttttagttgaagtacagtgtaatacaatggaaagaagttgggcattgttgatgctgtcaaattgcacagctccgtgtaaatggcacttcctacagttgtgtagtgggcagtcttggactttgatccacacatactggagtttttggcttttctcactgaccaatgggaattcgcatgtggctcacatggtgatttttttgtgtgcacccctaaacactctgactgccatgtagcacatcctcaacaaacagtcattatgtgattgattcattttggttcttttctccttagtaagtggaggcacttggatggaaggagctgccccttctttgttgtatccaaccctctccccaccccagatgcctggtaacccacttgctgcctgattgacttgtcttacttttagcttataggctttatactgtggtgcctcgcctggtcaagtttgtagatattctgaccaattggtatgttagaatgaaccgcagaagattaaaggtaagtgcagactgctgttgggaaaagcaaaaagtgtatgaagtttgaaagtagaagaaatatgagaatagccagaagggagaggaacattttcagttgctctccgtttttgaagctttgtttttcttttccttttacattgcattttaactatatttgtcatttgagggatagggatctataagttctaaaagtcattttgcattattttcacaacacaattatgtacatgtcatattggagggagaatgtcaaggcacaaacaggactacactgagcagacctcttaaaattcaaaataaaatcatgcaaatattttataaaaatactggtagatatggcattaatattgagaggggtacttccttctaccacaagggagtcagatattatttactgtggacagaactcctctgtagctgttgggggtttaggatgagcagagcataggtcctggtctcaggacttaagccaggtacataaataacaatgatgcttaatagagagagcgaggt

SEQ ID NO: 133790 - DNA, 1058 bp, Homo sapiens
cttagtgctggtgtaccccattggtcctgcagtgagagtggcataagatgcatttctgtgctatacagtgccatattttggtgtcagattatatacgtcttttataatttgctaagtctcttatagaaagtgagagtgagttttgtgagttttaaattgaccactcaaagagtattcataattacccccttttgtagaaaataggactgattttcatcttgctctctcaatatgtcgagtagtaataattggtttactgtctaagtaccttttctgtctaatttttctccctcttccagattatatctgattaactcccctgtggtgagagcagaaaacctccgctttaaagaagagggtgtgcgggacgtccttaaggatgtactgctcccatggtacaatgcctatcgcttcttaatccagaacgttctgaggctccagaaggtatgggctgtagggggctgcacatgtacctgccgtgtctccacagcgctcccttcaccaagctgtgaggtggagctctgtgtgagactttagggctgctgttctctgctgcctgatgctggggtaacttagagccatggggaggccatacatgcaggtgcggaaggtatctagggtccgggctatgccaagaccatgggccctagcctgcaaaagagttatgtcatatagttgtttagtcgccagttgttgtttttgtttttgaggtggagtctcagtcttgtcacccagactggattgcaatagcacgatctcggctcactgtaacctctgcctcctgggttgaggcactgcctcagcctccccagtagctgggattacaggcacccaccaccatgcctggctaattgttttatatttttagtggagacttggtttcatcatgttggtcaggctgatcttgaactccagacctcaggtgatccgcccttcttggcctcccaaaagtgctgggattacaggcatgagccacggcacccagcttcgtcagccagttcttggtaccaggaacaccatgttgagtgagacacccctccccttatggaaccaatgga

SEQ ID NO: 133791 - DNA, 4395 bp, Homo sapiens
aatgtgctgtcttcagattccagtcctttttgtctataggaacagctacccagcacaaattctgtttttagaaaggggtagatgccttaccaatgagcttgttcctttgaggagtagcaaagtctgttagctggtaacagtcctcatgtggatcccgtgtccttggtgcctgcctccttctccattcctgaggcctgggctacctctcctgggcaccagggctcctcccaactctcctttagaagtgggagggatatctggatcagtgtttatgttaactatggggtctggtctcctcagctcatgtcccttgatgttctcagagtgcaggactaggtaagagaggcaggaaagcatcacccccaggacagtggtcagggatatgagttcatttgggaaacaagctaggtagcacataaatgaggtacataacattttacagaataaaagcattttctagtctgccttatcacttttgggtgagagtgcattttgcatcttttgtcatcaaattgtcttttccatatgatcttgtgccaaattcaaaacccatccttcatcttcagctaggtgcttctgggtggtcctgagaggccacccagtgctgccatgtggctctccacacagacttcctgggagctctggtaacagagaaatggtcagtaaatcattccagacgtttatttcaatgcttctttcaaatcttagacagtaatttgattggtctccagtaaccaggattaagaatcattgctttaagtgattctcaagaagtgtgacttatcaaaaatagaaattcaatgaataaatacagtttctttcttatgcttggacttcatttctatttttattgaactgtttggggttttttttcaggttttataccctgctggtgctggccacggccctctttggacaaccgcctttcaagaacgtaattgtgaatgggcttgtcctggcaaggtaggtcaactttgttgtagtgacgggtggaactttgtctccactgtttcttaagaaggagtgcgtgagagcggtcaactttgttgtagtgacaggtggagctttgtctccactgtttctcaagaaggagtgtgtgacagctaagcctgatggaggaggaggaaggggaggactttcagattgtgctactgctagtaacataatgctactagtgatattactagtaataaaatagcatttactaaacttagcactttatgaaatacttttgcttatagatcttatttaatctgtacatcagtcctttcatgtagattttgttgtcctttttttaacacacgaggaagctgtgggttctagagaccacaggtgcccaggatcaaagctagtgacagccacactgggcttgaccgaggtactctgccaccagatcccattcttcccctcatctgaaacttcctcccaatgggcattatttcccacattttgctattataaggaagtctcatttttcctttactttattacctctagtcattaagaataaaaataaacataaatgaaaattttaaaatgaaatattttaaaatagaatttgtgctgagtacccacacagaaatcctactttatatgctgtgtgaggaggaagaggatgtcacctaacattttgtgcatccttattttttgccaggccccactgtgtgcattttcacattttaactcatttaatccccagaaccatttgagatgggtcctataatccctttgtgacctttgaggaatctgagggacaggaaaaagtgacttgccaaaggacacacagcaaatgagtggtaaatgcaaattttgaacccaggcagtctgcctctgtagtatgtgtactactttttttttttttttaattgaaaattttattgagggctgggtgctatggctcatgcttgtaatcccagccatttgggaggccatggtgggcggatctcctgaggtcaggagttggagaccagcctggccaacttgataaaacccccgtctctactaaaaatacaaaattagtgggtgcagtggcacacacctgtaaccccagctacctgggaggctgaggcacaagaatcgcttgaacctgggaggcagaggttggagtgagccaagatcatgccactgcactccagcctgggtaatagagtgaggctccatctcaaaaaaaaaaagggggaaattgtattgagatcattgtagatttgcatgcaattgtgaaaaataatagagatcccttaaattctttgcccagtttcccccagtggtcacattttgcaaaactacagtatatatcacaaccaggatattgatatagcccactaatcgtattcagatttctctagttttacatatacttatttgcttatacgcatttacctgtatacggctatcgtgtgtaggatcctgtatccagcagcacagtcaggttactgaatgaattcaacatcaaaggctcccttcctgcattgccttcccctcctgccttcccactgtcatccccaatccctggcaaccactggttttttctccatctctgtaattttgtcgtttccagaatgttatataaatagaattatacagtaactaacttgggggaattggctttttttttcttttttttgagacagagtctcactctatcacccaggctggagtgtagtggcgtgatctcggctcactgcagcctccacctcctgggctcaagcgattctcccatctcagcctcccgagtagctgggaccacaggcatgaaccaccacacccagctaatattttgtatttttggtagagacagggtttcaccatgttgacaggctggtctcgagctcctgagctcaggcgatccacctgcctcggcctcccaaagtgctagtattacaggcatgagccaccgcacccagctggctttttttaaatccacataattccattgagattttagatgactgcacctaccaatagttccttcctttccatggataaatagcattctgtattatgggtatgccatggtttgtttgatcatccacctcttgaaggacatctgggttgcttctaacatttggcaattgtgaataaagctgttgtgaacaattgataataggtttttatgataatgtaagttttcatttctttgggatatattctgacacatctttcttcttcagtctaccctgaagcttcctcatggacttagtatgatattcaaaaagaagtttgcaaatattaacaaaatatcttaccattgtaccttaacactgtttgtttcttttttgagacagagtcttgctctgctgcccaggctagagtgtagtggcgcgatcttggctcacttcaatctctgcctctcaggttcaggcaattctcctgcctcagcctccccagtagtggggattacaagtgtgcgcccccacgcccagctaatttttgtatttttagtagaaacaggtttcaccattttggccaggctggtcttgaactcctgacctcaggtgatctgcctgcctcagcctcccaaagtgctgggattacaggagtgagccaccgcgcccggcctattagcactaacttctatctaagttactccttcccatttcattttgtatattcctgtttgcaaatgatttgtatccttaaaacaagatcatctgtgatattgacttacttaattggcatctcccttttgttttacaagtgatggccaaaaaatgagcaaacggaaaaagaattatccagatccagtttccatcatccagaagtatggtgctgatgccctcaggtacaaaccagtgctttgccttgtgtgtatctattgtttttttatgtaagcatctcctatactattaatcagtattcttagatttggtttatagttaggtttttagcaacatatctctgttatttggatgttatgttggtatggttgttgattttaaacccccaaaatagttttctaaataataaaggcatttttaaacctagaggtctgtttgaggaagaggacctgtgttgggtgttgttgagctgtccaagtcctccccaggctagatgctgattgcctctgccttacttcctttctaggttccctgtcttgttggtattagaattctctttcatcatttgttttaattttgtacttacagagccatgtgagatatatctatgctagaggtgataaaaaaactcatattgaaaagcttttggagaaatttgagccactgcttgaggtagctgtaatcatgaaaccacacagtgttcaagttgaaagggacctagagatcttgttcagcatccctgtgtcctaggcatgagaccagtgcccaggcctgtgactcagcaccttcacacagtacctctgttgaccaggagccattagtggggctctcccccaat

SEQ ID NO: 133792 - DNA, 1791 bp, Homo sapiens
tgtgtctttcatgagagagaagccacattagcaaatactatccttcggcccagattggtgtgttaatgtgcctttaaatcatcagtctcaggctgggtggctcacgcctgtaatcgcagcactttgggaggctgagggtggctgatagctcgagtccaagagtttgagaccagcctgggcagcatggcgaaaccctgtctttactaaaaatacaaaaaattagctgggtgaggtggtgcctgcctgtagccccaggtacttgggaggcttaggtgagaggatcacctgagcccaggaagctgaggctgcagtgagctgtgattgtgccactgcactccagcctgggcaatggtagtgagaccctatctcaaaaaaaaaggaaaaagaaaatcatcagtctctcaaagtaaacatgcatgctatataaattaactcagtatgctctgtttggctctaaggagctcctgctattgaactttgtttttgacaggtggtatgcattgggtcagtggcggaacttgaagaactgtcaggagcaaagatctcagatctccacagagagaggtcagtttctaaatgttcgattcacttcagttttacgattctcctattaagacctggtctctagcagattacagagccacacatggaagtgactagcttgctgaattactttgctgatgactcatgtcatattgcagtattgtggcctctgtccttgtgaaatgtgaggtgaatggtgcataacctttcagatggaggattcatggtgctctctgaaagcctttgagaattgctgatatttctgtttgcaaatgtgtataatatcttgtcagggttttgtgtttcctattagcaattaaactgcaagttctgttatgcttacagttaatagaaatgactacttttctgtttgttagtgttgaccacctgaccattccttcacgctgtgggaagggatccttgcaccgcatctctgaagtgtttgactgttggtttgagagtggcagcatgccctatgctcaggttcattacccgtttgaaaacaagagggagtttgaggatgcttttcctgcagatttcattgccgagggcatcgaccaaaccagaggatggtatgcctccttgttctttcatcacgtgttttattgattttattttatttagggagtattttactaagtcactgccatttatctactgggtgatggagagattgtggcaaataagacaggctacattcctgccctctcccctccaccaccaagcacggacattaaagtgccttttgagtaggactctcccactacaatagggctgtagttttacaatttcaatgatctcactggcattttggaatatatgtgttacactggatgttaaaatgataaaaaaagttatgtgttcttagcttacgtcagatcatttactcaaatgtttgagtatttgcataaaagacagtagtttgggtgctagaaatttgagggatagttggtaatgtgctcagatattgaggctagccttataaatcaacattctaaaaaaatccagatttttaaaaaatatacatatgagagaggatttgggcattgatttttatctggtgccttatgtaaaacagttccttaattggaagaaggtgaattactttctttccatggattggctttgctggcccaggctttatttacttttttttttttttttgagacagaatcttgcactctgctgcccaggctggagtgcaggggtgtgatctcggctcactgcacccttcgcctcctgggttca

SEQ ID NO: 133793 - DNA, 1104 bp, Homo sapiens
ctatggtgaggataatgtgaagactagagttgtatgggatgaggctggctaaagctaaggtgactggttagaggtatgtggcagctgtactccagttgaagaggaggacatgggaggcctgtgtgctgtggggtaatctattggatgtaggtcattgatggcagcacaaactgttgtgtgtgctatgctgtccatttagaagacattctctttgcagtgagcgccacgtttccagagtgtttggtccacaaagcgttatacaaaggctcctgtgggtattatttacatgttgaatttttccatatttttatgtgattggttatgtgatctgtttattgcagggtcccagagttggtacgagaaaaacgatttggaaattggctgaaagatgcacgtgactggacaatttccagaaacagatactggggcacccccatcccactgtgggtcagcgatgactttgaggaggtgaggcatggcagtatttccttgtgttgatttttgctaaagcattttgttcatgaaatctgaatgtggtttaaaagaatagggtgtttttttctttgcccctttcttatttcatcttttttcctctttattcctttctagaatcatgacataagataatctgtttctggggtttttaactttttttccttgaattaaatacaatttataaaactttcctctgtaaaaataaaaggatacagttttctcagggaaatacacactttaaatgttttttttgtgtgtttccccgatgtcttttcttccccctacattaaggtatactattagcttatggttaaactgactttatagatgatgaaaaaagaaaacttgaaaagaaatttaccaaagcattacagacctttaacttctaaaatcaaatgaataagaggatgtgtgtagatatatagatgtatgtggatatactatgtcctcacttaatgtcatacagaggttcttgataactgactttaggccgggtgtgatggctcccacatgtaatcgcagcacttagggaggccaaggcaggaggatcgcttgagaccagatatttgagaccagcctaggcaacataatgaggttccatctctacaa

SEQ ID NO: 133794 - DNA, 1433 bp, Homo sapiens
tggtctcaaactactgggctcaaataatcctcccaccttgtcctcccaaagtgctgagattacaggcatgagccacagcgcctggtctaggagagttttatgaatggctaaaaatgttgctttcctaaggaactgtgagagaaaaatagacctgtacaaatctgttttgtattgtggccacattttttttaggatgagaagcatctctaaaattttgtaatagagtttattgaaaaatttaatatgattttaacctttaatataagaccatgctgtaaaagtatgggtgaaaatgaaatgttcagttgcatcgtgtttggtttccacattgcctcttctgtgttgaagttgaagttgacattgtttcttagataattgtcactagcagaactatttttttctactcttgttcttgtattagtttttgcctttcttactattgtggaaagatatgaccaattttgaagtcttagatgtttttatctataataaaaatgaatattagcagaaggccaagtaagtgatgatgctgtcaataagacatgaaaagtcagtcttaccgtagtgcctactagtctcagcctgagcagctatgtgtgtgtttctgcttccccagatcagacactcctctaatttacaaagcagtgcccagctggtttgtgcgagtggagaacatggtggaccagctcctaaggaacaatgacctgtgctactggtgagcagtaagatgtgtttcttcatagtgtcttttgtcatgtggttagtaagtatggtttacacttcccccaagttataattttaataacccatcttttattgggtattgtaatagctatcttttcttctgtgtgtttaggagcacaaaataattcaaataatgttacagaacagaagtaacatccttcttgtgataaagtatgtaagggagtatttttctttttaaactcattggaaatgataaaccaccatttattcgatttagggaatgaaatgaccttggaaaaatatggctgtactgccagagtttgctagccttcaataatagtcattttcagagtaaacattattttcagatatacctgcaaaagccatttgtacttactcttgttggtcctgcagtggatgatgtaccctgtgcttggctgtatggataagctccaagcacagaagcctttgctttccatagctgatatgtgtcctgcaggtgatagcccaagaagtatcatttcagcctctgggtacaaaatgaaacaaggcttgaacctgtgtatttcagatgaatgtttttcactacaagtttgaaaagtaatcaccactcttaacttctcacaaggacccaactagactctagaaaactgtatctgagtttaggagaatggggagaatctcagggcagcaaaggaaatagttataaactgtagctttctaatatt

SEQ ID NO: 133795 - DNA, 1250 bp, Homo sapiens
ttttcctgtctacccacatgacaccacaccagtcagcctcagcacagggagaggtgaacacagatccaggtggaagcatgtcagctttccagcttgtcttggagtcaacccagagtgtggtttcaccaacataaggcaatctctttaattttatatttaggcatcataacacagtgatgaagactatagactctggagccaggctgtttggttttgaatcctagcattgctgcttcatagctgagttacttcttggtacctcgactttcctatctgtaaaataggaaatttttggtttttcagatgtgtgtgctgctgttataaatcaaatttgatttagttttaaaacattcctgtgtggctgctctgcttatggagtagccattctttattgctttactttcttaattcctttcacttaaaaaattgatgtatgtcatctatcttctcatttagtggatactctgctacatatggaggtctgggaaataatatttgagaagactagactgggtgacctaacccctgtccaactgtgagggtctgattctccgaatggtcttgagttaccttcagtttacaggacaaagttgatgaaatgtatatgttacaatatagaacaattatcttgggaatctattacctcatgctcacacccatacatagactgttttattcttccctctcttttgccttttctcaggaggactatcgggtctgtatggactttaacattattcggaaagactcactccctgtttgccctgtggatgcttcaggctgcttcacaacggaggtgacagatttcgcaggacagtatgtgaaggtctgtaatccatatagcatagaagggtgactgttacttctgattagtctctaccatcatttataattgtattgtaattcttctaggaagttgtttttatttggttttgtcatcgcatgaaatccgtaaagacagatgttatcagttacgttcagagggtctcatatctttagaggatgcatgctgaaatttcatggggaaagatcagaaaaactccagttcatgcctcatgaagcacctttgtgaccttggggttgtcatttcagatcgaaaaactttatgaccttaaatgttgtggaatgtacttgaaaattacttaaagttagtgactaaaaataataaataatatttgttatttgtgccttttattcataacaaggtatcagattctagtaatatattgttcctaagtattatagtatgt

SEQ ID NO: 133796 - DNA, 1098 bp, Homo sapiens
taaggtggtggagtacctgtaagtagaacttactactcgtggctcccacctgttcctttcaagatttgcctttatgactgaataacttgagctgagttgaaaggagaaagagaagcaaaacatatgcagtgattgaaaatgtaccaggaagtgaacaatttagggagcatgctttctgagactgtatcctaaactgcatagggacaaaaagttgggggagggagaactaatgaaaaacacgtttgtaaccaaggaaattagaaatttttatctgccattctccagataattatttcgtttataagtggtaactttttatttatgggaaaaatgtattgaattagcatgtttcttcccagcctgcattattctttcttttctatttctgaaaataattttaccggttaaaagcattttcaggttcttaggaaaaactgttacaaagttaacgttgtaacacagtaatgtttcatccctgaagcctgctgtcctttctttccagtgtaaagagaatggcgctttcactgtgcttgttgacaactatgtgaaggaagaagaaggcacaggggttgtccaccaagctccttacttcggtgctgtgagtagcataagtctggcaaatgtatttgagtatgtcggtagccacttttcatagatgcggagtcctgtgtctcatcatgttgggttaccaggttggcctcttttctggctcactgcctgcaagatggcttgtaaaatttgcatctgcaattccctttcatcctaagctgatttctggaaagagtgggccaaatccagtaaactctttttggtgtgcagttccgtgagttttgacaggcatctagagacgtgcaggtgcctcagccaccaagatacagaccattcccatcacctctgctgtgttcttaattaaatgttcagaagggggaatctgacctctcccctcaaaacagtactctacagttaattttatattttgactagaataatttttctaaaaacacattcctttttatgtaatttgtgtatgaataaaaacagaataacataaaggcacatgctttacagtaaaccacctctcaccttaaatcatggcac

SEQ ID NO: 133797 - DNA, 1100 bp, Homo sapiens
tgcttgatgcatgtctttggaatcagccaagttcagaatataacccaagtccatgtttttcctttttctcgtagatgttgccagaggacgattactcattttaatggaagccagattgtcagccctctataaattggagagtgactatgagatccttgaaaggtgaatattcaaatagttgctctgtgtttgtgtgcatgtgtctgtatgtgtgtctttagttttaaaaagaaataaactttgttatccaaaagcttgcattattcaaatttagttttaagtactaatactatactaagtactttgcagtcacacattacagcatgaatggctagggctaagaagccagtaaaccagaggggagtggtagcttgatgtggctgcagcctcatatttgattttaatctaattgtgagtttgcctttctccttttctagatttcctggtgcctatcttaaaggcaagaagtacaggcccctgtttgactatttcctgaaggtaagcttagggaccgctactgtgggcgctctccacaatctgattatttgatagctggggtgttgtgagaagtggaattgacattacttttatgagtgtacctgaatccagaaagtctgctttagtaccaacaaaattaaattgtttgtgtagctttcttgtcttagaggatttttttttttttttttaaaaacagggtttcctctgtcccccaggctggagtgcagtggcacaatcacagctcactgcaacctcgacctcttgggctcaagtgattcccctgccccatcccgagtagctgggactactggcacacagcaccacaccgggctaagtttttagttttttgtagagacagaatctcgctatgctgcccaggctggtcttgaactcctggaattgcaagcatgagccactgcacctggctgggattttttgttgttgttgtttttgagatggagtgcaaatatcgtgcaatagcgcgatcttggctgactgcaacctctgccccccaggttcaagcaattctcctgcctcagcctcccgagcagctgggattacaggcatgctgtaatttttgtactttttagtagagatggggt

SEQ ID NO: 133798 - DNA, 1516 bp, Homo sapiens
aatacaaaaattagccacgtgtggtgacacgcacctataatcccagctactcgggaggctgaggcacaagaatcacttgaacccaggaggcaggggctgcagtgagccaagattgtaccacagcactccagcctagtgacacagtgagactccatctaaaaaaaaaaaaaaaaaagtcaccaggtgtcaaaagacattatttttgagactactaaggtgatgattaaaacattttttaaagtatttaaaaatttttttacttggaatttcttgctattttctgtttgtaagtctggtaagtggtttcttcggtttaccctgaagatttattttattcctctttaggagtagttcctttttcttaggtgtctgttattgtggatttctaaaacaatactttacctcaatttatttcaggatgttcaagatccttcagtatttgtaactttccctttggaagaagatgaaactgtatctttagttgcttggacaaccactccctggactctacctagtaaccttgctgtgtgtgttaatccagaaatgcaatatgtgaaaattaaaggtaagtgggaggctggttacttatgattaatatggataagataattttatattttggaaaatatgaaagcttacctttctttttgcatgaagaatagaattatttgaaaacaatctgacttaattagaaaaataactttaaacatttgttttcatttctaattgaaaactaacaaaacaattaaaatagtacagagatataaaaagtagaacataaaattttcttataatttccagtttatagtacatttttccacaccatgcccctgtgacagatgaagaatctaagattcagcgatgtggcatcacgtcgttactagcaattgataccagaacttgagaactttttgcctttcaaatgtcccctggtagagagttaccagtctcaacgagggcctttccgagatttaaaaagaagattggtactttgtgaacaaatataccttcaggtttggtagttttgtggcggtaaaagaaaaagagaaaaactcattgccatgaaaaaagctatggcacagctgctgtggaaggcagtgacatttcttcaaaaagctgaatgagatgacactatggcccagcaatttcacttctgagtgttttccccaaagaattgaaagcagtcttgaacagttacttgtacacccgtgttcataggagcattattcacagtagtcaaaagatagaagcaacccaagtgtctatcattggataaatgaataaaccaaatagggtatttacgtacagtggaatattattcagcctaaaaaagaaaggaaattctgatacaggctatgccttgaatgaacctggaggacattatgctaattaaaatgagccagtcaccaaaagacagatactacatgattctatttatatgaggtatcgagaagtgaacttcagagagcaaagactagtagaatggtggttgacagaggctgggagggaaggggga

SEQ ID NO: 133799 - DNA, 1785 bp, Homo sapiens
caatgcattatatcaggtggcatgtgttgcggctatgtcacattgatggtgataactttgttcacttggttaaagtgctgtcagctttctgctttgtaaagttgtagtttttcctttgtaattaataagtatcttgtggggagattctttccaaatattcttttttttgtcatacattcacttattaattttaacatccatggatggtttttgccagtaataattatgcctgtgatatttgccaagtggtggttttggtagacttttataagtgaatatttatacttgtaaataacattttgtgcatgtaggatgaatgccgagaaaactggttcttaaccttacataatatgttgttggcagtatagatttacttgtaccattgattattctgttttcccaaaattttcatttgtgatgacaacagaaataaacacacattgatgtacaattataaatatcattgtctaatactgttctaatattaatattttaaagtctactgttagcagacttggccgatggattgactttgacaatgactataaaactctgtatccacaattcatggaatcagtctggtaggtttatttaaaattgtaaatatggtaaatattctattctgttgtattgataattggaaaaatgcactagcatgaatcagtttatttttgagtccatcgttatttctctgaaaatctttgggaacaggtttgtttttgaatgtagaacttttatttttatttttttgagactgagtctcgctcagttgcccaggctggagggcagtggcacagtcttggcccactgcaacctccgcctctcaggttcaagcgattctcttgcttcagcctcccaagtagctgggattacaggcgcccgccaccatgcttggctaatttttgtctttttagtagagatggggtttcaccttgttggccagggtggtctcgaacttctgacctaggtgatccatccaccttgatctctcaaagtgctacgattacagacgtgagccactgcgcccagcctgccagttgcttttcttaacattatgtgttaaatatcattcgatatcagtagatattagcattttaatgtctgcctgatgtcttactatattgatctgttataatttaccagccagtctcccaatgaaagacattgttttttcacttatttggcagacagaaactctaaaaagaaaatggcataaatgtttgcattttcagaaatagaattttgttctgtaattgtgaaactccatctcttaccaggtgggtcttcaaacaactctatgataaaggccttgtttatagaggtgtgaaagtcatgcccttctctacggcatgtaacactccactttccaacttcgagtcacaccagaattataaggtacgtgaaatgtagagacattattcagcattgagttttgtaggtggaagctgagtagttatgatcacagtaggtattcccaagtagacccagtgtggaatgttgcccacgacatccaccactttgaccacttcttactgagtgctggaaatattgccagttagtatactaaggctctgttaagatgagggattttttttccacattggatttatgatgtgtcttaatgtgataggttttgcttgttttgaccatatttttgtgcctctctgttgggttaacaagtccagctttgacatacttcctgtagtcatcgtttcttaagggttgagtaattttatgccttatctgggacctcatgatatcatttatttgttaacggtatttgga

SEQ ID NO: 133800 - DNA, 1431 bp, Homo sapiens
caccctcgtttaggcacttatacctaagtaccccatagaaggctactatagtactacctgcctttagtcctcattcacctaaaagactagtcctttaatcagtgttttcattatatgtctcctctggtcaaaaactatgagataggggtttattgccctattttactgatgagataactcaagatcaggataaataatttgccttatgtcatggaactaataaatgaaaaatggataatcaaatggaggtctctgtagctctaccacaattgtagcctttctgaaggcaggaccaccagtaaatatcaaatcaattatgtctgtcggtttcctgatcttgctgcttttctccttgaagactccactatgacaagagctatctatagaaaaatgccttaaattttggctgtttttaaatggcttgatatatttttattacctgttagatttaccttctatgatggtcctccttttgcaactggactgcctcactatggacatatacttgcgggtacaattaaagatatagttacaagatatgctcaccagagtgggtttcatgttgacagaagatttggatgggattgccatggcttacctgtggtatgtttgagtatccagctttataattttctgattttttttataagcattagattttgtcatataatatgttcaagtatgatgaacgttgactgtcagaccttctagttcatttctataatatttgtagtttgatttgttttgttttctagagttgcatagttgcagttgttttcatagggcagcgtggtaacagtcttatcacaaattttcaggaatatgaaattgataagacactgggaatcagaggaccagaggatgtggccaaaatggggattacagagtataacaatcagtgccgagcaattgtgatgagatattctgctgagtggaaggtatgttgggtttttttcagtagaatgaacagcaaatgtagttactaaatgggcattgaaatggtttatggtcccttgtgctttttttattaatttattttttgtagaaaaagtgttagcttccaccttcaaccctattacttaaacggttagcttaaactgaaccatctctcttctgacttctgtgtgcttaattggtctaactttcttgcatgatcaccaatagggaaaaattctaataagtataacatgatatataggccttttctttttttctcaaatacttttttcaatttttttaacttttcattttgaaataatttgacttattaaacaattgaaaaagtagtatgatgggttcccctatatccttcatccatctttcccagctgctaacatcttcggtaaccataatattaatagaattttcaaaagcagttgccccattaatttttatttctgaccaatcacatattgcatttggttgtcatgt

SEQ ID NO: 133801 - DNA, 1482 bp, Homo sapiens
tgacaaattgggcatcattaaaatgaaaaatctttgtgcttcaaaaaatgccatcaagaaaataaaaagacggcccacagaacaggagaaattttttataaatcatatatctgataaaggatttgtatccaggatgtatacataacccttaaaacccaaccacaaaaagagcccaattagaaaataggcaaaggataaatatctatccaacgtggatacgcaaatggccaataagcatgtggaaagatgctcagcatcattagtccttagggaaatgcaaatcaaaaccacaagatactacttaacatctcctagaatgactgtaattcaaagatggacaataagatgtgttgggtaagatctgaagaaattagaatcctcattcactgctgagggaatgtaaaatagtacagtcactttggaaaaattttggcattttctcaaaaagttaaatacagaattatcatgtgacccagaaattctacttctagctacaaacccaagagaaatgaaaacatagatccacacaaaattttgtatgtgaatgttcatagcagcgttattcgtaataaccaaaaagtggaaacaatacaggtatccaagaaatgatgaatggataaacaaaatgtggcatattcatgaaatggaatactattcagctatcaaaagtaatgaagtatgaatacatattacatcatggatgagccttgaaaacatgctagagaaaggaaaccagatgcaataggccacatatagatgattcctataaattttcccatttatatgaaatgtccagaataggtaaatctgcagggacagaaagaagataaatcgttgccactggctatggagaagaaagaatggggagtgactgctaatggttttggggtgttttggtggggaggggaggttgaaaacgttttgaaattaggtattactagttatactaccttgtaaatatactaaaaagccactgaattgtacactttttacattacactatgtaaattgtacatcaataaagctgtaattttttaaaagtatggatagtgtcatgtacacccatgttaataatatggtactctgttattcctagatttctcttttgacagtaataaatttgatttcttttgcagcaacaaaatgcttcaacaagttccagaaaacataaattttcctgctgaagaagagaaaatcttggagttttggactgaatttaattgttttcaggaatgcttaaagcaatcaaaacataaaccaaagtatgtgaattttttaggttaagttcccttaagaatagtcatttcttagactgaattccattaaagcagatactttttttttttttttttttttgagatggagtctcgcactgtcatccaggctggagggcagtggtgcaatctctgctcactgctacctctgcctcccggatgcaagtgattctcctgcctcagcctcccgagtagctgggattacagg

SEQ ID NO: 133802 - DNA, 2261 bp, Homo sapiens
aaggagaaacagaaatggatttagaggagaatgaaaagggggaacagaaataggcttataggtaggatccacatgacttgatgattaattggttgtgtgtatcttctgagtagtgtcaggggtgactcaaaaatgtcatgcctaagtaatgggaagaatattggaaccactaatacagtagtttaaaagggaagcaattctggaaggaattatgaaattttaaacaaaacatggttttagtgtgcgtttctaaaatatattgaggcaaaataatatgaagtaatgtgaataatatgtagttaatatcagggagggtggtctcgaaattgctgaacgggaagttgaggttaaggtgacctgaaggagttgtggagcagcgaagagtcaagggcctggattataataagagggaagcaaaggggatggcatccctctgcacaacaaggttgttgtgcaaggttaacctgctctgtccctgccctgtggttgctggatgctgttgtgcatggacagctctccagtggattcgatgggccatagcaatcctgtgatttatgcatggaggctgcttctcctcagcagctgccatagcccggtcgctggtacatgattcttcctgaatagtcaatgctgttatactgagtgtttatgcttgacgtaataatgcagtgattcttaatctttggggaaagtagagactccctaaaaaacacagtaaaagctgaatgagctggccaggcatagtggctcatgcctgtaatcccagccctttgggagcccagggcaagaggatcgctttagcctaggagttgaagaccagccagggcaacatggcaaaaccctgtctctacaaaccaccccctccccaccaaaaaaaaaaaaaaaaaaagctgagtgtggtggtgcacacctgtagtcctagctacttggcgggctaaactgggaggaacacctgaacccagggaggtcaaggctgcagtgagccatgattgtgccactgcactccagcctaggtgacagagtgagccactgtctcaaaaaaaaaaaaaaaaaaggaatgatcctcttctcagaaagcttaaatcttattttctcaaaaataaaaattcagatagatattcctgaataattgttagaacagtgcaagagtggtgatgttcagactttgatgtgaatgctcatcccctagggatcttgttaaaatgcaggttctgactcgtaggtgcgaggtgaggctggtaagtctgcatctctaataagctcccatagatgtgggccatagtaggaccagccttgaagagattagaatgtgttggtatctaaaggtctgttagtcttcagataacaatcccataagtttcagttggcctctgataaggtacacaatgaacctaaataaatcagtaaatgcacaaacacttattttggtccttgaaaggctagaggttataataagagttgaagatctaaaatgccttaaaccttctgtttaataccttttaatggcatactgtgatcagaaatagctatttcagttagttaaacagcccaactgttcttgtcctgttttttcttaaattaaactcagaggcactcacacatctgaaaaattaatgagggtaaaagaaaatgaaagatactacttgtcacagacttttttttaaatgataacttgaatcaataacttgattagactatgatgcttttgatgctttcaaaactgtttgaggtatgtaggtgtcttttcctgtagagttgattaccctggtctgttgtggttcttgagtacttaagattttttatcttctctgttgttcccttattagcaattttatccccttctgatctgatactgacttggaaagctcgtcacccaccttgttagaattgttaagtaaatataaatagactttgagaaggaaaggtctcaagggtggctcactagatacttaagtcatagattgatcaagtatctctgcatgaggttattagcaaaacatttaaaaagacactttaagacttctctcattagggactaaaccagaaaggtatagggctcatccttcataaaaatcatgaataagcaataaaaagggtaaaatggaaaactggaatctatatttgaatgtgagattctcatctttttagctttaagattttttaagttttaccagttttcctcaaagagaagatgaagttacttcaagagaactgatttctgtcatgtgagtgtaggtaagaaaattcttaactactttgag

SEQ ID NO: 133803 - DNA, 1060 bp, Homo sapiens
agtcctggaagggaactcatgaatggtataggtgaggagactgcagactggctcaattgagtgactggtctcagaatccagccaagcctattaagtaacacgaaagcatcagatttttaaagactgaattatagttcccattataaacagttaatgccaaaaatgccaatatcccctcttcatttcaaaagagcactttcaaaataggtttccacagccctgacagtgagaataacctgttttacttctatctactgaacatcttaaaaacaatttgtttattgctaaccaagtcttttttttttcctaggattgtcgaaagaaacataaagacgcaaaaaggaaaatgaaaccaaaataataaatgtcagctggttttgatactgaatgtgaacaaggctcacctaaggaaactgacccagaaaacagttttagctgacaaagaagaaatttcagagtgaaggaattttaaaaatctggctgacggaatatcattctggttgccatctttttctgtggaactcctctgcatttcttcctaagtaattacttcaaaaattaaattcaacttcttataaaggaagaacaagatagtccttgaaaatactttttgtatataatctctttgccctctatcctgagtaactaatggacatcttctcatgcaaggtttatatgaagcctttttaaataaatgagtcaaagcacttgtattttccagcctaggctttgtgtgaattataggctatttgaaattttatttctgattatgtcaaatacaccttccattttgtcatttttgtttaaactgataaattacaagtcaacattgagttttatacttgtgttttggtgaatggttaactgaaatataggacatttcagaccaacatcatataagagttctgtgaggaccaggagaggaagccaaatacagttatcttgtcattgcctctaggaattaaggaacaacatctagatgtacaccaatcccaaaattctagttagactaaaagcttatgaaaaataccaagtgcctgaaagataggtagtcacaatt

SEQ ID NO: 133804 - DNA, 1108 bp, Homo sapiens
gacttgtgaggtgattgtcctgatcttatagcagtagtttttccagcagttctagcaaaaagttttgggtattgaaaatgtaaagatatattccttttctcatttataaatagacaagagggaaacctgatttccctgtatcctattatattttaggcttctcatgcaagcacagatgccatggttattttaggtgtcatttttaaaaattatatagctcatttataaacctttattttttaaaccttttttatattactgctgtccttatcagatcattctagcaatgccaaaattatgatagtggcttctgaaaatatttgaaaaatctaaaaagatgatactacctatttttttgatactattttaaattaatgattaacatattggaactttagatatgtctacgtggtaaaagtaatcaaatgaatgtgttcagaaatacttggctgtggagttacaatcccatcatcttttgttgtcataacgatatagagacctacagagttgaaacagtgaaacctggaaagattgtctggcaggaagaccctcgtttacaagacagcagttcagaagaggaagatgttactgaagaaacagatcacagaaactccagtcctgggtaaacaatttgtttctttgcaggcatagttcataatttgtaaaatctgaattagacatactttagaaatattttagcttctcttcacatgacaactaaattgtcttagcttctttttttattttattttttttttttgagacggagtgttgctctgtcgcccaggctgtagtgcaatggcatgatctcagctcactgcaacctccgcctcccagattcaagcaattctcctgtcccagcctcccaagtagctgggattacaggcacgtgccaaccacacctggctaatttttgtatttttagtagaggcgaggtttcaccatgttggccaggctggtttcgaactcctgacctcaagtaatctgcccaccttggcctcccaaagtgctaggattacaggcgccctgccactgagcctggacatctcagtttctttagagtgttctctagcctttttataatggagagtgtgtttccttttccatg

SEQ ID NO: 133805 - DNA, 1111 bp, Homo sapiens
aagactgaaacaactatccactaatatcttatattgtcagatataccattaccatttttcactctttatcatttttagatttacgtaatttagattatgtttagaatgttaaaaaaatcaaagagtctataatcactgtagttattagtatcttgctctattacatttgtcgatctttaccttaaaagttttagacttgctactgaaagccattaaattcagactttcataattaggaacagaagtaggacttttcattgtctggtcacgcagactttctgagtttgctatgactgagggtctttggttatggaggttagtgaaatgaggttaaagtttcttcttcctgtcttaatggattttgaacatgtttaggtacttggtaaatatttgatgattgagacttctcaggctgtgttttccaagagagtattaattatcccttttcctcaaagaggtaaatgaaaagaaaactgctgaggaagaagagcttgctgaagaaaaaaagaaagccctgaatgttgtacaaagtgttttgcaaatcaacttaagcaattctacaaacagaggatcagtagctgctaagaaatttaagtatgttttatgttccatcccattctaccatatcatcctttgccataaatgtcttcttgaactcaatttaaaactaggtctcttttaatggcctggggaggcagctggcaatatgtatcagacccttaaaaatatacttgcctttgacccagtgattcacttcaaggaactaatcttaaattatttctgtatttatacacttagatgtcatagcagcatcgctttcattagtgaaacaaatgggaaacagtttaaatagtaactgtaaaagtatttatataaacgtaactgttatggaaattttcaggcatgaaatttagagagactaatgaaagccctgtataccatcattacctgtacaccaggtaatgaaagccctgtacaccatcacctagcttttacagtcaccaacatgtgaccagtgttctcttctatacctttatccaacccctactttacacaatgaaatgttttatgcaaatcccagatagtatatcattttatctgtatgtatttt

SEQ ID NO: 133806 - DNA, 1001 bp, Homo sapiens
atttataccttgccaagtcttgccaagatttactgtaatgggcttttgttcattcttctaacaattgttaagtacacctttatagtaagtgccagatttatagtatgaggatggtgatcttgcctttcatacagtttttggctcatggtgtggcatgctgacagtcacagttcagttacacagggccaggagggggttgtgcccctgtgccttggcagcacgcaggagacacactaagtcagttgggagcttctgtagtctgagctgagtggtaggaaaagatttgtgggaattggtcaggcccaggtgaaagggtggaaagggagtggaaaggctttcattctaggaaaaaggaaccgtttatacaagggtgaatgttttcaatcagtgtaattaaaacttatacagcatgagatggcaagaaatgaggctagtggtttcattttgttcataaaatgaaaagagagtgaagaattttaagcaaaggagagaagattaattgtgtctattttggaacaggagttgacaaactacacctcaaaggccatccagcccatgacctatttatgtacagccttcaagctaaaaatagtttttgagtacagaacaaagacgatatgtggcctgcaaagcctaacatatttactctggccttttacagaaaaagtttgtcaacctctgtttgggagagatccttcagaccatgatgaaaacaaatcgaacggctccgtctgtaaccaaggagagcctttggggaggtggaaagtcaaaaccgtaacaacagcaatgggaatagattgactgaattgataccaaaaagtttaattgataggacttggtgataactggatagggatagaaagaggaattgtaagtttctgtcttaggcaaataaacagatggtgatggcattcactagataaggaaaaagggcaggaagtagacttggcaggggaagggagtgataggtttagacatgttcagtttgagattgggttgtt

SEQ ID NO: 133807 - DNA, 1788 bp, Homo sapiens
aatgacttatttgagattaagcaatattttttgtatcaaagattgatgagttttcctaaaaccaagtgctttagttttgtttcttgacttgcgtaacatcatcaaatatgatccctcaaaatactgccacaacctgaagaagataggggaggatttctcaaacaccattcctatatccagcctgacttgggaattagaaggagggaatgaccctatgagtaagaaacggcgaggagagttctctgactttcatggccctcccaagaagataataaaagtgcagaaggatgagagttccactgggtctctggccatgagtacaaggcccaggagggtaatagagagaccacccttaacacagcaacaggctgcacaaaaaagaacttgtgattccattactccttctaaatcatctcctgtacctgtttctgatactcagaaacttaaaaatctaccttttaagacttctggcttggaaactgccaagaagagaaacagcatttctgatgatgatactgattctgaagatgaattgagaatgatgattgcgaaagaggaaaacttacagagaactacacaaccctcaataaatgaatctgaaagtgatccttttgaagttgtaagggatgatttcaaatcaggcgttcacaaactgcattctttaataggtttaggtatcaaaaatcgtgtctcttgccatgatagtgatgatgatattatgagaaatgatcgtgagtatgactcaggagatacagatgaaattattgcgatgaaaaaaaatgttgctaaggtcaaaaacagtacagaattttcacaaatggaaaaatctacgaagaaaacttctttcaaaaatagagaaaactgtgagctttctgatcactgtattaaactacaaaaaagaaaaagcaatgtagagtcagccctcagtcatggattaaagtctcttaatcgtaaatctccctctcactccagtagcagtgaagatgctgattctgcatcagaattagctgactctgaaggaggtgaggagtataatgccatgatgaaaaactgccttcgtgtgaatctcactttagctgatttggaacaattggctggcagtgatctgaaggttccaaatgaagatactaagagtgatggaccagaaaccaccacccaatgcaagtttgacagaggctccaagagccccaagactcccactggcctccgcagaggccgacagtgtattcgtcctgcggagattgtggcttccctgttagaaggagaggagaacacctgtggcaaacagaaaccaaaggaaaacaatttaaagccaaaatttcaggctttcaagggagtaggctgtctatatgaaaaggagtcaatgaaaaaatccttgaaagacagtgttgcctctaacaataaagatcagaattccatgaaacatgaggatcccagtatcatatccatggaagatgggtccccatatgttaatggctcattaggtgaagtgactccatgccaacatgcaaagaaggcgaatggcccaaactatattcagcctcaaaaaagacagaccacttttgaaagccaggatcgcaaggcagtgtcccctagcagttctgaaaagagaagtaagaatcctatttctaggccattagaaggtaagaagtccttaagtcttagtgcaaagactcacaacataggctttgacaaagacagctgccatagtaccacaaagacagaagcttcacaggaagagcggtctgattcaagcggcctcacatctctcaagaaatcaccaaaggt

SEQ ID NO: 133808 - DNA, 1068 bp, Homo sapiens
aactaggctttgtgacctgtggcaagttacttaaacttctcagcccaagtttgcttatgtgatgaatgacaaaagatagtgcttgcctcataatatttctgtgagaattaaattaaatgatacatttgcaatactttgggaggctaaggcaggtggatcacttgaggtcaggagtttgagaccagcctggccaacatggtgaaaccccatctttactaaaaataccacaattagctgggtgtggtggcagacacctgtaatcccagctacttgggaggctgagacaggagaatcaccagggaggcagaggttgcagtgagccaagatagtgccactgcactccagcctgggcgacagaaggacactctgtctcaaaaagaaaagataaatttgtacttagtacagtatctaccacctacaaaattctgttaatggtattattaaggaagctgacggcagatgctcagagaaatcaattactacggcatagtaattcaaacagttcagtcactcatagttaattcatctgcaagttctacagtgataattagtatgaggtgataaataaaattaaggtgctgtaggattccagagtgtcctctgattcacctgaaaagatgattgttttatagttacaggaaatatatgttttatagttacaggaaataacaataaaatatacattaaatatcagttattcagaggttcctgacatttgtttacaaacaaattgcaaataaattttgctttactttttacacattttgcctcattccaatctagtaacactgtgagatagggagtgtaaagactcttttggtaagttgtcaagatgaaacaagagcctaggctccctctctccaggtctcatttcttttcttccacttcccctggatctctttgtgataaacaagcctgcttttcttgatactaaataattagaaaaagcacaagctgaaatatatttttacattgccatgtacttgtaataattctttactttataggtatgtctgttttaaataaaacaaaatggaaaggtggaacattacaaattcaactagcaaa

SEQ ID NO: 133809 - DNA, 1051 bp, Homo sapiens
ggaagaaggctggggtgggtaggttgggggtggagacaattaggaagaggtaggctagctctttttatcttttagtgcgttacatcctgtttctgtcagactttgttaaagacagtaaatgaatgtatgagtgagtcaaggaaaaacatctaaaaacatgaatacataaaattaagagggatagagtgtaatattatggccatttggaggaaaaaaactctgtctgtacctgtgtctatatgggtatggggttgctgttccaaagtgcattcatgaaagatgtggatgtagggcttgggcaaaacctcgaagactaaaatttggaagtaatacaataggaagtgaaatacagatccaggagacggatttgatacagaaggttcagaggaagtagttgttttgttagattttagaagaactaagggaaagaactcttctctgtatacagaaaattacttttcccactgaaacacacccaagtatatgcccagccttcatgaaagtgaacagagaaacgaagcgcctttatgtgggtggccttagccaggacatttctgaggcagacctacaaaatcagttcagcagatttggagaagtttcggatgtggagatcatcacacggaaagatgaccaaggtaatttatggtccttcactgggcagttataggcagacataactcaggttaagtgctagaaaataaaacaaccccaagataaatgttagctctgaacaccaaaagttttaagtgatgttgtggaggtataatgtgtgatgtggaacttgaccagaatttgtttctgaaataagaaaaaattccaaattctaaaacatctgatttcagaaacatattaacttccagttttgagaactagaattttctaacatggattaagtgtcccgttaagtagactatcactagcatacaatcaaaatgtttccttatctgactactggacattttcttctttttttttttggaatattttgataattatgcttatttttatagccaataaaaaacaaggtttatctttgaaataataagttttc

SEQ ID NO: 133810 - DNA, 1127 bp, Homo sapiens
gagactgaggcgggaggattgcttgaagtcaggagtttaagaccagcctaggtaataaagccagaccttgtctctatgagaaggaaaaaaaaattagctaggcacagtggcatacctgtggtcccagctactcaggaggatcctttgagcctgggagttcaaggctgcagtgcactatgattacaccactgcactccaggctgggtgacagcgtaagaccctcatctcttaaaaaggaagaaagaaaaaaaaagtggtggtgttagtaaccacactggttttgagaaaattctttttaattttttaattttttttattttaatgggggaaggtgacttaattggaagagagtaagagggacaaaatgggaatgctttgaggaaaatggggttattagatgaaacacgtgttagtaattggagtgattatttttgatatttgccttttagaaaatcttttcaagccatacaccaattcaatttggaaggatggaagtcttcaaaagatctgaaaaatcagcttggacatttagaatcagaactttcatttctaagtacgcttactggcatcaatataagaaatcactccaagcagacagaagacctaacaagcactgagatgacagaaaagagtaagcattttttttaaatctagacatagtatggaagcttaccttattatgcataagaaattggttgtcataatattgaattaaaattctacaaggtaagtatttgaaagtatggttgtggtaaacttgtttactcacatatcttttgaacatcacggtgttcaaaaagctgcctgggccaggccccgtgatcatgcctataatcccagcttttgggaggccaaggcatgcagatcacctgaggtcaggagtttgagacaagcctggccaacatggtgcaactctgtctctactgaaaatacaaaaattagccggatgtgttggtgggcacctgtaatctaagctacttgggaagctgagccaggagaatcatttgaacccgggaggtggaagttgcagtgagctgagattgtgccattgcactccaccctgggggacagagcaagactccatttaaaacaaaaaaaaaaagggctgcctgagataaatattaaag

SEQ ID NO: 133811 - DNA, 1079 bp, Homo sapiens
gagattatactgttagctcacatgctgaatgaattagagtcagttgagctgtgccagacagaaaacttaaaaataaaggtactagaagtgtatttctctattacttaagtaaacttgtaagttttcaagggctaatatggtggttttatgataatcaggttctaccatcagccaacatggcttcaagtcatggcacaatgatcacattagcatttcaggtatcaggaagaagttgggcaaagaaagcctcgcctgttcttttaaaggacactttctggaagttgtacattcatcattttcacttatattctattggccaacaagttcatgcaaaggatgctgggaatttagtctttgttatgcttggccatatggccagtgaaaaactggggcaagaaaaaagtataaatagaggggactactagcagtttctgtcctatatgctttagcggatgcagggggaaaaaaatctaaggagaggaactgtagatatcttctttgaaggacatagaacctagtaattgctgagtctctaaagagacatgagttgtcattgtttaagttttaaagtatgtatgtgttttgggactgattggttttactaacaaagtgctacagaaagagtgtgttctccctggctgtgttaagaactctcactttctctctgagccttttagattttatgattcttcttgaagaccaggactggtaaacaaggtgttggaagaaattacagagagctgtggaatcaacagggtttttggaatcagttgtgtgagaggcaccaagagttcttacttggggagggaaaaacaaaggactatctcgtttctctttattgcttacaattctgatataataacttgatgaaaagtttttgaaatgtttattacttaatggtaaattctagcatattctataccaacttgtgtatgtatgcctttagaaacatatctagtagaattgctgggtcaaaggaaacttacaaattctgattgatagtggcaaattgccttctaaaatagttttaccattttacatactgagcacatttttacatttttactgtgaagactgat

SEQ ID NO: 133812 - DNA, 1050 bp, Homo sapiens
tcaaatttatttaaaatccgcattttggaaaaacattctttcaagagtatttgaagtaaaacaacaaatgttaataaagaatatcatcacagcaggcttatcatgtagtggtatactgctaacttcctgagccagactctgtgttttcagcttctcaattgtgcatttcgagtttaaataccaaagcctgattcttgcgaagtaatgcttcctaaagcctgatatgggtactttaaagtacttccttttattccctttctttgttttcgggcataactgaaattaagtttggttgcatcgtaatacctcaggttctactcatttggatagcatcaaattattgacagcattaatccacacagcaaccagttctgaaagtcaacttaaataatatttcagggttcagattctctcaaaagcctaaccagatcatgaatattgtttttaggacttgtactaactctcctttatttggggttctattgtttcttattattatttattctatttggttgagctaataaaatctgtcaggcctaggatttttttccacaaagaaacatgggcagttctgtactatagtaccttgaggtgttctcatgattttgttatattcgatcataggtagtcttaaaatgccagaaaaattaaatatttctgcttcacaagtgttataatacagtaatgaccagggagtgtgctggcagttatggtaatagatgaatcacctaatgttgctgtttccttatgcatttgaatgggtgatggaaaatgggagcactagtctccatttccaaagctgatttgactctacgtgctttccagtcaggtatgaagtataattggtgtatttttcttatggagggtaaagagcttctaggagctggtctttgctagttataaaattactagggtggaaaaaacctatcacattgtcctgtaaccgtcaccaatatccacattgttttgtaaccatcaccactgtccttctccagaagtttttcatcatcccaaactgaaacatacccattaaacattaactcctcattc

SEQ ID NO: 133813 - DNA, 1066 bp, Homo sapiens
tctgagtgccccctcacttcaaatccttgtgtcaaattaattaggaaatactcaaatgtacacctggagacaaatacaatcaagagcagacttcacacgtactgtgctggtctacttgttatgctctggatggaatctggacttctgggaagaaagttcatgagcctagtattaatctttttgataggcagacatttagctatcacgctactacagtgatctaaccaaaatttgtatgtgaataagtgaggttcccaatgagtcacaagattttgactcataggtaattagagtcagatattgtgaaaggaactatcatacctgaagatgaattacacgtagactttctggtaaattaagaggcacggattccagggcattatggtccaagtagaggaaggtgaggttattcagtttctgtaaggaaaatttcatgtgagtgttattgaggttctgtacattctttcacaggattcaagcaatatatatgtgcatatgagtatatgtctatatatacagacttgcatattgatatgaatacatcaattatatcaattgttcgtatggtagtttcttgtttgggttttttttctgacttcacgtgtagtgtattttgatcctttatgatggccagtggagctctgccgcataccccacacttctgtccattcatctgatctctgaatatccggctctaatgccaacttctggtactctttgtgtttgtcttgataggaactaatgaggtgagtccctatgtgggattgaattttgaccctggtgctgccataacctctcctgtacctctggagtttcccatctcagttccaccaatttctagctaagtggttacttcttagaaatgtgtgtgcttgtatgtttttagtagagacgaggtttcaccatgttggctggtatggtatcgatttcctgacctcgtgatctgcccgcctcagcctcccaaagtgctgggattacaggtgtgagccaccatgcccggcctaaaaaaatacaaaaaattagacaggcgtggtggtgggcgcctgtagtcccagctactcgggag

SEQ ID NO: 133814 - DNA, 1051 bp, Homo sapiens
tctgatgtaactttaaaatgtcccttaaagttgaataaagataccttaattgtaatgaaaaatgaaaaaatggactatttgtacactttctaacagattgtacattttttgacagaatttacctgtgtgtgattatcataaactttatgataatgaatatttgatagtttctgaagttacctttagaagcaagaaaccttgccttttgaatgagattatgtctgttaccagcaatggcatggtcatcattttatctggggaatgattacatcagagctatggaaatcctggactaaagtgattactcctgtaggtcatgcattttgagacaaattgtctacctaaaccgaagtagattactttccctttttcctacataatatttgcttgaattgttaagaaatgtatttaattcttactacatataaaattttatattacatgctctcatgaaattcaaaggaaaatctccctatagaatttcacagtctaatatctttaaatattaaaagttaaattcagtatttacttttggatctttatttttttctggtgtttataatttgctaacattgtaaggaaaaagaaacacaggaaatatcccattttgagctttcgtagactgtaagtgtcatgagagggccaaccatgtctgtctaaataaatatttgctgtatgaacaagtgaaaaaatgagaaacaaaatagtcccatgaaataaaataaaggttatgtattttaactgagatatgggtataagctaggctgaatgagcctaataggatggttatttattatgtaaataatgtcttcatttattaaatcaaaatagtttttaagtgtaatcaaaatacaattctagaccaaagtttctcttttatctatcatatcatcactcatactatgcttagttttactataaaatacttactttgaatgcatttgctttgattcccctactcttgattttgttgtattttgcattaaataaagtgagcttgggaggaagaactggaagttttagtagttgattttcagcaagtgaaagttct

SEQ ID NO: 133815 - DNA, 1787 bp, Homo sapiens
attaagtaggacttgtaatttgttatttcatgacaagttttctattttaattgaaatgtatgtgtaattattgatgtatatgtgtgtttctgttctgtaagtttcttaaaggcaataattatatttaccgtatactgaggctgcacattgtattttgcaaataatccgtgtttaagtatttctcgaatagattttatatggatggaaaccacactttgtggaggctaagcttgcctaagctttggttgttctcacaagttcttgctccacatttctcactcataatgtgggatggcaaatggtgtgcactcccagtttgagtttatcattggaaataaaattccactgtttgtatttactgtatcttgagtcagtttttgattaccacaaggaataaagtccattatagctatttttaaaagatccatttgaaaaatatttagatgatacttaccatcattttctttcttgggaggtaatggtgttattgcctcatctttttgtaattgaagacttttctcattgggtattatcacagtttctttttcctattggaaaaataaaagtttgttacctagcttcattaagtctgtgtttctctgtaaaatgaagggatcacagacaccttctcgtagttacaattagtggcatttcctttgtgctccattaggctttcatacatatttccattttatcatctattaaattacaataagtattttttagcttgtttttattctagactatgagctccttgagtaaaagaactgggtgtttttatttttatatcgccagtagctacactcagtgcttaataaatgttgaacatcctgaaattccaaatgaaagctaggtgagaattccctgaattggaatgaaagtttttctgaggtgaaactgttcctcaggggtcttgtctgaactgagtttctcattcagattctaccattttgagtaagactagagctccagccatgtcacaagtataaactaccaattaaggtctttaggtctcttcttggggtgaccctttaattacctatatccctccattaagccctggctcttggatcccttttattccagcttaccttacctaccctgcttgggccactggggtaggccattaattctggggaaattggagtagatacaatttagatcctgtctttcctgttcttggagagtacgttttctgccattagattacagtgtattatgtggtgtcctattctttctgtcctttgtaagcatgttccattttagtctcggtcttgactcctgactctgcccttcaccttcattctcccatctgtgtggtggttgaacttcctccctctactctgtgtttgcacatcaagtcctgttgaattctactccactccacaaatatcttagaccctgcatttatattaagatagagaaacttctaaagccctgtaaagagaagaagcagagagaaaaataatctctaaactctttagggatcagggaatcttaatagattcaaatcatccaagtgagccaatagcctatgttatgatgggacttttttttctttaacttgaagctataattagtaatacctatcctttgtgtcttagtgatgggcaaaaataatgctatcatattaaaagcattaactgaaagaaagaaactgtggtgttaacatttgctcattgtgtacccctgcaaaaaagaaaagagaaagtagcaattataactggtcaatcttataagtctttatcctccaatttatagtggagaagaacttctgaaacaatcag

SEQ ID NO: 133816 - DNA, 3013 bp, Homo sapiens
cacgcccagctaatttttatgttgtcagtagagacagggtttcaccatgttagccaggatggtctcgatctcttgatctcgtgatttgcccgcctcggcctcccaaagtactgggattacaggtgtgagccattgcacccagctgagttctagttttgattcttcatgaaccttcccctgaccttggcaagttctttaacgttttgggccacagtttttttatcgattgaacttttatcgattgaatcgggttactacagagttcctcagcctctgcactactgacattttggacctgataattctctgttgtgggggctgtcctgtgtgcactttaggatgtttagcagcacctctgccttctacccactagatgctagtagttgcaccccacccccacccctactttgtgatgaccaaaaatgtctccagacattgccagctgtccactgatgggtgggggttggggaagcaaaatcattcgtattgataactgctgagttactagatacacatagaccctttttaatccagcattctggattttgtggaaagtctgtggtttggatctccgtcttaaatctcatacttatgcttgaagcctaattgtttgttcaaacaagaaatatgagaacccatgtattttacttcccagactaaagggtaaaatttatatggagagaattatgactcaatgtaaggaagagctcatggtaaaattgtattttatttgttaatttagtttttctcagtagtacataaatctctgtatagtgaattcataacctaaacaagtaaagtgatgcaagatgtgtccatgatgttatgatatttacacctaggcagatttataacttggaatagttatatcaatttaggaaattggaacatataagaaacttcagatgtgtagccattatgatttaattttgtttccagctgctcttatgctttatttccaagatgtagaagaaatggatttagaatcaggaaaccagggttttaggtctagccatccttggggacatatgaattcttaaaacagaaaaattatgtagaacagacaaggtttatttcttctattttcttttttacatcatggagctgattaagtgtgttatataatatgcatacatctgtattttactttagtgctcccaagcttgagaaatcgagtgaaaatgtgtagtgtttcaggtaattcttaaacactggctaaacattctcaaccagtattattgtgaacaaatttatgaagtatccttcttaaaatttcctttctaaaagttaaatgtgtgttcgttatgcatttatatttgttaattaaatgggtttatggtgcaacttggacttatttgttaatagttacagtttaacctattagctaacataactaaatacttggtagtataatgagaaaaataataaatgaattttcacatttttatttcctgctataaatatcaaattaactggtttagtctgtagctccgataggtaactgtgcagtcttgatgtactatttgaagaaaatactttattcttcatcgtctcccagggaatgcattgaggtttttctttgttttgttttgttttttgtttgtttgcttgttttgagacggagtcttgctcagtcacccaggctggagctcagtggttcaatctcggctcactgcaacctctgcctcctgggttcaagcaactctcctgcttcagcctcccaagtagctgggacttcaggtgcgtaccaccgcgcctggctaattttttgtgtttttagtagagacagggtttcaccatgttagccagggtggtctcaatctcctgacctcatgatctacccacctcggcctcctgaagtgctgggattacaggcgtgagccaccgtgcccagcctcattgttttgtttttaatgagaagtacttaagcaggtttgagttaaggcattttcaagtaccaaaaaatgattgttaatctgtctcctccttgggccctgagctagaggacgtgggatgcatttacttatatgcacttttagagggaggagccagagcagagttgaactgttcttgctaataaacaggaggaggttgaccacactctggggcagggaagccagcaactgagtgccttgtgagggggtggagggaaccctgccatcctcaccctggtgggccatccagatggtgctttgaaaagctgcagtgtccaatagtggttgtgaacttgtgagatatatgatttaagcaccctaatgaaacccttagtagtctctcttgtccactatcttttgtatgagtaaaatgttggaaggaacccaaagagatgcttactctgttttgtgtgccaggaaaaacagtgtgagcacccaggagtgtgcagcatctggatctgtgggctgctgggccagatgtgctacagtgagccttactgtttacttgatacctccaactcatgtgcactttatgtgctttattataccaattatttatctttatccttatgacaaccatatggaaaccatcttttttaaaaaacaaagaaagagacacttaaactaaataactcactcaaagtcacctagcttaaaagtgtcatgtcaggctttatacccacatagctcttatatcagattcctttttttttccttttgagacagagtctcgctctgtctcccaggctggagtgcagtggtgcaatctcggctcactgcaagctctgcctccccagttcacacctctcctgcctcagcctcctgagtatctgggactacaggcgcctgccaccacgcccagctacttttttgtatttttagtagagacggggtttcactgtgttagccaggatggtctcagtctcctgacctcgtgatctgccctcctcggcctcccaaagtgctgggattacagatgtgagacaccacacccagccagattccttgttttgaattgctaaatttgtttttgttttttgaaacaggatctcactctgacacccaggctggtgtgcagt

SEQ ID NO: 133817 - DNA, 3490 bp, Homo sapiens
ttgttgttttggtattctgaggcaaaaagattagttaattttgtgaatctgtatgccttgggtccttagtacctggatggcctcttacaaatcaaaaatatcattctatgtgctatgtggtgagctagggggatggatgtcataatggtgagatcacaaataccagtgtgaaagctttcctgaagaagaggtcagagaaaatggtctattccttaaatgaatgcttgttacattaatataccttcctgtcatttaaatattgtcctcagagtgatcaaaaaggtcatggcctgtgggtctttactgctaatgctacttccttcctcatttttagaaaaattactgttaatagaaatgatacactcactttctttaacatgatatttctatatttaaaaagagcataagaaaccattaacgtttaatttatgattcccacttgtcattctaatttatatttttaaagatttacattattttgagtaagttctaatcctatgaaatgatgcagatgtcaccaacaacttaaattcaattctgatcttatactaatacataattctaaatatattactttgagtaatacatgtttacttagatttactatattaagtataggttttgtgaagtcgtaagtgtatacctatatagtttcttgctattcttgattttcataataatgaaggtcaaagtgcccttctgctccttcttgttctgggctctcatgagcattgtcaggatcatcgtgatcttcactttcatcatcatcatctggaaatctcctgaaaacttgtgtctttagttgtattgtttgaccattagtgcttcgttgttcaccataataaatagtgtgtatatgagggaagcagaagaagatgtatgagcttattggttcttttagtttattttggtccacacgaatgtatgttaaatggtggtaatgtagtgggtcaatagaaggacacatcactgtaagattcatctctgaaagaaataaattaaaaattaatcttgtattatagtataatccatagttatagccataattctatgttagattttatattgtatgggatataattctgttaattaaaatatttataaattgaattaggtttcctttttatattaatcaaataataaaaagaaaattaaattatgagttttatattaacaaaatatatatggcttcattggcttttctgattaataaattcctagtagaacaatctcaaaaaaaaattatctacaatcccactacttaggatactcatatttcttcatgtactctattatttctctcttttatatatatacatatataaaactgacaatttatacatatatataaaaaaatatatatatataaaattatatatttcttctttttttctttttttttttcctgttgcaaggagaaaaggaaacattgtggagaaagtgagtaaactcagaatacgctctgtataaattgtcagttatatatatatgtataaattatcagttatatatataaaagagaatatatattttttatatataaataaatatattatatatgtgtgtatatatatatatttatttatttatttatttatttatttattttattttttttttttttaagacagagttttgctctgtcatccaggccagaaagcagtggcatgatctcagctcactgcaacctccgattcctgggttcaagcaactctcatgcctcggcctcttaagtagctgggagtacaggcacatgccaccatgcctggctaatttttctatttttggtagagatgggacttcactatattgaccaggctgatctcgaactcctggcctcaagtgatccaccccacccgccttagcctcccaaagtgctctgattacaggcatgagccaccacgcccagcctatttctcaatatttaaggcaataaaatttaataaaaaggactataaactgaatagcacacatttctctggggcagatttctgccattcccttaagcaacttcaaaacaactattttcagcaatgtctaaagcatagcttattgaatatttttttctttaaaagatcaggattccattctttctctcttcaaaacacaataaaagtctacatactttctatttcattattttgtaggtataggtgttccaaatttcttggaatatagaatgcttgcttcaatttgttgtgtccaacactgagttctacaatgttgggaagattaaaaatattatatgggatgtcttgtagtttgttgtgtgacattcttagagtatgaagttttggaagtttgtcgaagtatttttcgggtatagaagaaattgaattattttctaaagacagatacataagtgaagaaggcaaaccaggaggcattgattctaatctgttactgcagaggttgagctgcattagtttttccattttggcaaagattttgtcttttagcagagaatcatgaagataattataacagagatcaagcatggtcaagtttactagcccatccatagcatttgtctgcagtttggagatttcattgtaaccaagaaggagtctttccagagatttaggaagaggaaatggaaattcttctaaattattatgctctagatgaagttgtagtagatttggaagcttagcaaacacaccataatcaatcttttgagatttaattttgttgtggctgaggttaatttctttaagatgagttgcattgatgaatgaatttgcagtcacagcctcaatttcattgaactgaaggtagagttgctgaatgtgcatcggaatatttgggatagtcttgagtttgcgattatcacagtacattgatgatggaaagttagttggacagaagcattcactgacacagcctaaagtatactgatgaaaaggaactccgtagtctacattttgacgaaatgggaatcctgtttggtaatcatcatctggctcttggtcatagtcttcatcccactgataagtttcatattggcaatgtactttgactccaaaaaagaagaaaataacatatattggacttaaaaaacccatcttctttttttttttcctattgcaaggagaaaaggaaacattgtggagaaagtgagtaaactcagaatacgctttgtataaattctcagttatatgaaatgtattatacctatgtctatatataaaagaatatccagaaagaatgggcagtgctcaaaccaaaatttttttctttttttgtgacagtgtctcctctgtcacccaggctggagtgcagtggcacaatctcggctcactgcaacttctgcctcccaggctcccaggttcaagcaattctcatgcctcagcctcccaagtagctgggactacaggtgcatgccactatgcccagcttatttttgtattttttagtagagacaaggtttcgttgtgttgcccaagctggtctcaaactcctgacctcaagggatcctctggcctcggcc

SEQ ID NO: 133818 - DNA, 1107 bp, Homo sapiens
ctacaggcgcgtgccaccacgcttggctaatttttgtattgttagtagagacggggtttctccatcttggccaggctggtctctaactcctgacctcaggtgatccacccacctcagcctctcaaagtgctgggattacaggcgtgagccactgcgcctggccgagattttttttttttttaagtcacatattacactgaacttgagtcaaaagtctggtatactagactttctactaagtaaccatcttttaagagtcccagtttctcttgcttactagggtatagatctatgataatagcatgacatcagtcaactacagtctgatccctccactgtaaatgctgtgtgttctttggaattacctgatcctttaatgatggtcactgcctgggggaggaaagacctttattttagttagagagcttttgcctgggagattctacaacttctatttgctgatacctttttctgcccttcagaagaacgtgaaatgctcccttttgtgtgataacttcagatatttagaaatagtattcatgtttccttttaatattttctgtccaaaactaacagcaccatcaaattttcctcatgaaacagtttccagaatccaattatttagtctccgactctgcttgaataactactttaaatcctaaagacatacagtgtttacattctacaaagttcaagtgtctttacatttttcttcctagcttccttttttccattaatatatttaagttttagatacaaaaatattattaaaaacacactgtccttgtctcccaggtgtttaaagtcttgtggagaatcaaatacacgtgcagtagaatgcaggaggaggatattgtgtggaaaagaattgcaaaagggcacacttcacaatgaacactcagtgctgaaacttgaagttctagggaagggtcaattatgtcccagatgagaagcctgaaacctatatttcatttctgtcacttaacatatctgcctcttgcctcatcaataaaataagaattgcaattatagctgaattataccttggctgcttatcttgtatgttgccttgtgtctttttttttttttttttttgagatggagtct

SEQ ID NO: 133819 - DNA, 1453 bp, Homo sapiens
tgcacgttgaaaactgctatccagatgaaatgaatgtatcatttaggaaaaaggttttaaaaaatcctacctcttttattctgagacctttctacttttcccacccagggtttcatgagagaatgagtttccaaacaaatcattgcatataatgaaatgacttatctcctgttcatgtagaatggttctagctatttttcatcattggtataattgagagaatagttacttaagttattttctttgacagaaccccatttgagaaaggttaagaaacatctcaatttcttcttcttttcttgtcagaaattataaatgtaactattgtgtgtatttggaatttgaagtagttattcaggtagagtcagagacccttgagctctcttcctgcagtgatactttccttcattcttcctcaccatttgctcccatgcacccgcatcctgggttttgtcttttctattactggaacccttcatactcttcattttgagtattccgcactcagaccactatctctatgtagtaactccagctgcaataattctccaatttccgtggaacctcagctatattgattctactgtttttcactgtccctcatccatacctcccaacattgtcagttccttcttaccaacttagaccccatagttgatcactatcgttgctcttttgcacatgccctaaactttctggctccttcaatctgccaaactccaactctggttactccaattctctacctactcacagcctgactgtcacagctgaatgtaactaaagaaaaacaggagcatggtgactggtctcactctcgattcaagaccactaacctcaagtgctgtcctgctgcatttccttagaccatcctccttccctctcttctacgctactgttttgtaactttcctctctgaagcctctaataccttattccccattattgtttttgggtgatgaccttgcttcttttttttaagtcaagaaaataggatcaagatatcatttatttctattttcttatatgtatccctacctacaagaaaatgccaaaatagcaatggtttgggttttgtttttgttttttttttaacaatatgtgcttttgaaattcatgatgtttctttgtgcaactctatattacatccatttttctttcttttctgtgagattcgtggaagatgtggcatttgacctagactttgaaggagtgttgaggttctcatagagggaagtgaggaagaagatctctggctagaagagatgagcaaaaacatagaagcaacagatggtgatgtgtttgggaaatgtggttggttaactcttgaaggagcaaaataagactattaaatccagatctgaagggattagcctaactttttttttctgagacagtctcactctgtcacccaggctggagcgcagtggtgcactcttggctcaccctccat

SEQ ID NO: 133820 - DNA, 2353 bp, Homo sapiens
ttttttaattttttgtaaagacagggttttgccatgttgctcaggctggtcatgaacttctgggctcaaccagtctgcccccctcagcctcccaaagtgctgggattacaggcatgagccaccacccccggccttggagggcctaaattctgacctgaggaatttgcactctgggaatgaatgcctaatttaatgaattaacatatttgggctgtgatttcacactacagtcagtgttcgtgggtgaaaaagtagagaatcttggaaggaggtagatttaaggagttatggtatcataccaaagggcagtgttcagagcaggctctccttgctgggctggaagctcccagtgggtctgcttggaaatgcttattcacctagtgtactctactactttactgtatgtaaacatgcttagtgaagcactttacaaatattagtagttagtttgattgggttacatcagtttaccgttgtcctgaattatttctagtgatgaggcactatgctaagttggtggagaatacagaaatgaagaagacgtgaagccatagtcccttctgtaaagagcaaacagcttagtggaggagagagatacaacaaagtgaaccctaatctaaggcagagggtaatatcctttatagcagagataggcaatgctgtggggccagtggcttacctcagccttacggagacaggaaagtcttttgtagacatcatttgacccagactttgggagattaataggaatggatatagaatattctatacattttatactcattgatgatattttatgtataattttataatattttattgtacttattatagtataacatattaacttttttttttttggagacaagagtctcgtgctgtcacccaggctggagtgcagtggcacaatctcggctcactgcaacctccgcctcccaggctcaagtgattcttgtgcctcagcctcctgagtagctgggattacaggcgtgcaccaccacgactggctacatttttttgtatttttagttaagacgggattttgccatgttggccagcctggtctcgaactcctgacctcaggtgatccgcccacctcagcctcccaaagtgctgagattacaggtgtgagccacctgcctggctgaaaactcagcttgaattttatccctttgttgagaacattagctaatcatcagttatcaaccttacatttgagaattagagtctgttgttcaacaactatgaaaaattgttgggaaaaaagaagaaggccttgaatcaagacatgactggggcgtctctgaaaataaagaggtttttaatattgtctgctttccgcctttgtgagcacctaagaagaaagtctttccttgaggaacaatttctcttctaaacctgaacttatcttaaacatccttgtcctcctccctccacgttcctaaccatgtagtacaatcttgtcccactccctttgattaagtgcagttttctgttttgaaatccatcctgttttcatctatatgctcattattttctatgcctcttgctctttccccaggataatttcccctgttacaacaatctcttattttatccaaatttttcattccccaactaatctcttctgagtcatttgctaagcatatttttgttacttctgcttttcatactctacaatgtatgccttgttctctataggataactcacagcaatattgtataattcattgttgatcatctcatttcctaatatcttttaacagaatctaatacaatgcagtgttataagtgctcaaaggtgtgttgaatgaataagttaataagttataggttaaggcttgctagcaaatgcttctctctactaatgttgattattcctaggcatttatttcactatgataatttcttcaaatgaacatattcatgagagcttgactgttcctttttctattgaatatttcttcatcacaatatactgtattcctcactttcctagtacatcgtgtagcaggaaaagaacaaatgtgaaaaagaatgtttggagcaaagtaatatatatatattaccagttttcaatgtgaatttttcatattatagcaataaaaccatctgtgtcataatatttctcttacttggagaaaagcactcgtgttcatcaagaaaagtttcaattgaaattactaatgaggtataatttacttgttcaggaaaagtttaaagtaaaatcctcaacattttattatgttaaagacataattgtttttatttgtatgacatagaaactagcatataagaaagcaaatattagcatataatttagatttttccaaaaaagttctaaattttaatt

SEQ ID NO: 133821 - DNA, 1967 bp, Homo sapiens
aagcttatgttactcaatagctattgcctttattttgtagatttagaaaatttcttcatttcatagagctatctctcctgaatagtaacagttaactgtttttaatgtttaatttttacactgttctcatattctaaacagagagttgacttgtgtcttttggcagtagattcggagttcattttgggggggaattcttttaagcttttacaaactaataagataaagtgaatcctggagttcattttgtttcctcaaaaaagtgttttccattagctttttacaaagaactcacaagatttattttgttaaactttgcattaagaaaagtatacagtgtttcaagtgatgctttggcagttgtaaaaatctagtctattatttgagacattggtatgaaaaacgtggcagaccacactttagccaagattccatcttgttactgatcttttccatatgttttctgttagtgtctttgttcttaaaactcaggctttcactaaggaagagagagcaaatctgtgtactttttcaaaaaattgttttataggccttcacagtccttttggaagattaactgaaaatcaacagcctaatgtttatataacttctcattaactctgtgatttggatttatgatattgattatgttattcatgtttttaacaagtgtgaaagaaaaatcagtagataactagagcagacagaataaaaatgtctagaaaatttaaactgattggcagtgtctatctaggaggtttaaggtggcaagggatggggatggggggaggtggtggtagttagagtcaggccttaaaggaaaaaataggggatgtgagtttgtaatagttcactgttttagttaagtggttataattgtagcaattggggagaaaaggagttgaattgttgaaaagtgtaaattatatgctatgattatactttgattgaaatagattcagtatctcaaagctgagtgacacaggactggctaggaaaggccctcctgagacctgcttaattaacataataagcattacaattttctgctcatttgttccactttattcactggacacctactttgtgcagattttagatgcttgggactcagcagtgaaagtctctgttatagagaaggaaaacagaaaataaacataaataagcataaaatgcagaatataaacaatgtagagtgcgatggaagagaataatgcaaggtaaagggataaaaatgaatgaggcatgggggtacgggtcaacagttcaggcaccgctgtatgtggggactggaatggaacaattaagttactgtatggcagatggtgagagccaggtgtctcaccgttggagtggaagttacaaataaataagcgaggtgaggtggtgacagtgattcatgtggtaatagattagagttgaagacatcagtatgaactcatatttagcttaatatagatacagctggttaaaagggaaatgtaattatgttatatacacatagtacacacatagacctccttgctctgttggctgagagatcctacaagcaggagcactttaagcagcaacaaacacaaagcccagatcttggtttctaacatcattttccagtaaaaggaaccagggctgctccttggagaaatggctgtttccaggaggactggagcaaggaaagtaggagatgggcctggagcattgtacagtaccagaaaaagggcactcagcaaagaaagggatctggggagtctctgttcttccactcagttttgctgtgaacctaaaactgctctaaaaaataaagtctattaatcttttttgttgttgttgagacagtctggctctgtcgccaaggctggagtgcaatggcgccgtcttggctcactgcagcctccacctcctgggttcaagcgattctcctgcctcagcctcctgactagctgggattacaggtgtgcaccaccaca

SEQ ID NO: 133822 - DNA, 1022 bp, Homo sapiens
tgcccaggctggagtgcagtggtgtgatcttggcccactgtaccctctgcctcccgggtttaagcaattcttctgcctcggcctcccaagtagctggtattacaggcatgtgccaccatgtctggctaattttgtattttcagtagagtcgggggttttccatgttggtcaggcaggtctcgagctcctgacctcaggcagtccacccgcctcagcctcccaaagtgctgggattacaggcttgagccaccatgccctgactattaattaatctttgaaaaagggcaggcagaaactattttaagtagtttagatatttagaactaaatatggtgatggggcaagccaagttggtatcagagtggtgacaggccagcttggctgatgcctagtgatctaggaggagggagtaggtggtactctcacaggtagccagtgtcagcagggtcaaggcagacatatgcctggaagtaaccacctctcagcattctaaatggaatcaagtttgtaaggcagataatgacacttagctgatgaactacttctatcagaaaggccacttgggcagccctatagaaacagtccaaacattaattgcagtcagtctcttagtctatctgctcccagggggctatgaggagcagaggctcctgaattcatggcccatactcacaggctttcttggccatcatcattcacattttctgtaaatggtgcccccatgccaaccctgaccactctcttgtgtaagccagaagtttgggagtcctttaaattagtaccttctcaagtgtggccggaggtccatcatcatcagaattaccagagctgcttattaaaaattcaggttccagcatctttatactcaagatctacaaaatcagaacctctgagcatgggcccaggaacttccattttaaacaagtgtcccaggtcccaccaaaccttgagaaccactgatgtaaatacttctccctgactttcaaattgaatctattggtgaatcttttgtgttctacacc

SEQ ID NO: 133823 - DNA, 1017 bp, Homo sapiens
tttccagtattttaaaattttggttttgtcttttctttttgtaaaaagattaacttggctactttaagctccactattcagatcatagataaatctgtcttttattctaaccttagtatttaccttatgattttaatgatgaatttcaagatgttgggttttttcaatgtcagtaaacattttttacttttacatatgttcttataagtgccatgatatcacaattttttgttacattgtagaaaaatttattttgtttattaaagcaattgaaactttagaatattttaatttttgagtgattattatagtattgttttcttttatctttaaggacttcatgatcttttatttttctttgtaaatgtttatggtttacaaagcattgcatatatatttttatcatttattcttcatagcaaccttgttcagtgttgtcacccctaccctttataggtgaggaagcaggctcagagaggtggtaacttgcccaagactataaatggaactggatttccaaggcaaagttctgcaacccgggacactgctggttctagcactactggtggtgaacatttattattaaaatcatactatcatcatccctctactcataccatggtcttccctctttttttgctcaaaaaagtagcagttttgttctaggtttccagatatgtcattttagaaattgactaactttcctgtaaagccgttgtttgcaacctgctgagattttgccctaccttccaccactccctgcagggacatttgtcaatttctggagaaattgttgtttgtcaaaactatagaggtagaggggaggctggatgcagtggctcatgcctgtaatcctaacactttaggaggctaaggcttggaggattacttgaagccaggagttcaatatcagcctgggcaacaaagtgagaccctgtctccacaaaaaattagctgagcacagtggtatgcacctgtagtcccagctacttggaagcctgaagcaggaggattgct

SEQ ID NO: 133824 - DNA, 1007 bp, Homo sapiens
agtaatgtgaagagtgcattacactattcttattctttagtaacttgggtagtactgtaatatttttaatcatcttaaagtatgatttgatataatcttattgaaattaccttatcatgtcttagagcccgtctttatgtttaaaactaatttcttaaaataaagccttcagtaaatgttcattaccaacttgataaatgctactcataagagctggtttggggctatagcatatgcttttttttttttaattattacctgatttaaaaatctctgtaaaaacgtgtagtgtttcataaaatctgtaactcgcattttaatgatccgctattataagcttttaatagcatgaaaattgttaggctatataacattgccacttcaactctaaggaatatttttgagatatccctttggaagaccttgcttggaagagcctggacactaacaattctacaccaaattgtctcttcaaatacgtatggactggataactctgagaaacacatctagtataactgaataagcagagcatcaaattaaacagacagaaaccgaaagctctatataaatgctcagagttctttatgtatttcttattggcattcaacatatgtaaaatcagaaaacagggaaattttcattaaaaatattggtttgaaataaaatatttgtgctttgatgttatttttcttcacccacccagcaatataaactattcttcagaaaactctaatctatatataacatgtttagagcagtattaatgtcaattattattactttttgttttgttttgagatggaatctcgccctgtagcccaggctggatggagtgcagtggcctgatcttggctcactgcaacctccgcctcctgggttcaagcgattctcctgctccagcctcccaaatagctgggattacaggcacatgccaccatgcccagctaattttttgtatctttagtagagacggggtttcaccatgttggccaggctagtctcga

SEQ ID NO: 133825 - DNA, 1027 bp, Homo sapiens
tacaataatgcatttaaaacattagaaatgatcagaagaatgaaatttaatgctctaagaattaggctcacaatttgattgtgaagaattattagctagcattttctgtgaccaaaggagaatttttctaagttgttttgtagaaagatctatcaacatcctaaatgcagaattgtaatatagcatcaataattgaaatcacttgatcttatgtacaccagtggacaagtcacaattttacaggccgtgtacatgtctttttaaattaaattcttactcaaaaagtatggtaaatagaggaactttccctcattccctttaacagcccttctaatttcttctttggccttttttggtaacagtgagatttctgggaaataaaagcaatctacttaactgacagcatttttgtgtactgaagagcagaagtcttttgctggccaacgtgggatatcctccctggctgttgttacctctagattctgcctttatgtcttagtaagactgatatgagaccaatcatgaaaattctaggcattgctaaaacatttaagtttggtgttcagtcccccagctgctcaatataagtgcaaggtatagtttaccatagtactgatctcactgggaatgaaaacctgctggacatcagtgtgtttactttgtggacattcattgaaatatatgcttatgacatgtgttcttctgtttgtgttataattctattcatttaattaatgctagcaagagtataggtagatttaagagagaccagaagctggaagcagagttgtggagcaaattaagcagaaatgacatcagggatggggcagcttgagagaggacggactcaagttgtagtcactggctaaacagacatccaaatgcagcatttggaaaagtcaaagcaaaagttgtgatcttgagattagcacctgcctatattacattcattttgatggtttgtatctcaaaggagtacagtgaacgaaacttgtttaaagatacaccggaaagaaaaagagaagag

SEQ ID NO: 133826 - DNA, 2234 bp, Homo sapiens
ggtttgcactcatttctgtcaggggagaatgacatgacttagcacacataggttgtatataaaggaaactcacagtgcagagagacacatcccaagaatgaatatcccaagaagcgtgagcttcatcctttaggctcattttcactcggtatatctgcttctgtctatctactgtcctttctgtcagcatcagaaaaatacggctttgtattatgtaaactggaatatatgagaagttcactatttttcactttgaattaccatatcagtgacattttcactctcctccaaccatgagcacaattaaggttttgttattgtaatagtgcatcaaaaaagatcatccttcatataatccaaaatgtttatgtttttctgtgtacatttttgtgtcttaaactttttttaaattgtaagtcaattagaaattgttgttttgttagcagaaatataaccttgaagaaatgccagtaagtgaggccaggcacttggttgaattaaatgaataaatgaattagtatcttggttatgaattttgaatggatattatagggagatggcatggttatatgataggtgtcagaaataaaatcaggtagagttttaaatataagacaaaaaattcctcacatcgataatcttaaagcagataaccaaatgttaggtgcacattccaaataatatccaaactaattttgtgtattatatttgagtagcttatgcaatacattaaaaatactacctttaaattaaataataagttatattttattagggtctggtcagaaacagaaaccacgctaagtgtttcaaaggaggttcttttttttttttttgagatggagtttcattctgtcacccaggctggagtgcagtggcgcaatctcggctcactgcaacccctgcctcctgggttcaagcaattctcctgcctaagcctcccgagtagctgagattacaggcacctgtcaccacacccggctaatttttgtatttttagtagagacagggttttactatgttggccaggctagtctcaaactcctgaccttaggagatccgcccgccttggcctcccaaagtgttgggattacaagcgtgagccaccaggcctggcctcaaaggaggttcttcagggagagagagacagtattacgaagatcatattttctttaagtgctaaacattttgttggacattttaattggtttataaatggcttatctaggcaaagattattcaaaaattaattttggaaattattcttaatagtgacgataaagtgttctacatctgcttgtttgttataatttcaagatgtcccattcatttgaaaaacttacccaaaacgtgtaaagcattcattcctttgaatgtgtccttttgtattttcttaactttattttcatgaattctgagttctgctaatgatttgggaagattaagtggtatttcacttagttgattgtgggacagatacagccttcgcaacttctttgtggttagaaaggcttttgggtgaatcttcgttagcttgttgttgttcaggatcagacccttgatcaagcatagaaagttacacaatattaggaagtggatttgatttaccagtattctacagtgattagccaatgatggaaatcagtacaatttatatcagtggtgtactagatcacccatgtaaaaactttcccagcccaatctaagcttttaaaaaaattttactactgagttagaaaagtgcagagctataataattaatgttgtgccattggtttagatagaagtgcatctttttaatctttgaatagataatactttcatatggctaagccttcaacctctactcagcctcctatttcccttcagggaagtgaccagtgatattatctttatcttatcttaaaatctatttactctacaaaactatgtttagtgcacaccaaatatacttttgcatgattttgtctactttgaaaacctcatttctttcatatttactaatgtttaccatttctcccagaacagaggcctgtaaggaaaaaaatcctaccatgtgccctcagcattctggcatattttagatattggggatatagtaatggatcctgagaaatgactcaatctcttatcagttttttgggtatttctcagggcaataagacagcatcctccagaggaggtctaataactccagagagtaaaaagagctcgtaccagtgtgagtgtgctct

SEQ ID NO: 133827 - DNA, 1925 bp, Homo sapiens
ttaaactgcactctcagtgctggcttgattatcacagagcttccaattcatcattaacaaacagtgtaaggacagaagatgagaagagcatagccattcagtagtaggacagtgattcatgccacatgtgtctcataatggctggaagtgagctgggagggctgtgattgtgttcagtgattttgctctgactgtatcatcctttgtgtaagaacccaagtgccaaacaagcagctaaaacttaacacagagaatttgtagaatgtctaaaaaatagtttgattctcttaaaagacaggtaccatataaggtgatactataattatataaatgttttgtaattgtgtggtatacctacaattcaagtataaagcatgtactttaaaaagtgatttacatcagtacacctggtcagtctgctaatagtagcttggcagtaatactacttaacagctgggggctttccctccattgctctacacctgacatgcatttctcaaaggaaatcaagtaggtctaagaaagctcctgataccatttagtttctcatttccctgtgaataacaagaataagtatggactaagtccctggaatgctcctaaaatgtaataaaataatgatatgatgaatttaaaactttcatagccccagtattaaatatgccattagttattattcttgtggttatctaagctgaaaaggggttgaagaagtggtaaacgcatcaacaggctatatttccaacttctgttggtggaataatggcctgccattctccaaaagattctgtggcctaaagttagtggggtggactgggtggatcctcggtggaatccattgtgtcatttctgactgtcttaatgttttagtgagacctaacttataaatatatgctcttctagttgctcttttatattgataatggaggcttaccagatctgagctgcctgcacactttgaaagtgaaaagagcagacaaggtgctggctacctgaccgggcagtgtgagagctggattttgtagggaggcttgatgcaaggattgagcatccctcagtctgccttaagtatgatcagcatgcatgtcctcaatcccagggtgacagggaggaagagatgggccagcagggtccactgcactgacccagggtgacagggaggcatggtgaccccacatctctcagacacaggaacaggccaggcctgcatggtagcaaggggctaatattgttatggtattttctaccctgttctcttagttttatcttatctagagatgacagactttaaatttgttttctccagcacagcctgagagtgtggggaaatggcctggaatagccaggcctggcttaccacctcagatgatacagaaccagagctcttcctctaacaccatgccagagtcagcgaggcaggagctgtgctgaggggaggcggtggcgggggaaatgaggtgctcctccaaacccaatttcagactaaatcagaaattttacttgctaaaatctggagacttcgaaatgatttttttggtttgtttttgtttttaagacagggtcttactgtgtcacccaggctagagtgcagtggcatagtcacagctcactgcaacctctacctcttggctaagactacgtgcaccaccaccatgccaactaattttgtattttttatagaggtggagtcttgttgtgttgcccaggctgatctcgaactcttgggctcaagtgatccgcccgccttggcctcccaaagtgctgggattataggcatgagccaccacacccagcccaaaatgttaaacatggaagtagtaatcttttaaatcctagaatattaaaatgatactaatacagtaaagaaaaaattcttttcttctttaaagatccaataaataagccatacatgtatatattaatca

SEQ ID NO: 133828 - DNA, 1065 bp, Homo sapiens
tgagaaggtgaccaaccactgaggtgcagcttctgttgatgtacctttggctgaggaatgttagctttctttgcaaattttcaggctgttatagtgctaaattggagcatatgggtcttgataatttttctttctttttttttttttttgagatggagtctcgctctgttgcccaggctggagtgcagtggcatgatcttggctcactgcaacctcggcctcccgggttccagcagttctcctgcctcagcctcctgagtagctgggattacaggtgtgtgccaccacgcctggctaatttttgtatttttagtagagacgaggtttccccatgttggtcaggctggtctcagactcctgacctcgtgattcgcctgactgggcctcccaaagtgctggtattacagtcgtgagccaccgcacccagccgggtcttgatcattttaagaagccttagatagttgtgtttagaaaatggaaaaattagatttttttcatgtatattaccaaaaactttaccacccatttcctttaagtaattaacttctctaattagttgtaaattctttgatttccacatactgattcatatattattctttttttttttttttttaacttgagacagtcttgctctgtcgccccggctggagtgcagtggcgccatctcggctcactgcaacctccacctcctgggttctagtgattcttctgccttagcctcccgagtagctaggatgtgtaccaccatgcctggctaattgttgtatttttactagacacagcgtttcgccatgttggccaggctagtctcgaactcctggactcaagcgagatgcctgccttggcctagatgtcagtacacttttgatagaaccgtcctcactcctgaagtgtagtcatacatttaatagccaaaaattgaagaattgaaaatctagtatttgaatatcaacattctatcctacagctctatgtacttttcctttctatactttaaaattggtcaggcatggtgccttacgcctgtaatcccagcactttgggaggccgaggtgggtgggt

SEQ ID NO: 133829 - DNA, 2239 bp, Homo sapiens
tagtctcccctttttctgaatgctttttgtttgcctctcattttgtcatataatgacaaacttcattaaggtctctagagtagattattgtaagctttaactcttgccatgaatgctatggcagtaggaagcacgtctaatgcttttcaagacatctgctcatacagactcatgaagtgaccctgatgggccatcagcccctgagtgggagttgtgtgccagaccttggcctccacagtggggccagtctcagctgtcccctcttggaaatagctgaaggcaacaactcttgatatgcattcccattaagtcccgtccttgaacgggacatggctgtgctcttgagtgctccttcattagaagtattaaagaaataaaatactcagcaaagaattataaattttaaaaagactttatccacttttttcttaggcagttttaaacccaaattgctaaaaagcaaataaagcattatctttaaaaggtctagattagagatttcacaagctttctataactcatttcattgttctagacatgcagcttattttgttatcatggagttttactgaaaagtacagtctcaacctgctagcaccctgagatagaactgcatgtgatgtccattctctctgaagggaattaaaattaaatgctttgatttaactggggaagagaaggaaatgttctatggacaacattcccttagttttcctttgattttcttaattttaaaaataagtttggatgtactttggggtttgctgtactttccacctaaaaacttaaatgaaaaaaacttatacactcagattatttttgaaatttcaatgagactttttccatcctttaaattgtcagaatagcattactattcttcaaaacaaaatcgacttatattcttacctaaatctgagcaatgtacaactcgtgaatagcactgacatccaaatggacacattggaaacagatcaaatggaaaaaaatggcttcttggctctcttgttggaaaaagagagttgtcctcatcatcatcatcatcatcatcatcatcatcatcatcatcatctgtgtcttccatatccttcagcatcatattcttcagtgcgatgtgtgaagggctaaagaagggtttggcagagcacaaagccaggaataataggagcacatactccttcatggtgtcttagtgtagaagaccagtctaggactaaacagacatgggatattaaatttaaatggatataattcctgcatatatacatttctcagttctggcaagagtgcaatgaaatggcattttaatccattgcttagctaatctgagagtaaatttataaagatttttggaaagcaattcagcaatgtgcattgggaactctaaaaatatctctttttcagatagtaattctactttttaaaatctagtctcaggaaacatttctaaagtgcacaaagatgttcatcacagaattataatagcagaaatatttgagacaattatataatggttaaaggggaatagtaaaataaaagagtatatttattccatgaaatattttggaacccacaaaatgcttgcaaagacacttttaaatatgggatattatcttttgtgaaataaaaaaaagcaaatataaaaaatccataaactgtatacttacaaacactcataaacaaacaaaaacaaacctggcaggaatatacctgattgatgataaactctgggcactagaaccatagatgacttgtgttttcctttttcctttaactttcataatgagcaatgagtattacctttataatgaaaaagctaataaacatcgtaaaaacagaaacagattatcttacctaactctgtattcccaaaatctttctattgccttaatgtattcagtgtccctgaaggaggaatatcttcattgtctccttagacaacatctggaatttttccttaactgatttctctccacctttcccaacctcactctcatagttggtcactttttccacaattggtatctttttccttctaatctgttccattgtctaatatttgatccaaactgtctgatgtccagactattctttcttactcatctttccactgagttcggtttgcttgttttgtttttggggggccaggttgttttcagttgcatttttaaaatgcacacaaaacagaactatacaaatgagaaccttcagagcatagatttattgccatatttacatatcc

SEQ ID NO: 133830 - DNA, 1111 bp, Homo sapiens
gacagatctgagaatggcaagagttttttatattttaataatcctatgctgattccaatttcaaaactagccctagcctcccatctgtacactactttgtggaggtgttaattcagatgttattctagactcatccctcataggaaatgaggcgtaaagagcttaagtgacttgcccaaagtcacctaccaaatataaatggagccagagctagggctcatgtgtcccaactccctgttctgtgctgccttctgctccagctcatgtggggggactcagttgttttatccagaaatctcgtggcttcatgggcatactctgtcattttttcttatctaaccagtatacaaattactgttctgtacacatctgtacataaagaagcacctgtgtagcttggattggaaggtagagaacagaatgattgtgtgatcagatttgtgtagtactgggtgagagattgtgctggcaacacagggttcagtggcttcttttggagagccccaggtggaaatcaccaactgtggctgactactgttctgtagcaggcatggggtgtccctgctggcaggcaggttgatgtttcgtattccagtcatcctgtgaatgctgtatggggtcctggtaaaggttactgggggcttccttctcaatatcactttgtccctggcacattgtctctgtgcctttgctgtctgtctaactttgactcattatgtgttttgacttagggctgttgtgtggctcctgactccttaaggtttagtgcccagctttgcctcaaccttcaaaatactcattccctagaaaattcagctcttggtccttagctaaatcaaagttggcccctgattccagtttattctgtaacattcttgcattacagctctgtcttctaggtgcatagctgcccttgaccttgtctgaccttggcaacaaggagctatagaattataatgtcatttaaggtcctgtttctggctttctttgaggttgctggagttattcagtgggcatttaccaagcacccactgtaccccatgcagtgtcactcgtcagaatgctgaatttcttaaagtagagcacaccttcctccccatcctcttctctc

SEQ ID NO: 133831 - DNA, 1928 bp, Homo sapiens
ttgtaccccctttccactcatccccaagagactgcccaattctacatcaactaagaccttcaagagaggacagttttcttttttttttttttgagacggagtctcactctgtcacccaggctggagtgcggtggcgcaatcttggcttactgcaagctctgcctcccaggttcacgccattctcctgcctcagcctcccgagtagctgggactgcaggcgcccgccaccacgcctggctaattttttggttttttaatagagacagtgtttcattgtgttagccaggatggtctcgatctcctgacctcgtgatctgcccgcctcggcctcccaaagtgctgggattacaggcatgagccaccatggccggcctgagaggacagttttctaaccctagtggcaaggacttactgttgtaagtgaccccaatggttcttcccaactgttgtatagatttggaggccagcaaagagcttttccagtgggttagaagacctgttctctactgtcatcaagagtctgaccatcgtttgttccctctctccagagaaatggcacacattgtgttaagcaaggcagctacagtcctaaagaatacatgtgcctcagatgtgcatagcagctggctatgtgttcatcctcccctcacttaaataaagtactcctccttggacctctaggctgacagttccaggcagctcggtagtcccattagtggccctctgtaactcaggccccatcctagccctgcagcaccttagggaatgacggccctcctgtttggtttagaatgctcatattctcatttattcaagtatatttcagttgcaaatgtatctgttaactggatgaattgggaacataatgaaaatatgaactggatttttaaaatctttgtatccagagcatctagtgtttgcctaaattccttcagaacacagtcataaacaggaagcccttgggtcaaattcagtttgtcctgcacaatgttttgtttctgaactgtttattgaagtgtatgttaccaaaaaaaaacatatcataatggtacaactcaattaatttttacaaaatgaccccaatcaagaaatcccagcctcacactccattctcatacatccagaatccctcctcttactcctcaagtcacagcctgagttcagcaccataggttatttcctgaactttatataaatggaatcatactgtgcattctcttttgcatctggcttttttcattcagtgacatgcttttgagatccattcgtgtcattgtgatacacagtagttcattcttgtcactgtatagtattctcatacatgaataagccacaaattgtttatatattcaactagattaattaccttttggagaggtactatgaacgttcctcagtctgtcatttgggggtcatgtgtatgtatttttgttaggtgaaattgctgtatttaaaaataagatttcaacttctctttaaaaattaggctttcccagtctgtgatttctggttttgcatggcaactgttgtctctgggacttgtgtttttctcttctatactcacaggatgttgtccacgtcacccacccaaggcactcctcagtcgagttgcctgcatggcctttctgggtgcagttttgcctcccatatctagagagttgagaggcagttcctgtaagattgtgtttctaaagatatgttacagctacttttccttctccccactgtgagacttaagctagtcttcctctgatattttgcttcgatctttggtcagagggcctagggaaagaaataggccctggaataagatgctggggttaggggtagtatatttggcttattcactctgttctgcagataatgtggtaaaggtgcaggcctcaggcacaaccctccaccatcttggggctgtgacatggaaagct

SEQ ID NO: 133832 - DNA, 1037 bp, Homo sapiens
accacctgcacacagcccaaatgaaaaggtttgataggtgaggcaggagctataggagcagcatgtgtcaggagtatattgtggggcacacacacacctgccaaaaaagtaggcagtttgaattttctgatgttcttttgccagtctgtggtgtccttcacattctaaatgaattggaatagattgtacaatgttcttttatagtagtagctacaagaaaggccgtccaccaatccattcattcaacaaatagtgtaagtgctatggagagaagcaggataggggtgggggtgtcaagggtgccctccctgtcaggtgacagtcacaagacctgagggctgtgagggagttagccgtgccatgcaaacacccactttaagaatgttctaggccactgaattctaggatgtaaatatgcataacatagggttttttgtatagtagatgcttaaaaaagcttctgtgaagggataagtgattaagatttcatgagttttaatgttcaagtgtccctcatggtggactaggcacttcggtttctaatgaacttattttatactgtaggttgtgacccaggggcagtattcaacatgcagattgtttggagcatatagtatttttaaaaaccaggacatttgatatcgaagtccaaatttacaatgtatttggaaaaatatgagctggaaaaactgaccctgatgtcctatgtagcagcaatttgctgagcacgtaggccctccatggttctctgctgccctgacctcctcttaccctctcctcacagctcttcctgttgcagggactggcttctgctgtgtcatgtggctgagctcactctgtcatcctacttgaagtttctagttctgaaaaatgaattataataaattgtcactaaatgttcattccgttgaatttatgaaaaatgaaggacttatacaattttgtttattatattttgcatgtgtcaatttttttttttttttttgagacggagtcttgctctgtcacccaggctggagggcagtggcacaatctca

SEQ ID NO: 133833 - DNA, 1747 bp, Homo sapiens
gctgaggtgggagaatcacttttggctgggaggtggaggcttcagcaatcacaccactgcactccagcctgggtgacaaagccagaccctgtctcaaaaaataaataaacatataaaaccattaagtgaaagtttgctcgatagcaagaaactgtactttgagtacccatacaaccattgtgtttttcactttcagtacagcattcagtaaattacttgagctagtcagcactttattataaaatcagctttgtgttagatgattttgccaactgaagaataatatagtattctgagcacatgtatctagcttaggccgagctatgacattagataaagtttagatgtattaaatgcgttttgacctatgatattttcaacttacggtgggtttatcagggtgtaacccatcataagtcagggaacatctgtattattcattggtgaatataagtgaagggtatgtagatgctcattgtgaacttaaacttttctgtggccttgaaaatattaccaaataaagggggaataaatgctaaataattggagcagataaggcagtttgccttaaattaactttaactctttgatttatccttcactctagtgaaatatttaccgccaaatttattttaagttaattaagatgttacgttagacagggattcttaacttgggtatatgaatacttagagaatttgtggaaagactttatgagtcttttgatacatgccaagtgtttttatctatgtatttttctgcatagaggatccattatagctttcaccatattttctaaggggtccatccttcaaatagttaagaactgctgccctagaatagatttacagtttataatgtattctttattcctagtgtcacaatactagttaaattcactttccaaatgattcacatataaatttgatgtttgtgaatgtaattcccagtttaggcaaaacaatgaaccttcagcagattacaacttataaaaagatttgcttatatcaattgatagtttaatgtaagtttatttgaccacagagattctgttacttagaaacacaccaggacattttaataacatgatgtattccttttcttttccaaactaatatgtatttagtgtaatcacatgttatttttaatacagtcctgctttcccttgtgtggattcacattcttcacattttatacaaaggaaaaaatatgctagactaagttttgattttatccattttcatacagaaaagggaacataacttcacagaagaaatggtcatgcctttatgatttagttgtatcaccactaaagtttacttactgagtttagaacatttattcctttacaaataacagtatgtgacagactgaaatccagccgggcttacagtctcgaatgctcctgttcaccttgtagacatgtcataagctgaagccttatttaagacatgtagaatcaaacatggactaattcaggattacacagtttacagtagattttcctctgaaaaccttttacaaatgcctctgattctgttggactagtttcaattgagctgatggtcgtagggccagaaatgaataggaaaggaacaaacttgctagggaagcctctgcccaaagtttgctatgtgggctacagatggaaaggcctgggtttgccagtgcagactgtcttgctatactgttggtgactcattcagcggttatttctaagggaagaattcatttataggacaggctc

SEQ ID NO: 133834 - DNA, 1021 bp, Homo sapiens
atttttttttttaatcttatgatgagatgtcatttacactctttgagttccagtttcctcacccacttggctccctcagcctggagatcctgctcagatgttcgtgtataccatggttcactctgttccgtgccatggacatgatcatacagtaacacagaagaaaggcagtcaaactcaggttttgttgttaatttcccacctactcctcaggagagccacgctgttgccaaggctgcagggtccccgctggacccccactggcccacagagtccaaggggtttacttctggccctttacagagcatgtgtgcagagccctgtcttagtgtattagacccactcctttttccactatattcaataccaatctaagaaatcagttattttaaataattaatattcaccacactcagaggcctggaagccttgagcgagttaagtaacttcctgctcaccagtttcctgtagtctgtccctggaaacattgacactcacctttattatgtctaccctgtgcccagcacctccacaggatatcaacttgtttagtcttcccatcagccctgggaggcagatgttgtttcctgattttgtgcacgaagaaactagaactctaagtaacttggccaggtccatggctagtactgattctagttgagagccaagatactcattattgtttttttaactacaagagatgaatctccatgtttcacagactttgggggcttaaggcctgtaatggtcatttggtgttaagttagagctgggcagaaacttcttttcatgggtacttttaatatttttgaattttaagtctatcaaggatctgaatttacgttcaaccatggatagataaatagttcagtcatctgtcagtctgtaaatgtttctgccatgaggacattttctatcctttttctaaataagggaaagaggtggaatcaatatcataaagggttttactccgccctttggaagtttcacttcaacagcagaatttgagtatttcattctt

SEQ ID NO: 133835 - DNA, 1228 bp, Homo sapiens
ggattttaaaacctagtgtgtcatttagatagtacctagtttgttgattgtaagaagaaaagggggatgggagtgaacactttctgatgagagcaaagctgctttgtttgaagagagaggtctgttcacttccttatcagtgacatgaaacccctaatgaaccctgtctgaaaaccactgatctgttccaaacatgttattttataattgaatcaaatgaatcccaaagaagtaaaatgactgcataattattgaagaacaagatgggctcccaagtctcttggttcctggtgtagttatttcattataccaggttctgtatgtctttcactaaataatttctttagtgctgcttataatattcttattgataataagccaaatctcaaaattatactgttccttgtatatatatacaaagacaagacacaccattaatatttttagatcatggctagaccaggacttctttagtgtatatgtgtgttagtaattatagtgtaatttttgaagccaaacagaacatctgttttttagtacattatattgtgaagagtgtttgctataaggacatttatcacttttttatggaattaaaacttcccatctagaacatcatgaaatttcagggctgaacaagttccatgctagccatattttaaaaattataaaatcagtagaaataagtacaacttccacttaagaaaaaagcttcaatcagtcattctgattttcatttttttcttgggattctgcagccagagcagagttgagaagcgacatacacagcaagcccacagtgcgtctgctccacaggcaccggtctggatctgctgttaatccaggccgttgagggtggccgtagtctcctggcggccctcaggccccagtgtgctcgtcgcattgtcacccatttttctgactgcacagcacttgcctgcttacttgtctgtttgatttcctgcttattgcctctaccagagaggaaaggccacatctgatctgtttgtcactgtctctagaacagcatctgaaacacagctgaataaagtcagagtaagaaatgaatgaatgaatcgtttagtatctgtctctgtgtcatcccaagatgctagttctgctgactcaccttattcagtttgagccccctttaatactaattttgtttacagcttagattgccttaaaccatttatgtcaatgtgtttatattcatacatcaataagt

SEQ ID NO: 133836 - DNA, 1064 bp, Homo sapiens
ttggttccccttcccctacattttcattccacatttgatttgatgacctggcacacctgggacttgaggcgagcctgagggaatctagaaaatgctgttaatcatctagaagatctggggaacgtggtgaactcactggcttgtttcaggaaccccacctgagtctcctaaggcttctgccccacgccctcttttcacctgatgaagacttctctgcctacagtgggctcagtgccacatgctgctgagcccaattggcctctccatcctgcttctgaatgacacgtgtcccaggctgtgctacttaggcacatagttccaggacacgcaatcccagatcccagttgtctgctggatttgctgcagggcttgcttctgactccctcccccttcactgaaagctatagccagaggctgctgattcttgtccaggaagacagagtctacttttggcctgcactgttaggccaagcattcttcagtctattttgtaagagttgaggtgaagaaatagtttggagaaaagaaggctgtgtagtgtaggagaacaggcctgggctctggagcctggtgcttccacctaatgatgatgaggagaaggagtatggcagatttctttctcactgtgtgcaggggaataatccttcattcaaacctcctgacaacctgtgaggtagacagagctagagtggcatttgaccactagtgggcagacctcgaagtcagacagctggggctcagttcttgctagctcagcacttggcatatgatagggtgtccagtatgcagtatggtgacaacaacagtagttactgcaataatcctaacaccagtcatgcagcgcacaggttggaaactgcatgaagtagcccactttggggatagggtaagggttcactaagaaacgattctgtctccgagcccttcagtatcgtcacctccctcacttatcccattcccagtttccatactctgtttaataatagcgagaggaagaaatagttcaataaaatttaaattgtagcatgtacttactcttgatttatccaggctaaaggagcaat

SEQ ID NO: 133837 - DNA, 3183 bp, Homo sapiens
cttaaattacaggaaattctgtatacagcatgaaactagagtttaatttacatcacaatagtcttaaaatatattttgttgtagtgtaccatatttcaaatataatacatttaaaacactaaaaaaatatattgttacctcaatagaaccaggaagaccctgcggtataattctaaatttattttttcccagacgcaagtaggctaggctcttcaaaggtttgaaagctaaaggattgacattggcttcactgagattgtttccttccaattctaaggtgaccaactgatttaagtctataaaaaataaaagtattagaatattaggataattgaaaaaccatgcaaatttttgtagccttttgaaatgtcatgtgaaatggccggtttatttggagggcaaatacagttttttttaaacctttgtatcctcctataaaaccttttcttaagtactttgtacatcccagatgctcaattcaaccagaactaaatgcatggtccagtagtgaggcagacctgaaaaaaatcattgaaatgctaggtgctaacaatatgtgtaaggaacagaagcaagagagaagagagggagggagataggaaagagaggcagaggagtttccatagaaattgtggtggctgaacagggatttggaattcaggtaggaaaggaatagaaagttgtggacagtcattggaaacattgcaaagacatagatgtatgaagtggcagcataataggcaatggggtgggtagaagtttaatgcaatgaatgatttctttttctaggacacagaaaagaacactttccctggctcaccctcagtctctgaacaagggagtcagaagtaaaccagaacagtgaattcccatcatagttactcacttgttggcacagagtgcagccaaatggaagctttgaaagaatgatgatcaaaaattctccatgcattcagattgaactagcaagaaaggcctttatacaaacaaattttttctactttgtttctactagtctcaggagtggtatgatccaggtcaaatggaagttctgtgctgcaaaatggacagctcagcaatgataatacccaaaggcatctgagtcagaggctcagggtgtggccaaaattcccagattaggggatgttttctattcaacccccttcatgggcattgcaccgaatgccatgtgggactccgttctgctcttaggcaacagcaaagacggttgcatcaggaatagaaataataaatgctggaagattaaaagaagaaaaagcagtgtagatgtgagtggtatgaaagtgccaggctcctacagacagaaagatttagatagaagtaggaggaacttccaagctgaaatagccagctgagcacatgtaggtgaaagaccatgtgggtttgctcagggagagaggagactagccctggagtggctgtgcacagtggagtgaaggttggtgctcagagagaagtacactgggagggcctttttttacattttttaaattttattttattttatttagagacagagtcttgctctgtcacccaggctggagtgcaatagcgtggtcttggctcactgcaacctccgcctcccgggttcaagcaattctcctgcctcagcctcccgagtatctggcattgcaggcccccaccaccacactcagctaattctgggagggcctttgcaccctggacaacaacgtctggctctcattctctaggcagcaagatggggatggcaggacaagggccacattttacaaaggttaacctggtggtggtgctcaggattaatggaagtgctgagcaacaggaagtagccaggccagccagtaaattgggataagtggttatatttcctcatattctctttcatttccaaaactaaaggtactgagaatctgacatctttctctagtacataggtgaagttttgaaatgcagtggaagtttttcattgaaaaatagataacagaaatgaactagtggccattacatgactgagagaaaaagagagaaacagtgcaaattcaggacactgtgttttcttttgcaattattctctggtatatataggaaataggaggtaacaggaaataggatggagctagagaacgtttcttgtaggtgagacttgaggtggatgttgaaaggattcatggacaggaaacaggaagtcttccatggtgggtggtaccatgacaggctgtggacatggcaggtgcctcgatgttcctggcaggcagcatcacatggtcatccactagagcagcctccagggctcctgatttagttgtttcagtcattagtgacaacaaaaatgcttttaaagcgtgcctggttttcctcagctgtccctccctccacctttcacacctctctctcaattgtaagtccttccctttctccataacacgtgtgcacatctcaggtggactctgctcctcctgcaggtaaattccctgcccttcagcaaggtgtgtgcagccccttgtgctgctctttgcttgcctttcaccttcaccgtgcctgcttgcagctcccacagtatcccaaattgtctcatttatttgcatctttgtgctgttttctctccctggagtgccctccttccccctctctggagctataatctgaaaggtcatgagtgaggagccaccccaagagagatgacgggagagcagtgggccacctgcttccacacagaagcagggtgccctcacagcactcctggcagccagcctgaccatccacagcatcaggactcccagccagggggagcccagcacccgaggggccagtactgcagtagctcttagaactcagcccacccagggagtgcagccgggggtatctgagccggaggacagaagcactgccggcatggggccgaggctcctcgggtgctcggactgtggagaaaggtgggctaagaaaggcaggcagacagcccgttcaccctggcttcctgtcaacactctgggaatctagaagcatttgtgagtgagggaggagaagagtactctggaaggcagttccaggggtgtgtgaaagcacgttcacaatcaggagtgcatgttttataacatctcattttgataacccaactaaaagtgtgactgacttatagttcatatacagcctgttagtacagttgttctaaattgctga

SEQ ID NO: 133838 - DNA, 1579 bp, Homo sapiens
tcatttggcaatacagtaaataaaatttctacaggactatataggaaagattataaggaagcatatcattgaaaaacaaatattaaatacctgataaactttcttcatcgatagcctgaagattgttctcattgactttaagttcttctaatgtagatggcaattgtgaaggaatctgtatcaaattatttccatccatattcaaacgcattaacttcttcagaagcttaaaaagcaaatctcaaagttacttttttatctagtcacagctgtgcagtcacatttcatataatggtcgtgactaaaagtctcacaaacctatccttccttaggcttagacagtaatgtccaggccacacagcaaaccccttattccccctgccaggttgatattgatcctggtaatagcattgattctcagggattttcagcagactacatttgattattttgtagcttactcaccacgtttatattgcagctttagaaagtgagagaaagctgccataactactggattggtcattcttgctagatcttaggtttccacctttacagcaatagacagaaattttatgaaatcatgcagtaatctgaagctgtcatggatgctaacaattaagatagcaatcaatcctttaaacatacttgtaaacctcagttttttatctactccagaaaggtcataaaataacactaattactgtggaaatttttcaaaaccaaggactacagatatcacaagccattccaatatggcatccagttgactgtctggaaaagtgtctttttcacatttgtagttgtgtgttcattggtcaaacctagcctgtacccccacaagtggggacctgtggttgggtaggttttagtaaagtcccatggaatgattcacttctccagtgatcatattcaaatttcaacagtttcggaatgggacagagaattccaaagcaagaaaaggaggtaatctcttacaaatttttctcttggacaaataggaaaaggaccccctaatgctagccattttctagaagaaggatggatagcatgaagtagatctagggtgtgaatgtagaacccttttatctgccagactccagataagaaacaggaaatgagaatagaagagaccagtgatttgtctgaagagtgggtggaagacccagaagactgcccaagggagtaacagtttcacttagtggaatatagtgtgctttatttttggcttttcaaacatacacatttatgagtttttgtttacaaacataaaccccttttctcttggctctgaaattccttgaattctctcttcttttctcctttttgttgtttgagacagggtcttcctctgtcgcccaggctggagtgcaatggcgcgatctcggctcactgcaacctccgcctcccgaattcaagcgattctcctgcctcagcctcccgagtagctgggactacaggtgcatgccaccacgctcggctaattttttgtatttttagtagagacggggtttcaccatgttggccaggctggtctcaaactcctgacctcatgatccgcccatcttggcctcccaaa

SEQ ID NO: 133839 - DNA, 1031 bp, Homo sapiens
aaactactccataaattaaaatcattacttttgtcactgatgctattgttggtgtccttacagcaaagctaaaagtatgtaaaatagtaaactatattcaagggaaaacttgaattcaaattagggacatcagagaggaaactttcttagaagaagactaccaattagaagcattttccttttcctcccttccccatctccaaccaatgcaagtcatagtgaagccattcatccaaatagacaaatcagagcatgtatttaccttgaatgcttttggacctatgcctgaagaagtgatattatttttactcagatcaagcctttccaaatttggtaatccattaaatgcttcatctgggatggaggcgatggaattgcctaggacacacagcggttatgttttaggcatgtgtgcatatacatacatgtacacacatgtatgggcatgtgtgcatagatatcaagagagagctttgtctggaggagaaagcaatactcagaacaaggacagaatatatattatataaccaaagcatgttcagaaaagtaacaagctggaaatagatggtttaacatagttgacattttctctctaaggattcatcaagctgtaaatatatcatggtttagatgaaggtgcttaacacagccagaatgtggtctgctggagagtactggtaacattgtacatttacaacaaaggtgtggaaggttacacagaaactgatttttattcttcatattttcccatagccattttcctggactagaaacatgcctctgtttttgtccatgaatgctcatgccaatcactcacctcctctgagcctgtctccatctctgcataagaagcttggggagatcatctcccagactctctcagatctaatgttatgcctctacggcttcaatctacaaaggttcctgtatgctttaattttataggtttttgttttaacatttagttaagttcagtagtcaatttttaaacccggaaagtgagcataccagtagtacataccataaaagcc

SEQ ID NO: 133840 - DNA, 1038 bp, Homo sapiens
tctctgcacaaatgtgttgaccttttcagcttccctcaccccagcatctccagggacacccgtggcatgggggcctcattacccagacgaatgctcctgctgctcccagcacccaaagtgtccccaccagccagcctctcacacctggtcctgctgttgttccactcagagccctccctggtggtcctatggaaacatgggcagaaggtctagatgaccacattccctctagaatgtcaaaaaggaagggagaaaacaactgacagtaccaagtgcgggcaggctgcagagaggcaggagctccccagcatgcaggtgggaaaggaacagccactttagagaactgtggggcattttcttataaacttaaacatgtatttaccatatccgcagtcccactcctgggcattgccctagagaaatgaacacttaggtccacacaaacatctgtacgtggatatttatagcaactttatacataatcaccccaaactggaaacaactcagatgacgtttaactgataggaaaccctgccccatccacatgatggaacactacttggcagaagagaggaatgaactactgatacacaaaacaaaatgggtggctttcaaaaacattagaagccagtctgaaagggctatgtattgtatgattccacttatgtgacactctggaaaaggcaaaactgtagagacagaaaacagatcagtgttctgtggtggccagtgactggtggagggggaaacaaggaattttggggagtgatagaatgtcctatatcttaattttggtggtggttacatgactatgtgcatttgtcaaaactcagaactatatactaaaaataagttttactacatataaattatacctcattaaagctgatttttaagaaacatcagtaggaaatcatcatttgatttggaggagtttgctttatacctaactgctattctgcagtaaacagctatctcttctgcaaagtttatatatttgaagattatgaaattagtctattcaggatcaatttttag

SEQ ID NO: 133841 - DNA, 1678 bp, Homo sapiens
tcttaccgggtcctcctcgtcctcctcatcctcctcaccctcctcaccctcctcctcctcatcctcctcctcctcccttccttggcgttgttgctggtgtgccagcctcctctcctctccaggcctctgctttctgtctcctcctctgctgtccccctcactgtaaagttgcccctgatttctagattcaggggtctctctcttttgctctgtatcttcttctttcacttcttcatcctcctcagattgaagtgcttcttttcttactattcggtccattcccacctgaggaggtggcagttgcttatgaagtaaattggtaggttctctttgttctgaagaatcaccagaaaattcatttctatcatttaatgctataccactgagtagagaataggagactaatgaccacgcaaggatgaggtagcagagataagttgatgatattaataaaagaaaaaaccataatgaaaatgaggttagtaaatattattccctccaagtatttgagtgcaatttaaagatgaaatgcaccttgaaattcttgcttaaaaagttttaatagtcactttatttctattttgtaatatctgttacattttattcacctgtgggccttaatactaatttttatattaaataacttaatgcttatttttgctaacatatcatgatacctggtgactaaggagggaataatattgccacatgaggcaaaatggtaagcaatcctgttgtgagattgtgttataatcagttgtgatacctttataatagatactgttctgttcactggggctattgctaatgtgagaatttgcagactgtttaccagacattagaaaagtgaaacaggtgtatattttacttgcttatagcagtgaaaccaacttttgcttatagatttgtcattatttttgtccatggcatcataacatcatcctctgaaattcagaattatagagagagagttttcctccttctctgtcccagactctatacttaaatcatctttactacctgagacttacaaatgacattctggacttaagtgatgttgctttaacttagacatatgcccaggagtgctgtttatccttccatgatggtgggagtagaatagatgatagtagacagttaatctacatttatatttagctgttaagtctttggcagaaagtggggaagacatgacaaagactagattcaaattcactctctgggtaaacagttctaggaagaactgatttcacagtgcatacttttttttcccccccccgagacggagtcttgctctgtcgcccaggctggaatgcagtggcatgatctcggctcactgcaccctccgcctcccgggttcaagcgattctcctgcctcagcctcccaagtagctgggattacaggcaccccaccaccatgccaggctaatttttgtatttttagtagagatggggtttcaccatgttgaccaggctggtctcgaacacctgaccttgtgatcctcccgcctcagcctcccaaagtgctgggattacaggtgtgagctaccgtgcccagccagagtgcatacgttttcttccatcaagatttaaaaatttacttaatcatctgcctacttttatttaacactatatataaactactcccaaaaagaactcaggaaatataattatttgg

SEQ ID NO: 133842 - DNA, 1035 bp, Homo sapiens
tacctgactgaatgaaggacccttgggagggaggcccagtctcctctgagaaaagcctaaccaacaccttatgaaaataagcaaataaatacttgttaaataattggctgggaagggatagggacatcttctcttgtctataaccaaggtagattgctcccatgcacacagatgatcacagggtaggtgtctacaaaagtctccttgccaggaaaaacttttgactatttagaaattgtgttttgcgttatactaccaaatatttcactaatatttaaaaagagttaggaaaaaagtgttcaatgaaatggattccttggagtgaaataaatacaaggtttacaaagtaagagtcacaaattctcagaaattttttcagaagacttggagtattcttgaaatgtagttattttggaaaaataaacttggatatacaggaaggattttaaatgtttcaatatgatagctttagtttccttttactaactttttcctattcttctgcatgttttgctagagatgtgaaaaaataattcacagactttataatacatactgaattgatatctcaagtaatttctccaaataattatatttcctgagttctttttgggagtagtttatatatagtgttaaataaaagtaggcagatgattaagtaaatttttaaatcttgatggaagaaaacgtatgcactctggctgggcacggtagctcacacctgtaatcccagcactttgggaggctgaggcgggaggatcacaaggtcaggtgttcgagaccagcctggtcaacatggtgaaaccccatctctactaaaaatacaaaaattagcctggcatggtggtggggtgcctgtaatcccagctacttgggaggctgaggcaggagaatcgcttgaacccgggaggcggagggtgcagtgagccgagatcatgccactgcattccagcctgggcgacagagcaagactccgtctcgggggggggaaaaaaaagtatgcactgtgaaatcagttcttcctagaactgttta

SEQ ID NO: 133843 - DNA, 1043 bp, Homo sapiens
tcccttcccagccaattatttaacaagtatttatttgcttattttcataaggtgttggttaggcttttctcagaggagactgggcctccctcccaagggtccttcattcagtcaggtatgagcctcattggagaaggggtccatgagcagccaacaaaacccgcgctgtgatctcctgcacacagaagtgccacatgagaaaatcatgcttcaggctacactttttctgcattttcctgggattatccaagcagtgatgtgggttcctgtgctgcctttgagtggttgggtatagccagagggttggggctttgttctctttagatgcaaatcactcttcctttgtttaccctggcttcaagatgataaaggcacgttgcactggattaagtgggataatgcacatatagaccaaagcagagcccttaatgcaataagaattcaggatctgttgtagaaattctgttaccatatctctaaagctgagagtcaaatgtggaatgtaatctcatccaagtttactgaatctgatagagctagaactataaagccacagtctattatttatatcccctaccatacattttcccagatattttctatgttaatcagcattttgccaatattttaagtactcagatctgactaatgtatcataattttaatctaaaattagtaacaaaaacaaatggaagttaaagattaatcacacactgatattttgcttagctaaatctctgtaccagtagcggagcagaccgggcagcattccccttcaggtataactgtttgggggcacctctggggatggcacatggtttcatcacaaagaactcttccatctgagcagaggcaggtagtgcagggctcaggcgaccacacagctttgttgtacatggttatgccctttaccaaacagtgtcccttctttcctagaagaaaacaaaagcacaaatttaaatttcttatgtgattatcagtaactgtgaatggaagtaaacacaatgtgaagtcaaactgctctaaccacacaagaatagaat

SEQ ID NO: 133844 - DNA, 1100 bp, Homo sapiens
attttgtaaatatagtggtaggataagtaatttttgtctaataattataaatgtgttccttaagttgtttttggttttttgggggttgttttgttttgttttgttttgttttgtttttaatctcgagacggagtcttgctctgtcgcccaggctggagtgcagtggtgtgatctctgctcactgcaacctccacctcccaggttcaagtgattctcctgcctcagcctcccgagtagctgggattacaggtacatgccaccacacccggctaattttttgtatttttagtagagacggggtttcaacatgttggccaggctggtcttaaactcctgacctcgtgatctgcccacctctgcctcccaaagtgctgggattacaggtgtgagccaccgcgcctggccctattttttaaattattttaaaatgtatgtttgtagattaaaccaaaaagtaatataataacctggatttttctttagaaaattatcttcatggagatgttctccctctctccctctctccttctctttccccataccatctctcaccctcctccctctttctgtctctctctcatagtgttctcttacctggtaacacattataacttgattctactccaggaaaacttgaaaaggattcaaacttttcctccatgctataatcaaagttaacaataggaagtcttgctactggtgtaaaaactgttgtttgctgaattccaagctgtctgtttgatctgtgcttgtgtgaggttgaacttttcctcaaccttctgtggtagatcttcctcctttgcttcctaggaatttcttcattttttccaaagtcagtttgaaaaatgataagcagaaaaaaacaaaacaaaactgcaatcttcatgtttgatttttttccaccagccaatttctagaatgaaacaatatttcaaagttagtggtgactaaatttttacttctgaaaattggcttatatatttgcttgtatgcctcagtaggcaagtctttgagaaattacacttatgatatatggactatatgctatagtattattgccaaatcataatttggaattcttctatcagaatcaaaaaact

SEQ ID NO: 133845 - DNA, 1049 bp, Homo sapiens
gtttgaattgaaatatactttctatttgctttttatttgtcctacatgttctatgttcctttttctgttttctttctttttaacttgttgcttggtttttattatttcattagtaattatacactttttaccattcttttctttgtagagattaccacatacatccttgacttatcaaagtcttaatataaattagtacctttacctcttcctggacaatacaagaaccaggatgaacttcaactccatttaccctatcccagtatatattctgtttcagttctgtgttttaattatatatgtatttttaaaccctcaaaagattatttttattttgtcaaagtttatttagatcagatttttcatcctcatcactattaacgttttgcgccagataattctttttttatggggagatgccctgtatattataggctatttatcagcaatccgtggcctctacccactagatgccattagtaccttcctcctagttgtgacaaccaaagaatgtttccaggcattaccaaatgtaacccgcccctcaattgagaaccacttgtttaggtttacctaaacatttatcattttccttcgttccttcctatatctactttcttctattaggattattttcttcttgactgaagatcaccttctaataattccttttgtgcagatgtgttgatcagttatttttgtttacctgaaaggatgtatttgttagatatacattctggggttgacaagtgttttctttcagcattgtgaagatacggttgattttttccccctacactttcatttccttcctagcttccagtattttattgttgccttcttcccacctacttttctttttctttttttatttaatgtttttttttttttattttattttttttttgagatgaggtctcactatgttgcctgggctggccttgaatccctaggctaaagcgatccacctgactcaacctttcgagtagctgggactacaggcacgaactaccacacccggctcgaagatacaatttctatgtcttctt

SEQ ID NO: 133846 - DNA, 1114 bp, Homo sapiens
ccaatatggtgaaaccccgtctctattaaaaatacaaaaaaaattagctgggtgtggtggcacgcgcgtgtagtcccagatactcaggaagctgaggcaggagaatcacttgaacccgggaggtggaggttgcagtgagccgagatcacaccactgcaccccagcctgggcgatagagtgagactcggtctcaaacaaaaaaaaaaaaaaaaaaaaaaaaaatatatatatatatatatatatatatatatgctttgggtccacttcacttttcctaccatcccccactgcttgcttgcctccattttgtttgtttgtttgtttctctctgtcctcctgaggctgttttaaaactctattaatcttctcaaccacctcttctggaatccagatgcttctagaagaaaaactgttctaaacctctctgggtttcagtcccatcccaaatattggccctgttgtttttctcaccctttctagttattctcagcaggtctaatgatctgacttgccttgtctgccattatcagaaggagaagctccctcagattccttttatttcttgcagaaatatatcctctttttctcagagaatgttgtaagttgtaaaattctgtgctcttattaaagatctgaaaatgtcattgtttaattggaaacagaattacggtttcaaaatcattctaatcatttttctttaataccttatagatatttgtccattatttcttatatttagtgttgccgatgagaaatttgacttgaatctgattctcatccctttgtaagaaattttttttctttctatagaaatttttttcaaattttcaacatatctttgatatttggaagttttaccttggtaaaagaatggaatgtaccttggtataggttgtttttgctgtttaatgtatccttcttgggatcttttaaactaaaaacttctttttttcctatacaagctctcttcactctgttttctcccatgactgttcaagggtacatttttcctctttaaattcatttctgtcttctctttgtctgtgaaggactcctcagagtgtctgtcccaccaggagctcccctttttatttcctagtgtagctgtatattc

SEQ ID NO: 133847 - DNA, 1077 bp, Homo sapiens
caagagttaaacagttgtgaaataaaatacccaaatattaaaaccattccacatgctaagtagaaacttaaaatttaaaacttttttacctggagatctaaactaagtaggctttgcttggtgtcatttaagtctccagctgaaaatgaaacaaaatcagagctttctttaaaaacaaagaaaggacagaagggaatgttgaaaagtatttgctgaacttcttagtaaaatctaaaataactgcctcccttggggataaatgcctttcagttctttgtgcagaaaatcagccaagaaagtaaccagggaaaatggttaccaagggaaatattttttttaatcataagaaaagtagaaaacagcagtgggtgtgggggaagagcattttgtttgcaggctgaaaaggcagagttggaaacacaaaaatgagcttgattaagaaatctgtggttttcatagactattcgcattaaaaatgttaaagtttatactagccaggatgatgtcacttgagctttatcagattatagggatgatattctcgtcagctaaaggctgtgtatatctggaatctattttaaattggattaataatatttaactcatctgcccacccacctcgatctcacacacaatactaacaaaacgacaacaacaaaaaaatggttacgtattaatatcagtggaaattatgtaacttctaaccatgaaataatagaaagaaaatgtgaaagggagctgtgtggctcctaattacctgttacgctggcaaattagttgtgtactttggcctcagtttctttatctgcaaatgagaagttagagacagatcaggattccaagcgcaaccctgctgtttatgagggaccttgagtaagttacttaatgtttctgaccaaagttcactcttctgtaaaactagggtgatacctttcaaatttttctgaaaataaaaggaataacagatatgaaggtcctaactcagtgcctatcctagactaggtaattttagaactattttttaaattttttttttttttttgagacgggagtttttgctctgttgcccaggctaga

SEQ ID NO: 133848 - DNA, 1064 bp, Homo sapiens
gtttatggagaaagataatataatccattctgtggatcaaaagagaaacctgagctagagatataagatccctcagtatgtgtgaatggtactgaagccacaaaactgaatgagatcatagaccatgatttataaccaggccatctggcaaggtttacagaaattacaggaaccaaaataagagaattttaaaactctccaaaataagcactttcacacattgttgatagaaatgtgaattgatagactctttatgtaggtcattttatcagcctttactaaatgttaagccattctacttctaggaatctgccctacgaaaatgtttgtagaaatgtacaaaaatctcttacatgggtattcatttgtagtgtataaagtagttaaaaaaattacaaataacccaaatgattatcaatagaagattggttaaatcacaatatattagaggattctggggagatggcagagtaggcagcaccaggaatctatctccctacctcaacaacaattgcattggcagaatctatctgatgtaactattttggaactctggagtctattcaactcttgcagcttctacagtaggggtgtccagtgttttggcttccctgagtcacattggaagaagaactgtcttgggccacacataaaatacactaacactatgatagctgatgagctaaaaaaaaaaaaaaaaaaaaaaaaaaaaaatcataatgttttaagaacgtttacgaattttgtgttgggcctcattcaaagtcatcctgggctgcatgcagcccacaggccatgggttagacaagcttgttctacaggaagactaggtcagtaaattgtggttaattctggtcaatttcagctcttaacaaagtagtagctacccagccccagggcaggcagctgtgcaccagttcctggagtaaactgcagacaatttttggggggccagcactatccttcaaatatcagagatttgtgctctgattgctatttctgatcacagagatacagacaaagaggtaggtgactactgttgtaacttccagaggatgtaaacg

SEQ ID NO: 133849 - DNA, 1008 bp, Homo sapiens
tgattgggtcgtcttgggtcatgtgtccatccttggtctcatcaattattatctgtgggatcaagatcaaattgtacaagcatggctgggtggtggtgatatacactagtatagagttaaacatattcagcagaagaatattcatgtagactaccctataaaaagcctttgtaacaaacagaaaagttagtgtttaatataactttattcagtcaacatgcatttatctttacttcctgaagagaacatcctttgtattgttggactgctttactgtgtaacctagtgcaagctttgtacctattaatctgtcggtatgtattggtttgattattttctgtttcattcacttatagcatatttgtaaatgcttacaggaatcttgtaggttttaactctatctcacaagtatcattcttaaactaatatatgaggttcaaagattatgggtgctttatttcattcttagcatttttttctgaatatgtgcttaaattacagaggagtggggttttttttttcttcttttttggagggtagattaaaaccattagctatacttaggcatagtcctcagtggataagagttgttttgctttcaaaattttcaagcaggctttagtgaaacaaacaatattttcactatgaaatcaccagcatgctagctggaagagctgtgccatcatctgtttatggtggtatgccatttggtatctataattcagaacagcaaaggtaaaatttaaatgtttgcatactgaaaattacttctctatgtctttggaaaagagtattagcaatggttgggcatgtagcaaaaaccaagctttctgtctatgagttgatggctctgcttagttcagtttcttgaaccattacaagccccatgcaagcattgtgctgtctgtcaaatataaccaaaggctgaatgaaaacactgggattagttccacttcctcagaatgtgtcagggacctggccacacctcaccccagccatcccccagtc

SEQ ID NO: 133850 - DNA, 1015 bp, Homo sapiens
ctttacatttttacctgcacttgatattgtctgttttgttgattacagctattttaatgggtgtgaagtgattctcttatgcgtttacgaaagatttcaactaagcattatacagacctattttttatttagagctcttttattttgagcttttaatgatagttcaaattgttgttgaatgcctttttaaactactttatcttacaaagtctagttgtaatttaaattgaagataatcatatgttcatatttcctgactctatcagtttttattcaccctttaattatgatgtttttattatgtttaaaatattgtattcatctgaaaagctcaaactacacagtatcatccctgctcccccacacctacctcccaaaaagaggtttcattgtttcttcgccccactttataacaacatcagtcacattcacatacaaaggatgtggaacagaaaagacccaaagagctttgcaaatgctcctggagggcactggcaggcactggttgagcaagttctctaatggtgtgtcagtggtgaggtacagttcaacaaagagttttcagaggctttaattatattaacacaacaaattgttaactacttgttctaaggtttttttcaaactttaactttagtttcttctcaatgcattctcttgctttataagacactataaaacacatctggttagcattcagcacttatggcacttgtaaataaagaatcctctttctattacaaatgtgtgaataaatgctatgcttaaagatgtttgatttttaaaacagtgtagaattcgtatttgtctgaggccgaagtatgacttttaggaaattggaatctgtcctttggctattttgtctttaagaaagaagctgacagcttgactgtcttggcccacactccctgtttccatttcctcctgcgggccagggctgcataatcaaagttagacagttgttatgcaagcttcctggtctcaggggcccttatccctgtccagcccttaaaca

SEQ ID NO: 133851 - DNA, 1013 bp, Homo sapiens
gggcgtggtggtgggtgcctgtaatcccagctactcgggaggctgaggcaggagaaccccttgaacccaggaggcggaggctgcagtgagccgagatcgtgccactgcactccatccagcctgggcgacaagagtgaaactccatctcaaaaacaaaaacacacacacacaaaaatgtctttttgtctgctcttgtgagaacagattgcagggtcaggggtgacaggagactttcacggtaggctccgcctgagatgtcgagctcctagggctagtctctgagagacgtgctttcctttctgtcctctcacagcgactgatatagaagcctgggggtgctgcttaagtctcatgcaagccctgccatgattaaaaagcactgtggcctccccaggccttagggaaggatagtgaggggacgttttccctgagaagcatctggcctgacagctagtcagaggacacaaggcaagggagcaggctggaactgcagtgacagggccttcctgctgctccagagacttgccggattgaaccagatcagctctgctgaatgaggttgtgtggggacaatggcatgacaaagcttttaaaggaagcagcccctgcatcgctgagctcttgccagtgtgggaggccctcaccctgtgcatgtgggcccagcatggcaagggtgcatcgcagcaccagctgcacctgccagaggctgagaggggcctggcggaagcttacaattactaacttcagcacaacagtttccataagaaaatgtatacctaagtgatttaagtggaaagtgttggttgatttttaagccgcaggctcttccaaattaatcacaactgcatgaggaccgtaagggagagcctgtgaacgtggcagctcagcttccaggctggctcagcggcagcacttgggactcattgggacggctggggcctgggccagctccaacgtggggcccgaggttcagcctccaagcacaagggagcagatggagcagctctctgcct

SEQ ID NO: 133852 - DNA, 1033 bp, Homo sapiens
tggtttcagttttttattctatgctaggttgtacagacttatttatatcatcgttttgagggactaatggaggcttattgtaacatataatattagtgaaaccatggaattatatgaaaatgatacatgagaaataaggaaactattttgctgattgtaaatttttgtgggaaattttgtgataacttgagaattatacttgtttgaatcaaggcaactcttctagaatttattgttcaattctgtcatatttacttctaattctactctcagaggtgcaaaaagatacttatctaactggacacttttactgttttcttctcacttccaatgacaccgtctcatacacacgggtcctgtgtgctgggatgggggctttggtgaagtgcacggagctcacggacaagccgcaggctctgggaagcgtggaggtagtggccgttgagtactgtcttgacccaagggagttcactgttgctgggctggggctggggcagcctggtttgggatgattttgcccattgtcacggtgtgtggaggatgctgggtcctgggttcaagtgcacatgtgagggaaccccagtccgtgggaaggtgggctgggctccctaggtccttcagggctgcaagagttattgcctagcacagggcccagacagggctggactagacacgatgaaaacagcctgtatttgagggagaagagaaaacagatggagacccccactctgtctggtcttggctcccaccagcccgggctgtgaggagcccctgagccgcgggtgccactgctgtggatgcgtttctggcccgtcttggaaactgctgctgctgcgtagtcatgacggccctgactggtttgagacaacacgcgttcacagatcttaacaatgctaaatgggcgactgatgaggtcacggttcttaaggcacatccgggacgatcgatatagcacttaggctatgcaggggggtctttctttcataaaggacctcattccttgcgtcccagcccaggaacagtgctgtctttg

SEQ ID NO: 133853 - DNA, 1016 bp, Homo sapiens
tgagacggtgtcattggaagtgagaagaaaacagtaaaagtgtccagttagataagtatctttttgcacctctgagagtagaattagaagtaaatatgacagaattgaacaataaattctagaagagttgccttgattcaaacaagtataattctcaagttatcacaaaatttcccacaaaaatttacaatcagcaaaatagtttccttatttctcatgtatcattttcatataattccatggtttcactaatattatatgttacaataagcctccattagtccctcaaaacgatgatataaataagtctgtacaacctagcatagaataaaaaactgaaaccaagattcccaacgtttttcatagcagccgggcacactttggtgaccccaacgagaaccctctcggcagcagccaggagctgttcaccttccagaagcagggcctgtggcagcctaacagggagaggccacggggcccaaaaacgcaacacgtctcaaggcaaacccgagggaggaacttggtctgggaggaagagagaactcgctcctcaaccaccccagacactggagtgtcaggaaagcactgagctgttggggcacactgcccagcccggccacagcagctcagccagtcacagctccacctccaacttctacagcagcaatttttagtgggaaagaacagctcatctccccctcatgtgaaagattaaattgtaaagcaaaaaaaaaaaggtcaatgctcgcatgagtggtgtccatcctgacctgagccttgcgctccctgctgccctgtgtggaactgtgggcttcagcacctccacagggaccctgagtctacactgctcagaatcggcatctgcgcgaccacgaggtcacgctgtgcagcagggaaccacctaaaaacctgtgttgatatgtggcttgcactgaaaaagtgaccatgtaactcagctgggggaagttccagtagtatccatgttttcttaaaagtccaaactgtaaaatgtatgt

SEQ ID NO: 133854 - DNA, 1101 bp, Homo sapiens
cgcacagatcacaggtgcacagaacgagtgctctttgtgagctggggtgtgaggccattcacttctcttttaaaagagattgatttatctaactttgcagaagtcaaagaaaaaacataaaaacatactagttgaaagaagaaagggagagagaacgggagggagggaaatgaatggggggcttgtgtatcctgaaatggtactttttacttgcagctctgatcaaaggcctgtcgtcccttcatcgaggtccaggtttgccttttccgtgtctgtgctggaccttgacctcaagccctacgagagcattccccatcagtataaactggacggcaagatcgtcaactattattcaaagactgtacgtgccaaagacaacgccgtgatgtcgactcggttcaaggaaagcgaagattgcacattagttctccacaaggtctaactctttccctgcagtgtctttgaaacttgaacataatgtgaaggctgaatgatagagatattttctgttgtgttgggtgacctttggttgtgaatgtttttgcttttaaccccttttgaggtgggattgcctcttggagacatggaattgaagagcactagaaacaacttcctggacaaggaatgtaggaagtgagtgctgtgtcccaggaagctgctcacactcttaaaatggaagtgtccgttaagccctgggaagacgttctggatagttcttctttcccaaccagggctcatgtctgattctctaatgcgaaaagccttattctaagacccaaggtttggatctgctaccaccagactcctaacatagaaaacttgaattgtcacatacattttacagtttggacttttaagaaaacatggatactactggaacttcccccagctgagttacatggtcactttttcagtgcaagccacatatcaacacaggtttttaggtggttccctgctgcacagcgtgacctcgtggtcgcgcagatgccgattctgagcagtgtagactcagggtccctgtggaggtgctgaagcccacagttccacacagggcagcagggagcgcaaggctcaggtcaggatggacaccactcatgcgag

SEQ ID NO: 133855 - DNA, 1081 bp, Homo sapiens
gtctgtgtctgttgcttgtctgtaaagtgggacgccggccgtgctgccctgttgggctgctgtgagggtggagcaagttaacacatgcacagcctgtagaagggtggccgtctgccgttgtctctggtggctgtatgatgttccggagggaatgtcgttctaagcgatgccttgctgaacaccccctgcgctctccttgcaggtgtcgagtgatactcacttgatactctgagtgtggccaacatgcggggctcaggtggcttactgcttttccttccaaaggccgactgtggtgaccttgctgaagacagatcatccgtctcagggtctggagtcggggtcccacactgcttgccgtgagaggtcagggggcggtgctggcctctgagcagccccgtggcactgagggctggcccaggtgctctcacagggcgacctcctgacgcccgtgctcaccgtggccctcgctcctaatcccaccctcaggttctgaggcaggaagcagttcccacacttggctactgggaaggaaggttgtgtgggggggcagaggcttcctgtgtgacctggagctgatctttcccgcccctgcaggtgcagcagtaccgcgtcgccatgactgccaaggactgctccatcatgattgcactgtctccctgtctgcaggatgccaggtgaggcccccactgcaaggcatgcagcctgggtctaacggggttttatggacagttggtgaattgttaataggatagttggtttccccatatttagagactccatggcggagtgacataacttccttggcctatgtgacatcatggggcttactaactctcgccctctagaagcttgtaattcagtcaaaagacagatttatggagaataacttaaaaggattgttagtacattgaaagttactgttttctaagaaaatactcccaagagctcagaaacaatgtggacagtgagctgcccattgcattccctcaaagaaagccagcccctgagatgtgtgggtacctgtggcccttgttcctcggtctcccacagtggcagcatggcgcacctgcctttttaccac

SEQ ID NO: 133856 - DNA, 1187 bp, Homo sapiens
tggcaggagatgatctgggacttggtacctcccaagctcacttggcaccctgtacagcacaggtgccaaacaactgtgagtggcaagtggagttttgtttctgcctctgtccctatgatataacaggtccttgtcagtggctttgacccctgtctgtggctctgtgtggctggttctgagctcgtgcctgtcgccagcccaggtcttacctgcctctcagtgtgggctcatggctctggactctgcagacagtgtcccagggttttcctcctttagtggtcttgcagatttaggatgtcagcaggatcttagaaattccttgccttgcagttgcaatgagtcgagatcacgccactgcactccaggctgggccacagagagcaagactctgtctcaaaaaaaaaaaagaaaagaaaaagaagaaattttgtgacctgacttaaaatgaggattatgtctaaacttagatcataaagtgacttccagggctgttgtggtggaatctaaaggacattctgagagttgtgttgggagaggagagccacgaggcaggacatgtgcatttcttgctccctcctttgtgcttggcctggtgcatccagtgtggtccaggcacgctgcagctccagcagctctgtgaggcgggagcgtcatctcgtctgtccttagtgccagtccagggtgcagtccttgcctgtggtgatgcccgtatggcggagcccaggatgagccctgcggtctgcgccggcctgtgtctccctccacgttctttgataatcaacatgctctcgttttcccctgatgttctcggtaggaaaaaacaccccagagcgctcggggttaccgaagggctgtcttctgtacaaaaccctccaggtgcagatgttggacctgctggacatcgaaggcctctaccctctgtacaaccgggttgagcgatacctggaagagtttcccgaggagaggtgaggtcgggcggtccccctgttgggcagccctgagaggagactgtgggagtgggcagggtaagaatgcgcctcccaaggcacagcttcccaggaggatgaagcatgccggccacttcctaccccagtcctccgctcccaggtgcccaggcctgctctggaatgtagtgccttgtaaaggaggaacagggtcacttgtttctagaaaagaaagcacgtctg

SEQ ID NO: 133857 - DNA, 1122 bp, Homo sapiens
caaggctgaggtggtccggaaggggctcagtgccccagacaagtgcatgatccagatctgaagacacctaggagatggaatgacaaaccaaacctaaagtgaccttcataggacaggacactgagccaaaaccaacaagctgaaggcgaaggaggcaggcgcaggcgtcacacaggagagaaatcctgcggcagtgcataaaggggcaacctgtggacttcactaacctgagatgtggccactggcccaagtactgcaccttcaggctgcagcgaggaaactgtgcccagatgggaagttccctcatcaaggagcccccacagggtcagtgtctggagctccagacacacaccagggaacatgccaggctgccgagagcctctcaagcatgccacagggtccacaccacatgaggcagagaacaccatggttacctgtgcctgggaaagttcaggtgcacaaccatcccaaacagaggcagaatgcaaactgacaggcaaaatgagaatcatcctgggccgtctctgagtggaagggccttggggaagctgaccaccttctgtcaggaacacctttaaacgcctctctatggctggcctgctatttaccttcctgcccaccctgggcacaacctcccaccctcctgtagcccacacctagttcctccatccccaggcctcatttcctacaagtcctgcgctgcacagaaggctctctctcatcccatgtttgcatactgcaggaagaacatcactgtgctccttctagtgctgacagccaatgaccatgcagatctccttacctaggccctcggctcctgcaggacgagctcaggctggctgaaggcgcatcatgttctcatggtagaggggatgggggtcagcacaggactcattagggacctttcaattctgagagaagctgatgtcctctcagagaaagcaaccctctccttacctggaaaaacttggcaaaggcctccctctctcttggactgaatgaggtggatctaaggagtacagtagcagggtccacctgctcccacacccggctggaaggaggctgggcgcatgctcagcatccacaagaccacggactcctcctattctacctcacccatct

SEQ ID NO: 133858 - DNA, 1050 bp, Homo sapiens
ctggttaaaacagtaataggcacttgaaaaaaaaagataaattattgaatgagtagtattacctacaaattccagaattttctgggttttaggacgttgtgaagcatgactgattaacagaattttatacaactgtaccaataaaattccaaattggaattgttttgttactctggttgttgtgccaaattgtggtacacttagaaaattctacagtcgtcgatttttagggtgttctctttcaacacctttttgttagtaatcattgccagtagtgccttcatcagttaagggaggtgtcccagcacagatcattctcaaaagcgagcagggaagagctagtgggcatgctgaaggccagcgtggacagcaggtgaggcaggtgctcctcacacccagacctgggcatcttcattgagggaaagaaaacagtcattgtgcaaaattctgttagtcagtgattctttacttgcaaattcaggggcttagaaaatgaaagcaaacacaaaaccttgagtgtgctttgggaaccaaatggaccttctgggacaagctgagcaagctgtatgaacgccacgtttgtgaagagctgagggtatcaggagggccgacgctgtgttggcatgcgcagtaggggatgagggttagccatagtattctttgcaaatgtgaaagcgagacattatatcttctcttgcttggtgtaactaatcactgttaatttcaggaaacagaactcattaaaactccttagcaaaccaggtctacatcctgttttgtttgctgagtgaggttagtgggagtggtcaaattggtactcttggaggaagaaaaactgtccttccttctccaaaaaaggaaaaattataataatataaatgacaaaaataaaagaattctgtttcctggaataagcatttcttattcctagttgtagggactcctatttttaccttccgttacagtgttgattcataagaaatattgttacatttgagataacttcatctgtatggggtatttatttgcaatgatgtctgagtactgtat

SEQ ID NO: 133859 - DNA, 2012 bp, Homo sapiens
gttttaggaggttccagcctgcagcataggtacgacctcagaggatggctttgcacttggcatagtttcatggaaaggagtacgttgtagtttatgcagtatctgactgcaaatcatattcaggaaagaagtgcagaatttcttccccaagcccagagaagagcagccctgagcccctgtattctgctggccagacacacatggcacagacacagctgaccataacccaggaatccagagctcggtttctcatttctgagatcaggatgcttgtatagtggcctgtgaggtgacagattggcagggcccaaggccccaggttttcatttttcatgagaaaagctttccaagtgcctggccagaccttggtccttagtgcagagcccgtccttttgtacttggggtgaccccagcagccaattatccggccttccatagggggttcagtcccaaagacatggggctttgaaaaccctagcctgaagtctgagccaccaagggcttggctgggttggacacccacaggtgtatccagagcccagcccggtgctgggaaagctttgcatagggccagggccacttgtcaggattcacaggtaggagatgtttaggtctctttatttagtgcaatctgggggatggcaacagagaaagaggaaaggtagctgtagggttctcccatttccagaggctccatccacacctgccttcccacattctgagcagaacttttctcagtacttttttcccgatcaccctgtgggaccagctggacctgaggctgcagtcttctctcctgcaggctgcttgccttgtctctcatgcggaagaggcattcgagttacctggtgagagaccgtgttgccccctcccacagctctctgccctgcgcgttcttccctttggtgccgagtatgtttcggtcccctccagactccaggacacgcccatgtatgtcccctgcgtgttcatcctgggcccagatccccctgccccagcaagactcgcagtgggatggctgctggcatgcccaccctgcatgcgctttgccctctccttgcaagcctggcacatagcttctctccatactcctaagggactttgcagacacccaagccactgggacccctgctaacacatgcaggtcttctcttctgccaactaacgtgctcgcgccctcccagcacgtggagagcttcaattgtcagataaacaggaagcgacagatgaccgctttctaacgctctcttttctcccgttttcagctgtagagtagctgccaggaggacttggccacccggccctgtcacactgcagccccttccccttccctctcgtggcccacaaggaggaaggaagggcaacctaaaagcccacttagaaactttttggatatgccactgcaattcttttcaaaatagcattccccaggtttttaatgggaggaaaaaaagctttaatgttgagcatgctgcgagctgctgcgtggaaaggcctctgtatgggccgaagacccttcttccctggctgccaggctcgccaggagcccactggaaacgcccaccacgggggctccttgttacacatgttctttttttatccgatcaacctgtgcacttttgatattttgatattatatttgcttccttaattcctcgcgtagagacggtctcaggtgccgtggtctatgctcgtggtcctgtagctgtccgcctcagctcccaccgtgtttgtctggtgtcagcacgaggcagagctgtgtgctccatagcgtgtagctttagactcggagatgagtgctttgacccagcgaggagctcagctaagtgtatccacgctgtggttcagcagcctttagatcatacggcattgtggttcatgtttgaaattacagattttaaatgccatgttcattaagaaatccagggtattcagattctggggtttttcatattgtattattattattcttaggaatagttcaatgtaacaagaagaaaacttgacctttg

SEQ ID NO: 133860 - DNA, 1050 bp, Homo sapiens
acttggtaatatttgtgaatgacttaatacaaggttggcagccttctatggatggatgtgtgttgttcttggtgcatctccacacgtacagtcctggcttggggccacctcagacatttgtgctccccttgctgtgtctgctggtcccagcggtgggtgggctgggctgagcatttcattgcattcgcatctcatgccctggaaccttcttagcatccacatctctgagcagaggaagcagtcttggcctggacgggctgccacccttcccaggatggcacctcacctggcgcttcatcttttgcttcatagtggccggagttggtgtgctggtgtgttttcttcatttatggggcctgaaaggagcttccacattgcattgatgcaagagcgttgacttctcttcccaggtggagtttgagggcctcaagcatgagatcaagcgtctggaggaggagaccgagtacctcaacagccagctggaggatgccatccgcctcaaggagatctcagagcggcagctggaggaggcgctggagaccctgaagacggagcgcgaacagaagaacagcctgcgcaaggagctgtcacactacatgagcatcaatgactccttctacaccagccacctgcatgtctcgctggatggcctcaagttcagtgacgatgctgccgagcccaacaacgatgccgaggccctggtcaatggctttgagcacggcggcctggccaagctgccactggacaacaagacctccacgcccaagaaggagggcctcgcaccgccctcccccagcctcgtctccgacctactcagtgagctcaacatctctgagatccagaagctgaagcagcagctgatgcaggtgagcaggcagtggggccttcggcacgctgtccccactccaggtctgcagggctccccgagcagtgcttacctgacactctgctgatgttaactttcccttttccttacgttgattttatctcctgcatcattacggtaaatggaactccaggagcacacatagaggagtctcagagaagtgg

SEQ ID NO: 133861 - DNA, 1174 bp, Homo sapiens
caagaagttgcatgtagtcagcttcccagagctgctctctgagccctgtcaaggtgtgatcattctggcttttgacaccaaagattatatcttgcctggttttgacttcttatagatggagttgcaccgtactttttttgtgtgttcactcagcatcgtgagactggtcctcattgctgcttgtatttgtaggttattggcactcgttgccacatgggattcatttgtgtggatataccacgccttcctcacccactgtcaggtagaccgaccctggggttgttttcagcttggagctgttagaacgctcatggggtggctgttgcctgtgtctgttggatggactggctagggtgacatagggcaggctttcttctagaggagcacagcagtgtgtggcgagctcctgtcctctccatcctcaccacgggcacttgatgtgttactgatttatgtactagccattctgatcagtatgtcacagtagctctttctggtgtaagttgcattccccatggaccttttcctgtgtttactggccacttggagagcctcttttataaagagccttttcaagaccttcttccaatgttcttcttgggtgtctgtctttttctcatgtacgtgtaggagatctttatatattcaggatatggagccctttgccatcaggcagtagttctgacccagcgatgcagcagaaggacccagcatggagcaggcagagatggctctcttccatctgtgcttctgccctgtcacaattttggccttttggagccttagtttcttcctccataaaatgggaacatgggttctcctgagaactttgagataggcgttaagtgaaataatatacttaaggagacttatagagtggtggctattattgttactaatacttttttaaataaaatggaaagaggctgaacacggtatcttgtgcgtataatcccagcacttttggaggccaaagtgggggctcacttgagcccaggagttcaagactagcatgggcaacatagtgagaccccatctcttaaaaaaaaaaaaaaaaaaaaaagctggcatggtggcacgtgcctgtagtcccagccactcaggaggctgaggcaggaggattgcttgggcccaggaggttaaggctgaagggagctgtgatctcaccactaca

SEQ ID NO: 133862 - DNA, 1050 bp, Homo sapiens
aagtggctgaacctcccgggcctcacttataaaacaggcatcataatagaactgcagcttgtggcaggaatcactagattaaggcacgcaaagggctcagtgcatttgcccaaacctggcctttggttgacgtccatagcttcaattcgtataaggaaaatatgggggctacagaaggtggggtcatagaccgtggggttgcccaagccaggggcgctgttgtccatgtttcagcaaaacagatgtatttttctctgggcgacaaaactcatcctaaatgcgactgagagccctgtaatgtcccaggacagcttgaccgctggggtgggtccccttccactgtcccaggctggggcgctgcgtctgggctgcccttggcaccatccactcctctctcgcccacagtcaagtacgaccttaacaacccggccaagcacgccaagctggacttcctcaacaacctggccacgggcctggtgttcatcatcgtggtagtcaacatcttcatcacggccttcggggtccagaagcccttgatggacatggcaccccagcagtaggacacccaggtgagctgggagatggggcgcgaggcctgcagtcctggggttgctcgctgttggaggctcttgcagtgtggtgagtccctggccggccagccttggacaccttcctaggccatgggcatcctcgtccacacctacaaggccaatgcctggccactgccttgaggccagccctgccactggtgctggccacctggggtcctgtggtcacagtgtttagatggaatgtgtgtaggagccaccatttgaacatcctggagaactcacttaaacgtaagatttctatacattcagaatgtctgtccgataaaaaaaaaaagatttctgggtcaggcgcggtggctcatgccggtaatcccagcactttgggaggctgaggcgggcagatcacttgaggtcaggagttcgagaccagcctcgccaacagggtgaaaccccgtctctactaaaaatacaaaaagtggccaggcatggtggcacatcc

SEQ ID NO: 133863 - DNA, 1019 bp, Homo sapiens
cgcccgcgcttggctgcacggcggagggggcctcggcgcagctcctcgggctaaggactgccggcgcccggctttcccgacctcccccccactctcgcgcgggcctctctaacttcagcctcgccgtgccggctcctccgcgcactttgcccggaggcgggcggaggggagtcacagcctccgggctccagaccagctgcatgcagacagttacgtcaccccacgctgaccacacaatctgatgcgtgccttgatgggggaacttggggcccgctgtggtccctattccactcacctgccttgagaaatagaaacgtcacacagccttcagtgtatgccgccaccggccctccagaacttgccctgcccggcctgggagggctgtgggcagggggcaggccctggtagtggtcccgcttcagaattcttcatcccaggactcagcacttactgagcaccttgtgtttgttgcaaggtcctggcatggccctctggtgacttgtttactttgaacattctttccttttctaaccccctcagggatgggggcagggaacagcagcctgttgggtttttccaggcctctccatggcgtggaccagactggggcaaagacactctgcccactcgctggtgaacagtcctaggccggtgctgtggggacaggacatgttcggggaggcggggccccatgagccacgggataggatggccctggggctgcatggacacttgttcctaggttagagaggagctgtcgcactgcaggacttgaccggtgtgcgggaccccagcgacctggccctgccccagtgtgtgagcactttggagcaataggcagggggctcctccggctgtgtgtccttgggaagttgccacacctcgctgggccttttagacatggtcttataaagagagaacaaagggtctctcctgccttcagggaagtggggaaagcaagtcaggtaataaacaggtcagtggcttggaagcgccttggaaaggaagggatactgctc

SEQ ID NO: 133864 - DNA, 1102 bp, Homo sapiens
gggaaaaacacaagcatgctatgttctgaaattcacttggtggaatgttccgtcagtcactgtgatatggtttggctgtgtccccacccaaatctcatcttgaattgtagctcccataattcccttgtgttgtgggagggacccagtgggagataaatgaatcatgggggcggtttcccccatactgttctcgtggtagtgaataaggatcatgagatctgatggtttaatatggggaaacccctgtctcttcgctgtcattcttctcatgtctgccaccatgtgagacgtgcctttcgccttccatcatgattgtgaggcctccccagccacatggaactgtgagtcggttaaatctctttcttttgtaaattgcccagtctccagtatgtctttatagcagcatgaaaactgactaatacacactacacactgtaaatgttagtcatggaggatgtgtaccaacatggaagagtgtttacaatgtatctttagagaaaagatggactatccaagtatgcatactggaattatcattagattaccatacatctgggtgaggagcagaacagagacataaggtgagtttgtgggcaaggttttctttttaaacttcccaaaagcttgctttacatacatgtaggcttaaataatttttttttgagagatagtttcactcttattgcccaggctggagtgcagtggcacaatctcagctcactgcaacctccgcctcccgggttcaagtgattctcctgcctcagcctcctgaatagctgggattacaggcacccgcctccaagcccagctaactttttgtatttttaatagagatggggtttcatcatgttggccaggctggtcttgaacatctgacctcaagtgatccacctgcctcggcctcccaaagtgctgggattacagacatgagccaccatgcccagccaaataacatttttcttattttaaaaagtaagttcattgtaaaaagtttagaaaacaaaggtaagaaaaaaaataattctgttgcccagaaataaaaactgtccatgttttgatattgtatcctcagtaacagcaaccgtgaacctcagaggcagcc

SEQ ID NO: 133865 - DNA, 1041 bp, Homo sapiens
tggcggccgccgagacgtccccggcacgctgatggagcccgggcgcggcgcggggcccgcgggcatggcggagcctcgggcgaaggcggcgcggccggggccccagcgctttctgcggcgcagcgtggtagagtcggaccaggaggagccgccgggcttggaggcagccgaggcgccgggcccgcagcccccgcagcccctgcagcgccgggtgcttctgctctgcaagacgcgccgcctcatcgcggagcgcgcccgcggacgccccgccgcccccgcgcccgcagcgctggtagcgcagccgggagcccccggagcccccgcggacgccggccccgagcccgtgggcacgcaggagcccggcccggaccccatcgcagccgctgtcgaaaccgcgcctgcccccgacggcggccccagggaggaggcggcggcgaccgtgaggaaggaggatgagggggcggccgaggcgaagcctgagcccgggcgcactcgccgggacgagcccgaagaggaggaggacgacgaggacgacctcaaggccgtggccacctctctggacggccgcttcctcaagttcgacatcgagctgggccgcggttccttcaagacggtctacaaggggctggacacggagacctgggtggaggtggcctggtgtgagctgcaggtgagggtgccccagcccgcagggggctttccgcagggtctgtccgcgagtgcgtccttgggcctgtccttgctcctgcgcctggccttaagaagccctgggggcggcggggctccatgtgtgtcaccctctgtgtggatggctggcaggatgcataccaggtgtgcggacggcatgtggggcctggctgtgtccgtgcgcaggttgcggtttgtgagtcagctggtggcgagggcaggcctctgttgtgcgtttggtgtaagtgtgcacgctgtgggcgtagagagggtcctggagagtgggcctcggaggctgtgtctcttaggctgctgcttctccagtcccgatgacctactttaatgacccaggga

SEQ ID NO: 133866 - DNA, 1015 bp, Homo sapiens
gccgggcacagaggaggtgcatggcactcacttactggggcaagacaatcagaaggcttgacccgatttggctggtggtcaccccttttaaaaattctctgaagtgcttaattttattgggagagttgtaatttgaaatcagttggatgccagcactgaatttgctttcctgggcgagatgttttctgcaccatgctgaccatggttttggtttagctggcaaaaaaggctggcgctagctccctgaaaggcctgtgcagacggactttccctccctcccaccggggcagaaatgtgggcgccaagctctcagtggtgcttctgccccccgagtggtggtggcgaggtgtgtgtcagcagcgatgacagacagcagcctgtgcaggtcaccgtcatgggggacacattgaggctgaggcaccacagcttgttttctactagaagcaggtgctcctgtggctcagtggtgccgtgtgggcgcctggctgagctgaatcaggaccaggccaccatgggactcgagcgtacctgtgctgctttctgagccccagagggaggaccccagcactggctcagatgtgtggagggccagcccccacatgccatttgccattgcaaatgatttgatttgccattgccaaagcttgtgttttctcattcctcgtcagcatgttaggaggtctgccagggcagctggacatgccctcccgcagcactggaaccttccgtggtggcagaaacatcctgcctctgcatttgtgtccacaggccctgcggagtgcctgggatgtggctggggcagctgagggtcagtgttcttatttttcctcacattaaacgtggacgcaaatgtccacacgtgccctggctgcttcacgggtcacccgcgtctccaggcttgatcttgggccctcctctaggcggctgcttttccagaggatataacagacccaggtgacctagaggtggccactgggacaccagacagacccagatggggacagtctatagacca

SEQ ID NO: 133867 - DNA, 1045 bp, Homo sapiens
ttcctccatccattctggtacagattttccagttgagcatactacctcctcctcaccccttcatttgtagaccaatgttaccggtgactggggaggcttgaggagcactgggctgggactgtgcactttggtagcaccttacccacttcctgagttcagggcatctgtcagcacagatgtgtcagtgagcagacggccactgtgtgggaaggccagcaccagccttcatggggagtgggcagcctatgtgcaggtgggagcccctggaccccccaggtctggagaggccattggccccagtgggtggaggctggcactcaggcttagccctatcctgggcccccttgttcctgggggcccaccctgctggccagcctctgtcatctcccccatcctgctggtcagcccctgtccgtccctgcaccctgtgcctggcccccactctgtccttcggcccgccccgcggccggctgtctggagcctggtctccatagcaacagttgctgctgtggaagctggcgcccgctcagcctcatcccgtggggaggtatttttggcactgctgagggattttattttatctttggtgttgacttttactctttgagtgacacagacgaagctgggggcagcctttgagaagcttctctctgggggacgtggtgttaaaggcctttcttcgtggccccttgagtgcagggtcctccgaatgtcttgctgctggggacactggctctgtgtgacgccagtgccttctggcagcctctgggccagtgggtctcaggctccagacgtactgggggctttggatggcaagaggaaaatcaggggtgggtttgagcctcaggtaaagccaccagtttggtggggacacccctggaggcaattgttgttgagtgctggctgtagcctagaccccgtgcggagcctcggggcacaattttatgggatcctcctgcccacggcccattttatagatgaggaaactgatgctgcagagggtggtgcctgaggggcatgcggggtacagggcatcactgatgtc

SEQ ID NO: 133868 - DNA, 1112 bp, Homo sapiens
aggagccggaggccgaccagcacctcctgccacctacgttgccgaccagcgccacctccctggcctgtgagtgctcaggggtgggatggccatgggcacccctcccacctaccctgcaaaaaccagctattgggcaaagaaaaatgaagtcctctccctttattggaatgctttgtgaggaagggggtccgcatggcatcccctcggaggagacatcgtgtagctctgagctgtcctcacgtagcgtgggtgattgctttagctgtaggtagtttccgggagtcctggctgggcacctatgccccgtgacaggctcgccttctgccagcacctttggtgccagggcatgtcgggaacttcataagagagcaacttccagggtggtggggccagcagacccaagcactgggatgtgcagggcctgattctgtgaccagcctgggccctgtccccccagcccaccatgcagggtgtggaccctaggtatgggtgagccttgtttcagtgaagggattggggctttctcagcatttcccggtgatctgtaaccaggagattaaggctcaatgaagttcatgttctcaggacagatggggacaaatgggccgtgagccagcagggtctggtggagccagttcagtcccactctgtgctatggatctgtggatttagggcaggttccttaacctgtctgagaatgacagttctggccccttggggggaatgtgaaggccaggtgaggtggtggcagtggctgcttggtgggacatctgtcctaggaacagagtgtgctgcttgctggcttggcttgtggtgttgccgtggggacctcccatcccccgtagtatctcccttctaaggcagaacctttgggaccttttgtacattttcagtagggtgttactgatgaattggcaggaatcactttggatcaggtttcatctaagaccatttagggaaaacctagtatcttctgcacatacaggcagaaaagtttctgtctgtgccctcaacatcctaagaattcagcagtgagctgaggactgaggaacatggcattgttcattctgtgaatatgcatgggatagaatgacagagccaagggacctgcc

SEQ ID NO: 133869 - DNA, 1050 bp, Homo sapiens
cctgagggctctaaattctgtgatgggctgtccaggctgcactgcattgtggtcagcattaaaagtggcctgtggtcagtgtccagccacacttcccctggggagacattcaaaagccaggcccagaggaaagccccgtccttgctgtcagctgcggaactgctggccgagtagccctgacattcctgtaaagacctactagataggaaagacaccctattggaaaacagaccccagggcacccagaatttgggaggctatggtagagctgagtggttccccctggggagcgggcacagtgataatggtgacaacccacagccacaatcatgatacccactgacagtgccctgggcctgggacattatcccagactgttccatagatcacagaaaagcatcatttgtacgaaggaaacctgagattcgatctagctgcccagcctcctgaggggctcctggcacttctctcccagatattgtgtagcggttaaagtcagagctatgaaaatagggcggggatgaggggaacactttcagggagcacgtgtggcaaaggagtgatggaacctcgggctgtgacgacacgtgtgggttgattcccacgggaaagactaagatgagtggggtcacatttggcacttatttttttattttgatttttaaaaaacactttagaaagcaaaacaattgctcctcgcagtcccaagtgcccagccacagaggggttgcccatgagccccaggcagtagattggtaccctcagagcgtagtttgtttatttatttgtttatttgagatggagtcttgctctgttgcccaggctggagtgcagtggcgtgatctcagctcactgtaacctctgcctcctgggttcaagcgactcctctgcctcagcctcctgagtagctgggattataggcacgcgccaccacgcccagctaatttttgtgtttttagtagacaccaggtttcaccatgttggccagcctggtctcgaactccggacctcaggtgatcctccctcctcagcctcccaaagtgctgagat

SEQ ID NO: 133870 - DNA, 1013 bp, Homo sapiens
cttcaggtgaatccagaagcccagcttgatcccagatacacttgctccaaccactcacaccatgctgcctttcataaagcacccaccgcgaaagacaagtgaggagggcagttttgggcatgccatcactcacgtgatccagagaaccccacgggagagaacgttcatggcagggtggaagagccatgatcctctgtagccctgcctgctcctcacattctcgttgttttgaaataaatcctagacagcaagacacttcccctgtaaatgattcagcctctggctctgcacaataaggactctcagagaacaaagcccaattccattagtacaccaacaaattaacaaattcgcagcaattcctcaatggcagcaaatacccattctgagagcttagatttcccattcttttgaggtctgtgttcactccgccgctggagtgctcacatgctgttccagggcccgtttctctccatatcgtctgtgagttatgtataagttttcatcttacatggtcacagtcatatggaccgtgagcttccccagtttaatgtcctcgggagcctttctgtatggttctgcagagcctctgtgctggccttttttgtggttgtgtaatgttctgtggggctgatgtgcccgggcacccctgggctgggggctgtgctgttcctggcccttcactgttgtgaatgatgcccagggctccctcactgcttctgctgtcatgttcctgggaagagggaccctggtagggaccaggcacagggatgacatgaggctaccctgcccctgcccaggagggggcctggtggccgagagctgctgctgagtgtggccctggtgctctctgcagcctggcttgccggtgggctctgtcccggcccccgcctgccctccgtccctccagcagcacttcccggatccggccatgagcttcgcccccgtgctgccgccgcccagcacccccatgcccacgggcccaggccagccagcaccccccggccagcagg

SEQ ID NO: 133871 - DNA, 1036 bp, Homo sapiens
gggctccttaggaatctgatttgggtgttgttcccttgtgagtttccacatggggtgtgcaaaggagacacgtgtacatgtgcgggcggccccaacctccccagaggctccatccgctgctgccaccttccccacggcgcataggtctggctcatgccctggcctacccacgagtttcttttgtcacatgagggtctcagctcaggcgaggcccccatgtcagcttgcttggcttttctggttgcctctttacggcaaccctgggaaaagctagtcagaaagagctccctagatggagagcaccggaatagctgcaggtgcagtgggtgacagtttttgagacaccgtgggagcagggctggaacccagccccattgatctgcgctgtgggaccctctcacatcagacgatgggatgagacagggtgctggccttcaggtgctcagagaaggcctggctgcatgagggtgcccggggctgacgcctcttctcttgcccgggtttattgggcatctgtcatagaatgccgtggggccaagacatcatggagtatttttagtttccaaaactgctgtttccaaaactgggaggagcacacacagctggctcctcccagtacccacttccattgtcctgcctgtctggaggcactcccatgggatcactttgggctgcttcgggtcagctgtgagccatctctgcctcttcctcctccttcagccccagtaacgtttctgatgttcccatagcagagtcgtctcccaggagtatgctaggctatgacagagatggaaggcaggtggcctcagactcccatgtggtccccagcgtcccccaggtaagggcgacttgacgaccccctggctggttggcagggtttgctctgtgctgatgttcacatgaaacctcttcatctccgcttgtttcccaaggatgtacctgcttttgtgagacctgcacgtgtggagcccacagacagggatggtggagaagctggagaaagctcggcagagcccccgccgagtgacatgggcac

SEQ ID NO: 133872 - DNA, 2105 bp, Homo sapiens
tcagcccctagatagaaaccctcgagtcccctactcaacacttgccgctgacctcatctgaggcagccatctgagatccagacttggcctccaacctgcaaaacaatgtatctttttgcacttggaaaacctccgatgggcttcggcggccaagcccagctgtgcccagctccattccagagctcccgtggccgactcagcagggtgtcctgcctccatcagtggggctcccagaagcctgatgtttgaaagccaagcggtgtgctttgcttttttcttttttcttttcttttttctttctcttttacttttcttagaatatgcttctagagacaaacacttctccctgaagcttaggggcttggccctggcacctctgccccctcggcgaagctcgtgggagcctgcaccctctctccaggggctgccccgtttcccccggccgggtcggccctctctctgaactgctgcctgtgtctgcccctccctgcacactgacgacttttgcttagtgtggtagcgtgtcccagtgtgtgctgttctgcctaaccctgtggtcttgtgtcgtttctttttcccttgcagggtctgccctgaagcgtctctgcctaggcaaagaacacagcagtagtaattatccgggttttttcccctttgtcctctctcatcgcatgggctttctcgtggctagcgcacatcagggttcccgcggccgggcgggcgtgggcctgccctgtgcctgccccgcgcctgctccatgcctctcggccgggcactgcttcgcttctgcctggcgggatcgctgtcctcggctcccccgtgtgtctcgtggcgcctagagtttgtgcggtctcgccagttcacatctaacgggcttatccttccccggaacacccgcaaattgccgatcattaattggctccttttccaaaaccgtaggaatgagtatttccttgaagtcctaaagatgagtgcctccccacgaggagagatgccaggactgagtgggtattagtctccttgggccactcacctctctctctctctcatctctctctctcgaaaaaatattttttttcttttctggctgaacttttcatgtaggaatagctccatgtgtgtcaaatctcatcactaatttttaattgtctgtgtctgtgctttttcattgctagccactaaagtccactacattttgggacagcttgtttgaagagatggtcattagattgtttctctatgcagaaaatttttgaattggcttattcaaaattgccaacgagaaattacatgtgttgcctggaaagggtatgatttaaaatttttaaagtctcattttagtcccttaaaaaacactttgaatgaagcagccgagtgctctggtgtgctaatggtcagcagagcggctcccagctccctcctgcagcagggcgtttggccgcagcccatggcaggagctggtggggccgcgtcaggcagccccaggcatgggtaccctttatgaataccttcctcgaatgcgaatgcgctggtcaggacaatttctatgtctggaattccaaacaaccagaccattaaaattcatgggaatgcaagtcaggcagccctggcaggcattttcccgtgggccagggggctgcctgcaggccagcccgccgtgtgtgctgagcgctctgcacacggtactccaccgccccgcgtcctcatgttacggctgaggatgcacaggccagagagagcccgaggaacctgactctaggcaccatgactccgaagcccagtgtgtctggctgtgccaggagtttcctgagctctctcacacgtgagtctggggatgggcagcggtgggcacagagtggatgctgagcagaggctgccggctgctgcagagtcctgtcccctggcctggcttctgaggtgggtgatggccacctggcacagcccatggaaatgccccaccatgtctgaccctgggcagccaggccccttaatccgaccgcctcttgaagcaaggtgctgcctggcccaagtgagaccattgtctcagctgtcacgtaagaatgaatgcggccagcccactgggggcctgggtgcgtgtgtggcgt

SEQ ID NO: 133873 - DNA, 1050 bp, Homo sapiens
agtcccccctagaggccgccgcccccgcccgccagcccgcccgcgcgccacggccccaccacccccggccccgccgccccccgcccgcacccgcgcccgcgcccccgccgccgccatgggcgtgcagggcttccaggactacatcgagaagcactgcccgagcgccgtggtgccggtggagctgcagaagctggcccggggcagcctggtgggcggcgggcggcagcggcccccgcagaccccgctgcgcctgctggtggacgccgacaactgcctgcaccgcctctacggcggcttctacaccgactgggtcagcggcggccagtggaaccacatgcttggctacctggcggcgctggccaaggcctgcttcggcggcaacatcgagctcttcgtcttcttcaacggcgcgctcgagaaggcccggctgcacgagtgggtcaagcggcagggcaacgagcgccagacggcacagcagatcgtcagccatgtccagaacaagggcaccccgccgccaaaggtctggttcctgccgcccgtctgcatggcccactgcatccgcctggcgctcatccgcttccacgtcaaggtgaggccggggatccgggcgggccggggaccggggccgcgccgcacccctatcccccttcccagggcgcagaatgtcgcccggccgtggcggcgctgggggcagcgagttcccccagcccttgcccgggatagcctggccgggccgggctgcaagatggatggccgcgggtgcaggccgcgcgctgcccaagcccgtctccagctgtccctgttcggggtccgcggccgcgtggggacacttgagggctgggagagagccccggaccagaattcggaggcgacagtgtcatcatccccaatatccttagtttttcccatcctatttgaggcgggcaggctatcactcaccttcaactttgacaaaatactcccttttctaatttagcctgttctttcccagcaacaggttcatcttggaagcaggcaggatacagagtaatagagggggtttcgccagag

SEQ ID NO: 133874 - DNA, 1027 bp, Homo sapiens
ttggcagagggcttcgcagctggcactgggccagaggagaacttcaggacccagcagtgactgtgaagataagcacatccatgatcctggacttcacgttctgattgcttgcttttttcattggttttcttgaaaacaaattttgggggcctttttgttgtcttagctcttgacactcggtcttccatcttgtcatttgacatttccttgaaactgctggagctgaaagtttgtgaaattctgtcttcgcggttgcccccactgcccgcgaggagatggtggtagttaagcctaaaatgatagcggaagtcccacccacgatccggttgcaattggtgagatggtgtttaagtcgtgggtggaggcggccggcagagtcccgattggcccctgcgcctggcagacacacagctgccattcctcagggaagttcgggtgagaggaagtgcctgccttttaatttctgaatcggagcctggggcgctcagggaagtaaggtgctgccatttgtctgaagcgatccatctccctaatagagcgtaaaagtgttcatagtttagtcttgttcagagatggaaaagactacttaaaagacaggatgagctgcactgacttgcctttggtaaccgcacagctctctacttaactagtcaagcgactttcaagggaacactgtgaatattacttaggattagaatcagtatgtatgcatatggtcactgtatctttaaagaactgttgagttctttttaattctacagtttctttatctttgcacccctttgaatgcctcgcacacctagtaggtgctcagaattcagaccaatgtgtcagtgttaggaaactagatttaagctccatttaagatcgtctttttcacttaggtttctggacacgggataatgggataattttgtctgtattttgcttttgctaagcttttaattattgacctagggtcatattatagtgcgaattgcacaaaatgaatattgtaataactcaattacttggtggtctcttagct

SEQ ID NO: 133875 - DNA, 1112 bp, Homo sapiens
gtttcactatgttggccaggctggtctcggactcctgacctcgtgatccacccgccctggcctcccaaagtgctgggattacaggcattagccactatgcctggccctatttttgcttatttttatgttttctctagaagtaaatctgatgaagaccttgcctgttatccagctcttagagcgatgcttggtgtgtagtacatgctcagaaaatatttgataaatggatatgaatcaccagttacaggcaaggaagtgtgatggcagaaagatggtaggaagcagaagttttaaagtccccctagagttaattccaaaatcactggtgtcagcttggccacctggtgcagagcttttatctttgagtaaaccttttatgcttcttaacttaggagatgtgttgagggcataaaatgggtgactgcttcaggaaatgggctgcatttagccacctttcctcttgttacacctggctttatcacacattgtttctaggcatcttaggggacagtgtaaaagagttgaacttgacccactgcagtatttgtagaggtgatggtcaatctgcattatggagtttaggatctgtgatttagaaacggtacttttatgcgccagtcatttggcatttctcagttgtctctggaatcaattaactttcttgaaaggatgaatttaccatgttggtgttttactggttagtgcaggaaagtatactagagggtttattgctggagggttgacttcacaggtctgaagtacatcattcatcctctgaggtagagcacatttatgaatagtagtaacaagccagcccagactgttggagggggtcactagactccatggatgaggtgttttaatttcctggacctatgaagagtttgcaagtgttactatcttgaaataaatagtatcaacctgtggttctttttcctaaattatgaaaattgaaattttatgttttagattttggaatggtattttaataagaatgatattactaggatttagctgagtcattagattactagagtaggctaaatagattctgaatacaaataatgtgtgtgtttcttccttttatcattgtatttttttatttttaaagt

SEQ ID NO: 133876 - DNA, 1756 bp, Homo sapiens
tgctccttcgtgtgttgtggaaatccgaggtattgtggatgttacattggggattcagtagaagtaaagagggtgtcttagattttttcatcattgaaaaggcaattgatatagacctagtcttgacatagtgtgtgggacatagaataagcctgtggcagttacattgagggtgaacgtgtgcatccttgtatggtctccacgtgtgggaggccttaggaggataagaactggttgacaggtaggccgagggatcatacttttattttattttttaaattctgatgatttcacctgacacatttgatctactttgaagaaattgttttgatttcattgacagtgggtggcttctttctgtctcctttctcacagaactctttattttcttgtgtctttctccccctctctttcttgaaaatactgtcatggggtcagctggctttgtgtattttcaagcaaggtgatctttgagcttgacaagaattgaaaattgatttacagtctagatgggatcataagttactgacaggagatgatttaaatgcgatttcccacagaaatttcttagtggagcaatgtgttgcaaactttattatggcatttttttgactgtttggctttcacggatagttttcataaatgtgatttttcagcttctgtgcaaacatttctgcttattgagcttgttgctacagtgttaccctacatctgatgaagtttttttctcgtttgccaggttgcacagagcattgaggatcaccatcaggaagtgattggtttctgcagagagaatggtttccatggcttggttgcgtatgactctgattatgcactgtgcaacatcccctactatttcagtgcccatgccctaaaactgagccggaacgggaaaagtctcaccacaagccaatatctgatgcatgaagttgccaagcaactggacctgaatccaaatcgttttcctatttttgctgctctcttaggtaggtggagcagtgtgaaaatattttataagggagtgaccatatgataagcacattgatcttttaagtgtttctgtgcttgaatgttttggatatgtatcacacattgaaaagaaccaaggcgtgggctcttccttagcattccttgcttcgtattattttttggcatagctaatgtgctacttttgttcttaagtgtttgttgaggtattgttctatccaggaattgttcagattaattttgtgaaaaaactcatttaaggttttggaaaactaacattctaaatcacagatgtcaacacatggtcactatgtaaattagacatttaaacctttgacataaattatgtttatagtagaagaaaatatgctatggggttagaatggttatgttttcacctcattttcgggatactcactactttaaaagagaaacaaaaataagctatcgtagcttgtttccaacacctacattttaagtaaatgtatacatgtctttaaaaaatttccttggaggaattccttatgctgaatacccagaaaggatgaaatcttgttttaactatgacattagattttaattttctttaattaaaaataattcccccacgcctgtaatcccagcactttgggaggccaaggtgggcagctcacctgaggtcaggagtttgagaccagcctggccaacatggtgaaaccctgtatttactaaaaatacaaaaattagccgggcatggtggtgggcgcctataatcctagctacttgggag

SEQ ID NO: 133877 - DNA, 1451 bp, Homo sapiens
atctgcactgccttaaaaagcaagcaacaatgctaccatcccttgttctcaacacctatatgttaggtaaatgtataaatgtccttgaaaatttcccttaaggaattctttgtgctgtgtacctagatagaaggaaatctttgagctgatgttttatatattaattttcttacttaaaaattttaattttgtctttaggtagtatagttacttgtcacttagagcaacatctttgcatagttgataaatttcataactaattttctacaattataaaatagtttataaagctttttggatgatgagggagactcaaatggaagtgatccatttgtactattttattaaaacttaatattctttttctcccttttgattcccttcctgtttgtgatagtaataaacatcagagatgaggcacttaattctgattttctgcagtggaagtgtctgtgtttgatgtgagcataggagtaatgagtgagatatgcacgaggcactggaaaacttcagcttggacttgttagtgactcctgtgattgtaatgatcatttgtcagttcaagtgcctttcttgacttggggaattaggaagatggggacctagactttgtatctgcttcccaccctgggactgcttccttacagtaaagagtggcggttaaattgggtgttttccgaagggctgtaaaattttgaatgttgtcgtaattaccctccctccataaacaattttaattggtggctagtttcaaatgggagtttttcttcctacattttaatttacctttaactctggtgatacccaaaagctgaagtagaattcctttcctcctttcattttgttccctgctgtttcatctctggcatgctttttctttttcatctctggcatgctataaaatgttctccttttcaccctaatggggtttggtatggactgttttcaacttcttgttcaaaaattagtttttcttctcttgttagaaattacatttctggccatagaatccctcctgtatgttttcatgaatgaagtgatgtgatctgtcattcggactctaagcttctggtgatgccatgattgaaatgtggattggggaaatgcagcgtgtaatcagctggacttaagagcactgcacctgtgctcagtagctctgttaagcattatgcttttgtaagtgagacacaaatgaaagcttgtttcctacaagatttattttgttttgaagagcaggagtgagatactcccaaggtttctggctatatgtgtatgtctaagttaaactagccctgcttcatatgtcacagggttagaagtgaagagctgtttgaagaattattggaaaaccagctcaatctattgccaagtgaataacatcattatatgtgtgtttttcctaaattttgttgagaaaatctttaagtattgaaatgtggaaagaatagaga

SEQ ID NO: 133878 - DNA, 1051 bp, Homo sapiens
acaagagttatgtgttactccctattcctcgggagacctgctgttgggattccttgctgcagtcccggagatgcctggaggctgggctggagtgcgacctctgtctctacccaggcccaggtcctgcagaacagggagcctggcagcagatgatacagagcaggctgggccaggatgggtaaaaccccagggctgcacagacacccaagcctgaggctgcgtttatcttactttgctctaagtaagttactctgtttgattggaaacataagagaatcttttatgtacctggaagagttgagatacactcctggaatgcctcccaaacaatggggaaggcattccaggagtgcatctcatttcctcgctcatttaaactttttccaatggcaatatttcttaaaagggtcatatctttaataaggaaaatacattgaatatcctttcaatgtgtttttggactcagtgttataattaggaagatttgtgattgtatttacagtaatgaaaagtgggctggatgcatattggtctttcgaagaggctcccactgtttgtgttgctctgggccgctgtgctcctttcatggttttagtgtggctggcagtgttgcatgagagaaatggaaggcgtcaggcagcctggtacccagagagctgagcctgcagagcatgggctccagtcccaagcccagcctctgtttcccttcaggtggtgcccccatgcctgcctcctcctgtgccctgggagtggctggccattcggtctgcctggacataaggtttagtgagcctgtgggtgccctgcatagctggtgtggcctgtactcatcagaggcggcctgcggctgtggcagtccaccctgggcagggccccctggctgtagacatgtgctaagtgagcagtttttcaaaatgtgacttttggggttttaaaaattgtatgattttgtgtcctaactggttacgggaattttttattttgggtgggcattttgttgttttaatttttaaaaatgttttatagatgtttgctggctttatttttttaa

SEQ ID NO: 133879 - DNA, 1068 bp, Homo sapiens
cacctcgaatttttcccaggggtatctttaactatattttttatatcttattgtcttcaaccagaagtcattgagtggtacttttaaaacatgtcctttagggccagcagttgggtctggctctgagagagtagtgaggagggtagcatcaggatctccaggagcaacgatggtagggccgtcagtctggccttcttatcgcagggactgtgtcacctccagggttggaacacacagcagaccccacagtgggccagtctagtagactggccctttgagacaaagaggaactgaacagtcctctctcttgggcttcccagatggacacctgggtggctgttgcagctgctgcccagcctgtggtcctagtgaccgctgtgcatggtgcctgtctctggactagggctagaggtcccagtaggtctcatgcagtgcctggagccagcttttgtccgagaagagctgtagcatttcaggcactttgaggcttcattgtgtgtggcatttaccacgtaaccttgctggagctaggtcagtgatcagatgacttgatctttctgaaatctttttttaaaaaattaagttgggtataaactgtaaataaatagaaagatgaacttcgtttatttctgactttcacctatattgtcatagcaggagggggtagttctgaattctgtgaaccctccaaagaaggaatttctccttacatgttagtgttaattgaagttcacttcatatatttttttcttaataagtcgttatattataatagtttagtaagagctaagaaaaacttcctaaaatctaagtacttatttagctttagaaaatataatattaggggcctgaaaggtaagtaaatttaaaacattcttctgtttgtttgttttttttttaaacatagtctattggggaaaaaaagagagacaggcaagatgacgtagtttgactgaaccctctgattttgttaatctttgtagtcttcatatttctgttgcatttttactgttttagatagaagcctatgttatctttttaaaaattcatttttattataaaaataat

SEQ ID NO: 133880 - DNA, 1614 bp, Homo sapiens
actagagtagtgaattctgtccagaaggttttcaatgtgcttagcccagatgcatcagaggagtcattttctatggcagttctagcctgatgaaatgtatttctttaataataagacttgagtgtcaaaattactcctttatccattatgggttgtggaatgaatgttgtgtcaacaggcatgaagacaacattcctttccttgtatgttaacatgcaagggctggtccctctgcaggctctcgggaggatcccagcccgtccagcctcgagcatctgaggccctgtcatgctgcatcactgcctcctttctccacattttgaggaccctgtgattcccttgggcttgtctgggtaatccaggacaggattcttatttggaggtcagctgacaggcagccttcattgaattttgccacgcaatgcagcatattcgcaggttctggagaggaggatgtggacagctttgggaggtcattgtcctgcctaccgcaaagctcttattaggtggctggtcttctttttcaacctgttaacttacgtttttctagtgtcagctgtttttggctaatgagatgttcctactctttatttgatattctttgtcactttcctcaaacatgcccctcaacaggcagtgataccatttttctccagttagagctgaagttggcctttgaaggtggattcaaggacttggtaactgcatttctgcttacagtttcagggagtcctgggctctaatctaaagattctacttgtgcaggccttcatctttgttggttggtgttgaaagaaagggagcgaatggtggctccaggccttctctctgggctgctttgtgcttcgcttgttatgggtgcaggtcctggccttggaattaatcgcaaacaagtcttggacttctcagaagtggtggaagactgtcagatgctcttttcacccaacacagtttaagcagctgagttgtatttcatccactgaaaggaaaatccagttcttgagcttcagaacgtgaacggcttaggaaagtcttagggccaagatcttacaagtggacaatcattgggcactgataagatcttagatggtagctccttgttgaatttctggctcctgcattcagattagcctggtactggttgctcaccatccactgttgacacttacgtttgttttctcaggtccgggcccaccagctggtcttgccaccttgcgacgtagtgatcaaagccgttgctgactatgtacgcaacattcaggacacctctgacttggatgccatagctaaagatgttttccagcattcacaggtaaaaaaaaaaacaaacaaaacaaaaaaacagattcatgggatatgacgttgcatagtggtgtggccaggtttggaagaaggggacttgagggtgcaagctgactggatgggtctgagagctcttgctcaggccactggaagaaagctgcaggttgcaaggccagaggctgaggtagcctggtcatgttccctgccagccaggaagtctcagccacttcacccagcttttccaggctgaataaaagggagattcagttagacggttggtgaggtctcctgctcataagttctcgatcttaa

SEQ ID NO: 133881 - DNA, 1914 bp, Homo sapiens
tcacttgaatgcgggtgctacatgagtctagccttagatttgtattattccaaagttaggtaagtgaggtcagccacaagatattatacactagacattttacattgatttaaattatatggttggagcttgaatagattttataatattctttggaccaaacctgcctatcagaatcacctgtgaacagttttttaaaataatagcgactttgatcgcacacgtggaggtgcagatctagccaacatactgttttaggaacagctccttgtattgtctgtgccatgcgtgtgtgtgcgccatgcatgcacgtgtggggtgtgtttgtgtgcacttctgtgtgtatctacgcctgtgtgtgagtgaccacttgatcatgcacacacatcccttagaggcacggacttgtggacttatcggtcagttaggaatgtgttgtgtgcacgtgtgtctatgtgcgtgttgcatgcaagtgtgaggtgtctgtgactacacacatgccagtctcattattcccagcttctcatactgcagttgtttttgtttggtacaaaggtggaagctctgccaaggttttttcttgatgcgagccaggatcgaagggctatggtgtttaaagcttgcgagctgaaggcccttggaaggcaggaacctcagataaattgtagtctgtaagattcctggtcgttctctggggggagtcaacaatgatctgtgcttcactcccagcgtctgttgaccatgcttggctctcaggaggccggaccaaggacagcgtttgcactcctggtctcaccacgcccagtgttggcttagggaacctcttgtgaatgcagccatggacatttgcttttcagagaacgagagtgaaggtttggggaatgtttctgtccttacctatattggcagtaggcagtgtgagaggtggtggttcttgggttgtgttccccttgcctggtgttttcctctgatttcatactgctataaagaactgcctgagactggataatttatgaaggaaagaggtttaattgactcacagttcagcatggctggggaggcctcaggaaacttagcatcatggcagaagttgaaggggaagcaaggcaccttcttaacaaggcagcggtaagaagtgtcgagtgaagggggaagagccccttatacaaccatcagatcttgtgagaactcattcactatcattagaagaacatgggagaaactgcccctatgatccaattacctccacctagtctctctgcctagacacgtggggattatggggattataattcaagatgagatttgggtggggatgtgcagcctaaccatatcaactggtgttcagatgaagaggttgtagaagcatatctactgcttaaagagggaaattggagtcagcaagctctgggcttggttttcttccacatttaaaacaaacccaaggaagagatggtgcagccgtgcaagcccctggtggatctgttgtgtctcacacaggttttctattttctctgtgtcttcagcagtgtgcatcttacttaaaccgcctcagggctcctttcatccccaggcccagtcctcagcttgacacatcataggccctcagcacctaagtgttctgagagggagtgcagctcctagaggtccatgtcccatgtcctcctgcttcctgcatatcatttgggccccagtcggtccttgttactgcgggtcttgtgctgtctctggaacagccctttatgggcaccatctactcactcattcacttctgttggctgacgtggcccctgagctctcttcctgtgcttagttaggccgcgcgaggccagaggttgagtggggaggcttccagcccctgccttctgtcccagcttcaggctggcctggttccatgtcctgctgtcctgcttc

SEQ ID NO: 133882 - DNA, 1539 bp, Homo sapiens
gggacccatggtggtgtcgatgtctgagccaggtgagggtgagatccctggcgccatgggctggcccccaggatgccctggaaaacgcattctgttcacagctgtgtgattcttttctttctgtgttggtgaagcagccagacccggtccgtttggaatgcctgggatggtgccgccgcatgttcctcctcagatgctcaacattccgcagacctctctgcaagcaaagcccgtggtaaggccttccctgcgttgggtcgggtggcgggtctcagacagggtgcgtgcattgaatttcaacgaatgctaaaataagttcctaacctcttgaattgatacgtgaaatagatgccagtgtttgttgaaataaaaatgagccaggaaacgtcagcctgggcctgagtcgggtcctgctggccacgtgtgcgtgacctgtgcccttcgcttcaggccccacaggtgcccagcccagggggcgccccgggccagggtccatacccgtacagcctctctgagccagcacctctcactttggacacgagcgggaagaatctgacggagcagaacagctacagcaacattcctcacgaagggaagcacacgccgctgtatgagcggtcctcgcccatcaacccggcccagagcggcagccccaaccacgtggattccgcctacttccctggctcttctacatcgtcatcttccgacaacgacgagggcagcggaggggcgacaaagtgagtggtgcgtgggtcgctgggtgcttcctggcgggtagtgacctggggaagctgccttctggcctgccagcccagctggtgttttgctcagagatgtagtttattgcaggtgggtgatggtcagtctgtactcagatgggggctccttggacagagaggagagaggaagagtaggtatgttcttgaagtttccatgatttaaaatctgcactatcccagccccatggcctggagccacaggaaactttctggggaggaatttgacaagaactggtttgtgtgatgaccaaaacatgggggcatttgtccggtgtggtgccactcacacccgtcacagcaaccccctgccgacccccgaaacattaatcttctggctcctggatcaagggagctctgaatttcctctccttctcctaaactcagcaggttacaggacactttggaaataacactgtttgcccaagcaaaaccctagaaagctgcctagacccaggctggaattgtttccttagaggagtattttaaacactgtgtgtccctgaataaatgggttcacaaatacatagttggttaaaatttgatcgaggaaatctttaatttgcactcctccctttctttaaattgtcttatgtttaaaacaaaaaaaacagggaaagaatatttcttttctttaagtcagtgtctccttttccttggtgtgaactctactttacagcgcagataaccagggctggttgatgttacatctgtttctgatgtaggaaatgtaagagacataggtgtcagcttccatgccagt

SEQ ID NO: 133883 - DNA, 1464 bp, Homo sapiens
cttcctggtgcctgtcagatgtttgtaatcttgtttcagttgaattaagaattacagttgaggccgggtgcaatggctcatgcctgtaatttcagcactttgggaagctgaggcaggcagatcacttgaggtcagaagttcaagaccaacatggtgaaaccctttctctaccaaaaaatacaaaaattagctggacgtggttgtgtttgcttgtagtcccagctacttgggaggctgaggtaggagaattgcttgaacctgggaggtggaggttgcaatgagccgagattgtgccactgtactccagcctgggcaacggagtgagatcctgtttaaaaaacaaaacaaaacaaaaattacaattgaatccttgtggaggtgtttattttatgttattttcatagattcatttggacttgcagaatctgaatcaaatctgaggttactgtattacaatttttaattctttgttttatatcttttttctaattatcatcttgatacaaagttatatagaattcaaacactggacaatacagtatagagaattccccatgatcctacttctagagaggtaattatatttgaaagattggtgaatattcaagcaccttattttcctctgcatctgctaaaataagatttttacaataactaggtcctatcttagggagagtaacttgccctttttccttttcttccatcttttatccttaatatacttacgtaactatgtattcttatttgtgcatgtaagtattaatatgtacatgtacttaatacccaatatttaataagatctatatacatccactttattgctttaatatttttgcataaaattactgacatttttaaatggatatgtaaaagtccttattgagagagaagactgagtttttttccaccttgtgaccttgtttgtataaatgggtttcattttcttgagaacttatgtatgtatcttaggagagaaagccctgtggaacaaggacatctccacatttatttttattttgacatgtagtgttatggaggcatcttttgcataagtcttgtatccccctcccctgttaatttttgctaatgacatgtactccctggaccaaatctggactgtgaaagatgaaccacaggaaggcaggctgtttggtgttagcatgctctgtgagcagcactgagacctagctgttggcaggaaccggtttgctcagagtctcttggttggtatttctaggtgatgttgtgacctgaagctcgcagaacctcagagcattcaaatgtgcgtgacaggtttgctgagttgtttgtgtattaaattagctgatgaaaaagctcaatgaatggtagctatcactactttttaaaaattaactcttagtatgctagaaaatcagaacactgatgtggtttttaatgtaaaatagctaaaagaattttatttggctccctttgatctggtat

SEQ ID NO: 133884 - DNA, 1754 bp, Homo sapiens
tttcctaacacttggcctcccctgccccaccatcctaggtgcatgatcctctagatcctcttaccctccaagagccccagacactctagggacagataccctggggatgggtgcttgtgggtctgcgtggttaataagcattccacatgagcctttaagcttaacaacagtttgagaacacttattgttctttacatgctatggaagataagcaagagttgtgccaatgttgccatgtacttctaggccaggatttagtaattttttgccccctgcgtctcccagcttgctgactcatgcatctctatcagcacatgctcatccacctcctgagccgctatccattgtctgctcacaatgcgccctcagtggctgctttctcagtgggacagaccactacactctggggatgcctgcaatggtttttgacgtgtctgagccactgctggggtttcctctagttttgttaagttgcaggcagagattgtgcatgagcagtggtttctccaagctccatgaagaccgggaaacctgaacagggtgggtgaacttttcatggcgtgcatgcagtatccttggctggacagtccattgtgtgacagcagaatctttttgcagctttttttccccctttttttaaaagacagaactataatgaagttgattggaagataggagaattatctggtcttaaaacctctccatctgtcatgtgagtcagttacaaaggcaggccagttgacccatgctggcatgtcctatggccagcactggttttcagaaggtagtttgggcatggaaccttatagtcgaagggtgagtgcacggagcaccacagccatccctgcctcagggtcacactgtgcactgaggttccagtgtggtgctgcatcctgctggccctgctcaagcccctgcacatcctctgctacctgtagacagtgcatttcacattcgcctgaggactatggtaaacccatatactacaagtgaacaaagactttaggaaataatgcttattcacaccatgcattctggtctgtcctgtttcagtttttttaaatgctcattaaacccacgaaattgtattcccagactgttaatgggtaacagcacagttacctctcattctgtaatttgagatgctctttgatcttctcatctctttttccttatccccttttttttttcactactttgttaaataaagccatcctccaaataagttcccatgaactccctgttctgtgaacccaccaagtttgtgccatctcgctttgcctagagtgtaccttccctgtctttcagattttccagttcgagtcacctccagtgttagctctaatgccccctccacatgaataggctggagcgccctgtgtggtgtattgtcgccttacatttatttataacttatgtgtagtattcgatccagataacatttaagtcttctactacctcataattgccaattaaatgctgatctttgtcttgctgtgacgatggaaagatcctccaaggcaaggcttgcctttgtttcctctgcatcctctatagcgctaagcaaatcacagaccatctctgaactgcctggtgactcctctaagttaggtgttcgatagtttcttttccatagtatgtggttatcacctacccttttgaagcaggaagaaatattagtataatagagttatttctcgatgttgtgtttattttaaaagtattgttattatgagcctgaagacttagctgag

SEQ ID NO: 133885 - DNA, 1044 bp, Homo sapiens
aatttcactttattagtgtcttaatgtatgcttaaatatatacatatagtgtggcatcaattattttttaatcttggtgtctcaaatgtatctatgtgtatttaaatttcctcagtgatttgtagtctttatgttggcacttttaatcttagccccacaatttaacaagttacctcagttactagattaatcctgcagaactggtttattgctatcatgtattattaacatgaatacctatatgaccatatataaccagacttttctgtctattctctacaacccatctgtggtttgtaaaatggagtcaataaatgcaataatgaactcctgttctcaaatactcctgaggtggacttcaactgttaactgactaatccaaatattgcttacttttattaattaaaggacatggaaaacatgtagccagtactatttgctcagatcctttaatttattttttagttgtaatgcctccaaatctcatctattatttgatatgggtatgcatttatagtatcacttttcagattatggttgtaaggtgaacattttatttttcaggttcaacataaattataaagggtaagtgaaaagtaattgttgtggggaaaacattttgctaagtttaaggaaccaaagttttgggaagacatctttcaaaataaggtgtgaagaaacaacactcattcctcgtggggctgtttgaaatgtaaggtccccaggagctacctgttatgtccacactgctggatctgatgcgtggatagtcggttagatctatatgagggttgcaaattgtaccgacatgctttcttatttcttatgaatttcaagggcaaatactgataaaatgaccatggttgagaaaattgtcttttcacattttaaaatgctacttaagttttttcagtttatcctataagctgaatggctctggtattaattgcccaggctaagacatttacagtgagatgcatctttatggtaatgaagagaatttgcaaagcatcatattattgagataaatattccctagatgag

SEQ ID NO: 133886 - DNA, 2654 bp, Homo sapiens
gtaaggggaaagaccagtttttaaattaaacttatgtgaatgaaagaaacagcaaatattacaaaattattatttaaagcatatatatcaatgaacttcatagacattgaggtcataaatgcattgttgtgctctgagtataattaaataaaatttgttgcatgatatcttgagatgtatcttgatgctgtaagatccctgagacagattaattttggcaacaatcttagctgccaaaggccacagtcagtcatttgtctcttggcagcacgttcttgagtcagatgcagttcttgccgtattggccctgggacatgaaaaaggtggagtgcttttggtttctgccctagtggctatgcatgtcctagccactgtactgagacacatttcttgagcacctgccacactatggcagaagcctaacacacgaggtggtaatttgccatggaagaacttagcaaagaaaatttgaccattatattttcaggatactcagttctttagtttgcatgtaggtaattgaaaattttcaattatattgcatgtgaccatcccaactctctaaataaaagttgcgagttctcagtcttttctattctgtttcttgtctgatgttatctgtctggattgtttcaaagactttggaacatctacatggttttcttttgttcttggttttggattaaacataaaatgatgtagattttattttgattctttgagcatatgctttggccacagcctgccaaatgaactcttcctaaacatctttatttaggcaagttgttaagcagttgatttggaatggaattgcaatgtcattaactggagataatacagtatatttctgtgagtgtattgtaaattcaacatgaaaaatgtgcaatgttattctgctttcttccatgcaaagggtgaaatcaaaattgctgtttctattgaagatgaagccaacaaggacctgcctccggccgctctgctctataggccagttcgtcagtatgtttacggagtcctgtttagtttggcagaaagcagaaagaaaactgagagacttgcttttagaaagaacagacttccaccagaatgtatgtactgtaacaatccattgtttgttttcctcggtacctcgtaatctcttgtgcattttctaaagccttagaagaatcatgactgagttgaccccgagtgcctctgtgtaaaggaggtgggcccatcatcggggcagtaggccagggtaaaggctcttagaaaaggaggagaagccacagactttcttcctcagtaacattccaataatgatgtttattcagtaaaataataaaacaggtttacactttaaagtgaatgttgatctgaaagcagacttgaattgccgccactctctgtaattaccacgtcttggtaatcaggacgagtgagtttctgtgctctggttttcatgaagcacagatctgctctctccagaaggccagggtcctggagaaaacttccagcaggtctctggttggccatgtttgtgctgttggagtgccaccacgcatggctctgcagctgtagcgaaggtcgtgggactcacggatcgtcgcaggattgtgatgatttgtctcggaatcctctgagacctgtgcacttccagctgatcaactctgggagtggggggtgcaggtggaaacactgaaaaggattgtttgaaaagttggtcaaagatgaggtcaaagcatttttctttatcttctagtgggcctgtgtaatacttggagaaaatgatgcctttctgttctaggtaattttatctcctaatgtaaggaatgtaaaagtaactgtatatttagttggaaatacagaaaagaatcctcaaacatacagtctgagaatattatgaattgtggaaattgtaaattactagatcattctttgagccatggataattagttacagactatttgtttgtgtggtgggtcaatgcagtcctcctgagatggtgaagctccttgtcagcactgactgtgtgcagtgctgagctttggaactttaacctaagttcattagatttaaaatatttctgtttgcaattactatgacaaacttgcaatctgtaaggctttaaagtgaagcagttctcactacctttccttggtgatagttgtcctgagagtgattgctgagctgctggtgtgactgtcactggcaggaggtgatgctcgctctgcagggctgtgagcatctccaccctctgtgtcttcagtggttggagataccatgtggaacaatgaacattgtaaatgacattcttctcaaaggttcaggacattcttcaatgtacctgttttcattcttttctcacattgtgtgatccatttgctctcaaaagaatgacatttcttactttgcacatggctggtcacttgtcctggcctgtctctacccttcacttctgcaggctgaccaggccctcagacccccttttttcagttgttcctctctcctgggcttagcctgcttgtgttgcaggctctgtctagtcccaaatcctgtgacatcctgggtgttgcagctcctttgtcctcagtttcagcgcactgcagtggcttcatggtagaaggtattcttttttatttgcttgtgtgttctaaaaacagagttaccttta

SEQ ID NO: 133887 - DNA, 1375 bp, Homo sapiens
gctggaatcagaggtcacaggaatggagccatcctgtggctccttttcttccaaaggaagaaaagacaagaagggttggggaagtgtgaaatgactcaagtgaatgggggtgccattgatgtaggtggaggaggaaagggacacaggagaacacaaaacaggatggtggcagcaggtggcactgggtcttctcttgagacatggctgagatggacaagggaacgccgtatcttcaaagtgagaacttacaggaactcccttccctcctctcctcttctccttctttttaaggatgggagactgaatagtttggttattgttatgttatttttttggccaatggggaggatttagtgggggagaggtgagtttatcagagagaataggaaaaaattagacagtcctgataaagagtttgtattagtagacttaggtgggaaggagaagcagaggcagaagtccatactttggggccatctttgttggtgaaggcaggaaggattgggggtaaggatacctcagatttggtttgggaaagggagtcaactagcactgaggaaaaggacagaggcccagccagctgcacttattagttgatcatggagcatgggtattttctgcactgtagtttagtacttctttgccaatggtagtttagtacttcttcaatggtaaatgagattttaaaaggatttcataaacatttatgtcttttgctattgtgtgtattacccttagagcagtgtgcagcaggcagtgaaagaatgaataattggtttaggtacacacaacttattggagatgaagacccggtttggtgcgtcagaaaattaaactttgttgtgtgagggtgtgcgtaagtgctgagatgctttgaaaggtcagtgctaaacaaattgcagtcttttctgctcaagtgatttatgaactttgattttgatattctgtagagatggggagccattgaaggtttggtacaaatgatgtttctgtttagaaagatgagttggatagcgatgtatggactgaaccaaaacagaaatgaagcctttacgtgtcaaagatagggcaggtgcagatgacctttgcctagacagttaagaccctagaatttaagtgtttagaaaaatgcattgttaatgtgctatgacaaatacatatttatttctgaatggaaaagatgtgtagatttgacctgagtttagaatttgggagaccttactcagtactgtaatttcagtgggtgagatttttgtaagcagctttagaatctaggtctttatagggagctgataaaattgaacttgtttcatgcgttagttacattcaagagggggaaacaagcctataaaaaagttttttatgtcagtgatat

SEQ ID NO: 133888 - DNA, 2288 bp, Homo sapiens
tgtggggtatgtttcagtgtgtgtattgtggtatgtgtgtggtggggggtgtgtgtggtggggtttgttgggggatatgttgtgtgaaatatgtgatgtgtgcatggtatgaaatgtgtgatgtgtgtgtcctatgtgtttgcgaggtgtggttatgtagagtaatctgatagcaacatagcatattggcgaacagctcattctggaagctccccttgcctgttttctcttggggtggagcagccttggtgttggatcacaggagggaaggcaggtcggctcacaggaaggcctgtgcatggtagtggtggttgtggagatgatcctgtatgttccgagtctacttctgggaaagcttctggaagctgagctgtgctggagatccacaggatcggggtgggggcagtgccttagattgtgcgtccaacgacaggatatgcttcgtgatggagaccttattggttttatatctatacctaaaagtattgaataaaaacaaataagcatgtatttatatatacatgtatgtctgttttgacttgatggactttaagcatttggagtgtttgaaatattcctttaacatctaaacactaagatattcaaatgtaaatgaaagacatttgcctaatgagagcagtaacatttttgtaaaaggaaaattttcagtgactgccttaacttgtaccccagctctgcccggcaggcttcacgtaaggggacactatctggagttggctccagaagggcttgtcacagagccctatgaggtcttgactcaacgtgttcctatacgtgacactgttacctgacttgtcaggtattgaaatgtatttaagcattttttttctgttgctgagaaactgtgtatccaagtgtctaactcctggtgtttttcatgacattttaagagattattgtattgcctgactatatttagactcagagtggaactggagatcagccagtaatacatttaactctgtcctgcttttggattcttcagaatgccttaggtattactttagagaagacaaacccagagagattaatgtaatttggatagaatgaatatgttgaagatcaaattagagtttatgatagcatcctggtctccgtacagacactggccttggagtgggtcgtgcactggagtgtgtcagccagggacggtgcctttgctcatgtgtagcagcactgggcaagggacaacaccaggccccgctttggttctggtgtttattcaactaaagtgaaccacttgttacttataaaatgcatacccagatttccctattgggttgttacctcagtgcagttgatgagattttaacattctactgtgcaatatggattgtttttgttttatttccttgtcattgttttttccttaatttattgggaaatcaatcaagtgggaaaatgtgcatgtttatgtatttgtaagaattgattgactaatagtgaaacatctgtggataaaaggtattgtttccatgttacatcaacttagaacttcttgtcttttttgaggcgaaatgttggataactttacactctgtctgaagtcttgctgaatagaattactgtgtgctggcatcatctgggacttcaaaacttggaatatttgcatctacttgtgttttactggccagtcttaaaaatagagtttaacagttacatttgttgaagtgggaggttcagtaaagtggctactgcatgcaaattatttctcaaatctaatttatgagggtatttatccatgtagaaagggattagctatccaaattggattttgcatgttaaaataattagataaccacatacttccgtgaattacactgttataactaaaactatttgtagatataaaatattaaaatggattttgtctaacatcttgatttatgcatactagttatatgagaaaatcaagtcatgatttgattggatgaaacttatttgtggcctaactgaaaatctgaatgagccattaattgcacagaatagagggacaaacaaaatacccacaaggacttgatgattggtagttttgctaaggagagaatgcattgttacctgagaggcgaatctttagaccagttactagagctgcttgtttttgttaagactgaaagcaggtgaatgatgcatgaatgtgtcttctctggcttttttttcctgtagtttcaccagtgatcattaaagaatgggcagcttacaaaggaaagtctcctcaaaccccggaactggttgaagctcttgccttcagggagtggacctgcccc

SEQ ID NO: 133889 - DNA, 3424 bp, Homo sapiens
tattgatggtttaattaaatgaaactttcacatcactcttttatgtatctcatcaaatataaataccatagaaatgtaacatttgctgtttgttctccttgaaattgcatttacatcctacttttgccacattaatttgaccatgacgtatataagctctctgtgcttcagtttccccttctctaaattgggataattattgttcctgtctcagaatttctataacagtagatgagttaaagtgtgtaaggtgcttagaccaatgccttggcacctagtgagcacgtaaactttctactttgggcttcaactgaaaatatatctcaatgagctgtctagaacctcccttacttagtttgtgtacccatggatgaatattaattaatacaagaatgatttagtgctcagcaccaactctaaccctgggttttgttaactcagattttaagcactgagcaaacttactctgcagatgggaatggaaagagctttgttaagcatgtcacggttctctgaactccttttgagttatttgccagagatcacgtcgtaatctatcatcagaagttatttttagtgatcagctggcaacttgattaggttgtccttcaagtttatggaatgcaaagaactgggaacgttagacttcagaaaggtttatgactaagtcattatagttagcccttcactttttcacgcccagacactccttggggttgtgccttgtgcagtactgtagggtgtttgtgattcaggcagtgctgttactgagaagggaaggagactcccaggcagacctgttctagttgaagttgaagatttggagattgattgtcctttagcagccacttcagggtgggcacattttgccgtggctctagtgatggtcctacgcattgcttttcttgagtctgactcccgctcaccttgtggtactggccctatcttcggttatttacctgctccatggacctgcagctgcagagtggccaggcaatggtctttgcttttcatctcgggatttgtctttcttatttatacctagggtctgcctcctggctatcctggcttgaacaaaaaaatgaatgaatcctgaaaattggtacttagaatgtacttccagggtttaaatgtttcacaagagtgaggttgtatcaaaaatcactgactagctagttttcagtatccacaattcagtgtgctatttttaattattctaaagtaaaacattctgacatcctgttttcatttgtaatggtatcatcaaatgaaagtagaaaagtagaaaagctgaataagaaatcacatgggtcttcttagctcacatcatccgggatttacctagaacctcccactggacttgtctatatgacgggcgaccactcagtaatcaccaaccttttgtttctgcccctcaccaggtacatggtgcagtggccgggagcacgcatccttcggcgtcaggagctagatgccttcctggctcaggcgctgtcccccaaactctacgagcctgatcagctccaggagctcaaggtaatttatcagcctcattgcattgtcttggacagtctcactttggattttggtgtaatactgctaactttcaacaggcagaattgctaattctttaaactaattgctttagtccactaaactaataatactaatatgataagaacttgatcaatcgccttcatggcaaaaggaatattcctttctagttatggatttgctatccccagtttggaaatgattagtcccactttgtcagagaatgatttccccttgtttaccattggatgtttattcttatttatcacatcatgaaataaacttgccttttatattttagggggggattccaaaccctgagagggcttgatcttaagaattttctaacatctagcaaggattctttttcttatttcatttcattgttcctaattacaactttagttttctctaaaaaatattctttgcccctcaactattataaaatcccttataaaaaaccacttgaagaacgatgttacatcatcatttctatccctttttaagtcagcatttaacatcatattccttttaattttgccttctagtaattccttttgttctttaattgttttgacaatattgatttttctccaagttgtcacctaatttttcagtgtggatatcttttttggtatactttcattagttaccttgttcacatggttgtaattgctttctaatttccatattaaattttagaaagttcaagacttttcaaagctagttaaattagtagatcagccttttcttttcaatgtatagggttttgtttttttctttgccatcagttcttgttttgttttattttgttttgttttacagagtttgatttgtaatcagttaatctctttccacaaaattgccttcacctttagatctttttggcattctttatgaaggcattctttccatggaggggaattttaggctcacttaatagattttcagtattcaatagttgttgcttaataaatttctagttttccctaaattatcatgttaaattgagtaatttggtgttaagtgaccctcctcaattgtgtggagctcacctgagacttcttgtgacttagaaataagctaagtaaaaaaaacaaaacttaggagaattcacttcaaattgtgttctttactttgtagatcaagcttttctgtttgttagacagaaattattatttttaatgtttttgaatttacgtttctgttttcaatgtttggtcaggtgtccccgtcaggcagtgtggctggtgctaagtcaggtcctttcccgtgtcctcacctggtttgtctcatcaccaccgtcttcgtcacagattgtgcttcagggggttggagatacttttgctagtgtgtggtgccatccctctacctctactcctgtttctcttatatagattattacatcagtattgacatcccagttctgaaaatcagaccgccaggtatcaggtatgcccactaagccttattcaccatcaagttacttttactcaaagttcatcttatatcccatatccttttcatttttggatcaacacataggatataacttttgaaaaacaatcacactctaagctttcattttggttcttttgagatcttagtgctttcatggttttctcctggttcttcatctaaagccagacatttgtagagatatgctcagaaagacatatgtatgtatagtaaacttcagtctgactcatcgatcctctgggtcttgcttgtctggaggtcgacagttccctttaataagagcagcctacacctgtaagtgcttcattttcatgattagtataaattctgagaaagctataaggaaaaatagcatttgttgggggggaaaggcagttatttgcttttttgt

SEQ ID NO: 133890 - DNA, 1076 bp, Homo sapiens
ctcccatttatcgtccactctgtggttggccatcagaggaggaaaagaggaaggaaaaacccagtggtgacagttaggactcttgttagctttttctgatgggaggtttggtgggacaagacattgaaaccattagttacaatgaatttttaagaatttcatctcatccatgctttcttcgtctgccatgtccatgaataattgagagtgttccatgtggctccttaaatacctgtgacagtgattgatgaccctcatttttcctgttatattttttaagcccttctcctaggttaccagcatgaatgtaattaaggtaaaattagcactgacccctgtgttttgaggagggtgggtaaaggatgagaaggaactttgtaccattatagtatttgtccagtttctttctcccttgccttgacattcctataattgccttaaattcttttaacagtttcacatgccaagtgcagaatataaaagatggaaaatgaagagctttaaagacagtattaggggcatgcaacatgtctgtgatacgtgtaagaattattttgcatataggtaaatatgacaaattgaagtaagagtctgttgcccagtaatcagatgttggacaaagtaactttactggaatttggttcttgagctaatcggtcagagagattaacttccatatttgtatttcttataaagtcagaattttttgtctgtatttctctagttgaggaactttggatgatattgaatattttatctcaattgatataagagaatgaagttagaatgtgaatattgcagctattttataatcaagggttcagatttgggttctcccaattaccagctctgtgaccttgaaccctctgtgacccgtctgtacaagggagtactatttagaggtgcctgcattctatgttgtttagagatggcagtgagataatgaaaaaagcagtgcttgatatatatttcttaagttccccataaatattaaatgttattatttatatataacatttagggaaagaaaaacaccacataatgtaagtttaaaaaattttcaaaggaagcaaatt

SEQ ID NO: 133891 - DNA, 1054 bp, Homo sapiens
cataaacattgcattcttgaaaagccaccaaagtcggaagacaaaagccagagcagggctaaactttgatcctggataatccacaaactaggcctttcacatgcagatgatcaagagttgactgtactcgtgttaatgtttctcactctgcttatcagacactagaagcgtgggctctacgtatagaaggtaggcacccagcacttaacactgagggaagtaaaagtctgcacaaattctagtagtatgtatggttcaagaaccatatttttgttgtcttctttcatttataagctatccatttctccaaaagacattttgacagtcttattaataagttgcaattaaaaaccttgacatataaaataatgtgaacataaagtataaatttattttagaatgtaattataccaaataatcttttaatgtaactatttaaaaatgcagaatcttaatagagtgttcagttttgacactctttctgttaatacgttacctgtgtgcagatctgaaatgtgaagtgttattttacgaagagattgtggagccctgggctctaaggagaccacacatcattgctcattttgtcacacgtcagccttaagtacagtgttactctacactgcggaacgctttataaacccaacctgaaatacttgagtatgtttataaaatattctcttaaattcaaatgtgttaaatcacataagtatttctgttcaaatgaggccagtgttaggtcaatataaggtaatggtaggactacttagtggtgctgttttgttgaggaatattctgttaactttggagagttttactaagactttgaaagaatttaatactgtagtactcttattccatagaaattactcttttcaatttaaagattgagaacctagatccccgaggaattcagctatcagctctcttcatgagtggagtagacatggccttgtttgcaaatgatgcatgcggacagccaatcccctgggaacactgttgtccttggatgtattttgatgggaagctcttccaatccaaactcctcaaagcc

SEQ ID NO: 133892 - DNA, 1742 bp, Homo sapiens
gagcaagtttaatcctggagataggggagagggacctgctgatgcagatgcaaaagctgcaccgtaaaatctgtcaatcaagctgaaaactctgctcacattttaagatatatttgtttctcatgtgtaagggaaaataaacccacccaggtcagagagagccatcttccaggactcatctcccagggcccttcctgagccccatgctagtgccctgttgaatgacccactgcagggagggtggccttacaatactggtccccagggaccatgggcacaggacagtgaggtgacaagaggggccaggagacccctccatggcagctggaggaggcaggggccactctgcctgaatacccagcagggccctgagtcctgtcccttacacttctcccctctctctctaccccgggtcccacaggcgtctgtggctttggaggcccctatggggaaacggtagcaacaggcccttaccgtgccttccgtgtggcggcagcatcgggacactgcggagccttctcaggcagtgacagcagcaggactagcaagtcccagggcggtaattatacccaccccttcccagagcttctgcctgccagcacttccttcgctccatcgtctggcgccttccttcctctactgtcctcatgagcccctcctccagcagaacggcctttcttctgggtccccgctctgaccctcattgaccactcctcctgagactctctgctctcaggtctcagcagcggctctgctgtggccagtctctcctttcagggtagaccactgagtgtccacctagaacagaacctttctgtgcacctgggtaacctgaccatcgcctcgtgttcataggatgagctgctaatagtggcgtttctttcccaagcagccatcttttggtaaagattatcatgcttgtatagaaaatgctaatggtcacagaattcctgacataaaaagtctgtcacagtttgtttcgcagaaacatttttaaacaaagatctaatgttgggcatataaacaaggcagtttactgtagattcccagtgcttctctttgcatttgtattaggcttgcaaaagagaaaagggtcttaacatttagcataggaagcaatgtcttgtgatggtgctgtaattggaagtcagtgacctgtatctttgtcctaatcccacattttgggactgcagatctaaatctgcccatcaagtcacataacaggattaactgttcagatgtgattttggagttgcattgaggatgggcaagcctttctctcttgatcaacaatgtttttccaactcagttacatgggatagttagggaggccagcaagggaactgtgcggaaaggtgacttgcagatttggcgacgggtcagcccctctgtctgcaggtcacctctcctttccctggtgcagctgcatgcctctctgcctcctctgtctgcccaccagcctcctgcagtgtgctactctgctctgtgactgctcctcatgcagctcgcagccatgtttcctctctgcttcttgatttgcttcagctccttctagtgccttgaaactgaagctggcctgtagttgggatcaaagatggagggagaggggagattgtactatggatagtgtagggcaagaagtgaattcttacactggaatgataaaaggaacctgcttcctgagtttcttaaaattgtgtctggaactcagatttgcactgcctagtatagtagctgctggc

SEQ ID NO: 133893 - DNA, 1033 bp, Homo sapiens
gttggacagtgctgaattgccacagctaacaccaagatgatagttgtttattatccattctcactgtcagaaaacaagatgcttggggctctggttttgtttgcttatttttttgtttttaaacagaagttttgctgccaattagcaattagagaattttcttaggtcagaaaacttacaatttgcagtaatcaaaagaagttagtaaattctatttgtgactctgcttatggaaattctaatttaaaaacacagtaagaaatacaggctagatttattgattctatgatgttcagttaaggtagtaaacctagaagtattcgcctaaagagaaaaacattcttgagtttgcagattgccatcttggtaatatagaaggcatgccatatgcacctgatgacactttattgtatctgtttctatctaaaaagccttgcacatttgcagttgtaacctaattcagttctcatgggttcttcacagtagtttaaagtcaaacagtgtgcacatagatacactacataataaaaaattgtacaaaacaggagaaagtagcttcatagtaaatataaaccaaaactgaaaagaagtttcttgcttgtatctttttgctattcttaattctgtgattgtaaagattttgtctttttgtatattttttatgcaggagtccaacctataccttctcagggaggcaaactagaaatagctggcactgtggttggccattgggctgggagcaggcggggccgtgggggccgggggcctttccccctgcaggtggtttctgtcggaggaccagctagagggtaagttctgagccacgaaaatgtcttttgtataagtaaagaaaacagcttctaacttgcttttttttggaagtttaagtaggaacatttttatatcattagatacattcttctttaatatcatttgtatttaattatttagtttttatttatttatttatcttaagatggggtctcactgtcacccaggctagagtgcagtggcacaatcacagttcagtgta

SEQ ID NO: 133894 - DNA, 1027 bp, Homo sapiens
atttatagtattatgtaattatttaattaaccattaaataattaacaattattaaataattaaccatacaattttcaattaaccaggtgccttaatatttttaaagtattagttttcaaatcaaatgcattggatatgggagatgtagctcaggggtagagcatttgactgcaaatgcattggatatgaaccaaaaaaataagattgattccttggaataaatcttccctatgatcatacttaacctgtttacgcctagtgttccattattggaacgcaaagcatgtgggagttctttatgtcctactgctcaaggtctgactgcaaaaattcaacaaattgcaacttccggcataaatgggttaattcagtgcttcataaaacgtaagattggatggctttaaaatcatttgatactattttaaatgttgtctgtaacagatttaagtgtttactgttgtcctttttcattcatttaggcgtccaagaggagttatttccaccccagtgattagaacatttggaagaggtggaaggtactatggcagaggttacaaaaaccaggcagcaattcaggtaagaagacaacatgatgtttgtgccagttcaatgccctcagggatgtctcctgtctgagcttgcacttctagtacctgcgctcagacagaagagctgtgagggtaatgctttagctgtcaagtgtctaacacagtaactggcacacagctgctcaccaaatgtccattccctagagcccagatcattttgctgttaagtgcctcttcaggttgtctctcccctttgccatgaccctgtgtctctggtagcttcccgcctggtgtgacacgatgggcttggcttaccttgggcattgcctagccctgacagagctggaacagccacttgtagtttctttttttttctttctttctttttctttttttttttttttttgagatggagtctcgctctattgcccaggctggagtgccgtggcacaatctccgctcactgcaacctccacttc

SEQ ID NO: 133895 - DNA, 2543 bp, Homo sapiens
ggtagagcatctaccgcccaaaagtcaaagcaaagacagggttagaaggacccagctgggcattttctgctcttgaatctgcagagagtgtcattaggccaaaattggcatcctctctcttctgtttatcagaaaccaccttctcatttgttgtccttcattttaaacagggcagacctccttatgctgcttcagcagaagaagtggccaaagaacttaagtcaaaatctggggaatcgaagtcctctgctatgtcttcagacgggtccctggctgaaaacggagtgatggccgaggagaagccggctccccagatgaacgggagcacgggtgacgccagggcccccagccactctgaaagtgccttgaataatgactctaaaacgtgcaatacaaatcctcatttaaatgcactaagtacagacagcgcttgccgcagagaagctgctctggaggcagctgtcttaaataaagaagagtaaacttattttttatagagggtgaaggatgctggaagggtaaggatttaggaatatctggagagaaagagagcctgcagttatgtacattttgtcctttccgtaagagaaaaatgaggactttggaaattcagatccctctttgatatcagagatttaaacaacacatttttagttttaaccagttgtagtcaaaatgctacaataaaacaaaaaagagaaagaaaatgaagagcatttgactcccgcacttaaaatgaagtacacataaagtttaaactggttatgacaaaagcctttagttgtgtttcttgaactataaagaaaacaaattttggcagtctttaagtatatatagcttaaaatataatttttagcatttggcaccatatgtatgccattatatttgattttgcattactgtttcacaatgaagctttctttaaggctttgatttttatgattatgaaagaaataaggcacaaccacagtttttctttcttaaatttcatcactgttgatgtggttcttttgtgttaaaaaaaaaaagtgcaactatcaaaactaaaaaattatagagtaatattgccgttctgctgattttaaatatacaatacatcatacatactttacaagcaagttaaatggagataaagttgaaatcatagaagatgcaaatgacctttcaaaatcaacacaatgtgttctgaaactttcgtgactaataccatgcatctgtgatcaatgaactatgtggttttgaatcggatgtagaccattagtactactacttgagctaaacttctgcatggttcataatttttaaagtgtgtagttaatatgcatgttatcgtcctttcttccattcttaacagtatgtgcccatttgcaaaacaaaaatgctaataatcagtaatagtcctataaaagatgttaactctgtttagtcattgactgatcttgctctaaccttaaaattttgtgattattgacctctgttgcatttattctaaagccccccaaaaattatctagccgtttcgaatatcaacattaccctggtgtattcactgctgtatgcattattgttctttgttgctgttttatgccttcatattagcaaatatgaaattctgtgaaaaaaaaccctttgatcttaaaaaaaaaaaaaccaccccccccttctgtagcaggaaacaaattgcttgttcttgagaactttcccatcaagaatttagtagaagcaggtatacttctatcattttgatgtttttgttaatgtttccaaacaatgtactttgaaatcagaatcacttcttatcgttttcatatacttctgatgctcttcatcacattagtgatcagaaatgaggtgtaattccccaacccctgcccgcaagagctaagtaggatcttactgtaagttgaagggagttttgccctaactcatggattgtgcaagaatgaactgctgttgggtttgattgactgtcgatggattgtggtgtggtgtatctgaaggctattgaatgcaacttacaatgcttaataaaaatctttattcttttagtataaagtatggcgtggcttttaaattcacttgtaaaagctaattttatagaggtttaattcaaatcgaaacaactactgaaaagatcagaaaaccaaagttgaaaaatattttaccttttcaaagtaattccaggtttccggcttagagggacattaatatatgattaatttgtttgatagctcagtttcaagcaaccaaggggataaaaaaattctgtttgataaagcagacttacagaagaggtttttttaagccctgaggaagcaataaatttgactccaccacgttttaaaagctggatgttacaagtatagtccgtttttcatgccatccttttgactgaaggctcttctctgcagcctgatatgaggtccccgtacccaggtccgccgagcgcctggagaaagcgccccgtgctgccctctagcgggggatggtgggctaacggcgccggaggcggccaggagagctgcggcgatcccgctccaggga

SEQ ID NO: 133896 - DNA, 1044 bp, Homo sapiens
ctgtgagttgggtaaggggggtttgttgtggctttgccacctcctccctggccttcagttttccccgtttctctcctctccgttcccggcaggaacgccggttttgacatgatcttatgctccctaaggaagatggggaggggggaaggaggtaacgcttggagacactgaaaacccccgccctcttggcccttgccgatggccatgacctggccccatgcctagggcaggtcccttcccaccaagaagtaaatggaggaggaggaagaggaggtgacagtgttgcccaaactgctccaacaggttctcttgcatctgactttgcctgtgggatgtgtttggacccggggctggccagggctgtatgccctctggggctccagtcccaaaccaccggcagcaagcagccgggggaaagagaggggtgtgtggtggtgggtggtccgggattctccttccagagaggagatcctcctgcaggttctaagactgggtcttcaagactggtcagtggtgcttaagagtgggctgtggccccaagtccagtcctgccagtttacatgtggggacctgggtggctgggatgtgacagggcctgctatgtctgtcagccccagtcctgagtcctacctccctgctgttagaagggcctgggactctgtggggtggggatgcccacggaaatctgggctgccttcctgggtatgcccagggctgtggaagccccttagagcaagggagactgagtgtgaacaccgggctctgcccagaacagggctgacatgcacaccctcaactggcagccgttgagaagttcatggccgggccaaagtgagtgagagcctctaaggctcctcatatccagggatgctgagctgctggccctgaaaagccctgaaagtggtggggcctctgccttctcccccatctccaccggagccctgacctggcgagcgcagtcactctgctacagaaccttctgggcacctgtgtcagctcctggctgctgcccacactcggggcccagagtagggagagtgagag

SEQ ID NO: 133897 - DNA, 1026 bp, Homo sapiens
ttggggtcatgcatcctgcattcactggaggggaagtgtggagtagaggtcggggaaacaggccctcctttgaagcccccctctgtccttgggatgtgtgtcccttcaccaagttctcgcaagattcctcctccggccccatcttgaccgtggctcatcactcctggggtggggatcctcgccagcccagcccttcttcactggcaccgactggagtgctgtcccagaatgtgggctttgacctgggagggatggatttttgtggcaggacctggcaggaggccgctggaggccggttgccttcggaggtgtcttgtctgcctcatttggtggggatgtgtcgctctgcaccggcactgaggaggacctgtcctctccttttagggatcctactcttacataaagccacttgggccgtacactgtgttcccttgtgcctgtgccttccaactggaggatggagaccaggccccatgccctccactcctgcctgcaaagtgagctggcatctcactttgtcaccaacttactttgaataatttaaatctctgggaagcaggaatgcttctgttaaagttttaaacatccttaacatgtagctttctggccctctttcagctgcttgttctattggactggaagggtttttggaggtgtaatcagtaaaactgacttgaaagaaattgaaagctgttcaggtcacttaagtgacagacatttcattcatacctcagtaaatatttgttgggcttgtattctgtacggagttcagagctggctgtgagggcccaggggttagccaggcagcttctcagattggtggcagccaccctggagggggagtgtctcagcagaggaggggcgagagtggactgaggttttgactgtcccccgtgttgcatgttgctgtggggagaggttgggagaaggttaggggcagggagccagtgaggaggtgactgtcaccctgcctgtgtacccagggggtggggagtgaggactggggtcggtagaagggtcacattc

SEQ ID NO: 133898 - DNA, 1047 bp, Homo sapiens
cgtggccttgctgcacgggcacctgcctctgcataccatgtgagtaggacgtgtggactgggggcgtctcagggagcaagcctcttttcacaagcgggaaactgaagctgcacagtgagttaggggcagggtggggaccagagtccctgcttcctcccttgacctattctttcccttacactgaatttttttctctgaatgaaatcactgtaacagaattcagcttcgatcctaggaagactccagaccctgggcagggtccatgtgggtggggtgtcctggcctacatgtctgagtgcagggatcccctctgcctctggccttgatgagtgataatctacgtcacagcttccctagcaagggagtcagaggaagaagcccgagagagcatctgtcaagagcccagtgccccacagggacctcaaccccagatgcttggccgttgctcggggacctagctgtgtggcctgctcctagtctggctgctcacctgcagaggccttgaggctctgggctgtgaatacatacctgcccgagggcattgctgggagagccagctccttccccagctgctcagcgcccactctgcttcctgccttctctggtgtttgtgcatttcactctttacccaggggtcattgtaattctgccttaaccagggacaccttggtccccattcttggaggtccccagtcctgccaccttgtgatgggtggcagggccaggggctctcagtgtgcacctcccaggagccctttttcactggggccacacttctgttcctggcctgctgggatctcagggtctttttctcaaactcctgggggatccctgggaagatagttgcctctgcaggggctgctggtccccactgtgggagcagcggggtgatcccaggcagacacaacactcagggcgggcccattctttactcatttggggagcgcagcatcattgcccccatcactgacctgtttaaaattatctgcatcctttgcctagtgatttaagccataggttcttggtgaagttcccctagcaacactt

SEQ ID NO: 133899 - DNA, 1052 bp, Homo sapiens
ttctattccaaagctgacccctgagggctgcaccccctggacccaaggcacctgccaggtcattaattaccctccagggtatggtgggggctgaggacagggccctcacctcccttagtctagagttcctatttctgttaatatgacctcggactacatttgctctctggtcaaatttgtcttgtgtctctgaggcttttatccagattgaaggctgtaattcccagaacttcccaaaggagatatttgctctacatctgcatacaattggtttccttagaaaccactggagtatgctccaaaacctgctttggattttttaaagagaccatgccctttatctgtaatatctgttaaaaatccaccataacaaatttaaaagtatataaagaatgaatattttagatatttatttaatttatcaagaattctacactgttgaatgatgaagttgggatgactaggcaaatgacagtgtcctcttgtaaatcggaaattatgcagtcgtcagcagtgatgtttacagcaaggctttaatgctatggggatatctttatgatgatattaaatgaaacactacacacataatgtgatggctggtgtcaaccaattaaaatggaagacggtctaggagggaatatgccaacatgttaaaggttaagattacgtttttcctaccacttttgtacttttctgtacattccaatttgttttccaagagcttaatacttttataatcagatataaagtaagcaagggagtaagaccatcagggtttagaggtcatattgcctggcctcctgttttacagattttatggactgtgggttttatagacactggggcttgggtagctctctctgctgcacagcaattggccccaggcctccctgaaggagctgtggtgggtgaggacacctcacccttccggagatatctgcccttccggcacaccccctcttctcatgtgaccccccccccctccattaatgcacaatgcacattagcttagtctgcagcctatctgcctgtgttggccagagctacccgag

SEQ ID NO: 133900 - DNA, 1066 bp, Homo sapiens
catctggttatcctgaacttttctttgtcaactacagaaaaggcttttccctttatcagtctgccaattctcagagtaatgaattggtaccctagaaatgcaggggttttgatagcttaatttttaaaatgtaggtatgtctcatgaattacttggaacataacactaaaatgtatttgctgttcatctgaaattcaggcaggccaggcatcctgtgtttttatttgctaatctggccaccgtcgctgaggcctgtgacctggccgcctcacagcatcaccaggtcagaggagtggtcagagttgagccaggggaaaagcaggcaggtgaagctcgacgttggcacctagagcctccgcatccagcccctggcagctcctgctgtgtgtgagggcagccaagagtgtgtgtccactccacacgtcctggcctcagggaggctgtgccgccttcccagggtgctcaagctcctcccaccacctccctagggccggaacggagtgtggatgtgacagatgtcaccaagcagaaggactgcaagatgaagctgaaggagtttgtggactattactacagcaccaaccgcaagcgggtcctcaacgtcaccaacctcgagttctctgacacccggtgagtgctaccaccctgggggtgtgggggctggggttggggcaggggcgctgtgccgtccttggtagtcgcctgagaagcacaggtcgaaggtatcagagtctggaatactgcacatggcacacactgatttttactgtttctctcttttaaattttttccttttttttttttttttttttttttataagactggcccacagctgactgtttctcttttaaagtatgaaggtgacgtattgagaacaattcaaacaaaaataaggagcaaaaaggcaaagcctcctctggtcttggccctgcccatcccactcctcagagagaaccattggtaacaatgtgtagttttttccagaatgcacacactcatgacacactcagacacatctatgacacacccacttccggacacacaacattcacgcttactcatgga

SEQ ID NO: 133901 - DNA, 1002 bp, Homo sapiens
ggagccagtgctgagccgcccctgggcctgggcagaagggcacacctcagatgttggactggttcgtcccactggggctttcctttcaatcaagggcttctttttcttttaatttttcgggtaaattcagaaccacaggttttcaattttatgtgccgagactgttgtttttttcacgtggaaatcttttgggaatttccacatgtactacagacgggtaactcagggggcagaggtgtagccccctccatggtgcccctgggcccatgtcgggggctgcagctgccatggggagcacagccctcctggtcttcttgacagctgcagattcccattgcacagatggggaaaccgaggctctgagggcttatacttgcacgtgggcacactgctaggaagcagcagaggcaggcccagaatttccatctgcctgattgcagaacctgagcttgggggtcctggggggttgactaatgctgggcagtgatatccgggtgtttgcggctggtcccttgtccagcagtgacttggattgaggaagatggagcctgtgcttgggtcctgctcagttcccaagatgtgcctcagagactctgtggtttccagaatccatgggcaacccagggccatgctgctagctgctccacacagccccaagcttgttcagtgggcaggtggaggcctgcttttagacagatggggggcttgggcaaggtagatgaagggcttgattgaaaagagcttttgctaaatcaattggccgtactttctttcatatattactattttacatgcaatattatgttcatgtaatattgatcagaaagccagctgtaaggtgcttttattttaatgggagtgaagcatgacaggaggcttccatagcgccttaggggacagatttcctgcttggcactaggtggttcctgtccatgttaagccccttgctgcagagatgtgcttgtggctggggttgaagcctggctgtgagctcctcctccc

SEQ ID NO: 133902 - DNA, 1735 bp, Homo sapiens
ggctgccccttagtgtcagcgggaccctcccccccaccggcatgccacgccccttgccatctagcttaccttccctttttgtgtcccctccccgactcccctaggaaaacgtacgaaaaagggcatggcgaccgccaagcagaggcttgggaaaattttgaaaattcatcggaacgggaaactactcctttaagatttggaaagccaggatccttctgctccgctcaggacccccggagccccgcgaaaacatctgcctcccaggagggtgccgagctgcctcaccagggagggccttgcctcttcccggctgccatctccccaacaagcgtctgtcccttcagccggcagagcgagcccagcgtggcccctcaatttgaaaatggacgtcttttctcaagttgctaagagtgatctgtcccagaaaagcggccctgcaagtttgaggaccgcttattccactttaaggacagccttcaggccccctgagcgtgggtgtgattgcagggcctctgcagctctgctgagagcatgagtccttcaaggaagacagagtgagccaatgctcaccagccccagagtcagagctggccacaggctggcagcctccaggggcttaaaaaaaaaggcaaagaacacagaaagaggaggagcaagtgggatgtttatgtccccccttctcttcctgagtgattctcagccaagtccagacagtgctcggcgggtgaggaagggtctgccccgagctttctggttggcaggtggcagcaggatggtgggtgttcagcctgaatgcccaggagcatttctggggggcagctaagactggcagctgggttggtgtgttagcgggcaggggagccattgtggggtccccaggaaagggcaagggctcagccacatcttggggtctgggaggcccaggctaagccatgtggcagggaccgtcttgccctgctggccacactctggagaagcacttctcagccaaggcacccctgccctgggactggcagggcaggggcaggggcagggacagtggccaggcggcccgaggacttacggtcggcacttctctgttctcccgtgtcagcgtgtggtgtcgcctgcatgggtcgtacctggatggtgtgtccaccatcgacacggaggggctggatttgtttctcaggcaatcctgtattttaattttagatgtatttcctgaagcatatttttcatagaatgtagcgtgtaaatagctttttaaataacttcttttttataagagtaaaagtatctttaggaatttctttctatagagttcttcattaacatttatacgagttttttgctgagtcagatggacagttgggttctgatgctttttccttctcctttccttttattattattatttttttcttttaagaactaaggtattgcctgaaaaacaagtgatgtctgtgcagccttacactctgtctttacagaagcaaatagtacacaaaagatctatttcagacacattttgaagatgaatcttcaactttaataccagctctttgttttccttgtatgatgaggggattgggggatacagttattttactagcaccttgtgaagtgtttccgtgttttgtgatgctgtaatttattaatgtttgtagctttttatatttgtacatttcttatgagctttgtttatatacccattacctggatgtttttgtccactgggagaggcagcttggtg

SEQ ID NO: 133903 - DNA, 1069 bp, Homo sapiens
cgtaagcttaagtttttcaacctcaaattcttctgctacgattgctgtctagaatctaatcacattgacaatatttatttaagtgtgagcagagggcctcttacgtcagaatgacctagagtgtgaattgataatacagattattgcactccagattttcatttccacaagcaccctgcgtaatcctggtgcattccagagttagagagctagtgctgtgagagtctgggaaggattataccacttctgacctcccaggcactgcttaatgtagttccccacaaatttgtccagaaaatacacatgtagattttggcagaacaccatgtgtctgagaaatagaaaggaaagtagtgacctaagaattcttcagtccatctcagaacctagtctcttgtgtgaaatgacttttatgaagtaggacattctttgtgttctactgttcttaacagtatgagtaatagtccattcctgcacttacgttttaagtattcagtactaattagtgagtgtgtggctaattataaacagttgagtcatttgagtgcttttagggataaaaggaaactgtaggactgagtgagaaaaatatctgtcattgacaacaggaaatagaaataaataatatgcgattttgcagtgaaatgacagggttattattcaaacccttctctcctgattctacagccaggcatatgatataagttcagttgtgaatgaaaataatgttttttaagtcaaaggagcttagccattactaacattttgtttcttttttgtttttgaggctagagtgcagtgacgcgattacagctcaccgaggttgcagcctcaacctcctaggatcaggtaatcctcccacctcagcctcccaagtagctgggactacagacatgtgctaccatgcctggctaattttttttttaatttgtttgtagagacagggttttgccatcttgcccaaactggttttgaactcctgggctcaaacgatctgcccacctcagcttcccaaagtgctgggattacaggtatgaaccactgcatgcagcccattactaactattaa

SEQ ID NO: 133904 - DNA, 1036 bp, Homo sapiens
catattggattttgcctgttcagatctaagtgggaatcagtagtttctttgtttgtcgccatggaaaccagtcagccaatctgaatggctcttagatcatacagaacgatgcaatgctccctgctctcagtgaaagttcctcactgagtgagtggggctgactcttcctgcctccggctcttgcctcccagtgccatgcaggtgcaggatgcaaccaggcggccctcagccgtgcgcttcctcagctcctttctccagggccgccggcactccacctcagacccagtactgcggctgcagcaggcccggcggggctctggcttgggctccggctctgccacgaagctgctgtcctcgtcctctctccaggtgatggtggctgtttcctcagtcagccatgcagagggaaacccaactttccccgaaagaaaaagtaaaggtctctttcttcttatagattgccatacctatgtatataagtttgaggaatgggaatcagctgtgttgtgtttatacctttttaaatattggcagtttattctatattatactttttgctgtctgttatgctattttagtgaatatataagaggatataaaatgatcaaatgttttgtgtttttttattaaaaatataggtttgaacaaaactcattctcttgtaaaacatctgcttctacagtttcttcctcctaattgccagtatgtgtggagattattatatgtgaaagcttttttacattaagagatatatgtcactttgacagggaaacagttttgttttcttgacaagatgaaggtgattttgcactggcttgtcatctaccatcctgagataaaatggaagctatttcccatgttacaatttcatttggagagtggaattttgaattttcctttccttatatgttctaggaaatttagaacgtccaacaccaaagtacacaaaagtaggggagcgtttacggcatgtcattcctggacacatggcatgttccatggcgtgtggcggtagagcttgcaagtatgagaaccc

SEQ ID NO: 133905 - DNA, 1682 bp, Homo sapiens
ggaggagagaacttttgataaaaattttgttcttcagaattgtgtttcgcctatccaatagttaaatgtattgctttcttccaaaatgaattgttttctttattttctgctccaaactgaaaaagtctttcattcagtcagcaaatatttcctgggcattactgtgtgttaagagttagcaagaaagagagtcttctattttagatgaaaatctcgcacccccactcctgggtcagccccagtgcccatgcaagctctgctgtggtgatgaagcgttcaggacttggtttgggccagaccgtatgtagtgtatatgaaagcattttctggaggtgaacacagacctttaatcaggatagttttgcatttttttccattctagattttattttaggacttttagttatcaaaaaaatcagttgaattctggaaaagaataaaatgaacattatttgaatagtataatgccacccatgcctgtactagaccatttcacatatattatttcatgtgatttttcacagttatcatagaacatatctgtaaggcagatgatactatttctacagtctttgttaatcttgtgaattcagtatcacagatgaggatgctaaaggtcatgaaggttagagggtaagtgacttgctcagggtcacgtggcatgcgtgtggcagagtcagggtacagcacatgtgtttaacactttccattatcccaagattcttggctaacctccctggagagcctcaggaaacatcatgataagatagtcattttgctaagagcatttttgattagtgtcagttctgcccagcttgtctccttcataagattgaatcaagagctactttgttttatacatgatctatgggatatgaaggactgtgaataacaaagtattggtgtattcataagataataaagagaagcccagtaccagagggcccttgtggcataatagaaacagcacagactctggagtaaggcagaactgggtatgaacaccccctttgccattttctagcttttggctcctaggtgagttatttcatctttcttgagccccattatatgtattggtgaggaagctccctgctgggtgccatttgagagttagagataagacatgtattacagtctctgtcccactgtgtgcatgtagtaaatattgggtaggtgaatgaatgagtgaatggtagcaattattacacttaacttctattttgttaaaatgtatttgactcactaaaacataaatctgaaccctgtcagaaattcatgaaaatccttatctcacttttcccttgctctctgtgaggtaaagtattaaaatctcatgcttaaattttctctaggcatttggagtattagaaaaactttccagttatcttccctatgtcaaatttcaggactcggggcttattgttaaatcctacataggatgctaaaaagatatttcaaagaagtacatatgccccatttaccagctttcaagcacctttattttatttttgcagacttcgaagctcaaagcttttccttttccttagaccccaggttaatgtataaatgttcccttatttctactttctcatctaccatctactttattgcaaaaaaatagttctgttttgttcaccagaaggctgaaaaggaagactcttgtgaactgtttctgtggt

SEQ ID NO: 133906 - DNA, 2432 bp, Homo sapiens
ggccttgggggttgggatgaaggagggaaggtaggaagtgcgaggggcggggggacagggcgggaaggcgcgggcggggagggcgggagagtcgtggctggctgcatgcccctgctccccgcggccaagtgcagcctcccttcctgaagcagctgctgcggctggaggtccgctgcggcagccgtccttggcgagggggaggggaacgcgggagcgggaggaaatcgtatcccgggggacggggcttggagatttgcgactcggtgtcaccggaaacagcgctggccttttgagtcgacgctgcaaactcttggaaccgagtgcctctcagaaggcttgctaataaacttcccgggcgggctctagtgtgaggaatgtggtaacctgtatgtccttggccagtaatgcccttcggtctttcaactttttacagtagattctgtgtcagaggtaatggtatgtattcttcaacttaccggtttttaaaaaattgactaacgagagggcgggcagacaggaaaaaggcagggaagacagtgaatgttaaaattttgaggtaaatcaggagactggttgagttttgctttttaacttcattgataatactgctttcttggcatacagttcctaaagttaaagcatcatgtggcattcctttgcatttatttctgttggcctgaagtataagaacattgaatgtcaaattccaaatttatgtgtagtttaggaaataattgtttatatccagaattcttttggtgtttggcggggtctggttttatttactgtatattcgggaagtatgtgtagttagggaagtaaaaacttggaagttactttgggttttgtgagaatgtttgattcattatacatatttgttaaaagtttactttgaaacttcaactttgagaatagacaaatttcttgacgtcctgtaaattcagtggtattatatagcattttaaaatttatcacttaggtgcaattacagtgtgaggggaaaagttaacttttttgaatagttacattgcagtgacagcaagagagtatttttatgtgtagacaggctgtgggttcccctcacttaaattgaagctctgttgaacttgagacacttaagaatcttgcaagtgtgaaaagtggagtgaaacaaaaccatttctaaaacgaaaatgtgtaactgcgttcagttttacacagtgaagaaataagtattaaacaagttagtctcaaacgtttatatcttaaggtcattttattcctgttatcattaactagacatatcttggtttagagagcagcacacaagacattgtgtacttttaatagctaagatagtataataactactcatatgggaattaccgagtgttaagagcgccaaactagtgtttcaaactgtaggtcctgagttatagggtcatgaagtcactttagtgggtggtgatccgaattttttaaaaagtagaaaatattccattgaatacaaaatagcgtgttgattcagctcgacacatgtgtattcctgtaaaataatcctgtgaagctgagtgtcaaaagttgaaaaacaacttctgtagggtgtttttctcgtttatagcattgtgtaaagtattatagtttaatattttttaacgagtattaaatgggctgtttatatttggtggaacatgagccacctactttagtttcacaagttgggaagtaaatttgccatccaggaccagtatgcgttttaatcatagtatttttaatagcctgtgaagcttttctttagaccataagaggtcttttccatcccataatatttattgccaattatttatccatgtctagatgagactagaagaatccgaatccccagtaatgagttgtcagcattgcttaatgtgacctcaggactgatcatcatatgctttttgcctgtgtaggtgttctaagcgttgtataatcacttaagaatggacttcattaaatagacaaaatatgagagccattacactatttttggtattaagtctttgaaatccagactgttttacacttgcaacacatacacttggggctaatcacatttcaggtgctcagtagcaacatgtgactaacagctaccaaatgaacagtgcagttctagtgcactgtttttaaaaaaattagatttttttttaaaattagatttctctagctgaatagttgtagtttcagataaacagccaaaaatgttctgtctctccacagcttcatctcaattgtgaagaaattgcattaggtgatttttttttttttttttttttaaataatagaaacaacgtctcactatgttgcccaggctggtctccaactcctgagctcaagtgatccttcttcctcagcctcccaaagtgctaagattacaggtgtgagccaccgggttcctggccgaatcaggtgat

SEQ ID NO: 133907 - DNA, 1050 bp, Homo sapiens
gtgtagactacatagtggttttttcaacccaggaacataacagtataatggaggataggaaggcagaagatgtttaaagggttgagaaataatggtatatgtataatggtcagtaagcagaacaagccagccaagttggatattcttcaagactatcttaagtgtctgctatgtgtctaagtgaaaggaaataagcaatagtccttttgggaaacctgacctagtacttagctatttcagacttaatgtgatgtttgatagagtaggaaataagatcttaaattagaattaggttaaattgctttagagaaacttatttataaatgtaaagaatttattatctcatgtgttgcacatgctctatcgaagggagcaaaatactattggagagtttgcttattaatgtaatactcagcctgcatcattgtcggataattttgttgataattcaactatttgagattgaaagaaatctgttaaagtagccagtgttgtaattttgatctgtgtttgattacagcgtatgaaacaaaaatgagactggaggaaatagtttacttgtgaactttttgagctactttgttttaggagtatttaaattaatgtaaaagtgtagggaaatgtcttagctcagaaaatttaaacttactagatattaagtgcttaaaaggtagagtatgcttgcatttcaactaaagtttagagtgttttaggaaattagaggctattttaaaaaatattttgaagttaggagtgtgttcctaagtgttttcaccataagaaaataagtctgtggggatagtacatatgttaattaacttgatttagctataatataaacctattttatgtacaccataaaaataacaatttttatgtcaatttgaaacaaattcattacaaaaatgaaattaggaatgtgaatgttaataagttatgaaaacttacttgatgtaaatgtagatatagacaagtctataactaatagatttgcctgctttgtagcatgctttaaattgataatatttttaactatcacaagtatatctg

SEQ ID NO: 133908 - DNA, 4635 bp, Homo sapiens
aggaggcggaggtttcaggagccaagatcacacggttgcactccagcctgggtgacagagcaagacctcgtctctaaaaaaataaaagtaaggacagtgctgattcatgggaaatattttggcttataaagggcctgacgttagggacaagtgtgtctgtgagttcctagtttgcataacctggccttgtagaattgaaatggtctcaaatgtagtatagtttagtgatgcagtactgtctctaatttggggcaagttattaagcttcttaccaccagttttcatctagagatgatgaagtagttggaccttacatattttggatatatggtattaataaatctttccctttttgttacagacgtgttgatactgcagctaggaaagctgagggacttcggctaaatttcttttgcaagatttcaatggcagagaattagtagggccaggatttgaaccctggtttttattgactccaaatgagtaatgctgtgaacattcaaatacacgttttttcaattctcttgccctttttttttgcggggaggggcagggtctcactctcttgctctgactggagtgcagtggtgtggtcatagcttactgcaacctttaactcctaggctcaagcaatcttcctgcctcaacctcctgagtaactcagctgggaccataagcctgcaccaccacacccagccatgttcagttctctagagtatatacctagaaatggaattgctgggtcatatggtgaactgttttttactcatcactaaccagttctgacaccaacaatcaattcttcaactcgacaccaacagagtgtcctacaattaaatttaattctgaaactacctgaagttagtacaaacttcacaggttgagggctcaaacacgtaagactgcccccgcttcagatgcaggtttctacctgaatttttaaccaaccagctataaattagggggtttcacaacctcttccactgggtctataatttgctaggatggcttacagaacacaggaagacactcattatcactggtttattataaaggatttaaatgaatagccagatgaagaggtccttaagctgaagtccaggagggttcctagcacaggagcttctgtatctatggagttagggttacaccagcctcctggcatgaagatgtgtttttcaactcagagctgtccaaaccctgacacttaaggggtttttatggaggtttcatacttaggcatgattgattacattattggcctttgatgattggcttactctctgtcctctctgctttacctggaggttgagggggtgaggctgaaagttccacccctctaatcacaccttggtctttctggtgactatccccctcctgaaactacaggagccaccaatcgactcagtagcattaaacagacattcatcacttaggaaattctgagggttttaggagctgtatgccagccaggatcttcaaatggagacaaagacgaaatacgtgtttctgattccacttaacaactgtttgacttgtctacaagttttgttctccaaagcagctgcaccatttcacattcccaccagcaatctaagggttccaattttctccgcatccttgtcaacacttttattaatcttattagccatcctaatgaataatgtatcttttcatgtgcctgttggccatttgtgcttatgagtcatatctttggtgaaatatctattaaaatattttaccattaaattaggttgttttaagttactttaatgtgtgttttgcacaccagtttacaaagaatgcagatccattttttttgcatgtggctatacagccgtcagcattatttgttgaaaaaacgattcccagttgaattgtcttgtcatggttgaaaatcagttgacccatgtatgggtttatttctagactttaaattctattatattgagccgtatgttttttattacgttttgtaattttaaaaattagtgcttttggttactaaatcactacaaaataaatttagtccctatcttaaaagataatcttcgtagtagctacctcctaaatatgaagtctgtaaattaaagggtaataatacagtttagattacttgggtttattaaagattttggactctgccttcaatccacatattacctttctatctaaaggaaaggatcctgaccctgaatcagatccaggtgattatctttgatttagtcctaataagaccacttagtgtttgctcgcatgggataaatgagtaggttcctttaaaaattagtttctatttgtgtgtgttttttatattatctcgttgtatgttagtgcatttggattatgcatgatgtacaggacttttgggttttgaagtcattggatttttaattagaggctgtcatgtttttctgtaatgattttttgttgtttcttgaaggataagttatttcatgcattttcatttgtaggaactgtaagaaaaccagcagttaataatagtaaaaggtggtggtaagagggtgatttctgaatcttgtaaatacatggttttaggagcggattcagataaccaagcatttaaaatactattaatgaaatacaggaaatgaaaccacagcatagattatgcatgtagccaaaatgttcagttaaacttcattttcaacgtaagtgaatgaaaatggtctaatactatttttcttatcactcacacaggaaaccaggattaccgaggaggaaaaaaagccttcctgtggtgctcaactgtgattccttttcaccattcaccctggatgttctcttcactgtgggatgaggtagtaggttgtatagttttagggtcacacccaccactgggagataactatacaatctactgtctttcctaacgtgatagaaaagtctgcatccaggcggtctgatagaaagtcagttaactaattgtacaatatttaagattaacttgtcttaaagagatgtagtgcagcatttgtttatggcctggaaataaattaatttagagataaagtctgtagcaagtacactggatgggggtggggaaaccttttgcttcttgtcttatttctctgtgtcagaataaatgtatttttttattttgatttatgctgataattttatgttgaaattttctttcgaaagagattgtactttccattccagaagaaaacattgctctatcagagtgaggtagtagattgtatagttgtggggtagtgattttaccctgttcaggagataactatacaatctattgccttccctgaggagtagacttgctgcattattttctttttatttagatgatattaaaactcagaagaattaattttgacattttgtatttacagtttatcagttaattttctctgttcaagtagtacagtaggcacagattaacatttaaatttttcacatatggtatatttcagaaatttgaagttaagcaaaaattttaatgagtagagaaagtaagtagccttcaggaaatcttcatagaggaccaggcccttttggaattgtgaataggtttattgccttacatcctggtacacatgtccaaggtcaggtcctgggtggtaaaggtaaatacaaattggaagggcactgtgtgagccaaaatgagtcagattagtcatgattcatttccagtttgggttttgggtggtcttggagaatgttgtaagcactgcttcattgataggttgattgagccagactttactcagcagcctggaaaaggagagatgggctctgggttctacctttgctcactggtaagttgctaagatttcagctttgccctcaaaccctgaagtagtccttcattcacacagtgggatcactcgaaaatgtcagatggggaagtccataggttgttactttaaagaaaatagaaaaaatgctggaaaaggtttcttcaattttaatacccatgaaggcccatgttttagctttcctccgatgggcaaaccatacactaacttgggccttgtaatcaacaagcaaggctaaaagctctctaagtgcttgctgtttaaactattttgtgttggaagaagagttggaaaagaggcagtgtggaggtgagggagaagttccctccctccaatcatttccaataaatggaaatttaaggagaaatttgtgtttatccttaatatctaagataatcactgtgcagtgccattggtacttttcatgagagtagaaacatcaaacttccttggatgggcccaacccaggtgacttaactctggaccaaatgtatgctttttgttttatccactgtggacagctgcatagataattggtctttgttctaaactgcacataaaaacatgggagaaaatgacatttgttgccttttgatgtgccaaagaagagtgggaatgttctaagaattctttttggcttaatctttgttgaattgaaaatatgtataactcttctgctgaaagtgtagcaagtacagtcatgaaattttgtggtcttcctgacatgttcttccagcataacgttgccaccttcagttggaaacgtatccttatctaataattaagccctggagaaaaattaatttatatattttattaattacataaggacatt

SEQ ID NO: 133909 - DNA, 1893 bp, Homo sapiens
attgtcacctacttttccagttaacaggagagactggagattttatgaaatttgatatttaaatgttggtaactgggttgggcaccatggctcacacctctaatcccagcacttcgggaggctgaggcgggtggagcacctgaggtcaggagttaaagaccatcctgaccagcctggtgaaacacagtctctaataaagatacaaaaattaggccgggtgtggtggctcatgccggtaatcccagcactttggggaggccaaggtgggcggatcacctgagtcaggagtttgagaccagcctgcctaaatggtgaaaacctgtttctactaaaaatacaaaaaagtagctgggcgtggtggtgggcgcctgtaatcccagctactctgggggctgaggcaggagaatcacttaaacccaggaggcagaggttgcagtgagccgagatcacaccactgtactccagcctgggtgacagagcgagactgtccaaaaaaaaaattgataattaaatgttaaaagtcagcgactccagtaatacgtggtgggctgagtattagactactggcttacatcctctgatgtcattactttcttgttcgtttgtgacttgaggttggattttaagcaaatgtatttgtggctttttaccaaggtcatatggccagataacttttcaaaagcattagttaaagaattctgattagtttgaattagaaacaaaactcaaagaacatgacctaatttaacaggttaatttgaagtgcatctgccaagtagaagaccagcaagaaaaaaaaaatgggttcctaggaagaggtagtaggttgcatagttttagggcagggattttgcccacaaggaggtaactatacgacctgctgcctttcttagggccttattattcaccgataacctgtttccttgctactttgctttggtgtaagcagagttctttctgtaggttttttcaaatgaaaacattgcaagaatatcaaagagagcagtgtttgcgttagtgattataaactgcagcatggtgctgacattgataactgaaagtcaactaatgagaatttgagacttctgaagtacacttagttgctagtgtctcccttttggtgtcactggaaagtttagaaagcatggttttgtttttgctcaggtttctctttctgtgatgcagagactctcagctgttcctcctctatgtctacattatgtctgaaggaaagaatttaacaaaacttgaaatactgctgtttttctacaatgtttgtaaatatttatcttgctgcttttctaggtttgtcttctggatttaaaatttggggcggctggggtggaattgcatggtttgggaatgggtaattgagctgctgctcattatggtatgtaacagtgatttgtctgtttaatatgtacaagaactggaaggtcaataaaatgaaagtggttgtcttgactgggtaatagtgttacatattttgttaaaagttatacatcttttcaataaaaacactgcatacttcaaaactagtgctttttaagtcatccttaacccttatccccatccttgcagtagtagatgcatttttcatttgtaattattatgatttgttcttagtttcatttttcattagcaataatttggtgattggatggtcatttacagatgttttaataaagctaacacgagcaatttccagctcttccatttttgtaaacacttgtgtgactttgtacagacaattaactgctcaggatcaccctcctttttgttttgtttttgagatggtctcattccgtcacccatgctggagtgtagtgaaatgatcacagctcactgcagccttgacctcccggactcaagcttcctagtaactgggactac

SEQ ID NO: 133910 - DNA, 1049 bp, Homo sapiens
caatttctccataccccacaaaaatatgtttttcttttttctggtagtagttatcctgtttgtggaacagtattttttatttaatttatttttaagtaaaaaaattttttaaacatctactctgattctggtctatggaacagtattctttttttttttttttttttttttttgagatggagttttgctctgttgcccaggctggagtgtagtggtgtaatctcggctcactgcaacctccgcctcccaggttcaagcaattctctgcctcagcctcccaagtagctgggactacagatgcttgccaccatgcccagctaatttttgtatttttggtagagatggtgttttaccatcttggccaggctggtcttgaactcctgacctcatgatccacccgccttgtcctctcaaagtgctgggattacagatgtgagccattgcatctggccagaacagtattcttaatggtgaaagattaaatgctttccttccatgattgggaacaaaccaacgttatatctgttcttaccactctcattcaacatagcgctggaagttctaaccacagcaataaggcaagaaaaggaaataagagacatacagatcattaacaaagaaatgaaactgttcctatttgcagaggacatgattgtctatgtagaaaatctcaaggaacgaagggaaaaaaagcttttaaagctaagtaaagtttagtcagcttgccgtatagaagaaaaaacagacaaacaattgtatcatatgtcatagcatgaacatatggtcactgaagttaaaatacagtaccattaaaattacttaaaaaaaagaagaaagctgaagaaattcttaggtgtaaatctaacaaaatgtgtagggtctgtttgcagaaaatcacaaaatgttgatgaaagaaatcatagacggtctaaacaaatggagagacatactgtgtttatggatttgaagatccaatatagtaaagatgtaagttctcaccaaattgatatacaggtttaatgggaatcctatcaaaatttcagcaaagg

SEQ ID NO: 133911 - DNA, 1046 bp, Homo sapiens
ccatgactgtctttatccttttattccatctgatgggttcttcactcatatagggtgttgttttgcatgtctgtaaacttctctgcacataatgttattaagttgtttccaactttttggctatgaaataatcttgctctgtattcttgtatgcctccttgggaacatgtccaagagtttctcttaaaatatataccggccaggtgcagtggctcacacctgtaatcccagcactctgggaggccgaggcaggtggatcacgaggtcaggaattcgagaccattctggccaacatggtgaaaccccgtctctactaaaaatagaaaaattagctgggtgtggtggcgcatgcctataatcttagctacttgggaggctgaggcaggagaattgcttgaatccgggaggcggacgttgcagtgaactgagattgcgccactgcactccagcctaggtgacagagcgagtctccatctcacaaagaaaaaaaaaaagatatatacttaggtgtgtagtagctggttcacaggcatgcatagcctcaacttatataagttatgccaacttgtgttctgaagtgggcatggcagcttatgctcccagcaggagtctatgagaattcttgttgtacatcctcaccaacatttgggattgtgagacctcatgttttatccatctattcagctggaagtgaaatctcagaggggtttttaagttgcttactagtgagcatgagcatcttttcatatgttgcttggcccttcctgtttccccatctgtgatttgaccattcaaggtgtttgcctacttttcaatgggtctattctttttgttattgatttgtagaaatcccatataaattatggaaacatttaggtctttaactggaattaattttatatgaatgctgggagatagaaataaatttttgcctgctttatcttcttacttgtttattttcatggtttcctggcattttatttttgttttattttttgcttttaaatgtaactatatagctggtattacactatgtagcaactgag

SEQ ID NO: 133912 - DNA, 1160 bp, Homo sapiens
tcacactttgagagggcaaagcaggaggatcatttgaggccaggtgtatgagaccagcctaagcaacatagcaaaaacccgtatctacaaaatgtttggggtttttttttgttttgttttgttttgtttttaattttaaggtgattgtggttaagtctcagacagaaatgaggaatgggtaatgggaaactggaatccttgcaaaggacttgcccaaattgcgttctagtgttttgtggagtacagaaattgtgagtgaggcagtgcagaatattcaggtgatatttctacacaaagtgatgcaagtggagtctgttttctccttgctgcttatagtaaaatattagaggagaaagataaattgaaggaactgttaagcaaaaaagaaccagtacttaaagatttggaaaattctcagcctgtccgcattgcaaaaaatgagaaagtatgttcttgaaagaacactagggtgtggctggacaaccatgtgataaagagattagtataggtctgaatggaaccaattaaccatctcaccagaaatgctgccagcttgaactgaatagagaaagagacaggacaaaaatgaaggcaggctgttagacttctgggattctacgggaaggtacaatagagctatccagttgcaaacgcacgttaatcttcaagaaaagggaagaatgtgattctcaaaggttctaatgggcccagagagtacaggtctagagggcaagtgtgtctcctcctcaatttcagtgggccaggagccgctgccaagggccaagggagcgacactgcagctcccgtgagcctaaaaagcagggctgccaatccagttggcccagaaggcagagcactgagccaaaggggattattctcgagacttaaaatctaatggaagttgccttgccaggtttgagacttgcttgggatccatcattcttcatttctttctcatgtctttcctttggaatggggaagtccagcctctgcttgtcccaccattgtagaatattgtggaagcagatatctgtctggtttcacaggatcacacctggagaattttgcctaaggatgaattgtacctaaagtctcattcacacttgatttagatgatatttaaatgagattttggatctagaggtgaagttgaaatgggt

SEQ ID NO: 133913 - DNA, 1036 bp, Homo sapiens
ttggcagccctgctttttaggctcacgggagctgcagtgtcgctcccttggcccttggcagcggctcctggcccactgaaattgaggaggagacacacttgccctctagacctgtactctctgggcccattagaacctttgagaatcacattcttcccttttcttgaagattaacgtgcgtttgcaactggatagctctattgtaccttcccgtagaatcccagaagtctaacagcctgccttcatttttgtcctgtctctttctctattcagttcaagctggcagcatttctggtgagatggttaattggttccattcagacctatactaatctctttatcacatggttgtccagccacaccctagtgttctttcaagaacatactttctcattttttgcaatgcggacaggctgagaattttccaaatctttaagtactggttcttttttgcttaacagttccttcaatttatctttctcctctaatattttactataagcagcaaggagaaaacagactccacttgcatcactttgtgtagaaatatcacctgaatattctgcactgcctcactcacaatttctgtactccacaaaacactagaacgcaatttgggcaagtcctttgcaaggattccagtttcccattacccattcctcatttctgtctgagacttaaccacaatcaccttaaaattaaaaacaaaacaaaacaaaacaaaaaaaaaccccaaacattttgtagatacgggtttttgctatgttgcttaggctggtctcatacacctggcctcaaatgatcctcctgctttgccctctcaaagtgtgagccaccacacccagcccagaaccttttaacatctacattcctaccaacagtgttttaaaggtcatccaggcttttcctaacatgtgcctcagaactcttgtagcttctttctaccgagtacccagttccaagtcacttccacattttaggttacaaagcatcccaatcacagtaccaaaatctgtattaatttgctagggctgac

SEQ ID NO: 133914 - DNA, 1082 bp, Homo sapiens
tgatactttgaggagaaccccaaggcattcaacctcttcggagacatggaggaattactctgcgtatttattctaggctactgtcctatgggacagggatattacggtcttcaacctcacctcttcctaagtcttccattgtctgtgatgagagccactggccacatgctcaccttccctgatgccagattgaagggcatttattcacatccctgtcatgttagctatgcctacgtgccagtgatccagcccttcagccacaaccttccttaaaactccaatcaggagctaaggctctgaagccacccacccttctatccagcccaagacactgcccccttagttatagtccctcctgttccctgatccccagagcccaaatgccccagatcctgacaaatgcctacaccaagaatggccctggccctgttccttcagcaccgaatgtttactgcatggtcagtctccccagtgcttggagccactgctggctcagaggggtttttcaccagaatgaaaagagattttagtttggaagaatttgccttgggaggatagatgaaagaagaatgacagatggaggtcactgaccccagcatctcagctggagacagtctttgggttagctttggtggggatgccctgagaccactggggacagcccttatcaacacattttcactgaagccattttgcctcagcgagttatccagtggccagagctgaagtcacaagggaagcgtgtgtgtgtgtgtgtgcacgtgaacgtgcacacgcatatgtgtggtatggggtcatttcatgccagcagtttaaaaatttctactgagaatataaatagaagtaataaccattccagcatatatattgaccttgtacttgaaagtgtttttccataatggaagtttctatggccattcacccaaaatggacctgataaatgatatataaataaaaaacaggctgggtgcagtggctcacacctgtaatcccagcactttgggaggccaaggtgagtggatcccttgaggtggggagttcgtgaccagcctggcaaacatggcaaaaccccgtctctacta

SEQ ID NO: 133915 - DNA, 1053 bp, Homo sapiens
taggtgcatatctttcaaaataaataaacataagccaggcttttccaactgcgtcctacacattctacaagatattaatcatgtgtcaagaataaaaagtgttgtgttcaagtacgtttgggaaacattgctagtatattattttcttcttagagaaccatagaaaaacttgagaggttggcgggttggcgcaaaccaagaccaaaactgaactgcaatcactaccaaacccccacgagtttgcccctccccgcttgctagcctcagtccagattctccggaaaaagaaatcagtcgtacgggctctcgaaatgacgtacttcccgcgcgccgcgaagtcctgatgccaaggggccagtcgcgaggtaaaggaggggtctctgaagtgggcgtggcgtcgctggaggctactcaggcgcgggactcgttctcgaggcgggagctgaggtgcggggcggggcctcctgcccggcgccggcctgtggggaggcggggcggggcacagtctcttaaccgtgcagcccgcccctgacgccgccggtaactgcgagagtcggggtcggtgcggtttgataagtggtcggttcctggagctgcggtcttctgctagcctgatccgcagcttcagcctccgccgcctcctcagccctcggcgccgccgctggcgccgccgcctgacccgcaggccgccgcgggccgcagagcccatgagggcgcgggcaccgccgccgcctccgcggcgtcgccgtcgtcccggagcgccccgggctggcgcgggcatggccgcggcatgagcgtggagccgccgccggagctggaggagaaggcggcgtcggagcccgaggcgggagccatgccggagaagcgcgcgggcgcgcaggccgcggggagcacctgggtgagcgcgggcgcggggcccggctgcctgaatcccggggaggctgggtggggtcgcacccagggcccgcgagcccgccgctccgggcaggggcttcggctcttggaaagtcggtccttttctggggggggaggcgaattcatcacgaatacagg

SEQ ID NO: 133916 - DNA, 1011 bp, Homo sapiens
tctcgggttcaagtgattctcctgcctcagcctcctgagtagctgggattacaggcgtctgccaccacgcccggctagttttttgtaattttgtatttttagtagagacgaggtttcaccatgttggccagactggtcttgaactcctgacctcaagtgatccacccgcctcggccttccaaagtgctgggattacaggcatgagccaccacgccaggcctaattttatttttttagttgtagtttgtatttaatgtttcaaagtattattctgttttgggggcagtacaatgaattagagctaatgcatttagaaaatatgaattacaggtaattgagggatcagattataaaactaacctttgctttggtttcctctccagggcctgctctcttttttgagtgccccactcattggtgccctgtctgatgtgtgggggaggaagccctttctcctcggcactgtattctttacctgcttcccaatcccactgatgaggatcagcccatggtgagtgacttggcccttcacctcctgactgcttgttttgagtcacatgtaaattatacttatatttgcagagcacttcttaactattacaaagcagttgtgcttgtgttttcatttgatctctctggtaatactgaaaaccagtttggacagttgtcattatatccattttataaatggggtagtgaagacattctagaattaagtctgagataagttacttaggtgaagaagtagaaataaaagatgcctcttcaggcagctgatgttgccatgatgtcaggtatgggagtttaaccctgagaatgggctaacaatcctgtcttcattactgtgacttttagttgactttgtaaatatattatttttgtcagctcatcgctgtggggcactgacacaaacatagtttatatcataataggcgggagtcactttaaaatataccataataaggctgatagcctattttaaataataatgtgaatttgagttcgtttttt

SEQ ID NO: 133917 - DNA, 1047 bp, Homo sapiens
aaaccccactttttgttctataaggtttttctttgttaattttaaactgggtttttaaaaaaagcatctatcacatgatataaatttttagtcttaagtacactaatatttttcattatgacttctgcttttatgtagatcttttcaaatcatttgttgtatgtcttttccttacttacagctaggatatttgagaagttttttttctgtctgttggctacctttaaaaatataacttttacctaatccccttattctttgtttttcctcttcttttgtttttttagggggcatgtactgaccccctttgaacaatgatgaaattagaatgtttctacttcttcctgtcttaacttaaattttttttgatatatttaagtatacatacatatacaagtatacttatttcttggtgcgtaatctttacatgatgtctttggctcaggtaatgaaagtgaacatacactccctttcccttgggtcattaaaataatctttttataggtggtattttgcgatgatttctgtgtctggagtcttctcggtcacgttttctgttatatttgcctatgtagctgatgtcactcaggagcacgagcgaagtacagcttatggatgggtaagataatagactatatatattttttaaccagaatagtaattaacattgtattagaaatttactggaaagtgagtttattagtcctttcttgcactgctgtaaagaaatatctgagactgggtaatttataaagaaaagaggtttaattgtctcacagttctgcaggctataaaggaggcatagaggcttctgcttctggggaggcctcagggagcttttactcatgatgatggaaggcagagccagagcaggcatcttcacatgactggagcaggaggaagagagagtgaagggggaggtgctacacacttttaaacggccagatctcacaagaactcacttactattaacaaccaaggaaggtggtgctaagccattcatgagaaactacccccatgatccaatcacctcccaccaggccccac

SEQ ID NO: 133918 - DNA, 1345 bp, Homo sapiens
ccaccttcctttgtagtgatcaagttatgcatcaaagctcctctgtgaagtagagctactgtggcttacttttccgggcaatcgtggggattactgttaatgtgtgtaaattaactagcctagtgtctgttgcccagcaaagtctcaacaacattagctgcttttgcttattaattacataaaagctatggtctgatgagctagaagctctgtagcactttccactcctttggtattaacttaccattttgttctattcaacaatccaatgtatgtaagaaggatttttcaacaaggttgtaacattcaacaagttcttaccagtttgaccttatggctggagcgtacttatttgtctaccagatataaaagttgaacatgaacactttgaagaatagagtgaatttacctatacggaaacgctctgtactgaatatggctttaaagaagttacattatgaattgagagaagtgattttcttaaaaggttctgtaggaatatatttccaggttctgtttataggaagttcgggatctgttcagggattttaatcagtgtgttaacaaagatgagtaagtgtgttttgtgggtttatttttttgcttttttttttagctatatgatttgaaatatatacctctgaaattaagacttgtaacttcctcagaaagatggtgatagaacttccttttattaaccatttgacttttgttattcatcttaatagatcaaaataatgaagctgatgtcccagaacattggcaacattaatgtgtattggcattttaagtgtgttctttctgcttattctcagtcgttgaagaaagttggaaaagattctactgtcttactaatctgcatcaccgtgtttctttcataccttcctgaagctggacagtattcaagtttttttctctatctcaggcaggtgagtagtgagtggctagtagcctttcaataccaggaaaatcaaagatggagatttgtctaaagatattttgaggaaaccactgcagaggaaaaaacatgtgaacttgcttctagttacaaatgtaggtgctggcatataattagtaaacagggcacctttaatgcaatgatttatagtaagataattactgtggaaatttttttttcttgagaattaaccagaattagcagaaacataatttatctttttttttttttgagacggagttttgctcttgtccaccaggctggagtgcaatggcacgatcttggctcactgcaacctctaccttctgagttcaagcgattctcctgtctcagcctcccgagtagctgggattacaggcgtgcactaccatgcccagccaatttttg

SEQ ID NO: 133919 - DNA, 1224 bp, Homo sapiens
aaaataacgtaacttttaaaaaacttgatatttaagtcttaaaagttgtagacatttcggagatactgttacggtcagaggcttagaaatcattgccaggttactttggctgcttattagaatcaccatgggagcttttaaaacatacctgtgcccgggtcataccgccagagagcctgatttaactggtctccagtggtcttccagcatctcactgctctccttcccttgctctccttatcccttgtcttttgcttacatcatgattttaatgtgcaggcaaagttgagagccactggctttgctaatgagcaatgctgtattggcagcatcaaaagtcagtcattttgtttcattttttattacttgataccatatttatcaacttgtgggttggggatggagagggtatataaaacaacaggtagacatataatagaaaatgtctataaaacatttcacaatttaagttgtgcctgcttataacgatttcttacatcagttttagatataaattactggttatataggttcagctttcagcatgtcttaatttgccactggttttatgaattttcctagacttatcattgtaatagaacataatatttcttattattttataatatctatattactaaagtgttttcatttcatttccataggtcataggttttggatctgttaaaattgcagcattcatagctatggtaggaattctgtctattgtggctcaggtgagtatcattttatctatacttaaaaaatttaaaaaatatcctgataaccatagtttcacaggaagccacatataaaaatgcaggaagatattccctgagctgctacctcagtccctcaccccctgctatggtaaggtcttgcaagctatagtataatatcagatcaagaaactgatgtgaatgtggtccacagaactattccttcttatataatgtgtagaggttattttcttttttgaggttgtaatttaggggaaattttttatgtttttatttaaaacaatgtttttaaaattatatccttgaccaggcagcccagcctggtgactggcatccactcttgtcttcagccttgcctcctcagctcaggggccctggccccgatgccactgcctaagtctcctcggaagccacagtggttccccatcccaggcccctgggggcctctggtgctccccttgcaccagcatcatctgccatttag

SEQ ID NO: 133920 - DNA, 1285 bp, Homo sapiens
tcccaattccaactttgtaaacttccagcagaagctctcatattctgtaaatgttcagcaggagtttgctattcacagatatttaagtgattagtatttctccagagactgaggctgtccctctcagtcatggtaactggtgaacagttgtgatatcctttcaggaagtgccagcagagcaccaggtagacaggcttcttagggaggaggctgaaagcattgagccccaggtcaggctgggagcccccaacactccacccctgtagaaggtcatcagtactgtccagactctgaggttgcaggtcaggcagtgtgcccttagaggtctctggtcatcagggaagggtcttcacacacagagcttgtattttaattctgtgtgttgatgtggtttttcagagttgtctcctttactttgcagacggcctttcttagcatcttgatgagatcattaggaaataagaatactgtcctccttggcttgggcttccagatgctccagttagcctggtacggttttggatcacaggcctggtaagcctcactcttagattctcgtgaactgccagacagatgcctcttagaggagcttggggtggttgggtgtgatgagaaggaagcaagggttattttgctggtttggtgtattcaacattgcagaaaccattaggctttaatttggggaaatgtggagctagataacaggattatttataaagactacctttatgtcattggactttcacggaattgttccttaattgaatgtatctctctcttccctccagcccccaaataaagttttatgtctactttttaaagcatatgccaatttttttttctttccctgagacggagtctcactctgttgcccaggctggagtacagtggcatgatctcagctcactgcaacctctaccacccggattcaagcagttctcctgcctcaggctcctgagtagctaggattacaggcattcaccacacgcccggctaatttttgtatttttagtagagatgggtttcaccatgttggccaggctggtctcaaactcctgaccttgtgatctgcctgcctcggcctcccaaagtgctgggattacaggcgtgagccaccgcacctggccacatatgctaatttttagagacattgaatatagtcaaaagcaaaacaagaagatacaaaaaaaatgactgattatggcaagcttcactatgacttatcattacctatcagtaacataaccttgataaatcatttgagtttgaacactaaaatttcttc

SEQ ID NO: 133921 - DNA, 2045 bp, Homo sapiens
aggaggacaaaggtctaaagaggaaggcaggtctgtttttccagttgggggcacaccatgctctctctgttgaggggtagcaagctgtagctcgagggcagtgtgaaagtgagccttcaagaggtacaaagaaaaaatgaaaggtcagtggagaaaatgtggtatttatagcaacaaaagaaatctccttgcgaacttcattgagcttatgtctaaagatagcagtagggagaccagggagaagaaaagtttgtaaaagaagtaaaatcaagacacaaaggtttcctggcccttctgtccccatcctaggccattcgtttcctccagtgtcacatgtaaccttgtaggttaaaaaaaaaatgcatttttaaagaggaaaaaataaataaaatgtaacaggagaaaacaaggcatttgtacttttgccactgattgcattccgaatagtgagctccttgaggttgacctgctgcctgactgtgcctgtcctgtcattgcaggatgatgtgggcagcagggaccgtggctgccatgtccagcatcacgtttccggcaatcagtgccctcgtctctcggaatgcagagtcagatcagcaaggtgaggtcactgccccccacttgtttttctccttcaacgggagacctccctgctagaagcaggagcagctctgagttctccccatcaacagcaggagccgacagccatatggccccttttatcatacctatttactttggcagataggaacattctattttcctctctgctttgatcttacacttatattttttaaagctagacttagcagttcagattgctaacaattagaaatagaactattcattttcccttttcagttttgatacatcttttcttctttagtgtcacaattaagcagactataatcacattttaacagatgtctattaaataatgaaaaaccagttaaccacgagttacttaattactttattcactaattatttggaataactcaaagtctttgagcttaatttagaaaatagtttgagagtagtaagaaaaagtctgtgtggttgttgatagatgttgagtgagagatgaaattaaaattaagactgctatgtggaaaatagcattctaccatctagatccatatcccatccttcccatgcctctgcttcccttcctgtcctgtcttgtcctccctccatcccttcttccctcttttcccacccttcctccccccaccccccacctcctaccccttacagggtctcactgtcacccaggctggagtgtagtggtacaatcttggctccctgcagcctccgtctcctgggctcaagtgatctcccagtcaccctcccaagtaccagggactagagacgcacactaccatgcccagctaattttttgtatttttagtggagatggggtttcgccatgttgcccagcctggtctcgaactcctgggttcagtctgcctgcctcggcctctcaaagtgctgagattacaggtgtgagcccccatgcctggactgctttcctttcaagcagttcccatggctagatttaatctctttccttctctatctcctaatggctcaccttattgtattcaggaagaagtagacaattttagagggagaaaaattttttaatgcctaagagcccttttttttaaaagttttagtaaaaaactatattggaaaggatggtttattcattgcattttttttttctatatcagaagttaggtatcttactcagattcattgttaaatattgtcccttgaagaccacacattctgtatgtcactcctggctacagtaactcagttggtttgcatccttagggaggtgctgtgtctgaagtgaagatgtgatgacccatccgtggaggactgtcactgccttggcatctgacagacaccgtcctgtcatttggggcatggattttcttttgactttttatacttattcatgtcaatatacatgtttctgaatgtcagcatataaaagttttggaacacattgtattaggctgaattatatactacca

SEQ ID NO: 133922 - DNA, 1430 bp, Homo sapiens
aaggcacagaacagtagcgggactgccatctctggcaagatttcaggtaaagaatctcttcttaatttctaccttcctgtttctctgaatcagcccataggtgttgatgagtggccactcttaaagagtcactcagtatcagggatctactgtctttgttcaaaggtcaaataaaaacctagtctccttttattctactttctattcttagctagaatgaaactcagcatatatacacttctggacataataatattgaatagtaattacctttactagatgaaagaaattttcattacaaacttaaatcatgtaaaactcaacaactcagattcctggacctggtgtcctggttgggtccaaggtgattttacagaagaaaaaaacaactcaagcattctggtggcaacatagagattgtaggctgcttctaagaaagttattaacaatttggaaattcctaagtaggatgagagttagtaactggatacgagtgaagtttatatccaagttcagactcaaaggcattattatgatttgcttcttcccatgtcttccatgtcctgcttctcaaagtttttctcatccatcacactcctgccttaactgctctgagtatgcatttgttttcaattcatctttatttcaatctgtttaacttttgaatcgcatgggaatacgcacattaagttcctttctaaaataaggttttatgaagctgagtttcacgataagtgtcttgctattttttgagatgttttatggacaaagaaaactttacagatttatatgtattttgctgcaccagtaaatggaccattaactagggcccacctttaacagagcacccctttgaaagttttataggtatgaaatatatgtagatatttgtaaagggttttaattttttttttttgatggggtgctgtgtaaatcttgtatttataaatgtaatgaaggtattgacagaaaaaaatatatacaacttttataaaggattgtgtactgactgaatacatttaaaagaaaatatattttgaaacctgttctgctatgaacagagataacatatctttttactatgctattggtttttaggttaagcttcctaatgcataataaatttacagtggttacttttatgtcttgtgtcttttttttaaagcaaatagtattgctcttttgggttctctgttgggtggctttcaattaaactgagttgtaatctttcagctgatgcaaaaggtatgtattttcaaaaaaattttatttttaacaaaattccttcaaagtctcccttcaaaaacatcgtaactacagatgctccttgaaaaaaacatcgtaactacagatgctccttgacttaccgatggggttccatcctgataagcccattgtaagttgaaaatatcatacattgcaaatgcatt

SEQ ID NO: 133923 - DNA, 1039 bp, Homo sapiens
gaaaaaataggttggtgagagttgtgaatggtaaggattttgcattttttctttaaaccatggaaattcattcagggcctttttcccccttttgtttttattttattttttatttttttatttttttatttttttgagatggagtcttgctctgtcgcccaggctggagtgcagtggtgcgatctcggctcactgcaagctccgcctcccaggttcacgccattcttctgcttcagccccccgagtagctgggactacaggcgcccgccaccatgcctggctaatttttgtatttttagtagagactgggtttcaccgtgttagccaggatggtctccatctcctgacctcgtcatctgcccgtctcggcctcccaaagtgttgagattacgggtgtgagccactgcacccggccttcccccttcttttttttaaaagcagggacgtgacattaaattagcgcttcaggaatcttactcttagtggtatggttctatagagaggagagacttggacaggttatataagtcagaatagattaagttagtagtaattaaaaacaactccaaaatctttgcggccccccaaaaaagaaggtacgtttcttggtcatgctattccatcacagctgaactggggactctgctcatcacagtcattctgagacccaggctgatagaacaaccaacatgtcacattttgtttacctttagagagcagagaagagcactctagagggttatgcactaatgattaaatgctaggcctggaagggacacgcatacttccatttacaactcagcactagagtgcagtcacatgtcagtaaccagttacaggggttcaagaaaccttctatgtttgtggggaggggctgggtagaaagaactggaagtattcaaaaatagcactgacgaccacacagggagtcttatttagaaggtggttgtgtaatagttgaagtgggtggtcttagctgctgggtcacagttgttgcagtcaatacagagaagagttgtatacaagaatttaaagcagt

SEQ ID NO: 133924 - DNA, 1098 bp, Homo sapiens
catgcacaggattctgttttctatagctccttcctgacatcagtctgccaaatacagaatgagttgacctgcaggcaattctctaaagcttctcttttcaagtttgcatgcccaagcaggtaggctgtgtgtttgctgctttttgcgatatttgaagtgatttaaacatgcttaactctgtatttttagagtggcaagcctgagtaccataagaccaaatggtcctgggcacaaattttgaaaaatatggtggtgatcataacttagcaacaacaagactgcttttatgcttaaaagcaggagaaccgtatattcaaaatttgtggttggttgtcaaataccatttttttcccttccttttagactgtggaagtaaagtctgcccaggtctagatgtttttctggacttattaccattccctggatgagagctgtggaagggggattgtggtctcttccactgccaggtggggtggggaagggaggtgctctgtttttccaaactctggcttcaattgattctgcttgcttggcttgactctgtcgggatcccaacaccttgggctacatgcagctgagtggggtttatgactcagctggctactggggccctgctgctttatttatggtcgagactttgcttgaggttttataaagcaaagctagaacaaaaacgatggttttgtaagtcaacttcataccctaaacaggaatagagaaacctcaaggctaggaggagtcatccaaaaagacctccatactgaaacctgccattgtcttcttagttataatatgctgagagatcaaaggacttcttggtaaattaaatggctctttcccgagtccatattttataaacatgtatgcaagatcgtaaattccatacctctggacttctttagtgattaggtcttaattataatgaataccattttataccatttcagtattcttttttggcaaatgatattaaacattccctcatgaactaaaatgggtaaattattaatcatgttaagcagtttctgagaattttagataatataatgatttcactattttgaatattacgtatcatagtttttattgaataagctt

SEQ ID NO: 133925 - DNA, 1104 bp, Homo sapiens
tccctttgcaaacaccttggcctgaagttagaatgaaactgtagtcagcaccccttatcattcttcagaaagtcttcccagccctgataggatctgttctgattcggaatatcagggaacatttcttggtgaataaacctggcttcttatatactggtgcagtcacttccctgtaacgaggtaatttaagccagttgcctttcatttcaaccatgtcaaagtatcaaataaagctataacttcagaccagccaggaaaatgagaggccggacagagtaacatgtttataatataaatccttcctgttttctcaacccatgctcccctggctgttttccattctgacagaacactctggagatttgcctacagacagtgaccaccaatttaaagatttgttgatgactaagaaaaattccaaagctgcaaatgaacgaatccaatgctgactaaaacaactgaccaaaattactaattcctaggctgctttagcacgaatggtcataacaactgggatagcaggcctgtgtcactcattccctagtaaagcagcttggaggccacaggtgacttcctcttctttccagactgagatgtaccagaaatagtgcagttcaccagtttggggaaggcagttgtctgggagtaatcatacctgcaaatcacttgatctcaaggactgtgcttgctgacttgagaacatctattttcttcaattttagatgtaacacggctaccttgtactcactttgagtctcaccgaattcccgtgcattgagggtccactggaattctttgttcatgggcattttgactgctagtatggatgaggtggtgagaaatggtggcagacacacataatttgtgtgtcccatattttcattttgcaccaagcttctttgctcccatgcatgctccattgctgcatcagatttcacttacaaagcgtaggtccaaagataacattaacaggagtttcaagacagtgacagcagatcattaaaccaagtgtgggatgagtggggccttgtgactacacaggccaatgcagtggaagctccctatgttaccttccctgatttcattcctttccctgcccctctc

SEQ ID NO: 133926 - DNA, 1058 bp, Homo sapiens
gtatatgaataagtgatcctacaagtgaggcgtgtgtttaaaatggatcgatggcagggcgaaccatcacgcactctggcagagatctaaacgggggcagtagtcattcttcagtcgtgtttttcttttggttggttggtttttaaaggtcatctgtctaacccctcattttacagaggcggaaacaggccaagaaaggttgccttacatcgctactcagagaattacatggcaaaaatgggcccaaacccggggctcatgagtgcatgttctcagaacccctaggagggatttcaaaacccaagtcccacatgattctggatcattaactcaacaagcagcagacatgcctctttaaggcaaaagttctatgttccatcagtgagcttctcataccaccgtgtctcctatattcttcagtaaaagactttaatatctaaaactcctttaacctcaaatcctgttatccccaaatgaggcaataacttactcggtgagatgtgtgcaccatcctgctcagtttgtgaatgcttcattacatttatatggatggtatattttccaagagctagataaaatatttcctcttctcaagtagctgcctactcatttggaaagaaaagacgtgaaagatgaacaaacagccattaagtgcaatcattggtgccttaaaactttaaggaaaataaaaatcactggaagtcggggcagtcacgggaggcatccagagagctttctcactcacaagagggttaaggtctttactggcaggttaagtagccaggcaggaagatttgtcaaagaggaacccagagtccaggagaggcaataaggaaaggaaatatatccaggggcagtgaagtataacacaaataaataggttgaggcggatagcagaggagccgatgatccaaagagaaggcaacaaggaaagggtggggaaaggatatgaggggaaaaaaaacagggaggaaaaaactgaaaatgaatcacctaattaatgggtgggaatactggctgatggtttccaggggcattgtttctagtccagttatctg

SEQ ID NO: 133927 - DNA, 1042 bp, Homo sapiens
ttcttaatatatgtgtaggaaagtaattatcttactgagtgcaagtatctgtaagtcagaacactagtctctcccgcatttccccccctcattgtggggtgtgcctctggccactttcaagtgaccgtggtatacgtggaattgatggtagctcctgaactccctgctaaatgagaccctgcaagacgtggggtagattttgggtggaaccaccagccaacagttccatgccccgtggggcaggtggtgggggggcaggtggcaggggagcaggttgagggggagcagtcagcctccagctctgctctttggatgcggcccaacacaggagttggtttgctgccgccgtcgtctgtcctgccccatggtccctgtcccttgtttccctgacacgcctgtggctccctcgtctcctggttctgcattgggctcctgtctcaggccggccttctcacctggctgacccatttccattcatttctctgtcttagggacctgggctcatcccagctggagattgttgttctctccctccctttcagtctatgggcaactctaagggagaaaccttttcctggccagccctagctctgtggaaatcacctggcctggagctcctctccccgtccactctcctctggccctgtgcctcccagagaccattggacagcccaggccccttcgccaaatcaaatgctggccatggcaagcctaggccctgggaagtctgagggtgggatcccagatgcgcggtcagaggaccctgcaggctgggagctctctcagtctggggcagcccccagagcggctgcaggctgggcctgacccagggtcatgggccttggcatctgggggcggtcccgtgtggtgaggcaggccctgtagcctgctggtttctggtttcatggctggttacatgagcttccccttaggagggtctcaatgtcagtgaatgtctgtgaaccatgaaatgaagggacaggaggggctgttctccattaccttttcatccccctcctcacatctttgtccattttcacca

SEQ ID NO: 133928 - DNA, 1042 bp, Homo sapiens
tatctcagtgttaaggtacctctgaaaaatgaaaagtgttccgaataaatcgcccacagtattaggtttccatgctgtactttctctcacctagactttaaattggagtcatctaagaaatagagagagaagaagaaagaagtggattacttttaaaacactaggaggaattttatttactgtaaagcagatgagaaatttgtttgcccaagtttagaatttcagtatgttactttgcagaagtttggactgcctgtcttttgattttgtattaaaacttgatttgtcattgtaatatcatgaaataaggtaagtagcccgttgttttctaagtgacttgcggaaaactcgtaaaagtgaataattttttgacaaatattacagcagataggtttttttgttgcttttgcttaattacatttcactgttttttgattcttgataccagcaagggattaaaatagcggtgtgtttttctgctgctagaatgtatgatgaatcactcttgattctgaagccaaattcttgctgatagcattgctgccaatttctgtgctatgttgccttagtatgggcattgcagcgtccgagaatgtgcacaaagcacatcagaataaaggtgatcccagagctgcagagtgcacgtcaggataccagagggcagcttctgagagagctggaaaaggaaccagcctgcgaatatagttgtttgtagctggactttcagtgtgcatgaaaagggggaccccaccccttttctttttccacagagggtcatatatgtcacttcagttgaagaataatagaaaaagttgtgatttggaacagacttgagttttctgaccatacctcagcatggtatggtaagttgtgtttaatggtttaggtgtttttttaaatgtttgtgaggtgatgaatgagatcataaaatacccaaagaaggaaaagaattatggcttgcttggtattttttaaaaaatgtgtcgttgctgttaattttttttttttttttttgagacggagtcttgctctgtcacccagg

SEQ ID NO: 133929 - DNA, 2072 bp, Homo sapiens
atggacttgagttgatgttctgtctgtgaaaagtaaatagtggctacccagtgagtcttctatgtcccgacagtaaataacctttccctgattccatgtggtaagcaggatctctgcatctactcatggaggactactactggattgaaggaagtggcgctttctgaagtacctcatctagaaaactccatttccatttatcttctcacactcttgcctgtcatgttagttccccactcagaactctgggtttacatgatttcagtttatatgtgcatagagaaacactggaaaaaattaaagtagtctatttttcagataatgaggattgctgaaaacctaagtcagcctgaacaaccagtacattttcttgaatttattgtacataagtcccccacgtaagaggctgctggaaaataccaaagagacatgagaaatgtcatttctggccatggggagatcaaacacacagcatatcaaagatcacttacaaagcatcctgtgataaataaatccacagcagcataacacaaactaaagacatgagtatatgatgcatttttacccgaggctaccctgggctagagtttccatgcctggtctttgttttgataaagcaacactttacacatgtaggctggaaattatggtgggaaattggataattgaattaactgagtccattttagtgcttttacctggtttgtaagcacagataggggtttgattgatgtatatgtaaatagtgttagtgtctttatttgaatatatgcttttaaaaattcatctatgttttgcaagtaaagctggaacctattatagaagtcctgctgacacctgtgaatcaagacgatttggaaacccaaggccagaaatgtaatactgttgattattctgtgcataacacatttcttattaaattctatatttattcaaacaatttacaatttttatttgatgttcacaacgtacaaaaccctgagtcaggagtagagaatactgagatgaatagaatagtttatagttagaagtagaaaactatataggataggagaatttatagatagatgtagaaaactattataggatagaagacaattgaatcacacctgtatcagaggtgcagggaagtgcaggaggtatcggaacagtttggatctctataagggaagtcatcactttgggtattttcattgtccataagccctccttcaggctgatagcaggatacaaatacctgtgcagtttcattcaactcttgttattttgtataatcgaggataccataatttgtattctcaaaatccagattgccttcatgagcacatactcagtatgaaattttttttcttctatttttagtagagacagggttgcaccatgttggccagggtggtctcgaactcctgacctcaagtgatccgcctgccttggcctcccaaagtgctgggattacaggtatgaaccactttgcctggccccggaaattgatcttttatctttggctcataaatgtgaaatcaaagtgccacagcaagtttaggctacctctgaacttggttcagtctattttactctcactcttttttccttttacttgcattaagctttttttttttttccccccacggtaaacctttggttttaaggcaaaataaaatgtttcagaattggggatggtaactttaagttctagagttattcaaagtttccttctcttgtgatttttttttttttttttttgaaacgtattctctatcgcccaggctggagtgcagtggcgcgatcttggcccactgcaacgtcagcctcccgggttcaagccattctccctgcctcagcctcctgagtagctgagattacaggcacccaccaccacgcctggctaatttttgttttttagtagaaatggggtttcatcatgttgaccaggctggtgctgaactcctgacctcaggtaatctacccactttggcctcccaaagtgctgggattacaggtgtgagccaccgcgccaggcccttttgtgatttttgaatgttaggttgtcattcagatagcatcccacacgt

SEQ ID NO: 133930 - DNA, 1041 bp, Homo sapiens
tgtgtagacatatgttttcatttctcttgggtgggtacctaggcattgaatggcttggctatatggcaggtatatgtttaactttttaagaagttgctagactgttttccaaagtacctgtaccattttacatttccaccagcagtgtttaaggtttttagtttctctgcctccttgtcagctcctggtattgtcagacttctttattttagccactccggtgggtgttcaaacgtgcttttttatacttaacattttatttcttgagaggatttgaaagtgtctagataccttaatgctgctcgtgtcttccattttacagaccagaaggcattggcccagtaaatgggaatctaaatgtctcacccgagattcccaaatgagtcactgagcctagaatcttcatgcgtcagttggagttgtagcaacctgcttttgttctgtcaactattgtgactcagaatcctctctgtccttgtagcattgttaggtgtgcctttctttttatcctttcaaaatcatctgttcttatcctctctggaattgtgtctgatgacatgcagcttgttttctgcagaagaatgctagtgttgtggagaggttctctctgcctcttggctgcagcacacaggcgctgggtggtcagacctgcttccgaggctgtctccacagtgactgtgcaaccgcatgtcatcctgtgaaagggcagatacgtgcctcgtcagagccttgtgggagttagtgaggggacttctctaaggcagctagtactcactcaatacttaatgcatcttaaggcacctcttcacagaaggcggtggaaggctgcttacgtgatggcatgtggatagcgatgccatccgtttgtttttttctcctccatgacagagaagcaggaaaacattcctaaatttatttatagacgttaaaaaaaaatcaggcttggttttttcctgtaactgttcttcagccggcagcaagtatagcagcaagtatacagcagcaagtatacagcagcaagtatacagcagcaagtacagc

SEQ ID NO: 133931 - DNA, 1091 bp, Homo sapiens
ctatcatccaggcaggttgttgtttttccccacctgatccctgcttttccttgagaagtttattttaaatggagagtcaggaatgagagagaacgtaggataggaatgaatcatgagaaaaatgccaccagttgttttccatagtccgtgtccttgttggaatatccttacctttgtcaacagagagtagcagttcatccacaagctcgtgagcagccactggcagcactgcctccatgaggcctcgggagcattctcattgttttctccaggctgtgctgttcttcccctcagccttgagagtgaccagggatctcctaggcctagggaaacgccacctggtcattggccagagccgtttctagatatggtatctgacccctgtgtgagtaccgactgcccaagagctggcagtagttttgtactctgagcctgagcgtgtggccccacgttccatgaggcctttggccggtttgtttgccagagtgtctctgagaggagggagaatgttggtatggagaataattttattgctttcttctcaaaataaaggaaatactcaagggaatggtgggaggggaggggataaatatagcgtttccgatttcctgcttcctctactcttccacagcatttcacttttcatacggttagattttcatcctatcgacttcagctaaaaataattccaaccatttctatcagattggccctcttatcatacttgttattattttgctttcctattcaaaacctttttttccccttaggccaatgaactgttttactttattagcttcatatttatttatttgttattgatggataataggtatacatagttttagggtacatgtgatttagtaccatcatataatttataaaaatcaaatcattatatttgggatctcaatcaacttaaatatttgtcttttctttatgctagaaccattctcaatagcttttctacagggaataaaagatggtctacagtgctcacctgctgcacctggtgcatgtgtcatggtcttatggctggggcagtcttggtgtcctggcttttggatggtcagaaattctggcttgtcctt

SEQ ID NO: 133932 - DNA, 2190 bp, Homo sapiens
tcttttgttctacgcctttttctcttgtacttttgttcctctttctagtactaacgtctcctccacctgtttgttctggtgccgtgtgctcagcatgtctctccatgctcctctcttaccccctaaaaccccaagtggtgattccttccttccagcaaaatgtactcattcagtttccctctcctccctccctgttgtgtttctctaccattctttgataggtgatatgatgagccagaattgataggctcatgtgtatgtggttctgtctccatcagtcggtgtgattcttcatgtttagaaaggttccatttagaaccttctttagaaaaggttccatttctaaagaagctacagttccctaactgaagtttcctccttcgtaaaaatgaagtagtaggttaattatatgacgctataattaataataaagcctgtattctacttaatatgtctttcatcaaaaaggccacatgggaaatttttgacatttaaaaattatctctgaattcagtctttgtcagggttcagcaaatcacaatacagtgtttcgtatttactttcttttgtaacattatagaaataagagtatgaaatacataaggattctacatatagaagtcacagaaatcattctgtatattcagaagttaaacatccccaatttcatttgtgagcagttaaatttggggatactgtgaaaataaatttatatcaaattatattatttgattaacccagtggagatttaaaaatcttatatattgttttctccccttgctttgctgtcagctgttagttctgtgaggtcattgatgatgacagaattgctgtctaaatgacgtactgaagacacatccctgccttgtcttccattagaggtttggttctgagtcctgacgttgatactgctttattccagggtacctatttgaaaacaagggagttttcagttatatttgagacatagtgatattattgttttttgcttgaagccaagatgtaggtagcgattgcttccactttatttttactgtacttttatatagtaatttggacaggtgtcttcataaaggagatctttgacaagggaaaatagacccagacacccattaagacgtgttttctcccattttctccttccttgcaatataggtgggtttgatagaatagtattaggaaataccaaagaatctaccaaatgggtaaatgctacttaagtgtctgtacaggtcatttagatgagaggatttgagactatgcttgttataatttgagaattatacatgggtcaggaatgacatgagggctgaggttgaagcaatttgaaaaggagagataatcatgaaactctacttggatattaataatttttcccttgaatcacacacagtggcctgcgaggcctcattttggctcatcagtttttatatgggctgaaggcatttgtttggaagatgtaaatacccttgtgtttttaatagggaaaggttggatcaagtttgctcttaattctgatcaactgacagtctttgactcaacatgaagcacactgagataaagcggatcctggtttgctgatacagatctctcagaagaggagcttgagaagcgggccttgctgggatttcctctaatcgctgcattggattgattgataggattcaggttttgttatgaacttgggagagaagtgggaagacatccaataacacccaacatttcatttaatatttgaaagaaaaccatttctttttcttttttcttttttttttttttatacttttaagttctaggatacatgtgcagccttgttacataggtatacatgtgccatgttggtttgctgcacccatcaacccatcatttacgttaggtatttctcctaatgctatccctccccctgtcccccaccccatgacaggcccccgtgtgtgatgttccccaccctgtttccgtgtgttctcattgttcaattcccacctgtgagtgagaacatgcggtgtttggttgaaagaaaaccatccctacattgatgacataccagttttctcctgaacctggacattaattgttggcatgttggggaagtctgctcctgtgatgtatctcgtaggagcagtcagcagccagacctaacagtttgatgcaatcaagttcagggccagttggaacatcttgaaaaatcta

SEQ ID NO: 133933 - DNA, 1046 bp, Homo sapiens
tttccccagtcatctaagactgtgggtaacatgtgttcctgtctacaaggccattgcaaagtcaactgagataacacgtgcgaagttctctgggagaaaagcaccatctgcatttgcataaagcagagctgccgaggttaagctgtcaacagcttcctagggaaaatgtccctgaaacagataagacatttacctgtaatggttttctttgcctgtgaaattaatggtacaaggcttaaaaaaagtattatcttttaatttgtcttttaaagttgattctattttaacatattttcatcatttagttgctaagaatcactgctaatgggcacaaatggaaacttagatcctgctacaagaaggttacattaattcaaaactggctccgctggatgcaggtgggggtgggagtgaggggggattaaaagtaaagacatcccagacctgcaaggagctcagaaatgggagcatcatgcgcagcagcactccgataattctgttgtatggcagaatagcgtaacagcccacgtgaaaatgaatgagagtaaaacccatgaagcaaattctgcatctggaagggtaagattggtgaagggttcttgaaaaacgtgaccccttgaatagtgatttgagtagagggcattccaggcagagggctgagaaggctgcagaaaggtttgttgaagggctgaggagtggactgggactggaaatgagcatagtgacctgcacacatagggcatacatgtcactgtttcagtccccagccagagagaagtgcagggtgggagtcagggaacccacctggtggtaaggcagggctggtgtgcccctagggcctgcactagagaggcgctggcagtgggggaagggggagagtggagagcttacttggcacctgtagtttacatttgagggttacatttggtaggatcatgggttgcgtcagtccctctcggcacacatctcaggctgtgcagagttggtgttgaaggaacgtggggaagagggtggcccattttatattcatgctcagaaacaggggt

SEQ ID NO: 133934 - DNA, 1029 bp, Homo sapiens
tgaaatcagcagaaaagtggttcttagaaattttaaagtttgtttatccactttactttttgaggatctgtgctcactggtttttcaagctggtttgttttaaaggagtcaagcttcactttggagtaaaggtggagattatagttgctctgttggaactttgatatgttaaagggaaattctgtaaaaatgcgggatgcaagcagtagccacaggagcatttttaaaagtttttctttttcagcttaatttatataagaaaaacaattaaaagcctgtgtttcattttagcctctttttaaaagataaattcttatttctgcagataaatgggaatactgaggggagggacggaaagtatggttttctatagactattttccattaaaatttaaataatcagaaagctcagaaatgttattcctgtaacttcgggaagttataggaaatgttacattttaacatcaaagtaaaattccaataaaatactttttcttataggagcacattttacatatgtaaaggaagatacaaaaatactagaaattctaaaacttaaccatttttgcgaaatttttctaaacaaatttcctgaagtcttgcatacatttgagaatttagattattgctagaaagcacatcttaggttttaatcatgttcatgccaacgcctatgaaaagacctaccaggattttagatccatagttaaccaccacttgtgagtatccattttgcatttttgaagactcgttgattgactatcaagtacttgaaattatgtaagagaatacttttttggcagcaaagtcgcatttcagatcccctgctcccctatcaacttcaggctgctccaggctctgggtccaggctggaactcacagtagaactaagattatgtctaaactcatagcagtaaagtgacgttttgccataaaagaacatttttataacgctatttcagtctacttgtttccttggaaatagtttctgtcgtgatgggcagtatctaaattaatgaattattcagc

SEQ ID NO: 133935 - DNA, 1111 bp, Homo sapiens
ggggaggtggacacaaggatcccacacatctcttgtgaaatacttggaaattttcaatttgagtgtttatgatgcttccaacatatataataacataaaatattaatgtacacgtggttgtaagagatccagttgaccagaggattgcatgtttcatcatttaaataatatgctttgtgttagattgcatatagtgtatgcttttaacaagagttaggggaataatagcacgggaacatttgacacttacaatctggaaacatgagaattatttatgccagtaaattatttcagatagtatttgcgaatgatggtatgtgtctgttttaggttctgtggtgccacttttagaaactccacaagcaaaccatggctcaaagtttgtagtaatctttttgaactgtaactattagaatttcccaaaaatctaataaatatgcttttctttgtataaaatgagctatatgaatatttgctgctacttgaattttctttccaaaatttgtttatagacatactccctaaagatgtttgataatcagaaataactgattctgctagacaaatatgcaccaattgattgattttctttattttgaagaaaatttttttcctcttaattatttggtggcttcctttgctggcaaatccaattttatgccccacaaataatgtgaacagtagagacttctacttgtaagtttcggcaattctttaaaatatgttaagtttttgcttcaacatataaaggtttttcttttctgaattgtgttttcagcagcaattcaaaccaattgtatttttccattatacaaattactaatttagaataaatatatttcatttctgtcatgatatcctagtaggcaggctcttgggcagacacctgatatgtgtatgtattattaagttgtctacttttgtttcttagaaatgtttatcatttaaaaagtaacagatggaagaagaccatttattgaagactgtggcctggctagtgtgtgggcagtaaggggtgactgcacctgggttctgtggctctgaacgttttctgtttctttttggattatgaggagggagaactcttggttttgttttgaggaacttcatt

SEQ ID NO: 133936 - DNA, 2619 bp, Homo sapiens
ccagccaggataaaaggaaatggcatcagggaggaagcatgcttcatttaggcacagatcccagagtgataatggggtaataatagaactcatgccactgtcaatccgtggctgcattagtcccaggcttattctctgtctggggagccgcacagtgactttcttcgtgtgaggctgcagcgcaccagctgggccacgccgggaggtgccctcctttgctttcggaggggtgcaggcaatggggcttggatgttgccatttgctggtctcttgtcacaggccctgcctctgcaaggtcagtcatgggacatgtccgtggcattttctgatgtaggaggtgagctggcctgttctgcatcatgctaatggaagaaatggtggcggaacctcagttgcgtgggtggtcttctgggagcacagagtgagtgatgcccccgtgacagcagtaagaggcttctgcaagagtcaggggtttttcttagttgagctgcctctagtttaggagggtgggtttggaaaattcatattttctttccaggagcatgcataaaaactctcccaaaccattcaaagtcgtacagcttgcgtcgactctgaagttgggaaaaacatgcagtggacttttttctttgtacagttcttagtatttagcaactatgagatcttccatgtttagagtagaacacagacttctaaaatccttaacaagcagcatttgtacttgactgacctcgtttagcattttatttcttgtactcatttcagtaagtttcatagttctgtgaagttctcttgcaagtacccacatcactttggcaccttgtagtcctattttgtgtaaatttccgaggcagatgcattttaaaaataatgagctggtctctgtatggaaaaaataaccccatcatgaatttcttgtttatgcaaaggaaaggacttttgcattcctgtcactgttgaactgtgggtgtgagcactgttgggcccccagaaataaaggcaagttctttttatactgtctgaaggagctgctttcttaggtggtgatgcttggaggtaaggtcctttatttttcacgatcactctgtggtacgaccaaagccttatctctctcccgccagtgctgctgtattaaacacagctggcctttcagtcttaaattcagctgatcttaaaataaataaataaacgcagctggcctagaagtcatgtgaagtttgctttgatttccacgtgggtggaagtggagtggtccacatagcatgtcccactccccctgtgcccgccccgggctcctcgtaccacccggtgctgccttgagcacatctgctgatacgtggtctctttcatttgctttacaaacattttggtttattacatgaccactgctttttcatttgtagggtggctttacggggagcaaatgtttattttacaaagacaaatgtatggaagctgtttaaccacatttttgcttcaatatgctctttttaaggtctattatcttatcctttaaaaatgttgtaatgtgtactttgcgaatgaaagatgctttattagttttattgtctgtgtcccaaaataacgtttgttcactgattttttttccctacttttttcagaaactacatttccccccatgagttagaatagttacaactaaaagccaggtggccgcaggttgtttaccaagtgagagtcatttcaagtctattcagaagaatgggactcacagaaacctgggagcatgaagctggctctggcagcactgtggtcgggggccttgttttagggggagcagatacctgaggggagtgtccatccttgcttcttacctctctcaaattagagtcagtcagtgtgctccctcccttacttccatctcgcggtcttaagtcagggagtttagctttaaatattttcattgtgtaaaatttggagaggacaaaagcttccattgatccttttggttctgtttctgtgtagagttgctgagctttcagcttaaaagaaaactcagatatacaggtatgaatgcaggtatttttgtaggttcacatataggtaattgtttgattttaaactggagctgtatctattggttaaacctagttggggttaagttgaggaccaagctagttgtcttactcagggtttctttgctctgtgtgtctctttagtttagaccaaatcccaaatgagagttctaacagtaggcttctttgtaagcacaagcgtataatatggggagatgcttttctttctactctccccttccctgtaattctgcaatttggcagggctggttccttctgtatttagttagcaaacgaggccccacttctggcaaagggtgtttaggggctggtggtgccgagaatcacttctctgtgaggctgagcccattccccaaagcctgcctgcctttgtctggaggggccttgatgccaggcgcctgttgtcctcggactgtctgtcttgagaaatgctgctcaccagttttgagtgtttgtggggtagagcaggtccccatcctgttgtggcctggcctgggtacccctcgtggagctgctgtttgacagcagcacaacaaagggtagtagtgaggtgaagtgggga

SEQ ID NO: 133937 - DNA, 2473 bp, Homo sapiens
tgctgaaggcgccttgtttctcctgagagaatagccacagcatgtctttcagatgaagcgatgtcatgaagtacagaatatacccaagaaccaagtgattgcattggtgtcttgtctcctttctttctgcctctgtctgtaggcaagtgggggctttcttagaacttagaagagtgaggtgagaaaacagatacctagtggaatggtgcggtgggtgtggtgtttgcagtgcttgctgtctgcccgttgccccccgcataccttttggaaaagtatatgtgtgtgtgaatgagtgagggggtaagggggtagggggtagggagggtcaggcagagtgcacacttgggggcagaaagatgaggagcagggagggaaaccagtactttttaaaaattgttttagaacaccagaaagtggcagttaaaatccaggtgttcttatgaatgtactgttgacttgatatcagcttccagacctgtaattgggattgacaggaatgatctgcacatacacagggatggagagaagctcagcagagagaaccatggaattcataggattaattttaaaatcttgattttagagtaaatatttttcacttcctacaaggcatatctcaaattgattcttcctccagtgcactacagggccgatctcacagggccaccaggcctggccctgctgttgcatagcgagtaacacggatgaagtcttacacatgcttctcttcatttcttgtatttcacatacattgtgttttatttttgtaccatgttaagactatctcctgtctttgcccttaacttgtaacaccacttttgaccattcctgtatgagaactcaggaatatgggtaactttgtgtgtctgtgtgtatagctgcacatatagttgtgtacagccttttgagctttttaatggattataagtatgattttcgtaatggagggaagacacagttctttcagtatgtgctctttatttctcagtgtgcagcaggtatatttgcagagcttatgtggtaaaaagactgaatgccgcatcttagttctgtgaaatttccaggtgtttgcctgtaattggatggctccttgaatctttgtctaggctaaattacattttctggtgtatgcgtgctgtaaaggaagagatccagtaaaccacgataatgttttattaagataagcacagttttgatctgctctaagtatagaactgaaatgattagtcatggaaaacggggccaaagcagaccccagaatgtagtgtctttgggaatacagacaatgtaggccctgaggaattacaaaagtcagccgaacagtctttccatgttgccaatatatgctgaaagcacccaggttaccctgggtatgtggtcttcagtctgaacatttgggtgttgtttctcatcaactgaatggcattttcataggctgtttggttttgtctttagcttcttccagaccagctggtcttgcttctggagcatctcttggagcagaagactctgagcccccgaactctgcaaagcctccagaggacataccacctccaggatcaggatgcagaggtaaccaggaacactctcggagtttaaccagcaggtccccactgttgttgaagaatggtgatcccattgcagtcccaaactattgaaaccaccatttctattagcaaaatctcatgtgtttgctgtatgagtgaagaactaagtgctttaatctgattatgcttatgcttctaatcagagtattttgaggtcttaagtttttccctcttcttaaatcataaagatggacataagtctcctaaaggaatgagtggaatgtttttgagttgtaaacttgggtgggtcattgtgcccactgacggtggtgccattctgttgcacattaaggaaacttggctcagatgtgtcagagcttcttggttgcattcagttagggcaggaaaggagccatgtgtaaagggaatgaaaactaaatctagcagctgtagttggaaaaggcaattggatgcttgcgagaaagcaatgtgatatagtccttaatatcttctaccttattgtgaggaatgcagtgtgaatcctaagacaaattccagggttttaaaaaaatacaaaatagtaaataatgtattcagacatcttaagtaaaaacaagagcttaaacagaaaacctcttttatataagactcccaaaatgcagaaagtaagtttggttttgaacattttaaaactgtgcagtctagtacagcagccattagccatgtgtggctgttaaacacttaaatgcagctattttgagttgagatgtgctgtaagtataaaatgcacaatgaatagtgaagacactggaatgaagaaagacaaaataacttaatgtgtcccaattgattatagtgttagtgatatttgggatatattaggttaaatattattgtaatgaattttataatcattaaaatggagt

SEQ ID NO: 133938 - DNA, 1433 bp, Homo sapiens
atagcaccagtgttattaaataaaagagcctatttggaggaaaataagaagcattccaggttttcaaaagtagttaagatttgtctaagaccacacaggtgaagcaaggttgcctcttttatcatacttgacgtttgtatttgacatcaatatttgatgtttgtcatcacacttgaccctcaccatgatctccatgtgcatgtcgagtgtgatggccctggtagcagttgagcagcacattgctgctgctttagctctaaccagttaaggtgtagacaagagctgtaggaattgactccagcaagggtggtaagagcctccagtgcttcatttgtcctcttaaccctgtgcctaggaatttactaacctggctttgcggtagcaaataaagtaacttttaatttcctttagtttaaaaaataacattcagattgcagcccttcagaaataaggagcagaaaaggtgagagagaaaagaaaagaatgaaaacacaaatgtggacagccctgatgtgatcaccacacagtgaaaggttcttttcctctttccatgggactgagcaggtagacggcctccacctgtccagaagcccctggggcagtcccccactggaatgccgtttgccctgtggctactctgcagaggccccccttaccagccagtcagcccactgtaaagtcaagttaaatctaatttaaggacacaaattgacaaagcaggtttgtttattgcagggtagacttattaacttagaagagccatgagccctggtctttctgtttacagaaataaaatggaactctaaatgaggtttaatgggcttcccagatcatgttccctggacagattttttttttccttcttcaacagtaaatttgaaaatcaaaaggactaaaaataaaggggagtgcttcctgttataaataggactggtggcattcttcaaagcattttatagcctctaactgtgcattataatttcagagtggctgaaaagcattccaagttttcaagtggtacgtttactcagaagcatttatcaagcatgtactatgtgctgggcattgcgacaggcccaaagatggcccagaggcccatgcatgccccagacttgcatgatgctgtaaataaatacatcagactagcggagaaggacacggcagtgcagagagcagtgggagctggaaaggctgcaagcccaactctgagagtggccggtgggggcacactgggagctgatctctgggctgcagaggtgaactaggagatgtggacgcgtcagatcactcaagtgaacctgggtctgctggatgagctgtggccacagcaatgccatctagtgtcacagcagatttccttgtaccctctgtctgctggctccagcatagctttcttgttaaaaggctaaaggctactaggacacacttgagac

SEQ ID NO: 133939 - DNA, 1013 bp, Homo sapiens
aaagtgaatttgacatgaatggctagaatttcatgtacattgggttccgtatttatgtatagtcatctgcttataatttttaaatgtttaaaaataaagcaaggaaagcagctaccaaaaggagccatacgtgcttttctaagcatggtgacgagcatgcaccaaactgaatcctggctccaggattgccgtggaagagacaatgaggccattcctgtctttggtcttgatggtttttggtggtggcaccgcagctcttggaaccaagttgggtatactggctgagttcttaagagctcatctgctctgtctcgtgcctgtagccatgtctgctcaggcccttgtgaatgatgtttatttttcaggcagagtaatttttctgtaagacactggttttcagactctgtctccagtattggggtactctaaagacacagtgcccctttttaatgagtctgattcaagatgaatgccagaccatgtttccttgtacagaggaatttgacctgcagagggaagaataaggcccagggtgtcaggactagcattaaggagcacctctgattttctggtggagtcgtgctaaagctggcccaaacccactcgggccgttgttcaccttttgcctcatctctgtgttcagtgacatcatgttggtggatgttgggggatgaacaccagtacaccactgtgtatgttgtgctctgggagccatagcttgggcacccattctagagcaaggatcagccaaccccagcctgagcctgtgcagcccattgcctgttcttgtaaataacgttttatccaaaggcagccatgccatgcccacgtatttacatgttgtctaaggctgctttgaccaaaaggccaaaagtgctcaatatctggctcttgaaggaaaaaatttgccagcctctcttctggagtttaccaggaatctggttctggacacatgaagatatcttgggttaaaaagagattaggggccaggcttatgtttgtaatcccagcac

SEQ ID NO: 133940 - DNA, 1044 bp, Homo sapiens
gggattacaggcgggagcccccgcgcccggcctgctgggattacaggcgggagccaccgcgccggcctcttctttctttttttaaaatgctgactggtgacctactagatggatttcataacccactgtgtcttgactcccggacagtgtgaaaacctacatacaagctcggcttccagagcctgatgctccaggctggaccctcgtcggctcaggcaagctgctctaaccaggccccactccagctccagctccccaagatgggggttagaagagcgtcaacatgcagggagggccacagacaggctgggctggcatgaggtaggaggtaggaaccacatggctgagcaagagcctgggccaggtcagagactcgcagcaggacagcagagggagcaggggagtcccaggagtagtaagggcctgggaagagctacagcttttcaggccatctcctgggagggagacccagggacaggcacctgggaatcctgcaaaccatttgtaaagatggctcccttagccttgccccagcctcagccccagccagactccacttctgcctttacaggaaacttatcacacactacccaagaggttccatggagctgaactctggaaggctcagaaacacagtggagggggaagcctgctcttctgacttcctgcaatgctagaaaaatggcacatgcctagaagggccatttagaaaccacatcttggatttgggacacaggtcccgtgacaacgggcatgtctatgatataacaataattttaactaggatatggtaaaggggcctcacccttatttgattgctttttttcttggaaataggaaagctgctgaagcttcctcacaacttgaaccactctaatctcttttttaaaataatattttttaagacagagtctcactctgtcgctcagtctggagtgcaatggcatgatcatggcacactgcagcttccaaatcctgggatcaagtgatcctcccacctcagcctccccagtagctgggactacaggtgcatgccactatgcc

SEQ ID NO: 133941 - DNA, 2216 bp, Homo sapiens
ggtggctcccgcctgtaatcccagcaggccgggcgcgggggctcccgcctgtaatcccagaaggctgggcgcagtggctcacacctgtaatcccagcaggccgggcgcggtggctcacacctgtaatgccaccactttgggaggctgaggtgggtggaccatttgaggtcaggagttcaagaccagcctggccaacatggtgaaaccccatctctactaaaaatacaaaaaaattagccaggcgtggtggcacatgtctgtgttgccagctacttgggaggctgaggcaggagaatcgcttgaacctgggaggcagaggttgcagtgagccgagatcgcgtcactgtactccagcctggcaacaaagtgagactcggtctcaaaaaacaaaaaacaaagaataaaaataccagactgcattgcgtgtagtgaaggaaagtgttgggaaataacactttgatttcagtgtgtgtctatatgttctacatatacacatttgtggatacgtatgcacacatagatatgcatacgtgtttgtactgaccatcactctgccccgcaccatttcccagtgcctgtcatgcagttggctgccatgaatgtgcttggaatcagtgagccccatcctcatagccagtgcctgtgtgtgtgcttccttccacgtgctttttggatacccaggttgcatgtctgcttgggcctcctaggtggctcaggcctgtaccacagacataccccgtcctccctgtggcagtctgtcagtggggtagggtccacaatcctggaaccattacttggattccttgaggattttaattctctactgccagatatgtgtctgatgtgaattggcttccacatacctgcccttcattcttcccaccctagattccaagaccctcccacctgcacccagcctcaaagaagcagttgtgtggagcactcttaggagaagctgaaatctttgctgtcattaccctgtattcatggaggctttggaaacccggaaagtgctgaatccctttccaacagtataaattgcgcctctgtgttaccccgacctgtacgctaagtgagggcagcactgtcattgtttctgttgagcatgtcccgtaagcagaacactttgaacagcagatgtccaaagtaatttttattggactaaagcattcaagggtgcacacctgtgtgttgtgcaaaagtcaacttcactgtgatgacatggaaaggatccagagacccagatgccacttcttcttgcgagagctgtgctgatttatttcatatgtgagctctcgcccacttccggcaggtcaggaggccagccaggcccaggccgcacctgctcttccccctcccaggccacctgcttgtctgctgcccagcgtcagcaccggcagcggcagagggaagagatgagcacatccttgataggtgaggtgttgggtgcttgagaggctggatccagggcagaggtgtgggtgctgcaggtgtccaggaccctgtgctcactgccacgggcagctctgttctcacttctccgtgccctgtccctgtttcccttctgccgtcttgttctttctctacttgcccagtctccttccctcccacaccaacttcatcattttcctccctcgcccctttggtcatggtctgcggtctgggtctgtgtagggctgaaatacatgctgactctaggctctcaggtgattcctggcatagatttggagtgacttgatgaattttaatcacagttttaaaggtcattaaatttttcaactatattgacaatagaaatataataaaatgtgaatatttgaagtgtaccatttgattacttttggcatatgtacccatgaaacattaaacatcaatgaagagaactgagaagccagataactgtatgcaattaagaaatacaagcaaaaccgccatgaacaaagtcagacagattgacaaacctggaaaaagctgcagtttcatcaaagatgagctaattttcctagtactcaaaaacactcaacagattaactagaaaaagccagtgatccaataggaaaaacatggtaaagaatatgaatagacagttactagaaaggattttatgcacatgaaaaaaatgctcggacatggtggctcacacctataatcccaacactttcggaagcttaaggtgggaagatggcttgagcccaggagtttgagaccagcctggg

SEQ ID NO: 133942 - DNA, 1084 bp, Homo sapiens
ttggggttttgagtacaaggaggagacagggattgcagactgcagcttccaaaagcacagtcagcccacggcctctgtcttctctggggtctttgcaatttctagaccagcaagtgtgtgtggaacaagcacagactgagctcatgtgtgcgtgtgtgtgggtacccacaccttcgcctgatgccctttggcctctgtgccctgcaggccatgggtgtgtacctctacggggagctgatggtgagtgaggacgccagacagcagcagctcgcccgtaggtgcttcgagcggaccaaggagcagatggataggtcctcagcccaggtggtggccgaaatgttattttaacgaggtgattctctccctttcctttctgtcatttagttctaaccagatactccttttaggagccaactaaatcagtaagccgaatagttagccaagactacccgcagcatcaatagtcggctccctggcccagggcctggagagtaactggccaagtgggtgctgggctggtatgggagccccgggtccctggagcaccttgcctggctgtggcagtcaccgggaagcagaggctgtccacctggaggcacagcggcactccttggcactattttggccacttcaggttttataatctgttgaaacaaaaattgtgggggaacatcttgagtaggtttagagatggaatgggaagcctggcagaagcgctggtccagtcttcagggtcacggctgatacaggagtttaagcggccgtgtgactccaaagcctagcttctgcaagcagatgttttcttctagccatgtgtgaattggaggttccttgggctgtccacgcctggtcatcggctggcaggaggctctccaggcacacgcagcacacacagcacatgcaccacacgtagcacacacactgcatgcagcacacacacaccagaggacgcaccacacagagcacgcacagcacacaccacacagcgcacgcaccacacagagcacacgcggcacacacagcacacacagcgcacgcaccacgcagagcacacacggcacatgcagcatacacaccaaacagc

SEQ ID NO: 133943 - DNA, 1036 bp, Homo sapiens
gtgaggtaagtgcacagtctgtgtgccgccagcccgtcctggaggggagccgcgtcaagtctgcagcaggcgtttcgctacgagacgctcagtcccgtttccctttcctggcacacatggttcctgactcttctggaagaatatgatcatgcttctgaaaaactttttatttcttttcattattagagttctttcagataaataagctacttaaacacgttacacagaaatggttttcataagcacaaaacattagaagaaaactcaatgttcaaaactgagtgaagaatatcaacaccaaatattcaatatccatgaaaaattatagagaagctataacacgaaaaatgcttcagatttgataaagtttttttaaagatacaaaattagacatcccctattaatatcatataaaacactgaagaaaaacggagcagacacagaaataatgatgattgttagagaaaaaaaatctcacagctatcctaacaaaaccttgtgtactaccgctaggttgctttaatagtgtagaaacccatactgagcaactaactgctaggaagtaaatctaacaggttaattccaggcacaattaacagaggaagtgatttaaataatctaggactccaatagaagccaggggagaaattccgctccaacacaacaaagcaaaaagtaggacctgccctcaagacacagggtcatggaggccatatgccacgtgtgctgtgtgcgccgcgggtgctgtgtggtgcgtgcactgtgtgtgccacatgtgctctgtgtggtgcgtgcggtgtgtgctgtgtgtgccgcaggtgctctgtgtggtgcacgcgctgtgtgtggtgtgtgtgctgcatgcagtgtgcgcgctacgtgtggtgcatgtgctgtgtgtgctctgtgttgtgcatgcgctgtgtgtggtgtgtgtgccgcgtgtactctgcgtggtgtgtgtgctgtgggtgctccaggtgctctgtgtggtgtgtgtgctgcgtgtgccgcgtgtgctctgtgtggtgcgtgc

SEQ ID NO: 133944 - DNA, 2036 bp, Homo sapiens
ggaaacgggactgagcgtctcgtagcgaaacgcctgctgcagacttgacgcggctcccctccaggacgggctggcggcacacagactgtgcacttacctcactgccggcctcataatagtaatcagtgtaaatggtgtttctctttcgttttgttatttcgtggcgtacgtgttaaagtgtgtgaaactacaaggccagctagtcctttcatcattccctttggtgcaggttttggagcagcaccacagggcacacccctcgccactctttatggggaatttttgcccaggcaggcaaaggagtcatcttggtcacaagtctcccttttccccctccccagcatcttcgatcctgtccccacccctccagatgcatccaggggttgcaagcctgccccccaaccagtccccgtgaggaacagtggccgggattgtcccagggccccttccagcagggggacctcctgacttgagagtccccaaagccttcccagggcagctagaatctgcctggagagaagggatcttgtccccaagggttagaggcagtaaactaatagcaaggacagctgcctttagcaattgtgtgtgtcgcatggccggtccctgcatttttcttcagttccaaagctgcactggcatttttatggtcatctctggagtccctttgattcaagaaattatacctctaggatgccaactaaacgaacaacaaacagaaactccacctgtttgctagcataacaggcgtgaaggcggcagtgtcgccggcgtccttccgcggaagcccagtgtgtgcagacagcacggggtggcgctgctctcaggtgctctggctgcttgggttcctggcatgctgatttgtgacttaagattaaaatcacattgccagggattaccacgcaaccacgaccttggctgctcctccagaaaccgtggtcgcgctcactgcagattggagaacaggtgcatctcgtagctcttctttggaaacaaaagaagccaccagctgaggaagatgctcaccggtcaccgtccctttatttatgcccagcgatgacctctctaacaaggtgcagagcttagctgattggtgaacagtgattggtttccgctttgttcacagtggctaagttctgcacctgaagagaaggtgagatggggacagttaagttggagccgctggggcagaggccgttgctgacgggccggccgctgctgcacagtcagcttgggtgcggagcgcgatcctggaggatgagagaccacttgaccccaaggatgcactgtctcctgctgggaatgctagccatgtactgagtccttaagtctgtccacagaaacatgcactaatcggacatctgtctgaaaggtcaaatgtattgaaagttgcaaaaattcttcttacaaaaaactaaaaccaaatgcatcacctaagtcgtgtgaaatcatgtggtagctcatggctgtgagcggggcggggcggggctttcggaggagctcctgttgttctgggcgcggtgaactctctcttgtatttgcagtccaggccttcgcgtctcctgcgccagcagacggtgcccacggagctcccagctgaggcgctgcttctccgggctgtcgattggacccgccctccggtgcctactgagctgatatcagttctcattttacacactggctcagttcagcaggaacaggagtcgagcccttgagcaaaaagccttcgtgtctgtaagtgcccgaggctcaggagagctggggctcccactcgcggcagacaggcccgcgtccaccctgcgtccaccccggcccggcggcagcacggtgccagtcatctgcatgtgctcctgcggcgtgggggtttgtagacttggaaaaccctgttggcagaaagttaagagctcccaggcctgaaggcaggacacagtgccagcagggggccgtttgcccccatgtgtaagggaggcagggcccagctctcccacggcgaggtgagctgagactttctgagaacagttagagtgggtgcgtgt

SEQ ID NO: 133945 - DNA, 1917 bp, Homo sapiens
ataatgcatggaagcgaaaccaggtacacacacattattttcctactttgctgggtggatggacgaggccattttaccctttgagcagcttcgtctccacttgtgaaagcaaaatgttgatgttgcgtgtccaggcatacaatacaaaaatatttgtacagagtatgcaagcctgtgtggaagggatttgcattgcttaataatttaagaaccaagaaagagagctctgcacgttgcaattttaaagaaaatataacagggagcgacaaatttatcctgttttcacacaaggactgaaatctgatgagttgagatactgctgaagcttatggcacaaaaaaagtgtttctacttttcccttatacagtgcaggttttcatgtttgccggattacttgttaaacgtgttctgatctgactttgcattgttcaggtgtgcactcctggaaaccgatggggccctggaaatcatagccactattcaggtgtttacgcagtgctttgtagaagctctggagaaagcaagcaagcaggtttgttatatcacatatattactcattcatcccagagaataagacgctgttgagagtattttggacaagagcactttattttcaataattttgatggactgttttgctcacaaagaaaggttcctaatgagtgccccaacaaaggttaagccattttaacttaacataaatcaagatctgtctgccccgtgccctgatacccagaagcatctgtctactattatgtctgagaactctgtcatgccagcatgcatggccctggaggacggctcttcttggccctgtgttgtgcactgtctgccgagcaggacactgccccctggctgcatctgagcctcccaggtcagcaggaggcaccctggggtctatatggcatgtgatgaataggaaagggcacttattacaaagcactcctggacattcttaattattagcatcttcattcttatcagagacccaaatgtgaattggcttccaggaaaggaggtggtaagagtgactgggaaaggcttgactaactagaaggggagtgaggaagggcagtgagcgggaggtgtgtgttagacacagtcagtaaaccaaaggccaggcccgcaccctgcagaagattgtgctccacgtccccagcagcagaggctgggcaacagctgccaagagtcaatgaccaattagagggacctcgtgaaacagggacctttgctaccagcgagctttcacctttcagcatatatatttggccttgatttctaacggccacagaagtaatgtttatgggacacattgcctgtcgagagtggtgctggtccagtgcatctcatctgtagagtatgtcacggcccctgtgaagctctccgcagtttgacttccgagaggagaactacaatgcttggctccaccagatcacaccccccgccaacgtcaaatagatctctcaggttttagccgatatttctacttttttttttttttttttttttttttgagacaaggttttactctgtcacccaggctggagtgcagtgatgtgatctcagtttactgcagtctcaaccccccaagctcaggtgatcctcacacttcagcccctgcgtgtagctgggaccacaggtgcatgtcaccactcatggctactttttgtattttttaattaagtacaatttccattttatttttctcaagagaatagtccgtcttcagactttaaggactcaactccttacgtgggctttggtgggggttgtggggcagcatccgcaggtctaaattggagtaggggtgttcagtccttgtgggcttcacaagatcgattcctgactactttgctgtgaattgcacaactcagacagtaatgtagcttcaaatacagcttgggaagcacataggc

SEQ ID NO: 133946 - DNA, 1231 bp, Homo sapiens
gttatgtacccattaccgaataaacaggctgcaggcacgggcctgacctcgaggcacatctagccatttgaggaggtcacacaggcacacttcagtagaactggcagtacaggcaggctccacggcatgcgggcagagggatgtttaaagtttctctaatacttactgattctgtattatggatcgcctgagcttttatagaaaatgtgggacatacaggagtatacagaggaataagctgcctgtaacccctgcccagggagaccaccgtatgcacttgtatgtggggcgttttcagtacagcagtggttcgttcttctaaccaaaaggagtatgccagttttctggacatcagcagttcccagtaactcctttggctgataatagcaagtttctgagaaagtgcttgtgatatttcacattctcatggtcttctccttttacagcctcaagcagcctgccaccctgccatattccgggttgttgatgagatgttcaggtaaacgttacactgtttcttctagtaattgatgtaaaaaaggttccatttccaagcatgaatcagaaaatgttgtggtagtctctggctgtatcatggggaaattagagtttctgattccctcctgttcctctgagctttttggtaattagaggtaaaaactcaaaaatcagtgtaaatttaaaggccagtgcctaagaattaagataactttattttctttagccttttaagattctaataatagaaacacagaattgagttaggcattaatatcatgaaatattcatgtaggatttttctcagctcagaataaagggtagcaatatactcccttcaccatgtgagggctgaccaatatttttaaaagactttaaagctaaagaaagccaagaaaaataaaagtcattcttaacagaactcttctgaaaggcaaaatacaccatgcatgttctcttacaacacattacatttttattttgaaaatatgagtacttcttgggaaatgcattagatttacagacggcaagagacgaggagctcacagccatgaagctgagatgtggctggcagttagtgggagttttaaccatggagtactaagttagtgggagtactaaccatggagtactaagactggacgcccctggggagcttgtcacctgggagtgtcccagcccctcttccaggggagcccatatcagctctctctctagcccctcccacctaaca

SEQ ID NO: 133947 - DNA, 1293 bp, Homo sapiens
gttcatggtgcagagtgacaagttggcctctcccttgcctctcttccaaaacaggcactgagaccatggttattgtgtgttgattccatgttgactttgtcttcccttgtgttttgagggatgaagatgggctttctttctaggtggaggggagataaacaatgcaattctgggtagccatgaggggagatcagagggaaagctcttgttagcccaaggggatgcacacccagcagaacaatcgggtctatacaagagggagggcagaacccagagctctccatcttcgctccctagtcatcctgggcattcagtgaaaagcctgaggggggagataaggagggaaggacaagactcatgttattgaagacctcctgctgacatagctcccctcgagttgaaatgatctgcctgtggaaattgttaggccagatggagaagagagagcttgagaaggaacagattttggtaggatggagaaaaacaaacagatggaaaccacaaaaggtttattttatttccccgcttttatagaaaagataatggccgcagtcatggggcttcagagccctggcttgcagcgtgacctctggtgtgttaccggagtgccccaccttacaaataaaacaggatcagaggttagatgcctgcgtcatcactcatgaagatgctacagagatttaggggggaagatacggcttccaaagaagcgtgtattaaaaccttaattctatttggaagattatcttgataagaaaagcagcttaagattgcttttgtgatttgatgtcgctgggacatatgcctgacctgtagtactctagtcctcatgaggggactcactgaccctgaaattatgtgctcaaaaagtataaagagtgtcattttaaaagccatcggtgaggggtgcagatgagaaggagcagttcacagctgtaggggtagcaagggagactggttttcttttttttcagtgaggtcaggagatcgagaccatcctggccaacacggtgaaaccccatctctactaaaaatacaaaaattagccaggtgtggtggcacgtgcctgtaatcccagctactcaggaggctaaggcaggagaatcttttgaacccaggagttggaggttgcagtgagccaagatcaccactgcactccagcctggcaacagaatgagaccctgtctcaaaaaaaaaaaaaaggagactggttttcaaatcaaaatctctgccgttgctgtttctgcaggttcccctgcctcctggcctcttacctgttttaaaagctaaaat

SEQ ID NO: 133948 - DNA, 1107 bp, Homo sapiens
accatgccaggctaatttaaaaaaaaaatttttttttgtagaagcagggcctcactatttgaccaggctggtcttgaactcctgggctcaagtgatccttctacctcagtctctcaaagtgttgggattataggtgtgagccactgcatctggccttgaaattgttagaaatattttcaactttcaagcaaccgattataattagttattggatatttatgtgccaagcactgtgctaatcactgtacgtgtgttgttgcattacaagaacactgtgaaggagataggcccattttacagatgaataaactgaggttaacttctctgagatcatacagttagtaggcagtggcgctgggaccgaaacccaggtccgcatccctattgtgaggcatgattacgcgtgtttgaacatgcctatttcttcagttagggactgggcatcacgaggccttttccatcccgttttttatcgctccctctttcttccatcactagacatttgcttattctttttgaaagcaatttttttcctgagcatttctgatttcttaaggtgagttgaagtggaagcatattcacattattttgcaaatgagcacttggtaaatattcactgattctataaattattagccactgctgtgaccatgatgagaagtctcacaaattggattagtgattgcattttgaactttttttaatcttcttttttcagtgagccatttctgtttaaaattttgtttatttctttctgaaaggaagaagatttctctccccatgtcagctgtagtctgcctctggcttcggcaccttcccagccttgaaaaagcaatgctgcatctttttgaaaagctaatctccagtgagagaaattgtctgagaaggatcgaatgctttataaaagattcatcgctggtacgtactgggttttgatgaagggaaaaatccttgaaggagatgcttggaatcatttcttttagtcagagaatgaaagggggggatgtaaacaaaagagcaattggaacctttatatataatcgtgtatttacattttatttttgaaatcactaacatagggggcttttctgcatccttggagcatgc

SEQ ID NO: 133949 - DNA, 1040 bp, Homo sapiens
gagggcctggaagctcagaactttcccccaggcctggccccatgcatctcttccatgtggctgttcctgaattgtatctttcagaataaattggtaatggcaagtaaagtgtcttcctgagttctgtgagccattctagcaaattatcaaacctgaagagaggatcattggaacctctgattttatagctagttggtcagaagaatgagaggcctagacctgtgattggcatctgaagtgggggcagtcttgtgggactgagcccttaacctgtggggtgtgtgctaatgccagatggtgtcagaattgaatcactggacacccagttggtgtctagagagttgggagcattggtttgtgtggaggaagaaaatccacacagtgagtgtgagaagtgctctgtgagtaaaaacagcttctaagtagtgggagtgactgacatacgagtctctgaccactctaacactcgcagctcggggtggctctgagtgttaaatagggtggccatatgatttaaaatctagaccatgccacttctgagagttaaaagagatcccttttataagtatagtgggataacagaaataaacttacaaactaggacaaatacttacactaagatttaaatgggttgaatgactgtaatattcttagcacagtgcctcgtatccacagtaaataccccgtaaccattagcgtctacagccactccaccctaaatgtgcccagtcttgcctgatctcagaagctgaggggggttgggcctggggattagcgggtgctgtaggctttaaaaaataaaaataaaaagacaggcacagtggcacacacctgtaatcccagctactcaggaggccaaagcaggagaatcacttgaggccaggagttcaagtccagcctgggcaatgtagcaagaccctggctctaaaaaataaaaactgttggtggccgggcacggtggctcacacctgtaatcccagcactttggaaggctgaggcaggtggatcacctgaggtcaggaatttaagaccagcctggc

SEQ ID NO: 133950 - DNA, 1096 bp, Homo sapiens
agtggacagagaacttcagatatgtagtagaaagttatgtggtattatgatacctattttaattgttattattaatgacagcaaaaattatgatggctgcagcgtggttgacagctgttttgcaaaggttatcatggtgtcagagatgttacctgatttcattaaaccggcttctacttgagatagaagaatacacttggcagaatttataattcactggagaactgtggacttgaaaagttttgttctcacacaagcttttaagaatccaagttaaaattttatgaatggtgatcacaaaagcttctaaaagggctcaaaaagcatgttacgcatcaaattgctttttaaattcaatcttctgataggtataaatgaactcagtccaagagattgaattatcttaaaaactatatataagggctcaacacattcagaaaagtacctggacaaatttatctggttgaattataaaattctttaaagaaaagattctaaacatcattcagtagagcaaattaggaatgtatcggatgtgttggtttacagggagcactctgctagcacaggcatctcatattcttagtaaattcagttaagaattttactgattgtatcatagctttgctttgactaggaatatcctgaactgctaactaaattaattccaattttatccttgctactcctgccagctgggatgccagcatggacatccttcagtggacttcgctctgtgccagggaatttgttcatattacttttgaaaaacaagcattcttaacaacaacaacaacaccaaaaaccaattataaactagagaataaacctcttccaaagtggcacaatctggcacaaaggcaaatttttaatctataaaagttgtttcagccttggcacagtggctcactcctgtaatcccagcaatttgggaggccagggtgggaggattgcttgaacccaggagtttgagaccagcctgggcaacatggagaaaccccatatctacaaaaaaaaaaaaaacccaaaaaaagccagatgtggtggcaagcacctgtaatcccagctactagggaggctgaggtgggagcatcgc

SEQ ID NO: 133951 - DNA, 1124 bp, Homo sapiens
atttctggagctcgagtgatcctcctgcctcagcctcctgagtagctgggaccacagatgtgcaccaccatgcccagctaatttttttgtattttttatagaggtgggatttctctgtgttgcccaggctagtctcgaactcctgggctcaagtgatctgcccgtctcggccttccaaagtgctgtgattataggtgtgagccaccgtgcctggcccctttgtaaacattttagtggcttacagtgagccactatataagcatattaatcattctctgctgttagacaatttttactatatgagaaataaccactatagtgaacatcttcgagcatagttcctgtcatcatatttgcatttatttccttaaatgtatgccacatatatcaaaggttctgaatattttgaagacatttaatatatttttttcaagttgctttctataaggcagggcctctgttagcccgtaatcggtctttgttcaggtgacaaacctctaggcagacacacccctggaagtccaagcttcatgatgggttccgggctgtgttgcctctgctcacactttgggcgcctcggtgccattcacaactgcactctgtatggaagaccctatttctattcctccaggagctcacacagagtacatgtttcatagaaccccatacagcttagctattcatgtctgtaaaaaacttgaattcattaagtgaaagtgccatacaggtgttttaccctaccctttttgattatggaggatgaacattcatttatgtgtttcttagctatttgtattttatgaattatctattcatattcattgttatgctcttagtgtttgtcgtatattttgtacattaatttgataatatagaatctgtactgtttgttgttaacattcttcttagtttgtgctcatattatttttctggtaaacacaagattttatttttattgagcacagccaagcctcttccctgatgatttactcccaggattttcagttctcagagttctttctcattcagatacttgaaaaatgttcatgttttcttcttgtgtattatttcatttttacatttatctctttgatttacattaaactggagtatattttgatgaa

SEQ ID NO: 133952 - DNA, 2012 bp, Homo sapiens
caggacatggggggtgtgcgtgtgcaggtgagcttgtaaattggttaaattggttggtggtgagatgagtgagtttcttgctaattgctattttctcaactacatatgagatgagctcctcaccaggacttttggggaaggggtggtggtgtgatgagagaggaagcaggaaataattactcaggaagtggccaagcaaaatgaccaaggatgcataagaagattgtgaggcactgctgagccccttcccttcaagggttgtggtcagaaatccaagccaacgctgtcagctcagttgtctgatattctccagcagtgttcagctgtgtgggcaccaggaagaaaagctgcagcatggattcacaagggccaaggttttacacagcaagtaccactggactttagaaaagggggcaagccagggagatgagggtgttttcaaagggatgattatttaagcctggcagaatatttatcaaatgcatgatctgctcctagtgaatgtatttagtaaagcacacatttccaggtctgtgtatctacatatttctgtatacattcttatagatacggtttaatgccatggtttcattcaggcttattttctaaagccttttggttttggtttttgggaagcctactctatttccccccccggaactaatgagcgagcaagcaagaggttctgtaagcaaaagtaaaagctgcagactttgttatggttggacctgtgtgtggaaattctgtgaattgtgttctgtcagcatcctgctcacggaataggctatgtaaacaacgggcgctgggagggtctgtgaatgagcagccttccttcccactcacagacttaaccactgcaattctccaggtttctgagtgtttatttcatagtaaaaagggctctaaaaataccagggcagttaggtttttattgtagatcatttcacttaaactgcaatgggacatataaattttaaaaagggaaaaaaaaaacattgaaggcaggattttgaagcaaaagctacagaaatgtgtctgcagtaatttgttttggctgtggatgtaaaactgcaaaagggatgggaataaatttgttccatttttttaagttagagcaattggcgtatttaattgatattcacagtatttgaatagcatcccagaatgcacaaataatatgctatcatgagaaaattacatatactgagatgtaaatgaaaggaaattctttttttgaacttaaaatatcatttgtaacttatgtgtaattttttaattaaaaatcatagggcacatcatactgtaagtttgagtatgcagagtgaaatgagaaaaggattcaggcagattaggcttgaggacaggaggcaaagccccaagagtcagtccaggtagggattataaatggcagggttcgggaggagtggacataaaaatgcgagagaacaggaaactgcaggaagtaacagttagtgggaaacaaagagagaagttactgagaaaacagacacaaacactgacgtgtttcggactgccatgtgaccaccactgaaggatgataaggtttactgagtaggaagatttgaaattatggacaggagcaatatgtaccaaggaaagcaaatattttgcttttcactggatggaaatttctcccttctaggaactcctgaccttctttatgggaccaagcagtgtaagttgtaggcttgtggttccttctgacttcttgtgtcttctccctaggggcaatgatggtgctggggtgtgatgttttcagtatgaagttgtgcttggaggcagtggcaagagccagtgggagcttttcatggagcaggctgcattaacccacgcgctgtgtgcctcctgaagctgtggcagtagtggcgtgacacctgccttcctgggagcctgggaagaaccccaggaagagacagtgaagattgcatctcttgtgggagatagaaaagagttcagtttagtattggcagtgataaatgcttgctgtgtag

SEQ ID NO: 133953 - DNA, 1073 bp, Homo sapiens
aatgagcttattaggctgttttttgagtgctgccaaacacctaattgattttttcagttttcttccaagattatagttgtcaagaaccatctgccttatatattacattaaatgggttaaagctgcaaatgcttctttaagcaaaatataagtgtgtatcttatagaaagtaatgcaatatcaccagtctgaggtttggagtgtattaaggtacttggtttctggaaatctttttaagcttggaaacctttaaacctgcgacttaaaaaaggatctacagctatctaagtaggtggccttctgtgtcttggctagttttagagtgtggtgtttgtttcttacgcaaaaaggaacaaatttaaatcactaggtactcaaccaacagatttcagtgtggattagttaagaaataattgtagttcttgtgtggtggcacaaatttttttccctacattttgtttatgcagactgtctttttttccttcatccttttctttttttcactgaaaaaggaaatcgcaattttgttagtggattgctttgaagaaaatacggagggaaagagagaaccagacttgacttgtgattacttttcatgagtgtggataagtgtgggcttcaagacttgccaggccttcaattctttggcttgctttttttcttaacatttccaaaggttttgttagtgactttcaaatggaacttcacgccttggaacagttccattaaaaagttgtgtggtgttagccacagtagcagcatggtttatttttcctgtactagtttcacagaggttaactgagctggaaatgatgagagactagcagtgcaagcgggtgggtgtgtgctatgtgtatgctttttccctcttgatttgtgcaaaaaaaaaaattttttttattggcattaacgtgtacttcaaatgttgtttaaaaaggaagcaagtcaaattatcctaaaatgctttatactacattgttgaaaactttcaaaaatgttctcttttgttaattgtatttttacattgcatagtaccagcccacatttataaaaggcaattcattatagagatt

SEQ ID NO: 133954 - DNA, 1092 bp, Homo sapiens
ggagcaggccagagtggaagtaggttattgcagtaggccaggcaaggggttatgagggcttgaaccagagtgattaccttggaatggagggaagcagatgaattggagattttgtctggaaatataatcaatagatattgatggtgtattttataaagggggccggatgagaaagaacatcaaggagactcccaggattttacatcaagttgccatttactgaaatgagaactgctcccaacagatagacatattttattttgttttaattcatacatgggcttttaaaaagaataaactttattttttaaagcagttttaggtttgcagcaaaattgagtggaaggtacaggtatttcccatatctacccattcctacacatgcacagcctcccctgttatcaacagtcccctccagagggatgcattggtcacaactgatgaacctgtcctgacacatcgttatcattcagagtctgtagttgacattagggctcactctgggtagtgtacattctatgggtttgggcaaatgtgcaatgacacatatccaccattacagtatcatacagcgtagtttcactgccctagaaattattcgtgctctccctgttcattcccctcttctccctaatccctagcagccagtgatctttttactgtatccacattttttccttccccagaatgtcctgtagttggaatcatagattatctagccatttcagattggcttctttcatttagtaatatcatttagtagctcatttttaaagtgcaaaataacattccattgtctggatatattacagcttatccattcacctaccgaaggtcatcttggttgctttcaagttttggaattatgagtaaaacatctgtgtttactaaaacacagatgctaaaaacatctgtgtgcaggtgtttgtggggacacaagttttcaactcttttgggtaaatatcaaggagtatgataggtggagaatatggtaagggtatgcttagttttataagaaactgccaaaatgtcttccaaagtggctgcaccatttttcatccccatcagcagcggatgagagttcctgttgtt

SEQ ID NO: 133955 - DNA, 1034 bp, Homo sapiens
gttttaattttgtttggaagttttgttttattttgtttttttcattttatttacatggagttctgcttattataattctaattgtatcagattgtttcttagtgatttgccagtgctcagatgggccagatcaagacatctattgccaattaggaacaggatgtttatggtatttactgatgttctccggatgacctgttttatgttttcagtttgttttgttttatgatcatgttggcttttccattaaactataactttaactgagttggcttagttagtaaaacattgaccagctccccttctctatcctccaggccccttctgatgcctcttcccctattgtgccccagcctcagtctgaagggaagcgaatttttaggtctctatgttccagatgtaatctatatttccaagacataagctcactgtatttcaacctaaattgcctgagtaatgctccttggaacatttagggataaatccctgtgaaaagtaaatttaaacagtgacgtctgtagtgggaggtatttcttaatgaatagccactagtgaggatgtgtggatgtctgcactacacgtggctgcctgatcgctacatctgttttgaagttcagtgatttcccagaccacatgttcatttctttagggggctgacatccctcccaggatccagtcattgtgagctggtaactgtaactggcttactctttttgacctagagattattatactttgtcttagtttgactattgttcctatcagatctgacaatattggagtttctataaattagcagcatggcagaggaaccaagtgtatttaaacccataaatcatgatttccaggtcttttaaaagctgtgtggtttgaatagtactttactctatggtagacataaagagtggttataaaaattctggctaatcaggaggcttttgtagttcagctgaaactacaaaataacctcagatgcgtcactcctttgggaatcagaccatccagatttgtcctggctctgccagtgagatctt

SEQ ID NO: 133956 - DNA, 1050 bp, Homo sapiens
aattaaaagattaaatcacaaatactggctaccaactgcctataaccattaagttgccttagaaaggtcgaaattactaaccatttgaaatgtgaaaaaactgatcatgaaaaaagcccagttctcttagttctttccatcattctcgtttggctttaaaaattgatactgttacagaaaggaaattgaccacacaagagttaagtgatcccaaggccacaagaaggacaaaaccccacaaagttaagtttagggaattctgaaggacagctaggagagcaaagatagagtgagggaaaatattcccatcagcagaaagagaatgtgcaaagtatgatggcgagaaagcaaatgttatattcagggatacttgttctgtgaacttagtagtttgagattttcctaaatataatgtttacagtgtttttatattaatgattttttctgcttgataaaacttattaagttttcctttttgtagatgaaagccaaaaaattctaatatggtgcttatgttgtctaattaacaaagaaccacagaattctggacaatcaaaacttaactcctggatacaggtaagagagtaaatcttgctctgcacttctttgaattaaattgattatttaaaagtgctgcttaaaaaaattttggggtggggtggaatccagttctatgatgttttagaaactttttcaaacatacccttcactgttacattatcttgctgagtaaaaagtttttcaagagatttcaattttgcttgactgtgaattccaaaagataccagtctttaggatgaagacctaatgttgagtggttttgaaaagtttctttcaggtgattaaaataatgtattccatttcactctagcaattgctatccttcaaaaaattgtttttccctatcaacctggtttaaattcctttccacatgcttccatgcctctctcaaaatctattttgtagtgaaatgaaaattcagcagtgcggcgggagcagcactctttattttgtgtcccgaagttggtgcctgagccagcatatgcacag

SEQ ID NO: 133957 - DNA, 1050 bp, Homo sapiens
cagcaccttccatcccaccttccagcaagggtgctagtttctcactctgtcgtttgtgcctctgtttagcccccaacccttctaagacccaaacctacagtttcattgcctgtttttggaccctagcataggaggggctggctgctcatggttttgtcctcggggtcttgcctctttgtgtttctgtctcgtatcgatttcatagaaatgtttattttgtgtgtgtgcttgcctgtatccttttccttttttctttttatgtttcccctctcattgctgtatgtttggagtaaagagaatccatccaaaagtgaatttaccgtgccatcttaactggaagtcacatgggcagagagtttaaaggaaagaaagatacttggttttacatagtactgaaagctaaccacaagaacgcttcctatgtgagctcagtgacccatagcatatagttacttaaactccgtctgaggcttgcaggccccaaaagatgagtgggattaggcaggtgggatttattagggtgctatggttctctacaaaggtttcaccttctatttttcattttggtggtaattttttaaaaattcataattccacacacctaaatgcctgcaattctaactaagtaatgtcttaaaatttcagtgcctggagttgtgtttgtattggtgccaaggagcactgctttaaatatagggagatattataaaagaacagaggtgaaaatgtaaataacgtgtttgagctaagagattgccgttgcacagtggttctgaagaggaaagtgatgcgtgaattaagctgtctccctgcatgtgttagtattggccagtcaacagaacctgcctgtcggtaccaagccctacatggttagtccaaagtgagtttcaatgactgcatcattgatcacgctgaattaattttgtcaatttaaattttactcattttgtagatttgttggtatttaatttgtatattttttatattgtggttgtgtaagagttacaagcataaaggttttactggtttatgtttgttaatatttaacta

SEQ ID NO: 133958 - DNA, 1059 bp, Homo sapiens
gccggctggccatgtcctgttgcacaggttcatgaggagagagtcgtgcctgttgccgcacatgttgttgatggctgtttttctgctgcaacggcagagttcagtagctgcaacacagactatggtctgcagagactatgatatttactatctggccgtaagacacctgccaatccatctctagacaaggtaacataggccagtgctagtcaagtgtggtccacgaatcagcctgccttggaagcttgctagaaaaaccgaatccaacaccacctaactcagaatcttggagtgaggtccaggaatctgctttaacgatctgtcctggtggttgtgatgcaccagcggaggcgatcccgaaattccagctgagtgtggccaggttctatcatttggcttcggctcctgggccagtgcgggccggatctggaaatggcacagagataccgactccactgtgtggtcctttcacaaaacacatgctcctctgtgggtgagcccaggccaggagcttgactgttacgtctgggagtccagagtgaggaactcccttcttagtgctcaccccacagtgagggaggacctggaaggagagtgtgggcccctttcctagaggggagggggagccacgccgggcccttccacggagagggctccctgtcacccacttgactggcttgggcaagtctcttaaaaccccagagcctgtgtgtcctcatctgtaaattaaagagataaatatcccttgaaaacttctgaagggtggcagcagtgatgctggtgacgaggtctggatctcaggggctggccggagtcgtctgagtgagaattggacagccccatcctgaggaccccactccaaaccccagttcaatcaccagctctgcctcagggttcccatcttgaagatgacaagggctccccatagaaacaatgggcgctgctatgggaatagttcatgtttactgagcccctcttgggaggcatttgaggtagcacagtaaattctgaccaaggaataagatgttcaggtaatacactgtcctccttaatactaca

SEQ ID NO: 133959 - DNA, 4401 bp, Homo sapiens
agagcagcccttccgtgaaagagagaaaggccaaccaaataacctgaattgtcctcctcctaccccccgcgacgacgcccgctgagctgcagtgtgaatctggttttgttcagcaggagcctaaaaataggtacaagctgaacgactttgaagttggtcacggtccttttgattgatgtggccactgtgttgctctgtgctttgtatagagacgcagagaccagattcttaacaatcagatggaacaggctgcccgccacagccctccgcagtgacgaaaatgccctctctgctttccaggatgggagccaccggccacacgtggctgtggagcacttgaaatgtggccggggctaccgaggagctggattttggattttagttcattaaaacttaagcaaccacatgtctggagcggctactgtgtttgacagagtaggcagagacagtcctgccagcgtcctgcactcaggccagccagggccgcacacttagcaacttcgggagaggggcagctcagagcctgcagaacctaacagggtcgggggcaggttgtggggggcagcagcttggatgctctgaccacagcccacatttatgggcagcagcagtacgtgtccagccagccgtgtcagagaaagcctggaaacaggattttcaaacaacacgctcctccgccaggtcctggaggttattagaaggacaggcttttcttttgtgggtggaaggcccccattggctccccagggttgactgagtctttggtgaaacccaaggagggaagtgtgggagctgcggggaccatgcccagcctgggataccacccttctaacccaccctcaccctctgcaggtggtccatcccgaatccaggcatcacccaccctcgaacccgagacagcagccccacctggactcagggtccctgcctcccggacggcaaggccagcagccccgcagggacccccccagagaaggcttgtggccacccccctacagaccgcgcagagacgcttttgaaatttctactgaagggcattctggccctagcaatagggcccgctggggccctcgcggggcccgttctcacaaccctcggaacccagcgtccactgccatgggcagctccgtgcccggctactgccagcccatcaccactgtgacggcttctgcctccgtgactgtcgccgtgcacccgccgcctgtccctgggcctgggcggaacccccgagggggactctgcccaggctaccctgagactgaccacggcctgtttgaggacccccacgtgcctttccacgtccggtgtgagaggagggattcgaaggtggaagtcattgagctgcaggacgtggaatgcgaggagaggccccggggaagcagctccaactgaggtgagtgccactgacaagggcagccaagggacctagagccaggcaaagaggaggacaaggttctcctggggttctcggcatccccgaggggctgtggcgctcgggcacatcccacgctggaccccagtgaccttttatccccagagcaaggctgatgtgtccaagctttgtcatccttggggaaccagtccagctccacactgctctcttcccccactgctaacctgcggagggtcggtgcagcgccacaaggacacaaacagcaccaccttttaccaatatttgccagtctttatggaggtgcatgccacagcgaattggtcacatgggaacgcatccgtgtaaccagcccccagatgaagggagaggtcacaagcagcccccagggacacctcaggcccacaccccactctcgtgatttctaataccaaggttactgctgcctgcttttgtactttataaatacggacttgcacacctcttactctgttcaacttccttttttgcttccttttaaagggtgattaaaatctgaagcaaagaggccaaagattggaaaccccccacccccacctctttccagaactgcttgaagagaactggttggagttatggaaaagatgccctgtgccaggacagcagttcattgttactgtaaccgattgtattattttgttaaatatttctataaatatttaagagatgtacacatgtgtaatataggaaggaaggatgtaaagtggtatgatctggggcttctccactcctgccccagagtgtggaggccacagtggggcctctccgtatttgtgcattgggctccgtgccacaaccaagcttcattagtcttaaatttcagcatatgttgctgctgcttaaatattgtataatttacttgtataattctatgcaaatattgcttatgtaataggattattttgtaaaggtttctgtttaaaatattttaaatttgcatatcacaaccctgtggtagtatgaaatgttactgttaactttcaaacacgctatgcgtgataatttttttgtttaatgagcagatatgaagaaagcacgttaatcctggtggcttctctaggtgtcgttgtgtgcggtcctcttgtttggctgtgcgtgtgaacacgtgtgtgagttcaccatgtactgtactgtgattttttttttgtcttgttttgtttctctacactgtctgtaacctgtagtaggctctgacctagtcaggctggaagcgtcaggatatcttttcttcgtgctggtgagggctggccctaaacatccacctaatcctttcaaatcagcccggcaaaagctagactctcctcgtgtctacggcatctcttatgatcattggctgccatccaggaccccaatttgtgcttcagggggataatctccttctctcggatcattgtgatggatgctggaacctcagggtatggagctcacatcagttcatcatggtgggtgttagagaattcggtgacatgcctagtgctgagccttggctgggccatgagagtctgtatactctaaaaagcatgcagcatggtgcccctcttctgaccaacacacacacgacccctcccccaacacccccaaattcaagagtggatgtggccctgtcacaggtagaaaaacctatttagttaattctttcttggcccacagtctcccagaaatgatgttttgagtccctatagtttaaactccctctcttaaatggagcagctggttgaggctttctagatctgtttgcatcttctttaaaactaagtggtgagcatgcattgtggtgtagaggcaggcattatgtaggataagagctccggggggattcttcatgcaccagtgtttagggtacgtgcttcctaagtaaatccaaacattgtctccatcctccccgtcattagtgctctttcaatgtgatgtgggaaagcaggaggatggacacaccccactgaaagatgtaggcaggggcaggtctctcaaccaggcatatttttaaaagttgcttctgtactggttctcttcttttgctctgaggtgtgggctccctcatctcgtaaccagagaccagcacatgtcagggaagcacccagtgtcggctccccatccaaatccacaccagcaccttgttacagacaagaagtcagaggaaagggcggggtccctgcagggctgaagcctaagctactgtgaggcgctcacgagtggcagctcctgttactcccttttaaattacctgggaaatcttaacagaaaggtaatgggcccccagaaatacccacagcatagtgacctcagaccctgatactcaccacaaaacttttaagatgctgattgggagccgcttgtggctgctgggtgtgtgtgtgtgtgtgtgcgtgcgtgcgtgtgtgtgtgtctctgctggggaccctggccacccccctgctgctgtcttggtgcctgtcacccacatggtctgccatcctaacacccagctctgctcagaaaacgtcctgcgtggaggagggatgatgcagaattctgaagtcgacttccctctggctcctggcgtgccctcgctcccttcctgagcccagctcgtgttgcgccggaggctgcgcggcccctgatttctgcatggtgtagaactttctccaatagtcacattggcaaagggagaactggggtgggcggggggtggggctggcagggaattagaatttctctctctcttttaatagttttattttgtctgtcctgtttgttcatttggatgttttaatttttaaaaaaaaaaaaactttgctgatatttataattttgtatcataagaatgttttcctctacagtatttgtcatgccagtttataacaaaaaaaaatgcagggattttatttctattggaaacattacagctatgttttacttttggacagaatttttatttgtatagagtgcttactaatgttaaatagttcagagtatataacatttacattaag

SEQ ID NO: 133960 - DNA, 1019 bp, Homo sapiens
cctgtgccgctcttcacttcgatacttaggtgcctccccacttgctggtggttcttcagtaaacatctcagagtcatgtctgttttcctcttcggtgtactggctttgagggctagagggcgggttcggtttggttcctctaaatcaactgattggcagcctgggtcttacagatctttatacagtaaatgaagactttccccttgagatgcataattggacttcacaagagtaaaaagtacacatcctgcctttccagtgtggagcagaggacagttcttctgctccagctgcgggacctgaaggtcctccaggtggtagagaaggggaggttaatacggcacagtgcgcagggccccagggcagggaacagaggcccctgaaaaataccgtgctttgagctttgagtgtggccagcaggtaaatggacaagaacacttttaacatggaatccccttaaataggtgtctccagccaacggcttgaaccgcctgcccacaccctcccctgagccaccccccagcgtggtccgcttcgccatgccgcccggccacacgcacagcgggtctgattcctccgactcggagtatagttcccagacgacagtgtcaggcctcagcgaggagcttcggcactacgaggcccagcagggcgcgggaggccctgcccaccaagtgatcgtggaagccacagaaaaccccgtcttcgcccactccactgtaagtgactctgcagaaccagggggaggggtcttcccaccgtggtagtgggcctggaggtccagcgggggctcctgtctgctgagcagcacatcacacaggcagatgggatgcagagataaggtacagactaggtcaaatcataggaaataaccagtatttaactctttctcaactatacaaatgccatcttcctgtggtttgatctcataaaggataaaaagggcaggggccagtaatgtcactgcacaaagcagtagcatctatcttgttcagggtgaggacagtttgggcttcaaa

SEQ ID NO: 133961 - DNA, 1317 bp, Homo sapiens
acactccctgcaggggtcacacgttcaggccaacagtctgatcttccagaatttactctgcaaagttcccgtttagttatcaacagcatttctggcctaggagagctttaggactgcaggagagacagggatgtgtccacacaatgttcagaagggcttgattcaaatgtacggtcctgtgtatttcttgcaatacactcatagtgcttagatgtactacaaacatagcctgaaacagtgacagaaggtctcacctctgcataatcgtgaggaagtgtgtgtagcacccaattgcttgggacactgagctaagctcttagccatccaatgcattagccagaatcctgtgctgtgggaattggaggtctcacgtgtgagtggtgtgagatcatttaaggaggggggaaacttcggggtgagtatcagtgaaaagaaggggacatttctgtccatttttatatagttttgattttactgtgttcaagatttacgtcaacaccaaatatgacccagtgtcatgaagaggtcatcttagtttaagtctaggtgctgctagttgagctactctgattacacattctagcaactaaaacagtaagatgtgagcagttctgagagcttgtaacatttaggacagagctgagcatttaccaggtgaagtccagcaacctgatcttgtgaacatcctcattgcacaggcctttctgacggccatcggcgacaagaaccgcagggctgtgcttgccctggagcacatgtttgcacccgtcctggatggcgccgtgtccactctgctgggagtgctgatgctggcgggatctgagttcgacttcattgtcaggtaagcaggcgtgtgcaaggagacatgttttagaaatcattgtgattgggccgggtgcagtggctcacgcctgtaatcccagcactttaggaggccgaggcgggtggatcagaaggtcaaggagttcaagaccagcctggccaagatggtgaaactcatctccactcaaaatacaaaaattagccgggcgtggtggtgggtgcctgtaatcccagctacttgggaggctgaggcagagaattgctcgaacccgggaggcggaggttgcagtgagctgagattgcgccactacactccagcctgggtgacagagcgagattctgtctcaaaaaaaaaaatattgttattagctcaggtgatcttcgttgcttatttccttctgtatctggtagattgcagcacctcgtcatcgtgactctgctttcttttgaacttgttaacgtagagatattcggaggtataaagacaagctctct

SEQ ID NO: 133962 - DNA, 1071 bp, Homo sapiens
acagatttacaaagtacattgttcagagttgttatggagtgtgaaactctgagctcacagcagcaggcagcagaccatcacgtttcccaaggatgcaggcagaggagtctgcctcagagacaccaggaaagtgcccaggcagcagggctgggcgagggaccagggatactgtgggacaaatgggattgggccagacccccagataccatttcctcctcccgggagggagaaaggcgtgctgcatgcacagaggccacgggctgcgctgtttgattccagggatgtgttgaggacatgcagttgttacatatcctgtggattaattgaatccagatccccgaaatccagttctctcactctctccctgctccttcttccttcactccttctctaggagccgctgtcactggtgtttttcattttgtttaaaaaagacccaaagcgaggaatgaggcctgaatctaaaataaacaggaaacggaatttttctatgtatataaaacgtacaaacacatactgagtcccacagagttccccacctcagcaaagcccacaagccctcctgccgagggagcacatttggccacgcagaggacgcggcgtgcggagtactacgacctccgggaataagatcacctggcgaggcttgagggtgtgcactcgtcccttgcactttctggcgctgggcattttttgaatccacaggtcataggaggctagtgttagcaaaatttatacagatgttgttttatttttatagctctcctccatttactgggtggcatttccttcagtgttaacaacagaggttaactgcacacagacgtgcatggggattcttgccaggtttctcccccttcccctcctataaatatgtttctccagattgttcattctctgccttggctgcagacggtcttttagcattcagatttaattggttcagccaattcctgggccatctgcagaactgtgtttgttataaacacgccagtgattgcatcctccgataagtgcacattgaaagaaatcaaaggtgttctgatgggattttcgacactttcaacagta

SEQ ID NO: 133963 - DNA, 1047 bp, Homo sapiens
tcgctcaccctgggctccagaagcagctgagctgctgtttgaagttgggggagtttgaatgtgctttttcccctctgtgtggaatttctggttgtattgaagaactcatgacttagcaccccgagtggcacgaaacggttaatgaccctggtgcgtgtctttccgtcgcactcttgccttcttttgtaattgtcatggggcgaaaggaggagagtggtttttcttaagataaaatatgagtatttgtttcatagaaacagataatctccttccccccttttgagcagtggctggcagcagctgcagttcattcatgaaagatccagtgctttcagtcaaagtggatgtgggacacagagggtgtgtttctgatggacgtctaagagccccctgccctgctcagtctcctcagcccaccccgctaggaccagggtccttctggctgcgagttataatgtgttacaatcatttgccatttctaggacttcaggatgcatttgacagtgactgggaaaccgggaaaatcatgccaaacaattacaagaatggatcagacgatggagtccttgcctacaaactcctggtgcaaaccggcagccgcgataagcccatcgacatcagccaggtactccagctgctgggcactgagggcgcttccagggctgcggggccgctgccctggtggaggctgcttgacagcgtgtgaccccaccctgtgctctctggagacctaaggcactgggagctggtagaaagaatattgggtgactctaattcacctcctcccaccagctaattgtgtgacctcaggccagccagtgcacctcactttcctcatctgtcaaatgggacaggcgtgttcctaccaccagaacaattgtcagaataaagtgcagccaagagagtgcaggctctttccaatgttagaaatgcagcggcgtgtgattctttcagttctaggactcggtaccttgttggtcttgatggtattcaagcttggaaagatggatttcttgggtagcagtcatttggatgagcagaatttgg

SEQ ID NO: 133964 - DNA, 1088 bp, Homo sapiens
attgtagatcatctctatacgtttcttcctttatagatgtaaatcagctggagttgagtttttttttttaaggtgcatttgaatcatgttttgattgctgtgtgaacagcatacacctagaccaagtgagatccattggtgctaagcaatcagggtcccaggcagccctgggactccatgactgactcttacagggtccgctagagcactcaacacagaatgaccagacactggagccctttgctgcctacacgtttttcaggcctgttgaatggttgatgtggtgtttgaacattttctacaaggaaacaattatccttgagtcagctttccttgctgacatttttgtgtggcttttaaatggtgggagcctcattggtttttaatggaattcccattaaaactatgtcatctcattggtctttatcgacattacaatagtttgtctttgattttttttactcctaaaactatataatggttaatttcaaaactatcccacatgtcacatcttaaaacatacatgcaaataaggcagagtcagataaaaaccatgcctcgagtcatgtacaaatgtgttcatttttatttcacactggattatgcaaacaaaattttgattaacattttacttctagggtcccatagctgaaggaaaatgggcaattggggttattcctttggcctagaactttacattagaaaataattattgacacaaaatattcataagaggagaacttctagctaagatattaaggtttgctgtaaaataagtaaaaagtcacaattttctagagtgtgcatgcattggaatatgaagcactggctaaagggcagtggaaacccaaccttatcccttgttttgtatccagggtcgtaccttgtacatgtgcttaggccagccccttgttacttgagctttttggtgattagtcagaaaatactgtagtaatggggaaagaacttaactgttccagaaagtcgatgactgtttcgtattcatctttgaacccccagtagagtgaatggcacctaagtgaccagcagtgtggattctgagttgaatcgagtttccagcaaggctg

SEQ ID NO: 133965 - DNA, 1097 bp, Homo sapiens
ggccgaggtgggtggatcacctgaggtcaggagttcaagaccagcctggccaacatggtgaaaccctgtctctactaaaaatacaaaaaaaaatagccaggcgtggtggtgcacacctgtaatcccagctacttgggaggctgaggcacgagaattgcttgaacctgggaggtggaggttacagtgagccgagatggcaccactgcactccagccttggcaacacaagactgtctcaaaaaattatatataaaacaaaacaaaataaaaatgcgattactatgattttatcctttttcctatgggagaacaacccctacaagataaatcagtttaagtgtggtggtgaaaacaaggtattaactagacagcttctctttgtccaggaagagtcagtggtgctccctggggtctgaccttgtgcctcttctgttccaggtagtggtgatcttcctttttctgggcttgctgggggtcagcctttatggcaccacccgagtgagagacgggctggaccttacggacattgtacctcgggaaaccagagaatatgactttattgctgcacaattcaaatacttttctttctacaacatgtatatagtcacccagaaagcagactacccgaatatccagcacttactttacgacctacacaggagtttcagtaacgtgaagtatgtcatgttggaagaaaacaaacagcttcccaaaatgtggctgcactacttcagagactggcttcagggtaagacggcgtgggaggctctcgtcctttcggtcttttgcgtgttcagcttcaacaggttcctttgtcatgattatgagagcgttagattagaatgtaacactgacgtgtttcatggacttttaagagttgctcaagattcttacatgaactgtttctgcagcagcctcccagatctggcttttacctataaaatgatgcagataattcagatgagcttctgtgagaatgtacaagtgcacgtcaggaaaaggggagcatgttgtaacaggtggagccgaggcttctggtgctctttcctcttggatagacggtggctagtttggtgaccacataaaatcaaagtgcgg

SEQ ID NO: 133966 - DNA, 1042 bp, Homo sapiens
ctttgatggtggtttggttttgtttggaattgtgctttgaaggattcatcatcatggaacttgcttttgaaagccaaatttaggatcagtcctccatgtggcctcctcagactgacttttatctagttcaccaggcgatgaaccaggtgatgttatcaaccaggcgatgtttctggaattcagcaatgtgatgtttctctcctaagtcagagctgtgtaaaatgggtattctccgtacacagtgaaaaatggcagaatgaaagcaccatttccctgtttcagcataacattgcaacatgtttcccctcctttcagcccctgcgtcagcagagtgattcaggttgaacctcaggcctacaccgacacacacgacaatacccgctacagccccccacctccctacagcagccacagctttgcccatgaaacgcagattaccatgcagtccactgtccagctccgcacggagtacgacccccacacgcacgtgtactacaccaccgctgagccgcgctccgagatctctgtgcagcccgtcaccgtgacacaggacaccctcagctgccagagcccagagagcaccagctccacaagggacctgctctcccagttctccgactccagcctccactgcctcgagcccccctgtacgaagtggacactctcatcttttgctgagaagcactatgctcctttcctcttgaaaccaaaagccaaggtaatctgccacaacttaaggctcttcctgtcttcaaaaaaataacagaacctttggagttcatcagattgcttctacttttcttctttttccttaaaaaaaaaaaaatttcgtttaagtatgatacatttcagtcctccaaaagtcaatgcttttagagcatagggccattttaatgaggtcatcttccatgggagtgaacctctatgcagcaagtctttttatgaatgaggttgtttaaaaatgtgattattgccacttgcggtggctcatgcctgttaacccagcgctttgggaggctgaggtaggaggattgtttgagcc

SEQ ID NO: 133967 - DNA, 1062 bp, Homo sapiens
gtgcctgaagcgcacaggagccagcgtggccctcacgtccatcagcaatgtcacagccttcttcatggccgcgttaatcccaattcccgctctgcgggcgttctccctccaggtgagcttctggtgatgaaggctgtggtgatcctgaacggggcactgacttccagcatcccatgtctgcggtctctgctaaggcacttcagttacttatgaagtgaaatagaaatgcctgtgtttgaggctctgtttaactgggtggatgctgctttaagcttataaccctgacactccctctaaaaaactaagcccttctggagtttttccttcctttctagccctatgaagcccagacgtctgttgccttatagagtggccatgtcctttatgcatggctttcggggctactccatgttgccctctggggtcaccagcgctgcagccagcttctgggccatcccctgcttccaaacaccactcccagtacctgcacttaccccctctcccgctgcccacttgatcccaaacaggctaccttttctttcgcttttgccaaagcacccccaacccaagacagtattaagctgaggtcgcatgtcagacggcactgcaggaccgcgaactggcgaggctctgtggagaatttcctgcagggtccgcctcggtgggccctttctttccacctccctttcctaagttggccgccacaatctttcctgtcccctcttctctttccttttggtcccctgctcccctctcaggctgcccaagcagactcatgatccctctcaccttcccatgcagagcacgtgggcccctcgtgacttgtcctctccttccagaccaggccccgtcacccccagaggccgtcagggtattttctaatccagactcagcttctgtgaattgtaagcatggacagttccctgggatggggatagagctgtagtccgttctgcgcctggagtaaattactgacgttgcccttgagctacctgaaattcataggaatcctaaaattagttactgcagccagtaaagcagagacttcaccagtttgtgcca

SEQ ID NO: 133968 - DNA, 1051 bp, Homo sapiens
gagacacttggctgataggaatgtatgtcattgaccagggttgtggctcttcagctctggtgggcatttgcatggcttgcagggcttgtgaaagctccgattgccaggccccacccccagagtttctcagtaagtctggggccggggctgagaatgtgcacttcagggcaattcccagtgatgctggtccatgggccacactctgccaatcattgcttaaatgagttggattccttctcatttactagcttaaaaaatgatagtacactgactttcgaagtagaaacgtgcaggatctcctgtgagctgaaatggctaggctttgggacgtcaagtgaattcttcaccatgaggttacggaagccctgcttcaggagctgttaggtgctggtggcagagtcctaactagctttagaatcatctgaattgcatctcgcatgtctaatgccaccatcctctgtttttgctgtaggttttgccatttctcgctcttggtgttggtgtggatgatgtttttcttctggcccacgccttcagtgaaacaggacagaataaaagaatcccttttgaggtaatgcaaaaacaaaagaagagagctttggggacatcacagcttcctctgttcctaagtatttgtcctttaattttcctcagtctgacccagtaaagatttcagtcccatgtcagatgatgtgtcactggctgccagtcaatgaaataagctggaagactctcaggacatgtatttgctatgagaagtcccaagagctgcatctcgggtgcctttaggaatacgggtgtttgttttaatgtgacactttatccctaactgccatacattcccagagcctgcatttgcttctctggagatgtctgtcacttagccatcacctccctccactcccttttaaaattatacttaagcgttaagtcattatcttgcagctttcttctctggatggtaataaccatgaagaattgatgactctgtagatggtactgaataatgctggtgttagggggtaaggcaggtggctctgtttccctaatg

SEQ ID NO: 133969 - DNA, 1805 bp, Homo sapiens
tggactctggtcagtcaggtgtctggcgtttcgtgtaagatttctcccttgggaacgccaccgtctgggatttctgcacagcaagtatgcgtcactgagcccggtgtatctgttcaagctatctgctcctctccccttcctgtttcatggaatggaaactgtgaaaggaaattgcctattaatttaattttggggtatatctgtaaaaggtttgtaaggttatacctttaatatggtacatcaatctattaaataaaataaccatcctggtcccattttaatggaaacatgtgctcacagagaaggaaaagaattgcagccagtgagttgggggagctggctggggatttgaggcagtggaaactgcttcctgggaatactgatgatgtgccttcccttggactgtgctgcagcgcccatgccctgcagaccatgttccagttaatgactcccaagcaaatgtacgagcacttcaaggggtacgagtatgtctcacacatcaactggaacgaggacaaagcggcagccatcctggaggcctggcagaggacatatgtggaggtaaacccaccttcgaatcggcgtgcagactcgctggttatgcaattcttcattttcaccattatttaaaacatttctttccattcgctttattttcaaaacattgcaattctgggaacttgatgggatgaaaacttttttcctcttctttgatattgaaaatcctgggataatatctaaaagactagttctaattggggtgccctgagacatgtttagtaaccagttgtgaattccagaactaaagcacataacagtgtttaaaaaaacacttggttagcaaaggtgtctggaaaacattagcaaggcatagaatctgttcacagctgcaggccccttggtcaggtcatgtgacaggagctggcctttgtttcccaagcagtgacctctactgagctgcatgtgaccttttaaaagtggccagcaaatgaacagggggaggagggccataagaatgagttgttttggattagtggggagccgatgggaccgcaagtcaattgtgaagttaacggagaagagacgagcagtctcagccctggagtaaatacagcactcagagtgaactccagcgacaccagccctcagcagcacccactgccactgattagccatggcccttgtcctaaaacagggttctttaatgttagcccaacttcagcttctctccctgccctggaatcacgtagaacttttttaaaaaatgcatcagaaaaaaagaagggctgcgctgtgtcacctgagatctgtgctgtcgaggcttgtggaagtgttcattgcatttgggcatttcgcattctgttgtgaccacaggtggttcatcagagtgtcgcacagaactccactcaaaaggtgctttccttcaccaccacgaccctggacgacatcctgaaatccttctctgacgtcagtgtcatccgcgtggccagcggctacttactcatggtaacgctcgatgccatgctcctgggggctggagtttggtttggttgttttagtctttacttttccatgactgctcctgcttcttaactgctcttaacatcgatgtgcatccaggacagagagagcgtggcttcacagtggtttaaaagtggtcgtgtaaagcatttttcccatttgccgtttgcctacctttgactcctgtcattttatgtgacgcccttgatgtaaagttttgttgttgttggataagttctgccttttgatttggggtgatgggtggagggaaacattagaatcac

SEQ ID NO: 133970 - DNA, 1039 bp, Homo sapiens
catttgttttgatgccagagtcccagaactgcagcattgccaggaacctcctacaaggtggatgcagtgggcgcagccgtgttactttacgatgcgtttagaaggctcttttcatggtctcgtctcctaatttcttttgcagaggtaaacctcctttgcggtggacaaacttcgaccctttggaattcctggaagagttaaagaaaataaactatcaagtggacagctgggaggaaatgctgaataaggctgaggttggtcatggttacatggaccgcccctgcctcaatccggccgatccagactgccccgccacagcccccaacaaaaattcaaccaaagtgagtaccagcagtgagcgctctcagaagggtggagagcaaaacacttttttgtgtccattcatcgttcactttattattttcatttttaacatttcattctccatgatcgtctttgtctatggaactaagtttatttatagagctaaattttgctgtaagatttgccatacacctcccattagccttgctattaatgttctctctgaaacacacaagcccttaatgcactggattttaacaaggcatgtgacctgcctactaattcccataattatgtggctgtctttttattttagcctcttgatatggcccttgttttgaatggtggatgtcatggcttatccagaaagtatatgcactggcaggaggagttgattgtgggtggcacagtcaagaacagcactggaaaactcgtcaggtaagccagctcccgaggacaatctatgccctgtagtcttcttcctttcctcaaaagccacttccctcctgacatcggcaagtgtatttgtattaatacttaaaccgttatcctcgctagccaggtggcgtcatagaatattaagaaatagtagcagactgcaacagcttgaaaaagcaccttgtggggaatttttcaagaatggatttgtagttttcatcaggaccatagttcctgactatagggtttaaggagatctgcccattaggtagagaat

SEQ ID NO: 133971 - DNA, 1033 bp, Homo sapiens
atgttgttgtttataatattaatggttaagagcaggagagttcattttgaatactacctattaaggacatgatctgccagtaaaacatctccgcacctgagtatgtgtcaatactttgcaaacctaatttaatccccgcctattttgaatttatgataattcagctgggctgccctgaagttgtttaatgtatgtagaaaagcagattaatggtgtaaacaagattattgggagaacacttaagaaaacaagacttttcaagtactttggtagcattcatttacataaacaccctacatgttaattacgattgagtattatctattcattaaagcaagcttgctgggtctctacttggcaaaagctctgctcgttttgacagatgcttaaaagtgatcgaaattgcagttctttttatatgttctatcatttcgaatttgcactaattttcttattacagtgagaaatttttgtctctgcttttcattttattaggcagtggaaattggaacatttgtgttacaaatcaggagagcttatcacagaaacaggttacatggatcaggtatattttcttcttgttggcaaaaatttctcaggaacaccccagtagtgtgccttaacctaacgcatggcctcttctttttaactttgacagataatagaatatctttacccttgtttgattattacacctttggactgcttctgggaaggggcgaaattacagtctgggacagcatacctcctgtaagtgtgtgatcatgctttctgatgtctgtgacttctctaggactcagtgtttctaatgttgcttatcattgtttgttccatttcagttttgaacaagaaataaaaacattgaaattccatgtgcattttttgagtgaatagtcgggggagaggggatttcagcagaatgttttttctcttttcaaaaaacaattctgtaggcgtcattaaatttcattcacttttaccaacctatttatatgcaaataaaatgcaaattattgcagagtacgtgtgattt

SEQ ID NO: 133972 - DNA, 1638 bp, Homo sapiens
tagactgttggttactacagggcaggggccacctcttgtctgttttcaccccagcattgagaacagagtgggcattcagtttgttgattgcttttgaggttggcatcactaaaccccatttccaggggacctctgagttgatgtcacccaaccccatcacctcccctaggctttcagcacctcttcactgaggcctttgttagtactgtttatttttcctggaagaggtgaggaagtagcagtataggcatattcagcagccagggagaaccaaagaagagaataaaattaagatttttcttgtcccttctctaacctctgcttacattccagctcgacaggatcctagggacaagcacagccagggtcgagtcacatgtctttggcacattcttgtttgtttatctgtaacctgggcttatggtcatgtgtgctcgtatccttcatggttcccagaacaagaccagatacatgaatgcaagggccttagaaaatgtaaaatcatgtttctgccaggcaaacttgccctgttggtctgtaacaagtattgtagggaagcaactacctggtacagttttgcagaatgtgaagtggcatccctgtggggagccaggttgtcctggggccactgcaagcatggccaatgcattcttagtgtttgtcacctacatgcttcaggagaagatgtgagggtctgtgccattaaattacactcttaagctgagatgggtccagagtaattttatgcattggaatgaactttaagaacatgtagttcaacccatcccatgttttaggtgagaaaactgggaattagactaattagagcatttgtccaagttcatgcagttatgaaatgagagagccaggtttcaaagcctttttctggcttcaagcccattcatttttctaatgcacaatgatgtccttctcaagtgtaaatgagagttgatcaagtaatataaagtgagaacctactcatgccggatagtctatgttgatgctgtatagaattaaaatataaatatgtccatggatgtgtggctaggtggaggatggcggagatatgggtaagttaggcacagctctcaaagagaggaaagacatcagtatagatagacatggacaaaggaaacgtgggcggtccccatgacagctgcgccaggtttcagcaggagatctgcccagccagggctctagagttcaggagaagggggtcattttcaacaagcttaacatgggggtgacatttcaacagggcgctgagagacaggaaggcacagggaagaggacacagtaagctccttgggtgaagacaggcctcccttaggaggccaagaatagagcagttgggagggaagtttttactgtgtttctttcttttttttttttttttttccttcccttggacttttccatccccactcttccagattttcttttttttttcgttagactgatctccctaacacacctggaaagatatgggcttatataacacttttctagagacaataaaactcccgattaattcttttttttttgagagatagggtcttgcttatctaggctggagtgcagtggagcaatcacagcttactgcagcctcgaactcctgggctcaagtgatcctccacc

SEQ ID NO: 133973 - DNA, 1022 bp, Homo sapiens
caggtagtcagataacagataaaacatgagtttgcagtgattttgctattctaattaaacctgtacatatttgtcagttggaggacgagtaagtcgtgaattaaattatactcgccagaagattggagaagaggctatgtttaatcctcaactcatgatacagacccctaaagaagaaggtgctaatgtcctgaccacagaagcgctcctacaacacctggactcggcactccaggccagccgtgtccatgtatacatgtacaacaggtaaggcccgccgcgtccacctactaatgagcagcaggtaaggcggtgggagaaggctgctggtttaggccccgttattttagtaaatgaagttgccctggaaatgcacctggagtattagttcaaatagctttgcaatgaaaggatttttttcatcttgatttatcgtttctcgagtttggtaacaaagcaagtgcattacttgataatgtattgccagtaagtatcttggcactgtccccaaaagaggatgacgctgagccacttggggactatacacccaggctgtaagatgtttcattgcttaagagatttttggagagtgatattttgaattgcccttgctgaacttaaaaacaatgcgaaaaagaagagctgcttcttgtgactttgtactcttagttgttttgtgtcacacagcacgttgggggctgagccaccatgggaattgttgctgacacctttttatttatttttttgagacagagcctcactctgttgcccaggctggagtgcagtgatgtaatctcggctcactgcaacctctgcctcccgggtttaagcgattctcatgcctcagcttcccaaggagctggggctagaggcgcccaccaccacacctggctaatttttgtattttcagtagagatggggtttcaccattttggccaggctagtctcgaactcctgacctcaagtgatccgcctgcctcagcctcccaaagtgctggggttacaagcgtgagccaccatgc

SEQ ID NO: 133974 - DNA, 1020 bp, Homo sapiens
tgatatattcctccctccttcccgaccccacacgcagtatgttaaacctcacctcacggagctcctggccttggcatccgcgtggacctgcacagagggtcctgccaggcggtgaatttgtactggttttcctaatgagggcattatttgctttttagcctgcccccttgtttataaaatatgccaagagaactaaacaacccgctgttcccagtccttatttacttgtccaaaccaaatgtttatgtccttgaatactaaacttgaagaaaaaggattcctcctcgtgggaaagctatgatcactgagtttttttctaaactgtcgctgcaggcctgcttttcagtcaacatgcaacttatcaatgactttaggaacaattcagacccgcttcctttgccctagactgtggagtgggggagctctaggttcctgggtctgtaactattagtatctccctgagacacctcccagcccaggtgcagcattcggagcttggcttggcccagaaccgttcattgaacataaccttgggcctaaggatgtaaaaaggagaggaagagaaaaggcatttggcagtcacagtgttgatggttttctttggtcacctgctcctgcgctggctttgggcataccccgtgctggccagcttgctggaaagctgggttggtgtgaggcaggacttctcggcctgggcagcaggttcagggtcacctggggtgcttccggaaaacaggctgctcacccccagctgactgagaacctggcacctgtgttttctggatgctgaccaggtgcgtctgatggaaccaggttccagggactgcccatgatggctgtggctgatacagtttgttcctctcaattgggatttccccatgggcatctgacttgaatcactttatttatcttctcctggcaagttttgtgctgaacacacactggccacctttccttgtttctttttccacagaggagaaacatttccttgttacctttgccagtttacttaggagaaga

SEQ ID NO: 133975 - DNA, 1021 bp, Homo sapiens
ctctcactgggctcacttcatgaaggcacattctctttgggctgattgtagcgtttttcccatggcaacacgcaggggcacaatctcataaggaaaaaaacggcccagaaacttggacagcggttggctcctcctgaataaaagagatgggtgggagaggactaaaattcacagcccgtgaattttcagccaattgctcacattactgaattttcttttttttttgtttttcgattataaaaaagaggcagtgctaataattttgcagttacacccgcttagagatttgtactttttcggcctcacagtaagtaaatgcaacattgaaaggaggacctgagcaactaaaagaaaaagaaaatctctctagaggctgttagataattcatgggattaatcaaatgcaaatgcaacgcttgcatatacacagaccctattttcctaattggactctgagtgggtacttttcaggctgaaagggtcatttgttttgactgattgactttttgaggctttggggggaattaataacttatacagatgactgcctgttcccaaggctctgtattgagactgcgcattcatttattcattcagcacacttggtgtgccatgcccctggtgcccctctgcgtccctcacatacggaggtgcatgggcaggacttgaattttgtggaaaataacttcggttggtccctcagatcatctttatgtggatcacaataagcttttgctaaaaggtttttgtgtgaatgacacagaagtttcttaagctctgtgcagaaggctgtgctgaggaggggcacagcagggaagcgtgatgagggaaacatctcttgtctacagtggattggaatcatattggcctagaagtatgggcctctgggtcagctggcatcccacctgagctagctagcctttcttcactttggaaagttaagcctggcttgatttggggatgagaggatcagcagagcttgatcaaaaacttatttgcagaagtgatgcttcttttgcct

SEQ ID NO: 133976 - DNA, 1059 bp, Homo sapiens
ttgttgaaatacctgcgccaatattctcctgattaagaaatttattctacagagtgatctgagaaaacggctttaagaaatagtgatgataaaaacaggaattttgagatgaaggaaaatgtaggcttcttgactccctctttctcctcccaccgctgttttttttccttttgtgaattcttccacattcccacccccactccctgatttcctctgctcctttactgggaaaccagcaaccttcacaaaatagactcaaacatcacacagcctctttttaaatagaggctttctaagagaaaataacaaaagaatttttcctagctgcctaagaaattctttcttcttactttattttcctcatgagatttacacattgttgtaataagtaaaaaatgataaatatgataccatcattttggtctacacatgatccagaaaaaaaaattgcacatgtttaataccttgcttaattgcaaacaaagcttgcaatttgagagaattgggattagggctaaatatctattaactgctctttctagagatttggggactaggatgacccttttttttttcttttttttttttaataggctacagtttcacatggctcccaaaagaaatctctctccctttttgtttcccacaccaattgatttatcattttgcttgcaagcagatccagaatgttagggcaagaacacactcacttttttctcgtaacttttttgttgcggaccgaaaccagttgacttgaataaatttttctgaggcctgaatgtagccagcaacgtggaaaaatcttgccattcagggccgtctgaatgtacatttcagccacacagtaagctgcattgggaggcgctggactgctaaatgcaaccatttttcgcagcagcgagttagacaggtgattagcataattagcaccgagcagctatacatatggtaatgctgagtgtgtaaatgccagctgcggtgtaaaatttatgtcaggggtcggcagggctgtgcgaaagtattgtgttccagctgcaggtcagggccgccaaagcttac

SEQ ID NO: 133977 - DNA, 1047 bp, Homo sapiens
gtgacaaaggtttcaatttttttcccccgctggtttcttatttatctttttggcaagttccaaatcctgctatttggaaacactttaaccctaaacaccactttgggcatcccttaccttacaagagggtagtaggggagggtagaggtgactaggtagataattcaaaccaaaatacctggagcattcctccggacagcatgtggaagctgaagagttatgcgcataatcgcttcagtgatccctttcaggatgctgttggagaccttgaagaatatttccttaatctctccttgtttgtgaagattcagcttgcagagttttgcaagcctggggtggagttggagtatttagttgagaagtgacaattaaaataatagtctacataattaagacaaaacattcctgccttaagtagtttggtaattaatacaaaagcgttctttggattgaatccatggagtaatttacctcagttcagcgattcagtatcactggtagataaaagaagggttttatcgagcagctattatgctcctagcaacaagtttcttgagcacctatgatgtccctagcactgtgttaagcaccataagagactcaagtgtgtgcgacactgcacaatttaaaactattagaattcgatgcatttggactacatttgggttcacagctgaaatgggctgtgaaagttacaagagggtggtagggggtggggggagagaactggagacggtaggggaaggagggcattttaggcatgggcgggacaccagcaggggccccagctgaggagtttggaagtgatgtgattggctagactgtaggggcgctgccgtagattctaggacagaatagggcatgaggacagggagggccgctgccgtagattcttggacagaatagggcatgagcacagggagggccggctcatccaccacttgatccaacctgtatttgttgccatcggatgaggatgacaaaacgtgattttgtggtgttcttagcaagagttttcagtggacctttgacatgttgaaggagata

SEQ ID NO: 133978 - DNA, 1930 bp, Homo sapiens
ggctgtctgaggtccgcagggggtggaggtgtgtgtgtgtgcgtgtgtgtgtgtgtatacacacgccctccctggtgtgccttttccggagcactggaaagccgtccacggcggaccacctcaagggcggccgcggcactgtcctgccccgtgccccctgccctgaacttcttcctcctgcgcccctgcccctatttgcagcctaaactcctgtacggctgccacatttcttaacatcttggagggggaggcggagtggagagaggcggagagaggaaggggggagggagccgaaataaaggtggtttccttttttggcagccagttttggttttgttgagcatgaaatctctgctcccttaaaaaattattctcggaaaaagatatcccccccgttttccaggttttgagccgcctctccttagggcctggtcgggggaggaaaagttgtaaacaaattgccaccttaaattcgcggtgcgagtctgcggagctgccgggttcattgtgtttacgaggctcgctgaaatgtgtggaatccagggaaggcgagcacccagacgggggcccgccggggccgcggccagcgccggggaaatgccgcgccggggagcagcctgcgccggcctgagcccttccctttgcactcggctgttttttacgtttaaccagaaaggaagggagaggagggaaagatccatgtggctgccctcttccgatcacaaatattgtcgtaagttgcagctggctgccccacttcctaattcagctcacacagcctctccccacgctatggaaatgcgtcgggagtgaactccggcggccgcgctcaccacgtggatccccacttactaccattctcggcgggggtccagttgggggaacccgcaatatgttgttccaaagagcgctcgcccctagcgcccgtccccgagggtgatggacagagcaggactggtttgctggctcctgaaccttgggctccatcgctgggattacgcagcccctcccttctcagctctggggtgaatattgtctgtgtcgagtggtttctctcctctctacctcggcttcctcttctgtattgcagccccagtgccccaagtcgctcagggatcccgcgggtgggggcgccctgatgtccccgaggtgcagctcccacgctgcggcccggctttatgaccgagccccccatgacgctcagatccgccggggctgcagtctcgagggcgagtccgtgtgccgcggccacccgcgcccccacggctgttgggggctcaccgggcgggtgcgcgcaagcgggcgtgggcgcgcgggccgcgactccccggcgctcactcctcccttctgcttcgtccccaggggaaggctactggccggaaagcgccgctgtggctgagagcgaagtttcagagactcttatttaaactgggttgttacattcaaaaaaactgcggcaagttcttggttgtgggcctcctcatatttggggccttcgcggtgggattaaaagcagcgaacctcgagaccaacgtggaggagctgtgggtggaaggtaagagcgcccgccgcggcgcccgcgcccccggcccggtccctcctcgcggttgatagagatattcgccagcgcacacctagagcctggctgcggccggcgaaaccccctgcccgcacccgggggattgtttattgtttgggcgcctggccgggagccaggcccgcccgacaaaggccgcgctgtaatctactcggggcgctgcgccggccgaggtgtggtgggagagagcggcgggggcgggacgggggcgcggggcccctccgggacggaccactctgcgcgccgggggccccgggcccgccgccgctgccgctgtccgcctgggccgcgccccgagaggcgccccggggctggcctctcccggccccgctc

SEQ ID NO: 133979 - DNA, 1122 bp, Homo sapiens
ataaaagcattcatgagaagtatgagcagaagttttcattattccttaagcccttgattcagagagacaaaaaattccaccctccactgcagccccacaatgccaagttgccaagcaacggatcttttatggtgaatcgccacggagactgatgtaaacaaaatcataaatcccattaccctgctaaatactaggtctgggttagaaagggagcaaaagagctgcttttcaggttaaaagagatcatatgaaacggtgagtggcaagatcttagtcagagtaaattgtcatgggtgagactgtaattaatgtcgcgcttttattctttcaatggccaacagcccccagttttcttgtatcaaggaaagcagtcatcgttggaagagtcatttccagctaaaaacttacctccagtaccccccaggcccaggcccgccatggaaggagcagttccttgtggttcttccctgcacttcccaactggactttggccagggcccacccagagccagggtatggtcattcagaaaacagctccaagaaggagaccctcgggaacaacattttgtactttattccccctttcagacaaagggaaagaaaagggacattcatggagcccgtctctatggcagactgtggcagatgacccagttgtggtacctcatttcattctcgcacagttccaggagctccaggctaccattcccatcaaacagacagaaagctggaggcctgaggatgaagacatcttttctaaggtcacacagttaactagcagaaaaagggagattccaccttcaaagttgaattacagactcaacgtggcccccactgagttggacctcaggccttctgcgggtaaaagcctctgcctcaaagtgagcaacaaatcccacgttgggacattgacccctgcagagggaacagctcacgttgtggctcccgtaataatgacacagggcctcttcagtggtgtgccaggagtgtttaacaaccagctctctggagcgaggggatgagttctggtttctgtgatgcgaatatttctccctggccaatttcaagctatcagcaagagaacattggccctcctgagctgcacaagtcagctccaacaca

SEQ ID NO: 133980 - DNA, 1051 bp, Homo sapiens
tggttgtctgaaaatctttacccttcattcttgaatatcatccgtaggtataaaaatataggttgcttttattatcactttgaaaatattctgttgtatagtatcttccattctttttcctgcaaggtcagctacttgtctatttgtttttttgtttgtttgtttgtttgttttttgattttttttttttgattttttttttttattttgagacagggtcttgctgtgtggcccaggctggagtgcagtggtgcagtcacggcccactgcagcctcattctcctaggctcaagcagtcctcctacttcagctttccaggtagctagtgatacaggcatgagccaccctgtgcccagctaatttttctaatttttgtagagatggggttttgccatgttgcccacgctggtctcaaattcctgggctaaaatgatcctcccgtcttagcctcccaaagtgctgggattacatgggtgagccactgtggccagaccagttgttgcttttttgtaggtgatctgttgttatttcttctggctgcttttaacaaacattttgctgtctcaagcacctgcttgtggttttttgtttgtttttggttttcattttgttttggttttggttctggttcttggaagaagatcttgaatctgtggcttgatttttaaaatcagttaagttttcagcttttatttcttcagatacttctgtatcatttcttttcttctatcatttgggattcagattataggtatccacacccttgttaagtatacttttttctataatttttctaattctcacatagttttttgttttatatagtttttcttcttatttatttttgtaaggtaatgatcagttattttcttccatatggatacctcatatacctttcttcccaatctttaaaacaaccttgccaaaattattttttgccatttttacagatattattcagagaggttaacgcccttgcctaacttcacagagcagccaagcaatcagagctaacatttgaatcaaagtcaaatcaatttagtatttcttg

SEQ ID NO: 133981 - DNA, 1376 bp, Homo sapiens
agaacacgtggcctgcttgtgtatgtacattacccacttggcctttgaagctattactgggatccagattttattcttttctctcttttggaaagttacttctctctcatttctcagtgcctttttggtagggggaaataaaaaacacgtgtttctttgagcaaggttaggtgtctgtcttgtcctgataaaaagctaattaaacagcaaattattttttgagaatcttcaatgtccagatatagctaatcactcagttgtatttattgttactaactagatgtcaaaattaaggaagaggactattgatattgatattgtggatttcactttgggattctttttcagtttttaaaaaacagcaaaatttttttattcttgttttagatgttcttaatagttgctcctctttctgtcctctacaactggaaggatgaattggacacctggggatatttcagagtcactgttttacatggaaacagaaaagataatgaattaattcgtgtaaagcagaggaaatgtgaaattgctctaacaacttatgaaacactacgcttatgcctggatgaacttaacaggtaatgggaataataggaataggaatgattgtattaatagtctacttacatccctttatattaagagtttttttttttttttttttgagacagagtcttgcttttgtgtttttagtaaagacggagtttcgccacgttgcccaggctggtctcgaactcctgagctcaggcaatccacccacctcagccttccaaagtgctaggattataggtgtgagccaccgtgccaagcctatattgtgattttttaaaaaggaataatgatgattcctttgcttgatttaatttcattttagaattattgaaatatttagttcataataacttactctctgagaaggaaaaacctgcatcaggttttctagaacttcttattctatttcttacattgaatacaggatacttcttcaaacactgattgttaaagaatgataagacttgtcctaaatctcatgtacagccttttatgcagacactgcctctgaactaggtcagtaattttcatgaattatttcaattatgggagtctgttgtgaatatagaggggcaaaaactacacacacacacacacacacacacacacacccccacacccacacacccactgtagcatagagtgtgagggagaagtggccaagaggtaacaccagtgagataagcagggaaaagattatagagagtattggaaggtactttgaggattttgatctttatcctgagagcaatagagtgccccctacagtgttgtcagcagattaccgataggataaaaatgatcagatttgcactttgtaa

SEQ ID NO: 133982 - DNA, 1111 bp, Homo sapiens
ttgcattgtattccatttcatcaatattcacattttgttacccattcatttgaggatggatttttgggtttttccagttttggattattatagataaaacttcaaggcatatttgtatgtaagccttttttggacatatgttttcatttctcttggagtagaattactgtattatatggttaactgtaggtttagctttagaagaaactcccaaaccattttccacagtggttttactccagctagcaatgtgtgagagttcagttgcttcgtattctcagcaacgtttggtattgtcagtctttttgttttagctgttttagtagatgtgtagtagtatcttgtagtgtaatttgcatttttctgatccatgtgcacttggaaaacaatgttctatagttattggatgtagtgtttataaatatcaataagactagattggccaagatgttgcttaggtgttttctatctttgctgatttccttttcgattggcttacagtatctgagagaggagagttgaaatcttcagttgtaattgtagatatgtttatttctcctttcacctctgtcagcatttaatttagtattttgaagctcttttatgaggtgcacatgcatttatgattgttattttttcctgatgaattgatccttttatctttaaaaaatatacctatttatttctaataatatctcttatcttgatgttttatctgatatgagcatagccatattgtggtacatttcagtagtttgttcctttttattgccgatggtactattatatagctatcccatattttgtccattcaccagttgatggacatttgaattgtttccagtttttgactgtatgactaatgctgctgtcttatgctgagtcttatgcttactgcatgtaaatagcttttcctgtttttattgcagtatatctgttcttaatatttggagtgagtctccaaatattgctttttcatccattcggataatctttgcctcttatttgggtatttagaccattcactttgaatataattattggtaaaattggatatggagctaccacttttgtcaggtctgggatttaattttataaatcaaacttacaa

SEQ ID NO: 133983 - DNA, 1040 bp, Homo sapiens
aaactgcagttcactgtccgccaattacctttacctcaactcttactgatcttcatagtctttacttccttattgctaaagaacatgtttatgctgcaacttttcaatttttctttagttttcagcatcatctattgatttctttttaaggaaaattaggatttttgcccttctcttgcccgctttaggatgacctggcccatctactttgtgcagtgggaggattcttaaacagactattgaacatttacatgactccaatttccagaggcatctggagccaccaattcttaacttttcaagaatgtgtaaataatatgaattagattgcttcttggctttttccactattggcataggacactagtctctgcttttgtcagccatcttgtccatgttctttttagcttctagaatttttgctatttttctcctgtctttgttcttgaggcttctagcttttttcagctttatattaagaaaatgatgaaacctatagaaaagttaaaataacagtacatgagcatctagattccaacagttttgtgtgtgtgtgtgtatgtatgtatatacattcaaatgttggcaaaatgtaagttaatgtatgtaaatgtgtgtgtctatgtctatgtctttgtgtacggtggtggtaatgagtcatttcagcaagttgcataaaacatgacatccttatccctaagtattttagcatggatttcctaaaactagtgatacttcttgtcataccacattatcattgtcacacacaagaatattaatagcaattaaaatttcctcagttattctcaaaacatctttaatatcttatgtttataaagcaggattcaataaaggttcaggtgatgaatttggttgtctgtttattcttctaatctacatcatttttccaacttgtattttttaattatatgactttttgagaggaccaggccagtcagttgttttaggatatctcacatattagatttgtctgattactttctcaagatatattcatctgtcatctgtattttagtaaa

SEQ ID NO: 133984 - DNA, 1020 bp, Homo sapiens
gagaaaccctaagtgaatatttatctagtttgatatttatttggtctcatttattttgctgtttttaactacttcccttttttgtaatagcccagtttcctaggagccttggagcataaatgagaaggggtctgcatagcactgccactgcacttagattttgttaccaggcacctcgtaacagcaacatttccatcactgtgtgtcatgaggataaatactttctgtaataaggattttctccctttatgaaaaatatagttgtattatgatttaccaaaagtatgcttccacattagctatttgtggatattttgtgcaatagttgaccatcattttcttggaatttattgtgccaaagtaacccgataataaatgttattgtaagtgatacattttatgatgtaagcaggtgcatagctatgctggtcctttttattttctatatttttctggttacagaccaattctcatggtgaaacagtgaaaaccttgtatctcagttaccttacagtccttcagaaggtagctaaccatgtcgcgctactgcaagctgctagtacttccaaacaacaggtttggttagcattttacatttctttgtgatgctattgttgtgaatattttataaagttttaaaatagttattaaataaagtttttgtggatgaaatttaagaggaaactgatttgcttatttttaaatgtagatatcaaggagtatgtgcacttaagtttttaatcaaagtgaacaaatttaagcttaatttaaaataagaactatcttttatgcctttaataatgttcatatctttatttttcaaaacagtctttggtataattactaaataacatatttgatgggtcagttctattcctctaataatgtctgtaatggtatttaatctactgggtaaaatgaggatttataataatttgtatattaaatattagggctgtttaccaaactggcaaaaatcagtaatttcaaagtttactttggttgtttccttttattcta

SEQ ID NO: 133985 - DNA, 1047 bp, Homo sapiens
taagatctccagtctaaaaacatttacttttcctgtgacttgtttttgtttttactgtaaaatacttgaaaacacttaaagttgcaatagttatgataccaccccaaataatgagaatggatttctatacaatatatccttggtttaaaatgttaatatcttaagaatgaaaaacaaaccacagactgggagaaaatattagcaaaacaataaaggactggtttacaaatatacaggtaactcttaaagctcaacaatgggaaagcaaacaatccaattgaaaaatgggcaaaggatctgaacaggtacttccccaaagaagataatagagatggcaaataagcatgtgaaaagatgctcaacaacatatgtcattaaagaattgcaaattaaaacagcaaggagataccactagatacctattagaacggccaaaatccagaacactgtcaagcccaaatgttggtgaggatgtggagtaacaagaacccccatctgctgctggtgggaatgcaaaatggtatagtcactttggaagacagttcagtggtttctcacaaagctcttaactaaaaaatattaccttaaatagtcttactatatgatcccgcaattgtgccccttggtatttacccaaatgagttataatgaattaaattttattgagttttaatgagttagaaacttacatcccgacaagaacctatgagtttatttataattgccaaagcttggaaacaactaagatgtccttcagtaggtaaatggattaaaaaagctgtggtacagccatactgtggagtactatttagcaataaaaagaaatgagctatcaagctaccaaaagacatggaagaaccttagatgcatattgctgagtgaaggaaaccagtctgaaaaggctacatactgtataattccaactatataatactatcaaaaggcaaaactatggagacagtaaaaagaacagtggttgctatgggttctgggggaggaaagaatgagtaggtgaagcacaaggaatttttagggcaatgaaacaat

SEQ ID NO: 133986 - DNA, 1375 bp, Homo sapiens
agaaagtgtggaggaggttggaagtagggaaagaggagttttgtgcattttctactcagttctgtaaaacagaaaaaataatatctaccaatttaaaaagtcttatgtgaaattcaaattacatacttcatatagaatcagttattttattaaaaaatgaactaaatgcaaataaaacttcatatgttctccaaatgtgaaagtaatgtttacccgatccataacatttttatttaccatttgataaataaatttggttatctgagtagaagttttttttaactccatagctttttttgagggactagggggaggtagaggtcaaagttagcacaatagcttctcttgattgagtaagtgttatattgagtattttttttatttaaaagcttaaatgtttatcattaaataaattgttttagtgtttgtttcatctttcagaagaatttagactttgtatagaaaatttctttttcccctctgtggattgcttttccacattgttctggagctgtcattgccagatgtggaaataaaagtaacagtgtgactgttatacacaaggctttggactgtttgtttcctccctgaaagcactgtgtgtgggggcagattactggcattttgaggtcaaaatcaaatctggaagtcagagcttactgtaaatagagaaacaaaggggagaaaatgagaagaggtgtgtatctgactgattattctaagaaaataaatatcaagacttttagaacctagatgtaattgaacacatttcattacatccatctagggacaatttaaatacttcctaaaaggaatgctgctctataatttagtttcttagcatattgtaggtataaagaaagtgtattttggaaattaaattaatccatttaaatgcatcccataatccaaaatgcttcctttttattaaaaccagatgagatgaaataaaagtctttgggaactttacctccttattgacaatatgatgatgaataacatttgatgtaatagctaatactttatttctctaacttggaaaaaatgaaaggaattagaaaaaatgaatgaggttagtattgtatgaaaataattttaaagaaattctcaagtgatgtttatatgtataaagtgtacttttagttggaactggttcactgattttctgtggttcattttcaggtccttcagcagcttttaaatcattgcaggaaaaacagagataaagttcttctcttttctttttccaccaaggtgagttcatctaaagtatatccttgattggccagcctcaacttttgaggcataaagaataaagcatatgcctacatgacaccttacagccacattttctcttatctacacagtaggaaat

SEQ ID NO: 133987 - DNA, 1200 bp, Homo sapiens
cttaacaagtctcaactttgtaatggtctgaaacttacttaaccaagattcatgtttgcccatcttcatacctctcgtctagttgcttgacgtgctacagcagtactgtatggcgtctgggcttgattaccgacgacttgatggaagtacaaaatcagaggaaagactcaagattgtaaaagagttcaacagtacacaagatgttaacatttgccttgtctctacaatgtaagaaaattaaatttaataactagatttttatccaattgtttttgagatttagcataatttttaaaactattactggattaatttttaatggctatgcttatttagaagcagcaaaaatactattatgaccgaaatttcaatgtcttaagttttagctaagcttttctctcatttcctttatcaacattgaattcctcttagaagtctgggtttataaaggtaacaataaaaaaattgatacttcctcctatgaattttccatggtagtgttttgacccaagtctcctggtgagaataatcagacttcttattaactggataactgagactcactgtagcagcagttttcccactgtgtcagggagcccttgagagcccactggggctaggggctcacgtttccctcctctgcctctacctcatctcaactggagcagctctgcagttagagtttttatgaaaggtaaattggttctaacccctatgtatgaatatccctttaagaccttttagagaatatacacacttctgaaaagatttaaatcaacataaacacctaagtaagattaatcccattttaggaaggaacagatcaataacttttgacatcctgtgtaataagaattttatagattcactcccactgtctttcagaatttcaatggactttaaaaataaacatatataaaatgcacaaagtaaaaattaaatcagaatagaaattaacttaaaatgaggaataaaatatacttatgaatgagccaacattgttgagcactttaattattcttgaattcctaccactaaggcaaatggggaaaagctttggattcccattttcctataaaggaatgcaagaagtaatttttttcatgcgtccttacatacagagcactaaatgacatagaatactgtggtcaattaaatttcataaaacatataagcattctaactttaaagtgtttccag

SEQ ID NO: 133988 - DNA, 1351 bp, Homo sapiens
aacaataaatatagtaacaatataggctagaatatcaagttcccaatattcaacattgtggtgtttgaaatgttaatatgtccttaccataattattgtatgggaatggttgttatggatatcatactgggtaaatatttcacatttcttcactctccctcttcccactagtacttttaatgaagttggctggaaagtattagttttctgtgtatgtaaaagtaaactttaacacaagaattaagagtatttttagaatgttatataaatgtttatatatgagtttcttaattagcaagttgaaaaataacattaagaatgctaaagcaagctgcatgcaatttttctttcttagctccaagaatagcatgcattgctgttgtttatctggttgttgctaccccctgtgttgcatagctatttgcattctttcttactgacattatagagagaaggccaagtagaagcagggatcatgacagccacaacatggttgaaagagggacctccagcacacaaactggaaatggtatgtaatatttgaacctgtagactacaacacctagaaaacatgtactgtgacaattttgtttcttttcctttttccttaattttataacctgtaaaaaaaaaaattaagagtcaaggacacaaagtcagaggactatggataaaattaataattaaggctgatttaacattcatattataagaacaaattcaggagcagttcaggcatttacagctaaactgaattttaactacaccaaactgtaaatccagtaccacctagataactaacccatcccaaataaataatttttgactaaatggtaagttaaatggaaaaatcaccatcaatgtgtatttaaaattattgaacccaaatatcaaaattattctctaacctgaaagtagatatttgattccttaattttgtgatctttttagtagcttgtcatctcatgtaccaccaaatctttatttcatcataaggccatcttaaaggtaaaaaacatgtgtggaaggtttttttgttattgttgctggttttttcttgtttgtttttagagtcttaactatcaatttataccagtccaatgagtttaaattggggatgaaatttctataaatttagagaaatatatgaatctcaaatattggcaaaagtattatcagataatactttccgcaatattttactagtagagcctcagttttagaaaactaggttatatttaactctgattaatgtgcaaaggttacatattgaatttaaatttgtagcaaattttacttcaaaattctttatttctggtgatcaagatcctatcggcctttttaatcaatt

SEQ ID NO: 133989 - DNA, 1032 bp, Homo sapiens
aatgaggatcataactctcagtttattgatgattattcatcctcagatgagagtttatccgtcagccacttcagtttctctaaacagagccacagaccaagaactataagagacagaactagtttttcttcaaaattgcctagccataataagaaaaatagcacttttattccaagaaaaccaatgaaatgttcaaatgagaaagttgttaatcaagagcagtcgtatgaatcaatggataaatttttaggtaactaaagacacattctcaaaactttaaaaagtatatttgttttatcaaatagttctgtgagacgctttgaattaacttgtaaaacagccctaaaatcaagatgctgcattgaggcacaaataaggaacggttgggtagcaggataaatgggagaccacatataggtcaagatagagaatgttgccatctaccccaggaccccctccatgtgcccatctaaatcacagttcctctgcccccataaataccaattattctagcctctatagtaattacttatttacatttatatggttttatcaccaaatgtgcatccccaggtgaattaatctgttttcatgctgctgataaagacatacttgagactgaagaaaaaggggtttaatggattcacagttccacatggctagggaggcctcacaatcatggcggaaggcagtgaggagcaagtcatgtcttacatggatggtggcaggaaaagagagagagcttgcagaggggaactcctctttataacaccatcagatctcatgagacttattcgctatcatgagaacagcatgggaaagacctgcccccatcattcagttacctcccaccaggtccctcccatgacacatggggattgtgggagctacaattcaggatgagatttgagtggggacacagccaaaccatatcactaggtattatggttcagtctcatccattttgtaaaaatattatatagtcttttttaatctacaggaatcctcatccctttcattgccttacaatgt

SEQ ID NO: 133990 - DNA, 1051 bp, Homo sapiens
caagatgtacagtaggaggagatgagaggccagtggtaatggatgacagaagtgaacagggatgggaggcatggttggactggtcctgctggcttctgggggcagtgggaaatgtctctgggttcaaagtacttcctgcaggggtttggcgactcccaggcagctggttcctcagctgcccagggaagagctggccccgcagctctttggagtgctggcgtggctggttggagtatggctctcagctctctgcagttgcagagaaaggtgaccaccttccacactgccacacagtgtacctacccacagaacagatcggcaacaaggatttttgcagagtgtgccttttcactttgggcaaatattttgccaggagactgaccatatacctttttttccctaagtttgcatgcgttctctgttctcgatcgcctccaagagccatgttgggacactggtttgttctgttctgggcttcaatgtcagtgcaactttaatatcttccctagatatattgtatgctgcttatagtcctttttcatcttctttgctcaccagtgccttcttaaaaggtggttttgaagctgcctcttcaacctcatgatcagtaagtttggagggggactcctttgttgactggtagtctctgagtgaattatctagctttcttttccatgtatttgtgaccttacagagattagggaactttgcaggtgttaattctttgtgccctctgagtcagaagactaagaaatggaagttcttccccatgtttctcaatgagtcgtccttcaatgctcatgaatttcattatgtcacaacctgcaccagggagcagtgaggcatgattgaatccttcctcaatgaaacttcacattataacatatgaggtcatttcagaaaaggttgtgatgagcttaaactgacttatgaaggcacacccagtgaccccaaggttagggtcggtaccaagttgaaagagtaatcgtgttatcttgatgtcaagacccttgctagctagtcatgctgcggcttcgttgaagtcacatgc

SEQ ID NO: 133991 - DNA, 1063 bp, Homo sapiens
gtttctttttttccccctttccctaagtgggttatggaagtctactctagttaactaacttttcttcacaaactggctggcttatgccccctgtttgtaccctgcagttccttaaattcttagagaaaattctgaaggcccagaattaggaaagccagttaaaaggcagaaataaagtgaatgataattatagcttatcctgtaagcagcaaccatgtggcatagtgtacttgcagactactcagataaaatgaggttagaagcagctctcctcccagaggtgacagctcacagggtcacgggtgaggtcgtggtttcagcacagcagaggtgaagttactttggcagttgctgagacaccaccaagccttggataaataaaagacatcagcttgtaaccttgccaatcacttaatctttacaaacacaaatatttaatagaagggccatgaaaatggatttgaagatgaaaaatagacagaataatatctcattacttcatgtgaagtgaaaactggaacctcttaagaacatgcttgttactttccaacaagaacattggcaatttccaggacagaaagttggagtcatgtgtatgtgttactaaatattctgttggagatgaaagtggctgttgatcaagcatgtatagtatctggatttcgggaagttaacaagacagtgtagtgaggactagaagccacaggcccatctgaagccacaaaagaaagttgtgagtgtgctttatggtctgcccctaaaagcaaaggaaacacaaactatgtaacctggtctacgtggcagaaagaaaagtggcattgaagctcctactaacatacattaaaagtaatttttttaatgctaaggattctctgttttgcataggataaaattcaaacttctaaacttggcctacggaccccctatgatttttagcctcttccttgcagtttctcctgcccctctgtgaaccaggtcatcttggacctgagcctgtacatgcaccctctccccctgggagacttcctcactcatcattacctgactgacttgtcaggaagag

SEQ ID NO: 133992 - DNA, 1026 bp, Homo sapiens
tcatttagggaaaggagcagggctcattgcccaggtccctaaatctttctgcctctatcttaccaaggttcttgaaggcccatttcctcatacatgcatacaacagcttttattagtatcttacactaagaatacaacacatttcttctaatagcatctcactccttagcttaggtgtccatgccaactggggaaaaaatagtctaggtttatcagtttagaactttcctttgggctcatcaaaaagtcttgtgcgatttctatgttgtatttgtaaaagaaggggaaaaggagagggaagggaaaaaaatgtctttcttaatttttcagaatttgctcttttcgttaagattctttgacaatttcatttcatgagacttgaatacaatatagattttcaagtacagagtctataaatcatgatcctcatgtcagtcataaattggctcaaaggaggagtagcatgctgggcctccataattcccaggaaatacctaatataatagcataaatcaaaataacttacaaagctggtgattttgtgagctaaaatacttttctcagtagcataagggtagaggcctcactctactaggataaaatgcgttttcattgtggaattcagcagacgtatgctaaaggaacaagattaccttctgtggactctacatttcctcttactggtgatgagttctttcaaaataaaatgtaatgaaaataaccactagttttgttcatttaatctttagaaaacaatttgaagaaatggcctcttattttaactcgtcttctgtaaacgaatttgctaaacatataaccaatgccacatcagaagaacgacagaaaatgctaagagacttttatgcttctcaatatccagaggtaaaagaattttttgtggattctgtgtcacaattcaacaattcttcctttgagaaaggagagcagcgcacccggaagaaatctgataaaagagaatctcttataaaaccaaggctgtcagattctgaaaccttgtcatttaaa

SEQ ID NO: 133993 - DNA, 1043 bp, Homo sapiens
cccccttgctcatccacctgcctttaatggatgggtggtctgagtttctggagatgggcaagatggagcagtctccacacttggctcttcagccccggcgccccccacagccgcctctgctttcctggagataccgcaggctcctaacctcaggccggcttgtgctgctccaccctctccctcccccacagacacaggccacttagcgcgctctcccgtccctcacccctgccaacagcagccacttctggccacttcctttacatgtgaatgagtccaggtctgggctgcctttgtccggggaggccggtgggatttccatcaataattgttggttggtgagtcaggggtcagcagtggtctcctttccaggacccagaaatgacaccacaagggtaactggccactatttcctgcctaggaactagcagcatcccacccccaccactccatggcctagataagacaggccaagaccccagagacaacaggactctggaacagggaagggatttatgattagcataggctctagttaaattcctttttttatttctgtgcattgacctattatgtaatatgcttttttcttcctggaatacagatcctaccagtggttttattccttttttatataatgtttaattcatctgtctctgtaaatccatcacatgaaattgaaagggtctcaaagagcagactgtttcccccctaactcttccactattcaacccaggggcaagcactgtcatccctcactgctaccagcttctggtcagtctttctggccacacgtatgtagacatgcttcattcttttaactgtgtttttgatgttttctatattaacaccaaaaaaaagtacactaagaaatcagtgctatttccgaatggagcccggagtttctcagcactgcgctcctccagtgccagaagcaccctacttctcttcctcagttgcttcatcaatcacatggggctggggcagtgaggaggatgtatttgcctcacatagagacttaaaggttttcctgatctcctctg

SEQ ID NO: 133994 - DNA, 1051 bp, Homo sapiens
gaggaaggcaagtatcaaacaagtaaagaaacaagcaaatgtcagatggccataagtgttatcaggaaaataaaacggtgtaacaggatggttacagaaaaggcaacactgggtggagccgtctgggagggtttggtggagacatgatattgagcagaaacccgattaatggaaatctagaggacaacattccagagagaagaacaaacataagggccccaagactgaaagaggtctgatacatgtgagaaaggaagagaagtgccttatgactagggtgatgtgcacaaggggaggtcaccatgggcttagtgaggtcggtgggggcaggccattttggattttatttaagggcaatgggagaaagggggatcccagtccatacaggggctttctgtgatttagaaaaaggaatccctctcttaagtaaaaaaaataatcacatgaatgactagttcagtgcatgacttgaacaaccattcacagtgtccctgcaggggatagtgggaactgcaaaaggctgagcactcagcagagaatgtaagcaggagaggggaggggagtgaggagatagaagagtgtcagctctggggttcaatcagcagtgtccagcctagtttgccgaaacaatcattccataatccaaactgctgtttaaatcgatggccagacacatgcatcctattaggaattaggcaaagctgctgctgggaggaggcactccttgactcagcctggctttctcagcctggtcactggtcacccctcagcatggggtgcacatgcatcaacagtgtgcctctgcctcccacagaccctccaacctgtacatgccccaagttgtctagcacagctgagaggcctgtgtttctttggatggttagctccatatctctaaataataagctccatgtcttatattagatagaaattatgttcagctgccagcacagagagccagcaaaagttgcttaaacaagataaagatttgtttctctctcacataagagaatccatacgtgaggagcagaaagatggaaggaaattggac

SEQ ID NO: 133995 - DNA, 1146 bp, Homo sapiens
acatggtgaaaccccatctctactaaaagatcaagatcagcctggtcaacattgtgaaacccgtctctactaaaaatacaaaaaaattagccaggcccgtggtggtgggtgcctgtaatcccagctactctggaggctgaggcagaaaaatcacttgaacctgggaggtggaggttgcagtgagctgagatcgtgccactgcactccaacccgggcaacagtgcaagactccatctcaaaaaaaaaaaaaataataataataataataatgataagttagagccatgcattgaagtcaagaatagggcaggaaactggaaaaagaaattgtctagtcataagcatgacttttaaagcaagacagctctctttttatctgcctttaggacaatatattcctctgagattaatgaggggaagggaggggaagtgtgagatcggacagggaatggctgggaagttgctccagtgagctgcctcttccctttgggctatgtccagaagcaggattggcgtgagaggtgggcaccgagagaggggcttgggaagccagggccagaggagccgaggtgtgaacacttggaggatgcagacaagctgcggaaacttgagatctctcagggtggcaaagacaatcccaggggtggctgggaagagataggaggataactggaagaggccacaaaacatgtgtgaggcactttgaaagcagcatccaagggtcaatctggatttaccaaggtgattagagtgaaaaagaagtgagaggggagggagggagaaaaacagtaggagatagagggaaggagagaggagggagggtactgcttggtcaggacagtctaggtaatgctttagtaacagataaatcctgcacatctgtggttaaacagccaaggtttgctttttgctcccttgcacgtcagcctcccagttactcagaggcccagctgagggcatgccaacttgagatatgttatcaccattgaaaaagcaggacaagaactggcagttctggttttcaaagcacgcactggtcctcaaagcttcctccaggaaatggtgcacgtctttcccactcacatttcactgcaagaacaaatcacatgtgcgatgatttcaaaggcgtggagaaggtcaagccta

SEQ ID NO: 133996 - DNA, 1124 bp, Homo sapiens
agagcaatatgtctctggtataagaaaacaacagagcaaatacaatcataaacagcaactgatactcagcctttggtatcagagagccagaggaaagggagggcctgcccaggcatttgttgccaggagggaatggaagcctaccatctccagacgaccttccagtttccaaaagaaggctgaagtataaatttccatgtgaaatctgcttttcccaatgtaagcccaacctttaaaatcattttgcatgggacaaattgacccgtgagcttctagttttcaacacctgcttcacactattcctgggatggctcatcttttatgtgaaacacctgttggcaagatagtcatgggcaactcattcatcagagaacggcactgcttcatggttggtaagagagggaggaaagaagaacaagttaattatcgggggctggggagtcaccaggggaaaaggcatttctgtcatttatttactagtatttactcacagagcaataaatcaaagtcactggcccgccaggagcagcgggagtgtcggcagcccagccgtgccagtcagaatgctctttcttatgtgatgcgcatctggggagggctggcttccaattatctcatgcagctcttatcagattccagagaagagaagacaaaaggaggggaggacagccacagtcacttgagagatgcgctgctatctggaacaggatggaaggaacagggcaggcaagggaagcccctgctggaggagcccccagaatcagcccacctgagggctgatccatccacttgggcaggaggctgttccacccctgcccagcccaactcccgaggccaaggccttttctcaccatgggaaccaaacagcattcagttcagcaatggtagaaaaaaaaaatccttcttgtagtataatgaagagatactcacgttgcagagctccagaaacagaccttggctgtggtgggtgatggagacagcgtgttgaagtccgcacctcggccacgctgtacacacccagcgattccctgagtgtgaggccccaggcgactgctgccttttgatgggtggcccgagggggcaaaagccgtcctgggaaccacacccctccaaggctctgctca

SEQ ID NO: 133997 - DNA, 1176 bp, Homo sapiens
agccaaaactagaacgacggcctccggagagacacccaagctggcgaagtgaagaaactcaggaacgggaacggtcgaggacaggaagtgagtcatcacagactgggacctccaccacatctggcagaagtaagtcagcccaggatgcacgaaggagagagaatgagaagtctctagaaaatgaaacactcaataaggaggaagattgccactctccaacttctaaacctcccaaacctgatcagcccctaaaggtaatgccagcccctccaccaaaggagaatgcttgggtgaagcgaagttctaaccctcctgctcgatctcagagctcagacacagagcagcaatcccctacaagtggtgagggaaaagtagctccagctcaaccatctgaggaaggaccagcaaggaaagatgaaaacaaagtagatgggatgaatgtcccaaaaggccaaactgggaactctagccgtggtccaggagatggagggaacaaagaccactggaaggagtcagataggaaagatggcaaaaaggatcaagactccagatctgcacctgagccaaagaaacctgaggaaaatccagcttccaagttcagttctgcaagcaagtatgctgctctctctgttgatggtgaagatgaaaatgagggagaagattatgccgaatagacctctacatcctgtgcttttctcctagtttctctccaccctggaacattcgagagcaaatcaaaacctctatccagacaagacaaaataaaattcaccatctcctgaaaaaaaaaaaatttcagtaatacggaggaaaataatcactagattatactataattctaatatttgatgaattatttgaatgggtgcattgataatattaacttaaacaaactttaagatctacatttaattttcagttccttaatttcacataggccattagtctttcaagaaaatattctgcttagatcaagcttttccaacccacagccagcaggttgcatgtggcccaggacggctttgaaagtggtgcaacacaaattcgtaaactttcttaaaacattatgagatttgtttacgattttttaagctcatcagctatcattagtgttagagtattttatatgtggcccaagacaattctccttccaatgtggcccaaggaagacaaaag

SEQ ID NO: 133998 - DNA, 1210 bp, Homo sapiens
taattcctatagtcccagcactttgggaggccagagagggaggattgcttgagccccagagttccagatcagcctgggcaagatagcaagactctgtatctagaaaaaatttaaaaattagccaagtttagtgatgtgtacctgtagtcccagcttcttgagaggctgaggtgggaggattgcttgagcctgggaggtggaggctgcagtgaaccatgatcacaccactgcgctccagcctgggcgaaagagtgagaccccatctttaaaaaaaaaaaaaagaaaaagaaaaagaaaaaagaagtgcagcccttctatctagccgccatctgttgctaaggaggatggctgctcactgaggctcactccagaatgttagggagggattctcctcccttggctcagcccagctggtgagtgatgtcctagtcacccacactcatgatggatgggtgctgggatcttagatccatgatgtcttctgattctgaatgcaggctgaggtggtttcactaagatggagctgggtgtgacgacacacatctgtagtcccagctacttggaagacaggcgggaggatcacttgaacccaggcattcatgtcccgcctgggtaatatagccagatcttgtcaagagatgaggttccccccaacccttttttaagaaaagaaaaatggaggatggagaaaatgttgcatgattggaaccctggagttggaattttaaagcaaaagtggaaataaagaacatccatgctgtccttggtttaaggctgtgctggtgcataggcggcctgcaggaagctcctctctgcccctgcgttgggctgggccctgtgctgtgctcccgctgctgtgcagctctctcctctgatctgggtctgagtggctccggggcaggtgctgtggatgggatggtcccctctgacagccagggcctggcagagcaggcactcagtggcatcagtttgagttttttaattttttcattgtatggataaataggattatttatagctcctgggaatctaaattaatgttagatttattaaaattataacaatttgagaaacttggattttcttttttttttttttttgagacagagtctcgctctgttgcccaggctaaagtgcagtggtgcgatcccggctcactgcaacctccgcctctcaggctcaagcaattctcctgcctcagcgcctccga

SEQ ID NO: 133999 - DNA, 1048 bp, Homo sapiens
tatttttagtagagatgggatttctccatgttggtcaggctggtttcgaactcccgacctcaggtgatccacccaccttggcctcccaaagtgctgggattacaggcaggagccaccacgcctggccaaaaatccttttttttttttttttaaattgtgactgagggagaattctgacttatgatgactaaaattaatttcccttctcacaaatatatttgtagataataatgtgtggaggcgtcaagcaaaaatccaatttaatttgcattcagattttggtagaatttttgctctgtgtttcattctctttggttagaaataatcttattttgacattgaagaagattcagggtatgccactgcaaactgtgccactgtgagatcaggattattttgagccgagaaagattgagaatcaacagatcaggaagtttgctgccttctcctttctgcctaaaaaccagggaatcaatttcccattgtgaagaggaccgcttctcccatcccaggaagaggagagcaattcctatcactggacggagggtcggccctgagatgcatctgcataaacaaaccctaaaagaacccttctcgttcatcatttccaccataggtttcctagttactttctaacaattacacaatttatttgttccttgaagcccaaatcctctttcctttttaaaacgtaagtccccaagtctaactgtttctttgagtttcacttcttttctgtgaacttcagggaacatattaataagattcgtattctctttctcctgttaatctgtcttttatcagttaaattagcaggcccccagacactgaatctaagagggtacaggaaaaggttttcctccctggcaatgtgtatttctgaattatgacatggcctagcactgtctgcaacgatcaagtgcaggtgggtgggccacatcatggctcagctattgctcttcctcttgttcctgtcatagatccccaaacgtatttatgctggtgctatttataatggaaatggaagagaagctgtttcaaaagaatg

SEQ ID NO: 134000 - DNA, 1033 bp, Homo sapiens
acgggtgaggcggggcccggggccggggggtctgcgggagtgcggggctgcccctgtcctccgtgcgcttcagcggcgcccgggacagggcgggtggggacagggaccctcgagtctcagctgggcacattggtcgagtttcccaggcgccctccagaactcgctcagctttctacactcaggccacaacctgagaaagtcgttctcttcctgagcgcgcctgccctgctgcgaggcgccctgtcctaggtgggctggtagagctcagacagattctttcatacacccagcgagctgaaaacagggattcaaatgcctgcttcaaaggacgcaattccttacacagatctccatgttcaacggtcaggtactcctgagccagtaagtctgtattgattgactgttcattctcagatgaccagcgtgttcatggaaaactcgggaaaacaattggaagttcatatggagtacttttttggattagtgtgaagtaaacgcaaatttgtgctgccttgaacctatttgtaaggactagaaaatcctgcttaattctgctaccattgtagcggcactgagaaaattgtggatttagacccagctccaccggttaacacctgtctttttggaccagtctcacagtcagcaatttttttcagatgcaaaaaacctgaatgattacaatcgtgttaattaccctccagggctctgcacgagctgttatatgtgaaggctctttgtaaactctactatgttacaagaatatgccatcaacattttagagcccaaagagacctagagtgtcttagttagagagtatcttagagtatcagctttctttttttatatatacatacagattcagcttatgtgggtctcacttttctcgaatataaaatacgaaagctgaggctggctgaggtggtttgcacctgtaatcacagcatttgggaggccaaggcaggcatatatatatatatatatatagtgtgtgtgtgtgtgtgtgtgtgtgtgtgtataatatttttttgagaca

SEQ ID NO: 134001 - DNA, 3938 bp, Homo sapiens
agcctggtcaacatggtaaaatcccgtcattacactctagcctgggcaagaagagtgaaactctgtctccaaaaaaaaaaaaaaaaaaaaaaaaattagccaggcatggtggtgggcgcctataattccagctactcaggaggctgaggcacgagaatagtttgaacccaggaggcgaaggttgcagtgagccaagattgtgccactgccctccagcctgggtgacaaagtgagactctgtctcgaaaaataaaataaaaataaataaaaacagctttgttggtatataagtagcatataagaaattatgatacatttaaagtgtacagtttaatacattttaaagtatacaatttgatacatttttgacatgtatatactgtgacaccatctccacaatcaagatggtgaacatatccatcatttccaagtttcttcgtgccccctttgtgaactgaactacacattcctccctgtcccccttccccccatacaacactgatctgctgtcactataaaatagtagttttatacaaatgtagtttgtttattctctcgatgggcatttgggttatttttggctattacatataaagctactatgaacattaatatacaaggctttgtatggacagttttgtatgatctgttactgtcatttaaaatgcatttttcttttttttttttttcttgaaacggagtctcgctctgtcaccctggatggagtgcagcggcccgacttcagcttgctgcaacctccgcctcccaggttcaagtcattctcctgcctcagcctctggagtagctgggattacaggtgcctgccaccatgcccggcaaatttttttgtatttttagtacagaggggttttcaccatgttagccaggctggttttgaactcttgacctcaagtgatctgcctgccttgcctcccaaagtgctaggattacaggcgtgagccactgcgcccagcctaaatactcatttctttagttaccaaagagttgagcatttgcattttctcttgtaaattatcagttggccatgtaacagaataagggtagtgtttttaagtttttgaataaactctgtgtcacagatgttaatcactttttcatagtttgtgggtttaatatttacagcgttaacgctgtcagaagttaccatccctctgtagataggataaataagtttctaaagactgttttttctactatttctgtattttactcaagtccatttcacacaggctctttaaggcggtgatagtttaatggcaaaaacgtgatttgagagtgagtagaagatctagaactgccaggtttattgtggaaacctgagcacgtctcttaacctcgttgaacttcagtttctttcctctataaataggaaatttatgttaaatcactttataactttataaactgaaccacataaaagtaatattgtggtatggaactttttaaaagaaaagtaaacatttggaaatttcatgtctgccatgtaactaatgttgctgcatttcacataggtattgggaaatgagagagcagcgcacccccactttgaaaggcaagctggttcagaaggctgatcaggagcagcaggaccctctggaataccttcagtctgatgaagaggacgacgagaagagaggggcccagcgccggctgcaggagcagcgggagcgcctgcatggagccctcgcgctcatagagcttgccaacctgactggggcgccactccgacagtagcttggacactgactcttccactgtacaaaagtactgcccagcatacttaaaaagtagatccttgggcataagctaagcaccttatttgcttatcataggctgctattctgtagaaatttatgaagaatgttattgccccagaatatggggtgagagagaactgcacttttttaatatggaaatgaattcatcgtaaagtttaaaatattttgtaaatatggactgcacagtacagggtagaaaactacatattgtgggaagctagattttgcaagtttaatgcattcattggaagcagttctcacaggaagcactttctgaataagacacttgtttgaaaaacagaatggtacaaatagccaaagaagattaaaacagattatttataagatcatttttaacaatatatattagtatgtttaacaatactgtaaacactgaagcaagcaagaaagtataaaatatgtaagatagataattttaattgcaaaatactgtgcccactaaggctagagaaatgggaggctattttggaagatgttctaagtaatggacttagaagaaaatagatatttgaggctcttggtaagatgcacaatagttcagaatttttgaaattggagcaaaatcagtcttattctatctggggctttacaactcagtataatgtttaagtttgaaaagcacttgtcatccctagcatgttaacttgggaacttttgcacatttcatatttctcatttgctgaaattgagtgattaatcttgcaaagtctaggtaacatagtaattggtaattttaaaaatacatattaagggccctgtaatgagatttggcacttggatttttactaaagggacacctgcagggttgttttgtagtgaaatgttttagatcttttgttagcaaacactacattttaattgtactgcttgtttagaattattagcaaatggaagcctccatatttatattttcagtgcataaagccaccttcttgctttacttcagagtaacatgccaagctattttgtgttcactaaatttagctatcagttaaacactgcagaaaatattagctactcaaataagtaggcttctgaaatagttttaactgcaagtgtgttaacttgtgtggtggtttgaagccatttttccaaataaagttattaaacaccactttatgtactgaagcatgaacagaaaaatcaagagctgagcagaccacctcctttatgtaggcaaaacttccatcattttggcttttgttctaaacagaactaaatgacatgcatagcatggtaacttacagatcgcttaattggagtaaaactcagagtaatagagggaaatatgggctcttcagtgcctttttagcttttttgagttgaagacgttcctacagatgtagtttaaacattacaaagtaggcttctttatccaaaaatcccaatgtgtcatagtacacagatagtttaaaatatgtagccacggggaaggggaggcatgtaaatgtcttgaagaggagaaaaagtatgaaagaagatacgatagttacgaataatgtgtatgatgaggacatactttaaaaatgtaattcctctgtacagtaaattacaaatctttagggatttttttgtaataagagaatttatatttgtaatggtctaagaatttttttgtaatgtggtatatagaattttaatttggagcacttataagctggtaagagagactatagcatctgaattatcttggtttatgtttcagcatttcctctagaatttttgctctcaaatatgtgatttaatgaactaaaaacaacactcatcagtcttgggaaatttgaactttgatcaacttaactaaagaaggaagggtagtaagaatttttcaaatacaaatatttgccaattcacagatgataacatttaaggccttcaaaagtaagggtttttccttgtttctccagtcagcttttgtcaactctaatagttttttcataaacattttttatttgtataattgcaacagtttaagaaattatcacaactatttagaaacatttaaaatgttctttttgatataagctatatacttggaaaaatacattggtatctaaaatttgaggtgtgttaagactgctttttgttttaaaaaatggtttacattcaaatttttga

SEQ ID NO: 134002 - DNA, 1413 bp, Homo sapiens
aatggaattctcgggtctgaggttttgaactccacccgacccctgcgatggagtctggctctgtcgccaggctggagtgcaatggcgtgatctcggctcacggcaacctctgcctcctgggttcaagctattctcctgtctcagcctcctgagtagctgggattacaggcagagaccaccacacccggctaattttcgtatttttagtagagatggcattttgccgtgttggccaggttggtctctagctcctgatctcaagtgattcgcctgcctcggcctcccaaagtgctgggattacaggcgtgagccaccacgccctgccattttgaacattttgaactcatgctaataaatcactttccaatggtgttggacacacatggccacgaccaaaatgtgactgtcttcctgtccccgctctagcactgatgagactgtgctggtttgattgttttctcctccaaattatagatcctaaatttcaccatattaatttacttttctggataccagtgaaactgaatgttttccacatgtctatgtgctggatgtccagatcctgacaggtgttaaccttgtgttttgaaggctgcctgagcagattcacccatgcaaaccgccactgtccgaagcacccctacgccaggctgaagagagaggagcccacggacacactcagcaaacatcaggctgccgacaacaaggccgcggccgagtggctggcgaggtcaggaatgctgcctttagtccaccgtgaagatgcacagcgcgggctggggctatgtcagggacctggacatgcctctcattttaaataagctgcatttatacacattttataacataattagaaatgacccctgattttctataaaattgttgtgagtggtattaggatcttaggatctgtgtgtgatagaaaattacaatataattagagtgcccagactacagtttattttaaaaggaagagttttcctattttgaaaaaatgttttatatgtattgtatttcattcgtcatgaatgcaacctttttcattttctttatgttagccttagctacgtgccaattaaaacagggatagacagccgaggtgggtggatcgcctgaggtcaggagtttgagaacagtctggtcaacttagtgaaaccccatctttactaaaaatacaaaaattacctgggcagtagtggcacgtgcctataatcccagttattcgggagattgaggcagaagaatcgcttgagcctgggagacggaggttgcagtgagccaagatggccccactgcactcttgtactccagcctgggtgacagagtgagaccctgtctcaaaacaaagcaaaacaaaacaaaaaaacaccagggatagatgttagtggttcttcttaggtgaggttccaaaaa

SEQ ID NO: 134003 - DNA, 1845 bp, Homo sapiens
gttgccagtgtgggtaagattcaagactatgtggcagaatgaagaaagggctgagtgccgtcctgatcaccactacctcactgtgtcacctgataccccaggcatcagcctagatgtctgtacatcaaggaactgaaaggaggatccctaagggatagttgagccctattagcatattttgtaaaaagcttttcccttactattttaaacaatccccctatatctgtgttttattttaacttgtattcaactatcacaaccatttattatgtctctaaataatgagaaatttagggaggacttgttattctttgagttatactggaaaatgcaaactaatgtacaattgttgattaaataatgtttttttcaataaataatgtttaattatcattaacaaatttttcagcacttgagcctggcactgtgttgtctataggaatttaagtgaagtataaggtactaggaatctttgcaggagactaccatgacacataaacaacacaggaccccaggttaatgaaggtatacaaagttcaattatttggaggtagataggaagaattcagttatttggggagataggaagaatctcactgagagcctacaggattgggaagatttgaatgggcagagaaaataggattttcaaggattagaacaagatgaggaactgcctcctggctggaatgattctccaggagggaagtaaggataaactctgccccttaaccccagtagctaatgaggttggtgagattgcctagagtgccgatcttagaggaccatttaagtcagcagataatttttagttgtccaaggtgtgtaataggatttgggggtggttcaggagctagttggtatgacaaaagcagatttctatgccagctactctgggattgctgtgcagggggagaaacaagaggccggccaggaggctgtcggagggttcatcctagtgggagggctgcccgtctgaccaggggaagctgagtgggaaggcaggagtgggtggaagacatagtgaagaatcagcaagatctagtgatttggagtatgagggagaaaaaatatgggataagctcaagatgataacctcaaggcctaaagaatagattgtgttccccagcagatagtcattgatgccacccaagtgctgccattagcatttccacctgcagctcagtaggggccatgacatgttttattgttattgggagtcatgacctatataaaggctgattctctccccatccccctcctcttctggccttattatctcagatataatatctaacatctgtctacttaggtgagaggccctatctgtgtgactatccagactgtggaaaagcctttgttcaaagtggacagctcaaaacacatcagcgtcttcacaccggagagaaaccttttgtttgttcagaaaatggtacggtgttagaagttaagtttatggaataactagttgtgacttaacagttaaaatatcctttccttgaatttttttgaggggaaagattttttaatataaattttataaaactttataagctttcttctttgataattgtgatacatgctgaatttctcagaaatgattgattttaaaaatttgttggttttgatttttgtgggtacacagtacgtatacatatttacagggtacatgagatacttgatacagacatgcaatgcataataatcacatggtaaatgggctatccatcctctcaagcatgggtcctttgtgttacaaataatcccgttatactcttaacttattttagaatgtacagttaaattattattgactatagtcaccgtgtgctataaaatactagg

SEQ ID NO: 134004 - DNA, 1441 bp, Homo sapiens
tctactgtttcaagttgcttttttattcagtttgctgagttgctataaatgtattttctggagttgtgacaaagctgatctgacagtttttgcttgattttttagtcatctgtggagggatgggccattggagttacctgcctcaccatttttactgatgtcccttaagaaaggcttttgctttgtttttagagacaaaacaaaaatgttttgtgctatgttgcttcgaactcctggcctcaagtgatcctcctacctcagcctcctaaatagctgggactataagtgtgtgccgctgcgcccagctcccaagaaagatttttgaaagttatattatgatacgttgctttaatgagtagcgttaaataaattatattaatgtttataaaaattatcaacaggatggaatccgacgtggtaggcccagagcagatactgtccgcgatttaataaatgaaggagagcattcatccagcagaatccgttgtaacatctgtaatagggtgtttccacgggagaaatcgctccaggctcacaaaaggactcatacaggtaagttgagcaaattttatagagactgccagaagtaacactttttttttttttttttttttttttttttttttttgagatagtctcgctctgttgcccaggctggagtgcagtggcgcgatcttggcttactgcaagctccgcctcctgggttcaagcaattctcttgcctcagcctcctgagtagctgggattacaggtgtgtgccaccacgcccagctaatttttgtatttttagtagagatggggtttcaccatgttggtcaggctggtctcgaactcctgaccttgtgatccgcctgcctcggcctcccaaagtgctgggattacaggcgtgagccaccgcgcctggccagaagtaacacttaactgaatgctgatttgatattgagtaataaattaactttttagttgctttatattttcttattaccactattagttgtgaagttttttaaaaaggcagtatagtcagtttctttttggtggagagtggtggttttatgaatactggttacatgtgatttctaaagttatcatggtaattaacctagatgtcatagtcatgttattggcaaatttagttttaccccctacttgcccaaattgtacttgatatacttttatctatgtaattgttaaaattcatctgtaggccaaaaacattaattgtcaagtttttaatagaatgtttagagtcctcactgtgctatcaggacatttgacctaagcattaaatctgtggtgaactatggtaggcagccatctcaagattatggtacatctttatttgcatatggaaattatatttgcattttaaatatcatttagagagccaaaaaaaaaaagtatagagggcccttgttctcgctataaagttggccccaaa

SEQ ID NO: 134005 - DNA, 2055 bp, Homo sapiens
ttctttaaagtacttgtagttccttatctccatgtgcatcatcagggaattgtgctgagtctgctcatttttggggaagagaggagacaagtctgcaatatagccagtgccaataacattctcccaatatgccacatagaggcactaacagctgtgggtttgagaacaatatttgcgttcatttactgtctattctttgccacttctcccaggggaggtgtcagcgtctgagtcctgcacaccctgtgtcagctttctcttgctcttttgattgttcctgcccaacactgcctccctcgcctgtgggaacacctactagcttattttggctgctcatcacacgagtgcttagcactgttggcatataattatatattatcttcttctggattgtagaattctgagagggaagaaagcaggtctaactgccttctgccacaagttgttccaaggctccccaccttgtccctgtgccctctactaagactgcatttgaagttacttcttcactggggctggtggggtctggcttctcagatactattcaccctacaggatctaccggctgccgtatcctacttcccctttctgtgtcacctgaacacttcaaaacctagactgtacatactgttacgaatagctgatttttaaatactttatacataatacataaattcatagtatttatgaatagtaatgtttgagcaccatgttaaacctaacatcatgttaacatagtaggcactatttattgcctggcacagagtaagcatttcataatgttagcagcaaactgctgggctctgtgttgagcattttgaattctttaattcattttatcctgtttacctgatgaggaatgagaaattagagtccccaagacaaaatctagttaagattgtatggtaagtggcagaactgatcggaaccttctagagtccctgttcttagtccctatactgcactgctcctgggactatcacatgtaaatagacttcaggggtttatttttgttttttaaatattaagctgagataagtagacataagaaatacatactattggccgggcatgctggctgatgcctgtaatcccagcactttgagaggccaaggtggatggatcacttgaggccaggagtttgagaccaacctggccaacatggtgaaaccctgtctctactaaaaatacaaaaaaattagctgggcatggtggtgcacacctatagtcccggctactcgggaggctgaggcatgagaatcacatgaacccgggaggcagaggttgcaatgagctgagattgtgccactgcactccagcctgggcgactaagcgagattctgtctcaaaaaaaaaaaaaaaagaaaagaaaaagaaaaaagaaatacatactatgtatagcttatctatgtctcaattgagatgctttataaaagtgcactcaattcaataaactggaattaaaacttgagaagttgtgaagataggtcaggatgggaagtaggtagttacaagttaggaagcatgtatgcaagtcatgggaagtttgtatctaaatctgaatgtgaaaaggttcacacgcctccctctgagacctatttttgttttccttctaggttgtgcttgttccctttatttgaattctacttataaaaatgtgtcaaggacttttaggttttttagttatcacatgactaaacactttcaaaatcactaatcaaccttctagaggtatggagattgtttttaaaattataattactaaggtatgcaaaagtttttggcaatttaataattttgtgttgcgaatcgtcaacagtcttgacaagatctgtccttagcctccaggtgcacttggctgctgagtgtaacactctgtaattgtccgaagatgcctagaaacatggttttctcattgttaaggccaaaaggaagagggtcctctttaagtaacattgcttattttaatatgtattgttaaaagatggtctttattcatttatttagggcattatatgattatttgttttgtcttattttctgagctaaaataat

SEQ ID NO: 134006 - DNA, 2314 bp, Homo sapiens
cgcccgctgcttcccacccctgcagcctgcgctgcggagtacaaagagcggagggcgcgcttgacctggggctggggtccagccctgcccgccggtgccgtctgctcaactagttaggtggctgctgcgcaggattccgggaaacgtcagtctgccatgagccggcaggactgagcctgcgactcggagcagagcgagtgaggggcagagcggtgctcaggagtgcggcccggggccgccggagctgggggtcgggccgggcgatgatccggggcttcgaggcgcccatggcggagaacccgccgccgccgccgccgcccgtcatcttctgccacgactccccgaagcgggtgctggtgtcggtcatcaggacgaccccgatcaagccaacgtgcggcggtggaggggagccggagccgccgccgccgctcatccccaccagccccggcttcagcgacttcatggtgtacccgtggcgctggggcgagaacgcacacaacgtgacgctcagccctggggccgcgggggccgccgcctcggccgccctgcctgcagccgcagccgccgagcactcggggcttcgtggccggggcgcgcccccgcccgccgcctcggcctccgccgccgcctcgggaggtgaggacgaggaggaagcgagcagcccagacagcggccacctcaaggtgagcggcgcgggcgggcgggcgggcgggacgtggggcagccggggcccgttaacggtgcggcgggcggggcggagttgaaaacgcgaggtcgatccggctacggcgggggctgcggctgacaggatgctgacgtcactgccgcgcgccaaaaaccggccccagtcggggggggcctgtcacgtgacaggcgggagcggcgcgggagaccgtccttgcggcaggtgcagtgggcgggagcgcggcccggggtcgctggggaggccgggtcaacggccactgacatcctcccggcgggctgccgagtcctcagttccgagaggaaacgagagggatgagggccttgagttgttccaccgactgcgagagggcagggagcgcacagtgtttgctccattactgcagatcgccctcgccctgttaaaagatgccctgcagagacagccgaagagcaagaaaggacttctgggcctgttctgcggctgaagttgtgccttcgctgcctttcatttatccagcatactacttgctaggtgttgagagcacatagtggaatgggacgctaaaattgcttgcagtctccgactgcttaaagctgggaaggtcgttaccactggttcaaacctattttacagatcaggcagctggggcttacagtgattagtgaggcgaccttcccacgatggcacagctcagtagtggaagagcggggactaggtcgaggttttgtggcttttagtcctgcatgtgtttggggtgactttctgctgacttatactgaactctgtagactgtaagctccaggtgagccaggagtatttctatctagaagactatatgactttactaccttacattctgtaaatgctcaataaaggtgctcaaaaaatatttgtgtaatgaatgaatggtgctaacagaagggtaatatccaggttccatttgttaagtggctgtataagataagcaatttgcaagagataacaagtaaatcacatagtggataactgcatctgtatcagcacataatgtataagttgaaacgagtttgatcattttacatgcagtcacaaggatgttgaaactacattgtttgggttttgaggaaattgatatattttatgtggcattattattaaataattataaggttataaaactataggtttttatacacttcagctcttgaaactgcacctcagtaaacatttgaaagaacagaacctgggccgggtgcggtggctcacgcctgtaatcccagaactttgcgaggcagaggcgggcggatcacgaggtcaggagatcaagaccatcctggctaacacggtgaaaccccgtctttactcaaaatacaaaaaattagccgggcttggtggtgggcgcctgtagtcccagctactcgggaggctgaggtaggagaatggcgtgaagcgggaggcggagcttgcagggaactgaaatcaggccactgcgctccagcctgtgcaaaagagcgagaatccgtctcaaaaaaaaaaaaaaaaaacaacaaaaaaaaaaaccataacagagcctggtgaggtggctcatgcctgtgatcccttcaggaggctgaggctggggaatcacttgagaccaggagttcaagacca

SEQ ID NO: 134007 - DNA, 1035 bp, Homo sapiens
attctttccagtatactataaccatgattttcttttagaatttttttctggagagaccttagacctttaatttaccagtttttattatatccactccttcctagaccaggtgataggtttgatcgagacagaccgttgagaggacgtggaggcccgagagggggtatgcgcggcagaggcagaggtggccctgggaacagagtttttgacgcttttgaccagagaggaaagcgagaatttgaaagatatggtgggaatgacaaaatgtaagtttctttgtaaatgctattttcactttaagatggtgtcagcacgtggtatgaatctattatgtgttaatatttagttaactttatagtactgtgctgttattcttgtgagaagctgatcctgggacttttatgaaccactctttctgatttggagattgactggagactagcttctggtttaagggactattctttctttccgtagagcagtcagaactgaagacaacatgggtggatgtggagttcgaacctggggatcgggtaaagataccaggtacggtgtaagtgtgtgccctctgagaacctgcaattaagtggaaatctctggatctttgcttttcttgaaaatgatgtcttctgtattgtgctttatacttgtgtgcccctaagtagagattgattttaggcttttgtttcgtgagataagtttttaaaacaggtttgctatgttgcagttagatttaaactgcttttaaaattctattactttagccaaacaaatttgtgacagatgaccatgtatttgctgatgcctcaaacatatggcactgtacatttgcacatgcctcaaaatgctttttgttggctgcacacggtgactcacgcctgtaatcccagtactttggaagccaaggtggacggatcacttgaggtcgggagtttgagaccagcctgtccaacatggtgaaaccccgtttctactaaaaatacaaaacctagcagagcatggtggcaggcacctgtagtcccagctacccaggag

SEQ ID NO: 134008 - DNA, 1026 bp, Homo sapiens
tgccttctctctgcctgttcccacaagctgagcactacaagtcacatcgtgggcctggttggaaccccagtaaattcccggtcactgatattctgaaaccaggccttggcgatccccggttcttgggttcactctttctctcaccttctctaatgactgttttaatttctcctcaaaaccctgacactgcctcccactgtacccttccgccatcgtcctctttcattttctggatgcaacatttccttctatatcacagagtaattatgatccattaggtggcaacttcatcatcctcccactgccaaagatacaagactgctacacctgcacgcctcctgggctccttccctcgtgctaaccatcgggctgccatcccccccgacctcttcacgcttcagatctttcctactgacttcatgaaaacttcatactgttagttagctccttccttttttggtatattcatctccttcctcccaaccctagtcttccagtcagcatttaaacatgctcagtctctcctgcgtaagtgtcctctggaccccacattctccgtcagctgcctctttcagagttgcatgtggccttcttcacttcctcccctccacttattcctccctttagtccaggcctggcttctgtcctcactgtccttctgaaacagtcaccatgtctccagatctaatggatgctgcagtctgcgtctttcttgacctctcagaagcatttgactttattgatttcttcgtaaacgtgctctcctgttggtttctgtgatcactctgctcttcttttccttctgcctctcagcatctcctttgcaggctcatccttgtctttcgggtcttttaaaatgttaagttcttcagggccctgccttaggccttctctttctgtagagtttctttataggatcttatgcacttctgtgacttaaattgtcgtttacacactaactctggaatatgtatctctggctcttaacttcaatgtgggctccaggcctgtggctccatctgccta

SEQ ID NO: 134009 - DNA, 1023 bp, Homo sapiens
aatacacttagatataaaacatgtatattgtttgctattattagtcatgccaaatcttatatcttaacctgctcagctgatagaaatttggtcccacttgaaatcataataagttcaaagatgtttggattaagattgtaattgcaagaatgtgggactctagaacatacagaactcactgtcttagaatcagaacagcagtgctgtcttcctttgtccagctctgcagcccagggccagagacaaatccagagaatggctctgactagcccctgatggtgttttagctcctgtgtagcacactgcagccactaagccagatgagtgtggggatggctgtggacttgtgcgtgtttgatgctgtaattgtgtttcagatggtaaaagatgactatgaggacgattcccatgttttccggaaacccgccaatgacatcacatcccagctggagattaattttggtaacctccctcgtcctgggcgtggagccagaggaggcacccggggaggccggggaaggatcaggagggcagagaactatggacccagagcagaagtggtggtaggtgtctgtattgacggtttggcgaaagaagttaataaggacagtgccctgggcccaggatggtctaatttcagagggtcatgagtttctgcagtcacttctttctgtagctagtgtgggactgatgttggggcatttggacggtgttgtagcatcatggacatcttgcctagagaccgttctgtagccctggcttccagggtctgctgtgaaggcactcccgggatcagagagaaactcactgtcacccgcattagacaagatccccaggcttgggattgaactggagcacctgacgttttgcttactgtggcctgattgtgtgccttgggctcaggtgatgctgtcagagtggacagaatcctccctaagatctcaagccctttgtgaggggaccttcctcaacccctccccggctcacctgcctcacaccgtcctcagccaaggctgcctgatt

SEQ ID NO: 134010 - DNA, 1055 bp, Homo sapiens
ccgggggctgtgcctttagcgttagaggaaacacatagagctggaactgttaatggaaagcagtcacagctgagttttcggagaccaagaaattaaaatacaattgcacttactgtttacttgtaaatgttatcttctctcctggaatattttgagttctggttttcacttaaccaatcatttaaaaatcgctattgtgtagccactggccaccactctgtgacacagaatcagagaaagcgttgatttttaatggtgatttaaactacctcgtggtttctgtgtgtgtgcacacacacatctagtgtttgggtggtttttaggaagaatattaagtatgtgacttcaaaaaccatgttatttaacctgccaatcaaatggaaagggatcatggcaaaagcaaataccgcatccttttcttccgcagaactagagtcagagttcggcagctgcgtacaaaggcctctgccctcggcttgagcaaaagttgtaaataactagtatttattaagcacttataagcagtttttctcacttagtcctggctccagttctagagttcctctttattgcttttggtgaaagtttggggttgggggtacacctcagaggttcagtaattcacctggagtcccaccctgaacagagctggacccagagccacacacgcccgggaacacacactgtgctggggaggaagtgggcctaggagggcctgcaggtccaggcagctgtagagctgctagaagctggggtgttgctctccccgctttctcatagacacagaggtactgtctgcctgttgtcacacagttcatatgctcgcttgagatggaatctgaaccttggtcccaggatctgtgctttttcccactttgccacactgtctaaggtggctttgaactggaacccaagtgcaaataaaggttggtattcgctcctgactttgtgtagagaaaacagtcctttggttactccaggccacagcagtcggtcatgattttgttgaataatcaaagttgaatccatacacgttagggtcagttaaggatgtt

SEQ ID NO: 134011 - DNA, 1710 bp, Homo sapiens
agggtgtcactggaaccacagccctttttcattttataaactgcctcttcatgttgcctgctcaagtttccacctagaattgctatcactgtggctctttctaaaaatctttctatttaactggttcactgaaattagtcatagaaaacttgtgatttggtgaagaggcattccttgtaataaccaaatgacttgggatggtgtgcatagcaagggcagtgttacacttatgaggactgtctctagcatccaggaagtctctgggtctgagggatggaaagttcttcctgctatgaatgagagtggactcttcccctcacccccaactgaaaccacaaacaaccagaatcttctggaattctgacttagagtcgttgttatagaagaccttgttgctatggaacatgaaactgtgtgtcagatggagagatccccttaacctaagagccttaaatagccctgaaagtacactgggacggtttgcgatggaattaaaattggaagtgaatatttttaggtgctcttgaagctttctggggactcaaaattatcaaaagtcagggacagtccggaggaagagcgtctgcaaaactgggttcctagaagtatagacggacttagctttttgtagaatttggtgaggagcagcgcctcgtgagagcagaatggcctggcgtggccagtgcttcccggcagcacgcagctctgcggcctccagaattcccctgttctgagcttgatgcccctagcctgtcccctacctacttcctcccctcctctctagccctctcacaggggtgattgctacctctctgttttcttgggcctaggcaagttttagaggagttcccaagcattgttatgaggccagtgtgctcgctgggctgggcgggatggcctgggcttgtgtgtggcctgagggctctcctggggccttctcttttcccagtcacctttggagccacagaagcagtgcactcattggatgtctgttcttaacacagcttctctttctacattaaaaaaaatcattattgcattttggaaagcagtgctcatcaaaagcaacttttaaaacctattttattgttcctttaaatgttctctcccgctgaaactgccctggagaggctatctgctgctcttccatttacccacatcaggttattctccatgtcactcagtggagatgactccagatgtgtttaaagactggacaattcacctatactgtgtaggaaattacctccttaattacctggtagaattgtcagcagacatgttcatccgatgatagtactgcagttttctattaataatttgcagacttttatctaacctgcactcatgtacagattattaaaagttttaaaatgtaactgatcagtattgatcaatcattgtcttgatttttttttacagcgtatatttctaatcatattttttaaagccaagagaactggttgaatgaatgtttattttcctgaaggtatttttaagataaagcttcctaatggcgtgtaaactttgcatatgtatgtagtttgatacatattgtcacatttgaaaatcttgtgggttgtaactggttttatacaaaatatcgaatagtggaaattgtataattacaatcatgtaattaaaagtattaacccaacagcctttttgtttattgtgttacttaccaagcattttgaattctggtaggca

SEQ ID NO: 134012 - DNA, 2324 bp, Homo sapiens
agccctccagattggaagtggtttttctgactcttattttggttttgtttgctttctgaaagttgttactgacctgaaagtgtagcgtcgtgaactggggaaggagagaagagaggcaggatgagaatcgtggagtgcggaggcaggtagcccgtggggtgcctcctgtgctcggtggagctggaagccgcttaggtgccagagctttttctgtgaccaaattctggcttttgaaataacccagtaacagttctctatcttttcattctgcccgctcctcccacagcctggtccctcagaggaaaggaaggacaaggagtgctttgcagcacgtgcccctggcggcgtcatggtactttcctggccctgctgcccctgcccgtccgtcttttatgatttttatttactcgtattggtttttttaaatttctattttttgcagaactgagcctttttctgccctgcctttctcctgtttgtctttcctttgtggttgatattgtgttgtcttctccaaagtatttgtcattagaaacttacagcaagcgtatactttttagcatgtcagtatttttattatgttgccctccttgtctttgataactgcctgtggacgctgtgtaaactttctggtaaaaatccttttttttccccctgtagtctctccatttcaaggactaaaacagtcttgcgttaagtaaaaacctgtgaccagagctgaaggaagactctaggactgaaaactgcaacagaaattagcacaatttgaaaacaaaacaaaattgcaaaagccttagttgctttttccacctaagaagttgatcaatggagaaaatgtccactggagtttgaataatgaactttgagtttgggtgcaagcaaatgactcagagaagggtccagctctcaagctgaatgacaaacatgctgttgtaaatttagtctcaggtgtaaatacccaagccctctggtacccagggagctggctggtctgtggtgcatgtgtgtccctgtgatggcaatcattgtagttgctggccttcagaagaattgaggatctgatggaggttttttatgtatttattttctgttcaccttgtgaccctgtgtcaaaatttataaagatacaaaaggcattactgaaatggtactttctgtaatttgatactatttggcttaatcatcttcacttgactatttgtaatactgttgtaatgttaactctgttaagtacccaagctgcttgtcttccaccaaagagtgctttattaacaagaatctgtgaaaatcacatttaaacactgttgcatgttgtaagaccaggtggtaccttagtaacctaaaacttgcaagagaatattaatggtagctttagaagactcaggaggagaaactgacttcagagttggaagatgttgcaagtcgttcctttttctgtccttcagggactgaagaactgggaggctgcccattgtttggttgccagtcatacaaattaaaatcatatttccttccatgaatggaagaaacacactattggtttttccccttggaaacagcaatcccaaataatgtcggcttacaaaaaaaaaaagttaccacttttttagagtccttccctgtaacattggattttttttttcccttatgagatccacctaaggccattgacgtggcctgcgatctcagtgacaatgatctgcttctggatctcactgttgcctttggttagggaacacaactagtaactctgcagagtgccttctcccgcagccctactggaacacagcagagtctgtgccatgaagcagttacagaaacagaattgatgtgctgctaaaaaaaaaaaaaaaaatggggcccgaaataaaagaatatatagtactcacctcagttccttccataagaagtgggtggtttaatgattgttaagccatttttgcctgtgccgggagcatggagggctgagatgtcgacaggcagtgggaaacaaatgccctcctaagccacaaggcgtgcgccagattagtaggcaactccattttaagaagctgcctttttcacaaaactggaagaaataaaagcggttggaataaacaagttaaaagtctttaatgcaaaaagtaattgaaaggcagtgcctccattttggtgtactttcttggaagaaagtataaaattgaccggcatcatgagagacggaagatgccgtgttctcagccaaacaagcaactctttccccgccaggcactgtcgggtggggtcaggccagcttttaaacactggggactggatcacagaaaaacagtggttttctgtccctg

SEQ ID NO: 134013 - DNA, 1093 bp, Homo sapiens
ctgctggcagtggacgcaggtggtgtggcatcgtctgctaagttgtttccagtgaaaagctcctgttatgcagcatgcctggagaattaggccataacaacacttcaggcttctgagtcagactcagagatagtgggaaagccttctctggaggctgcagggcctcagggtcacctttgtgcacgctcttgtggtgtccggagtggacagccagtatacatagtgcatagttgccctgatggatttttttcttggaattggacatttatgttcgagacctggctttttagtttttggctttgccgtgttccttgggttgcagatttcactatatctgaaatctcagagtaccgaggctccaaggatgctgcagagaagaaggtgaactggaatataggcaagaggtaggtaggatggaggattttgtcagggcagatgggaaggaagaaaatacatctgctgcacactgctctgcaaagccatgcttggcctgggttggaaggcagaaggccgcgagtgcccgggttccctgtgacagaggcaacacgtcaccctctggtgcctgtcaggtggtgtgtgctgtcactcatgatagctcagtggagttctcccccaaccccgatttcatcagtgcataacctgcagttaggataaataccgtgttgtcagtgcaaataactggagtcttccgtggtgtggttaatacactcaagttctatcattctcttggttttaaagttccacagaaattactagctatttaatattattattatattagttcactttaatttacactaattttatagagaaataaatacttttaaaaagatgttttccagcagcctgagaatgactacaggatttagcagtagtgtcttgttttgaatggcatttaaacacttcagtcatagttttaatttgagaaatcaggattcagatttcctaagcaggcagtgtatcagctcttgtttttttctcagattaattattttgcagtgtgattgttgtctgtacttttggccaaccgtggcctcaaattatttgagaattaggtgttgtatttaaaaaaaaaaagccaacaggagtcttg

SEQ ID NO: 134014 - DNA, 1856 bp, Homo sapiens
accatattataaaaatgtgccattcccttagcttcctggatggctcaggagttagtaactcccttgaagtgagatcagttctgctgtattacgttcatttttagttgtgcctcctgtgattttgttaactagtctggggttttgtgtttttttgtttgtttgtttttggttatctggttttgcctcctttgccccttgtggtttgctttagttttctgtgtgtgcacatcttctgctttttgaagaacctcaatcatttatctgtgactgatttcagtatcataaagttaaattaacatggggtagttatctcactagtgactgagtcccaaagtatgaaacctgtttaaacacagcatttttttattcaacataaaatggcaaaactccatccttgttgaccacccctttgtatccctgttgctgttggctgggcttttagggtgtctaaaattcacatatggcttgattgattgatgattgcgtaatttattttggcttcccaatttgaacatctgttctttccccttcacccctttccagatgtcccctagctgtgctgacctctgcactgtgtagtgttgtcatctggtggattgtttgtgactacattcttcccatcctgctattctgtctcgatggtttcagaacacagtagccatcaggaccccctgacagatagctgctgtaagtgtcccgttctgtttctctgccgttgcttacttctggtgcctagtgtggttcccacaatgcatgtttttctccttgtcagctcctagctttgttggtttgcctattttcaaaggttctttttctgaatcttttcaattaatgggatggtggtggggagggaaggtgggcttcactgttcctctcatagaaaggatattgaaagtaacatacgttgttttaaagttatgcttatccttaacatatttcaaaatagcagttgataaagacactgaaacagtttttcttcactgaaacagtttttcttccctatcaaaagtagttagcttaggataattggggtggttttattttcgtcagttggctatacaatttccctctagttttctgtatcttgagtatgtccttcccagtctagcaaagaagcatttttcccactgatctactttcattaaatatgtgattttgtagcctcgaaatctgccattgtacagcagctctctcataagtcttctctctttagtgtgcagaatttcctgctctgtctcattttcctcctcccctttagggaatacagtaagtacagtgtgtagcacttgatgctaaatgaaagtaggaggtcggagctgaggtcgcctgtttaaattggtgcatttccatatgatggtcattgttcctgcttttctccttgcccagacatagccagaatgcctttaataggctaatagcagcaaatctgtattctcttgagatctttcatctttgaaatgaagaccttaacagcgaagaggctttatttctgcagaagaatgtacaagaggcccacttgtggaacagcatgttgaagacccccagaaggcgggtgtgtccgtgtcacggggtccaccgccacccttctgtgtctgagctgcgttcttccttctctgaagctttttccttaactcatattttaagaatttcttctcttgtctcctcttggacttggaagttatgaaagaatgcaaaagttccttgcaagatctcttccaaagaaaaattccattgcaaccaactctggtactttgtggtttcactgagtattttcacatagctgagaaagatttaaaaatcaagctgatttcactcttcagaattaggcaaaacctgcttaacttgctcctatttat

SEQ ID NO: 134015 - DNA, 1482 bp, Homo sapiens
ctcttcactgttgatgtgttttctaacaagagtgctgctgtgttgtctctgaaagtcaactttggctgtcttaaaatgtcacctgaagcttgattgtgaaagggaaaaatattctagagcttgcagaaacttggactgtgttcatgtggataaattgctgctctgctgtactgcattaataagtgcaacttaaatcattagctcagtgtttttttacttacacagtacagtgatgatgacgaaatcaatggagtgacacaaggtgatagacttcgggccttgaaaagcagaagacaatccaaaacaaacgctattcctctcacgtgagtctgggttcctttgttgtggttgatgtttcttcatatgtgtgtggggtccttggtgagggtttttcctgtacatttttctccatagttgcaagcccatgatgccactttgaaatgcttgcctatgttatttaaaacctaggggtgctggccttggaagctctcagctgtcccttgtttaccttggtcctcatgagcctttatgggtgggaaggcgacatcagggatactttttctccatgaataatcagcatggggcatcctcaggagcgcgacagcagatgtaaagcccaggatgccagacttgtccatagttactaaagtggtgtatttctttacatttgccatgttgcagatcatttgttttgataagcatgacatgatggcttaatgacattatgttgttttggggcaacaatgaactggtctaaactatattttgggtttttcgtttgtttctttggggaatgattttctaattatagaggaagatttagcctgagaataggaaatgttgtagtactgagtgtatgtatgtctatgtgtacattcttgtgaatgtgtgttagttgggattcaacctgatggagcatccaagattgttagaaaaatatgcagaagcaaagtacatgaccatggtattttttgtaggctgttctttagtaaatgctcccacttgttgccattggatttcttccttctagttacttcctttttcattgtgggacaccagatttccagccttcttttttgcggggagggagtgtgatggacatagatcatttattcagtaagcatcttgtaatatggtaaggaagtatgatataatataccatttatattggcagagaacaggttttcttttcaattaaaagtaattcctcactagtgtctcgtcataaaaattctgaagtagaattacacctaaggcatgtgtcattatgggttgctcccctgggaggttcttcttaaaagacccaaggcaaagaattgagttttacaatatgcagtgttatgtgaatgaatgtagggcatccattttgattataggcatttattaagcatttcttttgcaacttagtggtactttagtcaactatacttttttaaaaatggtgccttttggccaggtgtggtggctcatgcctgtaatccc

SEQ ID NO: 134016 - DNA, 1049 bp, Homo sapiens
gaagaaataaatccaggccgggcatggtggctcacgcctataatcccagcactttgggaggccatggcgggcggatcgcctgaggtcaggagtttgagaccagcctggccaaaatagtgaaaccctgtctctactaaaaatacaaaaaaattagctgggtgtggtgacggatacctgtaatcccagctactttggaggctgaggcacaaaaatcacttgaacccggaaggcagaggttgcaatgagctgagatcatgccactgcactccagcctggccaatagacagaacaaaaaaaagaagaagaaataaatccacagaagctatccctgagaaagatcaaattgtggacttagtaggcaaaaaattttaaataaccatcttaaagatacccaagagttaaaagaatatgtgggaaaagtcaaggaaacgatttatgaagaaatactaatatcagttataaaaagaacacataaaagggaaccaaaaggaaattctggaaatgtactaaaactgagatgaaaaattcactggagggattcaaaagcatatttgagcaggcagaagaatcagtgcgtgtgaagctagaatcattaaagaattagcaagtctgaggaacagaaagaataaagagcataacataaatgaacagaatttaagggatccctgagacacacccaagtagaccaagatacagatcgtgggagttccagagggagaagagaagtaaaggagcagacagatgatttggctgaaaactccccagatttgatatatgcaggaatatccaagaagctcaacaaactccaagcaggataaactcagaggcccatgtgaacatgcattataatcaagctataatgccacagacagtcttgaaagcagcaagagagaagtgacctaccacatacaggggataccactgagattgtcagcagatctctcatcagaaacattgcaggccagaaggcagtgggttgatatattcaaaatgcataagtgagggaaaacctgttaagaattctacatctggcaaaactccttcaaaaa

SEQ ID NO: 134017 - DNA, 1791 bp, Homo sapiens
ttgctttcctctaatgtttaatagattactttggtagagctaattgtaacatgtaggttccctgttcaaaatttatcactgtatattattattttttatgtttaagcagtttttatagctgtaagaatggcttaccttgtaagcatttatgttgaaaatgatgatactaattaaatttaagaatatattaactcagcaatctgtgagaagaattctaaactgcattaaatttgagattgcctctacagttatgataagagctcagggactttgttatttaatgatgatcttttgaatctgtggtcccactttttaaatgatttaattatcttggactcagaatagccagtgcctgcaggaggaaaggatcagttgggaagttaagacaagggaacagagaacgaggatctagacgcagtgggtaagaatccagttcagcaaacagctgcccagatgggacagcagaggctggaggacagaatgaggtcataacacccttcctgggtgtctgtgaaaggcagggcaaacagcacgaggcaaccgtcagtagtagccaggccccagctagtgtgaggcgaactgggctgagcaaagggacggcacaggccctcagtgggaagccagtgcttccttgggagccggccctgtgggaggcagctgtctgccctgctcacagtgcatcacagtttgacttcccttgccacccgagggcttctgacgggcgtttccactgcccgtggtgcttgctgggtgctgttaacttggggaaaaagtgaagagaaatggctctctgatagcttaagatccttgactgcagatccgttaagctttctggaattttgggtcccatccttgttccggtcattgttttagataggatgggttcctgtctataaatacggccagaggagcaggccctcttccatcaataataggcggtgtgatcttggatgagcagttgatgccaaggtctggaaagttgtagcctgccagttttatgaaactcacagagcattataaatagttgtgggttttttttcctctgtggttaaaatttaggagatttcattttttaaaaaatcaagatttttttcttggtctttaaaaaatgtccctaccactcaaatgtgtactaattcccagggccaattcactatttttattagcagacttggtagatacgtgtttgctactctgaacttccagtttcattttgtcgaaattgaggatcattatatatatcattatatatatgtaaaagtaattttaaaagttaaaactattgaaatataagttcatctgaggttttttttaacgagttttttttcttaaccagttttgtgcaggagctatgaaagtgattttatttacttttttattctctgtgttctttcctctgctcaccttttttattgagcagttgaatgtgtaagcctatcttcaacttgcattgatttgtgagcattctttgttaatctggagagagtgatttttttttttaataatcaatcaagttcttggcgtaggaaagactgtatcatctggctgacatgaaaatagtcacaagagtctttaagtgctggaaacattgtgacatctctccaggatttcctggttactcaggctgccacatttgttgctggaatttcaatatcctttgtcactctcagctctagggtgaaatgacttgtgtaacgtttgggttctaaattgtacagaggctctctaagtatataaataaagcttcagaatcctgtgcataagagtagaaataggaagcacatgtctaat

SEQ ID NO: 134018 - DNA, 1734 bp, Homo sapiens
ggtaatttgtctaattgtaaaaataccgaagtagtgattccaagttagaaagtagtgatccctaagaacagttggagaaacatatggtttgttctatagctgtaagcggtaattttgaagcaattttgaaagcattctttccctttaagaaaaaaatagtttcttactgaaatgactttttaggatgtcttgaaaaacgtagtgaaattcatctagaaacttacaaggttgatgctagccatcacatgcatgctgcaatttgctgaaatgtcttgatccaggggagctaaacttttacaaaaataggtttgtttagaagtcatatcactacatgaaaaatcaccacttttgaaacttacggttaaaggcagtttctcttttaaaaatgtgctcattgattattcccacccaaatagccagaatattttgtaattacccattaccactcctaccatctgaaacgtgcatgaaaaaaatgaaaaattgacttcatctgaaaagagttgtgtcatgatatatgaaacgttttttgtaacctccaggaaggaacattgcaatttttccatttcagatcgcctttgttttgccattctctacagcagaccaaagagtgcatcaaatgtacattatttcagcatagataatgaacttgaatatgagaagtaagtattgctctttaaaagattttaactttttgtttttgaagaatctaaaggtatggttataaatgggatggcctgggaaaattataaatctattgattgctaattacaggatgcttgtttttcacctgtagtaataaaataaacctttagagcaaaaaaaaaaaaacctccctaaatttaaacatttagatttgctagtctaatatttacactacaatgagatataaatgtgtactaagtaagatattgtggttttgcccttggaaatatgtgtggaaaaacagcttttttaatttagaaggtatgttcatgttcattgaggttacatgtaggcattatagcacttgtggcatttttaagtaggcattatttaccagaatagtcttccaccagtaaaacagtacctttaagttgtattggcccataacaatttggtatatgcttgcttatcttaatttgatcttgtagacccaaaaaaggcatttatattcagagcatctagaatgtacatcacatttttatttttcatttttaaagcttctacgcagattttggaccactcaatctggcaatggtttacagatattgttgcaagatcaataagaaattaaaggtaaagtctttaagatttgacttaagtaatcattgttagcttgatctgggggacgaaagtaaggaaaacatctctttttaaaaaggaaatgacatgtttttcactgcagtggtgtttgggacatgcacatggttttcttgttttataagatcatagtgtatctatttgttttctagagttttgaatgaacagtttaagtttgggtcgtttggttctagtttgaattagtgatgcccaaatacttgaaaagccaaagtgggaatcagttaattaagtgaacctcgtattgtctgacctaatagaactgaaacttaacaagagaaactcttcccttgctgtggccattgttctttctgccttcattttgatggggagtgatagcaaactaacaagaaagctggactcatcttactttctctcctattttgaaactcccatgatactgtactacatgat

SEQ ID NO: 134019 - DNA, 1032 bp, Homo sapiens
atgtgtagtttgaattttagcaagtgtacaactacgctaaagttccctgggtctttcctgtcatcccactaccccaagcatctgctgtctggtttctgtcactatagattagttttacctgctcttgaacttgatgcatatggaatcataaaacaaactcttgtgtctgtctccttttgtgtatcagtacttcattcctttgttactgctgagcggtgttcccttgtatgaatatatgcggtctatccattgtcttattgatgtacatttgggttgctttcagtttttagcttttataaagctgcagaaatattcatctgcaaatctttttgtagacacacatactaatttgccttagatatatacttaggagtagaatgtctgggtcatagggaaagcctgagtaactttgtaagaaactgctcaattttgccagtgtctacataccattttacattccattagcaatgtatgaattctaattgcactacatcttctccaacaattggtgttgtcatttctaattttagccattttaatgggtgtgaagtggtatttcattgtggttttaatttgcatttccctgatactgaatgcttttttcatgggcttataggccattcctgtatctgcttttgtgaaatgtattcaaaacttttgccctggttcccatttttaaaacttcaatatgtaccttacaatgagaacacagggacacagggagggaaacatcacccactggggcctgtctgggggttgggggcaaggggagggaaagcattaggacaaatacctaatgcatgtggggcttaaaacctagatgacgggttgatgggtgcagcaaaccaccatgccacatgtatacacgttctgcacatatatcccagaacttaaagttaaaaaaaaaaaaagtgccttaatcccttccacaccattttctttaaataaacaacaacagtgcaattggcatgacaatgcattttaaatctctctgagaagttgttttctaaagaaagaattacttattaatat

SEQ ID NO: 134020 - DNA, 1076 bp, Homo sapiens
ggccagtgacaggtcctgacttcggtgaatgtggagtgactggaagagctgagccattgccagtgtagcatgccaggaatggatctccacagagactgtggattccgttcaagttccatttccaggaactcctcgtccttagctagacagagtgtgtgcctgtaaagtcaaccactttaagtcttttatttcgaataagggaagataacaaatactttggcactcttgggaatgtttcaaggtggatctactggtttaattgttccagggtttctaatctgtgtgtcacatgcttacacgaagctaggcaatagggagatcacaggttaccgcatgtgatgtcactcagtgctgtttactatcggtacctttttggatgctttcctctctttattaaaatcttgcgcagtgtcttttcattttttcttcagaggtaattcagtctgttcttactggaggggaaaaataagtcatagtgctaatcttgtaagaagtggaatttaacatgctcaagctttcacatgggatcaagattcaataataaaagccttgacgttggaagcttaatagttttagaaataatttttctgcagtttctcgaatgtcagtgggcagcatttagaatgtgtttgactaagtagtgctggtcttcctcccctttaagcctgcacttgtggtacagccaggtttctagtttcatgacgcatttatcattggcctatgcctggcccttggttaggcttcctgtatttttcaaatgtggccaactagacagcattatacctcttcacctagagttgctttcttttttttaagtttttcattttattttgtttattttttaataggtaatatatgcatgtaggttcaaaattcaaaagataacaaaagagtaaacaacatagactaaggcactttcctgttttccctccccataatctgtcaatattactaacctcttgtgtgtcttaccagagatgttttgtgtatttgtgtgtgtgtgtgtgtgtgtgtgtgtgtgtgtgtgtccgtttctatcacctcaaatgacaccacattattctcattgttctgca

SEQ ID NO: 134021 - DNA, 1027 bp, Homo sapiens
gaggttgcagtgagcagagattgtgccactgcactccagcctgggtgaaagagtgagactccatctcaaaaatatatatatatgaataatttttccaatgtctggtgaaaatctgtcttgtgtgtcttttcgtgtgtgtgtgtgtgtgtgtgtgtgtgtgtgtgtctgtgttttaacctttaaacaacagggaatagtgtcattttggtatgtaactgatcatatataagtatatgttaataattcaccgaaaaccctatctctattaaaatacatctaaaggaaaaggtctacatttcaattagttctatatctctaatttggatctcttgctatcccagaggatataatttaaaataagatttcttgtttattctcggtaagaagtaattacagagcacctttaagctgagtattgcttcttaaattgaaggcactaaagataaagattgctaaatatttcgggaactagatttaactgtgtgacttgaactgaaaagcattctaattttccattcttttatgggtgctggggaagaactgctttgacatgaatgtataatagaattaaaatgtcggtcttaaattttggggagttgttctcagtttgctcttggaatttattattgtaatactgtcattagatagtttgttggaagcagctaatacgtgaaagtgaagcatcttaatatgcatctcttttctttctgacaatgaactgtcaaaaaagctttgagtttatctaacaaacacagctgaggctgggattttaactccactattaatatattctaattttaaactactgtaactgaaagggcatacagcactaattcaatccagacatgtttgagtgcgtttgatagtctcatccttgtaatagctgctgaaaaagatgtggtagagatttcagactggaccactgacgtctgggaattgacactagcacacagactgggtcaggcaaggtacaacctggtgccgccagctgttttgcatggaagaccttatctgtaaaactcataga

SEQ ID NO: 134022 - DNA, 1048 bp, Homo sapiens
acaaatattcagtagctaagatgggaaggaaaacaaaaaatactggctactaaaattcatttttcccagggtaataaaaaatagatttaaagatctcatttcttctttatatcctattcccaacctttccaaataacttgtctctctgctacacattaagcatggaaaggtcctttgaaagcaatttgttttacaaacaaaaaaacaaaaaaagaccctgtctgccaataatatgcaccattagtttcaaatcttttggataatcgtctgtgaaacactattttaaaacatatacaagagcattttttaaattaaccactctgaaaatttatattctatcagtaaataatttcatatattgttttattttctacctcaggctctcccatggtagaggggtctcccatctttaagaagacctccccaacaataagcttagctgcaatttaatattaggcaatataagtcttcagtataataaaaatacataacaatagcctcaagaatgaagtaacagctttggtttattcctccttttacagggaatctttctaaagagaaactctaacatttatcccaaggcagaaaagatgatcaccacggcaccaaacctcctccgctgctctgacaaatacagagccagcctcatctggagcatttctgccctgagctcgctctcagaagcagacagaggaacacactgcatttccactgtgctgattcactgaaccttttgtgcaagtacacgggaatgtttgcttcttagcttgaaacccttccagccgtgatgactgtgcctcagcctgccctttgtcctcgcagctgctgtcacgcgtgtgacacaagagaacactgatgcagccctggccatcaatgggcatcaagccaggcacttcatatgcatccccttcatttcattctcacaacaaatctgtggcagatgaaagcatcgaggctccaaaaggttactaataatctgtctgtgctcaaccctgggatggggcagagactaggtttccccagtgtcctcatgcctagtggctagctt

SEQ ID NO: 134023 - DNA, 1003 bp, Homo sapiens
gttttatggagtcttcctcccttggtaatgtttttcctccttcaattttctgtgcacattcaagtttctggaaattgtgccataccagcaagattagttctctttttttttgagacggagtcttgctctgttgcccgggttgagtgcggtggagctatctcggctcaccacaacctctgcctcccgggttcaagcaattctcctgcctcagcttcctgagtagttggaactacaggcatacgccaccatgcccggctaatttttgtaattttagtagagatggggtttcactatgttggccaggctggtctggaactcctgacttcgtgatcccccccagcctagatctcccaaagtgctggggttacaggcgtgagccaccgcccgcagctgattagttatcttttgatggctgcattatatggccaaatcatgatttatttagtagtaataaatagctggttatttgggggttttccagtccctattgcaaatggctgcagtagcatcaatgtatgtgtctgtttatatgtgtgactatatctatagagtgtatttctagaggtgaaaacgccaggccagagtacatatggactttatccattcctcagtggactttttggctattaggaataatgctgctgtgaacattcatatacaggttgttgcatggacatgttttcagtataacacccaggagtagaatggcaggatcacatggtatctccacgtttaatgttttaaggaactgtcagactctttttccgaatggctacgccgccagcgttcccacaagcaatgcaccaattattccacatccttgccagcacttaatattggattgacaagattctttcacagtggagtaggtttgtaaaaattaatgcatattgtcacttctgtccaccctgcccttaaatacatcattttttaacttagtcccttgacatttttattgcagcctatttaatctgtaaattgaattcccatagatcccaggata

SEQ ID NO: 134024 - DNA, 1001 bp, Homo sapiens
aaacccccgctgctccgtagccttgggaccctgggcgccgcgttgcccgtccggcgcgtaagcccgagcccctctcctgggcctcccgcgccctgccccctagcgcgccccccgaacgcctccgcctcccggggtccgctccccgccggggcctcgagaaggaaggtgtcacgttggtggcattcgagccagccggcaagacgaatgtccgggttgtcacttttgagaaatcccagccagccagagcaggtagccaagcagcccttcgatagctgttctgttagtgctgattcgactgttcttggagactcataaatccaatttggcagctgttaggtttgctgggattgacagtgacgcgtgtgaaggcattaaatgtgatgatgtatgtggcaacgctgtgtaaacagcagagctgtccacgattttgagggaattggcagtctgttttcagtggcggggaatgtgtcaacctcggtgcgtggcgttattaaaaactgtttccagcccctagcctttgataaaccaggtaagctggagtggcgagaacattaagtggaagtgtttagacaaacacagacgtttaggagaaataatattctaggttcatggacaatctggaaactaagttcgttttgaaatgaagctgagagcagagcgggtttctcggctttggtggatggcccttgggaaccagagcgggcataggaaggggttgccctgagtaccagtccccggccggtagctgcggggggtgtgcgggaggtgaagcctgctgagactgagaagccaagtcccgctaacgttgtgcccttcccaggagagggcctcgccgaggacggatggggctgggaacgggtgggcctatacatagtttctgcccgttattgtttatacctcttgaaaggatctgtgttgaatgggatttaattttaggacaagtaatgcatttacatggtacagaactccaattctaaaggtgcacaggagtacgtgcagaa

SEQ ID NO: 134025 - DNA, 1051 bp, Homo sapiens
tcttacatctctccatctctttcgccgctgtcaagtctctgacacctgtttggcaccagacctcggctccggaaacacctctggcttgcttactctgaccaagttggacaggctctgctggctggagtctcggtcctcttcttcagacagaacttggctgttctctcttgggctctgcaacatttgctacaaatccaagttgtccctgcctttggcccccgctgccaggctcaccccccaggtctcctccctcaggggaatgggaaagacagcagagagcctgcttcacagtcataatcaatggagatcatcaggtaatccgaggtagctaacagcctcctttatcctctacacggttttctttccaatcattgcaggacaagaaagacatccttgtctgactctccccttatccacacaattagaagtgaattaaaggcatcaatttcaagtcacttctgtagttgtggaagggtgaaggcaatttattttttatctcctgttgtggctggaaagaaaacttcttgcaatgacttttctggttttggaagagaaccagcaaccaattctaaaatatcgggtgatttttctttttgttacaaattcttccgaatgtgatgaaatcctagcgcactgggttcccactcaaccagagttctccttaggaaaaaggagatcaggaatgaccaaaatgcacagatctatagttttgcattctcatatggtgggaagtttttctctattcatgattttttttttctcttcagtgataccagagcatacatttgggcagattaggttggattctctattaagttcctctttccatttttaaatgcagattcaaatgagcagtgaattattttatccaaagttaggggctatataaaataaaaaaaatgaagaaggctgaaatggccccttatataggcagtcagcttctagaaatagaagcaaatgaatatttaacaatacttaaagaaaggcaatttgttttcacatttatatattaattattttagtttgtgcgttattaaatattacatacctt

SEQ ID NO: 134026 - DNA, 1036 bp, Homo sapiens
tttttttgagatggagtctcactctatcgcccaggctggagtgcagtggcgcgatctcagctcactgcaagctccgcctcccgggttcacgccattctcctgcctcagcctcctgagtagctgggactaacaggcgcccgccaccacgcccggctaattttttgtatttttagtagagacgggtttcaccgtgttagccagtatggtctccatctcctgacctcgtgatctgcccgccttggcctcccaaagtgctgggattacaggcgtgagccaccgcgcccggccgataccgcattttctttatatttatccattgttgaacactgaggttgcttctatatcttggtgttgtgaatcatgctgtaataaaacatgggagtgcagatatctcttcaacatactgatttcatttcctttgaataaatgcccagtagtgggattgctggatcatattatatttctatttttaattttaataacttccagactgttttccgtaatggctgtactaatttacattcctaacaacagtgtacaaaagttcctttttctccacatcctcaccaacacttatcttgcatcttactgatagccatttaacaagtgtgaggttatatcattgtaattttaatttgtatttcactgatgagtagtgattttgagcatcttttcatatatctcttggctatttcttttttttttttttttttgaggcggagtcttattctgccccccaggctggagagcagtggcacaatctcggctgactacaaccttcgcctcctaggttcaagtgattctcctgcctcagcctccagagtagctgggattacaggcacatgccaccacacccagctaatttttgtatttttagtggagatggggtttcaccatgttggtcaggctggtcttgatctcctgacctcaggtgatccacctgacttggcaaaagtgctgggattacaggcgtaagccaccatgctcagccctttgtccattttttaatcaggctatgttgttttcttgcaaagtt

SEQ ID NO: 134027 - DNA, 1110 bp, Homo sapiens
tgctaccacccccttctaaaaattatctcatgaaaagctagtgattaattctcttactgaggtggttatcttgtctgtccattaacctctgaactcttcttggccatccatgtggaattagaaagcaggcagagccaaggaggaggaacagccatgacactgcatgtccaggggaaatgacagtctatctccttttgctttcaagttgctgatatttactgtgtattgtgatctttgagttggccatcatgtgtgggaacagcttccaaccttatctttttttgatggacagcagatgacctgattgattgagaaaagccaggtgcctagttcatctgaactttttgggtcatattgagaaagtaggcgaaggggttggtagagactgcccttttgctcaagtacacagtagcaggttagaactccttagtgtggggaacagggttagtggtcaagtgaaggtctacgctttgctttgcctgaggaactagctacatttgactcctgtcacttactcaggttgctgcaatgcaggctggctgccatatgtatgtactgattctatttgtggaaacatttgggctgtataagaaaagtaatgtattacagtggttagtagcacatactctggaggtgtgtgactatcttggtggaataccagttcatgcacttactatgtgagttgggaaagttgcttaaattctctgcatctgagtttgtcatctatgaaatcgggataataatagttcctatctcaaaggttgtagtgaggataaaatgaaggtatgtatatataatgtgctttggttagggccccgcataatatctgttgctgctattgttgctgctgttataggataattatactttttgcccagatattgctcaggggtctttgtaatatactcaataacctctgtccttttccttcagagcgtatatttccatttataattttacattccgtgaaatgagagcaaggactgtatcctgtttctcaccattgtccccaacacctagctggtatagtcaaggttaacaaatgtttgttgagtgaatgaatcgtttggagttgagtattttcactcttatagaatgttggacatatac

SEQ ID NO: 134028 - DNA, 1360 bp, Homo sapiens
cctctgcctcctgggttcaaatgatgattctcctgcctcagcctcccaagtagctgggattacatgcccggttaattttttttttttttttttttaatttagtagaggcagggtttcaccatgttggtcaagctggtctcaaactcctgaaacctcaggtgatccacccgcctcagcctcccaaagtgctgggattacaggcatgcaccgcacctggccaatttttgtatttttaatagagacgaggtttcaccagattggccaagctggtctcaaactcctgacctcaagtgatctgcccacctcggcctcccaaagtgctgggattgcaggcgtgagccactgtgcccagcctcaggacatttataaatggatattaacagcatttagaatagtgcctgacacatgggaagcactgtttaagtattagctattattattaatggagccaattttcccttgattccttgtataaaatggaaaacctgctcctctttcagctggggtccagaatggggctcgaatggctatgtaaaaatagccaaagacaagaacaaccactgtggaatcgccacagcagccagctaccccaatgtgtgagctgatggatggtgaggaggaaggacttaaggacagcatgtctggggaaattttatcttgaaactgaccaaacgcttattgtgtaagataaaccagttgaatcattgaggatccaagttgagattttaattctgtgacatttttacaagggtaaaatgttaccactactttaattattgttatacacagctttatgatatcaaagactcattgcttaattctaagacttttgaattttcattttttaaaaagatgtacaaaacagtttgaaataaattttaattcgtatataaaggtgggcctttttttaatgcattggctttttgtgtagtcaggaaatataattaagctctgaaataataacttcatgtgccaatggtatgttaggagaaagatgctagcagaaagctggcttcctggctcttgagtagttataaaaatacagactttatatcagctgcccagttactgtgtgttacccaactcctgaatctaccaaaatttgataaacaatttggaaggacaaacctacattttttttttttatgagacggagtctctctcactctgtcaccaaggctggagtgcagtagtgtgatctcagctcactgcaacctctgcctcccgggtttaagcaattctctgcctcagcctcccgagtagctgggattacaggcgcgtgccaccacgcctagtgtatttttagtagagagagggtttcaccatcttggccaggctggtcttgaactctcgacctcgt

SEQ ID NO: 134029 - DNA, 4799 bp, Homo sapiens
agctcatctcctgctgtgtatcagccaagaaggtgtgaggtggtgttccttggggatccgcttgcatctacttgggatggtacgtcttcattagtgaggttttgcctggatgacctcagtacaattggtgcaaaacctggaccaactctttcctagttttctagttgttgccttaagcttctcacccgtcaggtatctttcacacccttctcataccctaaattatcgcatatgctgtttcaacgcctccaactctgcaggctgcttttaattttggtgggcccatcaaatacctccacttggcctgtttcagcctcttccacagtccttggggaaatgctagggagaataattgaaatatttctattccacgggggctgtaagatggctttttaggattggtctaatcagatactcatttcttttctctttctaggttttgaaacatgaatctttcgctcgtcctggctgccttttgcttgggaatagcctccgctgttccaaaatttgaccaaaatttggatacaaagtggtaccagtggaaggcaacacacagaagattatatggcgcggttggtaacatctgaaactgtccagagggactctggagagaatggtcctcgctgttgggagttgatagccagagagtagcttctagacaccagaccttaccaggcaataacctaacagcacccattataggtgcaatatgggcatatatctccattgtgtcttggcttggagaacagctcccagagaagtatcaacccatccctggccatggtttctcttccatttctgcccgcaaatcggcttggtgaacatgggttgggtaagtagacataaagtccaccagctatatgtttgcctctagaatgaagaaggatggaggagagcagtgtgggaaaagaatatgaaaatgattgaactgcacaatggggaatacagccaagggaaacatggcttcacaatggccatgaatgcttttggtgacatggtgagtgtggcaaggattgctgaactctgtgctgcttctcagttcttcaccaaaatagtcttgcttttaacattttatttacttctccttgaagaccaatgaagaattcaggcagatgatgggttgctttcgaaaccagaaattcaggaaggggaaagtgttccgtgagcctctgtttcttgatcttcccaaatctgtggattggagaaagaaaggctacgtgacgccagtgaagaatcaggtgagacagcgtcagattcagaccctgtctccacaggaaagccaagaaggaattggtgtcattgctgtggtagatggtggcacaacatatggtgatgggttttttgtatttttggtttttggtgttttttttgtttgcttgtttgagacggagtttagctcttgttgcccaggctggattgcaatggcgtgatctcgtctcactgcaacctctgcctcctgggttcaagagattctcctgcctccacctcccgagtagctgggattgcaagtgctcaccaccatgcccagctaatttttgtgtatttttagtagcgacagggtttcaccatgttggccaggcggatttcaaactcctctcctcaagtgatctgcccgcctcggcctcccaaagtgtggcgatgggttttttttttttttaaagaatattaaggtaattcaattatggggtactgtatttgtattggtcttgtaaatttacagctttttttttctccctttttagaaacagtgtggttcttgttgggcttttagtgcgactggtgctcttgaaggacagatgttccggaaaactgggaaacttgtctcactgagcgagcagaatctggtggactgttcgcgtcctcaaggcaatcagggctgcaatggtggcttcatggctagggccttccagtatgtcaaggagaacggaggcctggactctgaggaatcctatccatatgtagcagtggtaaatggagctccttatcttgtcattcgtgctctgcttttggaaagtggaacactttcagagataacagatacttttttcagaattcacattttatatggtagaatctacatctgcaaaccgtgagtattgtcattataaattattagcctttggccaggcgtggtggatcacctgtaatcccagcagtttgggaggccgagacaggcggatcacgaggtcaggagatcaagacaatcctggctaacacagtgaaaccccgtctctactaaaaatacaaaaaaattagcccggcctggtggcgggtgcccgtagtcccagctactcaggagactgaggcaggagaatgacgtgaacccgggaggcggagcttgcagtgagccaagatcgcaccactacactccagcctgggccgcagagcgagactccatctcaaaaaaaaaaaaaaattattagcctttgcacagttctctggtgagatggtcaacagctaatggttaccatataagtaccattagatggttaacacacagctgttcttgcttttacataacatggagaataagcaaaccattctacatataatagaactttatccattgtgaaaaattttttatggacagattgacctaggggttctcattgaagaaatgtcaactaatttttcattttcaaatcaacaaatagcattttatttcatgggacgatttataagggtgttgatttggaaatcctaggttgcaaattgctgagtgtttcggttctagaactaatgttccccaggaggtagatggtagtgatcaagtctctccccctttaactttaaaaggatgaaatctgtaagtacagacctgagaattctgttgctaatgacactggcttcacagtggtcgcacctggaaaggagaaggccctgatgaaagcagtcgcaactgtggggcccatctccgttgctatggatgcaggccattcgtccttccagttctacaaatcaggtaagtgtcattttattatagaaatttaggcagaattgggaagcatcactgtgattgattcttggatatgacatcctgctttgcaggaatgtagtattttgagagtgagcatttaacatagtgatgtttgcatttgacatgagaaaatacttagttatgttaaacttctcataaatatttttaaatggctatgtaattgtatagagacaacctaattttccaaactattttccagttgttgggcctttttttctcaaagttttttactactgtaattaggactgtaaagaatccccttcaagtttttgtttgtttattttggtgctattttagactgacatcctaggaacagaaagggattatgcgagttggtatttgggctcagagatatctaaatcaccttagctgtaaacaataggttttatcttttggattttcattttttttggtagaaaatatcttgaacttagttgaagttagttgatttctagtgagttgaggttgacttttttcctttatcagccattactgttttccggccaatattgtttgggtccttatttggcatttgtttatgacattttactgaatttagagatgcctcccttatggagggtggtagggtgggttactgtcacatgtcgcttggagcttctcaccccagcattaattttactctcccaggcatttattttgaaccagactgcagcagcaaaaacctggatcatggtgttctggtggttggctacggctttgaaggagcaaattcgaataacagcaagtattggctcgtcaaaaacaggtataaaactcaaaattgaaaagggaatttttgttccaaatcagtatttggatacaagttcacaaaagctcaatttcaaaattccgaaagtctttcttctacttagagtgaacacagaaatattaatgtttgattataagattccgtaccaagctttttggagttattgctatgtatttgtaatattttattactaagttttgaaaatttttaaattctgaaacacattagtcctcaagggtttcagacaaaggactgtggacctgtaggtttgagagctgattgcttttttctgtctaatttttcaacaaggaatagtaagcagaaacatctgcctctgctggttctttgttaagtctgagagatcatccgggagtccagtggtctgtgtgcatccttctattgtcattggatgccctgtcatcgaatttcactccccagctctcaggctttgaaggttgtcagaatctattttctcacaattagcattctttaattgagatgtgacataaggtagtatgtggggacagactgctacagtggaattccagttctgcctcagtatcttaaatagttaaggacccacaagaatcaatatattcattcattcatttgtttatttattttttgagacagagtgtcgctctgtcacccaggctggagtgcagtggcacgatctcagctcactgcaacctctgcctcctgagttcaagtgattctcctgcctcagcctcccaagtagctgggactacagggatgtgctaccatacccagctaattttttttgtattttttagtagagacggggtttcaccatgtatgccaggctgctgtcgaactgacctcatgtgatccgcctgccttggcctcccaaagcactggtattacagacatgagccaccgtgcccagccagttttattttattctgagatggagtcttgctctgtcactcaggcaagagtgcagtggtgcaatctcggctcactgcagcctccacctctcgggttcaagtgattctcctgcctcagcctccc

SEQ ID NO: 134030 - DNA, 1035 bp, Homo sapiens
taatgcttctgctgggggctgtgcgttcttccactccgtcccacctttgccgtggactaaacaggagccactgaacgagagtaccctggctcccggccctgcagattttcaccaaaaactctaggactaagttaaagtagggactgaaataccacacagagctcgctgtaaaccacccgctcagcgcagtaagtcgggatagtcagtagatctgagcccttgagggaggcgcctccccctcctccgcgcagcccccgggcgcccggcccagcttcccgcagccagggtgtattgaggtaggcgcgcccagacctgagacgggttgggactgggctgcgtcacgcgcgggctctaagcgcccggggccccgcccagtggccggcacagccaatcgcagcgcgggaaggcggtgggggcggggaaggccgcctggaaacttaaatcccgaggcgggcgaacctgcaccagaccgcggacgtctgtaatctcagaggcttgtttgctgagggtgcctgcgcagctgcgacggctgctggtgagcgcccccgaccagaccgagggacagggcgaagggggactggaggagggaacccccctttagggacactgagaggaggcgggcgcttctgggagtgagagcttctgcccggagctctgccagcctcgaggtggggaacgggggagggcggttggagaccccagggaggcgccggcaccactgggagggcccgggcggggcaggtcagtcatcctgtgggctgaagccggaccggaccgggcggcttcatgcccccagcctggccgcggagcccccgctccctgcaccgccgcaaacattctcggggcgcggcggcgcgtgcagagggcgagagcaggcggtgcggccccggtcctggcccgcccggagctccgggagctgcctgcctcggtccgggccctggccctggggcccctggcttccagcggcgcggccttgtgaccctgccccggtttaggggagcgagtagcacagacccaagtgtgggacggcgggaa

SEQ ID NO: 134031 - DNA, 1800 bp, Homo sapiens
acacaggatttgggacagtagccctttagacaatgctgggtgttgaagacagaacttcatcgtaaatccgtatgttctaatctgatatttatacaggctatgatcgtctcctgaaatgtttcccaattctttatatgtcttttaaagcacaatttaacatatgctaaaaaatttccttccgcatccaccagttttgaatttaaactcaactaagtctgccaggtcgtacaaaccacaccttaatcattctaagacaactcttaaaattaatctacttgtattgttctgcttgtaccttaactatggcataatgaatttgctaattcaaaatgttgcagagccagtaaccccagtgttatctgcagaccatctgaggtacttttaagcatttttttgaattctattgtttgctttgaaaacatggggtttaaacggtcaaggaaaatgcgttttgtctcgtcattcaggagctcttcgggacacgcctgcagtgttgcagacaggatggaatgcaggcaagagggttccaactcagagcgcagacccttgggaaaagcacttggtgggtcatcctgaaaacttcccatttccggcagtttttgatggcatggcagtcgtgacacctgaggctctcctttggggcactgtcctctgtggccgtgggtggccctgggccctcctcccagccagtcccgccccagagcttcaacaccactgcaggacacccgagcaaaatactctgttggagcagggaacaaacccacggctgcgctcggagtggctgctgaggctggatttcttcttactgattctttcacatatggaagaactgggccgccactgggaagcgagaggccagccctgctcggatcctttctcatttccagtgataatgcctcactctgaatttccatcagccgcaggcttattcatccaggagggtgcatctgcaggccaagggccctccatcggcattctttgcttaaggctgtatgacagtttgtccgagtcacctcctccggcccactgcacttgtgccaggcaggtgccgaggggccctcttctgtccctcatgcttcgtgttcttggatgccgtgggcctgaggtcacgccttcgtcagtccgggagggccttcaatggatctcaatatgaacctataggcggacgttgagcatcatggaagccacgatgtagaagtaggggaagttgatgcgcagccaccaggccagattgaagaagacagcagcttgcgagtcagccccttgcgtaagactccacaggagcgggcggcggctgagcgctagagccggacagccaggcgcgacagagccgccgccatatagagaccggcgctcccacagcccgcctgccctctccgcgccgcgtcgctcgggccgctggccttcgcttggcgggctcagggagcgagggaggcggcggctagactggcgggcgagcgggctgcgggagcggagtccgcgcgtcacgctcggagaagcacctccgcgagctgccgcctggtcccccagttcactgtattttttaaattttctttgagacttccttttgacccatggattacttaaaagtgtgttgttttgtttctagtcatttgaatatcttcctgttatctttgttattgatttctcatttgattccattgtcattacaaaacacactctatatgatttcacttatttaaaatttgttgaggcttgtttgatagcccaggatatgacctatcttgggatatatattttgtggtcatttgaaaagaatgtgtattctgatgttgctaa

SEQ ID NO: 134032 - DNA, 1720 bp, Homo sapiens
tttaggaagaacatatctcagaattattagtgttgttagttggaaacagtgcagaagatgttccattcagttgaaatgctgcaaattcaaagccatttctgaggaagcaaaagtagtttttgttctgttttgagcccacagtcattcattcactcatctattcaataaatgtactgatgcttgcttgggattagccacagcagctcctaaccctttgagctttgagctccccataaaatgggcagattagaatatgatctctaagagtcctgcagatctttatacctcattttctagattctcagaaaagactcaggcaccattggagagcaaactggctctgcagttatatctgaaaagcacaaatggggccatgtcaggaggtactgcctggcctgacctgcctctgaatttcagggttcagtgcatggattgggatgctctacatggaccattatcacatcaaccctgtgcttgtcagcttttgccacatcctgatcacaaatcacagggagaagaagctgcagcagagcaccaaatactggtgcctaaatcaatcggcaggtaacggctcctgtttgaacctacgctggattcagaccccaggaagtaaataccctgaggctccctgggatccctgaggtgccccaggttccgcttttcctgctccttttctctatactccatgccctgggtgcccttgagctaggaagcccaggaggcttagctcccagtcaacctgacgatgggacccactcaggctttgtgtccttgtcctgttaactggtctcctgccttgttcctggaagtgaactctagctctgctagtggagttctccatatcccatgtgtttgagtctccaacccatatcccaggctacatggcagatgtcttccaagatgaggctacattttgatgattctgccctgctgcttaccacaagatctctgaggctctctgcctctctagggctcagactgtgttcattgctattcccaacactgcagatactcaattctaaaggacaacttacatcccttcaacctccctcatgtctgcaggagtcccagtctcacatgaatgtgccacatcttacacattccaggcagccctttcaaacactttggagagggagttcccctccctgagacccctcactccttcagtctgtctgctctgattctatcctaggtccccatgtctcagctaggtccagaacaaggtggttcctgttgcagaccctaatcgacaacccaagactcaccatgcacagaaaattaaaattagggcacagttcccaggagtcccaaattctgatggcatgctcggagagctgacgctggcccccatcatctgctccaaagccaggctaggacatctgccaccaagagagggctcaatctaaccagcagctgtcccctgcaatgaaatgggatggcacaggcaccatccatgcagatggcagacaacaatggtcactcatgggatggccacctgggctgagggatgaagtttcaggactatttcactcccttggcaaaaaagattaaaaaactaaagaaaagtctgttgaacaaactttacccattaatgacttccactatccattgtgggtaggcagccttggagagttacttgttaaaaagcacttagtttacctacaaagcagaattttatgtcactggagaaggtggtaaaatgtgtacatcaggagagttt

SEQ ID NO: 134033 - DNA, 1049 bp, Homo sapiens
tcatttgccttgcatgtatcaagctctgccccaggcacttgggaacacaaacaattaagacacttagagtctagtgtgggaaacagacatgaatataaatgatgtgtgtggggtttatttatgtgtcttcatatttggaaaaatcttcctacatatatccagtataatttatataaaatttatttttagtgagggtatgaggtagggatctatttctttttttcaaatagttatttgaccagtccctcacctgtctgttttgaaatgccactttcattatgtaccaagatataatgcaaattgcatgtttctaagttctctaccattttacctgtctgtacaactcatttaagtgttgtaacttcataatgcatttcaacatctggtgatgcaagtccttcattttttggttatattccaaaatgttctttgtttccaactgtttatttttgcatggtcttctttattctgttttaccagtttcttataagtgattaattggaattctgacatccaagttttgaaagaggctttcaaagacctagtttaaatttagcttttaacatacttttctctgagtgaatatgaaacatgaaagatgatgccaggttttatttttattttttctgattttaaattattttaatgacttgttttgctgttaaatgccactgagactttaaatgaaaagtgtagtgtttaaaacttggtatagactttgttatttacatttattttactttttttttttttaatatcttaggtttagcccaaaggcgtcccttcaaccacctttgcagatgcatctctcaagaacctctactaaggaaatgagtggtatgttttccaaacatttttgagatacatattggcttccggagtcaagaaacatatctggtggtggcttttgacatttgctctcaccttctcctgtttggaatatatccttcctcccctttttcctaattgctttgcatcatgaatcaaagtgatcttaagagaaaatggtgcctcccaaagatatcattatctaaacactgacttgaggc

SEQ ID NO: 134034 - DNA, 1140 bp, Homo sapiens
atatcattatttgggaagaacttaaataaattagctatacccttaataggaaatatatgtggatatcctggagccttctcttctctgtgccaatctaagacttagcaaggccagatcctgccctttgatggaagagcagagtcagcgtccaagtgtcctcaaggaatagctcactctgggcttcctggcattctcagaggcagcatccccaaatcagactgtctctacctgcaaattaaaaattactgaatcccagcagagatactatctgcttaaaatatgcatatattttgcatatagatggtaatatttaatatactcagatctgtatctcagtgaaatttcgtagagatttggaataaatttcatagttcttaaaattccaggactgtcagctatagtaaacactcagatttctttattttctggggatattaactctcacattctaagttttaagtaaaaacgaaatgcaaaatagctataaagccaaaactttataaatacacacttatgaaagataaatgattgatattggggaaataaaagttatctgtgggttccaaaccttttatgtttataaactgaggctaggatgatgatgattatagatggatcaattttttaacttttgtgtgttgctaaattatttgttttccattaataaaggtgaaaattgatcataatattcaaactcaggcaattttttatcttctacaaaactagtataagatcaaaaagttatttgatctgttaaggaattattcctatgttctgtggaatatagctttaaattcagtattgtctgtaaactaatatataaaatgcaatcttcctcagcaggtagaaaacggttggttaaataatttaattattctttatgtagcaagatcatcttgatgtttaaactatgaagcatccttgcaaaataaagggactaggttccctctttgggtgtttcttgacccacaagaaacactgctggttatttcagggttaaaacttagaatgaagttgtcacggtgctgctctgcctaatcctgctcccttctaagtcctttggctaccacaagcccacactatagcaaaacctgaagatgcaaatattaggtaatggggataatctaaaatgttaagcat

SEQ ID NO: 134035 - DNA, 1042 bp, Homo sapiens
atggagtctctgtgccctctctgggcctgccaccctccaggcagccctccaaacctgtcatcttggggttttatggaggcttcattacgcaggcatgttgattaaaccattgaccattggtgatcagcttgaccttcagtgcctcttccctcccggcatttgaatggtggggccaaaagtttcaaccctctaatcctgccttggactttctggtaagcagccctaccctgaagctctcagtcagtattagcatagaaaaagataagctctttggagattccagggattttaggaattgtatttaggaaactgggaaggaagaccaaatatatatttcacggtatcacagcctcacatctgccaagcctagtatttctgctccaaacttacagaaatccagaggggtgtgagggaagtgtctcattcaaattgtgattccaactgtggcagaaatcaaactgattatcatgaacttacgggaatagaaagtttaaggcgtattaggtacagcatcttctgatgatcagcaaaggaaagggcttgactccatggtctagggagttcatctttaatgttacctgtctctcctgctggaggtgggggtgggagtgtacacatggtacgtgaagttacaagtcatgctagttcccagtcgttggactgatggattttttgggtggacattcagaaccaaagagaaaattacagagccacaaaacaaagaaaacatgaaggacaaggataggagtattgtcctgagtcttctcccacagtagaggaggccttctgactccctccttaggtatatgcctgaatcaagtgggctaaaggaactagatgccgtaaaagttcccttttgagagatctacctgaagtggttagcagttgattatcacactaaggaaataataaaagccatgtttcaagtagatgttggcttgccttggtcatttgtgaagaccataagatggctgttctgtcttgggaaatgaggcaggagatgaacatgtaaatcttttcagatgcaccagagcccagtaaa

SEQ ID NO: 134036 - DNA, 1069 bp, Homo sapiens
tcagctggcctggcatggcagctcatgcttgtaatcccaactccttagaaggctgaggcaggaggatcacttgagcccaggaggtggaggctgcagtgagtcgagattgcgccactgcactctagcctgggcaacggaacaagtcccagccttaacaaaaagagagagagaaagaaaagaaaccccaaagattggaatgaagtatgtggaccaggtattttttccatatcactaaatttatctgtgaatatttgcctaaagtgttgaaggatatctgaatcaattccaggtagagtcaggttcggtgccttgttaggcctatgtttaatcttagtaaatgcttatttgaatgtatagaagccaaatcattggagaacaagtgaaatgtaggcacataactaactgttttgagataaaagaataaaccattaaagactggaaagtgcttacaattcaaggaactggtcattagagtgggatatggttatctactttaaacaataagaataatataaaactgctgagggaaaaaatctgtcttctaattcagatgattatttggctatggtttgtactttgggtaaattcagacttattggtcaaaaattcactttataggctgactggcaaagtttgacttaaatgctgcagacacagccctggaagcttagtacctccagatgatctttaagtattattctggaataaaagccagaaaaaaatgggaattctgctcttgccctggaccaactcaagtggacataacgtccctaacttcagttaagacagcagttcctatttggaagaacttgtgctggtcatgtcagaggtcattgttagaggtttgataggtatgttattaggtaattggcactaatcacatctaaggcacagatggaatggcagtctggggactgggagaggggagactaagcaatgaagcatcccagattctcagtacactccttggaaagaaaaagataataaagccgaagaaccctcttaccttctttgggttagaagaaggctatatggacagtgggggatggggcttaggaagttattttag

SEQ ID NO: 134037 - DNA, 1101 bp, Homo sapiens
atggcgggttgcaggagaggagagacacagtcagagttgtgcttggtgaaggacatggtggagatcatcctcctgttcccctaggtgtcttaggatctacccagaggggcctccagccttgctcggggtgactcatgggtatccttgctttctcttgtgcttcaaggcccttgctgagatgctcaaggagaacaaggtgttgaagacactgaatgtggaatccaacttcatttctggagctgggattctgcgcctggtagaagccctcccatacaacacttctctggtggaaatgaaaattgacaaccaggtgagatgggcaacggtctcctcaggtctgttactacatgcagctcgctggcctgcagtgtttcccatgctgctggatggagctgagaatgctgatgatagaagctcagagcccagctttgagggacctccaaggtccctaaagttcacaccctctaccacgctcaccttccttcttcatcgcttccactacgtgctcttccagttctgattgagtccctctcatgatgggggacacactccttaccaacatcatcacttccattcttaggcaatgagaacattcttccttatatccggtagaagtcagctccccgtaagtcctgtttgttgggcttagctctgttctctgcttcactcaggacatctgttgcacagatctcatggaccactaagctctccttctccaggttaaaattcccagttttcttcattcacccccattcaatgcggcttttgaatttcctcaccattcacattactctctaggcaattctagtttgtctttattcttatggagttactgtttctctgtaacttctgtgggtcaatcattttatctgcggggcaactctttcagctctgactttctaagaggatgctaataacaacatcttacatgttacatgtgttgagagtgtactgtggaccaggctctgagatacacatcttacatccatcatctttgatcttcacaacaaccctacagaatgtgggtatcatcagtctcagttttcagaaaatagtccagacaggccaaagataagcccctttttcagggccatagggtca

SEQ ID NO: 134038 - DNA, 1127 bp, Homo sapiens
tttccagtgaggaagaggaggcttgcggacctgactgggcccatcattcccaagtgccggagtggtgtctagtgtgtggcggtggagtccatgcctttgaactggatgtgttctattgatgacctgtgctctgcaggggaaaccagaaggcaaaatgctggcagcatgaaacccttttgtggttcagttctttatgcactaaggttttaggttgactagtggttgtagttgaaaattttataaaataccgttaatgtgaagtttttctttagtcacagaagttgaatctggttattatttaaaaactagaagcccccaaaccagcagatcttactgaagatgatgttccagcagcagcgacttagccccaggagcccagtttcaatggccttgctgtgtggtgtttcaagtgcatttaaaatgtgtgacacagaaacggcacactcttccacatgcttttgaagtattataaaacactttattacaaatttgtcttagctattagcaaataaaactgattatcattctttattaaccctccttggaattttgaaaacctcgattaaagttgccaaattgattactggatccagaacacaattttcccctcagaacagatagacagactgaagccactgaactctgccaggagtcaacatgagattccttttgctggatatgcagaaatgataggaaaaaaaccaatggtgaaatttcaagtttcaaaaaccaacctttcattaccaatcccaggcaacaaacatgtccctgagtgttctttaagaacatttgggatttatgtacaatttaatactggagttagaactttttccttattgaatgccaaccttatgatggatgtgaaaatctacggccaaatacttttgaaaacacctttctatattgcacagtgggcaaatggcttatgtgaggtaagacactagagggataaatttccagatcaacatggctatggtatttagtaatggcccagcttagagacttcagctactgatctcatcacttattagacaaattgctgctgaccttacgcctgtatattaagcctccgcaggatgccggacaatggtgaagaaactccagatatcaaggaattgggaaatcct

SEQ ID NO: 134039 - DNA, 1056 bp, Homo sapiens
tattgcagttttcagcgatgcagaatgcagctgcaattgtgttttaaggagaagccaaatggggatggttgtccctgcaacatggtgccactcctgggccatgtgcagcctcagtggacactcttccatagcgctgaggccctggccccgcctccagttaccctgtactgcccactgccttacagttcagtgcgcaggccttcaccttttcatcaccagcctctctgctcagtgctctggagttcttgaccttgtcctttatcatgagatttgctgaaatcactaatgaaaataactcccaaaagcaacaaacaaaaatattagtttaactggcactgtggtatattaaaaggcacaagggcattgtggcttaacacttttgctggatcccaagagacgcacatgatgttaaaaagagatctggcagcagtactaatactacatttcagtgtaatcatcttggggtggtttggccaggatttcccaattccttgatatctggagtttcttcaccattgtccggcatcctgcggaggcttaatatacaggcgtaaggtcagcagcaatttgtctaataagtgatgagatcagtagctgaagtctctaagctgggccattactaaataccatagccatgttgatctggaaatttatccctctagtgtcttacctcacataagccatttgcccactgtgcaatatagaaaggtgttttcaaaagtatttggccgtagattttcacatccatcataaggttggcattcaataaggaaaaagttctaactccagtattaaattgtacataaatcccaaatgttcttaaagaacactcagggacatgtttgttgcctgggattggtaatgaaaggttggtttttgaaacttgaaatttcaccattggtttttttcctatcatttctgcatatccagcaaaaggaatctcatgttgactcctggcagagttcagtggcttcagtctgtctatctgttctgaggggaaaattgtgttctggatccagtaatcaatttggcaactttaatcgaggttttcaaaat

SEQ ID NO: 134040 - DNA, 1106 bp, Homo sapiens
gaagacttactatttggaaaccttccccgggttccacaggatctacgagattctagtcagcaaagggagcaatgcctgtccacgtgtgtgtgaatgtatgtgtttataatgatggcttttccttcctccccagagtgttcatactgtggagcccgctgggaccagtataaactctgctctactccccagtgccgccagctcgttttgacctgccctgcctgtcaaggacaaggattcacagcctgttgtgtcacatgtcaagacaaggggagcaggaaagtttcaggccctatgcaagacagctttaaagaggaatgcgagtgcacagcccgacggccacgcatacctagggaactcttgcagcatgtgcgacagcctgtgagcccagagccagggcctgatgctgatgaggatgggccagtgcttatgtgagcagcacctttggcattttcccaggccctcggtaaaagtaggtttggggtgactatacagagaaagcatggcaagactgcagaaacagagaaatcgggaacttcagttctggccgctgccaccgtggcagccgtctacacttcacagcgggaggggaggagtcacgttgtctaccacttacctgagacattctgatttggatgatgctagagcacagaaaataggtgagctgcatgggatcccaaagctgctgagggatagagcctgagcctggtggccacagcatatgccctttctgttccatgcagctggggctgttagtagtcattgcccttgtcagcagaccttctaccctggtggcaaacacatgaaagctgtggccctgggagtggcctcctaaaacaagccacttaggtcatctgccatctacccttaacctctgtctctcgcctgaggggaatctgcaagctgtgcattgggcttacctcctgcttttgtagaaataaccatcctttggtatacatggaggatagttccagaacgcctgagtatacaaaaacccaatgcatactcaagtcccacagtgggccctacagaacccacgtatgtgataaatcagccctccatgtacgcaggtttcgccccctgccaatactgtattttcaacctgtatg

SEQ ID NO: 134041 - DNA, 1047 bp, Homo sapiens
cagtttacaaagcctgtagtcagccacgtacttgcccagctcctccatgtacagtgacaatagagcagtggccatttcctgacctaccagtgaccatacaatggaccagcaaattcacatggcaatttagatcccagttgcctggtttttatcactagggttaggccaagtatgaggatgcaaaattctttgactagttatttctaaactaccaggtctccattgccctcattttaggaggagggagattgaggatacctggaattactggaattactaagttatttcatcatgatcatcaagtagtgttcttttcagacagttgtaattatgaagagaagagatttgggtggaaagaaacaaagcaacacgtaagtcaggctgggtgagtcatgattgggttttggtttttttgtctttgttttaatataatttttttggtttggttttaggaatccatttatccccaggtgaatttcataaagaagtagaaaagtttttatctcaggcaaatcaagaacaaagtgatactatccttcttgattgcagaaacttctatgaaagcaaaatagtaagtaaaagccagaactgagttctctgaattggtagatctccccattcccacagtgtggtatatttcccaaggggaccttgtgtgtgcccacctgtggccacatggatctcctcccagtactggcagcttcagagaaaacccaagtcctaaaactcagaaatctggtgagagagtctaagaaaatatgaattaaaggcatccaggcacataatatactttgtgactcccatgagcctgcctttgacatgtatcaaggatcttgcaaagttgcctttgggcagcctctccagttcccctgaggaccctgggaaggtgacccacagcccacagcctcggttttaagttgagatcttgaagttgaaaggtcagagtggggatgagattagcaactggcaggggcttctttgctaagtagggtttgttgggtacaaaaagaacctttgttcctaccaggtatgtttttctgataattt

SEQ ID NO: 134042 - DNA, 1092 bp, Homo sapiens
cataatctggacaataataattgtattcccaagatatatttctctgtcctctttatttcctataagttgatcattagatttagagtagtgctaatagaagtataatgtgagctacacaattttacattttctagtagccatgtctttaaaagtaaaaaatagatgagattaatttaaataatatggttttcttaatgcagtatatcaaaaatattatttcaacatgtaatcaatataaaaaattattagtttactttttttcatgctaagtccttgagattcagtatgtatgtcacccctattatagcacaagtgcttgtcagccacatgtggctagtagctactgtattaacaaccaggactagagacttgatcagattccaatttgatttctttttctcccgccaccaagactacataagcactgttgtcttctttgatcaggaagcacaaaggtctggttgactccatggtgttcattttgtaatatgtaaagttttgaaagaagtctaagagtgaagccagggggaaacgggattaggatacaggcatctgggaaagagactcatgcatggggagatgagggccagaaagagctgttgtctgcttactgttcccatcttagcaggaggcagtatgactacaaacagcttttcctgggcactgcaggacattgcaggcagagagtgggctctaggcagtgctgtcttgttttcacttgaaggaagtttaaagggacctctttttctttttttgagacagtcttgctctgttgcctgggctggagtgcagtggcgtgatttcagctcactgtaaccttttcccccggggttcaagcgattctcctgcctcagcttcccaagttgctgggattacaagtgtgcgccaccacacccgggtaatttttgtatttttagtagagatggggtttcgccacactggccaggctggtctcaaactcctgacctcaagtgatctgcccacctcagcctcacaaagtgctggaattataggcatcagccaccgcacctggtaaagagatgtcttttaaacacatccatgctggtcactgtccaaacaatcgttctcagg

SEQ ID NO: 134043 - DNA, 1065 bp, Homo sapiens
aataccctttcccctttattttttggggcttggggagtttttttgttttgttttttgacagggtcttgctctgtcacccaggctggagtgcagtggcgtgatcatggctcactgcagcctcaacctccctgggctcaggtgatcctcccaggtagctaggaccataggcgtgcatcaccatgtctggctaatttttttgtagagacggggtctcactatgttgcccaggctggtatggaactcttgggttcaagcagtcctcccacgtcagcctcctatagtgctgagatatggacgtgagataccgcacctgccccctttcccctttaaatgtgcttttctctttaggttacgagacagtacaatagaaggagtatgctcgtccccattctttcactgagtcaccatatgattttggaccagctagtgctctagacctcagtatcccttcttataaaataagaatgttacagctcatgcaatctgggactccaaatcttggacatattagctcacttgagagaccaccagcctggtcagcagatcactgtgtttttagtaaatctggaattgtaagattaacacttcataccacatgggggaataaagttgttgctctcacaggtgggctgctttgtttgagtgactttataccttgtcataataagtgataaggtgatgggaaatgccttgctagcgttcatgctggcaatgataggaaaagaatgaaaaccgggtatagtcacatgttagaattgctcagcggtgttgcagttttataattaaatgcttacacctaaagaaacactttttcagcttaacattcctgcacatggcaggtatgcagtaagtatttatcaatgttgaattatctggaacattctgggccctaactagaggttttttaagacttcagctattgttattacaaaacagaccatcattcttatattggcacttgtcttatacctggagatgggacagcaagactgtattctgttttgtttctcattggctagaccagcaaaggaggagctcactgttttccagaattgcgtgttggtg

SEQ ID NO: 134044 - DNA, 1080 bp, Homo sapiens
aagtactggtatatatcagtgttatatgactagaacaatataggaccttgaattaaatcatctctttttccagacagtgccatgatgccacatgtgctgcccttgctagcacttttctttagagagctcagttccctttaaagatgatccatctttaaactcatccacaggattttgtagtacgaaaacaaccaactctgcagggcccccagaacactgcctcttaaggctggggctttaccccaggctctaatgtcccctaaccaggggagcatttcaaagagaatatgggacttgagatgccaaagagccccagatatggatgcatattcatttattcaacaaatcgtattgagtgcctactatgtggcaggcactgttctaggggatatgctggtgagcaaaacagacacacacccatgtggaacttgtattccagtggatggtttgcagtggtaggctgtcctccaaacaccatgcagagatacatgctcatgtataccctcagccctcagatgtactctgtgctttaggattttggtagtatctcctcagcagttcttttcatttctggtgctctttagttccctttttattcatataaagaaattaagattcagagaagtcaattaactttctcacagctacatgcaagtgagtggcagagcttaatcttgagcctagatctgctgacctctgtggaggactctgttaagctacctggatttagattaagctcagaattcacttctttggctgttggactattgtagctccatagcaaatggggctttccaggagttttattcacattcttttgttcagcatgcatgaaacagaatacctcatctgaactgaaggctatgccattttagaaaaatacaagtatccagctgggcacggtggcttgtgcctgtaatcccagcactttgggaggccaaggcgggtagatcacttgaggccaggagttggagaccagcctggccaacatggcgaaaccccgtctctactaaaaatacgaacattagctgggcttggtggcgcatgcctgtaatcccagctactcaggaggctgaggta

SEQ ID NO: 134045 - DNA, 1899 bp, Homo sapiens
tccctgcctgccacttaatccattctccacacagccataatgatcctaaaaggtgaatcaaatcacatcactccctcctcaaactctttcagtggctgccacttctggtgcatatggaggaaatccagtgccttaaaaatgcccttaggttcctgcgtgagttggccccttcttaccttttcctctcgtctgatactgttctttgctcattatactccagcaacatggtctttcagttttttggaacccaccgagttcttttctctccttgggccttcttacaagcaaactatcttcaaggaactctcctacacccactctgctgctccagtctgatttttactcaagcttagttttcaattttcatgacacttcctcaaagagacctttcctgtcaatctaaattcatttttcccagtgcactctctcatggcatcttgtaattgtttttcataacatttgtccatttgtaacttttattttaatatctgtgacctcccatagtctgtaagctcctaaaggggaaaagctatatttttttcaagcactgtatccctaattcctagcacaattcctggtgtaaataaataaataatatttaatactttcatcaccattcctattcagaaaacttccacaccctgaaagatggatactctcacagtaaacctgaatgtacaaggtttgaaaacagcctcttggtttagaggcagatcatttttcttggcccaacccaagtgctaaattagcaatgagggatcttacccacaaggtggcagcacttgcctagatcttggatataaattcctaggtgtcaaggatacatgcccagtttaatgagagttttgtgtttggagatttggcaaaatatcagtgcctaagtagggaaagagaagaacctgacagttgtagaattatgggaaaaaagcctctactctattgctgtgtattctttattgcctcaaaaaatttgaggggatacattgaaggctttggaaaggaaaagttataagattgggagctagtaagatctggttttgaatcccagatttaccagctatcagctataccactgggcaagttacttgatttctctgagcttttgtttccttttctgtaaaacggggattatgatatctgcctttcaggattataatgtaatgcttctgtctcatagcaagtgctgaataaatgctaatgattgttcttctcagtttcttacaaggccttcctcactaaggagctttgaaggatttctgttagagaatcctgggggttcaaagtctagtgcacgagtttagagcatgctctgccctagctatatagggagcagatgtgcttgtcttctctttgggttctgagattaaaataaattagaaaagaatctactagcctaccccaagagaggtacttagacatacatacttcatcctacctgctgtagtcagaaactcttttggagtgggttttctgactcttacactgattgggctctatttttctatgtagtccactataagttggtagtggggacagtagcctgtgtagcagagatgtcacaggcttcctgcttccctctcccatgcccagaactggcttcactagactgcagcactgtttctcaaggagtctggatgtgacccggaatctttgtcatggaactctggaaaacattttacagtactatacgtagaggtgtgattccaagcttcttaattttctagaacctgccagggtcatttaccagctcagggtattgacatttgctgtttccttcctctctagagtgctcttccctgcaccttcacatggcgcataccccacttcagatctcggctcacatattgtctccttagagctgcagtctgaagtagtcctctccagatcttgtcacgttct

SEQ ID NO: 134046 - DNA, 1065 bp, Homo sapiens
aggccggtcctccggggcttctcaatggtttcccggtggcctctcaatggttttcccggcggcccttgcgccgacgccaggagacttccggagcttggtgacgtcacgagcgagcttttctacccaaatacgcggcgggggaataggctcgagggcggtgagcagtgacaattgctaggcggagacagtgcagggaagagagaccttagaaaggatcaggactggcgggtatgtgctcatctactcccactttccggcttttgccgccttgggaaaagtgggaggagaggttgggccaagctcggcatgcggggtggggcctgggcgggaggcggtgccgcacgtgccgccccttggtatggaaaggccggccctgacgcgagcgtgcggctccgggcttgccggctggccgtcattttccttaagttgtttgcttaggaaggaacaaatgattgttttagtaatctgttttcaagggttattgggtacctatatgcctgtgtgtgagcgtcccctcccctgatgtctttatgagcaccatactggcttatctgctttgtccatggccatctgaaatttcactctcccggcctaattctccttcggtcttacccatttcagtaaatgacgtcatccgtcggccgcttaatccaaaaatttagagtctttcttagctcttttccctctttttacataacaattatctgtaaaccctgcctgctctgctttcaacacaaatccagaatcagatcgtgttactgctttgtttaaaagtctcctatgacggccgggcggggtagctaacgcttgtaatcctaacacttatgggaggccgacgcgggcggatccgcttgagcctaggagttcaagacccacctgggcaacaaggcgaacaccgtctttacaggaaaaaaaaaaaaattagctgagcctagtgtttggcgcctgtagtcccagttactcgaggggagggttgggggccgaggtgggaggatcccttgagcccaggaggtcgagaatgcagtgagcggtgatcgcacactgcactccagcctgggcaacaaa

SEQ ID NO: 134047 - DNA, 3586 bp, Homo sapiens
ataggtgggcagcctcacaaaaggagaaagacctctgatgcaaatgaaactgaagatcatttggaatctttaatatgtaaagtaggagaaaaggtatgtcacacaataggcacaggctgtgatgggtttaagaatgtggttaactgtgctttgattaatttttgcagctgaaaagttggactacattttggcaaagctggtattaccatgcatctgtatcccaaattgaatccatgttgaagcccctgggatgtagataattgatcatttttagtactttagtaattaataattttcatagaagatgagcccttagaagggacctagggtatagaccccttaatttatgcatgaactaaatcagccctgaatacttgaggtaatttgcccagagtaagagagtgaattagtaaaagaggtaaaatggagcccatggtgtcctcccatttctaatacttattctgttatcatagactgcttagtttttaaatttcactcgtccacttttcatggatttctgaagaacaataactatctgaattgatttatactaaacccattatagctctgtatgcatgtaagactattttaatgatcatgcagaagtttttattttagttcactaaaatagcaattgaaaggacagatgattggtaatgattttaaaatgatagattttaaaatatgtatatatttacatttaaatagatttttaaaaataaatttatgttgctgagtacttgacagatatttaatgtgatgtcctctacagagtgcctgctctttggagagcaacctagaaggcttggctggtgttttggaagctgatcttcctaactacaagagcaagatcttaaggcttctttgtacagtgtatgtatgcaaaagatttatgaatccaggtgataatgtattatctactcttaaatgctttgggaaatgttcaaaatacatgtttatgttctatatgtccttggctttacttctatggggaaatttgtacaaatgagccaacctttggcgctttggcgaactctttttcttagggataaaactaaaattgaacattttccttgtatgttcttacaaccttagaatcattttagttgactttttatagagatagtagatactgtctcattcagatatatatttttaagcatgtacatttaaatgtatgatacttacatttttaaattagtaccagacaaatttgggaattggtaactcaggtaatagcccttcttggaagactgaagatgctttggaagccactgttaataggcatactctctggataaatgggagtctttgtagttacatgaaattgtaatgtatccatgaggtgtttttaaattatgaaggtgatgtttatcacttctcagccttttagtttagatcaagtgaaggtaactttaagaaactactaaggaaatcttctgaaatcctttattaaaatggagtagtatttacacttaaactgttggaagccttgtttgtttaaggctgaacttgtattgcttcgcagtgttcttttttaatttttggttttgggagggtttcagggaccacagttaccatcaacacaggtattttttttgaagaccttgattgtccctgatgttctgctaggtactttaggaaaacaagtcaaagagaatctcttgcccacttaatgattatgaattcttattgctttttgagctaattctaaaggctgcctaaattaggaaaaattgctttttctaaaggtttattgtaatcctttcccatacttttaaaataactttaatgaaatcagcacacttggagtaagcaactgagacgtaaacaaatcttaactatatcagagtatgtttttaaaaaattcaataattaaactggtaggaacttagatgaaactcgttttaattgtgcatcttttctaaacaactagaatagtgtttctcaaagtagaattctagttccatgacatttggttagctaagtttagaaattctgaatgctgcacgcccccccttaatgattctgtattaaagaggcttgtttcacccaggatttctgagctattttaccatggaaaccatgttctgtggaaatgctattcagttccactaagcacacttgaagaaaaactgttgtagcattagttttatttatttcagtatgataactttacaattaaatcatttactttcttaactcttagattaactgatgaattaaaatgaaaaattacgggactatgtctgtaacatttctcaatgacatgctttttctgaagtatttttaaagacatagctaaaagtaatcctgttccaaagttaatggaatgataaaaagattcacataaaattcagcaacttaacgccattgttttggggttttcttgttatactgggttcttaaatcagtgcacgcctattacctgagaagctgacaatttatacaacattagttggactactgaatgccaggaattacaattttggtggagaatttgtagaagccatgattcgtcaacttaaagaatcattgaaagcaaacaattataatgaagccgtgtatttggtaagttagtttgtttgttggtatgttatgactactgttgggatggagggaaaaggtgaactacaaccaaataatttaaaatgctctcctaaaacattctcattcactttcatagcttcataagccacctttattttgacgatacccccaaatctgtaactgtatctccaacctttctcctgagctccagtccagtattccagatgctagctgcatagccttcagataccttactaggaagtgcctaaattaatgcatcattcatacctccttttttctgccctctccccagctcatacagtggccactgtgtactgaataacccatctagaaagctgagcattaatttttgtcttccctttgccctctcgtaccataggtgttcccaatccctgtcaattctgtctccctaatttctctcaagtctgtcctttcttagtctccagggcctctagcatagtttatgccttcctccagatgttcttaatagcctcttaactgatctttttgcatctagattctctgcttttcactttgtgttctacagtggcaccagactggtctttctataactaggctctgcacatgttggttactggttaaaaaaaccttagttccttcccattgtctacagtgagtggtcttaaaagcctggtgcacaagatgattccttgggtttcaggaagtgaatattaagaactcttatttatcttaagtggaaatgaaattaaaccttactaataatacatagattaatggtgatccagtgtatatcataaatacatatgtatgtgttgaagatatgtgatcaaattcttttttactgagtacacaatcaaaaaagtttggacacccatcaggctataggattaaagtccagactctttagcctgaccctttatggtttccccagtctgtttctctattcttgtctcccatatgctccccagcaatatcaaaataacttgcagatccctaaacacaccttgtttttgaacctctatgcctagactgc

SEQ ID NO: 134048 - DNA, 2025 bp, Homo sapiens
aatttccatttctgtaattcagtgaaaattacagccaaacagaaaaggagattataggttgaagtagctagaatattttacaatctggattcttgatgtagtatagcatagaaacgtatgaactcacagattactgtcctttatatagtctttgttacaacttctcaattctgccattgtagcacaaaagcaaccatagacaatatgtaactgaatgagcgtggctattccactaagtttacttatgggcactgaaacttgaatttcatgtaatttgtatatgtcataaaatactcttgatttttttttcacgcatttaaaaatgtaaaaaccatttttagttcccagctatgcaaaaaacaggtagtaggctagattcagcccttaggctatagttttttagaccaatagtttagcctatacaagattgcttattttgtagttattataaagaacatttaggtttaatagcagaaattgtttgccccaacaggtccgttttttatctgatcttgtgaattgtcatgtgattgccgccccatcaatggttgctatgtttgaaaattttgtaagcgtaactcaggaagaagatgtacctcaggtaagagaacccctcatgctgaatcttgaggggttcttgaggggttactgaatcctggtacttccatatagtaccaggaatttttcgctgataacccattagcaataaagaaaaaaataacagcagactatcacactttaagttcttactatctaaaaattaagctgactggcacactggtgggttctcataatatctgtatgttgatttaaatgatgctgtctagtaagattagaactaatatatctagaaatgctctgtataaaccagatgtcttatttaagtcctattaaatagcttccataggatttcattcaagaataaataaaatatgaatgaatataattaaagcatattttaaacttaactttttaaaaatcctttaggtgcgacgagattggtatgtgtatgcatttctgtcatctttgccctgggttggaaaggagttgtacgaaaagaaagatgcagagatggaccgcatctttgccaacactgaaagctatcttaagtaagggcacagctcatagtactctttgttgcttaggtaaaggatatcttatatcagtgataccatttgagtttctcaaaaataagctgtagagttcctgaaggtattttctaggtaatcctgttctcctgctgttttaactcactgagacctcaaagtagtcagatatggtttgcttacttttgccagtgcaaaggacagttggcaatatagcttcttttaagctgcttttatatgtttgtttataaaagacataaaacaccctagtgcaatagttcctcaaatattagtgtggataagaattacctgtggtacttaaaatactcagaccccaacccccagacctgataaattatacaatttgagagagaggtttggacatctgtattattaacacatttcacaagtggagaaccactgtcctagcacatacagtatatttagttcatgtaaattaatcttaaatcaagctcttaaaacagtggtccttaaccctccatccagccagtacttcttaagtaatatgacacatttcaattaaaatagtcacatgtcttcccattactcatctctcctaagccaatgtaaaagcttggtttatattgttagatacaataataataaataggtctttttagtaaatttatgcttaactatccagcaacatggtaatggttatgtggcccttaggtttttacagattgattttgttgttaagtttcattttctcttttttaagtgctttttttggataactgttaatagctacttagttggttattaagtaaagttaaaagaagcttaaaaaataagaatcttttggccgggcgcagtggctcacgcctgtaatcccagcactttaggaggccaaggcaggtggatcacccgaggtcaggagtttgagaccagcctggcc

SEQ ID NO: 134049 - DNA, 1214 bp, Homo sapiens
gacacgacctcaactcagtgcaacctccgcctcctgggttcaagcagttctcctgcctcaggctctcaagttgctgggactataggtgcccaccaccacacctggctaatttttgtattttttgtagagacagagtttcaccgtgttggccaggctggtcttgaactcctgacctcaagtaatctgcctgcctcagcctcccaaagtgctgggattacaggcgtgagccactgcgcccagcctaagagttcttgttatttataggaatgaaactgtcatggatcttttgagcccctcaaaaagctgtacatcctggctcagctgtggtgctttcaaagttggaatttaattgcatagttctctgggaggagtgtagatcgaataagcattagtgtcgtgtgtttttatttgatcgaattatagagagaagaaattttcattacagttttcagttttagatttttgtgtttgaaagagcataattttaaatattaaaaagtaattccattttcatatgaatgccatggagttagagctcagatttagaatgttaaggtctttctaatagaagtgcaaagatagcagttggattgaattgtgactcatgattcttttgtaggtgatctttgcagagctgtttcaacttccagcaccccctcacattgatgtgatgtacacaacactcctcattgaactgtgcaaacttcaacctggctctctaccccaagttgtatccttttctttatttttaaacttaatctctttggcctggtcttaaaagattattaaatatttctgcttgtgggtttaaattttgtaggtaaaaaatgtggcttttgaagtgtgttgtgtgtgtgtattacatgtatgtacttgtatgtctgtaaatacatatgtacctatacatatgtagatacatccttcactatttgggtcagggagttcaaaaatagacaacaataaaatttgttgcctagattgacttttcctctcacaatagatttctctgaagcatgtgatgcttgctgtttgatacagcattttacccacagtagaacttctttcagagttggaattaatcttcccaaaccctgccactgctttattagctaagtttctatgatattctaaatccttcgttgtcattcagcagtgttcacaaggagttgattccatctcaaaaaaacactttctttgctcatacatagaaagca

SEQ ID NO: 134050 - DNA, 2705 bp, Homo sapiens
tggcttgcactgaggtgcgggtgagtgagctcatgagcctggtggccaagtatgtggggtgatgatggggcatggtggagatgactgcacgctttggaaactggctatattctatcaaataaataaatattgaggataatggaagccaagtttgttactgcctgagaaggtgtttacaaatcatggtagagaagaagtgtagaaataaggtattgagttggaattggaggcatatatacacacaggtggacataaaaacagttatggatggatggatgtgtgtccaccaagaggcttagaaccaatgacaccccaatggcaatgagcatatcaagtgcccagatcttggctcctaaataccatattccattactactttactagaaactagggctccatgaataaatagatgattccagtgatagggcaagaaaacgcaagatgatcctaaatatgttgttctagaaaataagggaatgctcaatgaatggctggggacgttaaaaaaaaaaaaaaaaatatatatatatatatatatagagagagagagagagagagagcttaccggggctcctcatgtacataccagggacaatttgggcatcaaaataaataatcctcatagtttataacccatcgaatgaaatataaattaattagtccctactgatatataaataaaggaataaataaatgggggagaaaggacagctcttacagaaggcccactaataaatgtagaaaaaataatggaatgagaaaatcatcacttggcaaccatcttagtggtagctgctaaaagcaggatggagatctgatgaagaacagagtaagagtaaaacttcagaatatctaaaatacttatcaattctactaaagggaaaaatggtgaggttaaggtagagaaagctggcagatattgacatgaccaggtggatcaggattaacatcaccagtggtgggaatcatgtgcctctagaagtgacacaccaagagcattaacaatttaagacctcagtctgctcatgagaaatatcagagcaatccaagtaaggtctagactctttcaaactggtaaaaacacaaagatagaaaaaagagttaagtgttcaagactgaaggaatctgaagagaatgacaactcaacactatatatgtacctggataagatttcagaccaggctgggcacggtggctcatgcctgtaatctcagcactttgggaggccgaggcgggcggatcacgaggtcaggagatcgagatcatcccagctaacacagtgaaaccccgtctctactaaaactacaaaaaattagccaggcgtggtggcgggcgcctgtagtcccagctaccaggaggctgaggcaggagaatggcgtgaacccggaggtggcgcttgcagtgagccgagatcgtgccactgcactccagcctgggtgacagagcgagactccaactcaaaaacaaaacaaaacaaaacaaaaaaaacactccagaccagacaggaaatacaggtgttgggacggctggcaaaatttcagcagcacctgtgaattatgtggtaggattgtaccacagctaattttctgatctaaaaggttgtatgctggctaggtaggagagtggttttgttttgggaagatatgtaatggaacattaaaggataatgggccattacatcagctgggtatgcagcttattctcaaaggaaaaccaacgtaatgggtctctagggagagacgaaaagggagtgagcatgagagcaaacatgataaaatgttaatagctatggaatctaggtgaagaggatacagaattctttgtaatgttgtgccaacttttctataaatctgaattcatttcatatataacaccttttttattttatttttttgagataagagtgtcgctctgtcggccagattggagtgcagtggcgccatcttggctcaaaggactctccctcaacctcccaagtagctgggattatagacgttcgccaacacgcctcgcaaatttttatttttagtagagagggggtttccccatgttggccatgctagcctgaactcctcacatcatgtgatccacccgctttggcctcccaaagtgctgggattacaggcgtgagccactgcgcccggcctgtgacatctttaaaagaacttattggcttaaattcacatggaatctatatggcatggttgcctaatttttcttagcctaagtcttgattaaaaatgggatggaagatgagtaagtggattttgaatccaatattctgaacacacatcacaagtgcagagaagagaaagaaatcctcccaaagaagttaaaaggagaaaacacaaaaaacttacctcatacatttttctagaacttctcttacaaacttcggtttgggactttcaggatcttgactaagacaatctgacctaaggaggaaatgtagttttatcaatgcttacatataatctgcacttacacccatttgtactataattatctgttaacttataacaacttacaagttttgttaagttataattgcacttgtaactatttgtacttaactacaaatagtttccaagaaattaaatatttcagacacttttatgttacagttttaaacattagtagttttttgactacagaaaaagataaaacaaaccatcacttaccaatcttcccagctccaacggaac

SEQ ID NO: 134051 - DNA, 1456 bp, Homo sapiens
aaagcagatttcttgttgctctggtgatgccttacggtgtatattagcacaaatttttataataaggactcaactgataccaaccaatagtaaatacaaggagtcccatcacgtgagcatctgacttacgtagattcaagcttgtggactcagcaaaaaagaaaagtacaaaaacaaaacctctctgaagttggcagccattaccttgttgagactcagacttcatttccacggtcccgaggaaagaaagaggaagtgggtgttggcaaaatgaaagagaagtacgttggttctgggattttgagcccaggagagttgagggcattaaaagacagtttaactgtgtccacttttctccttaccattcatcttgaggatgatcagcaccttgtgctctaaattttacttagctaagtgtccttaatgaattgttgaaatgagaattgtccctttttaggtgaaaaaccattaacctattagaaaaagctttcacatacggtatttatatgtgattaaatattgaccttgggataaagagcatcctattttgaaaggaagaatttaaaaaaaatttttctcagttatttaactgttcattagaatagtcttgaaacctgatctgtcattccccttacccccaattctgtgtttagattctcttcctggacattctgttgccctctgtttagctgttgcctttaaaagtaaggcaaccaatgatgaaatcttcagcattctgaaagatgtaccaaatcctaaccaggatgatgacgacggtaagtggaattcagtatttcttaagtggaactatgtataggccaacttaaagcataaacataactctggcaacatgatgctcttaaagcaatatatctatatctgtttgacctgttcagactgttgttcttagcaccccaggtattttccccttatataaaaagagatcctaacatttctgtgatatagcttacttaagaatataaacttcatcgtaaatacaaagtgaaatatgttaccattcaaggatttttaacccctgctttcaccatagagaagttcctgaatagaaagacttggtgtgttataaagttggatgttttctccaagttaagctattagaataataatgtttaacatttactcagttatataccatgtaattccaaccagaatcctaggagtttttctgggcaagagtgggaaaattgacaaaataatttatacagttgcctgaatcaataaatggatatgcacatagaaaaactactgaatcaaaataagatattagtggcctttgggtatttattactgggattttgtttggatatctctaagaaatttgtattatgatattagagaaaatgagtttagaaagaataagccaaaatgatggcattaaattcagatgttgtcagacatcttaagacataagcttaagtgtttttttttttttttt

SEQ ID NO: 134052 - DNA, 1716 bp, Homo sapiens
aggagcaagcaggcactgctgccactgccttgaatcatgaattctgtttacatagaagttggtaagaactggattttttaaaaagctattgagcatccatttttttcatttccctttttatttttttaatgttggggattttcaggggtccattgttcctatcagcacttttttttccccttcctcttttcatcattctgcagcatgggtgggctgctgaaggaaatgttccacaagattgcttatatgctttttcctgacctaactacccccttttgtgtgtccacagcatcaccaaataatccagcagtacatggtgaccctggagaaccttctcttcactgctgaattagaccctcatatcttggccgtgttccagcagttctgtgccctgcaggcctaagggtcattttttcctcatgtcaaggttttttttgatatcttaaaataatttgtcttattttttgatggtttgaatgcttgctttcttgtagtatcctttcacttcttaaaggaaacaaaggggaagaggacagtgaatgaacatggcattacttttaattgccctgaaaagcaaatacttcctaacggcagtaatgtgactatgaccatgatatattatatatgtgacagatacaaattctctgtgatcagtttgttattttttttctccttaaggcacaaaataattggtttgaggtatgtgaaacactagaggtcaaccttacatagtatatagaactgatgggtttacccagctacccagtagcataacttttcacagctcggggatgaattaacatggctgaaataaaactaaaagtatggtttttaaactttggcatttcatgatttatcatctcactctactctaaaactggtggtttcttactgaaggtgttctccatttgaaattttatcttcaaagtatttttaagtagtatctttaagacatgacttgttagtaataaaagtgttactagttggaagagtagctctcaaatttgtcttaatgtaaatcacctgggaatctttcaagttattttgaaatttaaaccaccgtctgggggtggaacgcagacatcctcagtaatccttaaagtttccccaggtgattccaggtttggtcaccattatcttagagcatctactcacttcctctagccttggggttatttgtccaaggtcttgtagtgagttacagaatactaaagtggatgtagaagtggtcagattgactgaaactataccctgaattagatgtgagtttagattttgtttatatggaacctgatccaaaaaactacgaagtcctgagcttgtttcctgtatagtactgatgctgaaataagatgacagcagtttgtaaaataatacacaaatatgaggaattgtctgacattccaaatttcgaggatttttagacttttttcattaaaccttagaaaaaaattaccagtaatcctacaactactggtagtgttgttgtgcatttgcacaaaataggtataattttttcttattacatcccaagtttatgatgcattaagcgttttgcatattttgatatatttttgctttggtttaccatacattttagtggctacagaatgtagtctgcttaataaatgggaattcctagaatgtttaaataccatactatttaagacaaaatacaaaatatccagaaaaatccaggttgcgtggctggttagt

SEQ ID NO: 134053 - DNA, 1114 bp, Homo sapiens
ggcatatatattagtagtatgaacagaactcttaaaagatttagttttcactggtattactttttaaagaaatataaactttaatataattagctttttttctcattacattaaattgctgctgttaatcaccagataagctactgtcaattgtcctcattttcgaagagtttgaatttgccctgaagtttttcatagagttagacctcttgggtctggtttctttttcagttcgcttgttatttgaatgaaggatgtcttttgaggacattttccaaagtggttacatgagtgatatattttccaagtgtctctgtaaatagaaatgttttactgcttttgtgcatatgaatacctaagttctgtaacattactccactgtcttctggtgtttaatgtgcagagaggtcagtgtgatgccttctttaattatggcttcttgttgatttactttagaggttgttcccgccttcctgaataggccacaaagggctgagactggagtagacactgtagagattagacacaaggagcttactgtgcagttttctcagaaggctcagaacagagaggaataaaagcaagtctaaaagtattttagttgaaaagaaattggaacctggttcctcttggtcttctgattttgatccacaaagaagctgacacagtttacttctttatgggaaggtaagagattatatttacctgctttgagaatatgatcttctactttagcagtttgagaattgatcttactaccaaaaagaattttacagtttaaatagtataaggtgtgtatagatagatagatagatagatagataaaaataaggtgaaagacaagaaagtgttttcttgttagtgaattcaaattgttctgccttgttagatacaaggcagaaactgctgttcagtttttttaactggtatcaaaactctgtatcaaaatattcaaaggaccgatagagagtatttggagagttcttttgaatttggccttttaatcttttcagtgccctacaccagtccttcctctcttcagtagcaaggagagccttgaaggataaagtagtgaacaggcatcttaaggagtctgaaagagaggactgttaca

SEQ ID NO: 134054 - DNA, 1083 bp, Homo sapiens
gtgtgctaggtaccatgatagtgatgaacgtgcggtgctgcaggagcacagaggtcactttgtgctctatcacagaatccctaaaagagtcttaaaaaaggaaacatacatgttcttcatgcagtaattatgcagagtcccattgtagtgtacagtgtgtagagataacacatactttatgtatatattcggttttatatatatactaaattaattcattgaaagtgaacgtcctatccatataattttgctcatgtttttaggattcataagtggttttggagagtgaataaggtcagatgtcttaaaaacaaaaaagcaaaaccaaaaattgaatgtaagccttccttgttgtgaggaacacaagttgttgtaatccttctcattgtgaggatttgtttttcctttgtcattacaagtgtaattcagttacagtgcagaaaagagaattacaaagagctcttattgcatgattttcctactcagagacaatcatcagcaacattttaatttttgctcttcctgttcttttctatcctaagatccttaaatttttttttaaaataaaaatggaagcactgtttgacacgaagttaagcaactccatgatcaacatccttatacacatctttttatatagttacttagcaattcctgaatcacaaggtaaggcacacattcatggctttgtagagaggtttcctgtaataagctgtgccatataagagcatttcattaaagaaccttcccaaaattagccactgctgtattgagaggatttggaaagagttctgatgaatttggccctttaatcttttcagtgctttacaccagtccttcctctgtagtagcaaggagaaccctgaaagataaagtagtgaaaaggcattttaagaggtgcgaaagggaggacagagtgatagattagttatatactagcctagggttttttgttaactccagctacctgaaatcacctcaactcttacctctttgctgcctccttaaaccatttccaggtggtattttggtgcagataataatacatggataaaataataagtattaattaaaaacctgtat

SEQ ID NO: 134055 - DNA, 1051 bp, Homo sapiens
attctcttaaaatctaagtaaatactataaagagtaaaggtatataatgtaaagttttaaaagtagaatgaagactttttacatcatcttggtaccaaaattaaaaaaaaatatatcctgcagatcagaagtcaagtcgatagagacaattattgatcttgaaggagatgagtagtagtaattggtaatttcctgcggttggagatttttggagatgacctcatatttaggtctgatgtggctaatctgtcaacaaactgtttctttggtgagcccaccacagttgatcaaactcactgaccacgtgtacttttgattcctgtgacaatacagtcagaggacaacttttctatttataatctaattcagcatacgtttactgacagtttcataggtttagatagatgttttattagagttgtttctgatcattaatatttaaaatctttaaatttctaataagtatttataaatttatacttgagttagatcattctttggtacctttggatttgacagttataactataatatttcgcaagtctgaatcacaacttatttaaatatggattttgtgttgtagattgtgaagaggtctcttgaagtttggggtagtcaagaagcattagaagaagcaaaggaagtccgacaggaaaaccgagaaaaaatgaaacagaagaaatttgataaaaaagtaaaaggtagatggccacattttatatcgtgaaggattgtgttttaccattttgcaaaaagcctttagctagattcttcctgtttaatgtcaccaatagattggaatgtgttttttagaggttgaaaaaaatgacttacagtttgccctcagtatgttggtcttcaaggcactaagctcaaacctcacagtacgacatttctgaaaagcatgtacgtcatcatcttaaagtgaatcatgtttttatataggaacaatgtgaggatcaggagtggtatcactggtcaaggatttggcatcaattaaatcttaagtatgatcaacaggtgtgttataaaaaacacacctaccaacaat

SEQ ID NO: 134056 - DNA, 1130 bp, Homo sapiens
cttcattctacttttaaaactttacattatatacctttactctttatagtatttacttagattttaagagaatttacacactaagaattatgctcaggatacctctcacaatatgttaaaaggaccataatattaatcagcatagccaaactcaaatttaacataatcaagtgatacactcatatttcgtatattctgagacatcacgttttccgcaatttaacatccctgaaaatgctgcatcaccaatgcacttaatggtactttaacaactgtgagtcaaaaagtggtgcagaagaattggactctgaatgtaaagtttaggaataccttcataagtcttttgcacttgcattttcccttttatgtgtgcaaaagtcgtgatatatgacaaactataataaagtctaatggcactatttcaccaagtataaaaagcatcaagtgataagaaagcatatgttgattttaatcagcggcatttaaaaatatttaatggtacataaaacaatagtgaatgttctaatcaacagaatcttagtatttaatgaaattcagtacacgttttgttttacaatatggcttcttaattttatttggagatatgggattttctagtatagtatatattcaaactgtgctctaaagcaatgcctcccaatattttaagctaacagcacaaaaagaatattacaatatttgtaccactctgaggtagatacaagaggctgcttgtgactcaaagaaactggcctgggcactagcagtcctagccactaagtggatcaccgtcttggcacacctataacccatctgcagcaagtggagttgagacgatctgctctgagattatagagctatatggacactcgctagcattccagatgggtagagttagattttaggtatttatgaaattcttgaaatttttctttttttaaaatatttcttttttggtgggagatggaggtgaaagagggtaaggaaacagggcctgactcccattccaaccttttttagtttccaaattgtactcttaacatcacccaatagcaacaggtttctttcaaagtgccatattagaagcaaaatgaggccaggcgtggcggctcatgcctgtaatcccagca

SEQ ID NO: 134057 - DNA, 1070 bp, Homo sapiens
ctggtctctcccccattacccctttcgcacccctagggtctccttttcatatagtattttgctcaaaaccttctagtggtttctaaccattgtcttcaccattgcttgcaaggtcctgactgtctctgactgtatctcccaccactcctcaccatcgcttacttcaggtcttctagttacactggtcctcttgctgtaagctctctttgcaaaatacacccctgccctagagccttttcccttgctgttccctttgctaggaatgtttttttctctagataatgtaacttaccagaataagtaaaagataaagtatttttctgttagaattcttatgttgctaatttaaccatgagagttgcaggaaaaagtattttatatgtcctttttgctgtgtgtgcccctaagttgctgggctatttgcaaacttagcttatttaaaataactaatttatataatggacttaatctgttttcagagatgctgatgataaacacaagcttataaccaaaacagaggcaaaacaagaatatcttctgaaagactgtgatttagaaaaaagagagccacctcttaaatttattgtgaagaagaatccacatcattcacaatggggtgatatgaaactctacttaaagttacaggtctctaataagttgtatttattatttttcactctggtaaattcttaataacaaactagtcataattggtttggcttttgcttacagagtgtggaaaaactcttttccctagttttgcatatgcttcacagtcatgtataatgacatttaataacatgttttctcattttgcttttttcttttcttttttcaaacaataaggtctcactctgtcactcaggctggagtgcagtggtgagatcatggctcactgcagccttgacctcccgggctcaggtaatccttccacctcagccttctgagtagcacctggctagttttttgtattttttgtagagatggggttttaccatattgcccaggctggtctcgaactccagggctcaagtgatcctcctgctttggcctcgcaaagtgctgggatt

SEQ ID NO: 134058 - DNA, 1004 bp, Homo sapiens
ttttcagggcagaggttgtacacatctcttcctaggttgttatttcttaattctaattgtagattcttgtggatattttacacacataattacatcatctgtgaatagatgctgttttacttctttcttttcatcctttatgcctttttggttttcttgctctgttagactagctgggaccttcagtataatgttgaatagaagtagtgattgtggacatccttgtgttgtttgagatatattgaattcaaaggaattttctatttatgaacaaggtaacatacaggcttacctacttcaattgttgactgcttttacttacttttgtaggcatggctaatgtaaaagcagccccaaagataattgacacaggaggaggcttcattttagaagaggaagaagaagaagaacagaaaattggaaaagttgttcatcaaccaggtaaagtgagtttttcaaaaataagtatctagattggttattttgagtaacatgcataattctatgcaaagtgatgctaaataatgccataactactttaatcagtgagtacattatctttataaaagtgataaagtttggcagttttgctagtagattaaaaaaacaatcaaagaaacagccatgcatatggaaatgattatttaacttgtggctgatgtacttaggggttgctgctctctgttgttttataataggcagggttagccagtatattgattggtagaataaatactcaaaattatcttgataggctgaaatgaggcaccagaatccaagagataacatttaggacattcttttatttatctgtggagaaagaaagcagcttacaaagtataagatagaccagcataaaaagaaggatgtaactatgatctaaggttagtgctttggtaaatcacttatatgtacacatatcttcacagtgagggtactttcacactctttgggaaaaagatagaaacactttatttgttcataagtttggcagccaacagtgc

SEQ ID NO: 134059 - DNA, 1036 bp, Homo sapiens
tttggacaaatatttaacttcctggaggctcagattcctccttgagatacacttggcctgtatcccccacaacacaggtatgtagatcatacgggataacgtgtaagaaagcactttcaagtataacacgtggtgacatacttgagcctgtggactgttgtcactgaccactccaccctgtgtaccagaggctggggctgtcagagtctagtgtcccaggaccttccccaggcttctctatgatcccttcactcctaccttcaccacgtgtgaccaagtcccctggtttcccagctaggagagattgccagaaaggagctcatgttgatactgtacttgcttgctctttggaaaagcacgtattgattaatctcttcacctttgctgtaccccttttcctagcatggcctgtgtgactccagggccctagtgctgctgaggttggcatgggaggggaatcccataggaagggaatgtgaaagaaagccccagcatgaggaataagggaagttccacaatgcccatggtgtgggagaatgcaactcccaccaggcctgctgggccttctatctatccccattctgttttgtttttgtttttttgttttagagtcttgctctgtcacccaggctggagtgcagtgatgcagtctcacctcactgcaaccctttacctcctgggttcaagcaattctcctacctcagccccctgagtagctgggattacagacacctgccaccacacctagctaatttttgtattttttgtagtgacagggtcaccatgtttgccaggctggtctcaaactcctgacctcaagcaatccttctgccttggcctcccaaagtgctgagattaaaggtgtgagccatcatgcccagctcccattctgcttctggctgaagcttgtatctcctgacttttgcagccatctgggcaggcttcctgatgagggcagcttgtagcaagatgactcctgctgggagggtcaaggttgattgaccatacaagctgaacttctgctgtttatgggggt

SEQ ID NO: 134060 - DNA, 1170 bp, Homo sapiens
tttttctttaatagctgtctattattacaaaatatagatgtatattttgtaatatacacactcttgttaatggagggctatgttgttgttataataactgtgacaaacccccttagacacattcttggccacttatgtatttttatgaacaggatatcagaagtggatatattgggttagaaggtaagcatatttagaattttggggaactacttccaaattatcctctaaaattaaccaatgtatacttcaataatatatgcaaatgacctttttcttacacccttcccaacacaatatgttatcagttttttacatttttgcctgatggggaaaaagagtattttggatttttagtttaatttctaaatttagaaatttctaattattagtgaagctcaacatcttttcatatggttcttagctacttgccatttttttgtgaattacttattcatgttctttgcatagtgtcctatattgggttgtccttagtaatttgtaggaacaatttgtgtgccacagatattaacctatggtccattatgtatgtagcaaacgttttctcttaggctgacattttgtagtacataaatgtaatgatttcatgagttcaaatctgttagtttttcttcttggcttcttggttttgtatcttttttaggaaggtctagtcatgccaaatggaaaaagaaaggaaggtctggtaaaggtatttaacatttctgaacttcaatttcctcatcccaaaaatgggggataaattatattacttaagacagttaaggcgattgtatgaaatgagtgtaaaaatgttttaccgtactacctggcaaacagcagacacttagtaaatattgtttgttgggcacttgataaacgtctctcaagttcctactgtgtgccagttgttgtgttagctgcaaaggatgtggagatgagattctgtctcttcctttaaggaaaggggatggtgttattttcttcctaccagatgacaagttaatactatttaaaacatgatttctgttaatttgtgggagattgcatttttttccccatcagatcattgtggtaaaataacttgtgctcttttcttattccgtggtttgttttgttttgttttctataggattttgtttgtttttcacaaaaatggtcatttgagct

SEQ ID NO: 134061 - DNA, 1022 bp, Homo sapiens
aggcagcggggttcggcctgttggccccagactgtgtggcaggcaaaaggtgaacgtcaaagcctgtccccggcttcttcacatctcgcgcctccgcgggcgtcgggccgcccccgtgagcctccccggatggactgggttttagggacccccgcagccggactgcaaagcttcccaccaacccttcccgcgaacctcccagcccgggccgcaagcccagctccgggcgcgacgacgtggggccggaggtagaaggagtctcagcgcggcgggggccggggggcggggaagcccccccacccacgagaaaggtcttacatcagccgccccacgtgcaatcggagagagggaggaagtcgctcctctattcgggctgcgcctttccccagcctccgccccgcccgccgcgagtctccccgccccgccttggtgcagccgcggccgccgagccgagcagcgccgcgcggggccgagtggagccgagcagctgccgcgccgcgtcgccggtttaagcgcagtgcaggccgcggccgggggcggcggtagtgagcccagcgctgcgctccagcccccttttccctccatggtttctctccgctcccgtgagtaacttggctccgggggctccgctcgcctgcccgcacgccgcccgccacccaggaccgcgccgccggcctccgccgctagcaaacccttccgacggccctcgctgcgcaagccgggacgcctctcccccctccgcccccgccgcggaaagttaagtttgaagaggggggaagaggggaacatggacatgaagaggaggatccacctggagctgaggaaccggaccccggcagctgtaagcagagacccctctgggtgccctctcccccgatgacttgcatgtaatggtggccacctgcggggcccgggctgagggttcgccggccccggcgcggggaagagcgcagctcgtgggctcggacggggaaggcgggcgggcgcggaggggggagcgagcgcgcgaggattaactcttt

SEQ ID NO: 134062 - DNA, 3991 bp, Homo sapiens
cactggcgggagccgcgcgccgcggccgccgccgactcatcccgtcgcgggcgcgctgccgaccccctcccccttcttaaaagggcaacggcaggcggccgcccccgccccgcgccgggcgcgcgggattttgggcgggcttcggctcggctcgtgggccgggcggcctctggcctcccacgtgcttgagagcggcctggtgcggtcggccgcgcgccttgcgggctgtaggggcctgagggcggccctcttgcggcgcggctgcgtgggcgtgggtccgacctgtgggaattgccccattcgtctcccgggtttagcgcggctgcccgccgtcgcgagccccccccccgccgcggaccggcgcgggccagttagcgccgcggccgggtgccccagcgggccagtggctttcccgcggagggcggccccgcggggcctcccgacccgctctgggctaagcgagcggccaggtttcgtgccctcaggtggctgtggttaacaagtcgcgaacttgtgggaattcgtcgaccagggtttacctggtgtgctcgacattttaaatccttgctctctagtctttgaggtcaccactaacgcggggcgggccgggctccaccgcacggcgctgtccttcccggagggcccgcgagggtgggccgctccgggggttgcgagatggagggtcgcgggcgtgcgttcttccgaccttccgtcagacattttgtgcccgccacgtgctagcctatcgcccagctcgcgcctcaaaacttgagaggctttcttggcttgagaaggtgtttattccagacttttccattgcggcgtaattgcaaatccgtagaatatggagtagctaaaattagccaaagtgcccgcaagagaagtacacacgtgggtcttcagaaatgcgttaaaatctagaatttgaattctttaggatatgctcaaactaaaggtcttttaaaattctcaagagtagtgttccctctgggaaacacagttggtctgctgttccccttagaggatgttttcatatatgaagtaatattgctttaaaaacacatgtatatctacaggtgttcatttttcttttttctgtttttcttttttttttgagactgagtctctctcttgcccaggctggagtgcaatggcactatctcggctcacctcagcctccgcttaccgggttcaagcgattctcctgcctcaacctcccgcgtagctgggattacaggcatgcgccaccatgctcggctaattttgtatttttagtagaggcggggtttctccctgttgttcaggctggtctccaactcctgacctcgggtgatccacccgcctcggcctcccaaagtgctgggattacaggcgtgagccaccgcccccggccaccagttcatttttcaagtaatcagcttaaccttcttgccagtcaggccagagccatttaattcagttaaattaaaacattttctctgtaatactatccacatttcaagtgctcagacgtgacaagtggctcgtgggtgctgcgttaggcagcactggcctgcagaatccactggtttattaagtaaacattttaagcctgagaaaccattgaggtggtgtggtgctttttgcacttgggagagttgatgaggccttgagagagtgttgtgggagccagctaagattgtgggggtagaggaaggttcccttagggagactgagaccagtgggagttaggtacccagttgggcgaataaaactttgacctaaaagtgaagggtttttcaggaaaaaatgctgtagattttgaaggaaattctaaaagagagtttaaagtgttttcgcacagaggcgtcatccttaaggcaaatgaaaagtttggagatcactctcttaaaatcacattcagctagtcacatgataccttatgtgtgatgtgctggaacatgccataaacaccacagaaattgatggcattgtcagctgttacacagtaggcttggcctctgggatcctgcagacttgtcgtgtggggtaacatgaagaatcgtttcccttgttgaaggtatactgttgttgtatgaacaggatgccctgaaatatacagcagtgtcccatggttgaccttaatgattttaaagtcaagtgagatttaagggtgtttgaagagggcgaataggggtttaattgtaaatatgttcttacgtttaagaccagatgggcttttattgtgtatatggcttttttttaattactggggtttgaagaagaccctagtaacacttttgttcagttgggctcttgtgtgttctgaccaaggaagacaagaaggtaaacacaaaagtgttactagggtcttcttcagttcacctgttactatatccctattccttataaacacaagtatgcccatttccctaagggatgggggcgagggattgtaaagaaatacagaattttatttatttttttctaagtccaaaagagctcttatggcagggtatattctcatagtggaacaaaatggcctaagatggcattttaaagtaatcttcatgaagaatggtggttaccatttaaaaacattttatagacaaggataggagatagtttgtatgacaaggaaatattttatataaaatattggcagttcactgagagtaaattgaacagtgctagaatacaccatatatacaccatggaaattggaggtcttgtcagtaaaatgagaagacactgacatgcagtagctagatataaaccacatttagttgtattctaaaattggaaaagaatacctgttctttatgtgagattcttatccttccagtaaactgaacatgtcgctctgttagaagcacctcattaaccacgcatctggggacagtcagccttcctatcagctctgagtttttcattcaaagttagaaagccaagcagttccttactgtggcttgcagtctatgcacctgcgaaatgctggtgtgctatatgctggactgtgacatttcatataccaaaataaaagtctttacgtagtcccaatttactgagaaaaaatgtagattgtctttaacttccatctttttttgatccgcaccccctccccagcttttgacctcttttgttgtgtctactgtgatgtaattttgagctcaattggatattctagttggttgcatagcaactaattggggtttttttccttgtataagtaatacatcttcgtttaagaaaaattagatatagataggccaaaaaattgtaggtatagacaagcaaaaagaagatagacatcatacatgcctaacgtaccatctagacactttagtgtattatagtctaccagaatgtttaaattttttctaaacttggttcatgcaaataatccaaatgctagctagcttgttgcttttttttttagaaaaaaaatacagtcaacatctttgtgtgtgtccttattttatagactcattattaatgtctgcatagatcataatttaaacatccctctcaggttgttcacagggattttggctgttttaaatactgctgaaatgagcatcttataatgtgatttttttttccatctgccagattgcttttcagaatggttcccgtctttaaatacccaccagtagaatattggtgtttccttccttaatgccagcagtcgtgctacctaaacacattggagaaccactaatagagatccgttccaggctgggcacagtggctcgtgcctataatcctagcactttgggtggcagaggagggtgggtcacctgaggtcagggattcaagaccagaccgggcaacatggcgaaaccccgtctctactaaaaatacaaaaattagccaggtgtggtggcaggcacctgtcatcccagttattctggaggctgaggcaggagaattgcttgaaccccggggacagagtttgcagtgagccaagataacaccacttcactccagcataggcaaaagagcgagactc

SEQ ID NO: 134063 - DNA, 1030 bp, Homo sapiens
tttgttttgaattaaggactcttgcatcctgattttttttcccagtgtcaagataatcttggcaaagattactaaaaccagagttggaaagtgcgttggtgcagaaacctctagccagaatctcttagtggtcttgataggaaacataaagctttcctcttttccaggggtcatcttctgggccttaaggtagacccagcctaaagagtgtcttcattctgcatttgcatttagataaaagctgccctttggggaacaggctggagaaaagaaataaggggaatacgcttacttcacttatatcttaaaaagtatagtttctgtttctggaaaaacaaagagcgtaagtgtttatacccatggaataatattccatctttgaacctgtcagtatattgttactgaaggcttaatcagtttttatctttttataactatgatctaggtctaagtaagaggctgcctgtatatatgggtgtttttgcaggatatttatggtagaagtttctgcattgttgtttgttttcaatgtgtttttgagagcttatccttttttctttgtcatccacaggttcgagaacttgtcttggacaattgcaaatcaaatgatggaaaaattgagggcttaacagctgaatttgtgaacttagagttcctcagtttaataaatgtaggcttgatctcagtttcaaatctccccaagctgcctaaattgaaaaaggtaagtgctttttctttaacagtaaaagagaacgatcctgggaagggaaaatgtatgattttacctgtaaggaagcacttagtgtagcagaaagcacatggcctttggaactgggcagatatgggattgaattctagccctagcatttccttgatgggcaaacttctgcaggttacttaatctctctaaggcccaatttcctcacctgtaaactggtggtattacttgaccttgcagaattgctgtgaagtttggaaataatgcatgttgggtgctcaataagtagtagttaggaagaataattactgt

SEQ ID NO: 134064 - DNA, 1030 bp, Homo sapiens
gagtttcaggtgaccgtttctgatgagaaagaaatttccccttctaagtatactagaggttcaagtataattcttttatatttgcatgggttatcagtgacattggaagctctgattagcccagttaaacatagtatagctttttagcatctatttacataaacttgatgctagcagatccttagtgtgtgttttgtgttgttttcctagcattctgatttattttcccaaattactgttggtctctgtactctcagacttattcagaaattcagcctatcagtgaccgtttttatagggactttaataaacctttcagaattctgaatagagcttgtttgagttctgagaaggacagggtttttgtttttgttggttttgggtgggagggcacgttaagtacacaaattaaaaacttttaacatttaaaacattaatcacttcccttatagggctaatgagagggaatcatacttaaaggcaggttgagtgtactcatgattgataagaactttattttcttcctattccagaacacaaattggttttgttttgttttgtttttgagatggagtttaactcttgttgcccaggttggagtgcagtggtgccatctcggctcactgcaacctccgcctcccaggttcaagcgattctcctgccacagcctcctgagtagctgggattacagacatgcaccaccacgcctggctactttttgtatttttttttttgtagagatgggggtttcaccatattggtcaggctggtttcgaactcctgacctcaggtgatcagcccacctcggcctctcaaagtactgggattacaggtgtgagccaccgtgcccggcccacaaattgtttttaacaagaaataagtactgaaaaaaaattgatgtgtaaatgtcacaaattttctaaatttacacatctatttcatttcaaaataaatatgctaataaatgttttggtagactgccttgttttggtagattgccttgttattcctactccctaagatacacatg

SEQ ID NO: 134065 - DNA, 1273 bp, Homo sapiens
atgcaagatgtggcctccagggagctggtttcataaacctgaggctgttgacctactccctttcctgaggttatgaagcttctttatgggcttacttgtagggcccgttcctctcttgtagctttcagagcaacattccctggtggcttccaggtgtagaactctacagtgtatgtcagtattgtccagaaattaggtttcaagtgggcattgcaagctttgaaggcacacaaaatatgctgctcagaatgcacagactattaaaccatttaccctttctggcaggtatagggtattacaacttgtcaaaggattctaattggttttgacccactttttaagttagaaaatttatttgctgatgttagagaccagttcttgagtaagctgttattagcagctgattaggaaaacacaatacttctgaccttaccttctcctgttaattatttggatttaaacaaaatgaacatgcatgccctaatagaaatagggatcatttgatcttgataaatctttgagaactgtatttgttacttacaataccttaaatgatttctgtttctctgtgtgtatttgtgtttgtgttgtgtccattttctcttgcagcttgaactcagtgaaaatagaatctttggaggtctggacatgttagctgaaaaacttccaaatctcacacatctaaacttaagtggaaataaactgaaagatatcagcaccttggaacctttggtaagtaactgagaatttggaaactggaacttactggtcattttcattttcatatttctttatagtgggggaaattactggcaataataattggttgagaaagtggtggctttttttttttttttttttttttttttttttttttttgagacggagtctcgctctgtcgcccaggctggagtgcagtggcgggatctcggctcactgcaagctccgcctcccgggttcacgccattctcctgcctcagcctcccaagtagctgggactacaggcgcccgccactacgcccggctaattttttgtatttttagtagagacggggtttcaccttgttagccaggatggtctcgatctcctgacctcgtgatccgcccgcctcggcctcccaaagtgctgggattacaggcgtgagccaccgcgcccggccgaaagtggtggctttttactttttatgtaagtcccaattttaaagatcagggcctctctaattagatgtatttctgtggctttgctctctccctgcctgatattgtggtggca

SEQ ID NO: 134066 - DNA, 1476 bp, Homo sapiens
ccacccccctttttttttctggtttaattttttttttttttttttagacggagtctcgctctgtcacccaggctggagtgcagtggcgccatctcggctcattgcaagctccgccttctgggttcacgccattctcctgcctcagcctcccaagtagctgggactacaggcacctgccaccatgcctggctaagttttttgtatttttagtagagatggggtttcactgtgtttgccaggatggtctcgatctcctgagctcgtgatccgcctgcctcagcctcccaaagcgctgggattacaggcgtgagccaccatgcctggccttctcttttaatttttaaagaacagagtagcaggcagtaccttttcactgttggccagttgatgactggccattacctagttctcgtggcagcctgaatcctctgattatcagaagcctttttcagtgttgtagcacacagcaatggagcagaagcaaatactgtgtgggagttgtttgcttgagttttttcctgatctggtcagtaatgtatgagaggaccctctggtggctgtgaaagtctcagtcccccaggatagtgaaggataaaaagtaatcttcgttgtgttcaccatttttagaggatctgctatacccatacatttactgggtgctttatgcatgttttattagtaattgtaaaaaaaaaaaccttcgatacaaagtggatagaaatagcatggcccttgttttatattgaggaagctaaggcttgggtgaggctgaatcccttgtccagagtcacacaccctgtggcagagccacagggctacacaccagagctatttcgaaaagcctggggtcccgccattctgctatacttggcactcagattcctggcggtgctaggttggtctcctgaagttctaacttggaattaagtaaatctgtaggagaaggtgaaggggggaagagttgggtccattttgacttctggcagtattcttcagtggggaaaaacaccatcctcatcctcattaaccacatacattttgaacaccgtctactttgagcccagttcttatagtcaatgcaatgattgtgaatgcctctgcttgctacagggacattaatcgagagacaaagaaggcatcaattcaaacttccttggacaccttttttaagagacctgggccatccaaaccatcccccaaagcccttctaaattctaagaaggcaagcaaaattattgttaataaaatgtttaatgtttattatggctagcctattagcttacatcaaatttctggtatggtagagttgtaattttttttaatcagtatttacacattacattgggatcctgaataatctgtgtgtagtgtattttgtgcctattgggccttaaagcacaattttactactttcagcagttccagagtactacagttatttgggatttttgttgttttcttgctttcatttcattt

SEQ ID NO: 134067 - DNA, 1294 bp, Homo sapiens
ggcatgtccaaattgtttgagaaggggtgctttgccaggaagtagccaaaaatctcacataattgtacagtttcagaaacaggagagccttggaggccctgtgtactggaagagtcaatgaaactagatagagaaagggcttttggtattaaaaagcattagataaatatcagaggttgtatgtgtttttgtgcacctatttctaggaaataattctgaaatataaatggctcattcctttaagtggagaatttttagagtgaacctttttggaaaagctgcctaaagctgactctagctggcatcgagtcagcctttgtgaagagaaagccagtatgctagctagccatctggggtggcattgcagcatttttttcctctttggcaagaagtcatacctgggcttctggaagtcagggcctgactggaagggaagctaatctgaaaattacatgatacaaaagcagctctatgaccagaagggctggggacagctttcttaaaacgtcaaggaactgactatataagcacattgtttgatccacagactcttggatcattgtacaatttgtgttttgaggggtgcaacgttttcctgttgctgtaaccctgctgtgtgttccctgcatgaataaaacaagtgtgggagcctctttcttcatcaagaagatgaagttcttcatgtgcaggggtcagtagcccttttctctaagggccaaatagtaggttcatttggctttgtagcctgtttatatagtctctgtcacaactagtctgcttggccattttagtacataaggagccatacataaataaatgagtgtgactgtgttccaatggagcttattttacaaaaacaagtggtgggccagaattggccactggaccaccggttcccaacccctgctctagagccttgaggcagattttcacaccattttatatctcctcagaactacatagataccttgagttctgaaaataaggttttgttttgtctgcatttcttctcaggtccttgtgagtgttgtaacagctttcctaataaagcagcaaaacctgttaagcatcaacatttatttttttagaaattattttatgtggaggtcctcttaaagtttgtttgggtgtttttagtactatcttcttagagaataccgaagtttttctcttgattcagaaccattaaaggttgtgtttatgaagctatccagatatatgtagttattgcccctattctgaaaggcaccaggctatgtgctacttcacattggatttgcctttcataggctgc

SEQ ID NO: 134068 - DNA, 1397 bp, Homo sapiens
aataaaatcagaagaactttacatcataaaagtctggtaacatgtcagtcttttccccaaatactaaaaaagaagagtgcaatgtttctccgtatttccgaagtttcaactctgcgcccctctgctttttcctcagcccatattgactcctgtcttccctgaaagtagctgcattgccacactttatattttattatatttcatcctctagtgtttcatgtctgtgccctaactaaaattgtaagcaccctaagattgtgttataaatctctgaatttttccctatactgccaccctagaacattaaagaccgcttgatacccaggaagttcttaatggccatttgattactcaaatgttaacatttgtttcagctaaatttattaaactgtttgattgtctcatactgtgaaaatacctggatttaataaaaattattttcaatttatatttctttagactactatgctgccagaaaaacacatagttctctgggagagtagataaaggaagagagggactaaagtctagtaacctaatataaaggttgcaaaagacttgatgtatttttctatatatgaggctgagtgggtagtggaaattgaatatagagcctagaattttacctcttcaagagatggatttgttacttatattcctttggtttaggagttgtggtttttgatccttttcttcagaaaaagttagaatgtctgaaaagcctggacctctttaactgtgaggttaccaacctgaatgactaccgagagagtgtcttcaagctcctgccccagcttacctacttggatggctatgaccgagaggaccaggaagcacctgactcagatgccgaggtggatggtgtggatgaagaggaggaggacgaaggtgagtaggctcagcatctggtgaacctgatgtctgcctttcaaagcctctgataaaagctattggatgttggccgggcgcagtggcacacaaccgtaatcccagcactttgggtggccgaggcagggggcattgcttgagcccaggagtttgagactagcctgggcaacatggcaataccttgtttctacagaaaatagaaaaaaaaaaaattagccaggtgtggtggcgcacacctggagtcttagctactcagaagactggaggccgaggtgggaggatcacttgaacctaggagtttgaggctacagtgagccatgattgttccccactgcactccgtctcagaagacagacagggtgtctcaaaaaaaaaagctactagatgttcttactattgaggaaaatagtgtgtgtttgtgtgcgtgcgcacgcgtgtattttttgaatgtaggcattccattaaatttatagctaaggcctatttcataagcacctggcctcaaggga

SEQ ID NO: 134069 - DNA, 1062 bp, Homo sapiens
aaggtacatgatttttttttttttaactttttactgtcaaaaatttcagacagtgacaaagggtaaaaataatagcaaaatgaacccccatgttcttatcactcagcttcagcaattattggtcatagctgatcttattttattcctgcatacccttaccttcttccccactccatataattttgaagcaaatcttagccattgtatcatttcatcagcgagaattatagtgtttgtcttatctaccaggacttctagctctctgattttatgggactctatcggacaaagggactgagctgtagcacatagtagaaagaaagtgactgcagttcgtggccttacagcatttgttctgtgagccagcccacagatcctcaacactttgtcccctgtggagcgtcgaggatatttaatgaatcccttttggactatttttagaaggagaagatgaggaagacgaggacgatgaggatggtgaagaagaggagtttgatgaagaagatgatgaagatgaagatgtagaaggggatgaggacgacgatgaagtcagtgaggaggtcagtgcagctgttttctaccctgcttcctatttgtaattacaacaaaagtgggggtttcaaaaagatgacaaaagaaaagaaaaaacaccttttgaagaaattagtatacctgtgaatacatttacaatatgaatctggttaatttagtgtttgtctggctttaaataactactaaatagaatgcctactgaactcaaactagtacggttcctggctgtgcaaggtaagttctggccctctgggggaaggaatgaattgagtattcagtgtggtgagaaaactggacatgttgagaattgatggtatgtctgttccttcattgaattgtagggaagtttatgtttaccaagtctaaactttttcttgtatattcagtgtaattcagtaaatatatatctgctatgttaaagagttgggagtacaaaatgaaatgagattgtggtcctgccctgaaagagcacagtctggtttatgaaatacccaataatagaggatccct

SEQ ID NO: 134070 - DNA, 1348 bp, Homo sapiens
acatgccaccatgcctggctcatttttgtatttttagtagagacggagtttcaccatgttggccagggtggtctggaactcctgacctcaggtgatctgcctgccttggcctcccaaagtgctgggattataggcatgagccagtgggcctgaccagctcaggttaataataagcactttaataattgctagatttgtaaaaagaaacatttggaagacaacaccttaaaatcgaggaaactggattaacttttcctgggtgagttgaggtgctgctgtgcattttgcttttcttggttctgtggtcaccacttatacttgctattagtcacctatattaatctgatcaagtttacattgttttatctcctaactgtcaaaaactttgttgttgttgcctccattggcaataatctaagcaaaatgcctttccactgtcctaaagtcaatttttgttactgtacagaggaggaagaaggtgggaaaggtgaaaagaggaagagagaaacagatgatgaaggagaagatgattaagaccccagatgacctgcagaaacagaactgttcagtattggttggactgctcatggattttgtagctgtttaaaaaaaaaaaaaaggtagctgtgatacaaaccccaggacacccacccacccaaagagccaaagaatagttcctgtgacattccgccttccttccatgtagtccctcttggtaatctaccaccaagcttgtggacttcaccccaacaaaattgtaagcgttgttaggtttttgtgtaagattcttgctgtagcgtggatagctgtgattggtgagtcaaccgtctgtggctaccagttacactgagattgtaacagcatttttactttctgtacaacaaaaaagctttgtaaataaaatcttaacattttgggtctgttttttcatgctttgctttttaattattattattattttttttacattaggacattttatgtgacaactgccaaaaaagtatttttaagaatttaagcgaaataaacagttactctttggtaaagcctagttgtatgcttacatttttaaattatactctcattgtaagctcatgttaaaacaccaaagaactggtttatttggcatttttatattagtagttgttgaggggaattgcacaagtgtgtaggatctttgagcatttagatcaaatcctcattgataactgggagtaaatgaagcatactttaaaaaataacgttcaaaatggaatactctggggccctgaaaaccagtaaaatgttaggttcaagtattatgtgaattaagggaaagaagatagtgtaaagcaaaaggccttcacca

SEQ ID NO: 134071 - DNA, 1087 bp, Homo sapiens
agatggagtctcgctctgtggcccaggctggagtgcagtggcatgatctcagctcactgcaacctccgcctcccaggttcaagtgattctcctgcctcagccttctgagtagctgggatcacaggtgcccgccaccacacccggctaatttttatatttttagtagagacggggtttcaccatgttggtcaggctagtctcaaactcctgacctcaggtgatctgcccgcctcggcctcccaaagtgcaggcatgagccaccacgcccagcccttttccagattcctgtagccagcaaagaccagcaccaaacgtttgttgggctaatggatgggtggatgcaaatgaatgtttgcatttgaatgaaatgactgagaacaaatctttgcctgctttcaagttgctgagcgtccctctactgcctaagatgaggggtttttctacttgtatgttattccttgcctgtcataacaacagtgtttttggacaatggtgaaaaggagctccctctttgatttttgtagatggcagttgaattcctgcatgaactgaatgttccatttttcaaagttggatctggagacactaataattttccttatctggaaaagacagccaaaaaaggtaagtgtctaatttttgacttaaaatcgaagggagtccaaaccttcatatttttactcccctcatggtggcccactttcagcagatttcatgaagacaaattttagcctcttttcatttttttaaatagagatagggtctcgctgtgttggccaggttggtcttgaactcctggcctaaagcaatcctcccatctcgacctcccaaagtgctaggattacaggcatgagccactgtgccctgccagaaacctcttttcaatcagcctgtacttccattttttgtaagctaatttgaaagaaaatgaattaagaatatgacagtttttataagacatttagaaattctttttaagaatttttttttttttttaatagagacaaggtctgtctatgttgcccaggttggtcttgaactcctggattcaagtgatcctcctacttcagcctcccaaagtgttggg

SEQ ID NO: 134072 - DNA, 1010 bp, Homo sapiens
gggaccacaggcacgcatcaccatgcctgactaatttttatatttttaataagaaggggtttcaccatgttggccaggctagtctcgaactcctgacctcaggtgatctgcccacctcgacctcccaaagtgctgggattacaggcatgacccaccgcgcctggccaagaaaatttcatttacagtcaccctctttagaatgtatgtgcttcctcaactgcttagctcgaatttgatttggtaacagcaagactgtcaaaggatgttcaaattataaagtatgccatgtttgttagaattttggttataaaaaagactacgccttccccatagtaaatggcccaagaagggaaccccctccctcctgctcaccgagatgacccgcaggttgacgtcctcaggctggagcgggtatgcgctggtacactgcaagaagcagaagttggggttgaggggcttcacgatctgataaacttgcttcatggtgtccattgactgcatcccactggagatcaccattgggcgacctgagtaatccagcaccaacaccatcagcactttctctttagaggttctgactctccccaacacatcccaactgctggtctcatcattcaactgaactccacagacatctcttaaaacactgtgccagcccctgtgggggaacagagaggagcttgttgggttcctgccctcggccacaggaaaggtgggctcccctctgccccccgacagtgttcttgagcaaaaggaactgaattaaagaggcagaggaatttcacactgccaagaggaaaatgagtatcttatctgattaataggttgtataccatggcagtacagtagaatgagtgctgattcaagagtgtgaatgaatgtgaggtgtggagctgccacttctagctgtgcctgggcagagtactgtccgtctctgagtctcagaggcctcccctgtgaaataagtatcaagcatcataatcatgacctgtttcagtcctaggagtgtt

SEQ ID NO: 134073 - DNA, 1026 bp, Homo sapiens
actcctaggactgaaacaggtcatgattatgatgcttgatacttatttcacaggggaggcctctgagactcagagacggacagtactctgcccaggcacagctagaagtggcagctccacacctcacattcattcacactcttgaatcagcactcattctactgtactgccatggtatacaacctattaatcagataagatactcattttcctcttggcagtgtgaaattcctctgcctctttaattcagttccttttgctcaagaacactgtcggggggcagaggggagcccacctttcctgtggccgagggcaggaacccaacaagctcctctctgttcccccacaggggctggcacagtgttttaagagatgtctgtggagttcagttgaatgatgagaccagcagttgggatgtgttggggagagtcagaacctctaaagagaaagtgctgatggtgttggtgctggattactcaggtcgcccaatggtgatctccagtgggatgcagtcaatggacaccatgaagcaagtttatcagatcgtgaagcccctcaaccccaacttctgcttcttgcagtgtaccagcgcatacccgctccagcctgaggacgtcaacctgcgggtcatctcggtgagcaggagggagggggttcccttcttgggccatttactatggggaaggcgtagtcttttttataaccaaaattctaacaaacatggcatactttataatttgaacatcctttgacagtcttgctgttaccaaatcaaattcgagctaagcagttgaggaagcacatacattctaaagagggtgactgtaaatgaaattttcttggccaggcgcggtgggtcatgcctgtaatcccagcactttgggaggtcgaggtgggcagatcacctgaggtcaggagttcgagactagcctggccaacatggtgaaaccccttcttattaaaaatataaaaattagtcaggcatggtgatgcgtgcctgtggtcccagctactcaggaggctgag

SEQ ID NO: 134074 - DNA, 1090 bp, Homo sapiens
attcccatagggtattctgggcatgaaacaggcatagcgatatctgtggccgcagtggctctgggggccaaggtgttggaacgtcacataactttggacaagacctggaaggggagtgaccactcggcctcgctggagcctggagaactggccgagctggtgcggtcagtgcgtcttgtggagcgtgccctgggctccccaaccaagcagctgctgccctgtgagatggcctgcaatgagaaggtgtgtcctgccggactctactcggttctgctgccgtgtgtggaaaaaggataggctggcctgagagggatggtcaggaccagccctccctgagccaggctgatgaaatgatcagtgaatgtgctcccacccgtgtcagcttcttcaggcttctcttcagtaatgcatgtcactctggcctgtagcagcagcaggagacacatgttatctaactttagcagtttctctggccacctagggtcacattagagtcttccactaattctctgaagcccatggccccagtactcctagactccagaatatgtaacaggagtgaggccctggaataagtcaagtctgggctcccttggagcaggtaagccctgagaaacatttaggcacggtgttccctgaggtaccagaagagcctgtggcatttcctaagccagggtggcactggtgggaagggcagtgagtcgttgcagaggtgggtgggtgatgatgcagctattccttgtgcaacagtgaccttcagacagaggaactggtgggcctagaagcactgcctggcatgctgactatcagggcttcctggaagccgtggcctggaccttcttgccttctgagtcatagagccaggcaggcatcctggggctgccaggcacacacacacctaacctgtaggctgtcggggtcaaggcaaagaccaaacaccaggcatgcctgggactgttgtcaccttttattctagtggggcctacctgcttccccaaatcaaagatgcatctataccaggaaattaaaataaagtaaaaagaaatagtttctttatagaggaaacaggagagaattagaccagaaacca

SEQ ID NO: 134075 - DNA, 1017 bp, Homo sapiens
tcctggcccctagggcagccgggggatgctgatggccccctcccagagccgcagggccgggtagagcggctcctggaacgtggcgcggaaggtatgcaggtggctcatgccgcccgtcacgtcgtagaaggcgaggacgccggcctcgtagtccaggaagacgccgagccggtcgaggtcgtcgcggggccgcaggcggctgcgctggccgtcgtggaaggcccagtactcaaggtcgtagcgcttgaggcaccaggactggcggttgcagcccaggcgggcggcggccgaggccccgcggcgccgaagggaggcgtaggccgcgcccacccaccagccggcgcccgcctcctgcacgtcaacctcccagtagtggcggccggtggcgaagcagtcacgagccagcacttgccagagcgcgtcgaaccgcagcacgggcacgggccccaggctgcccagcaggccgcagcgcaccgtcaggcgatcggcggacaggcgcaggcgcgcgtgcatcgtgtcaggatccagcgtgggcgtgcgcgcgtctgcagggggcgagacaagggacgcacctggtgggcggggccagcgcggcgccccgcccccgggaacccaccaacgcacgtgcaaatcacaaaatgcgaagcgcggaaatggcccaaggaaggggtgacagacccctttaaaccgcgactgcccctggggcggggtcttggggaaaggggaagaagagatcactctgctgcacatcccttatactgtctgtattttgtgccgtgaaatttgttgccaattaatacaaatttaattaaaactaatcctatcactgttaacattagggtgtgtgtacttcctatctttcccctccccttgctgctttatagcttttctttttcttttttttctttttttgaaacggagtctcgctctgttgcccaggctggagtgcagtggcgcgatctccgctcactgcaagctccgcctcccaggttcaggccattctcctgcctcagcctc

SEQ ID NO: 134076 - DNA, 1051 bp, Homo sapiens
acttacaggtggcagctcactgtgcccacaagtcaaattttaagagagagaacagataaaacttcaaatattatatgtgaaaccacaaatttacgaaggggcactggtagccagcaatgcctacccatcctgttcaaagaccaaatcaggtcatttcattctttccttaaagccacaaacagtacaattaatgaataatctattataatggtttgcaccacgcccagtttgggttcagtttcagccaccctgcagctaacccttgtcctgcaatgagtttagggctgggtaaagaagaggggcctttggaacaggcaggaaactctctctgtctctttctctctctctctctctctctctctctctctctcacacacacacatacacacacacacacacaccccgcatgtatgtcaagaaaggagcatattgcatagcaggaagaggggtctctcaactagtcctcagactacttcccacctgcactgctcatcataacatgacttcagtctagtcacttcccttgcaccccagttttcccatcatcaaatgggggaaaataatccccacctaccttgcaggagagttgtgagccactgtcaggtgttaagaaataaactcaaggccgggcacaatggcttacgcctgtaatctcagcacttagggaggccaaggtaggcggatcacctgaggtcaggagtttgtgaccagcctgggcaacttggcaaaaccctgtctctactaaaaatacaaaaattagtggggcacagtggcatgcgcctgttatcccagctactctggaggctgaggcaggagaatcgcttgaacccaggaggcagaggttgcagtgagctgagatagcaccactgcacactccagcctgggcaacagagcgagactccgtctcaaagaaaaaaaaagaaataaactcagtgcgatgcaaaacccagagatgactacatcctttctgggagttgggaattcacaggccccggagcctaatcccatggcatcaggcccaccaagcctgcatgggatcacagcagcagaa

SEQ ID NO: 134077 - DNA, 1135 bp, Homo sapiens
aggatcatacattcaatctatgtcatctgccaccagtgtccagggcttaatcaccttcccctgctgcctgtagtccatccctggaatgtcagagttggtgggttccattaagataccatcccccaaacctagcccctccccccgccagccacccctctcctggcatcatttcacagataggtaaagtaaggcccaataagagatggggccttgctcagcatctgtcagccagtcaggagcagataggtgaagtctcattcaaataagaaatcgggagctgagcatttgtgcagggttgatatgacagctgcttctagcctggccttgagcctggagtttgtaggggccctggcaaatggcatgaccctgcccacaggcagtgcaggggcaggcgtgtgttccctgggcccaagagtcttgtccctctagccagccctgggtgggaggtgagtttggggctttgcccacactgcaggtcccctgagagttgtctcctgtactctgactgtgcatttatttctggctctggtgccagcaaactcctggggctgcctgctgccagggatgcagccctggcttctagccccatctcagacactgagtggccttgggccagggtctctcctggcccacctgcaaaatggcatcataacggccccagccacaggatgaagtaagaagtgcaagggaagttcttgcacagggcgtggtctatggcgtgctcaataactgggcaactcctgtggctgttcctaaggctgcaccacggtgttggcccaggctggggaattgagcccactgcagacagagccccctcctgccaacctccctttcacacctggctgaccaggtagacctgcctgagaaatcagatacgagcctccagcaatggtttggagtctaagattgcggacaacaagggatgcagtggagcaaaagaacccaggcctctgaagaaggagagctgaccccgctgctgatatgctccttaggcaagtcttgacccttctttatgactcagtgtcctcatctgtaaaaggggaagaataattcctgccttagtcattgtaatgatcttcaccccagcaaccacctattgatgtttttctaatgcttggggagtgtgaatgcagac

SEQ ID NO: 134078 - DNA, 1087 bp, Homo sapiens
cagcagggctgcacccctgcacaaccccagggggcagccttcatgccacagtcctgggatgccatgacctgagctcgtatagcaccaaggtactgctctgctgccctctgcagctgcatggcctctggcctctcttcattctgcgtgtctgcttccttctctctcagcagaccagcctctgtccattcattcattggacatttagggaccatcgaagctgttagaatggagacctcagcccctgagtcttgagcctttcagtgagtcttcccaccccacccctcatgttccagttctaaattccccaaagaaaaaatctgattggcccagccaggaataatttccacttctggtccaattggtaggggacgcagggagggactggggttaggggatgaggtcacctggttcacagggctatctcccctccaagactgtgagggactgtcatccccccgctccagccccagctatttcagtagaagctgcatagttgcaaatattttcccaaagcaagttttcactcgatttaatttaaacacacatatacctaagcaaaatttacataagccatgctgcttttttttagaataggtggtgtgtgacatttatttaacacagaatcaacattcagtgtccttactcaaatttgagtggttcccaaaggtagatatttttcatactctatttccagcctaaaattgggtgaaattgagcatgtgtatgtacaattcctgggaattaagagttaaactccaacagtaatgcctctcagtcgaagcctccttggaaaatatgttcagatttcatgccacactaaacgtctgccacaggtcaggtctgtagaaatttcattcattcaacagtctgacaaaagcccctgtacttctcatttgtttgaacatgttaaaatccagaagaaacaaaacctgcaaagcctcttctaagaatagctgtgaagggagctggaagctatgagatcagaatgaataataatttttgcatttcacacaaaagccaggtaggaagtaaagcataatgggggcctcttggatgccaggtgtttaacacctgatggcatctaatc

SEQ ID NO: 134079 - DNA, 1050 bp, Homo sapiens
tgatcatggctcactgctgccttgacctcccagactcaagcatcctccaacctcagtctctcaagtagctggaactacagacttgcaccaccacacctagctaatttttaaacaaaatttttagtagagacagggccccccatgttgcccaggctggtctcaaattcctgggctcaagtgatcctcccaccttggcttcccaaagtgatgggattacgggtgtgagccaccacatctagcctcagtcttcattttgttcctggaaggaacacttagactttgatttaaatcatgttcccgcttgacctgcccacgtgctagggaatgagagaatgtgagactgtttgcccttccatgtccttcttaaatgctcagagactgagctttgtagttaatgttggttttgttgcccaggagcaaagccatgcctttgctttcagtgaatgtaactctagcattttttcccaggaataaggaaattgtgaaatatctgctaaaccaaggggccgatgtcactcttcgtgcaaaaaatggatacacggcctttgacctggtgatgctgctgaatgatcccggtaggtaatttcaagaaaagggttgtaaatctacccagcgtttcttggactgggagtcaagacaggcacctcctctgtgacttgtgttttaagcacttgcttattcgtgggggaaagtcactctcaagtgtcaggagcttactgcatgatcttaggcaagttccttccctccccagtgaagcgctggacttggaccaggtggccccggggacttcctccagcaccaacctcctaggagtctctagagagggaaggaaaataagacgtgtctgactttgcagtccacacacaccctagaatggcatctgtgcttcacagccagaaatcctgagtcactcaggtggaaacataaagtcccctttgataagcagaatgggagatagagcgatggccttctcagcttaattgtgtaggtagaggctgcagggtcaagggtcgtgtactgggaatgtagccgttagttccaccccatttt

SEQ ID NO: 134080 - DNA, 1033 bp, Homo sapiens
aacggggtagggagggcttcgtgtaggaggagactgcggaactgggccttgaaggatgagttgggaattgaaaggcaggaaaggaggccgaggacatgagtgggctgcacagctgggaggcggcaagagagaagggtagctgtagaggggagtgggagaaaagtcagagagaaaacggggagcagaagttatcgggctataggatataggaaacatttccccattttggagaaaactcagtgacgtggctgtccttggagtctggcagttaaatgcaagtagtggaaatttcttctctttccaggcaggagcagaagcagagggctctggcctaggctggggctcggacgtcggctctggctctggtgacctggtgggcagtgagcagctgctgagagtgagtgtgaaggaggacacgacctggtgtctgggactgccttcaaaataaccccagagggagggacgtgggggccagggacagatgaaactggattggctgctgctggggttgccggcagtgagctcatgggggttcattctacttttccttgtgcttgtatatatgtttgaaattgttcactttgatcagttgcattgtaagtgagtacgagcctacatttatcttcaggacctcctcaccccaccttcttcctttccctggtgggcttcttgagcaggctgccctgcagcaggtgtgcccagtgcccttcacctctgccaactggctttcaatcctccctccccctcctctcaccctattcattaaagagacctgctggttttgtctctgggtggctattctacttcagcttccagaaccttcctgaaatctccttcccttatgcattccctccctgcctccctctccaggctactctttctctttggtgcctcttgctcccctggcctcctgccaaggctggagctccaccagtcctttctgaaattgccccctggggagcttctaccttctctagctgcagctggtgcctctgtccctgagagcctgtgctgaatccctggttgaaagctc

SEQ ID NO: 134081 - DNA, 1024 bp, Homo sapiens
cacagacacacccatcgctctacccggccctccggggctagcggctgagcggtgctggggctggcagaccccgcccccacgcggcctctcggagccgggagccgatcgggccggggctggggtctggcggcccagcccccggggagcgtggggcgtggccagaaaccggcgctcgcggctgcggattggctgcctggcgggcccgcaggcggggctcccggctgggtcccgcttggcagctcgcggcggcggggaggcggggccggcgggagcccggcagccaatggacgcgcgtcctccgagcagttacaaagggccggagcgaggccgccgcggcggctagggaggtggggcgaggcgaggtttgctggggtgaggcagcggcgcggccgggccgggccgggccacaggcggtggcggcgggaccatggaggcggcggtcgctgctccgcgtccccggctgctcctcctcgtgctggcggcggcggcggcggcggcggcggcgctgctcccgggggcgacgggtgagcggcggcgcggcgggcgggcgactgcggggcgcgcgggccggacccggcctctggctcgctcctgctctttctcaaacatggcgcggggccgggggcgcaggtggcggcgccggggcccgggccgggctctcgtggcgccgcgcggctcggcggctgccgggcgaaccgcaagcggggagcggaggcggggcaggggcgtgtgtccgggcgcgggcggacgtgtccggctgcccgaggccgccccgctcgggactccccggggaggtggagtcgggcggagtcgtccgaggtccggggctgccctctggggtgtgagtgggcgagggccaggggcggagagtgcgaggccggcggggactggcagagccgtggctgcccgccgccgccccctgggcacggcgtgaccttgttctggggacccccgccccaagagggtccgtgccagaggctgccgaacccggggcggggtttgaggttggggtggaaggcggctc

SEQ ID NO: 134082 - DNA, 1050 bp, Homo sapiens
gacccctgggtccgcaggccgccctgactcccgcccggctcgacccgagccgaccctgctggaaggggctgctcctccagccaggggggctttgtgtgagaagaaggaagcgcggagatgcgcggaatgtttcttctttcgtgcgtctggggagtgttgaagtgagtccagtaaccagacggctacggattgttttcatagtggaaacttgaacgtttgctcattctgcgggttttggaaattttgggaacgactgtgaattgattaaacgctttttatttcctcgaaggaacatcactcacgttgttccttttcttgagtgacagttaatagtttgattcagacatctgtatagctggttttcaaggaagactgttggctggatttttcaaaatagtaaatcaggttggggtaggtggttggtatccacaaagggatgagtgaaaaacttcgttagcagctgaactgagacactagaagctaaaatacacagcctcagtgttagcaactaaaatgcagtgaaagtacatttctgtttctgaaactggacaaaagatgttgaaatttttttaaaaaatcaagactgacggtgacgattataatcagtcctaatagctaccgtctatgtattgtgcattactacgatgtaaatgcatacactattgtataattacattatttaatcaccacaagtaaactcccaggagtagtggcatttgccccactttacagatgtgcaaagtggggtacagacacgttaagtacccaataacttaagtgctaaagctaggattttcactcagatctcagtttcccaaacctgtatgtcatatatatatataaatatgtatacatcatactatctggcgtagcccatttttcttcttcagtcgtctgatgagcaattggtctttattatccactttggattctgtcctcatgatttgagtatcagataggcttcattccgactcttagcacattgttgagtcccttcacgtgggcctgcattagaggaaacaatggatttttgacattggcctagggagg

SEQ ID NO: 134083 - DNA, 1171 bp, Homo sapiens
tgtcctggaggagtttacagtctccatggtatgcacaaaatacaaagctgtccaggtgcttattactctaagcccagactgcctcagcttgtctgcctcccctgttggttatgatgatgcctcagtccacccttaaaaaacattctgaaaaaggtcaaatgctttttatttcctctgtaacttggcttcccttttaaagacttgcacctttttatgttctgagtatgttttaatgttctctgcccaacttctgtctccaacataggtttctctagggaaattgattccttatccctagtgcacagtttagtaccactatgtctatatgtatatcccatctgagaatgctatttgcttcctttctgccatttcataactttttttctttgaaaacgtgcccccaatccaactcttctatgaatgcctcttgaatgtctcctcctttcttggtatgcagccttcagcttaatcctgcctgttatcctccaaatctagttgctttcccatgtttttctcatctaggcttttctatggctactgccaaactaatcttcctcagccttccccgtgaaggtttataagatttcccatttgtattcagcacttagaacaacacttagcagcttatgattggggccatctctgagtatcctaccagggatctcatttctcattactgcagaccttcgagcaatttctctttctcactgactcctgactgttcagccttttcactacacatttagttttgcccctttttttgggagtgcgagaagttctcagccctgacttcctgtgctggtttagttcttgaattctttgtcttccagaactctgcaacacttaacagtttgtgttgtccatttctactgcctgtgctgctacttaactctacttgaatgcgttataggtacccagaggacaagattcatgccatttctttcttttgtggcctcagaacttagcactgtgttttatattctattccacataaatgcttgttgatttctatttgagcattcctttaatatttatactgttttatgtaagtccagtttatgcaatattaacttgtaattccgtataaataatcaggaaaagttgtatggcgtgttgaaagcaattggttatttgtcctaccttcaccagcagttatgcagaaaatggggca

SEQ ID NO: 134084 - DNA, 1049 bp, Homo sapiens
aggtcaatttttttttaattgctgataaaaggacctggtatatacttattgattgagaaaagtaggcctatagtagtttggaagatggtcttgagtaagtacagttaattgaattggggtgtagttagaaggctttggtttagaatattagatgatccgctttgttgttgaaattaagagaggaattgacataaaaataatcaagaggaagataaatcttgttcctgtgaggagggccgctcatgtagggaagacccctgtcaaaaggttctaggccttagttgagcagttacagggactcaacaccattcttgtagtgtcattttattgcaccaaatatgttcatgtgtaataaatggaattttgaaaatgccattatcctatggatggcccttctgatgtgagaacgtgtctcttcaaaccacagagccccttgcaaatgtcgacacacctcttgccttttgcagttcttccttggtcatggcttacgtaacacagagttctctgaacagatggactgtggtttgatatcatgtgattgggtcacatctttgcttcctgcttttggaattgagggcagatgctggcatatttctcagggattttttaatgctttgtcccatagaactagcttgaggaaaagttttggagtcttctcagaatttatggtcagttttgacccagcctaactccaatacttaggattacatttaatgccattcttagctgaattttctcaatgtcaaatccaggcagtctccataaacattaaaattgtttaccactctgaattagatccaattttatgtgttttgtttgctttccaggtaagtttcttatggctacccttcttcatcatgaagaaaattggttggtagacttgtaattattcatctcagacatcactttcttaaatactagtggactaagttcagttggttttatggtccaattttatagatcagatcaagtcttttataaagctgctccctcaaagaacaatttctaatctaacttaaaaaaaattgacttgcaaagtatacacacag

SEQ ID NO: 134085 - DNA, 2619 bp, Homo sapiens
agacactgctttgaatggcacagatgtagactaacagtagttcagccactgagactcaaatgattttgtattaccataaaccccatctgcctgggcaggcagaattgacacaattttgctcagattggaacctagttcatatctatgaaagaagaccctctttgtttccattttatagaccaggaaactgaagttatgctgttaatgaaaggtggagccttcagttaagcactccagggtatgtactcttttcctatacaaatgctcctctacttatgatggggtcacgtacgtccatgctcctttcatatagagtaaatacattgttagagccacttcagcaggaaagtttcctttcccttttttgcaaaccatgagaatttgcttcagattgccttgattacagttttactatttctttgcaactgcaggccattcagatactaacagtctttctttaacattatatttttaggtaatttgaatcttcctgacgagtccagtgatagttgatcacttactatttgtattgatttatacatatattcatagcaaattcttttcttctaaaagttacataagcacaggactgaaaatttgtattagagaaaggaaaaaaaccatcaccagccattattaacatttggcatatcctgcacccatgcttttttttttttttttttttttttttttttgagtataaaaaaccattcttgggctgggcacagtagctcacacctgtaatcccagcactttgggaggccgaagtgggcgaatcacgaggtcaggagttcgagaccagcctggccaacatgatgaaaccctgtctctactaaaaataacaaaaaattagctggacgtagtggcaggcacctgtaatcccagctgcttgggaggctgaggcaggagaatcacttgaactcaggaggtggagtttgcagtgagccgagattgcgccactgcactccagcccgggcgacagagtgaaactccatctcaacaaaaacaaacaaacaaaaaaacagcaacaaaccattctttaatcattctatttcagcagtttatgaaagctaataaaagtgtttaaattgacaaacagcttcagtttacagaggaaagagcttcagtttacagaggaaatagctcatctattcttagcaaatatttagtagtgatcaacatgatgagaaatataggaaaagtaagaggcagtcttgcttttgaaaaaattgatgctgaggaaatatgactacagactcagtactagcaaccacagggactgctttacagaggaggtaggacttgatctctctgccttgcaggaggatagggctttgagtggatgtgtggtggaaaggaggcacttcttggctggagaggatggcatgtgtggagaaagagcattctaagtttcaggatttctaagaggagaaatggaagttcatggtgtaaagggtgggctcagagaattatgggccttgaaaatcaggagagtggttttaatgtggaaaaagaatgtctaattgtgccgcagagggaatggatcagggtggctacccagttggtttgatggcattgagaacggggtgaaatggtgactgtatgacatttgaaacaaagaaatcagaggaattagtagtagggcctgtgtgtggctgttcccttgcttgtgtgctcttccctcacatacctgcatggcttcctccctcacctcctgcaagtctttgctcagatgacacctttttctcagtgaggcttatcctgccaccttttaaaatattgtcatcatcctacagtgctttccttctctgtaacaataccttctaacatactgtatttatttacttatcatatgtacttatttactgtttattgtctccttcctatcattctatgctttgtgaaagtggatgtcttcgttttgttcactaatgtatctcaagtgtatggaaagtgcctggtgcatcctaggcactcagtaaatatttgttgagtggcagtaggtcttagctgtaaagaggtggagtacagaaattcagagtgactccatgaaagaaaaaagaatgactccaagcttttttaggctggataatgcctttaacttaatgagtaatttggcacgaggattaaggggagacgaattctggtttaagcatgttgagtttgaggtgaaggtagccaaataaaattgctcagtagtcagcaaagattaaaaaaaaatggaacctagttggaaatgggagagcaccttaagcaaagaaatggctactagcatctagcattcacctcatattctctctctctctctctgtctttctcttttgggggtaggaggattctagtgtcctaaaacgctaccttaaatggagtttttatttagaccctgaagtcctagcttgtatctggagtcctggtccgtttgctgggatatggttctttcctgttttgcaggttcatgctatttttcccccacctctcttagtaaagatgtatatattcagaattacttgtgatcttctggttgtattgaaattaaccttcagacagtgctgctttctctgcagtaatgcgtttgatcttttgggagtgtggttcttggctgagataaaagagaggaag

SEQ ID NO: 134086 - DNA, 1554 bp, Homo sapiens
cctaatttacctgatcgttgtgaagatagtgtacagtagtatttacacttagtacatagcctgacaccagtaggtgttcaataaaggggaattattatatatttaaataagtgaaagaatgtcttctgaaagaagaaatacatgtctgtgtaatgaagaactagaattaattggtagactgaaaggcagaattcagctcaatgtaaggaatgactctctaccatagctgtcaaaatggaacattgtaaggtagtatgttccctgtcaccctggaactattcaggcagaggctagataaccttctgtctgagaaattgtagaaggaatttcttacattaggtaggaggtcggacttgtttatctctaagctctgtttctcctctaaaattctgtacttttgggcataatccaagcttccttgcttactggttttagccaaatatagtctaaatatccctaggattcatggcttcaagatgagcagtatcttgttgctcctgtattatacgagaaaagttagtttatccattgattggcttttattttggtcattttccaaaaaaggattttggaagcttgaaataatagcaaattcagtaagaccaaatctactgaccacaaaagataagaatcagtaagtcaaaaagggaaagaaaaagagaacaattatccgtaagtttagctgaggaaagctttagaagttgaacacaatacttagctctgagttttctggtaaccaaggcaagtaaggaagactgataatttgcatagatctcattgcctatcgagaattcatgaggagactgccaccttccttaataaagtggagccccaaatgccaagattgtcatacagggagaatctccaagtggtaaggggttattgctggatctggcaataatctgattcttgttctgaggcttcccctttaacacgtattgagggttcaatttagtgctgctgcctccatctttcttctccagtttaagtctctgatccaagtatgaacacattagtctttccctaatgccaatggaacagctgatgtaaggctaggacatttaaatcaagctttgctaaaagctggaggataatgaatagagagcaacatgaaactatttagtctggcttacaaagacatttttctcatgcccttatcttttggtgtgtctccatttgatacacttcatcagagtactgctaccaaaggcagagccagacatttaccttcaaacaggtgcaagtcagtaagatccagagtgtctttgcttgggtttcttgtttgaagaactgcttcatttctgagtaatggacgttcggaatgattactttaggagagaccacacttatctgagagtgtggccctactgtactggtctcacagtaatcccagtattcatggaaaagataggcacgtacattagcatgagggcattctgtggttagaagcattctgatttcattgggaaaaacaagcttctctctgttcttgagcagaagcttttatagaagtctttgtacatgggccattgaaaaataaagtgaacaattcgg

SEQ ID NO: 134087 - DNA, 2051 bp, Homo sapiens
ttggttttctttttaaaatttttaaaattgttttgcttttcttaagttttggtttctacattaataaaatgacagaactgaattgcctagatgatattcaaagtttcatgtggttctgttagtctgggattctacagtggaattttgtcactacttttgggaagaagtttacctttggtggcctacgaataaaaaccacattggcacaatgccatttatcatatgggataattctgtgtgtttatataatcatttatgttcgtttccaaatgtgttaataaagtacagtatctcatttgattagctcagatgatgaaataggtcagagaggtattatgtttattttcctgatgaaataaaacatcgtagttagcatcttgaacaatttaaatttgatcatcttacttggtatgccagccactaaggatgaaatcctgccactgagaaagaaaacccagtcaggaaagctttctcacccttatctatctaacaaattgtacatattctccaagttctgacttgaatgctggtgaagcttttcttgataatctcttctaccgcagcagagtagaaacactttgatcattcttctcaggactcaggattttaattatctgtttaatgcctttcccttccaccctagtgaactactcaagtgcaaataccttgtcttactcatctctgcacctcatagcccacactgtacctggcatatagagatgcttagtgaataattgcagaattaaatgaaagagtcaaggtgatgtgttgcagagtgaggagaacttgggctttgggctggcggaaggaggtgtcttcgtttacgttttttagattgaaattttgccatgtatatgcgtttaaaaatttaaaacctagttgaataaaaggttggggggggcagtatccaggggccaaatctatctattaataaaataaatttgaattttttaaaaaaatggcaattaaaactcatgttcatggaaaaaattaagttcttattttagtttttccctaaacgatcttgccgtatcacataacagcagtcttgtagtcaatcaagactgacttcaagtggtgaaatggaattttttaattccctgaagagagaaatctttacctagttaagctttgtgttatcttgatgtttttatttgtctagtgacctcttctgattgaaagagtagttaagaaaaaccctttagtactgactttttcaaatttaccgtaatgtaatgacctctttgaaaggagaagtacagagtgtatttttcataatgttacttaaattctgtagacatgaaactagatataaaacccttatgttcttggctcatacaccactataaaccaaatctgcaaattaaatacaaagacaactacaaaaaaaaacaaaattcaaatgaatacaattattccatgtgacagatgatgtttaggttttgcagtagaaaaaaatagctttaggtctaattccattttaaatgtgtttctgtattttaacttcagtgataataaaagctgtgagtagtgcctcttctcatcagtaatgttatgcaggagggcattaatgacttcaaggccttgttggtaagttcaggatgagacatcatacctaaccaaaacacttgacagcaagcattcctcaaatacaggcttataagttttactgagatgtcatccattttgttcattggaagataaggttaatatcttgacattattgaaatcttcattaaatgattttctaaaccagttattgctggaaatgagaatggaaaaacattgcatacctacaattatatttactgctaacaaatgtttgcaaattgtactacacatgtaggacccatatagcacttgcatataataaagtacatatatggtattggctgttaggctattggcttttgaatatgcatgccatgcctgtattgccatatggtcgattcaaattccctttattttttactctttcttttacaatgaccatgaaacttatgctgtgtgtagtgtgccacaaggacatttggcctgaaggggatcttcac

SEQ ID NO: 134088 - DNA, 1224 bp, Homo sapiens
ttgagccataaagatcaagtagatacaagtgggcatgaagctagtattttgctgccagtcatttctgtagttaggttgcctatgtggttggagcatgtatgtattgttacaggtgtagtctgcttggcttccctaagagaatgccccagtcctggccagaatatacatgtcttttttagggtttgcaccaaggggaatagagagtgtctggctcagtacaaatctgtttccgttactccattatccagaaagccactgaaatggcattagcctacacttaatgggtggtagtgttttcacacattgcttctcaaaggaggagtatgtgaatgtttagtttgggcctggtaaaaaaaaaaaaaaaaaaaaaaaagtataaccattacaaatttaaatgtactttgtttctaatgggaaggcaaatgcttgccttgctttgatgaaattgaacataacaaaatttttctatacttggaagcaaaaaacttcaggaaaaaacctgggtccaaatgttgctacatttccttgggcttccacgtgtatgtggttcttaatataatttgaaacttctaagagcaacaaatagttgttttttgcttctaagagcaacaaacagtgcatagaaattgtgtgataataggatcaagaatgtattattagagtgaatattggataatttcaaactgttaaccttgagattttttctaagaatctttctctttttccagcgttacagtgtttctgccacctctgtacaaaagacaattttacttgtgtgacagatgggctctgctttgtctctgtcacagagaccacagacaaagttatacacaacagcatgtgtatagctgaaattgacttaattcctcgagataggccgtttgtatgtgcaccctcttcaaaaactgggtctgtgactacaacatattgctgcaatcaggaccattgcaataaaatagaacttccaactactggtaagttgtataaaatttttttcctagatactacaagaaaaactcttcatactctgtgattttagaactggaagggatcataaaaattgtctaatccagctcattccgtttagaggcaagaagtgacttgtccattgttacagacttataagagtaaccaagatcctgcctcctgggtatgtgttgtttaagaaggtggttccagggtggacttcctctgaggtctgttatacctaaaaggatagataaa

SEQ ID NO: 134089 - DNA, 1023 bp, Homo sapiens
agtataaataatattgcaggtttgaacctaataaaaatctttaagcttgatgtatatatgactgtggctggtttaaaatagattggaacttaactttaactgttaaagcgaatcaataagtcagctccatggtggtataaatttcaaagcgttctcacttgtataatctaatttgcttttcatcactgtgaggtagaaaggataagaacaattattctcatatagatgaagctgaaggtcaaagatattcacatgatctgcagctaacccattctattcaggattgtttagcagcttgatgtttacatttgaaaacaggcatgacagaaatgtattcagaattgtgaaggttatttactttttaaacattatatgaaattgtctttcgtataggcctggttttttaaaattaaactaatgaactcttatgtcattttctcacttgagaaaaatgtctaaccaccttcttatttaatgtagttttggcccctaatgacgttttcttttctcagttctatttgttgatatttgtggcatcagaagtagatgagctaattgtcagagtcatcccaaggtggattttggcatagcagtgcttcatgtttaaactgaaagggggttatcttttactttttcttgcatgtggtttggaaaaatattaagagaggaacactcctatcccctgtgtttttagaatttgacacttggtgaagaataaatagatctaggtttcaaggcaagctttgtcattgattggctgtataaccttggttagaacatgtttcctctttgggcttctgtttcctcatcaaaaatatggaacccatactgttgataaaaacacttcaagtggtttgttaagacttttaaatgagatgtactatcctttgaaaagtatgagtcatcttcaaataagggctaaattcatgaataaagtgaaaatttgtaaagcgtatataatgaaaatttcactaattttggtgaaagcccatctctattaaaaatgcaaaaaaattagccggg

SEQ ID NO: 134090 - DNA, 1040 bp, Homo sapiens
tatctccccagtgagataaattcctaaagggatagcttaaagtatcagttttctgggtcactcattagtgcctatcatgatgtttgaaacatgtaatattgttgattgtgttgagtactatttatttttacctttaggtttaccattgcttgttcagagaacaattgcgagaactattgtgttacaagaaagcattggcaaaggtcgatttggagaagtttggagaggaaagtggcggggagaagaagttgctgttaagatattctcctctagagaagaacgttcgtggttccgtgaggcagagatttatcaaactgtaatgttacgtcatgaaaacatcctgggatttatagcagcagacaataaaggtctgtaacatttgcttttccttatgttatatataacaagatctctttaagtctttacagatatggtgactaaccatcatcaaagtagatgagacatagatgtctctcatgtagattagacccattaagtcgaatacaatatattagtaacttttagaactaggaacttcttcaagattttcttgactcttgatagcattcctaaaatctcttaatgttttataaaatataaaagagctattttaaaaagccatgtactttgttggtttagtttagggcagttagttattgagagtactcatgatatagaaaagatatataaacttgctcaaaattttgagaatagggctcagatagctgtttccttttaatctcttcctgaccagtaggatgtttcaatatggactattgaccttattaatggggagagtaaaaataacttgtcagtgttctgagttgccaagggctaaatagatgaatcttctggcaaactcaaagagataaattgtttcttcaaccaccctggtaactgtacggacacttttctgcctatcatgctggtgcctgaggcccagtgtcaggtcagatgctgaagaaggaaggaagcctgtcagcagggagtcagaatgagtggggactgcaagcagtgaccttagactgtgctgctgccac

SEQ ID NO: 134091 - DNA, 1001 bp, Homo sapiens
tacatcctattgcatcatatgtggaggtgtatagtgtttgattaagacggggcagtgaggtatatgatgaatgtaggtagcgattatcagtggcacctgacaatgtaatacctcttaagttaaaaacaaaacaggccgggcacagtggctcacgcctgtaatcccagcactttgggaagccaaggtgggtggatcacgaggtcaagagttcaagaccagcctggctggccaagatgatgaaaccccatctctactaaaaatacaaaaaaattagccaggcatgatggcaggtgcctataatcccagctacttgggaagctaaggcagagaattgcttgaacctgggaggtggaggttgcagtcagagctgagatcgcaccactgcactccagcctgggcgacacagggagactctgtctcaaaaaaaaaacaacaacaaaacaaaacaaaacaaaaaatagtaatcagtctgaccaaatccttagttctcattttcgtttctgcctttatcaccatttatttcctcccccaactcttaaaacaaccttttctttatttactgtgtttgatgaccctagactttccttgttccttcttacttcttcatagttgtctttgttttctcaactcttactcttctcactggttcatatgaaggtactgattttataagtggtaatttcttccttaagaacatagccacattcatggtttcaaactctaccatgttggcaactctcaaatctccatttgaaagcttaaacctcacccagggtctggattttgtcacattccaagttacaaacacagcagcacaaaatgttggtgagtctgtgccctgaacttctaaccaggctgatgctgtcatctggtggtcaccatgggaactagctgaccctactggctcttccctactccccttctttcttctttgtcaggggttaatgtactttctctgagcctagcccctccacctcagttcctttatcttctcctgattt

SEQ ID NO: 134092 - DNA, 1008 bp, Homo sapiens
ccttgcttccctctctgttccttccttttttttaaccttctctccttccaggaacagccactgagcacccaacccgacccagagatttttctaggcacttaagagtgccagctctgataccaattatctgtgaagactcaaaaaagtcaccatctttgtctcttaaatgggattaattatacttgccttatctcaagaagaggggcttactctgaggaactaaaggatgtgtacataaaagtataaaacaaacaatgtagaagaaaatgtgaaggaaatacagacttaaggtggcattatattgcagtgtgtgactcaggattgagagtaaaaagtaataaccattgaacaaataaatcataaatggtctgcagcccaaccgaaatgttaattctgttttacagacaatggtacttggactcagctctggttggtgtcagattatcatgagcatggatccctttttgattacttaaacagatacacagttactgtggaaggaatgataaaacttgctctgtccacggcgagcggtcttgcccatcttcacatggagattgttggtacccaaggtaattctataagcagttctattatttaagctttaaattttcatgaataatgtctatgaaaatagaaggtggaggctgggcctggtggctcatgcctataatcccagcactttgggaggctgaggtgggcagatcgcccgatctcaggagttcatggccagcctgggcaacatgacaaaaccgcatctctaccaacatacaaaaaattagtcgggcatggtggcatgcacctgtagtcccagctactcagggggctgaggtaggaggattacctgagcctgggaggtcgaagctgcagtgagcagacatcatgccactgcactcccagctgagtaatagagagagaccctgtctcagaaaaaaaaacaaaaacaaaaacagtaggtggcctaactggagatatttaaaacaaattttttagatgagaacattttat

SEQ ID NO: 134093 - DNA, 1643 bp, Homo sapiens
tgctgtaggtctctgtgggtcctgacccataattttggtaggtttttgaagcttcagtatgaggactggcattcttttgtatctattatttttttccctggagtatattcgtgcccttcctttcatcctcagtgagaagacttctaaattaaaatgcatggtttctacctagtacgtgtataggtggtgtacattaggacacctttaacagtcacaattgttatgtatgtctttcattggaaaccaagatcatgaggcagatagtgtgaaactgctattttagcattttgtgggatttagttgacatcattaatgtgcaaaccagtgtggatatttaatatttttcttgagtctaatatttgttatgtaatattgtgtacatatgtctatgtataaagaaatgtctgaaaggaggttcatccaaatatggcagtaaggggatgattttcaaagttctttttgcaaattttttttaggtacatggcccctgaagttctcgatgattccataaatatgaaacattttgaatccttcaaacgtgctgacatctatgcaatgggcttagtattctgggaaattgctcgacgatgttccattggtggtaaattgctctcctctcccccagtagtttgtcatgagcagaagttgttcaagaattgtcttctttttttaattgaatgaaattatgtacagtccattatctgaaacaggatgtcaccgagtgccagagaaaacaaaggcgatgaaacctttgggaggggacagtgccatggtgtgcacatgcacagctctagcctagtgtattctcttcctgtttccatttgaatctggagactcatcagaacccaaccccttgttatattggaatatagttctttagaatggacagctgcttgagaggctcacctaggaagctgtttctagcatgtacctgggtgtcaaacttattttttttctttgagattgtggttattttctccaacttgatagttacagttacatacacagaatacaattatgttaccattgtgttgtattctagagttagtttgttttaacttctagctttttagatggagtacttttaatgtttactcaggaaacagtctcttaggcttggggacctagacttggctgagacctagtgccttaggtttttgaagcagtgagggacagagtatttctctgtattgtagtaaataggatatattattgacagatgcaagtagagaaagggacttggcaccttaaacttgcctcataagattcaagtctcactgatagggtatatatatccctgtgcaagtgagagcctgtgcacttacagaatagaatctcatttgctgcacaatagggttctaggggaaaatgtcaatctggtcatcacagctcatagtttactgtcatttcaaataggctttattgatctcatggcaatacttagtttcaaggtgtgggtggaatatcaactcagggaagtggcttgtggatacagatgtggatgagatagagaaagctgtaatctctgttccacatacctactttagtaatgaaacactgtaataggtctctcaggtgatcttttaatgccttggcattagctgaataaattcatcaaaatttaattttttttaaactgatac

SEQ ID NO: 134094 - DNA, 2794 bp, Homo sapiens
gagaccctgtctcaaaaaaaaaaaaaagaaagaaaaatttgatgtgaatacttcaaagtacaaacttaaaatttcagtgtgaggtcagatttcttctttgctttgcccagctctggtttaggattcggccttttcaggtttgctaaatgagtcactctttgtccacctgctttccagcactggcaccagtaccctattgatggaaatttatgtaatttctactcatttgctattacaaataatgcttaaacaataacaagtgtatatgtcatttaaaaagaaaatttacacgtaaaaattcttatccagaccaatggaaaatggtgcatgcattaatttttttttttatattttcttgtaggccttgagagtaatggctaaaattatgagagaatgttggtatgccaatggagcagctaggcttacagcattgcggattaagaaaacattatcgcaactcagtcaacaggaaggcatcaaaatgtaattctacagctttgcctgaactctccttttttcttcagatctgctcctgggttttaatttgggaggtcaattgttctacctcactgagagggaacagaaggatattgcttccttttgcagcagtgtaataaagtcaattaaaaacttcccaggatttctttggacccaggaaacagccatgtgggtcctttctgtgcactatgaacgcttctttcccaggacagaaaatgtgtagtctacctttattttttattaacaaaacttgttttttaaaaagatgattgctggtcttaactttaggtaactctgctgtgctggagatcatctttaagggcaaaggagttggattgctgaattacaatgaaacatgtcttattactaaagaaagtgatttactcctggttagtacattctcagaggattctgaaccactagagtttccttgattcagactttgaatgtactgttctatagtttttcaggatcttaaaactaacacttataaaactcttatcttgagtctaaaaatgacctcatatagtagtgaggaacataattcatgcaattgtattttgtatactattattgttctttcacttattcagaacattacatgccttcaaaatgggattgtactataccagtaagtgccacttctgtgtctttctaatggaaatgagtagaattgctgaaagtctctatgttaaaacctatagtgtttgaattcaaaaagcttatttatctgggtaacccaaactttttctgttttgtttttggaagggtttttgtggtatgtcatttggtattctattctgaaaatgcctttctcctaccaaaatgtgcttaagccactaaagaaatgaagtggcattaattagtaaattattagcatggtcatgtttgaatattctcacatcaagcttttgcattttaattgtgttgtctaagtatacttttaaaaaatcaagtggcactctagatgcttatagtactttaatatttgtagcatacagactaatttttctaaaagggaaagtctgtctagctgcttgtgaaaagttatgtggtattctgtaagccatttttttctttatctgttcaaagacttattttttaagacatgaattacatttaaaattagaatatggttaatattaaataataggcctttttctaggaaggcgaaggtagttaataatttgaatagataacagatgtgcaagaaagtcacatttgttatgtatgtaggagtaaacgttcggtggatcctctgtctttgtaactgaggttagagctagtgtggttttgaggtctcactacactttgaggaaggcagcttttaattcagtgtttccttatgtgtgcgtacattgcaactgcttacatgtaatttatgtaatgcattcagtgcacccttgttacttgggagaggtggtagctaaagaacattctgagtataggtttttctccatttacagatgtctttggtcaaatattgaaagcaaacttgtcatggtcttcttacattaagttgaaactagcttataataactggtttttacttccaatgctatgaagtctctgcagggcttttacagttttcgaagtccttttatcactgtgatcttattctgaggggagaaaaaactatcatagctctgaggcaagacttcgactttatagtgctatcagttccccgatacagggtcagagtaacccatacagtattttggtcaggaagagaaagtggccatttacactgaatgagttgcattctgataatgtcttatctcttatacgtagaataaatttgaaagactatttgatcttaaaaccaaagtaattttagaatgagtgacatattacataggaatttagtgtcaatttcatgtgtttaaaaacatcatgggaaaaatgcttagaggttactattttgactacaaagttgagtttttttctgtagttaccataatttcattgaagcaaatgaatgagtttgagaggtttgtttttatagttgtgttgtattacttgtttaataataatctctaattctgtgatcaggtactttttttgtgggggttttttttttgtttttttttttttgttgttgtttttgggccatttctaagcctaccagatctgctttatgaaatccaggggaccaatgcattttatcactaaaactatttttatataattttaagaatataccaaaagttgtctgatttaaagttgtaatacatgatttctcactttcatgtaaggttatccacttttgctgaagatattttttattgaatcaaag

SEQ ID NO: 134095 - DNA, 1715 bp, Homo sapiens
ccaagtttggagattgagcagatgaggcttgggatgcccctgctttgacttcagccatggatgaggagtgggatggcagcaaggtggctcctgtggcagtggagttgtgccagaaacagtggccagttgtatcgcctataagacagggtaaggtctgaagagctgagcctgtaattctgctgtaataatgatagtgctcaagaagtgccttgagttggtgtacagtgccatggccatcaagaatcccagatttcaggttttattacaaaatgtaagtggtcacttggcgattttgtagtacatgcatgagttaccttttttctctatgtctgagaactgtcagattaaaacaagatggcaaagagatcgttagagtgcacaacaaaatcactatcccattagacacatcatcaaaagcttatttttattcttgcactggaagaatcgtaagtcaactgtttcttgaccatggcagtgttctggctccaaatggtagtgattccaaataatggttctgttaacactttggcagaaaatgccagctcagatattttgagatactaaggattatctttggacatgtactgcagcttcttgtctctgttttggattactggaatacccatgggccctctcaagagtgctggacttctaggacattaagatgattgtcagtacattaaacttttcaatcccattatgcaatcttgtttgtaaatgtaaacttctaaaaatatggttaataacattcaacctgtttattacaacttaaaaggaacttcagtgaatttgtttttattttttaacaagatttgtgaactgaatatcatgaaccatgttttgatacccctttttcacgttgtgccaacggaatagggtgtttgatatttcttcatatgttaaggagatgcttcaaaatgtcaattgctttaaacttaaattacctctcaagagaccaaggtacatttacctcattgtgtatataatgtttaatatttgtcagagcattctccaggtttgcagttttatttctataaagtatgggtattatgttgctcagttactcaaatggtactgtattgtttatatttgtaccccaaataacatcgtctgtactttctgttttctgtattgtatttgtgcaggattctttaggctttatcagtgtaatctctgccttttaagatatgtacagaaaatgtccatataaatttccattgaagtcgaatgatactgagaagcctgtaaagaggagaaaaaaacataagctgtgtttccccataagtttttttaaattgtatattgtatttgtagtaatattccaaaagaatgtaaataggaaatagaagagtgatgcttatgttaagtcctaacactacagtagaagaatggaagcagtgcaaataaattacatttttcccaagtgccagtggcatattttaaaataaagtgtatacgttggaatgagtcatgccatatgtagttgctgtagatggcaactagaacctttgagttacaagagtctttagaagttttctaaccctgcctagtgcaagttacaatattatagcgtgttcggggagtgccctcctgtctgcaggtgtgtctctgtgcctgggggcttttctccacatgcttaggggtgtgggtcttccattggggcatgatggacctgtctacaggtgatctctgttgcctttgggtcagcacatttg

SEQ ID NO: 134096 - DNA, 1004 bp, Homo sapiens
ctttactattcttcagtctgccctcaccctaaccaaattctttgtgtaatgttttttcagtacaactccctctgcagcactgcagttgtagttgtacaggtctttgggtttagaaagactttgctgtttactgtccatttgcctcttcccatcagtcttccgaggtgagtatgattatcccccatcttacacacaagctcagagaggtgaaagacttgcctgaaggcacacaattgaaaagtaactgagccagcatttggcccttagttacctgagccatccgggactttgcgcataccagaatttctcagtctcctcctctttgatatgcgtaaatatcatttgtccttcatacatacacacataaaaacacgatgggccaatagaagagggagtatcatgtccataaagagacccactcagctaagggggagtagtagtgcagttctttgatccaatgacaaatgtctactgaacacgtatttggacagcctttagagcttttgcagagctcattagagattgtctcgtttgctcttcacagcatcctttcaggtaattataggcatttttagagattgaaagtctgaggcttacagctaggaagcagtggagctacaattcaaacccaggtatgtccaacttgaggttaacagttcttttagttgtactacagttgcctcttcagcaaatgcttcatgaccagcctgaccaaaatggagaaaccccgtctctactaaaaatacaaaaaaaatagtgggatgtggtggtgcatgcctgtaatcccagctacttgggaggctgaggcaggagaatcgcttgaacctgggaggcggaggttgcggtgagctgagatcgcaccattgcactctagcctgggcaacaagaacaaaactccatctcaaaaaaaagagtaaaaacagcaccagagcacttcactgctccactctgctcactccatctttaatcataacaatcagcccttctctgtccacctttgccag

SEQ ID NO: 134097 - DNA, 1146 bp, Homo sapiens
gatatgttaccaaactgctggtataatcagattgtttttaagatctccattaatgtcatttttatggattgtagacccagttttgaaaccaaaaaagaaacctagaatctaatgcagaagagatcttttaaaaaataaacttgagtcttgaatgtgagccactttcctatataccacacctccctgtccacttttcagaaaaaccatgtcttttatgctataatcattccaaattttgccagtgttaagttacaaatgtggtgtcattccatgttcagcagagtattttaattatattttctcgggattattgctcttctgtctataaattttgaatgatactgtgccttaattggttttcatagtttaagtgtgtatcattatcaaagttgattaatttggcttcatagtataatgagagcagggctattgtagttcccagattcaatccaccgaagtgttcactgtcatctgttagggaatttttgtttgtcctgtctttgcctggatccatagcgagagtgctctgtattttttttaagataatttgtatttttgcacactgagatataataaaaggtgtttatcataaaaaagaaacagtattagattttggtctccataatctattttggtattgttacgaacatggatatgacaaccaaactggaaatcagaacactagggtaaagtggatattgaaatgaagcaagaatattgtcacacatgtgttgtgcatcttgtttagggtatatttcttaatgtcatctaggtcattagttttgttaatatttgtgttgtcttgaccaagctcctactaagtataggacacaaatgttttttatcttccaaggcctggctcaaatgccactgctgcaaagctttctttgaccctctggccacctcccaagccagaagttatcttccccctccatgtactctagccttttcatgacactgatattttcgtgacactgacttatagttcactgtttacctgttggtctaacagcaaatcataaacagtagttttcaacatacttctaaggctaaattcatttccagaagtagcaaagcttactagccaaaggctccacatttatcaactcttaagagctagacttgagagcctaacagcctatatga

SEQ ID NO: 134098 - DNA, 1105 bp, Homo sapiens
ggccccgcccccggacttgcaggcaaggtcctctctgaccccagggacgcctgggtcgtctcacgatatgcctgtagacagtctgctacagacaacttagttacctgctgtatgggaagtagagacctccggcctccttcctttggatcacaacgtccttcagaaagtccaatccctaccgaaggaaaaatataaccggggtcagacaagatattttctcaggcagttactagaccctcacagatttgcgctgatgtggcctaactgacgcacgtacggcagggcggggtcggcccgcagtggccagctgggagctacgagcgcggagcttgcgcagaagacccccatcagggtgcggggtgcagttgcggctccagggccatggcggaggagcagggccgggaacgggactcggttcccaagccgtcggtgctgttcctccacccagacctgggcgtgggcggcgctgagcggctggtgttggacgcggcgctggcgctgcaggcgcgcgggtgtagcgtgaagatctggacagcgcactacgacccgggccactgtttcgccgagagccgcgagctaccggtgcgctgtgccggggactggctgccgcgaggcctgggctggggcggccgcggcgccgccgtctgcgcctacgtgcgcatggttttcctggcgctctacgtgctgttcctcgccgacgaggagttcgacgtggtagtgtgcgaccaggtgaggcggccgcggggccggctgcgcgagtgcggacctcgccgtggagggcggccgcgggcatgacccctgagagaagaccttccctgtctgcggttcgcaaagatcggaactgacatggagaagtcagggttgtgagcgagcctgtggttctctaactttagtgtgggcccatttaaagttgcagattgctggggttccatcctccaggaagttttcatccaggtgccctgaggtggggcccagacatctgcattttaactgggtcatagggtgattccgaggtagatagtctttggggctctgagaaacgctggtattagaagtcagcttcagtcaccttttactaatgagtaactcgcgtgttgtcttcccg

SEQ ID NO: 134099 - DNA, 1038 bp, Homo sapiens
tagcagtctgcctgcctcagtctcccaaagtgccgagatccttccagagttttttaatgcatttccaagacactacaaatataaattctgtttccctttccttttttatacacatggaagcttacacgtattgttctgcctttttcacttaatagtgtatcttggagttctgtccataacagtggaaaaatatctgagatatatctgagatatatttcatttataatgtatcttggagatctcttcatgtcattgtgtgaatatatcattatttagccagccccatattgatggacatttgggaagttttcaatctttttgctgtttcaagtaatgctacaataaatacttttgttatatagattatacttgtgcaaatatatttgtaggataaattcctagcaattgagggatacaaattacaagtaatgctacaataaatacttttgttatatagattattttatacttgtgcaaatacatttgtagggtaaattcctagaaattgaattactgggccaaagggtatatatatcatagtagtttgataggtactaccaaattactctccatagaggttgtacagtttacactccactaaaaatataggcaagtgcctgaatactcatattcttgccaacaatgtgttatttaaccttaggtttttttccagtctggtcggtgaaaatgttatcttagtgtaactttaatttctttctctcatgagtaagttagaacatctttttcatatgcttaagagccatttatatttccttttggtgaagtgtgtcttatatcctttgcctattttgggaggtgggggtggtttaaaaatcactttgtagttgctgtttataatatggagatttgccctttgttatatgagttgcagcgtatttccccgtagtttgtcatttgtctttcaactttgcttatgatgtttttgctatgtagattttttaaaaaatgtacttgaatttgtcagtcttttatgacttctagatttagtcatagttagaaaaatctatactactccaa

SEQ ID NO: 134100 - DNA, 1075 bp, Homo sapiens
agttacaattttttacttctgtaggcagatctaaagttcttcagctttctttcctgaaactataatctatctcagcgttttgccttatcatgtccatagcagttcgtaaaagttcaaaggatcgtcactgaggtagtgattttaaatgcaagctggaataaatgaattatggaagttgtagaaatgaaaagatttgctttaattgatagtcatgacttgaattgattagcgaggtttagagttttaagtttacatcagggttttttatggaagagcacagacctctttgttctaagactctgtttgaactaagatgcatacgtagtttggtttcaagtgagacgtaaatgacttaaacatttttattctttactgagggaaatcttttatgtttgtttaaaatgtcaaacatttcccacacattatttttttagattaagtattaatatataataatctgtcctcatttcattgcataccctcgcaaacttcatttgaatcctctttaatagtacataaattatggctttaaaaaatattttgagtggtcatggttataaagttctcctttatatttgatctgttaataataatgaagttatcattattcatcataatgtgaaagaagtgtaaatacctggaaatattaagtagaagaaaggtcatagagtaattcatttttcttggttgatgtgaaaatgagagtgtctttatggcaataatgtaaagcatagagtaactattttaagcatttgtaaaaatcatttagagcttttaaaatattggctatttgccatactgttttaatgtaaaacttactctgtatcgcctgcctttgctcttcctttaagttaaataaatatattcagataagattaaaaacattctcagttgtgataaatctacaaattactttttagtccattgactatggccttcctaaacaattgaaacatttttcctagagaggtaaagcattcataggctttaaaggtaaaatagtaatgcagttttataaaatactatttcagttataggtttggctgaaaggggcattgagagaacatgaacttag

SEQ ID NO: 134101 - DNA, 1034 bp, Homo sapiens
tcagtatgctctaagatgataaagtggctgttaaaaagggagttgatttgaggaagtattacttagcattcatgcatattgggcttaggctctagccctgccactatcattgtcttctctggactgtgaagtcactgaggacaaggaaactaaatttaatgtctgtatcactagtgcctagaatttctggacacttagtagtcaccatcaggcgtttatttaatgaatgagaagcaaagtgaccttggttacttttttaccctgaggggctcagcactcattaggacttggtgcctaattttataaaaagtcactaagctcaagtgcttggatgaaaggacagcgtggataaaaaggtttttaaaacatggatgttaaggctgttttgcttggagaagacttgggactgggacagtctttagatattatttgaaatgctggcactgtctatctggatcccagggcttgaactaggatttgaggaagtcacagggaagcagatttcagtctgacatttattcagtgcaagttttttggtgctgtagtatatgatgaaagatgtaaagctgaataaagcattatttctgccctagagttgttcacagcctagtcaggcatatggatatgtaaacaatgactgtaacgtgttatagatgtaaagacaaaataaaggttaaagagggcataaaggagcactcaattgcagagatttgaggacattatttttattttgagctttaaaaagatgaataggtgttctcaggaggtagggatctggctgagagggaataatctgagcaaaggtatgaaacagcctaatgcattagagaaaaaagttcttttagtaaggcatttggggttggggaagctagaaaaagaaatgggagctggtcacacagggccttgtgtgccagactaaggggtttgtagtatatattgtaggcagaagagatccatcaacagattgcaagcaaggaagtatgttcactttaaagtttgagaaagaatagtgtggaagcacgtctcaaatttag

SEQ ID NO: 134102 - DNA, 1079 bp, Homo sapiens
aattgataactaagataatatctacagagtggatgccattaattctcttagcagtcacgtgcagaagggaagggtttgggccaacctagggttgtgctgtctctgtcgactagtctaggaaagcacccaggtgtcaggtattttggtcccttccaccacacctcagcaaatgtaaaacaagcccacagttaatggccctgtggcaaccctgccctggagaatctcaataagagcatttgaaatgaggaaagcaagatttcacatttaaatatcttgctttggcacacagttgcttttattgattaataagcaaataattataggggaactactattcatcgaatacacttattaaaatattatagcaccataaactatattggtataaaaatgttttattctttcttttgtagcaagcccaagatgtagcaagcagtccacctgagagctccttccagaaactagcacccagtgaatataggtatactctattgagggatcgagatgagctttaaaaacttgaaaaacagtttgtaagcctttcaacagcagcatcaacctacgtggtggaaatagtaaacctatattttcataattctatgtgtatttttattttgaataaacagaaagaaattttgggtttttaatttttttctccccgactcaaaatgcattgtcatttaatatagtagcctcttaaaaaaaaaaaacctgctaggatttaaaaataaaaatcagaggcctatctccactttaaatctgtcctgtaaaagttttataaatcaaatgaaaggtgacattgccagaaacttaccattaacttgcactactagggtagggaggacttagggatgtttcctgtgtcgtatgtgcttttctttctttcatatgatcaattctgttggtattttcagtatctcatttctcaaagctaaagagatatacattctggatacttgggaggggaataaattaaagttttcacactgtgtactgtgttttactgattggttggatattgcttatgaaaattccatagtggtatttttttggattcttaatgtgtaacttaaacatac

SEQ ID NO: 134103 - DNA, 1021 bp, Homo sapiens
gttacaaagctgcatagttttcagtggttagcccctaactatttttcccttgagccctgttatttttagtgtgatgttgcagaacaaagtttttttttagttacatatatgtaatttaggaaaatatataaagtgcccattaataaaaaatggttaatttggggtacagcatcttgatagactataatgtgccttaatgataagcatggaaatttttctatgaaacaagtacaggaattagaatacaaaactgagtatctggatactatgcttacaactgtgtaaaaatgtttcacacatacctggcctgcaatagttgtggtaggatggtgggactataggttagcaaaagtttttttaatactgtgaagttggtaaaatagagataagtccattttaacagtttacattttatttgactctggttttagaattcctggaaaactcaagcaattcgtatttgacttacattctggaaaactgcacagagaattccatcatggacctgacccaactgatacagccccaggagaggtaggactcctgtttatttttcaatgagaactctttttttccctttttcagttagcctcaaagagggtctgaagttcttgcatcagcttgagcttcagcttctgaatatttgtgtagagaaattctgagtagaaattaaccttttaaattaatttttaaagctttaggtcttcagaaaagttgaaagaatattataacgtagtttcttgattgtataaaagtgttctgatgtgacctctgtggaatatggctataacagttaaatatagttggcttcaaatgggaataggaaataggaatctaaagcagataaatcagtgaagaaatcagtggattccaataactatccaagccttcctctgtggctggaagattgaccacactataaagaaagtaatgatttgttattcttgctaaatcattctaagagccttcacaaatacactattcataatgctcaaaaccttacagtttaatgcagctttcc

SEQ ID NO: 134104 - DNA, 1208 bp, Homo sapiens
cagctacctgacagtcatttgtatttgtaaactgtgcatttggcacctgctggtctctgttgcattggagctagtggggagccaaaatgggtatacaatgaagttattggttggtacatctcagtgggagttattgaagggaagaaacagcacttccgggacctcaagagaggataaaaagtaaaagaaactggtaatattaactacaagccagctattgtttgctaccaaaaaaataatgattttaaaagtcaatcaattctacccaaggaattaaagtgtatatggacctgcattttaattcttgtaacagaatgaaaaagtgtttctatttaaaatatataattaattttttaaagcaccaagatctcagaaggcagacaattcgtatgagcagagatataaattcagacaagcaatgaaaaaaatgcttaatttgtgaagaaatgtaaattaaaatgcaggtatcttttacttatcaaattagcaaaaccaattttaatttaaaaaagacatgcttggcaagactttaaagaacaaacaggtagacagatagtaaaaaccaactgatgttttataggtataatttgctcacacttggtcaaaagctcttatttgttaacccagtaatcctactttattgtatataactcaaggaaatattacaaagaagaaagcctggtacataaatttgtttagctcagtatggtggtgtctgctacagtgcattgtttctgtgctgcagatttgctcatacatgattggtaattaagagaatagtgtccatagaaagtgaagttgtgtcagtttatatatcattatcctcagaatatcctgaagccatcagaataagctttttcgtaaagagaatgccgcaagggtgtatgaagatctccaaaacaaaacaactgaaaatcctggggaagtccccttgttagtgtaaataaaagctagtttaatgatcttgagaagtgctttgcttttcacaatattaagctatccaatgaagttgcatgtgtggtttgaagacattatgaagacatttgcctctatgtttaggaaaaaaaacatgaaaatgctatgccctggttcaggttaatttgatgaaattggtttcactgtctagtgaaggcccttaaggacccgaacctcaaaagtaggctcacaagctttacgttaaggctgcagaggatcacctggttgacact

SEQ ID NO: 134105 - DNA, 1002 bp, Homo sapiens
ttgcactaagtcaatatgatttctaaagaagttatactctgtgccctaagaactaaaagcctacctattttaagtgttagatatttaggttttagtttttctgatctatattactcttaagaatgttgggtgctttttttttagtatgtcactttttgtgagcttgcaatcttacaaaaatattttcaagaaaatttgaatttacctctcaaaattcttttttcttaaaggtacaataaactttttacatgccgattgtgacaaatttagacatcctcttctgcacatacagaaaactccagcagattgtcctgtaatcgctattgacagctttaggcatatgtatgtgtttggagacttcaaagatgtattgtgagtattcattttgttttttaaaaattactgatatgtttttcaaaaatgaactgaaaatagttgtttgaatattttaaataatcctatgttggaacagtaagactttgttaactggatgggagaggtttgggtgactgctgctttttttcactatagagtgtggtataattatgaacattatgatatagccttgtagaaataccaacattaagtgattagaattgataatgaatgcttggatgattagtgattaatgcttgggaatcaatctctcaaagaaaatttttgtcttgtgagaaattagctcttcattgagtttggtctttaccaagcacattgagaaaaatagcttataaccttaggccagggtaaaggaaattggtaatattgctgttcattcgtgacttcacatagcaagaacattagtagtatttatgaatcttgctattactaggcgtttctaatggcatatagctatgaactgttccaagaataggtaagctttctgactcaattctcagatatttatagtattaatatatgtacaagccttgtagctactacagatactgaatttttatcagctttgtgaggtgttaaatacagtggttaaaaatgtagatgttt

SEQ ID NO: 134106 - DNA, 1286 bp, Homo sapiens
tggggaggtcgaggctgtactccagcctgggcgacacagtgagaccctgtctccaaaaaaacaatggtgaaatttatggtatgctaattgtatctcagttttttaaaaaaataaatgtaacaagaggcttaataattgatcttatatacaagtgaaataggcttaaatatggagatgagagccagaagaaaacttttaatcctgtaaaataggtcccagtttgttttttaaaaaataaaggacatttgtactttctggtgaggtagttcctagatttatggagagatcctcaaaaggatagttgatgaaaataattttgttatgagaccctttctggactttttctgatgagtcagaacttagcatttgttggggagaataaatgattaaatctgtctacatatcacattttatttaatcatgtctacccattgtagtattctccaattacaacaataaaaattttaatagcactttataattttcaaggtgcttttctgtgtgtataaataaagaggtatataaaaatatataggggtaggtatttattaataatgttaattgtatattggttgagaattagttaaataatggaggttttgttttttaccctggataaaacacttcaagctttgggtaagttttatatgtaagtgtaatggtttttgcaaccttagaatataaaaaaatacaaaaaattttgcaaatcagatttatttattgctgatatactgtttttcactgttacttgtgaagactgaaaatactagtcatgtttaccccactctaaaattaacaccttggtaaagaaccagcatagttcacctctatatgtcatgaattcaacagcctaaccctgaagtctcatatcccatactggctaacagacagtgggggcagatcagtttctgcagcaaagcagggcatgtgggtcctctgactgtctgggtacttgaggtggggaggggagtgaattcagtcttctgttcaggctaatgtttattcacaccactgggccttttttttcccccgggatattgcaactattgcattacatgggttgggttcaaaattgttcctacctagaaaatagctacaactgaatggagaagcctgataattctcattgaatgcttctctctacaggaattgacagaagaaggactgccttttctcatactctttcacatgaaagaagatacagaaagtttagaaatattccagaatgaagtagctcggcaattaataagtgaaaaaggtagacagattaaggtgtttattttcat

SEQ ID NO: 134107 - DNA, 1014 bp, Homo sapiens
ctcccacgtctgcctccaaaagtgctgggattataggcatgagccacagtgcccaacccatattcattaaatgctgcaagcacagtcctgcagcagagcctgaatctggaagtgcttctcccagatgtcatctcatcagaaagtccttgcctgataactttatttaaagtagcactaccattatttaatttgtcattctttacttattccacttattttcttcatagcatttttttgtaaccaccaaagataaatatatctacttgttagtctgtctctactcaccaaaatgtaaactccatgagagagagagttttgatagttttgttcactcccgtttatccaatgccaagaccatagctggtacaaaggaagcacatagtaaatagttattgaattaattaattaatggaacacatttttttctgttcccacggttatcaatctaggttagcaccccttgcctctatctcctggactactctagttagaaactagagataaatcagtgttcaattaatctaaaaattgattacaaaaataatttgttgtagtactctacaaatgtttattaagcaacttctgtgtgccagatactgtactaggttcaggaaacaacaatggacaaataaacaaaaaattacttatttatggaactatattttagtgatgtgggttatttcgtttttgtttttttttaattagtccatgtgaccaaaccaatgaccttgatccctagttgccggaaaacagtctggggtcaaaaacaaccttttagtgctaaaactcccaatctaaacttacacaaaacacaaaaacaactaactaaaattttcctttaaaaagtctgcctcatattaaacgttttctttaaatgtatacttttcttggtattgcatagtcttgtaatagggaagatgatggataagtatatatttcaagtctgtaattcctacattgcaaaattctgtcattcaggtttattactatttctcccttcctatagggatgttt

SEQ ID NO: 134108 - DNA, 1059 bp, Homo sapiens
ggaattaatttttacatgtggcatagtgtatgaattggagttcaattgtttgcatatggttctggcattatttgttgaaaagactatcctttcttcactgtcattgcatcttgctgaaataaactgacactgtatgtgtgggtctatttttgttctgtctcttctatactgttgatctgtttgtgcttataccagtacttcgtagattactatagcttataaagagttttgaagtctggtcaggtaaagctttcaactttgtacttttttttcagagttgtttggcagttctggttgatttagatttccatttaacttttagaatcagcttgttaatttttaatgacaacataaaaggcgactgggattttaactggggttactttgaatcctcagggcaatttgtgggaaattgttattttaatgatactgattcttcgaatccatgaagattgtatatctctccatttatttaggcattttcagtttcttccagcaatgctttgtggtttttcagcctacatgtcttggatagctttatcagatttattcctaagtatttcttatttttttgatgctattgtaaatgatactttaaactttatttctggaataattgtagatcatatgtagattatagttgcaaaaataatacagagaattcccttatattccttacctattttgccctaacatcaacatcttatattactatggcacatttggattttatttggattttatccctcttccacttaatatctttttgttgttgttgttctagagtatcacttttaggcataatgtcttcctggttacctttgatctatttgtttctcagtcttcattttttacaaccttgacagttttgagtaatattctttaagaattttgtagaatgtccttcattttgggcttgcctggtattttttttctcatgttttggtcatcttttgtgagatctctcagtaagtatttcttattttggggtgctgttataaatggcattgattgttaaattttaatttttagtttttttgttgctagtttatagaaata

SEQ ID NO: 134109 - DNA, 1349 bp, Homo sapiens
tttatctgttcacttcctgacagacatttgggttgtttcgacttgctggctattacaagtaaagctgttatgaacattcagatataaatctttatacaaataaggattacaaataaagctgttataaacattcagatataaatctttatacatatgttttcatttttcctgagcaaatacctagatgtgaaatgctaggtcatatggtaggtccatgtttaactttttaagaaactgccaaactattttccaaagtatttgttctattttatatacccactaatagtacatgagagttccagttgttccatattcttgtcaaaacttggagtggatagtctatttaattttacatattccaatatgtgtgaagtggtgtctccttgtggtttaatttgcatttttctaataattaatgacgttgagaatattcttacatgtttatatacattcatgtatctgtgatgatgtgtctgttcaaatattacacattttttattggattgtttattttcttattgaaatttgtttatttatttgtttgcgacagggtctcactgtctcgcccaggctgtagtgcagtggcacaatcttggctcactgcagtctcggaccttccaggccccagtggcctttccaccacagccccccaagtagcatgtgccaccacacccagctaatttaaaaaaatatttttagagacaggtctccttatgttgcccaggctggtctcaaactcctgggctaaagtgattgttcctcctcggcttctgaaagtgctgggattacaagcatgagccactgtgccctgccctctgagttttgagagttctttatatattgtgaatacaagtcttttttcacatatgtaatttgcaaatattttcgcccattctacccttgtatttttttaaaaaaattgtaacatatacataaaattactatcttaccattttaaattgtacaatttaatactgttaaatgtattcacattgttgtgcaaccagtctccagttcttcatcttgcaaaactgaagctctacacccgttaaacaacagcttcccattgcccattctccccagcccctggcaaccacttttctaccttctttttctacaaatgcgattactctgggtactccacataagtggaatcatacagtatctgtctttttgtgactggcatatttcacttagcataatgtccgcaaggctcattcgtgttgtagcatgcgtcagaatttccctactttttaaggctgaataatatttcgtggtatgtatataccacgatttgtttatcatccatcaagaacactggttgattctgccccttggctattgtgaat

SEQ ID NO: 134110 - DNA, 1017 bp, Homo sapiens
acatgatgtttttggtgtgggttctcatttcaaatctttctattctttatgtatttaattagatgttacagtgcagataagacttcctacttttactgaatttgaaccataaaattggaaattatgctctaaagcttacattcattgggaagaaaatttaatacttatatccttgaaccataaatatcatttattccatcttttaaacagataacttttgaagaaaatctgacatcattgctagtaagctttctttttatgggggcaaatagcacagttcagatgcttttcaatccaccagcaagttatctgaggtattatgcatattttgaggtattatgcatctctctgaatattttttctcttctatgtaattcttttaaagaaatgattgttatgaaacccttattgattaatgtatttacattttccacagtctctttagagattgtaagacaaactgtagttttgttaacctcttatgtgccaattagattgtagaggttttggactggaagaaccttaagaattctgtgttctaaagagaaatgccttttaggcagattattctgtggtcgaatttttttttttcctaaccatttaaacaactttaatttatatactgatatacgtatcagtgctttgaaaaatagattgttcaatcctaaagcagtttttaaaagagatttattgaggtataattgacatatgttacacaaatttaaattttataattttataggttttgatacatgtgtgtatccatgaaaccatcaccacaatcaagatattgagcatagctgtcatcctccaaaattttccttgtgcccctctgtgatccctgtctgtcccttctatacctcaccttcatcatccttaaggaccatctactttccatcactggagattggtttgcattttctagaattttatataagtgaatcatacagtatgaggttttttttgtctgggtttttttttttttctggacttagtatgtttattttgagattgttt

SEQ ID NO: 134111 - DNA, 3335 bp, Homo sapiens
agcatcttgtcagtgctcaaacagttttagattttgaagcattttgaatttttagattaggggcattcaacctgtattaagacaggtcctattttaaacatgaaccatgcttaaatacttaatgagtggcaaactggacaatctagagaaaagaagcccttgatgtgtttttttacgtcgcccttaagccataaagaggcttgcccgctctttcttcactaggtcagatctaaatttttcaagaaaccattaatcagcccctactccttgcctcccttgccctccagctaccttattttcagcgaactgtaagaacccacaaacctgcggtcctagccgctccagttcctccattctatcaatttattgatttaatacatatattgaatgtttattagaatacatagtcaaataagacacggtccatgatgtccacagaccccatcctcttatccctgatgggagagatttaagaatgctaaaagaggaaagagccacttgaaagcaagagattgaagatacagatgtgtctccttgatatattctaggacatctccttaggaagtcaggtgagtgggctagaagagatatatatatacaagaagaaatagggaggaagtataatgtttgcatcctttcacaggctttccaatatttttattgtattaaagctaatatgtatgaactaattacatgtggattaaactgttcactgacatcatttaagtaaatttggtggaaaagggctctggaagcaacagtagcaattgtagtttgtttacatattcttaatacttcttccgtaagagaatggccattctaacccagctggttgctaattctgattcttccccttcttattgggtccctttaattacctagaacatagtcatccatgacatgatgtttaggtcaatgacagaagtcccatatataataccgtatttttactgtaacttttctgtgtttagatacctgctattgtgttacagttgcctacagtatttagtatattaacatgtggtacaggtttgtagcctaggagcagtaggaggctgtataccctatagtgtaggtgcatgctaggctataccatctaggtttgtgtaagtatactttatgatgttcacgtaatgaagaaatcgcctaatggtgtatttctgagtgtatccctgtcgttaaacaccacatgactgtatttgtgaaatgtttggcttgattaagggacagttagaagtaacaagtttgtagaatattgtgggggtttgtgccttgtgtttaaagtaaaagaaaaaagaaaatatagacaggaagtcttggttaggaatttaagatatttgcttctggacttactgtatttagtatgtttacagatataaaagcccattttatcaaggggtaaattttgaggggaaatagttaattatataccatatattcttttaatataacttatttatttagtgtgttaacttgcctgtgagatttgatagaactagccaggtggagaggtctaatatttgcaatacagttaaaatattttacacaatagtctaaaattttattattttgaggtgggaggattgcttgagccctggaggtggagggtgcagtgagctcagattgtgcccctgccctccaacttgggcaacagaatgagaccctgtctcaaaaaaaattaaaaataaataaaatagagaaagctaatttttcataaatgttcaagcctcagtagttacaaatcctaacagtactttgtagagggcttatttcagacttgttttatgacctctgcaagagatccttagctgtgtgctccataatactggcaattgtcttaagatgaataaaaccaaaatctattatacattcttagaattggtatacagtctttgaacttaaaattgtcttcatctccattgaacgatgtcagggtccatgattaaattaagtgtgtgattatctcgcagagtcgtttattatgcctatatcaaatgtcagtgggcaataacggaaataagattttattacttctgcttttcatttctaattggcatccttctctgtgtataggtgtcgtttcagtcagatgttgcatccaatttttgaggaagcttccgatgtcattaaggaagaatttccaaatgaaaatcaagtagtgtttgccagagttgattgtgatcagcactgtaagtacctcaataggaagtctagaagagactgtcccatcccaaacacaggcacacatacacattttttcttttcttttcttttctttttttttccttttctttttttttttaaatgctctgcttttaagtggagaacaaaccgaaaaggttctagtgaccttggttaaattgttactatttaatttttatgtacttagaacactactttccattttgcttgtgtgaaggtttttttgttgttatttaaaaaattacagtaggtcaagcgtagggaacaaaactagcagtgttttctaccaaagcaaataccaaaatcagtaaataagattgaaatgtagtattagaagaaaaaatggatttctgttagttttagaatcatgtgaaaataccatttatagtcatttcaaataagatagtctcagatttttgtgtgtttctgtttttgaaaagattctgttttgaaaagattctggtttagactatttttgagtctaattagctgtagcaactgattataattattaagagtgttaagaaacttagcttaggctcttaaaatccaacctcttgcattttgcttgtcctggtggagcattctctataaaatcctcatggtttttcgtatacatgaaggatttgtctaacttgaactagtgatcttgctagtggtgtttcctcctgtgtgttcccattatacttgaactttcctctctcatcgtgctaaactcattgtatttcgtagttctggttcattgtgtcttagttgtcttatcagctgcattgtctgttcattaaggcaggaatttttttttctttctttttttaatgctcacttttaagaggagaccaaaccacttattaatctctgtgtctcaagcatctgacagttgctgggagacagagactgctcacgaaaagctattgcattgagttatttgtaagttggtgtgaatacagaactgtctcccattcttcaagttttctatttttttatacttaacctactgattaaaattagtatgtgtgtacacacacctaacttttcattttactgatgaggaaatggatatgaagtggcttaatcaatgttacatagctcagtgtctggtaaagcccgaatttgaatcctgattttctgaccaa

SEQ ID NO: 134112 - DNA, 1064 bp, Homo sapiens
taagttattactgtaccttactgtagtctttataaacagtaaacttacgcaatactaaacgtattttaaaatatcttttttctttaatactaaattaactagcttactgtaactttttaactgtataaacgtttgactcttttgttataatatggaggttaaaataccaacacgttacatagctgtacaaaaacatctttctttataacctcattctgtttgcttgttttattaaaatatttttttctttttagcttttttgttgaaaaccaagacaaaaatacacacattagcctagacctacacagggtcaggattatcaagacatcaagaggctccaggaatttttcagcttcattataatcttatgggaccactgtcatatatgtagcctctcattaaccaaaacatttttatgcagtgtgactgtatgtgctgaagtgcctggaaatcgtaccaaagaacagctgggggaaccaactgttaagtagtgatgtagaggggtttctgcaataggtgggaagatcctttgtgagattccttctaagtctgtggatcatcaccaagtggtgtgctttttgctattatataattaaaaccaaattatagtatagactttatttttatttgataacctcagtttcctcaaacatgttaaaatgtttgttcgcaatttcaatttctggaccttttcctcctacttctcatatccaatatcgtctctctaaattcttagtgtgttaacatcatctacctattcatccatctaatcattcatttagtacatatttgaatgtttcttgtgtacaaacagggtacagtgatctgtgggatacaaaattgaataaggtggtctctactttcaaggtactccccgtctgttggaggaagtaagacaccagtgcaaataactaatttaaggatagaattaatttgtttcttaaagacagaataatatgttaacaccctatagaaagtgctcttggtgttcagagcagggagagatataaatttttaataaccatctaatggaagaaaacattctttccttgctgaagaagctc

SEQ ID NO: 134113 - DNA, 1804 bp, Homo sapiens
atcagggatttgggcccaaatcttggatctgctactcaccacccttctttcttcttaacatctctattttcctattaacttctgaggaataatactggtattatgtctgactcctaagtggtggtgttattccatgctactattatgattttatgaaacaaaaagtggtgaaaggtatccccttttctcattcttagatctcagtttgttgtacaatgccttattatagagtaaatgcttaataacaatttaagtactgtggaaaaagaaaaggtagggcttacgtgagaaggatcaggagtgtattaggggagttgtagtttgtaagcatcacgggacaggtgagccttgaagcaagtgagggagttagtcatttggatttcctggaagaagagccttccaggcagggccgttagtcagtgcaaagcccctaatgtgggagtgtcccaggcatattcaagaaatagcaaggagagcagcgtgattgtcatatagtgaataagatacagcatattagaagatgaagtcatttagttaaaacatattttgcaaaagtgtacttgcccttactatgtatgttgtttactgataattgtttttctttttctattctgtgctttattttattttttaaaaattgctgatctgactcagtagggaagaacttcctaactgggtggctgatattattgatctcttcagccttgccccatttgcctctgttgggagtagcctttgttgttttgattctctgttacaggaggggtcccaacttgcagtgtgaaaaatactgttgtagtaacttaaaatgttaaaccaaaagatttcctgacgtgttttttgattcccgaaagtgataacactttcatggtacagaaaagcataatgaagaaaaaaatgcgtacactaaccactgataacattttagtgtatttcctttcggttttattctgtgcatatgcgtatggatttttaatagtaatgtgtatattttgaacaatataagattgggctctttttgtttaatcctgatgtagagtggtagacttctggttcatagaaatatagaaagaaaagataccacatgcttagatgtattctaccacttggaaataactcctagcttgaccatgtaacttcaaaaagttatttaacctttctgagtttccattttctcacatatcagatagagataaagacctctcctgcttagttctggggcagctaatgagactgaatgtgtctgtagtgcattataagaaactaaactctcctggtttttgccacataataggtgttcaataaatgttaagatgagggactgagtgaatgaatgaatgactaaatagataccctttttttgaaactttcaagttgtctgtccaatggtattaaaattgtgtgcactgatgtaatgagttcacttgaccagcttccggcctttgtggtctgtggtcttcttatcctaataattacattgtcattatgccaacaaaaacagcttaaaaatgtgactgttaagtgaataagttatcagcttagctctgttttataactgtattttaattagtgttatacataaatttgttatattattttgaaaaaagcttatggagggagttgtgttttgtcgtatagtccattggttttagaattaaaggagattagggtttgaattctgttctgccattaatttggacacgtcacttagcttatttgaatcttattcatttaataaatattctcccttttactgtatgccagagactgcaaagtttttttttttatttataaaatagggata

SEQ ID NO: 134114 - DNA, 1067 bp, Homo sapiens
cccagaagcccctaatgcatccttctctccccactagaggaataggctatcttgacttttataataatcattacattgtggttttaccacctacatatacatccttaaacactttagttaattttgccatttttgactttttgctaaatgttccatgttcacttgaactaaaaaatgtatgtatattacatttttgtcattttcctgctcaaaattctttcattattcccattatacttggaataaaatttgacaggttacttgtatctctttacctgtccatcctcacgttttacctcacgtggtaaaacttgccttctttcagtgtctcacacctgccaagccctttttcatctcagggcttttgcctgaaacgctgttctccctattctctgtctgaataactcttagtcatccttgagatttcaattttaaggtcacttcttcaaagaggcctgctaaccatccagtctcaatgaaatctgttcattgtattccctcttggccctctgtagtttttcttcatagaacttgtttcagattatcactgtatatttatgtgtatgaatattttaacatctctctcctccataagctagtggccttcatgaaagtagtctgggtctgtttaattcatcactaaatccacaaaatccagcacagtacttggcacataagaaatatatttgttgaaggaatgaataaatattttaatcattctttaagtatcttttctcccaagtagtctataatcatcttgagggccaggactaaaaatgaattgagttgaattaaattgaattgaggagcagattgggactaaattccatgagaaaaaaaaattttaagtcaggacgtatgaagaaaaagtaccaagtaaaatgaattcattaatgctttaattaaaaatataaccttcaaagaaaaaagtgcagtatgttataaattaaaaacacttatatttttatggctcagtcatacagattaattaatgtgttattattaaaacctgaaaccttgaaaatccccaaagagaaaatccttaaaaaccaaaaagcaatcatgat

SEQ ID NO: 134115 - DNA, 1006 bp, Homo sapiens
gtatagggtggtgctctaagaaacctagtattaaacaacagctgggagactagacagctgagtagagattattttaaattatcctatattttcttttatgtttaaatctcttaatatataacacattgatttttgtatggggatccattctcattttaaagcatatggataactaattttcccaacacaacctagttcattaatttttggccatttagtatctgctctctgtcagttccaggcttttgtactacgaactccctatgcatttctgtttttttaaatgagggatcctgaatactagggagcctttgggaaatttgaaaataaaagttacatgatcagtgtattttagggggactaatatggcaactaaagctactttggaagagaaagagtggagatacatagattgctattatagttcaggccaatagagaggaattgggtttaagagatacattatggaggcagaagtgttcattcaacaagcgtttgttaaatatctactatgtaatcatgattatacaactagagagaatatgaaaaaaatgaattacgtatgttagcttatagatggatgctctcagtacccatccctattaatcgtcatttccctttgtttagtgaaccttctgatatattggatatcaaatatcctttccaagtattgtctgtcccacttaattctggtatccatgaatgcagaagtgtgctatttatgtaatcatgaacactcatgtatatgtgtataccttcattcattcaacatgtgttaaaactattatgtaacaggcatcatgttaggccttggaacacaaaggtgaacaacatgattcctgctcttaagttgcttacaaagatcatggatgaagatattaaatgataattaaagctgattgatctaccttgtaatacataagtgttttataaaatatctatagccataatagtcattgttattattgacatgagaagaccaaacattctcatacattatttatta

SEQ ID NO: 134116 - DNA, 1065 bp, Homo sapiens
tgatgttgagcattttttcatgttttttggtcatttgtgtaacttctttataaaagcaaatattcttaatagtgcagacaacccaaatacgtaccaacaggtgaatgagtagctaaattgtgatgtattcctacaatggaacactgcatgaatgaactgctgacacgttcaaccacataagttaatttcatagacattatgttgagtggaacaagtcagacacttataaaaaatttatttgctgttcatatcaacctcaggaacaagaaaaactaatctatggtgagtcaaatcagatttgtggttacctaaaagatgggtaatatactgagaagaatatgaataagctttcaggggtgctgaaaatgttctggatcggtgtgtgtgttggttacattaaaaggtaccagtctgtatgcttaagatttatgcactttactgtatatgttatattctcaatttttaaagtattatttaaaaaatgataaaatgttcagaacttggtagacattatttgtagggaaggtaagggaggacggaaccaagaatggttcctgacctagactgttaagcactcaggtcaaatttcccccatccttagcctcaggagctatatgaaagccctgtgtctatgctcttatccaggggttcttagatgaacatgcagcagaatcacttggagaacttgttaaaacatagacgtctgggccccaccaccagtgtttttaattcagcagggctggtgtggggccagagaatgtgcttatctaacaagctcccaggtgatggtgatgatgtaggcaacacactttgagaatcactactctattctgcttataccatttgtctttgctgcattttcaatgctattggctccataacctctagatacctatcctgttttactggggactcttttgactggtattcctagctcttgatgacatgactcatagaggtaggatatactagtccaggtacaattttgagaggaagttatcgagttcagttgtgaaaaatggaattttaggcttcggtgataatgactagtatgaattgtgatag

SEQ ID NO: 134117 - DNA, 1121 bp, Homo sapiens
agtatgtaaaatatggtccatgtctttatgatactaggaatgcatcttttttttttttttttttgagacagagtctcgctctgtcacccaagctggagtgcactggcccagtctcagctcactgcaagctccacctcccgggttcgcgccattcttcttgcttagccttccaagtagctgggactacaggtacctgccaccatgcctagctaatttttttttgtatttttagtagagacggggttcaacatgttagccaggatggtctcgatctcctgatcttgtgatccgcctgccttagcctcccaaagtgctgggattacaggcatgagccaccgcacctgggaggaatgcatcttttataatttgtagtacttttaatgttttaccaagttgccagttttttacataagtagaatattaagcatctttccagttctattagctgctatgtgtattgctttggattgtctacataagcaatcatgcatgctatctgtgaataataacatttttatttcttcatttccaatctttatacttttcatttctttgctgtgccatattgaattggaaccttcaatacaatcttgaatagaattggtgataattggcatccttaattaattctggtttctcagatggcaagctttcaacattttaccattgagtaagatgttgctatagatttccttatattcccacttgccaagagtttttttaaatcatagttgggtttttgtcaaatactatttatgcatttatcaacaagatttttttttcctcttttctgttaatatggcaaattacattgactgattttttttttagatgttaaacaacccttgcatttctggagtaagccccatatatattatgtacttttatatactgatgtattttacctgctaatattttaagatttttgcgtctatgtttatgagagagattggcctataattttcctttcttgtattatagttgcaaggttttggtagcaaggtaaggctaaccttgtcaaaaaaaaaaagttagaaaatagtcccttgtttttattctcttggagaataaaattggtattacttcttccttaaatgtttggaagaatttcctcttgaagt

SEQ ID NO: 134118 - DNA, 1065 bp, Homo sapiens
atagctttatatttcctgcagtctcaagatatgggacatctcttcaagggagacttgattaagagagagcaggcacttggggagctggtaccagaacctcggtcttcagtctgcctgaaataacaaatagattctctctctgggtctctcacataacacattacataaacaggtaacacatcttttaactctcctattacactttgaatagttgttctagaaaataggtttgttagaaaatattcagatcctcatgaatgataagctgatgggaatatcaaaatggatttttgaggcctttttatgactttgaattaacaaatgtataggatgccacagtcagaaaacattagtgatatactttgacaaatgatactgaggccccatatgagaaaccttgctgaagacattgctatattttgcttctaactttttatggagcatataagcaaatacattaaaggtttagtagtttttaaaagtaacaaacatatgtctcaatttttctctcttggttttataacttccacaaaattattttaatgtgaactattgtttttggctgtcttcactgtatcttgaatggagttgtcatctgtgtacccctctgcaggtgagcaagaataaactggatttgtacagggggtaccaatactaataatcacagttattccattcactggaatggaactttaaagggagttcttttcttttattgttaaagagataggcccaggtgtgtgtgtgtgtgtgtgtgtgtgtgtgtgtgtgtgtgtgtgtgtcaataaaaggctctgctgagattcttggtgggtggtttgcaaggctgtgtgtgtgtgtgtgtgtgtgtgtgtgtgtgtgttgtgtgtcaataaaaggctctgctgagattcttggtgggtggtttgcaaggctgggtgtagaagactgacatgagcagggattgatttgctgcctcccaaatacatgtggagaaacagcccaaggaggctggcattttgctatatccacctttctgcttcttcctttttaagtggtaaaggcactactaaaacctcgggggtg

SEQ ID NO: 134119 - DNA, 2127 bp, Homo sapiens
caagtttttttctttctttcttacctatccaagcttgttttcctatctgtaaaaatgggaataatgccaactttattgtgttttggtgatcattaaaggagataacccaagtaaagtttttagtatacctgacatttgttaagtgctccataaatgttgtcattaaggaaattatttagcaggaataaacttcaggccaatttctagtcacttagttcactctaaagtaagaaaatcagaagttgcagacttcagctttgtctaatggttggctctctgccttcagctgtgtctgtttggccgggacagctctgttgtttaggattcctttggtgattttagtttggggggggggcggttaaaaaagtgtcttgtatagtttgattggcagattatcccttgagattcgtagtgatactttgaagtaatagtgcttttacatgcatataacacaggtgctcattagtattttttcagtagcctttgtaggggtaatggaagtggcagtggaataattcagaaatagtgaagggaagaaaatcaagagcttggattattcccagactggggaatcagcccatctttgtaaagaagagattgacagaaattgttggttggccctgtagagttattctcagttggcactggggtaaagatcatgagacactagaatggcaagagggagaggcaagggtgaagggatggttggtggtgaaatttcattagtctctagcatgtgcaggagggaacagacttaacaagaaaccattagcatttgaggatataactaggaattttcactgcctgtggtaatgcccaattaatagttccctgtttcctggaagacttcctatggtaatttacagatggggatacagttgccaaagctctgggaaattgtgtttgggtgtgaaaaatactgtcaggtagcatagtgatttgggtgcagttctcagattactcttgtttttctctccagacattgaagagtggaagtgttcaggaacagtggctcacagacttacattactgcttcaacgtgtatatcactgggcatccccaagggcccagtgcactggctacagtgtattgaagaggccatagtacctcctgtttgaagttgtttattcacatctatcttatttgaagaaaaagactgatgtaatagatctttgtcattaaagctgaacttttaaagaagtttacgaaccttctttctttgcactgatatatgaaaataatgtttgggcgttcctattgatgtgtaggctggcttcccggactagcacacgatacatggtcataggcggttgtgcattgtgcatttcataggagctaaatatttacaaaatagagagtgatactgtggtaccttctgttatataccaagaaactggctaaatctttgtaattccatccaggcagacctccttctttgtgtttttgtgatcacaaaaacgatgaatgtaataattagtaaactaaaaaccaaggtaattaagtgaacacttcattgcctatctgtctatctcttaccgttagcacagaagtggcactgatctgaagaaaatgaaagcaacccccaaaatacctgtgagtaaaatatatcactgtttatgcctactgtcaatattctcacagcagctttccccttaaacaatgtgaaagagcccatcatcactggattttatttaaaccaggtgttcttagaatgctaggatgtgtgccgtttcattcttccctgccaacagaaatggcattttaagaagattgctcacttctgcaagttggtcagaaaatacaagtagaacgttgacgcctgagttagcaccttgctgcatgaacagtctggtctgtaaaccctacctgacagaatccttgatactgtaatacggctgttggtattcagcactgagaaagccattcagtgaagacgtggcggcaacttgtggccttgagaggctaacgtaggaactgtaaaatgtaaggaatcaccagaatgtatctatggtcttttggacaatttctaaatgaaaacagtgggcaatgattctgatctaaaatttaaacctgattaattttgaagtaatagtgggacgtgatatgtgtgtgtgtgtgtgtgtgtgt

SEQ ID NO: 134120 - DNA, 2565 bp, Homo sapiens
agatgaattatttggaaaattaggccatatataaggtctatttgtttgatctttgacatttgcatcttcaaaataatttgttatgtgtttcctattaatatgtagagcaagtaggtattaaaagaatctattgctgggcacagtggctcacacctgtgatcttagcactttgggagtcttgaggtaggtgggttgcttgaatccaggagtttaagacaagcctgggcaaaatggtggaaccccatctctactaagaatacaaaaattagccaggcgtggtggtgtgcacctgtagtcccagctactggggaggctgaggccagaggattgcttgagccaggtcacgggggttgcggtgagctgagactgcatcactgcactccagcctgggcgacagagtgaaactctgtctcaaaaaaaagaatctgttgaacttgtttctgatctaaaatgttctgatttggttagtggttttctccttttctgacaggcagtttttcacagtttattggttattcctgcccgaagtcagaactttgacatcttgcaaagtgccatcagtaagcatttggtaagtatccttaaactttttctcttaagaatgaacacaggatgcattggttagaatagagttttccacagccccagaaagagcatgtctggaattctaagattaatgatatcatagtctcttgcagcatgatgcattggcaagaactgaggaatcttggtatttttcctggctgttattaatttacttctgagtgaccttgggaaaagtctcttcttaggacctcacttttctaaatcagtgaaataagggacctgaaaattaaacttcacatcctttccaacttctgtaattcacgtgtgcttggcctcattgtattgagaattcaacatctagactgaagtctgggttccacctagaaggtttggggtccaaagtaggcacatcatctaacccggcacaaggtgtggtcactggcagctgtagactcaaccctgagactgacctgttatttgatattggatgtctcatttccattggtattaaattcacattagatatacctctgtagttgcttttaactttctccagtgtttatactcttatctttggctttttattgtaatgtgttatagtacaaagcagggctcccaaattatatctttgagaaacacacttgtttggataaaatataggcacatccagactcctttttctcttaaaatgttacttcccttgagttggaagagagtactgctttgaattcctagtactttctccctgctgtcaaacttccagtccttatccctgtgccatcaacaatgcccacttttttttccctacctccactccagagaattagactctccgttgactacattcattattctagtaaaagatcaatatgccagtcagtcttggccactattttcacacagcctgtggaggaggttaagacatcagagtttgcagactttgtaaaatcattacccaacagtagtctccaggagattgaaaccatgtatatatacagttacaagttagactctaccttaatgacaatgcatacagtacattctagatgaattagcaaactctaatgacccttcctgggtttcctggcagtgaaacagtcaaatgttaactatagtaatatcttttactgactccagtagaggtatgtttattcatgtctgaatgactaaatcaaagtgcagaggaaggctaattttgaaatgaactatttatacatttaattacctggcatatgagtggtgccacatgcaagttttccagcctgaataatttaaaaatttttaagtatgattgttggtattcagattttctttgagtgcatgaaataatccctttaaatagttatttctaaccagcagtagacattttatagaacatttagaagattctgtcatgaaggggaggcagtggattgggttaatagcacttcttgtgtttgcatgttttcaaagtcatataatttagggattaaattctcaaaggaaaacaggaccttaaggtgtggcaggtggcatatgttaggtatatattggttttcagtagaaataatgtaaagttaatcgtgaattaacaggttttggttttatgtggaggagcgggtctgttatgaagaggtgattaatctcgtttttctctgcttaggttgggttgactgtaattcctgacagcacggctggctgtgtttttggtgttatctgtaagctcctggatcatacttgtgtagttagtgagactctactgccatttctggcttcttgttgctacagtcttctttattttctgctcactatagagaaaggggaagcagaacatctaagaaagaggtaattattttttattcttcaaccttaattttcctactgttcctcctcccccaaccaaataataaaatagacagttaaagataattaggttatacagataccttaaattctgtttcagagagtttgtgtcagcctagctagctttttctttgttccttcatgaatcccctttgtgttgtagtgaaaatttttagt

SEQ ID NO: 134121 - DNA, 2330 bp, Homo sapiens
attgtgaaatagacctagttacaactttactaagaataagaacacatagttgccttatagtggctttaaagataagttttctttgcctaattaagatacttttgcttagttatgtaggaagctgaagcttgtttaaacataactcatttgctgagggtaagactataaaaatcaaatagtaaatacatagcagctgaacctactactgaaaagcaaaacttcatcttggctccttagagtctgattttcagatgggatggaaattttctgttgtactatatatgttgatcaagtatgctttttaatgaaagtttgtattaatatgtttgaatttcaaactttcatactagggtacttgagcccttggatatgaaattaatacaaggcatactatgggttttattttaagctactaaatcaaacttgttttcagtaaagaacaatggttatatactgtgctacctttgacaagtctgtcaagttggtcacttctggtaatagttctccctttgttttttatagatcatcattttctgggtggaagtattcagctaaagactggttgatgagtgatgtagactatttcagcttcttattttccacacttacaggtaaccacattcacttgccagattaaaaaagaaaaaacctaatatgaatcacaattctccttctaagatttgccattttatcagtttggttcagttttgaagatgataaatattctatcttggagtgatttttgtgattagtaactggaaatcgaaagaatatttctaacctacatacactgttaggcttctgaggcaggaggatggatgatttgtctttaaatctcttatagtatgagtatcaaaaccctgagcattatttgaatgtcatgttattgtatttttaagtttgatgtactactactattattttaaatgtattatttgaatattttcattgtatacttggataatgataggattctttgaaattttctgaagacttgaaattaggagagttaatatagtgtcaggatccaaaaagaacttgacagatccaatactatgctgaatctagcaagataaatacttcagaagataaatgtaagctcctatatgtttactgtatatttatgaatgtatacatttgaggtgggagaggctgtgtgttttaatagtagttgtcagaaagtttttagtgattttagaaagctcattgggagtcagtactatgacatggctatcaaactagatgatgcctctttaggtagtgcttacagaagtatagtgatttgaacatcaaggtagatagggttgggccacatcagtggtattctgatcattttgagaactacctttcaggagtgactttggcagcttgtttgtgtaggttaggccaagtgtaaatagaggtggtaaggggaactagaaattgttgaatgaactatacatgtattgtcaaagtaaaaacacctagggggatggagtagttttgaaacatttgaaggtctattatctaagaacctaaagcatttgatatatatgtaggagtatattactgcttttacttgctcatttgcttttttaaacctaccattaattggaaagattatgcctttcactctaagtaaaattgtcaaaaccctagtagaagtggtaaaacctgtttcttgctatattatagattgggtctgatcacatcttttatataattatatgaatttaactgtcttcattgctagcattttattttttaaaatatagcatgaaatgcagaagctcagagaaaacaaggtagcttaaagaatgttcacttgaaggcatatgtcatctctgttttttaagaaagtcattgttttttgttttttgtttttttaaattggctttctttgttacctgaattagggttttcgaaagaggagttgacttggcttcagagccttcgaggagttcctcatgtcatccagacacagctttcccctgtgcttctctaccttacagatttggatcaatttttacaccactgggatgtaacagaggtaatagttcatttaaaaagaaactaataattattaaaattcagttcatcaaccagtaatagttactatatatgagttgccttgtgtgagatcttttcaaagatacttgtttaaagtgcttataatcttggatgggagaagtacgtttgaaaagggaaacattctttataaattgtgccactagaacagaacaaatcagcaatttgaatgatagatccatctttttaaaagaggaaagcattatgaaagagtaagaatttgaggttttgaaggataagacttaagtaagagttggtatcct

SEQ ID NO: 134122 - DNA, 1066 bp, Homo sapiens
cagatatttgactctggtcactggaagtgtgcttcataactgacaataaacttgccttttaccaaaacagagaaaaacatataaataaaatattgtttgtatttaaaaattttaggtttatttcttccttgtatatgcacattagaggggcctggacatattttttaagaattttaaatattgattagtttcccatgttttttctttttagatattaaaaaactgcactttgttttgtgtaagcaaaatgctaggccttttaaaagttaaatttttaaaaaaaattttccgtaacttaagagcttgttttttatttgacttccagtagagggcactctgttccttagatataacttacattcagttccgttaaatcaccccttgaatgtttcttgaaattgattctccttggaagatgcatttaatgtcttcatcaacatctgttcacttatgtttaataacttttgtcaaggattattttaaaatcttggggtttttttgcttttatctttttgtggcgatgagtggcgagaattgggaaaatatattaattttacaaatactgataatacagactcatatttaaatgattgtcattgtagttaaaagtctaccaaattaaattttgctttttagtatttgtacagagtccattagtagacttctctctatgtaggtatattattcccatctaaagtagtccctttttaaaaagaatacaaaattaggacttttcagccttcttgagcccatagcaccatcattttatcacttttcatagggtcataataagactagccaggcgcagtggctcatacctgtaaatcccagcactatgagaggctgaggcaggcagatcacttgaggtcaggagtttgagaccagcctggccaacgtggtgaaaccccatctctattaaaaatacaaaaattagctgggcatggcggctcatgcatgtaaccccagctactcaggaggctgaggcaggagaattgcttgaacccaggaggcggaggttgtagtgagctgagatcatgccgctgcactctaccctgggtgacagaag

SEQ ID NO: 134123 - DNA, 1559 bp, Homo sapiens
gtagctaatgtatagcagagctgagacttaagttcaggtctatcttgacagcaaagtccatgatagaatcaccagcctttcaggggacctagtgaaaatgttcactgttattcaagacatttacactccagcaagtattctaaagaaataaaaatagcacaagtttgaagctattttgtatgggagcaacttatggtgaatgtgtacatttgttaatatagtataataacaccgattaggataaatagttaagtgtctctatccttcaaaataaaaatacaatttagatactgccccagttaacattaatttagtgggtaaagccttggaaaatgatgctggcatcttgtaggttctcaaatgtttaaatgaataaatgtggtattattgatacataattagtcactttgtgatatatttaagttaaaaaaaaattttttttttgtttaaatttatttcccttgtctttgagtattacattttattcttctttggcctttctaagatatcgtagtaaagtgttatcccgttggctggctggcttaccattgcaacttgctcatcttggctcccgaaatcctgagctctctacacagcttatcgatatcattcataccgctgcagcacgagcaaataaagaattactaaaaagtttacaagctactgccctccgaatttatggtaagagttcatttgtttaatggtatgggtagtcattgatccaccctgatatacaaaagaagtttttaaggggagctctgtaattttgcctttcccttagtctgaattagtaataccatggttaaattgccagaacaaaacatcatacagtaaattcattttcaatatttattagaatatagaaggttaatgattgttgatgcttattgcattcttaaattgtctttcaaaccacttgctattcataaattcaaaactaatctgatacttaaaaattcctttgaagctctgatggcaagacatatctttattacttatttaatcatagtgaatatctcgtatgactttcatatattctttgttcatctaggactgacttaactaatattttaagcaaaattattaaaacataactgggatgtatgtatgcatataattattgaaatataattcacatactataaaattcaccattttacaatgtacagttcaatgaattttaaaaaatatattcctaaggttgtgcaactatcaccactgtctaattctaaaacatttttatcaccccagaaagaaacttgtactgattggaagttcatccttattcctttcttcccccagcccctggaaatcactcatctactttctgtctatatggatttgcctatcatggatattttggaattacataacatggggccttttgtgtctggcttgtttcacttagcataatattttcaagatttgtccgtgttgtaacaagtatcaatactttattcctttttattgttgagtagtattttgttgtatggatatgtcactggtatttatccatttgtctggtgatgaacatttgagtggtttccaccttttgtggg

SEQ ID NO: 134124 - DNA, 2284 bp, Homo sapiens
ctaagttgcaaattttgtttttattaaaatattttattttagattttttgaaattgtgttttgtttggctagagtgaataaactgatattaatatgtgaattataaaattgtttcaaatcagtgcttaccggggtatgtctccttatttcacatgtgagaaagttatggccaggaaagactagtgattcttttaagtcagatgattagttaaaagcagagccaagatctactgtgatttccatccaaatataagcatctgccttaaatcaggtgtgtcagggtttttaagtcttatttttcaagttcccaggcaatattataagggcatttacattttgtgtgaatagcaccttgagtaatgaattgagctgtatacactctgtaccttcttaacaactctgattccataatgaaatggtttatttatagaactgtggcctaagtcttgcctatgcacctatcttcttggccatctattaattctagaagggaattttttaaaactccattgatagattattttaagtattctaatgaagcaggcatggtagacgtaatgctttatagatgtgtgtgtctttgtttctagcatcaagcattgcacagttctctccaataacatagatcatctcttactgaatttaacactgtctgatatcatggtctccctggcaaatgcgtcaactttgcagaaggattgcagttggatagaaatgataaggaaatttgtaacagagacccttgaagatggctctaggctaaatagtaagcaactgaacagattgctgggagtatcctggaggttaatgcaaatacagccaaacagaggtaggtgatgctactttgcccttatttaagagtggagctcttacatgtgctatcttaaggtctagctttgaaatgatggcttgtaaacattccatgtagtcaggctaattgtattcaagccataaaaggtagctactgtctacttgaacactgaaattgtttatggctcagagtatctctaagtgggtaggtccactctgaagcagattgataaagatttctaccctcttctgatctagtttggctagaacttgagaactttttcccttgattgatatggcatgaatcttccctgtctctttaccttttttctagcttaaggttaagttatattaagtcagttttagagtgacttactaattctttgattttaaaacaaagttttcctatttggttcccatctaaattgcctttctaatattctggtttttgtcattcctaggtttgttgttaagaaaatttatactgtaactactgattggtttgacttttttattaggctattgctataggacttcaatggtagttgtctatttgtggctaaaattggctttgccataggaagaaagtaaagtacttcggtgcattcagaggaatttgggggctgttaaacattttttgattcatatgcaagttgttttctttctgtttgtagaggacacagagactcttattaaggcagtttatacattatatcagcagaggggccttatccttccagttcggactttgttattgaagtttttcagtaaaatctatcagacagaagaactgagatcttgtagattcaggtaaaatcttgttatttttcctttcttttttctcttgctgagtttttctgtagtctaagtatttaaataattttagagagattaaatctttggagaagttcattctttttaatcctacttgtttgcatttaagaaatggtataaaattttaaaagatgcatacgtaatagtgccagtaaactttatacccatatctgaacagataaaagactgcttaggcatgcatttctacctgtccacttatagctaagggacagttggaacaacctcagccctttctcttcccctcccataaaaattacggaggttgaatctctagccattagtgacatattgaggcatatgggataagagtgagggcaatagaagatgagaaagtttctggcttagtttagtgctatcagagagagacaacaaaagagtggactaaggaatttttcaataaggtgagtttgaggtttatttggcatagtcagaaatgtttgagaggaagatacagatttgggatacctcaacatatataggtagttgttgtaacgtattctggtatttactttaagccaagttactttacataatctcaataatcttcatactgctactgtgaggtggatactgttagcttccattttacagaaggaagcagaaaataaataaattggtg

SEQ ID NO: 134125 - DNA, 1115 bp, Homo sapiens
agttcaagaccagcctggccaatatggtgaaaccctgtctctactaaaaatacaaaaattaatcaggcatggtggtgaacacttgtaatcccagctacttgggaggctgaggcagcaggatcacttgaacccaggaggcagaggttgcagtaagctgagatggtgccacagcctgggaaacagagtgagactccatctcaaaaaaaaaaaaaaaaaaaaaaaaaaaaagtatatatatatatatacatatatatatacacatatttgttttttatatatatttatatattatatataatatacatttttatatatttatatatatttatatatatttataaaactgcttaggagggcaaggtacaaggcttaaaaaatctgatcctctctatcacaatactttgttctaccctgttcacagtaagcaaccaaaacaaatatttagtgcatgaatgaaaaactcttatgcctgaaatagctgtattgcttccaagcatattctctgaaccctgctcaaaaaacctcaatgattctctagctaatgtattccctttgataaaagagcctttgacagattttaagatcccttgcaagtgtatgctcatttacgggaactacagtattagtattttagcttgtacctgcttgtcaaattttattacataacttgttctcacatttatctgctcttacttgaggtagacattttaaataatttctaggcttacttttttttttttaactttcaccttctaatcaattaccttttatttctgatttttctccaattaccctccttccttcgggatactgatattagtttcaataccaggttcctcatgtataaatgagagtggaactagatgatcatcaagatattctcttgcttaagaggttcaataatcacacagtgcctcacccaaataaaccatacaccttggcaattttattaaattcgtatttacataagctgatacattcatctagcacaaaaaaaccattttacagactaaaaaataaaaataaaatgttaatcccaaggttcaaactcacttgtccaaaaatcagccatattactacttttattttcacaaaatctagacataaatacacag

SEQ ID NO: 134126 - DNA, 1022 bp, Homo sapiens
ggagaatagagttatggtgtagacagaacatcagggagaaagactttcttgtatatttcataaacattgcattagtagtccaaattcagaattttcttaagtctcagatactttcactttttctctcttaagcagcagacagaatgcaagtaaatagttattaagcaccaaaaggatctatagatgaaaagtgggtgctttaacagttaattctgatttttaaatttatttacatattatattactggtagaaagtgaattatgatgggacatttatttgacaagttgtcatttctcttcaagttttattgcttattttacattttttcttgtagatttttctaatctttgctatttcaataggagtcatggcttcgaaagaactaccttattgattttaaacaccattttatgagtcgttttccatatgtcttaaaagaaataaccaagcacaaaaggaaagagccaaataaaaggtattatgattctttttcactgtataaccttgaaaagctgtttaacctgaaattatcaggaagtaattaaccttaatatggaactttctacactgctgtgtatttatgtctagattttgtgaaaataaaagtagtaatatggctgatttttggacaagtgagtttgaaccttgggattaacattttatttttattttttagtctgtaaaatggtttttttgtgctagatgaatgtatcagcttatgtaaatacgaatttaataaaattgccaaggtgtatggtttatttgggtgaggcactgtgtgattattgaacctcttaagcaagagaatatcttgatgatcatctagttccactctcatttatacatgaggaacctggtattgaaactaatatcagtatcccgaaggaaggagggtaattggagaaaaatcagaaataaaaggtaattgattagaaggtgaaagttaaaaaaaaaaaagtaagcctagaaattatttaaaatgtctacctcaagtaagagcagataaatgtgagaacaagtt

SEQ ID NO: 134127 - DNA, 1059 bp, Homo sapiens
atagctagtttttaaaatgaaattacagtttaacattagctttttgatttactgtggtttttagggtactgtattagtagtgtcagggtcagtattatgttataaaaattgtgtcttagctttgcatttaatgcttgacttgcttgctactttttctctacgtgtgtgtctcattgcttttatccttttgctgtgagggttagagtttgtaaccaaacactaatgcagtcatactttataaggcatttattcaaagctttattgggcatcaataaataatggctacttaaattaattaaaatttaaaattcaattcctcagtaaccctagccacatttcaagtgctcaacagctacatgtgggtagtggttactatattggacagtgcagatagatatagaacagtttgatcattacagaaaggtcttttgaatagtactattctagactctggggctacagagataaacatggttgataaggtgcttgccctcatggtatgtaccttctggtgggatctatagacagtaaacaaatatataatgtcagtactaggaagaaagatgaaagtaaaatggggtataaagagcatgggcaggaacagtgagggggagctattttagataggttgtcaaatgctctctgagaataagatatctgaatgtcattgaagtgaaggagcaagtcttgtcaacatctgtgggaagaacattcaggcataggaaacagcaagtacaatggctttgaggtgagaacaggcttcgcatatttgaagaatggcaggaaggcctgtgcaaatgaggtactgggagaatggtagaagatgggggcgaagaagagtgatagtggccagatcatgtgggactctgtggtccctggtaaggagtttggattttaacctgagtgtggcgaaaagaccactggagggttttgagcagaggagtggcatgatctgcattatatttatttaactttaatgtgctgaatttataaaaatagaacactagtgaactcccaggtgctcacagtctaactctagcaaccatcatctcttggatg

SEQ ID NO: 134128 - DNA, 1618 bp, Homo sapiens
ttcaagcaattctcctgcctcagcctcttgagtagctaggcttacaggtgcccgccaccatgcgtggctaattttttgtatttttagtagagacggggttttaccatgttgggcaggctggttttgaactcctgacctcaggtgatccacccgcctcagcctcccaaagtgttgggttacaggcgtgagccaccacgcctggcctagttttttcatttttagagagccaagaagtaaaaattccaagcttcttcggtgtttgattacatataagcactagtaaacttttgttactgctttgttagtagcatttgtatttagatagactagtaggaccaaaattcaaaatctgaaaatttattaattatgctagttttgggtcatcttatctggataacactaacaaaggatctaaatactgctttagttttatggatatttaaaatagtatgctttagaactattttgtgctattataacatgactaggcttattagcagctcattaacatataatggtaagtttaaaagactgcgtagactgttgaagatcagaatacaaattgagatactgtataaagctgaaataaataaattcagataggaataatatttaaaaacatccactggtagaatgctctaattcaccttggcagatttgtaataacttgataagaaccattatttatttatttattttttaaaaaggaaccattatcttagagacagagtataaaaatgtacatcattggtacaatctatacaaaatgatagattgttagtagcattctatacaaaatgacattaaaatgcacattctggtcttgaacttctggccttaaatatccttgcaccttggcctcccaaagtgttgagattacaggcatgagcctctttgcctggccacagcctaatctttaggaggaaccaaatagcattgcttggcattgatgtcagatcacacaccacaagctgaattgtaactctttttctctcagaaactgtatagatttttctattggtaaattgatgtctcggttagatatagtcttaggactactgactgtttgcttttacatgttggtgctgcagcttaatgcatttagtttgctagtatttacaaaaagtcaagaaatttcacttgtattcaggtagtttttttttttttttaaactttttagtaatttgaagctttgatccttactttgaaaagaagtctcagggtacattaagtcttacatgcagtggctgaatagtcagattctgtaataatcaactgaagttgtttatttctgaaatactgtgtgtatcttttttttttcctgttcatataaacagccatttattccagcactatttgttgaaaagattgttgttttacatttgattaccttggcactatttttcttttctttctttcttttttttttttgcattcccttacctatcttttttattttaaagtcaaaccttcagaaggaatacaataagcacttgcctacccccatctagttgcagcaatttctaacattttgtgcacatgttgaactactactgtatgtattcttaatagttagctagctatatccttgatataactagtttttatttatttttat

SEQ ID NO: 134129 - DNA, 4825 bp, Homo sapiens
attgctagagaagttcctccgaggctcttacgaagcccaggagcacaccagcagatacaagttacatctctaggaagtctgtgctgctctcctacactcgaacaaaggaaaacaaaaaaaaaacacatttcagaaggtttccctttagcatatagcttgacaaaaggttctgtgacccaaaaaactttgcaaaaccgtggcaagactgttgccttgttacagtattttatcactaaactgagtttttaatagttcttaacagcattttttaatattttgatctttcagcataatcagattcttgattacgattgaaataaatgttacagtagtatgtgttggaaagtgccttttttcataatttattcttgtctctatccattgcttttaattaattcttttcattatagtagtcgagaatgactaaaaaaagaaaacgccaacatgattttcaaaaagtaaaattgaaagttggtaaaaagaagcccaagttacaaaatgctactcctacaaactttaaaacaaagactatacatctgcctgagcaactcaaagaggatggaacacttccaacaaacaatagaaaacttaacataaaggtaaatcataaatcatgttttgacaaaataagattttctttggaatcgtgtagaatgttatatttttgtgaaaatttgtctaaactcttagagtaaatagtttgcctagggtcttagggtttattgatgtttggagtttatcttttacccaaagatctctcatgcagctgtgtctttccacttcctccagaaacgttcgctaaactaaatgcacagttgtttctccctggtatatttatttgatgatttatttatttatttatttatttattttgagacaggtctcactcttacaccatgttgagcacaatggggtgctatcatggctcactgcagccaggaccttctgggctcaagtgatcctcctacttcagcctcccaagtagctggggctgcaggcgagcgtcaccatgcctggctaatttatttttttgtggaggcaaggttgcaatatgttgcccaggctggtctcaaactcttggatgcaagcaatcctccagccaaggcctcctgaggtgctgggattgtaggcgtgaaccacggcacctggctgtatctggaaataattcttacatgtttttgatgtgtcaaatttttgatgaacagttttctagctgttttttagcgaattaagatacaatcctgtcattcatttttgaacccatacagcacatagtttattataggtttgtagtaaatacttgaagtcaattgaagtttgagaagtgttgcttaagaatctaacagctttatggagatataatttacacataattaaaatctctcatttaaagaatacaattcattggttttggtatatttacagagttatgctactatcaccttaatctaattttagaacgtttttatcactccaagaagaaaacttatacccattaggaatcacttctcatttcttccagccctaggcaatcactaatctacctctgatatctatagatttgcttattctagaaagtgcatataaatgaaatcatataatacatggccttttgttactggccttttacttagcacagtgttttggaggttcctccaggttgtatgtagcttgtagcatatatcagaacagtggtacattcctttgtattgtcgaattgtatttcattgcatgattaggtcacatattgttgatcactcagcagttgatgaacatttagtttgtttctggtttttggctcttatgaataatgctgttatgaatatttgtgtgtaggtctttgtgaggatatacatttttcgagttttgctttttaagctctgaagtttaaataatactaaagagttatttaaagttttttttttcccaaaggttacataaattattccacagataaaattgtcaggtagtatactctgaataaaacacaaacaccctgtgaaagcccatttgaaacaggcagaaacggcctgtcaagagtatatatatacaccttccatgatgtttggtacctagtaggttttcaataaatgatggtgtgattgctgtcactttatatcatagagcgcctaagcctgcatgtaggttaatgtaaagagagaaaattccaactgaaaattatgcaatgtttttattaagctgaaagtatttttctgtttctgatcctaacaaaagctaaataacatttaaaaagtacttattgaagcagtttccccaaggagtgtcagtttactagtgtagtgttagttagcatgtttacgtgaaattgatacatgtatataagtatacatctaaaatttgtatttttatttataggatttgctgtcacagatgcatcactacaatgctggggttaaacaaagtgctcttcttggacttaaagaccttttgtctcaatacccatttataattgatgcacacctttcaaacatattaagtgaagtgactgctgtgtttacagataaagatgctaatgtacgattagcagcagttcaacttcttcaattcctggcccccaaaatacgagctgaacaaatttctccattttttcctttggtaagtgcccatctctctagtgccatgactcacattactgaaggaattcaggaggactctttaaaagttttggacattctgctggaacagtacccagctctaattactggccgtagcagcatattgcttaagaattttgtagaacttatttctcatcagcagctgtccaaaggactgataaatagagacagatcccagtcctggatactttctgtaaatcctaatcggagactcacttctcagcaatggaggctgaaagtcttagtgagactcagtaaattccttcaggccttggcagatggatccagtaggttgagagaaagtgaaggacttcaggaacagaaagaaaatccccatgccactagcaactccatttttatcaactggaaggaacatgccaacgaccagcaacacatccaggtttatgaaaatgggggttcacagccaaatgtcagttcacagttcaggctacggtaagaaggatttcagttatgtccacacagttttgctgtattgaattataactgctaaccattgatgactgttggtgggaagacatgcagttgtctttcatagttttcatatagttactcatgatttgattttatttactgatgggaagagttatttgtatgttaatttatttatagcaaagcctttgagaaataaaacttgataatatcttttggctttgtcatcttagaatttcatttttcttactagttttgattgatgtaattatcagttcatggtgcttcattttactagtactttatatttaagatttaaattagcaagggataataaacattttttaatcacttaatttttttctttcttacccttattaggtatctggttggaggactgagtggtgtggatgaaggcctgtcatctactgaaaacctgaaaggatttattgagataataattccattgctaattgaatgctgggttgaagctgtacctccacaactagctactcctgttgggaatggtatagaacgagaacctctacaggttatgcagcaagttcttaatattatttcccttctgtggaaactctctaaacaacaggatgaaacccataaattggtgagaactaatggttctttattttcttagtattaatagccttttatcataaatggcaagattcgaaatcagctcattactactaattggttatatatttttctgaaaagtaccctgggtttaactgtaaacttgtttgttttgcacaaaactacaaattagttttctgaagttattatctgtgaatatatatatatatatatttaagtgaaatgcgtaactcatgcttggttccattagttttttactggctataattcatagtagtgttacagtgtattgtttatggcagattgattgtgtaggaacattctagtttctgaaaggtctcttacaaggtttaaaaagttgcttattaagtagtctctttcaatttattccacattgccaggtttagtagaaagggacaaaactgaagagctcatgatcagacttgaattgttttaagtgttgtgctatagtgaatgtagtgcatagtgtatgctacacttttcctttgcaaccaaggaggaacaagctgcaagattaagttggtgctaaatcaatacagtaacacacttgaaaagggtagctacagaagcaagacttcaaagctagaagcatctggttttcagaagaattgctgtaaggacttttgataaggcaggtgtgaatccttcaagtttatataaaactgagaaggtagttttcttgtttttgttttatttttatttcaagttgaagtttagaatgagtcagtatggtgcataagacgggataaattaagtagtatttgatagtcttgaaaagcattatagagttgtagtaaggtgtatattttaagagcgtgttctattgctgttaactcatcatctgtaggaatgttttgtcaattgctttttcaaataagatggcattttattgattacggttttgagactttgttttatgattcattgcatacattggcaaaaaattaataatagggctataatgtaagattttgagaaagcaaagcttgtttctcatatggcagttaatttgtgatgtaggctagagacagtaagaatgtatatagctcctttaaaaaaagtatatagtacttacagtcttgatctatgatcatctgaaaggt

SEQ ID NO: 134130 - DNA, 1055 bp, Homo sapiens
atgagccaccgtgtccggctccatccatccagttttataagcaagcatagtaatctggtagatttatttgacactatccccacccttacattctcatatccaatatattatcaagttttgtcaatgttatgtcccgcacatttctcaaacctgtctgtgtcacaccatctctaccagcaccttaatccaaacttttacctggattaatactatactcacctcaatttcatttttgtttgtctgccaatccattctccccagagcagaataataatattcttaatatgcaaatctaatctgccatttgatcctaacacctgtcaatgatttactttcatttcaaggttaaagaccaaaatccttagtgggacctacaatattgccctgccaaaatcttcactctattttactttgttctatccactttgtctttctgtcttacccactggccttctttcagttccttaaaaacacccttctaccacagggactttgcacatactattccccctacttcatgtattattttccttgttcttcatattcttagcaactacacatcctctaggtctcagatttaacatcacttcttaagagaaactatctctgactcccagatcaagtcattacaaagatgaattctgccaagtaagcgtgatcaaagtaaaagtgtgtgttcagaactccatttgctcctcctggtgcactcttcacgtttctctgccatgccttgtggctaagcaggctgatttgtgtggactacaccaacatctccctggcctccctggccctcagagcaaatgagggtgtcaaggtgtttatcccctgcacctccaagctgggtcgctgcacgctggctactccctcaaccaagtgccagctacagcttttgtcaggcagctgtctccatggaggtttctttgtctccaagttctaggaactgctgcctcctctcgctcctccaagctaaggggtaccatcaacagtgctatcacatactacattattacttctggttcccctaatccctgcccactcctttgtaaatagttctt

SEQ ID NO: 134131 - DNA, 4323 bp, Homo sapiens
cctctcccagttggtgatgatttgttaacgtattgtggaagatcaagggctggactcaggcactcctgtcctgagtgagtaggaaagacgtctgggagaagggtggtttattttgtttttaaccaggcattgaagcagagagtaggtgggtacgtagcgatggtgaaggtagggaacatcatgcatacttggaagagcaattgctttggagagatagacagtttggggtttgaatcctagctctgccatttcttagctttgtacattttttgtgaggataaaataatgttttttcacatatctggcgtgcagttcaacaagcactagtaccgtattccctgtccgtgataacattcattcaacaaatgtctgctgagcaccagtcatgtgctgagtcatatgttacatcctggggatacagcgatgagtcagaaattatgtattcccctaggaatttcccagtccagtgtgggagatggacgcaaagagcaaattgcaaaaaatatgggaagtgctacagtacagtcatgtacaactgtcagtgagctcatagaagagtaactcattctgagccagtgggaactcagggccaatctatatctaacaaggtgagtatgagaccttatgacacaggtttttgttttttgtttttgttttttttttggggggggacagtctcgctctgttgcccaggctggagtgcagtggcatgatctcggctcactgcagtctccacctcttgggttcaagcgattctcttgtctcagcctcccaagtagctgagattacaggcacctaccaccacgcccagctaatttttgtagttttagtagaggtggggtttcaccatgttggccaggctggtctcaaactcctgacctcaggtgatctgcccaccttggcctcccaaggtattgggattataggcgtgagccaccgtgcccagctatgacacaggttttgaatgctcctttaccacctaactttgatctcttttacctttgtcttatctttgccctgctagtctctcctctctctctcaaaaaaaaaaaaaaaaaaatctagttgcagtgtgtgtgtaatttgtaagctgcttcaaacccattttagaaggaagccgttataaagaaaataaacataacagactgggtattaattgaggaaggcttaacaaaaattgcatgagagttgggctttgaagattgaaaatgggccgggcgcggtggctcacgcttgtaatgccagcactttgggagtgagactctgtgtcaaaaaaaaaaaaaaaaaagagagattgaaaatgggcccttggtggccttggggtaaaggattccagccaaaggaagccgcgtgttgagtttggtctggttaggttgaaaatacatggagagaatgaggggctggtgggggtgctataatcaggaccagatccggaaaggccatgaatgccatgtgaagagttgggacttttatcgtttaggcagtgggagagacgtctgaggtttacaaggaggcctgtggcttgatcactgtgttttaggaagatccctgtagttgtgtggaagagggtatggaagtttgggagaccattttagagattagctctgtccacagacatgggcagtgagaatgggagaggagggaacagatgtttgggtaaaatgtaccataggtcttgttaattagttgcatgtgattgaagattacatttctgctttgggaagccaagttgatgtggctgacatcatcagaaatcaggagattttggtgtatggggaataattagtttggttttggctatggagagttggagttttctgaggtacccatagtggggcacagaggtggctgatagataattggaaatgtgtttgatgctaaggagagaggttgaggcttggaagagaggttcttccatcactgccactttattctttttctttttttctttttttttttgtttttgagatggagttttgctcttgttgcccaggctggagtgcaacggcgcaatctcggctcaccgcaacttccacctcccgggttcaagcaattctcctgcctcagcctcctgaatagctgggattacaggcatgcaccatgatacctggctaattttgtatttttagtagagacggggtttttccatgttggtcaggctggtctcgaactcccgacctcaggtgctcctcccacctcggcctcccaaagtgctgggattacaggcgtgagccaccatgcctagcctttttttttttttttttttaaagagacagcgttttactctttcacctaggttggagtgcagtggtgcaatcattgttcactgcaacctcagattcctgggctcaggtggtcctcccacttcagcctcccaagtagctgggattacagatgctcatgcctggctaattttttaatttttatttttagagatggagtatcactgtgttgcccaggctggtctcaaacttctggcatcaagcagtactcccccactgccttccaaagtgctgggattacaggtgtgagccactgtgcctgcgtccccactcccaactttttttttaaaacaaacacttactgtgaatctactatgtgctgaagatagatataaaatgtagttccatgcctcggagctcaccgtcagatagggagagccttcaggatatggatagatctcagtgcagagtaattctgagtgctgcaagaggtaaatacttggtacccttgtcctagagaagatttgagagccgatggttgtagctgaggtggtgggagtggaggagagtgtattcagtagacgagaaggaggctggagtgggaacacctacagaaggggaccttctgtttttcaacactgctttctgtggaagataccttaataatgattccaaaggcatttcagggaagccgtgggtggggatggtttaagatggagtgtggggaaggggaaggacggggttaggactttaagaactctcatctggtttatagaggggactgtgaggatgggaaagtgggggagacctggctttcaacacaaggctggttctgcatgcacacagtcacactcaggcgcagatgatgaaaataaacacttccaagttacatggctgcctggagtgggtggaaaagtggtagagagggaatgcattagagaaagcaagttcggtgctaggcttgactggaaagctctcgaaaaggaaagaaagaaggtagagaggcagagagagcttgggtgagtggccatcctgggcacacaggtatgtacatgtgcaggcaggtaagagtactgtccaattactctcacctctggataaaatgaaatcctgaaggcatcatagtggttgtgaggctcttaaaacattgccatttctaccttctttgaactgtaatgatgtttgcaagaaggaaacgattatattatgataaatcctttgtaagaggagaaatttaaaataataaaacatctagcaataatcagttaaaaaatgcaaatggcaagcaggttggttatggcaggtaattccacaaatatttattgagtgcttgatgtacaccaggcactcttcaaggagccatagtgaacagatcagatcacctgcttttgccatttcacctggaactgcttaacttgcacagttaaacctgtttaaaggccttaagcaaaataacaaggtcatctaaagtgctgagatcacttcattctgctgtaatgctctctttcattggccagtagctccaccagtctcataaataatcagaaaataccaactatgtgtctttggcagtgaactgtggaaattagattgcagaaaaaccattttaatggcagtgctaacatggatgaccagtactggataggactttagagaatacccccttgagctttataatttagagacgaggaattgacagcaagtaaagaagacgtgccaagacaaatgtcacaaaatgaatgacagagttgagagcagtgccctggagttttcaaatggtacagtcggggaggcttgagagtacctagcaaaaagggcatcttgatggtgagggggttctgaagtgggagaggggttggaaagcaaatgatgaagccttgatttcagactcttctctgttactagggccttgggaagccctgttttgctctgagcctcagtttcctcaactgtaaagtaagaggattagattgaggtccttctttaaatttatttatattttttctttttctaaagctccactctcagaagcagtggtagggttgggctttgaggccatgggtccaagcccatgtccttaacctctatattatactacctt

SEQ ID NO: 134132 - DNA, 1328 bp, Homo sapiens
atcccaacactgggaggctgaggcaggctgatcacctgaggtcaggagtttgagatcagcctggccaacatagagtgaaaccccatcttttctaaaagtacaaaaatcagctgagtgtggtgatgggtgcctgtaatcctagctacttgggaagctgaagcaggagtattgtttgaacccaggaggcggaggttgcagtgagccgagatcacgccactctactccagcctgggcgacagagctagactctgtctctcaaaaaagaaagaaacagtctttggtgtatacttcctcctttccaataacattgtccccactcagagtccaggccttctcttatcaattatttatctgatgatcttcttcaactctctccattcatatcctatacattcttaaagatctagctcaaatgtcctcttgttcatgaagaatgcaagtgaacctcttccctcttcttcatgctcaaggtgctttgtcctctcttctggtgtctgtttcagcgtgcctctcattttagttgtcagtttgtgcatgtcagcgctctttctaggctggagggttcagcctgtccttgtatctcccacatactctagaacagtgctgagcctttggcaggagttcattacatatttgttgaattgtgtgtgtatgaaataaagagccaataacttgttatatatacacacacaccatacacacacacacacacacacgtgcgcacacacacagtattattctacttttggaagcagtttaatatgggtgggaagagtagaaagaactaaaattgattgaagctgtagtctgtgtttctttattcacgttgcaggacttttgcgcagagggaatgaggcagggccgggatagcgggggagtaactccatttcacagatgaagcattagaggttgattgacttgcccaaagtcacacggttgggtgaggggtaaagtcaggatttgagcccgggttttctgcatccagtgtcttggttcatttcacctcactttaagatcagcagtctattaatgtcctgaagtctgattttccagtgccatagctcttcagtcatggtacccattctgagtattaacttcaaagaactcccctttccacaaagagcaagagatgtgaaatcttgacaagtttctctgtctttgctcaaactttaggacttagtttcacccttggtggacttaaaaatcactagatggtatattagtcttctcaggctaccataataaaataccacagattgtgtggttgaaacaacagaaattggattcttgcagttctagaggctgagaaggccaagatcaaggtgttg

SEQ ID NO: 134133 - DNA, 1261 bp, Homo sapiens
ggcgtggtgacaggcacctgtaatcccagctactcaggaggctgaggcaggagaattgcctgaacccgggaggtggaggttgcagtgagctcaggtcgtgccactgcactccagcctgggtgacaagagcgagactccgtttcaaaaaaaaaatgttcaacttttctttttttgctgttatataccagatagtcacagtatagccacaacaatccactttgaaataaaaccccattcctagtacatttctaaatattctccagagtcctgaatatcataattcaaccttaatggaaaagaaagtactgtatttcagacaagggaatcaagtcaggaattaagcttcagtgatttataggcattgtttttgctggagttggtaatcattgcttcaaacttccttttacaggatagctagcggccaggagaaatacagtggaaaatgcaaaacaacgaaattataaagcctgccaaatacttctcagaattggaaaagagcatcctgctggctttagtagaaaagtataaatatgtgctggaatgtaagaaaagtgatgcgcgaactattgcccttaagcagcgtacctggcaggcgctggcccacgaatacaactctcagcccagcgtgtccctgcgggatttcaaacagctgaagaagtgctgggagaacatcaaggctcggaccaaaaaaattatggcccatgaaaggagagagaaagtgaaacggagcgtcagccctctcctgagtacccacgtcctagggaaggagaagatcgccagcatgctgccggagcagctctacttcctgcagagccccccggaggaggagcccgaataccaccccgacgcctcagcccaaggtatccgttcctgatgccagtgtgcacgctctcactgggtatctgtttgacattttaattttaaaaccctccactttgagggaacttctaaaaatgaaacttttgtatcaaatccaattttcctaattcaagatctcaggattatataggacattcaaagtcttatagaagtgggcgtggtggctcgtgcctgtaatcccagcactttgggatgctgaggcgggaggatggcttgagctcaggaatttgagaccaccctgggcaacaaagtgagacccctgtttctacaaaaaatagaaaaaattagctgggcatggtagcatgcacctgtagttccagctactcgggaggctgaggctggaggataacttgagcccaggaggtggaagctgcagtgagct

SEQ ID NO: 134134 - DNA, 1134 bp, Homo sapiens
cccattttcaaattctggggtgggatctagggaagttcatcccacagagttttttctctttctctttggaagaaatgatgtaattcatttactcataaacgtaatttataaattttcagcaagaagggaataaaggtacattctcagtgtttttcttatagtaacatttaatagtgactcaagtataaacggatttattttaaattggatgtttgtacatagatgacactggggacttccctttttgctggtgattattaaagcatagccaaatgctccttgctcctgtgtccaggtcccatctggagggtggtggagaaccttggtgctttgtcatttgggaagtgtgtccaaaggtaatctgttaatactagtaggtagggtactggtactctttctatacagtaaaacaactttgagttcatttcactcattttgcatttcagttttctttcaagaaagaaaaagaagcctggaattgtcaatcatcctttctgggacttggtaggaaaaaggtggaaaatctgctatagagttatggccctcattacatcttgtgtatttgacataaggaatgtgtgtgtgtgatctttctatttctaacactgtgctgtctaatacagttgtcacaagccacatgaggctcataggcacttgaaatgtgggtagaccacattaggatgtgctataattgtgcacaccacattttgaagacttagtacctaaaaatgtaaaaaaactcattaaataatttttatattgttacatgttgaaacaataatattttagatatgttggattaaaaaatatattaccaaaataaaatttcacctttttttatttttctaatgttgctctgaggatatttaaaattatataaatagcttatattgtatttctgttggacaatactgttccaacaccttacagggtacctgttacagaattaggtactcagaaatttattggaatttatgataaaactgttaaacaggatggactctaatagtattccactagaggcctccctgcaactactttttggtatgagatagtttcaactgtgtcatcttgatcactgtcccttggatatacttagctttgtcaacaactttctgaaaatgtccatctgca

SEQ ID NO: 134135 - DNA, 1049 bp, Homo sapiens
tttttaaacagacagcagaacttttctatccaaatgaatgccgtcccatggaaagtggctgtcctgggaggctacacgtttctccaatggtgatgctgttgctcagaacttgctagaggtctttagggaacctccgtgagagctgcagcacctttttaattttctcggtgtcatcctctgagtatggattttctgtttttaaacagcccaaagtttagaagggtattttctaatgtggctcataaaccaccttttaaggcctttcctcaaacaggagttctaaataagtctccaacaatagtagttttgttggagctaaggatgtaactactttgaggaagaaatgttcgtttagatttctacattctgttatgttggttttattaaaaaaaaaaaaaagacttgcaattttatagtcacactgtgtatgttttttaaaggtgctgccttcccagctgtgctccagtttttctcttctctctctagtttcctcccagctttgtactactgagttgatagttgcccttgcttttagtctttagctaccaaaggaaaggcccttccctcaccatgctcatggtgctagccagtagtaatgctttgtagctggcattacataattagcattgggccttttgaggatccattaccaacatattcggaaatatggattgataaatggatattttgactgagctgcagtatagcttctcctgtagcctcttgttaaaaacagccccgggtgttggggacagcagtagctggaagcagcaaagtgacacttaagtgccaaggcagatcagcagtttctgacagtgagagttcaaggccatgtggtggggaaggaggagtatatgtggcagagtccacataagtggtataggccttggagtcagggcctgaattctaagctcaactctccgtcaagttgccgtatgaatgtgggtaactccttttaacccttggtgtagtgtttcctgtccacagaacaagggagttgggctagatgacgttccaagtctgttacaacttcttggctatggtgtggt

SEQ ID NO: 134136 - DNA, 1036 bp, Homo sapiens
cctcggcctcccaaagtgctggattacaggcatgagccaccgcgcccggctggtctgtatagccttggatgagtactgcccacatcataatcagctggagagcatgggtcaatagggagaaattgtttactgcaatggctaaccttccctcctgcataattttggaatttggggactggggaccataagtttggtaaggtacacatatacttgctatttatgcacagcacacaaaacgggtatgaatttattttaaacaccgaattatattttcaatgtcttagaggaactggttatttgaagaaagcctgtgaagactagtcttctttgaaagaaaagatccttttgtaaggatttatgttcttaatttagtttttaccaaatggacccttttagagaaagaagcatcaggataaagtcccaatcttcagtggtttgtggaagagagaatctgatgattcatgccctcctaccctgttagaattaggacagggaatggcagaccctaaacatacatgtgaactgagcaaagattgcctttgcttcacctattgacacatttaagaacctcgttttatagagagtacggagtggggtctgagattctacatttcttacaagttcctggtttatgccagttctgtttgtctggtcaccacacttctgaatagcaaggtttcagaggactctatgaagtttttatttctcaaaaatttggcttaggtacatctttacatacagtggtgctagatattattctttcagaacttaaccatgcaacaatgcagaagaatacaaaaaatgcttgcacacagtagtgtattttaatggaactataaaagcattgaactgattcctaactttacatataaaggataattaaaccagcagcctaaagcaccttgctctactgttaatggtacttatgagtttataacagtagcttccaaccttggctatgcattagaaacagcattttataaatgattagtcccactgcgtcccatttccacaggattctgattcaatttacctg

SEQ ID NO: 134137 - DNA, 1962 bp, Homo sapiens
catgcagaaggaaggaaatgatgctcaaagaagaaccacctggtgtcaagcagatagctagcgaatggcaaagcagaacctcaatcccagatttcttgactccaaaatatgtagtccaaactgcctgcccttgtcccattccttgagctctatcatgaattggttttatcctgagagtcagatcacattacagggtacttgtttcagtgtctccatttgtgagcaagtatatcacaattcatttcacttttgagcagtttcttacccgaggtagaaatgcaataaccatttcttggtaggtggtgtaggggatagacaggtaaatattaagacacagttcatcatcccccaccttggcaaattacggacacagcccagtagggagtataagggttgtacacagctatcatgcgcttgatcagtgcatgtcttcaaagtgcacttgtacctcagcagagagctaagaagcatgaaggaagtcttcatggaggagatggcactggagctaagtcttcagagtcggcattttggcaggtggagattgggaaaccagaggaacttcactagatgcaaggtcctgttgaagattcaaggtaatgagacacataattgagagggagtgacagcatggggaatttctgagtttgggcagtaatgtgatcagaactgtactccaggaagaagagtagaagaaagaactgagtggagagaagactggagtaggggatacgtaggagggtttgtccctggttaggatgagatgatagcaggacccagaagaggttgcagtaaaaccaagagagacagccgggtgcggtggctcacgcctgtaatcccagcacattgggaggccaaggcgggtggatcacctgaggtcaggagttcgcgagcagcctggccaacatggtgaaaccccgtctatactaaaaatacaaaaagatagccagacgtggtggcaggcgcctgtaatcctagctacttgggaggctgaggcaagagaattgcttgaacccaggaggtggacgttgtagtgagccaagatcacaccattgcactccagcctgggtaacaagagtgaaactccgtctccaaacaaacaaacaaacaaacaaacccacgagggagatcagtgtgaagggcattgccaaagtggaatcagtaaggcttggcagttgaccttgtttgttggagagaagggataagattttaaagctacatgtctgaaagaatgatgctgctgattgaaataaaggaagaaaggatgcatttcgggctccaacctgtcctaggaaggcctagacctcaaacaccatcacctccatgcatttcctctttggctactatgtcttttccctgacttctgcctctccagctctctgggctgctgcttccacctgttcatctgacttagaccctccctgctgggtccttgttcacctactcatttggtgcttcgtctgccatcagtacctccattgcagctggtgggatgtcagtcaccatctcttatatttgcttcccactagaaagatcaagagaagttatttctttcccttgcgctccaatttttctctagacagttggtatccacaattttaaaaaatgttccatgttgtataaacaagcattcgctgagaggggctgttaatacacatcgtgccccttttataaaaattcatgcatggaatcctacattattatgcatcaaaatctccagaaatgtcttaggatttttgcagggagaatattaaatgcattgttttgctttgttttgaagagactagatgtgcagaggaagagaggtggcatggtgggagggtacatttgagttgtcaacagtctctgcagtgtcaggtcaattacatcagcacttggactggaccagggaaaggaatgattctgcttcctgggaatgtcagaaggacctgatgattatatttggcaaagccaggaggagtggct

SEQ ID NO: 134138 - DNA, 1058 bp, Homo sapiens
ctttctgttggactggttcccagagggtcctcttgtttgtccttgccctcgcttttatatcagttcatgttttctcttctgtcatcttccttcccagcgctgtttctccaccccctcctgctgcactcacaacagcttcccctctcctgtttagaggtggaagcatgtaagaatgcgtttgagggggatgcttgccaaaggacagcatattcaacatctggtatcaacaaggtaatgtttaaccttagactagccaaactagtgatgacctgcttccatgctgcatctgctgctttttgtgttgatgggactcagaaatcatgagaaaggtcttcagtgatccatgactgcaacaaattcttttcctaattgtgccgtatattatgcccctcaatacaacttactaatctctgcctcagtttctccatctgtgaaagtggtgtaatacttatctacctcccttgaatgttgtgaagattagtatatgttggtaaagcacttttaaaataaagaatgatataaagcattgaattgttgtgtttgggatgtgggtgccctcctgtagagaggctgccctgtaggggaagtatcccaggtgtaccatggtttaggaacacccagtgtacaaaacttccattacaaatacaagagtgtgattgtttcctttctttcttttttaacttcatctcaggctctactttcagattattttctttatgaaaaatttcaacatggcatttctttaaataggcttttggtgcatttaatatgagattcaatttatagaagtgatttatggaagatttaaaagaacacatctattgaacctctattacccaatataactgttgggtttgcaagctgattattaatctaacagtgaagtttatcatcattaggtggaaaacttggtttctgcattatccagatgtccagattgtatatgaaagttctctcactgtaagtactgattggaatggacagaatgtgatcttgttacttccgaatgagaggatctgcagttccacttctaaaatgcccttacagcacagccagtt

SEQ ID NO: 134139 - DNA, 1114 bp, Homo sapiens
gagggcggccccaggcagggatctgtgtgtgtgtgtgcagagtgcggtgggtgggagacggcgagggggctgggcggggtgagggcaggggagtgaccatgtgctgatgtgctggggagattcttccttaaggcactgggggtctcgggggtgggggtcgtgtggataaagggaacgggttgtcttgaggacgcggtttggcgatgcagagtgactgtgtgtgtgcgcgcgcgcgcgcgtgtgtgttctttgggttctgagatgggatctgggggcttagagtgacctcgggtctgtggatatgagcggggaaagtcccagggcccaggaagtgaccctgtgtttttgtgtgttgtgtgtgaagcctggggctcagttagtcaccctggggtatgcattgaagaggagggatgggtgccctatagcgaaccccatttatgtcttttcaaaggggaggaggcttgggagtcatcatcctgtgtagggtttggatgtagaaagaggaaattaggtctcagggaatgcccttgtgtagcaaggtgtaaccctgggttattaaagtgtggaaagagagaattgggtcccagggaagatgtcgtgcctgtgtgtgtgtgttttgcgggagggcctggattctggcagcagcggggagcaagggagtgacctctcccctctctccaaggccgcttgcccccccacagctgttggaaacaaagagcttgctgaggctttagtggataacactggggaggagggtcccagcagtaaagttcctcttcatttctaaaggggtcccagaggcgcacaaggattatggccctggggcaaagacaggcattcaggtctcattttttgagtggagggtcttcttggagctggcctagcagatgctagtgatcataagccacatccttgctaacttgcccttttatcaattctggagccttctcttgtcttctttaaaccaaggcggagtagggggaggagggaggaacataaggccactgggaatctgccggacaacctttatacttttgggctcttgaaggggcattatttctggaagagtgaggaaggagcaagagagtctcagcgcagatgcttatgctaccct

SEQ ID NO: 134140 - DNA, 1043 bp, Homo sapiens
atgttggccaggctgatcttgaactcctgacctcaggtgatccgcctgcctcggcctcccaaagtgttgagattacaggtgtgagccaatgtgcctggcctatttcgtttttttttttttttgagacggagtctcactctgtcacccaggctggagtgcagtggggtgatctctgctcacagcaagctccgcctcccgggttcgcgccattctcctgcctcagcctccccagtagctgggactacaggcacccgccaccatgcccggctaattttttgtatttttagtagagatggggtttcatcgtgttagccaggatggtctcgatctcctgacctcgtgatctgccagcctcggcctcccaaagtgctgggattacaggcgtgagccaccgcgcccggcctatttcagttttaaaactaaatacagccctcgattccctgtagatattcatttttggttttggaccatcatttcagcctactgtgagctttctggagctgattcggtcaggctgtgcgtgttgggtcactcacaggtttttttcacttgcaaatatgaagagcagttctatggcttcattaaattaatagaagttgtctagattgtgaaaaaggatggaaccctgcgacatattactggagactttctaccaacttggttgatgttgttacgttagtcaaccagatgttcaactagctatgcatcctgttagttgaatttaacagattttcgagcttctgctgttcaacattttcccattttgttcaccagcctattatttaaaagattctttcagattgtcttgttagattgttatgtgtatatatcatcctgtcatcctccctttttccattttagtaatcctgttaaataaaaagcacatgttgtatagcctgccttaataaagagctgatggtggctttctcattttactgtattcgaaaacttatttatccattttagaatttttcagcagttacatagcaggtttacccacagatgtttttctggatctgcattccgccttttttttttttttt

SEQ ID NO: 134141 - DNA, 1035 bp, Homo sapiens
tcttgatgaagatgaagcatagggaattggccctgttgtctcttgatattgcatcttccctaagcaatgggcctttggtttatctcttcttgttctcaacaagacttttttgtttgtttgtttgtttgtttgagacaggatctcattcctgtcgcccaggctggcgtgtagtgacgcaatctcagcttactgcagcctcagcttcttgggctcaggtgattctcagcctcctcagtagttcagactacaggtgcgtgccaccacactcggctaattttttgtgtttttagtagagacagggcttcgccatgatgcccaggctggaacaagacttcttttgttgtcctcttgccccagttctccacttattctggactttagacttattgagattaaaagaaaaacttcgattttatatcttttttatttatgcttatttttttttaaagctaacttaacagaaagttcccagttatccaaagagaaaaaaagcttggaaatacatgacatatgtgaagaaagataaacttgaatttaggagaccaggtaaccttagactgactgactttgtttttcatttgtgaaatgaagatgatgatggtcctttttggctctgggatatttgagaagaacaaatgagactaaccatgtggggcatttctagcttagggaatatggttaaagaggtagaagaacatactgagagaccagtaagtggcatttcgtgatagatataaggtagagaatttgaaatgggttttaactagaagtgggtcctctggattattatatggtggtaggaatggtattaatggacgatataaatgtcagattatgagaagtgccttatttgtggcaattcaggattcttgggaataaaagtgagtttttctaattaatggggaatctcgggcagggcttttatcttctagatccctgttgtgtaaaatgtggatggataataattaatttagcaaaccttgattgaatactgcgtagtgtaatctaatatactggatgttaagggaaatatat

SEQ ID NO: 134142 - DNA, 1112 bp, Homo sapiens
tccaaagtggctgcaccattttacatttctaccagcaatgtttgaagatcctaatttctccagcatcttctccaacacttgttattgtctgtctgtttgattttggccatcctagtgggtgtgaagttatgtatcaatgtcgtttttatttgtattttcctaatggctattgatattaagcatcttttaatgaatgtattggctatctgtatatcttctttggagaaatgtctattcagatcctttgctgggcttgattttgacatcttggagtaatcattcccttagtaaatcatactaatcagttcccacagcaagcacagagatgctcaaatgctaagttggctctcgtttgtcatttgatttttctgcttactaagcaagagtcagttgtatttgttttcaaacttatttataccagtggtaattatgagtataatttaataaatattactcaaatcgatgaaatatgaatacaaaaagttgtttttatgaaatgctttgaaaagacttgataaagacaagaagctgaaagaattgcctctgaacgaattaaattatggttaagacaactgaaacagagtggagaaaccctgtaaacttttggaaggatttcccagaaaacactgcaagtatttttaagcccctgttctacttaaaggaaaggaaaatggacattgtagatctaatggattatgggtgtgatttatctaaggaagtggggaactgtgtttggcagacttacactcaaaaaaaaggtcttggtgctacattgggaaatgaatgtataattatgtatttaagactaaaatggctaaaatagatatcattttaaatggtttctgccttaactgacttttttggttaatagatcaatgatcactcttgtatatgtttgaaaagaggatttccactgtacaaggtgccctgaggaagatacagatgtggtgtcatgggaatgtgtaattctgatttgtaggaatcaaaactggtttcatggagtaagtggcactcaagctgggctgtatggggagagtagaatatcacctagaaacaacagacgcacttttgcctgaggcctttgctgttgatgttcctttggcttggaatct

SEQ ID NO: 134143 - DNA, 1047 bp, Homo sapiens
aatttcattccttttttttgactgaataatatttcattgtctcgataataccacattttgtttatccattcagtatccattcatctgttgatagacatttttttgtttttactttttgactattatgaataatgccaccatggatattcatgtacaagtttttgtgtaaatacattgtttcatatctcttgggtgtatgtattccacctaggagtggaattcctgggtcacgtggtgactccatgtttaacattttgaagatttgccaaactgctgtccatgtaaaactctatgtttaacatttgaggatttgccaaactattgtaaatggttgcagcatttcacattttcatcagctatgtgtgaacattccattttccacatcctcaccaacctttgttattgtcttctttgttataaccaaccatcttcatttaagttcctatttgttatccttcattttccctatatatgtggtttctttaatggaatttaaattctcaatttcttttaagctggattgggagataacttcaacctatttatcccccttcattttttacattgttagaaacattgtcttaacttaactattttctttattcatataattctattattagcttcttgagcatttaggggcttggcatacttctcatgtacttggaaattctatacttaaatctgaaaattctctccgtatatgcttttagtttattaggtaacttaatttattgtaattcctttgctactattcaaattcatctattttttaaaaagtatcatgtattttccatggctcagcagccttgtcattttttcagaagtcatttaaggttctaaagttcttaacgtattcttgtacctttaaaaactttggcaggttattatattttcaaccacagctcaatttctctctctctttttttttttttgcaaatattctgagtctgtcttttccatggattaaaaaagggaaaaaacccacaccttttttctttgttataagagcagtatataatctgtgtagaaaatttgaggaatatg

SEQ ID NO: 134144 - DNA, 1145 bp, Homo sapiens
agtttgttgtaaaactcaattcagaaaaatacagaataatgaagaaagcttaaattctaccgagagataactgtggttcctattttggtgggtataccttccaggtttttaaaataggcattaaaaaaagtttgtgttacatacattttaaaaagcctgactttaaatgtgtcatgtcaggaaatgtagagatttttcatcattaattttaataaccgcaccataacagattcagtttatggtttgccaggctagtgtcagaaccccagagatcagaaacatccatgaggaagagagtgtcacagctctgagatctttggctaggattggcgaggcctggaaagaccctgggagacttaaccactcaactctgtacccaggccttttcttccatctgatcttacagtagtttttctccctgtcaccttgcctggagagtcctgatacaggcatttagaattaaagtaggcagcgggggaagattgcaggagtgggggtggaggattgacaggagcaatgtggtttaacaaagggtagttggcagtagtatgcaaaatggaatgaaaaatattggagtcagacgattgtgtggcatatgtgaaatttctttcgttaagtatagcttagagaagttttagccatctctgcagttgatgctttttaatattaatgtaaactgcttttggttttgtatcataaaatattaggtaaagtttctttttcctcctcatatctttatactagaagataactaatatgattagtaaacaagttgaagaggatttaatttctaatttttctgatttcctgggacttgaagtcaacatttgctaaatctattgcttgattttataccctgaaatgtattttcagtgatttgtgtcattagaggtgcccctcagattggttgggagttgaagtcatatctgggaaaagaaaaaaagtgaatatttgttgtataactacttgttttaggcacgattgcttttgaatacattatctaatcattacaatatcaaaggaaagtattattctaaaaggagaactaccacgtgaacttggcccttcctgatatctaaacttatgcttcgtctgtggtatagcaaactgtctctggggttgtctttgaaatcacattgaggttt

SEQ ID NO: 134145 - DNA, 1145 bp, Homo sapiens; identical to SEQ ID NO: 134144

SEQ ID NO: 134146 - DNA, 1145 bp, Homo sapiens; identical to SEQ ID NO: 134144

SEQ ID NO: 134147 - DNA, 1145 bp, Homo sapiens; identical to SEQ ID NO: 134144

SEQ ID NO: 134148 - DNA, 1015 bp, Homo sapiens
tgatcacccaaaatttattctgcataccaaaataattaagataatttttatctcatttaattaatattactgttaattctcattagccttaaaagtaacttactagaaaaataacctaaaatgttaaataagaaatagtaagattgctaccttaaggccttagaaggcaaaatggaaaaattccacagatttacctttggaaattatgttaagtcctgaaattttgagttctattttgagttacttttaggctcattactatgcaggattctgtttggggaatactgagcattttgtgtcttacagaatttctttttgtatagttatgtcttattacacttctgaatgggggggctcaatacattttaaggactttttcatacacacacacacacgcgcacagacacacacacgtaataaaaagccaaatatatatgtcaaacaatttttttcttttgcagaattaaatgtgagggagtctgacgtaagagtttgtgatgagtcatcatgtaaatatggaggagtctgtaaagaagatggagatggtttgaaatgtgcatgccaatttcaggtgaggaaacccagcctattttgaaaagttttatattcttcgtattttataattctaaattcttcaaattaaaaaacctaaaacaccttgaaccccataaagaaattggggtcacagcccctcagttcttttttgtcagatgatgccctgttatttgtatcttccatactgcttgcatggaattgagaggacagattgacaataatagatgtgacaattctttgaaaaaaatgtcaaatttctatttaaatgtaaggtataattgtcactgaaaggaaagaggtacaggttgaactagagtctcttattttaaatgttggcatctttttccttttcttctccttctagtctgtctctttcccttccattcttatttgttgctgtctcatctcttcaggccacagaacttgactgacttggagactcggggtaagtcaaggttag

SEQ ID NO: 134149 - DNA, 1684 bp, Homo sapiens
caccatggggcccagtcaagttgacatagaaaattaatcatcacaaccttgttattattttctacttgctgtattcagcatagttcctgacacacagtaggtacacaataaatgcttgaatggatgcagttccagagtcgtacactgctccatctttctaaactacttgaaatagctggcaacatcatcacattcttctagctaaagaaaaggtacaggggagagttcttcctcccaacaagggtggcaatatagaggagcagactttaggttagacttagaatccaccatcagtgcataagtcagaaatcgcatgttgttaaaattgtccaaatcccataatttgtccattagcataattagaggcttccaggagagacccatggaaactgagaatgaccaacagcaggtctacttctcccatctcacactcactcctaggtatatgcttgtgagggtgaatttcagagacattaagtcctctgctcagtgtcaccaagtgacagatggcaatacaccactgacttaacttgagtgtgtagtggttaaaatacatcatatgggaggaattgtggctcttccacttattagtgactattggcaaatacttacgactgagaaatgatactagcaatagcaaaatagctaatgtttattgagaatgtaccatggtcagatagaaatgccaaaggtagattatcttatttaatcttcataacaactttgttaggtaggtagtattataatcaccgttgtacaccattgaacatggtgatggtgctagcccatagtcacatggttggtgggcccaggatttgaattcaaacatttttggctttatagccttagctctaagcattcaaccatgtgcttcacatggtttatgatatttaagttaggacacttaaagttgtagactaatgcttcctggataaaaaatgtgaagattctcagccctatcagaattaatgcttcattttaatattcagtttctttactatccttagaagaaattcacggataaattaacctacataaacacatgattaaagaaatgaatttaatgcatgattgcaatgtaaaggagaaataaaagtaatttataataaaataaatatttcagaatgtaaatgcttaggtatgattaccatagaagaaaatacagtcatcagatgtttgtgtctgcttatgataaatgtttggattaaaaaaattaaaagcaggtcgggcgcggtggctcatgcctgtaatcccagcactttgggaggccgaggtgggcggatcacgaggtcaggagttcaagaccatcctggccaacatggtgaaaccccgtctctactaaaaatacaaaaattggctgggcatggtggtgtgtgcctgtaatcccagctacttgggaggctgaggcaggagaattgcatgaacctgggaggcggagatagcagtgagcctagattgcaccactgcactccaacctggcgacagacctagaccctgtctcaaaaaaaaaaaaaaaaaaaaaaaaaaaaaaacaactaaaagcaatttcataccaggagtacatgaaacaaaaatgtagatgtctagtagatgctagaataaaaaccaatattaggataagttataacagatcagactgatttgtagtattaaggaaagtcttgtcaaaattcctacatgaata

SEQ ID NO: 134150 - DNA, 1684 bp, Homo sapiens; identical to SEQ ID NO: 134149

SEQ ID NO: 134151 - DNA, 1684 bp, Homo sapiens; identical to SEQ ID NO: 134149

SEQ ID NO: 134152 - DNA, 1684 bp, Homo sapiens; identical to SEQ ID NO: 134149

SEQ ID NO: 134153 - DNA, 1847 bp, Homo sapiens
aacattgtcttgttagatattaagatttttaggttattgatattataaatttctgttggaaatggctgtaataaatgtttgtctacaagtttctgtcacattgatttctaaatgtgtaattctggatcaaaaactgtattcctttttttaggattcttgaaacatattctttaattatgttaccccaaagtagaaccaaaactggtgtagtgggatgtccacctaattgaattttttaatagccaattttataagttggaaatagcatctcatcttagtggacaaccctgattgctagtgaagatcaataatattttatgcattaactggccatttgtaatttttctgtaaacacttcatgtctgtctttggtcccgtttttattaatttgtatgatctattttttaagtaataataacttgtatcatattgttataacattttccccagattttaaaactttagtcatttatgatatttctaacatgtagatgttttcaggttttcctacatgcaggtccagtgtcatttctcaaacctgtattaccttttttcttcttcacctgtcttatttctactcatctttcagggctcagttcatattccactttctctgaggatgcttttcttgaatacttcagcttacaataataggtattaggcatcacatgcttactgatttggtacatgatctagctttgcagtattggttttttttcctactcgtatgactctctgacaagattgtaaggtttccaagaacagagatcatcctatatttctttgtgtcttctgtaccatttaccttgggactttgcctactagatgttttgaataatgatttttttctatttttatgattaggtttgaatgaataaatgaattttgataataataaaatgctattacataagtagcactctttacattgtcaataatttcctcttattaccttggtggtttttcatagcaagcaaatgaagtagatagagattttcattctcatttttttggatagttggtagttattttccttatgaatgtgaaaaaaggtatgaagaagtagcataattctttttaagccaaaaaaaaaaaaaaaccccagactattcagtagcgaagtatgtcataatgctatggtattgcattcatgaatgtgaaataaactattaatattcatgcctagttctgagaatttatttttgttgcttttgcagtgccatacaaattatattcctgtctgtggatcaaatggggacacttatcaaaatgaatgctttctcagaagggctgcttgtaagcaccagaaagagataacagtaatagcaagaggaccatgctactctggtatgtatgatattcttctgaataaattttggaaaatatggtggaatcatttctaaaagggggttttgagtcagaggtatatttccacaactgctgtgtggattggtggtggttgttgcggggagtaggggaaatcttttttgccctcatttcaggttgttgcttttcaaccccaggtggtcttgtatagacttatgttactccttactacattgttaaggcttaacactctttttatagggacttactttctttgcatgtcctttgccttatgatttgaacagtagacagaatgagctttgaggtggggaatgataggggatctgtcttgatgattttttaaaaagaggtgaggaaggtcgggtgcggtggctcacgcctgtaatcccagcactttgggaggctgaggcgggcagattacgaggtcaggagattgagaccatcctggctaacacagtgaaaccccgtctctactaaaaaatacaaaaaattagctgggt

SEQ ID NO: 134154 - DNA, 1141 bp, Homo sapiens
atgactcactgcagccttgacctcccaggctcaagggatcctcccacctccgtctcctgagtagctgggactacagacacatgccaacatgccaggttcattttttttttgtattttttgtagggacagggttttgccatgttgcccaggctagtcttgaacttgtgagctcaagcaatttgcctgccttggcctctcaaagtgctgggattacaggtgtgagccattgtaccctgatattcatagtttttattggggctcattatgtaagtataatttgatgagttggttgtgtggttaattgaagactctgggtccactaatactgtgacctgtaacccctactctactcttcatgattggtctttctagtgtaaccagccccaaccctaagacttagacgtggcccaacccccaacactaagttccagtgtggtcagcaccctcccttaacaaatatccttctatcaggtatgacgtaggttaccttccggaagcagagggaaaagacgagacctctcttgtaggaaggccaaattctttctatacacactaaaataatcacgtgcttggagaaattattatgtttttagtctagtagactatgatttggtgtggttcttatatacttctttaagtacattgtgtttcacaaaatgatctagaaattaaagaggaatatggaggttctttccagtctcaaattatgtttcacttatgaggagcatatgtctaagacagcaagtgttaacacctaatgttaaacattaggcagcaaagtggtagattgggagcactgtgctagggttacaagacctcgccttaacctaactccaacccttatttactgtgtgaccttggacaaatcactaagcctctctgagccccaattccttaacttgttaagtggatattatctcctggggttgttaaataaggattgaatgagcaaagttataagctgctatattgattttattttctgagtgggcagtgttttatgttatttggtcttttgtggatcctattccttgaactagaaatactattctcttttccttatttgaaaactctttttcttatgcttaaggttggtcttaagccttttctcctctgtgaaatcttccttctgtgacatctc

SEQ ID NO: 134155 - DNA, 1141 bp, Homo sapiens; identical to SEQ ID NO: 134154

SEQ ID NO: 134156 - DNA, 1141 bp, Homo sapiens; identical to SEQ ID NO: 134154

SEQ ID NO: 134157 - DNA, 1141 bp, Homo sapiens; identical to SEQ ID NO: 134154

SEQ ID NO: 134158 - DNA, 1132 bp, Homo sapiens
ccataccttgctttcaagtttttgctcatcaggaattttcatggtacagggttaaaaactccagagggagttgtgcatagaaaaaggaagacttgcccaacaactctcgtggaatttagagtttaatttaaacctttaacaatttcctatctatgtttttgattttattttacaaatatatgaattatttctgttgtttaaaagattaatatttggtaatagcatataatggagtttaaatgatcagaattgagattgactaatctatatcatagtctaatgaggctataattcttaatgagtatgtactgtataccaaataatgtttgagatattatggggtacaccaaagaacacccacttcagtacaattcacacttaatgcaaatggaaactacagttatgatcctttcaaaactgcctgaaacctcactccatacgtctacatttcatagaatcttaaaatttcagagttggaagggactttgaaggtctcctggagaataggagaactgtcctgaggagaaattcaaggatgacagtttcagctaaaaaaaaaaaaaatgattaaagctttcaaacaatagaatttgaagtagatggacatgttcaagcagaagctttataatcaggtgtgaaggatcagataataaattccagatcttagagctggaacagattttaggcgatcatgtagtctagcccctgtggtcaggtattcagttaggaaactgtcattgtcattgttcctatattaaagaagtgagagttgatctcaagatttgcttatataatacaatattgggctgggcgcagtggctcatgcctaaaatcccagaactttgggaagctgagatgggaggatcacttgagcccaggagtttgaaaccagcctgggcaacatagtgagaccctgtctctaccccaaaaaaaaaaaaaaaaacaaaaggccgggcacagtggctcatgcctgtaatcccagcactttgggaggccgaggcgggcggatcacctgaggtcaggagtttgagaccagcctggccaatgtggtgaaaccccgtctctactaaaaatgcaaaaattagccaggcgtggtggtgggcgcctgtaatcccagctactcaggaggctg

SEQ ID NO: 134159 - DNA, 1132 bp, Homo sapiens; identical to SEQ ID NO: 134158

SEQ ID NO: 134160 - DNA, 1132 bp, Homo sapiens; identical to SEQ ID NO: 134158

SEQ ID NO: 134161 - DNA, 1132 bp, Homo sapiens; identical to SEQ ID NO: 134158

SEQ ID NO: 134162 - DNA, 2850 bp, Homo sapiens
ttttttttaaactctgaaattagtttttatgtagttagaaagacaagtatgaaactgatgtgaggaaaaggtgagagttacattcttttgtggtcaggcgcttatctgctgaccagctttgcacaggctgattgcaacaggagggtaatcacaggacttaaatgtattgctcctgtctcttttctttctcccttattcagtgttatatggtaatttttcttaaaaaagcaattcattatcaaacctactgtgtagttctgcctacatagtttaagggatcatttttcagcaccaaaacttgttttcctcacaaaatatgttgtactcagtactggcaacatttttgaacttcaagcattggtagattttggaagtgactgttttcaagagctcaggtacattttcctcagaaacaggataatgactgctgaaaacatgaagcatatctggaaaggatcccaacttttggttgtaaatttgatttttctttttaaacagaagaggaagggtcaggggcagaagttcacagaaaacactccaagtgtggaccctgcaaatataaagctgagtgtgatgaagatgcagaaaatgttgggtgagttggttgaggggaagggacaaagttatttagagattaatcatcagtatgattatattgtggaaaggtatcatttacctggttctgtatcttttgtgtgttttcaaattttttttttgtttaatgctagtctattgacttttaaattgatataatactatggctatttaaatcagtttaagtgttataattttagaatgataatccatttatagttttctggttttatctatgcttttcttcctccctgtagttttatagttttatgtattttataccaagtgcttttctcactcatgttcagccttcattaaggtaggttttgtagctgacagcactgtctgtccaatttcccattcattccctgtaagaaatggtgttcttttttagaacagtaaggctgcagacatttatcaacagtcatgtttgatttttcctttcatcagtattcttatttatttccaatatcattcttctttcattttcctgtggtgctggctttttgcatatttgattctaaaagctttaatgttgactttaggacctgggagcataaatggatcttcttcacttcctcagttttcacttagtatctattttaaaacatttatttccataagatatttgtgctttcttccttacttgtacatatttttggtgtgtattttccagttccgtatttattcagcccgtaactgcatattcgagcctttcactgaacagtaataatatgatctaattagcattaatgtccaaagttagttttgcaaattaagaacactcaattttcagtattatgtacaaaatcagctatttggatggcacttggtaaaattgtattaatttatttggtgcatatttcaaagtgggtgagaactggcaaaagacaagtaagttcaataataaatgaactcaacaaaacctgaatttactgtttctgcatattggtcacatagattgacccatgtccattcatttcattcagagtggtttgatttggaagaacatgttttccaaagcagatactggcctatagaacaatagagaaatgatgagcaatatggacttacagagagaactgataatagatattatgctgtttcttccttttattttgtactaatgatatggcatgatgaaacaccttaatataggtatatgtgtcagtatttttccttagtactcttctgtattagtgttcagagtcaaaatagctgtcagtgattgattggcttgatcaattggtctgtttttattcctttcgcggtgcttctattcatccctattttatacatttttctattatcatttttcatgcctaaatttaaaaagatggaggtcttttgcttagaattgaaacatattccatctagtctcagaagtggctccagatgtgacatctgcataataggctgggtgcaatggctcatgtctgtaatcccagtgctttgggaggcttaggtgggaggaatgcttgaggctgggagttctagacatctacatgataaaatacatatctttatgtaaacacctcctcatagtgtaatatgtagcctattcccaatcagagcaactctgttgtgtttactaaattaattttttgtgtgtctatttatctgagagcttgccaccactattgttgcagataccagctctaagcataaggaagtggacatagaccatggaagggcttaccaatagtaaggagcatgcaggctcttaccagcaggctaaggagcacatagacagtgacaagcagccaacgtcaggcaaggaaattgatgcaacaagaggaaaatacgaaggaagcagttggtatctttatctagaaaaaagtgattaagctaaagtgtttgatccttctatggaaagagacaaaaggaaatgttggtaatatctaatcttttagtctgtaaagcacttgttactgattgcagttgttttaacagtgtaaatgtatctcagtggttatttttttttaacttttaaatgggccatggtaccaagaaagttatatagtggttatgtaactccctcaaagcaccttccatgtgtttttcatggttgctaaccaggtgaatagtgatgtatctaaaggtaatttttacctatccagctgggccgtttaggtctggaaaatggaaagctgcagaaatatgacattagccattaagtcttgatttttatataaaaacctattatttattaagatgttacataatttccttattaaaagataaacttttagttat

SEQ ID NO: 134163 - DNA, 2839 bp, Homo sapiens
acttcatgtaaaaaatacatttgcattgttatccagcactcctgtttatatacacatggtactaataaatattaagtcaaacaaaattctgtggaatagtacttacctttattaaatgcaatgtactctaatattttctatcctactttcttataaaatactggcagtgaaccactaaattgacttcataatccactagtgattatgacctacagtttgaaaagtattgctctatagtaaactataatagatgtgtactgcatgtatttttttaggtgtaagtattcatttaaaattttattgtatgccagctgtggtggcttacatctgtaatctcagaacctttagaaggccaaggcaggaggattgcttgagcctgggagatctaggctgcagtgagccatgattgcgccactgtgctccagcctgggtgacacagcaagaccctgtctccaaaaacaaatgaacaaacaacccagaaaatcaaatgtactttgtcttttctcaatttgaaatgtctttcctgtcagaaaaaatgttatccaacctatctgatttgcaaagagcagctaaaatctttctcttgcttttaaaaattctttctcttgctaatggttgttaaaaaaatctggcattttggtgaggggataagtgataccgtgtaagttaattttctgctattaagagaagtgctttttttaaatttagccatttaaatagaaattgatttaaatacattacatacttctttgccttcttaaacagaatatacagaacatgtttaacatactcttacaattacatatgtagtatattacagttttcagagcattttttacacataatatatttttaagctattctgagcagttctgtttggtagtagagcaaggaagtattatcctgatttttataggtgaaggtgagttcagaaaggctgaatggagaaccagaacataggtctcatgacaaggaatcagtctattgtgttgtgcatgcacatgtagaggcccatgatgtgtggttgtttcactgctgcacttaaggcttcatttagctttgtgttttgggttctatatctgttttttaaaaatgttttcttctctcttgtaaggctgttagctgctgcttctagatgctgtcagtgtgccttggcaatgagtttgactgtagatgccctcaatttttaatttgcttctctgcttccctggaataggaaacaaacactcgcagaaactgtatctaaagtaagaataagttctaaatgtaaaataagagtgtataggttcttctgagtgaagtgcgtgaactttattcattgtatgtgttttatctgtcttgtctgctcaatggctattgtaattcatttataatttaaattatttttgcttctaagaggcttccccctcacccttccttcctgaaactcactgcatttctttgatggcatcgtgggctttgcttgggtttgtgacagttatgttcgttaatgcttacctttcaaatttatacctagaggtgtaggtggttgaggctccaagaaatatgactccccacataagtgggtttcagtatttcactgtgaccactgtgaaacagtgcatagacttcctactgggtcttaaaacttgaaaacagccttcctttacagcaacttgtatttcttaaaccacatattcttagtaccacaccccctcactttctaaacagtatttctaatctgtccaaggccgaagttattgttgtaagatagccatcagctgcttctctggatagtggggacacataatcataggactccttcacttcagtaccttttatatacccgacctaaatccctgcccaggaatggtgtgaggagtctgtagaatcatcaggcctaatgccaatacaggtgagttataaaaatcctccagttattccttttgaactttgtctgcaatgcactttatggaaatagcccctgctcttctgccttttttatgtcagtctcctttttagagatgctgtttccatttatccccctgagtgatataaatatctcagagttgctcagagaatcatacaggtgcagggtatggcagacaacatggataaccagtttaatccacctgctggacatcttagtcatttgtggtaccattttctgttttgatgcagatttctggtcagtactacaatatgacgagtctctccctcagaaggtgcagtgatatcttttctcttgtgtaaacagagtaatgctacacatttgtgtcctgcaatatatcctcctttctggaagcttcatgtactttttaaaacaagaactgaagaagtaccttttctatccttctgtttttatttcctcctaatcagagatggcagtaatttttgtcatttagcactgccttattctggatattttaaaactatttttaggtttagtaagtccctactgtagccccttagattataatggaaaaataattttgtgttgttttttaaaacacaaacattattaagcattattttatccaaagtataatctggatgttagtaatgacaggttcctttatccagaaatatcttctttttttttttttttttttttttttgagacggagttttgctctgtcgcccaggccggagtggagtggcacaatcttggctcactgcaacttccgcctcccgggttcaagcagttctctgcctcagcctcccaaggagctgggattacaggtacctgccaccacgcctggctaatttttgtatttttagtagagatggggtttcaccatcttggccaggctggtcttgaactcctgatctcgtgatccacctgcctcggcctcccaaa

SEQ ID NO: 134164 - DNA, 2839 bp, Homo sapiens; identical to SEQ ID NO: 134163

SEQ ID NO: 134165 - DNA, 2839 bp, Homo sapiens; identical to SEQ ID NO: 134163

SEQ ID NO: 134166 - DNA, 2839 bp, Homo sapiens; identical to SEQ ID NO: 134163

SEQ ID NO: 134167 - DNA, 1102 bp, Homo sapiens
atatagggttaagaaaaaaggaagcaaaagtgtggatgtttttcagtaataataccattcagatgtgcacagtatttgatagatttcaaaggactttttacaaaatcttatttgatcctgtcagcagtgttttgaggtattatccctgttttaaagacttggagttgtgatttgccaaaattatagtgctaaatcatagaaggtattgaatttatgcattcatttatgtatgtatatatgcattcatgccttcgaaatttagtgctgccaattcaaaagcttaaaaaggctctagagtgaaaggtctcacttccacccctgttcccagtcactcagttgccttcactagagacagtcactgtgatctgtttcttgtttaatctcctggggtattttatgtatgtgcaagcagatatgtacatatattcttttatttaaaaaaaaaaaactaatggcatcacactatacccgtagttctgtaccttatttaaaatctttattgtaaaatgtatactgtatacaaaagtgtttaaacatacatgtgcaatttaaggaatacctgttaaaaactacctatgtacctaacacctagggtacaaaatagaatactgctattatttccagtaccttgtgttaacctagccatggaaggaaagggcaatagtgcccacttagagaggaaggcttacggaagacactttgaacagcctctgtggcagggtctggttttcagctcctcagagagtttacaaggttcccttttggggaagtcagtggacaaagccatgagtattggagtcacagggtcatggagaacgtaggctcactatagttgaggcatctgataggattctaatgtctggatcactggtagaaatgtgatcagaatggactgctctgctctgtgttgtttacttataatctccccatagctcatcttcagctgtcaggagtatgtcaattaactgagtgggttgagttgttcttgcagcaggacatggaggggagagcaggaacttcattatcttcatttatttttttttattatactttaagttctggggcacatgtgcacaacgtgcagatttgttacatagtgcat

SEQ ID NO: 134168 - DNA, 1102 bp, Homo sapiens; identical to SEQ ID NO: 134167

SEQ ID NO: 134169 - DNA, 1102 bp, Homo sapiens; identical to SEQ ID NO: 134167

SEQ ID NO: 134170 - DNA, 1102 bp, Homo sapiens; identical to SEQ ID NO: 134167

SEQ ID NO: 134171 - DNA, 1053 bp, Homo sapiens
caggagttggagaccagcctggccaacatggccaaaccctgcctctaccaaaaatataaaaattagccaggcatgatggcatgtgcctgtaatcttagctacttgggaggctgaggcaggcttggacctgggaggcggaggttgcagtgagctgagattgtgccactgcactccagcctgaacgacagagtgagaccgtatctcaaaaaacaaaacaaaactaaactaacaaccacaaagaagaaaatctgttaactttaccagattgctctttgaaattaattttctcttctcctttgcctgatttgaccccctctattctgctactctttttcacattatttcactgcagcttacctgtagccatgagaataatcattctcaaatattgtttttattatattactcctttaaagacaaatatatatttagatttgatatttaatatagtaatttggaatttggagggtattttaacaaccttcttttattttgatatattaaaaaacaatatcttctgtggaaacgagcatgggctctctcaaatgtagcagtgtgtatatagatcaggctatgtttattagtgctagaagcgtgtcatttatttcaaaagtaaaactaatggtatgtgtatatcaagaccctattgagagaatctgaaatactgttctttagtagaaaaaaataggttaaatctttgaaagcccatttctaggggtaatgtcttggaagtttttatgcagaccttgcctcatattgtagggctcaaaaaattttttaaatgaaagtggttattgcatgattttttctcctttatgctgagccttgaggaagaggaactgggaacaaaaaaaacgaagagaaatatggcctttccttggaaaattgagcagggaggttcacaattaatttaatacctcaagttttgtttaagtaatgggaaaagtttttgtacatttgtttaatataaaaagcattgtcactaattttggtaatgggcaagccatgatctttgagcctctgaccttttaggattacatttcttttaagtct

SEQ ID NO: 134172 - DNA, 1053 bp, Homo sapiens; identical to SEQ ID NO: 134171

SEQ ID NO: 134173 - DNA, 1053 bp, Homo sapiens; identical to SEQ ID NO: 134171

SEQ ID NO: 134174 - DNA, 1053 bp, Homo sapiens; identical to SEQ ID NO: 134171

SEQ ID NO: 134175 - DNA, 1051 bp, Homo sapiens
ggtgacatgttttgcaggccatacctacagagttgagtatatttaagaagttaagtatgtgtctaaagtttgatgtggttatcagaaaagttaatgcaatcctgcctgtgtttatgtaagcatagtgtccagaacagttaaggtaatagcttctctgtactgtagtccttgttttgttcttggcctcatattatgagatactgaatttggagggtgatgaggatgatataacaaatgaatcattgaattaacttcaggtgaaaacttatattcaatataatgattatctttgaatctttaaatgatattttgggcttattacatgtagattcagaggccagagttagagtcaatgggtggaaattaattaggatgcatgtttggggctcagcccaggtaataaccactcacccatgagatgtactgccttggtgagatagtaagctgtctattgctacagatgctctggcaggggcaatgtaacaataaggtcacaaatactgctgagaggagccctgcactgagtggaagatcagaatagatggctttctaaagtccttttcagcatggcattctttcaatatttgtttagatacagagatattatgactaaatgtttgtgcacatgttttcacccacgcatagtagattgttgttctctgcatttgtctgcgcccctcccttatccacaacttttacctgaactcaccttctgtgattggctaactttattttctttggttctttcacctcttgttttccagaaattaaatttttggtacaatatatattttttgactttagtgaatattcttatgaactaaaatttttttctgtttccttaatttttaaattataaaatatattcaaaagtgtatgaaaactaaaatatacacatttgattgaatgcgcaaaaatgaaatgagcttttgtgaatctacctcccaaggcaagaaacagaattttttttttttgagacagactctcatgttgccaggctagagtgcattggcgcagtatcagttcactgcaacctccgcctcctgggttc

SEQ ID NO: 134176 - DNA, 1051 bp, Homo sapiens; identical to SEQ ID NO: 134175

SEQ ID NO: 134177 - DNA, 1051 bp, Homo sapiens; identical to SEQ ID NO: 134175

SEQ ID NO: 134178 - DNA, 1051 bp, Homo sapiens; identical to SEQ ID NO: 134175

SEQ ID NO: 134179 - DNA, 1048 bp, Homo sapiens
ttttgtttttgtagttttagtagagatggggtttcaccatgttggccaggatggtctccatctcttgaccttgtgatccacccgcctcggcctcccaaagtgttgggattacaggcgtgagcctctgtgcccggccagaaacagaattttagcagtacagtcgtctgtcagtatttggggggaattcgttctgatactcccctcaaataccaaaatctcaggatgctcaaagccctgcagtcggccctgaggatatggaaggcagactgtacttcagggcctcccatgtctctctctaattgcatctgtctctcacccacatgctatactgcattttgcagaaattattcccttcctttctttatattttatcacatatgataggtcccttaatgatctataatctggcttttgattgcttttgtattttgtataaatggaatcatgctatatgcattcttcttgattttctcgtgcacagcattatgtttttgagattcatttatgttgatgcacatagctgtagttaattcagttttactgcttgttgaatttgattgtttgcctgtaccacattcttttacagtccattttactttcgacgtttggattattccagtcttttgttttcatgaataatactgctgtgaatattctttcacattttctggtatacacgagtaggagatattctttttttttttagacagagttttgctctgtcgcccaggctggagtgcactggctcaatctcagctcatcgcaacctccacctcccaggtttaggtgattttcatgcttcacagcctcctgagtaactgggattacaggtgcctaccaccatgcccggctaatttttgtattttagtagagacagggtttcgccatgttggccaggctggtcttgaacttctgatctcaagtgatccgcctgcctcatcctcccaaagtgctgggattacaggcatgaacctttgagcctggcctgtgtgtaggagattttcaacggccttgccttgttgtgaagttgttgggcgtgtgcaagtct

SEQ ID NO: 134180 - DNA, 1048 bp, Homo sapiens; identical to SEQ ID NO: 134179

SEQ ID NO: 134181 - DNA, 1048 bp, Homo sapiens; identical to SEQ ID NO: 134179

SEQ ID NO: 134182 - DNA, 1048 bp, Homo sapiens; identical to SEQ ID NO: 134179

SEQ ID NO: 134183 - DNA, 1081 bp, Homo sapiens
gcaccagccggccttgccaagtgcccacccgtgcctccccctccccacctccccgctagcagagggagctggctccggccttggccagccccagagaggggcccccacagtgcagtggcagactgaagggctcctcaagcagggccagagcggatgtcgaggccaaggaggtgctgagagcgggtgagggctgctagcacgttgtcacctctcactaccagcagaggatgagaattcccttagcttctcatccttgccagtacttgggttttgtccttgtttttgacttttgccaatttcgtgagtgtggatggtatctcattgtgattttaattttaagttttctgattcttaatgaggttgaatatcttttcacatatgttgttcttatatgtttcctcttttatttctatttttttgctcccctttcccattgatcacatatattatttaaaaaattgatttgtatttgtgtattctggatactacttatttgttgattatgtgggctatgtttatctttttgtttgtaacttgtcttcttattctctttatggggcattgtttatttcaaattcctcagtcttacgtttgatctcctaaatctttatagtttttgactttcacatttaggtcttcaattcattatgaattaaggaaatcatcaaacagaaaaggagaaaaatgatggacctctacccatttattcatcttcaaaagtctaattctgttacctttttttgggaagtatttaaagcaaatcccagcatcaagtcaccttacctgttaagatttcagttttgctgatattttttctgcttggtatatgagttgctgagagaggtgtgttaaaccctatcatggtggatttggcaatttcattttttttttttttctttctttctttcttttttttttttttttgagatggagtcttacactgttgcccaggctggagtgcagtggcgctatcttggctcaccacaacttctgcctcccaagttcgagtgattctcctgcctcagcttcccaagtagctgggattacaggtgcctgccactacacccaactaattttttgt

SEQ ID NO: 134184 - DNA, 1081 bp, Homo sapiens; identical to SEQ ID NO: 134183

SEQ ID NO: 134185 - DNA, 1081 bp, Homo sapiens; identical to SEQ ID NO: 134183

SEQ ID NO: 134186 - DNA, 1081 bp, Homo sapiens; identical to SEQ ID NO: 134183

SEQ ID NO: 134187 - DNA, 1844 bp, Homo sapiens
attttttaaccttcccagttatttggcaaggtaggttatttatttatttaagacagggtctcactctgtcccccaggctggagtacagtggtgcaattatggctcactgcggcctcaacctcctgggcttaagtgatcctcctgcctcagccttccaagtagtggagaccacaggtacacaccactgtgcctggctaagttttttattttttgtagagatggggtcttgctttgtttcctaggctggtctcaaactcctgggctcaagtgattctcctaccttggcctcccgaagtgttgggattacagtcatgagccatcatgcctggccattattattacctccattttactgatcagtaaactaagacttagaggaagaatttggatacaaatctggtaataactaggggtagaatttagatttgtgactattgactcataattctgtgtcctttacaatgtgccattttgctatttaattaatgtcattgatatttgacatctcctgattactttatctagatatgaaaattccagagaaaccactggattcataatatcttgatgaaattatctctaaatcctcacctaaaatttttttaggtatttactttgcttaagctttcatcagtgacttaaaacaatatattgacttctgttacagaaagcagaagaaagaattggtcttttttgctgttgcagcattgtgaaatatttttgttgtaaaatataggtaatttttgtcttttccaacaggtgtgtatgtaatatagattgcagtggatacagttttaatcctgtgtgtgcttctgatgggagttcctataacaatccctgttttgttcgagaagcatcttgtataaagcaagaacaaattgatataaggcatcttggtcattgcacaggtaaaatccattttatttattcagagacccatctttattattgtataaatgtaatcttatttgtacatttggtagtgtttcaaatttgtaaaatgagaaatcctcgaagctttatttttttattactttatatttcagattttttattactaatttagttttttttcattattttcatcttctcaagacataaaccatgcttcttggttttttatttagttagttcttggttgctagctgatcctaacatggaattataattattatttatagttctaatatcatctcaaatttggaatgattatagctatttaagagttagataacttattttaatttcagtaaaactatgttattgccatatatttgttaaacctctttttatagagcataatagtttactttgtttttccattatctgtatcattttccctgtacatattatgtatgatacagattttggtgtgaagttagagaatgtaaggaaaaattattgcctttagcttaaaattcttttcacccttcttgctttttgttatagcttagaaaccatgataccatataagaaagagtttttgttttccacccctactagaaatattcagtctctaaagccagagttcccaattttctttccccagtaatattcagatgagttgggaagatggattatttcctcagtcacatatgtggaccaggcacactctcatggactaggattgtatatctttcttgcttactggttcccttcttcctccctttttagacttattaaagggatattatgtttttatctgagctaaagggaaaaggttgtaagccaaaatttggtacattatattggtaacaaattatttgtgacacactacacaattgattgcagtacctctggtctaaactaccaaagaatacccaggaagctcatcagacaatttt

SEQ ID NO: 134188 - DNA, 3173 bp, Homo sapiens
agcgagagggaaatctgccccccatgatccagtcaccttccacaaggccccttttccaacgttggggattacaattagacacggcatttgggcagggacacagaaccaaaccatatcagtcaagtttgagagtttaattgaaatgcatcctttagagtgattgggccttaagttttgtcttagtcccctctgtaatttttcattcacaaacctaactatgtctttcgtttgcctcctccactagtactgggaagcttgtgcttctaaacacgtggttatggctcatttatagtcttcccagtccaggtgcagttctcaaatcaggggtcattttttatagtaagtgtttcataacacagcagagattccccatttatcttaatctgatatttccagggtaacagtggtaggagaaggtaaatcttgaggcagttgtcttttagagaaagaaaggtttaaccctttcttctcagagtaggtgttgttttagtttgcataggaaagagtttttaaaggaggcgacattggagctgaagtatagatgaaattggctattcatcatgcaaagagcacttatacctaggatgcctagaggcctaagacagaaatgacataattgatttagagaatggtagacaacatgagcaggataagggggcagaggttaagaagaacttggaataatttggaattattgggagtatcatgatatgacttaaccattgtatatattttaatttgaaaaccgtcttctcttacagatacagatgacactagtttgttgggaaagaaagatgatggactacaatatcgaccagatgtgaaaggtactgaatcatgcatctccaaattttggccagctatggaaatacggtcactagctgtccttattagttctgtttccattataacaacacctctaactttgctctctatagtaatatacctaacacagttaattattagtattaatagtaacagaaacagctgaagttcatctcattttataaggtactctcatatgtgctttctttgattaaagtctgtattgagataattttagatgtacatgcacttgtaagaagttatacagaaagatctctcaatatgttttataaaaatcctctttactcctctagaatctcctgttaacacttgcccgatgcccaggtctttgaaccttgttcctttgcctgaaactctttatttcctttcctgattaattccttcttatccttttaatcttagcttggaagtcattttattttgggaaatatcccttgaatctgaagtctatattagatgcctttcctgtatactcccctctctgaacacttagcccactctattataactgcctttttattcatctgtaacctcctctaggctatgagttctgtgaggagaggagaacctgtctgtcatgttcactctgtatccctaaccctagccgaatatctggtacataagtaggtactctgtgcttgtctaaagagtggatgtggctcaaagaagcagtaggttttatttacacaaggtctcatgtagtaaaggttggagcagaggctggattccaggtcccttgacttcaaggccactgctctttttgcttgttttcacatccattattttgtttgattcttataactgctctttgataggtaaggaccaatgggaagattgaggatcaatgaggttgtatctggttaactgaaacaggtctatatctttggccttctaggccaggacctctatataattgctgaattacaagtgcatcatctatccatttgtttggttgcaccattaaaagatatgtgatctatcttttatacctaatttctaaacaatatgtaaaatgggagtgataatagtacctgtttcctagagtttcataaaaactaaatgagataatatatgttaagtgctttgaacagtatcggatatacttgtaagtgttcaacaaatggtagctgttatcattgagtaatttgttacttctcttacttgaatcatatgaaacctgagttagttataacccatgagctgctgaaatatgtctcctatgttgaaacaaaatgctgtatttaaaatagaaaatttcctgtattctcgtaggagacaaaataggtcagcttcagttttattcactatattgatagtacttgactagaataggaaggccatttttcagtatttggaagctcatacttagggcagtttggggaattgtgtgttctaaagcacttgtgtgccattgataatggataatttagagcctaggccacttttgagatactgaaaatgttttacacataagaattgatctctaatttaaatgaaattatcatagtagaaataatttattatgtacctaatttatactggtcattttactgtttgtagttaggaagatatctaaaatatatgcatctttaaagttcttgtgatgtagtaaatgcagataaccaacttctaacaaagtagaaattgattattgctataagtgtatacagtttaaaagtgcaatgggaattcagaaaagttgagattaatttttggtggggaacagtgggaatctgtgaaatgtcttggaagaagtggaacttgagtgaaccatgaaggacgaacaggagtcagaaggatatctaaggaggataggagagcatgagcatagatatgcacacaatgttatgacaggatgtgttggagaaaggtaaggaatcctttgggctggagaataggaggcttaagaggtagaagtagaaggcaagactagaaagacagcttggggccagattgtgtagagtgttgaatgctatgctactctagggaatttagactttatttgtgggcagtggggaatcattaatatatttgaaaaaagcaaggctacaaagttaaccatttgaaagaatgatacctggcaggaatattgtgcatattgtatacattggaatggaggcagggatatcagttaggtaaagtcaaaaggaatagacatcttagatatgagagatagagagttaaaaatgacttaagtcttcaagctcagatgacttagatgatgaattctgttcacagaactaaggatattaggtaggtaaaggtgtttggaataaagtaagggaggagttgatggtggagatgattgattgtattttagagtttga

SEQ ID NO: 134189 - DNA, 2463 bp, Homo sapiens
aaaggtgtttctctgggcacagtgggcaggctaggaaaggaggaatcagggctggtgtggaggacagtggggtttagaattgggagagtgggaggcattggagtgcgggtaggagtttatatagtggaagataattccttaatggagtccaagcagatggtggttagggaaggatgtgtggagggatatgttagtggcgaaggctggggaggtgcagggtagtataggggaagcaagacagaatattttgaattttttaactgtagagatttatagaaataatgagccctagggttactgatgcagtgttgatatagttgtggcctcagtggtttaccttccagatacatgtctccattgctaatagcaactcctcatgctttattttggttgtacactgttggaccaggacagatagccagtggaacaagcctttgcagataagccatctggtactgggttttttcataacatcatcccttagaaccacaactatcctttgtatttgaaaacactgcagctggtggtggatttgtttctgaatgcctctgtgggtgaaaggagccatttggtgaccaagtatactttttatattgtacacacagacacacacacacacacacacacacacacacacgcacacacattgttgcagttgcaacagactagcagttgcagttgttgttcttggagcctgtcaccacttagctaagggcttgtttaggcaggatcattctgtgctcagttcttactgtgtgcaggtgacatctctgctgttgtttccgaaaccatgttatgttacatcttttgaggctttttatctttcctttttgaagttggctaatttacttggcctggagagcaggtgcttggccattctgctttttatctgtttcctacacatctcctaggatagcttggagaaataatactgtaatggctaagagcttgctctctggagtcagacttggtctatatctaatagctgtgcgtgttgatttctgtgagcctcactgatcacatctgtaattagggacagtaatatctactacctaagatcactatgaatattaaacactatgttactgagttcattatcagtgttattatggttatttttaatacttttgtttcctagtttcatgttgagtaacctggctgtgctcaacagtctcaccattggtgagatagttatctgtcttgttatttaatattatggttcataagtgacatcagtaggatattctttcatttaatagttattaattgagtgccctactatgtgccaggtgctttcacatatttatgttatttagtcctcataacaaccaagtttaccctcattttgcagatgaagaaactgaagctgcaggagttttgcccatatagaatggcagaacagcgactggaattcagcctttctgaccctaagtgctgctccttccctttgtaccatgattctagaattcttttctgcttccttgctttcttaattaccttcagatatttaatcccctctgagctattactttggtgaaccttaacacttgttctcgagcctggatcttttttcaagcactggtttcacatattcagttgcctggtgggtccttgtacttacttgtttgttttgccattgcttcaaacttctggaactaccatagtgcctggaacgtaatagatgcttaaaaaatactttttgaatgactggagatctaaacttgatctcagcttactacattttctcttcggaacccccatcattaggctcacatttggagtcatttttacataattctgtattacaagcatcttcaataaagaggacagtttggttctactaaactcttaaatgtgcggggttagtgctgggtaccactcttcaagatagttgtaaattgtttgagtaggggtgggactggggaaatctgagcttaaaaataaaggattggttaatagaggggagagggtaaacagatgtggggaagtctacaccaagttgaagcgaggtttcattcaacataaagaaaatctgatggtattagaataaactgtattatgagttctggaagtgttcaagtagacataggctctgagagttataaaactaaagagattcctttatcaaaccagatggcctccaaggacccttccagatctgagtttctgagctcattcactttccaaaacatcttcaaaccatttttattttttctgtgtgtctagtatctactcctattgctgagatttagcttagcttcttgttgccacaagtttggattatgtactaaccttcttatttttttgagacacagtctcgctctgtcacctaggctggagtgcagtggtgcgatctcagctcactgcaaccttccacctcctgggttcaagtgattcttgtgcctcagcctcctgagtagctcggcttacaggtgtgcaccccattcccagttaatggattat

SEQ ID NO: 134190 - DNA, 2463 bp, Homo sapiens; identical to SEQ ID NO: 134189

SEQ ID NO: 134191 - DNA, 2463 bp, Homo sapiens; identical to SEQ ID NO: 134189

SEQ ID NO: 134192 - DNA, 2463 bp, Homo sapiens; identical to SEQ ID NO: 134189

SEQ ID NO: 134193 - DNA, 1072 bp, Homo sapiens
gtctcacctagaattcaaatttttccataatctagttttagcctacttttccaactttgacatatacccttcgccagtctgaatgtatcactctacctgggttgctactgtttattcttgagaatgccatgtgcattataccttccctttgccttccaccattcctctgtctaaatctatttatgctctgagtcttaacttaagtcctaccctatcaataaatcctttagcctacagtgaattctcctttcaatttgaacttccatagcacctagtgttataaaaccatcttttgccgtttaattgtaaactgccacatgggaccccttccccttgtgttattcagcttttcatgtgtatatgctgattttctaaattgactataagcttcttgagggcaaggaccatgcatgctttttttttttttttaatatcctctgtagcttagctgagcatgtagctatgtccagaaatagtatgtacgtttaatgggatgaataaagttggcattgagcggaatattagactctgtgaattcggacgttgtcacaggattcaaagccttattagacatgttcatgttttatatagcctcactttgcctacagcttgataccacattctttcattaattcattcagtatatgtttattggtgccatacttttcttattaatttctcaaaaccttgtttttaatttggttaacttcctctgactgctttcacctagctgagttctcttatagctttcagctctgcattattcttgaaattccttgctgtttaaagaacttcttatggtagattagtacattaccacagcctctacagacctgcaccgtcctattactaggactctatccttataggactttattatcataggttggtgcataacgttattctctatagtcccattgttataccctttcatgaccatgttctgagaaatgctatgggagatgaccactttcctcaattcacttatggcctgattgggaatgtagagtggcatttttagtttgaaactgtagcaagaaaagtatatttgatctcagttatttggcttctg

SEQ ID NO: 134194 - DNA, 1072 bp, Homo sapiens; identical to SEQ ID NO: 134193

SEQ ID NO: 134195 - DNA, 1072 bp, Homo sapiens; identical to SEQ ID NO: 134193

SEQ ID NO: 134196 - DNA, 1072 bp, Homo sapiens; identical to SEQ ID NO: 134193

SEQ ID NO: 134197 - DNA, 1331 bp, Homo sapiens
aatctgattttgaagaccaagttcctatgttttcatctttcctgacctgttccatctctccttcctgactctcttcattttcttcacttcagttcagttcaaatcattatacttaagtctgagcagatgttcatcaacatgttgacagtgttttatttttggagagcgaaatctcaggttattttgaatttcttttttaacctctgtattacttgaatttttaaaataatgaccatatactaagaaaaactatatgaaaagagcagcaaagctattttcacttgggaaaaaaatcaatgtgcttgataattttcattccaaaaataaacctttaaccctaaaatttcagagtcccttaatttgctctctgtcattcagtgttctttggcctcaatttcatagccctcaaataaatgattaagttcattccccaaaagccaattctatgtacaccatctgtctgtcacagaggtgaactttcttttagagcatttatttctttagcaaaggtgtttagttttctttgccagattgtttttaaacaacagtaactcctagcagtcacattctgcaaatatttttaaatgctttgaatctaaacagtttacctgctgtgtttatggcataataggaattagaagagaccctggatcttatctaaccccctatctgataaattttcttttcaaattgccagtaggtggttgacagtgggtgaattcatttgctgtttcagaacatttgaaaagtccttatttttcagcttgcgtttcattgttgaacgatctggtttatgttcttttaagatgctagtgatcaaagagaagatgtttatattggaaaccacatgccttgccctgaaaacctcaatggttactgcatccatggaaaatgtgaattcatctattctactcagaaggcttcttgtaggtaagtcagcgcttccagatcagtggtgagcattttttttcatcaatggttgttgctctatagaagggaatgaaatgtagactaaatattaccagaaagtagtgtttatttgcagtagacaagtaaaaaacaaatcagcagcatcatttggaaaaaaaaactggcaagtaatatgcagaaaacaaaaatcttttttttttttagggcttaacattttaaatataatactatacatttttaatacaaaaaataaatgtgccacattccaacactattttggtttttaggcaatctgtcacaaggtggctgagggactaaagactgtattaagaacagagaacatgtaactcaaataaaatatgtgctaaaatagatttctaaaaataaggggatggggacga

SEQ ID NO: 134198 - DNA, 1011 bp, Homo sapiens
tttgcatagcagtaaacaggcaaggataaacagcctttagccacagtcctattgttaggttaaaatcttctagcattatggtaccactgatttttcgttttgtttttgttttgagatgaagtcttgatctgtcacccagactggagtgcagtggagcaatctcggctcactgcaacctccacctcccaggttcaagcgattctcttgcctcagcctcccaagtagctgggattacaggtgtgtgccaccatgcctggctaatttttctatttttagtagagacagggttttgccatgttggccaggctagtctcgaactcctgacctcaggtgatccacctgcctcagcctcccaaagtgctgggattacaggcatgagccaccgcacctggcctgatttattttttgattgattgattggttgattgacttattaatgccaaattctccctgatattggggtgtcaaattcaactatgacagagatccagggatcttgcctttaaaaagcatacaacctggtgaaagagaccgacaaataagtaattataatatggaaaatgctatcatacacagctatacatgaggcgatttgggacttcagaaaaggcacatcagcctgaagatgggtgggggacattgttggaggaagggtcaggtcttacaggaacatttgggccatcccaggagcttggcttttattttaaaggcagtgagagacgattagaggattttaagtagcaatgatgagatcaaatctgaaagccactctggtgacattgtggaaagtagattagaaaatttaggagacttagtaagaagtaagggcctgaattaagtataaaggagttgtgaggctgagaaaataaatggattgcagagagatcattaggtggttgaactcacagatgttggtgaccgacctgttaggttggatatgagcacgagaacctggggattggtggaggttagtgggattaagagtcaggagagtctcctggctttctggct

SEQ ID NO: 134199 - DNA, 1011 bp, Homo sapiens; identical to SEQ ID NO: 134198

SEQ ID NO: 134200 - DNA, 1011 bp, Homo sapiens; identical to SEQ ID NO: 134198

SEQ ID NO: 134201 - DNA, 1011 bp, Homo sapiens; identical to SEQ ID NO: 134198

SEQ ID NO: 134202 - DNA, 1846 bp, Homo sapiens
gttttcactgctaataaagacatacccaagactgggcaatttacaaaataaagggtttaattggacttacagttccacgtggctggggaggcctcacaatcatgggggaaggcaaagaggagcaagtcacatcttacctggatggcagccagtaaagagagggcctgtgcagcaaaactccagtttttaaaaccatcagatctcgtgagactcatttactgtcacaagaacagtgcaggaaagacctgcccccataattcaatcacctcccactgggttcctcccacgacacatgggagttgtgggagttactattcaagatgggattggggtagggcacagccaaaccatatcagatagtataaccaaaagtcagttggagaaaatgatatccagggagaactgcagggatgatatatggcctattggttctttttgatactctgattttaatctttggcttaagccaaaccattagagagctgcatatctaggacattgttacagctccttatggaactgtttttatattactgagctttgactattggccattagcctaccatgaaggacattatttaaaaaatcccatgagacttcattatatcattgaatttactgcagctgtgttgttgaggataatgttctttatgttagaaggtgccctctttaaatgaggaccaatgagattaagttcccttaagtttcataacagtaataactgtgcttcttttgaatgacttgtttgattttattttatggagattgtattttgtgtcaactgtcctccctccctccttccttccctccctctcttccttccttccttctccattggtgtttaatatatgcacagagttgtgcaaccatcaccacaatcaattttagtacattttcatctcctcaagaggacacctcataccctttagcttttactcccaaatcccctcatgctctctagctctaggcatccgctaatttattttctatctctatagacttacctattctggatagttcatgtaaattgaactatatagtatggggtctcctgtgtctagctttttttaacttagcgtaatattttccaggttcatccatgtcataacacatatcagtacttcattcctttttgtggctgaatactattccattgtatggatgacaccacatgtttttaatctactcatcatcagttgatgaaaatttaggttctttccactttatggttattatgaaaaatgctgctctgaatgatcatttgcaagtttttgtgtgaacgtgttttaatttcacttgggtaaagcttagtggtagaattgctgggccaaatggtaaccctgtgtttaacattttgaggagctgccagaccgttttccaaagtggctgcaccattttacacaccctacagtacctttgacaacacttgtaattatctgactttttgatttaggctatcgtagtaactgtaaaaactggcatatacggtggctttgatttttatttccatgatggctaatgatgttgagcatcttttcatgtgcttattggctatttgtatatcttctctggagaaatgtcagtacacatcctttgctcttttattttttggctattattgagttgtattagttatttatatattctagatataagtcccttatcagatatatggaacttactttttttttccattttgtggcttgtcttttcactttcttgataatgtccttaagtacaaaagattttaattttgatttagtgctatttatcttttttgttgttgttgttgcttttgatttttggtgtcatatctaagaaactgttgcctaatctaaggtcacaa

SEQ ID NO: 134203 - DNA, 1846 bp, Homo sapiens; identical to SEQ ID NO: 134202

SEQ ID NO: 134204 - DNA, 1846 bp, Homo sapiens; identical to SEQ ID NO: 134202

SEQ ID NO: 134205 - DNA, 1846 bp, Homo sapiens; identical to SEQ ID NO: 134202

SEQ ID NO: 134206 - DNA, 1051 bp, Homo sapiens
tgcccaccactcacctcctgctgtgtggcctggttcctaacaggccatggaccaatatctgtccatggcccgggagttgggggggatccctgttgtacatgataaatatacgtaattttatttgtcaatttttaagcaaatttaatttaaaaagtgaaaaaaaggagtaaatctttgtggctttagattaggcaataatttcttagatatgacaccaaaagcaaaagcaacaataacaaaaaaagatatacattaacaatattcagcaactttaaaattaatgtgatataacttaggtgaaagacgcaccatgtaggcatatcagaaagacagtagggaaacatacaaatgacatttttcccccagatggtaggaaagtgcatgatatcctattcctgtttaaattttattactattttgtattttttaatgtaaaagcttgggagtatcaaaatttgtaattttcataggaatatatatatttttccttttcagatgtgaatctggctacactggacagcactgtgaaaagacagactttagtattctctatgtagtgccaagtaggcaaaagctcactcatgttcttattgcagcaattattggagctgtacagattgccatcatagtagcaattgtaatgtgcataacaaggtaggtaatgatgtaagaaatatcaactttaaattagaggcaggcaactgtttatttatagatgctttgaggccaccagtctattaggaaaaatcttatgatcagttccctgaggttttcagtggtctctccctatccttcttctttaggatacgggcagggactaattcccagtcttacaggtatatctgggcgacaagcagagagggaatgagaatagtcaatgagataaaggaatttagggatctgagaactgtatacagtctttgaacactgtattctgggaaaataatgttagtagcaatcttttttttttttttttaagagacagggcctcactctgttgcccaggctggagtgcagtagcaattagagctcattgcagcctcaaattcct

SEQ ID NO: 134207 - DNA, 1048 bp, Homo sapiens
tataaataaaattattcgtcataaattaaatgacttatttggagtgcagtggcataaaatgggtcttttctaaactgagtagaaatacataagtcagactgaactgggcctgagaaaagtcagagtaaatccagcaagttcgtgttgtctttgtgcttcccagtctaatgcttttcttcctgcttacctctttctttaagcttcagttcagaagtctcataagcatcatttctccacttccctgcattattctgggcagagggttgaagcatatcaaatacagatattggcaggccataatggatttgtggcccttctatccaaggtctggatagaagccagaccttcagtagtctcagccatctggagctgagatgataaatctagaaatgataaaaaagaaaaggttctccaagtaacagatatttttcataacacctaggcatgaaagtcagtgcgctttatttcacagaacagatgatctgcccttaggcaagactactgaatataaaattggacggtagatcaaagtagggacataatcatgtaacaaataatgataacagaaagagaagatagggaaaacacatttaacagcatgactggctgtagccatttaatatagactcagaggttaagtaatttgtctgtggtcatccgactagtaagtggaattgtctggatttggattcagtttgattcccattcattctttacactgaaaggttccatgttgagtcatcttgggaaacatgtttgcccagtatgaccattgcatgggagcagggttcaaacttgattttgtagcagtttagggtttttgagcaggggaaggacttggtataaaccatatttttcagagtattaatgagtcatctgaaaaattcattggagtagtgaacatatgaggtagggggaagaccatttaagtcattattagagttaaataggagtgaggtaatgaatgatttggaaggcagaaggaaaattaaggtaaagtaaggggagatgtttgaggcctggagatagtgcctttatttgagacagg

SEQ ID NO: 134208 - DNA, 1048 bp, Homo sapiens; identical to SEQ ID NO: 134207

SEQ ID NO: 134209 - DNA, 1048 bp, Homo sapiens; identical to SEQ ID NO: 134207

SEQ ID NO: 134210 - DNA, 1048 bp, Homo sapiens; identical to SEQ ID NO: 134207

SEQ ID NO: 134211 - DNA, 3114 bp, Homo sapiens
cttgctggcagagattttggaagctagtccaactcctaatttattttttacatataggagaattgaggttgcacagttagttattagcagagcccagaattcgtcttagcccccttactccacattgcatagcacagcatcttgtgtttgcaatctagtgtgcaggcacaagagcagttccaacccagtgagatttgtactgctgttgagaaacgtggtaaaatgagagcagagttaaagaatgtcccttatcctcagtgtggcagttccttatgggcttctgtggtttgccccaggagggtgtggacagcttcttttgagtcattgtctaaaatcagtagacattcctatgtattcatagctgaggttaataagcacacttcttcctgatttctcccttcatctaagctcttcttgtcattttagagctgtcttctcataatgcacagggaaagtacataggccagagtcctttctcctgtcaggggtttcatgttatcagtcactgtgactagggagtttctaggctggaggaagggtgggatatctgtcagggatgcatacatagtagcatagacactggtaatgagttttgcttgtgccagtacctatattacatatctaatcctctcaacttccaggtttgtagaggaggtagcagtctgaattgtgttcatcttcatcttgtcttgcaacagataccatctcatttccctttcatgtaattgcttgcaatgtggctttatgtgcaaaatgtgtattactttggaaacatttgaaatatcctgaacaaaatcatcaaaacaatatttttctctctttctttttttaatgcaacagaaaatgccccaaaaacaatagaggacgtcgacagaagcaaaacctaggtcattttacttcagatacgtcatccagaatggtttaaactgatgacttttatatgtacactgaccatgtgatgtacatttattatgtctttttttaaagaatggaaatatttatttcagaggccttatttttggacatttttagtgtagtactgttggctcgtatttagaatattcagctacgacagttttggactgtttagtagtctttgttttatgtttttaaatacagaaattgctttcacaaatttgtaccacatggtaattctaagacttgttctttacccatggaatgtaatatttttgcaaagatggactacttcacaaatggttataaagtcatatccacttcttccacaatgaccacagcaaatgaccaagcatgaactaaaggtaaagatgtttacagattacttttcttacaaaaaaaatctagaagacactgtgtttaaatagatatttaaatgtttttgagatttagtaactgattttttagacactgcctatcgcatgaactgtaaagctgtgtgtattaggtgtaaaatatttataagatatatggactggggaatttgattattcctccctttgaaaaaatagtcctaataatttgaacaaatatgttagtaatgatggaacagatcaatgaaaagtagatatagatattgtgaaaataggctgtttaacaaacagattggaataaagcctattctaccagttaaactactttaatacacattcatttttaaagaaaatgtttgttttaacataaataaacaaatcgtatcagtgtttgtgaataaaatacaaaaatgattgttaatgattggtgctcttaaagtgagcttaaaatttatccaagacgtatatccaaatttgtcctgtagtaatagattaatattcatagattgttggtgtttaaagatctgaagtgtgagtagaatgtattcagctgtttaacatgtagtttagatattcaaaagtatgcatgtagaatttaaagaatatgttaaaaattattaattttaatattttgtttggaaaagcatgttataatataatgttttcactatatggcctctgttttggtgtgtttatttaccaaattttttgatattggtgtttcagtatatttaatatgtgaaattagtagaaaaagcagatttcggttcagaattcccctttactgttacaaatactgattgaaattatctaaaggcaaaagctttacccaacatttggagtttgcttttttgatcatttggcttctaggtttaatattagttacatggtggctttagtgaacttttttaaaaagctttactcttctacccacacagtcttatttgagtcccttagtcagtcagcaagcatgtttggaacagtccccggtgctttgcaagggttcagattgcagaacagtcacatatgggtatttgtagttataaatacttgaccgttctctaggggtggggtttccaactctttaaacaaccctgttgcctgttatcaagctgactttttgctccaagtgccagaattgattgtggttaggacatcttacgctgagaaataaataaaatggaacataatgggtctgcttcaaatgctgataaaatccaccagaatcgcctgtcgagtgttacagaagatgaagaccaagacgctgctcttaccattgtgactgtgctggacaaagtagcctccatcgtggacagtgtgcaggcaagccagaagagaatagaagagagacacagggaaatggaaaatgccataaaatccgtccagattgacctgttgaagctttcacagtcgcatagcaatacagggcatatcattaacaaattgtttgagaaaacccgaaaagttagtgctcacattaaagatgtgaaagcccgggtggagaagcaacaaattcatgttaaaaaagttgaagtcaagcaagaggaaataatgaagaaaaacaaattccgcgtggtaatattccaggtaagcttgcacttgtgttcagcttgcttgttctaatctcttgcatcttttaattgccaaaagtcatatcagaggtttccagtgtcacatcttaactattgtatatattaatacaatggagttctgtattagcagcaatctcaggataaaaccatttctctgttaaccaaagtactatctgtcatttcggtattttgagcttctcaaccatttcatgtaatatgaactgtggctcata

SEQ ID NO: 134212 - DNA, 1692 bp, Homo sapiens
tgctgagaacttttgtgcaaagcagtggactaagtgccaattaagatttacaaaagcaagagcaaagaagtttctgaaaagtttccattgactctgttgattgacataactcttctttaaactttaagatgtttctgtattcacctgtttagtccctgtaacttactgctaattgttcctttctttgatcccttgtagttatttaaagcaactgaagggtgctagtttagggcacatctcttctcttgtaagaaataatgccatgaagattctgcataattaagttgttcagagtagcagcagttcgtcaaaaagtaattgctatcatttataatggaacagctcgtagagaaaagaataatggacatagaactctgattcaaagattcattagatgttagaaagctgtatacatggtcacatggttattcttagcagttaaaattagttataattaatcatcatagttaaggtatataaatggttatattgagattgctccttctgctaaaattaacttgaaaccaagcaattcagccatagtaaaaattacctgctatttcttatacatttattatttcttttcgaacatactatatcttcactaataagcctcagacttttgtatattcagaatttccctagctatattagtttgagagcttgtttggaagttctagcaggggagtgcagctgcttgtatacccttgaccaaagactggtcctcctctatcgtggatggtcatcctcttcgaccaagcgtgcggcttcgagagggacacacatggagcggtgagggaggaaggggacacccacttagcccagccagatcagctgaatcaaccctggcaatcagtgggttaacagatgttgcagccaatcgccctcacatcccatagctatattagtttgatgttcaatccagcccacagtactctgaagcacagtattcattctgttacaaaaatggtctttttacctggagttttatattaaaagatacaattatatttggaagtcaactataattcaacatctacaatcttcagttattataacagtctattcaccattagctcatgatgtcgctgtctcattggagttgcaactaatagatctgcgtaacaagtacttttttctgactctactcctgttttgttttactttaaagcctgattttatattatttgttgtgtacttaaaggagggtatgtgattcctgggctaagctatatctgatttcttcacagcaagattgtgttttttcccctatctaacagtaattaacttttggctctttcgttttctaattataccctctcaggccgtgccaacccacattgtgttgctgaagctactccctgcagcaggtgtcaggaaaggagaggaataatttcgctgcttcaaactgattcatcagagagctatgagacgcccacccctgccttttttagctcctagactctctaatcctatagccaaagaatttaattttaaataagtatccaaagaaataaggttccagggatatcttcttgactatcaggctgataggttttggaatatgcataaatgtgttttgtatatatttatatattttttgattgaatagatttaatctggatctcacgtgggggcacagtttcttttagaaattttaactcgtggttcagttaaaaatctcatgatttt

SEQ ID NO: 134213 - DNA, 2225 bp, Homo sapiens
tacatatttttgagtaaagcttcaattcaaactgtgctaaatgttataaacagaggtatgtatgtgtaaatttgagatagagttagccacttgaggaagttggggacacttgaattgattattgaagaaagatttcatttacaaagccaaaaagaggtgaaagggaacctaagatgtcagaaacttctgggtatggtagcatgtgcctgtagtcccagctacttgggagactgaagcagggggattccttgagtctcgcagttcgagtccagcctgagtaatatagtgagaccccgtctttatgaaaagaagaagataccagaaatcacatatacataggcgtagagggatgaaaacatcttgtgcttgaggaattgagagtgattgtatgtttctgggctggaagagtgggaaagtaggtttagctaaagctgaggagccttctaatcatactgaagaatttgagctcttcgttgagtattggtgagctctccaaagtttaaagcagagaaaagatgtgatcaaagctatgctttagtaatattctcagaaaatacttagttgatgttctggaggtagaaggatcagtgaggaggcattgcgcaagttcaggactgagacgacaagggccggaatcaagacattggtagagggaatgaagaaggaggagggaacagataagttgttaggcagtattatcaacaaagcttggtggctggttggatatggaatgagaaggagaggaaatatttgggattatgattcaggtgtttctatcttatgtggcacctggataggtgttagtgctgagaggtacagggaaagaagtagaaatggagaggatggtggatgggccttgatttttagacttgctaagttcaagatgactgtgtaacctcaaactgtggagcagtctgcccatcattcacacatgtgtcttcatcttaggagagaaggaaagtgaagataaaatacatgtgagtttacttacaattggatctgaaaaatggagtggttaaggttgcccagggtaagcctgggagatgaagaagaggaaagggccaaggtaagagaaaccctaagaaatggtaacatttaaggagcaggcagaggataaacagcccatggagatttacaaggcatggccagaaggtaaaagagctgctctatagtgcaaaggaagcactaatatgctttgttttttctctccttcaggagaagtttcggtgtccgacatccctgtctgttgttaaagacagaaacctaactgagaaccaagaagaggatgatgatgatatctttgatcccccagtagatctgtcttcggatgaagaatattatgttgaagaaagcagatctgccaggcttaggaagtcaggcaaggagcacattgataatatcaagaaggcattttccaaagaaaacatgcagaagacacggcagaatcttgacaagaaagtgaacagaattagaactagaatagtgaccccggagaggagagagaggctaaggcagtcaggagagaggctgagacagtcaggggagaggctgagacagtcaggggagaggtttaagaaatctatttctaatgcagctccctcaaaggaagcttttaagatgcgcagcctcaggaaaggtaaggaccgaacagtggctgaaggtgaggaatgtgccagggagatgggtgtggacatcattgccaggagcgagtctctgggccccatcagtgagctctactctgatgagctcagtgaaccagaacacgaggcagccaggccggtgtatcctccccatgaaggaagggaaatccccacccccgagcctttaaaagttacttttaaatctcaggtgaaagtagaggatgatgaatctcttttgttagatttaaagcactcatcgtaaagaggaattaagtatatcctaaatatgaatctcctaatcatgcagttttagtttgaatagtgtagtcgtctacatttctgtgccatgtaggaaaacataaatgtattttttttcttatatttaaaatcttgaagataatataaatattattatcactctttctcatggcagctgtggattttttagttcctttctcttgtccaccagaaaaatagtttcctaggttgggccagttacgtgtttggtaagggcaactttgcggccgtcatttgcaggagaactctaaatattggttaggattaatattgtggccagcctcaaag

SEQ ID NO: 134214 - DNA, 1088 bp, Homo sapiens
ggctctagtatcatagctttacttataagaaaaccctgggcaagtcatctgcttattctcatcagtaaaaatggagagggttggcctctgctgcctgcctcagaggactgttgtgatgatcaaaggaaatggtacacattctgggggaacaagaagcacacccagagaaaacaagcctcatcagttcctccaaaacagaatggaaagagttacaccttctgaaaaagccctcagcaccaatcaataaggtcctaggttggagagaaactaaagctggtcttcagaagccttttcacagaatcaagagtgaaaaataagtaaatgtttgggtgaccactttttcatcagactaactatatcttgggttttagttgggtctcaaaatgttccccagccagaccctttctaatttccttttgattaagatctttggtggactatagcactaaatttgtttaagcagtatgaggcataaaattgtgactatgtttctaaagtcggccctgatgcattgggtttggaaatgaccacaaatattcctgttttcctgagtgtacccttcagggtccagctgtccaaaacagtgttgataggagttcatcatagctgctttgggaggaagccagattctccttatcttttagctttagatcgtggaatccaggaagtagaacaatgtctattgttgctaaagaaagaaagaaatgggccgggtgtggtggctcacggggagtaatcccagcactttgcgaggccgaggtgggtgaatcacctgaggtcagaagttcacgaccagcctgaccaacatggcgaaaccctgactctactgaaaatacaaaaattagctgggcatggtggcatgcgcctgtcccagctactcaggaggctgagacaggagaattgcctgaacccaggaggcggaggttgcagtgagccgagattgtgccactgcactcaagcctgggcaaaagagccagactctgtttcaaaaaaaaagaaaaaaagaaaagaaagaaatggtagtactgattctgtacttgaaggatgtttaatgtagcatggtgttgtaatagagaagaaatgatgaa

SEQ ID NO: 134215 - DNA, 1093 bp, Homo sapiens
gacaacgatcagctatcccactttttttctcactttcagatcagtttttggataatcatatggtagttaaaataataagtgtacacatatacacacaggcatacataaatcggctttaaaatatttgactcagttactcagatgtttgggtttgggagtctgattcagcatcatttcctcttcaccttgcatgaatacatgaaatcataatatcgttcatgttgttacctttttatattgaaaactaaagtgtatacaacattggataacactttcaaatgaataattttaaaatgtttttatgacattttggaaagatcttgggtgcctaatcacatattttcttaagaaccataataaatttgaatttaagaaaatgttattacaacatttgatgtttgtgtcctataaatatttttactaataatgcaaacagtgaatgtaaagaagttacaagctttttcttttttctagccctatgcagaataaatatcagttgacctgaaatatttttctgcaaacattactgtcatggaatttttgtaaagtcagtttgcttactgattcatatataaccagacttgacattttatggaacatttcacatatagctgtatttgaattttgatgaggaaggagttataacctggtcagctcttcatcatggtagactttgtgcaaccccaaaacactaaacagtttcatgtccctggaggtttattgtaaccttgtactgctttcttggtactaggattttccctccatgttgctctgtttctctacatttcttcccatatttgggacattccaaatgctacattcataatttattattcctttaacttaattttcttggtataaaaataatgggctgcaaagtcacacgtcccgtttgacatcaggaatattctagtcagtgtttgtatttttaaagtttcagataacagggacaaattattttacctattcatgtgtattttagaaattatacataccagattttaaacagtgtattcaaataaaaccattggcaagattccttgctctgagatagaacagtgtagcatctatagacaccagggggcatggagcc

SEQ ID NO: 134216 - DNA, 1063 bp, Homo sapiens
agtccattttctcagctagcagtgaagcctgcaggctggcttacatcctcagccagggagagcagtggggatggagtgccttctctctgtggtcacctccaactcaagtgagcaggtagcaaggagaggggaggttgagaggccagggcctctgggtcagaacatggggtccagtttgaagccacagcctcgtttacacttctcaggcctactatgcagagttaaacagagcccaccgaacctagcttctccatgttgagcatccctaatccaaaaatccgaaaactgaaatgctcctaaatccaaaacttcttgagtgcagacaagacactttaaggaaatgctcaacctgtataatgccagattttaaaatccaaaaaaatacctgaaacacttctcccaaatacttgttcccaagcattcagttacaggatactcagcctgtagtgcttctgaggcctgttgtggacacactgaattgaggtatgtgtatcttcagcggggactaagtgaggaccaagtggaaggtaggcaagttggatattacagatcccagcccagagatgaaggctggataacacatttgttgaagtataggtaagtgcaattgtgagttttcatgcagtttgaaaggagtggataaagatcttttatttgtcaaacttctaaaatattcttctgaacaattgttcttgggctcttatttcaaaaattatattctgccgatcagtctgtgactgtcattacctttgaaagggcaaacagtctctatcctcattctggtttctagcccctgacagaatcactttaagaggaacattacatattgttctaagctgaaatttagaactacaatgagcaccccagtctgaagagtttggctcagtttgttactgtgaatccattgaggtgttactcctggctgaagtttgcttagtattataaggcagccaaggtctcctaataatgtcatgggccaatattcataacttaccagggtctaactaggctttttatctgaacaggctttaaattcttaacaaactctggttatgtaaatatg

SEQ ID NO: 134217 - DNA, 1084 bp, Homo sapiens
gattttttgctgctctgcatatgtccaagaatgattgggaaagtgccttgagtgttattttggggttacaagtaaactgtagcaaataggcaatttcaccaatatggaatccatgaataatgaggattgactgtatatgtatatataatgataaaatatatactatataaatatattttacgtatatttatattttatatataaggtctatataaaatacataatgacctaattgttaatatcttatacatagtgttccgctacttggcaatatattgtatacaggtcaatactcttttacaaaatatattccaaaaagtgtttctcaggccattgttaagtcagtttgggaaatactgagatcaaggaatcctctacgcctgtggcatctaaaaaaaaaccagcgcctcaggttcttatagttatgctttaaaggggacagggtcactcgtgccaaaaaggaagctaaaatcaatatccctcttgcactagcatattttgcctgtgttttgttactttgctttttctaactcttgtagccctttttactgtatctcattggatgaggcacaattggatccctctgacatcattatatacctactcatgtgagagggtattaactattaattttgtaattacaatttttctcttacatggcacagattttacatgtagctttcttctgaaaaggtgcaatgtaaaagttttagtgaagatcttggctctgtcagtgcctcagcatcaattcattcaattttgcattcctacaggcctgttctgggcttccacttcattctcgctctctaggcattcaacaagagcttaatttgacaagaagccacgggttatcctcagttcaaataatttcaaaatctcatatcagatggctcttttggaaatgtcaacaatttctaaaatgtcaacgctacaatataaacaatgctacatacattgttaataggagaagtaatttctaatcccaataaaacagaccccagggaagtttgttgtgatgccgtgtttttcgcttgagatcagtaaagacccagctgcagctggtgcctgtccatggcctgggatt

SEQ ID NO: 134218 - DNA, 1048 bp, Homo sapiens
tcaggagagggtccagagagaaccacttgaaaaagtctggccagtccctggccctgctggttaattcaggcgagtgcacttgttaagcttgtgggctcaagagtcagatcaacaggtttatatcctggatccgccaagtaacacctatgtgaacttgtctttttaaaactcagttatgttatctataaaatgagaataatgatataacacacctcatgtaaagctcttagcaaagttttggaacctagtaaattctccatgatgttagctatacatatgctaatgcaattattttattattagttccatagtgaaaggagactattatcagaatccattctaaaattttatgacttttagtatattagtatatttagtgaactgtatctcattctcattacaaaatgaaggtttaagaattccccacaaatccttttatactctttatagtgttcctaagcagaaaatccttagggtgttattctacattgatatctactacagggggccctgccctgactattggactggccagagtggaaaagtagagtcatataagcagcccccttacagaatgcagacttaacaaagcctgtttttgtctgaatttgttaccagttaacttagtttgtatctttatgtgtccctcatgtgtagtgaggtagcatctgaggatacagtgaggatacagtgacaaagcaagagactgttcccgtttactcattcatcatttattcattgactcatggagtcattaactgattgattcattcatttattcattcaactatggtgactgaccacctgaaatgtaccagtcactccctgcactagtattataatctctgtttttaagaatttcacatccagtagaggtgacagaaaaagcaagcagggaaataaaatatagtggtacttgttacatgtagtgacagtgaagacatctggaaacaatgactagatgaaggtggctcctaactgtaatgacaggtcctgggcaaaaattttgcttgtacagcaaatacttgttgactacctactatgtgcc

SEQ ID NO: 134219 - DNA, 1034 bp, Homo sapiens
actttcaatggcaaaaaccacaattacttttgcaccaacctgataattagaaactgtaaagaggcttgtaatatttaatgaaaagaaccgccaaaaagaaacagaagtacctgcaaagcagaaaggaagcaaaccaaacactcagcagttccaagggaaacaatggatcaccgccaccagggcttcagatacagatatgccataagtattaattgctatgttagaagagaaacagcctaaaaatatgtgaacaaggctgggccctagaggtactaatggcagtggaaacggttgccatgacaacgacaaggaaaagtcaaccaaagggattactaatacatatgagtgtaaatgtgcctgacattgaataatgtgagccaattccttggcagattccagcactatttttgaatctgaaaaaaaaaatgtttcagcatttatcacatgcaggttttattgtgtggattttatggtaaggggtaactaactttttcataagaggtgggcttaatcttaaaaataacttttattataagaataacctaggaacattaaaggatattttcaaaagacaaaagaaattgcttgtcatcctcatcaatacagcagcttgcctttttcttctcttctctatatccaagtgcatttttatataactgtaatcttagtattctgacatttttgcattctgcttttattatttaacctcatatctgtagcattttccgtattttaaattcagcttcataattatcagttaaaatttctgcacagtagtcaattgcattatgtcatttacccaaccattcaccaattagaaggtacatatgtattattgacaaactgtgttataggcaatgcagagagaaaaggtagagtttagattagcattactgaaatgctggctcttaacattacagagagttgagcttgtgtttgggccatcatgcattacaatacacaaatatctgtgagtcggagggtgggaggggtcagcagttcttgattattaggtggtgccaacaattaatagg

SEQ ID NO: 134220 - DNA, 1041 bp, Homo sapiens
gaaagtgtaaaagctgctaggtaatgcacgaggcacttccttgaactgtatacttatttcttttcatttaaaagaaattctaattttgtgaactttgttcttctggaccaagctgaaggtggaagaaatgatgggggctgccccatgcagtcattcagggtctcacggtgaaggtgatatggcatcctcacatgtagtttcacagatcctttatgtgtcaatcagtgtccagctggcgcttaagcagagagtggagaggttgtgagtacccttctagtggtggcacttccacccacatgctattggccaagattcagtcacataactatgcttacatgcaagggagaaggaggagaaaataaaatattttactagaaagccacttctctaattcagctcctcaacacagaatagacattctctggtagaacactagctgtttcttccacactcctcacgtattaagctccatccaccctgacttttaccctgatcctggcatatttacatctcagggcctttgtctatgttgttcctcttctaggaaaatttctgctgcccttaacttgtctggtcatttttcttttcaatcttaaggtttttcttaaacactatccccatcaaagacacctttcttaatcacctgtcaaaagtaagattgtcccaagtaccttgttggttttctttacagcgcttaccataattggccatcatttgatctgtttacttccttttgtttgtttctcccactagagtgtaagctcatgaaactaggtatatgattgtcttttacactattgaattcctaatgcttgtcacagtgcttgacatatagtagatgcttaacaaatattttctaaattaaagcagaaggctctgggttatgagtaaataattgtagtattaaactaaaacaccattaccattaatataaatttatagatctatgattctatagacaggtttgacaaaacacagtcagtgcatcattattaccctgtactgacactttatattaatccaactcattcttgaattatt

SEQ ID NO: 134221 - DNA, 1223 bp, Homo sapiens
taggcttgctgttgttgaatgagataatcaaacatatgatgtaattttaaagggtttacatacagaaggcctgctgtatgtcctgcttctgctgtgtaaaagattcagcatggaatcattggaattttatgtacaggatttcattatctcattttctatacaatttttccttctgatccagagacacggaaaaacaaagggcaagatggaaataagggatgagaaggtctatgtggaaaaacagttacaactggagtggtaactgcaaaaaccaagcagcttcatgtgatcgttaggacagaagaaatttctcctttgtagcctagagcaatattctcaaaatttaatgcgcatgttaatcatttggggatcttttattcattttttcatgtggggatcttttaaaaatgcaaattctgatttggtaagtctggagtaggtcctgagcttctgcatgcttcaaaagctgattatgttttgagaacatggatctagatgctggtattgaggtgggagacaagtactgccacctgaaacaacagtcttggtaaatttagccgacgagggtaaacacatcctaacagggaaggtaaactgtacgtccatcagtaccactagagggcatcactggtttatagttcaatacagtgaatatatcagaataatggcctttagttttcctgaaagattaaattaggcttgctaacttgtttaatgagataatcagacatatgatgtaattttaaagggtttacatttttaaaaatttaatgattgctacataaaaagggtatcagttaactaattttacttagatggaacttctgtaagcttagtaggtatgcttaaataaagcctgctaataaaatagagattcagactcaatagaatggttttacatatgtaatatatgttttaaactgcataaaataaactcctccctcctttcttaacgtgtcatttttctgattacaaaagtagcacgttctttttagaaaattgggaaggaaaaaagcaaaaacaagaatgaaaaaacaaaactatcttgccgctcataattacttaacattttggtatatttccaaatgaaaacaattattttcctgtattttacaattactatggcatcatgctccccttcacattataagcatttccccatgtttttaaagacaagaataacaaatttgattaatagcatattattgtataattagatgtca

SEQ ID NO: 134222 - DNA, 1013 bp, Homo sapiens
aatcactctgggtctcaatttcttcacctgtaaaatgaggacagtaatacttacatgttaaagttgccttgaggattaaatggcagaatatatgtaaaacacctagcaagtgcttagtccatagaagacgcttggcaaacttttctctcctataataaacatatacaactcaagcttatttcggaaaaagatattggtgatgttgtttaaagtatgagatagggcatggagctgccacctatgtaccagctattccagatgaccaagccctgctagaataaagactgacttttcattgtgacctctgaaggatgtgcagctcagctttcacctatccccacgttcacccaagccaaaaagaagaattgttcattcaaactggaaatgatctccagcttggaaatgagactcctcatgagcttattctaagatcagagtctgaaaattattttctcaaaagttacaaataaatgtcttttaacagtactgtcagactagtgaccaacaagttactttatgaggatggatgatgatattagagttcaagcaattgtccagtttgtttcgatgccacagtttgcttttaaattcccatagtgagcttccatcttgagacccactcaacacagaaggattacataaaggttgatcacccacgctctacagatgaacaaattgagacccagagatgctaaactgctctgcaggtcacaaacctgaacagcagcatagccaaaatgggaacggagctcttctgacttcaagcccctgcacttttttcttaaccacattaattttatgaatatctatgtggtcaaagtctcttttgtaaaatctgagtataagctgaactagatcatgtctctgtaagctaagatggcagaaacacattgtcatgttagtttggaggagcaaacagatataagtatgtgttgtaatgttatagtgagctgttatgtatcccccagcaatgtccaaagtgatcagagctactagatgacttattacaatgt

SEQ ID NO: 134223 - DNA, 1048 bp, Homo sapiens
tttagccttgactttcttttttttttttttttgagacggagtcccgctctgttgcccaggctggagtgctgtggtgcgatctcggctcactgcaagctccgcctcccgggttcaagtgattctcctgccttagcctcccgagtagctgggactaccggcgcccgccaccacgcctggctaattttttgtatttttagtagagacggggtttcaccgtgttaggcaggatggtctcgatcttctgacctcttgatccgcccgcctcggcctcccaaagtgctgggattacagacatgagccaccgcgcccggcccgccttgacttttactctacaatttaattttttttttttttcctcaaagagaaatatggagatggttgtggaattaatggatccaggttaaagggttggccagaaaagttgctagtttttactctattgttttactctattgttgctttgcttacatatattatgtcagtttctgcctttttttctatcaggaaaacgactgtcttcttctgccaaaatgtcaggaattggaaataaaagagcagctggagaacctggcacctccatgcctcctgagaagaaggcagctgttgaagattcagggaccacagtggaaacaattaagctaggaggtgtctcttcaacggtatgaggaaacagtgccatgaaagtgtgcttgtcttctgtcagttgcaacttgaaactaaaaattcatggaagctttctggagtatggggaagctatttgaaaagaagagggaaataaaacaggctgaaagtaggtaaaatgatgtggtagtcagttctagaggagaggtagattgatagttgttctttgttttcaaggtgtacttatattctttcgagaatctgggaaggtggtgcctgatacaacattaactataggtatttagcagtgggaagatacacatttatttttcattcactgaaaaagtcagtaccagattctaagagacagtttagcaatcattgagagtatggtgaagagtgagagtctgagaccagattgcctgga

SEQ ID NO: 134224 - DNA, 1264 bp, Homo sapiens
ctgattaggtgctgctgatgtgttctcattcaggtttcagttggaacaaggggaataaagggaggactgaggtgttatatttaataatagttcactggagataccaaaacacctttgttggtgaaatagtggggatggcaccctgttttcagtgagcttaagagaatatgaggggagaggaattaggaaaaagagagtagagacaatgctttataaaggagtatcgctgtaaagtagatgactatataatgactgatcatggaatttaagttcagtaaagaaggaggtgagagaagtgaaaggtataggaccaatggattgtagatcctggagaggttaaagaatttttggagtaaggaaactggagagagtgagctggaaaaatagtggtagttgtgaagaatgaggtgtttgaaattgagcttatagaggacatgtaggtacaagtaagactaaatgtgggagttggtggctgaaggaggtagaagacaagatcattggtgaagaggaggtcagtgacttgatgattcaagtataggaaaggttatctgtatgggtattgaaatcattaagaatgatgacaggaaaagtattggagagtgataataaggtaggtgctaagtctttgtgaaatgtgaggaaacgacgtgggcatttacagatgaattcaacagagcatggcggcaggtggtataggctaatggcatgagctgcagaggtaggaggttttagggaggaaggtggggtaatggcctggaagtggcaatggaaaataaggaggatattcatccctctctggcttcaaggggtgtggaagagaaacagccaccactagagaagcctgcagggaaacagtttctcatccaagtttcagttagagcaagaagggaaaggcaatgttcagagaagagtttgaggatatagtttattaatagtgttaataaactggtacagtgggaaaactgttgactactttggcatattaggaatgttttaattaaagtggaaaagagaaaaatgaaacaaaaattggtggtgtaataaacaattgtcactttaaaataatgatttcattaattcctcagaaaagtaagactatttttccacatgctggttctttgcttgttatatcctccaatcccacctcccaccaacccctccctggtttgtcctagggaaggagctggagagagaaaaatattgagagggatgtgaaattactaatggagtgagggttttgtagagacagaagagaacaggatcc

SEQ ID NO: 134225 - DNA, 1584 bp, Homo sapiens
gaagtctttaatgaaggaaggatggtgcttacgagatagaagacagtgttgattggagtcgagggtgatctagctggatggtggccttaaagcagcattactttgtagatgtttatgtgactagaacagcgagatgggttgaggttctggtgtatttgtgtgtattattctttcctcacaccatcatatacctgttgtttatctcttctgcttctacttcttaattacttgtaagattttttaaaagtcaatagctttattcatagaaaataactaatgaataattgtgaccttgttgagtttaacggctcatttttcttatttctttgtggagactaatacgattggtttactgggcaggaggaactagacattagaacactgcaaaccaaaaatcgcaagctggcagaaatgttggatcagcggcaggccattgaagatgaacttcgtgagcacattgaaaaactggaacgacgacaggccactgatgatgcctcactattgattgtcaaccgatactggagtcaggtagctaacttgtttatttgttcagatttttatttgaccaatttagttctccttactgttctcttcatttccaaagttgtgtcctttgtttcttcataattgtacctacccttctccagtttgatgaaaacatccgtatcatccttaaacgttatgatctggagcagggcttgggagacctactcacagaacgaaaagcccttgttgtgcctgaaccagaaccagactctgatagcaatcaggagcgtaaagatgaccgagagagaggcaagtgttcgtgatggattctatcactgcatgctatctgggtttttaaagtagagctctgctttgaggctttccatttgagggaaaaaaaatggattttgttatttccagtttataattttggggggcttctttttttccccctgtgtcctcaggggaagggcaagagccagctttctctttccttgctactttggccagcagttccagtgaagagatggagtctcagctgcaggaacgtgtggagtcttcccgccgagccgtgtcccagattgtgactgtttatgataaattgcaagaaaaagtggagctcttatcccggaagctaaacagtggaggtgaggcaagaccctggaggccgggagtagtggaggaggaataagaattcatttttgcatgctaatttgtagtttgcaagcttacatatttatttttatttatttattatttactttttaagagataaggtttcactgtgtcacccaggctggaacacagtggcaccatcatagcccattgaatcctcgaactcaagcaatctttctgcctcagcttccgaatagctaggactataggcacgtactaccacacctggctaatattttaacctttttgtagagaggaagtcttgctatgttgcccaggctggtctcaaacttggcctcaagagatcctctcttctggcctcccaaagtgttaggattacaggcatgagccactgtgcctggactatatattttaattaaatttttagaaattctaaccttcagtgttactggtaatgtcttc

SEQ ID NO: 134226 - DNA, 1028 bp, Homo sapiens
atatactctattaatgacagttttgtaaatagcagaattaactttattatttaataaacagctctaatatctggatctgtttatcgtgtatgtaggctattgatttatagtgataatactttattttaaataacaactatattatttaattattagttacagaattttgacttgaaaaagttaatttttacttaacttatttttcattatcgctaatgtttttaaaaagagttggtgcaggttttagagttgacagatgatctgtatggttaaaaggattattagaaaatattctatggatgaaagagtatttgaaataaaataattatttgggataattgtgttactcagagttaatgcaaaaatttaaatttgtacagtaaagtatttgtgtagctaggttacatctttagtcatttgtggcataaataccttgctcaaatgcaaaaaaaatgccttgatttcatgttttcaataataatcatggtctagttgtaatatcttaatttccctgcttatcattaagatgtttaacctttcatttctgaaggaaataagttgaatgtaatggaggttgaaccattggatgagcatataagaattgtattattctgtaattttgcttttaagggtaattgggctaagttgtcaacagaattaagcagcttgtagaaggcctgtgaaaatttggtcacgggtttcttttgcttttccattagattatgcatttctgtattttattataaggaaaacagatacttgtttaaaaatatacaagtcagaaatacaaataagtagactacaaaagtttccccattctcatttctcaaaagataaccattctaaacaatgtgttttatgtcctctcagacttttgtacttttgtattaatatcttacatctacttgcatgtccccagctaaactgtgtcttggttcagtagtttggctcactcttctttgtttctctagtttctagcactgcatctggcatctagcagatgtttagtcaatggggaatgaatggat

SEQ ID NO: 134227 - DNA, 1060 bp, Homo sapiens
aaaaaaaatgacactctagatgctaaattaaagtatagttcttcttccccagataatctgatagtggaggaagcagtgcaggagctgaactctttcctcgcacaggagaatatgaggctacaggaattgacagatcttcttcaggaaaagcatcgcaccatgtctcaggaggtacttaaccaaaaaggagagatggctgtgtctagtgggctgtggcagatgttgacttacaattctgagcacctcaaagattaccttactctagaaggcctatcatatcataggggattttgtaaaacacaacacaactccaaacctccaaataatgaattaccctaaatataaaagactgtatagtgttattgaggaatggcgtggtagaaattccacagggaatggggaagtagaaactactgtattgatgatgtcctaggaatttgaggaatgtcaattttcagtctaaacttgggtgcaaataatgccatgattaaaccatgccaagatttggacatttatttatttacacaaaatgatcaagataaagtgatgataggccttaaatgacttttctgatacttctgatgatcattttgatttagttcaaaatatattctactggaatttgccccaccttagtttggccactgaattcttatgctaattagtaatttagtagttgccatttacttagtgcctagaatttaagcactttatgaatgttatctctaatggcaaaacaactcccattttattgccaaagaaacaaattcaaagaggttagtgattattctgagggcacatagctagaaagtgattgagctgtgttgtgactgtaggtctgtttgacttcaaagctcttgttcttcatatgcctttgtttactaaaccccagtgttaaggtccatgctggcctggttgcatgaatatcatctggggaatttattaattcatatggattatcctggaccttcaaaggggttagaatgtagtagcccttataaataaactggagtctagtaagaaaatagaatatttttatcatgttttaagacattgacta

SEQ ID NO: 134228 - DNA, 1146 bp, Homo sapiens
ctataattcattttggttcacagcctggatgtttgttttttaactcaagttgaccagttttgttttcatcttctgagaaggaatcttttatttggtaattctccctatttctcagtgcctcctgatgtgttctgttctttctctccttgtgcctttgcccttaccacggttcctcataacattgttgttcctgtatttaaggccctataaacagggagatgcgccacctcatcagtagcctccagaatcacaatcaccagctgaaaggggaggtcctgagatataagcggaaattgagagaagcccagtctgacctgaacaaggtaaccagagggaatagaataaatatcatttgctattaatgtcgtaaagctgcttttgaatgaggtcggcaatgtggttatcataagagatgtgcatctttcttttctttattctcccagacacgcctgcgtagtggtagtgccctcctgcagtcccagtctagtactgaggacccgaaggatgagcctgcggagctaaaaccagattctgaggacttatcctcccagtcctcagcttcaaaggcatctcaggaggatgccaatgaaatcaagtctaaacgggatgaagaagaacgagaacgagaaaggagggagaaggagagggaacgagaaagagaacgggagaaggagaaggagagagaacgagagaagcagaagctaaaagagtcagaaaaagagagagattctgctaaggataaagagaaaggcaaacatgatgatggacggaaaaaggaagcagaaattatcaaacaattgaagattgaactcaagtaagaaccacatttagagtaacagtttcgactgaaaagctaagattaagacatcatgcatgaaatgtttggttgatggcatggcttgtctgatcgttttaatgttttagattgtacaattaatttggtttcaagtcgtgttcaagtgcacagccaaaatggcttgcatggctatttagtactttggttcagtgatcgagtatcagcaaaccgatgatggtagccttatttttatgaatccaaattaaggaaaaggatgtcatgattgaggtaatacttctgagaattattgggaattaactactgctcttcactggatttgagcagattgc

SEQ ID NO: 134229 - DNA, 1520 bp, Homo sapiens
aaaataagtgtttaagtgcaacattttctgccttttcaaagaccatctgaagtagagattttaaaactctccataggatggtaaaatatatctgaattactggggttatgagtaggctttccaaagtatgtattccttgtttttcctatgtaattcattgctacagggataatctttttcattacttttgggaggaatgtcttatgctcttaaaattttgaggcctaaaaaaaaggatgggaaccactattctaaagaaagttacctgtgcacttctcaaaagtgttgcttatagaagcatgtcatagtagaatggagtgatgttaaaacagatggtgttatgtaatgttttagtatattatgtaccttgttctataattctgtaaagactcttttggtattatgaaccttctatctttgcacagtattaattgatttttgaaaatgtgttataactttttatttttgtgcaattcctttcctcttatagttggaagatctaaggcaaagactcaaggatctggaagataaagagaagaaagagaacaagaaaatggctgatgaggatgccttgaggaagatccgggcagtggaggagcagatagaatacctacagaagaagctagccatggccaagcaggtggactcactttctttatttaattgactttttgagtaaatgttacttgacaataagttattgccagtgaaatttgcttttttattttggtctttttttgattgttaatgtgtatttttcctttttgtgtgtgtgttttaattcttaccttcaagtcttttatctttctgttattttgttttgtgtatttgtgaggcaagaaatttacttttatttaaatggacatttattgaagatctagtctttctctgctgttgttcagacagttattgaagatctagtctttctttgctgacctggaattaagggttatagtgaatataaaatgaaaaataagacataagattttatatacattatgattacaaatatatgaaactaagaaaactatgcttataaatatatatcattatatatttctatgtagtacatatactacacagaaaaactatgcttataaatatgtgatttatatataataaggatataatctattaaccaatataataacattgattaagcagtatgttaactatggctattttggggtcatagaactatagagattgttctcctccttataatgaatatgtatgtatttttaaatgccagggaatttttattaaaattcaataataaagatactgaaaatgcttgaaaaaaccatatatgtattctctgttagtacaccttcattgtttctaagaaatagcaaaataacagtgagatggagtaggtttaatggtaagttgatcatgaagtgccttgaaaagaagaacttcattagatcctatacacattccttttgttaacaagtgtaattttgggctgggcgcggtggctcatgcctgtaatcccagcactttgggaggccgaggtg

SEQ ID NO: 134230 - DNA, 1170 bp, Homo sapiens
cttaaaatgagatagatataaagtaaagctattattagataccagtcttcacctatcagattgttacaaggctttagatgtttgcaactgctggaaatcctgtagatccagtattttaattgtggaaaagcatgagaaaatgtgagaggttatgatggaagtactcttaaccaattgctgcttgatccgtttgtctagattaaggtaaatacaattattgtctaatttaactgacgttgagtacagatcaactaataagtatcagaccaacaattggtgccagtgacttcagataatagagcttctgtatgcctagtgacaaaacacaacttcttaaaactctgtcactaaattaatttatatctaaatgaacagtgggaaaatttagtttcctgtgctcttccattgaagttggaagattcttctaaaatcaaatctcttccttcatcctttaggaagaagaagcactcctctctgaaatggatgtcacaggccaggcctttgaagacatgcaggagcaaaatatccgtttgatgcagcaattgcgggagaaggatgatgcaaatttcaagctcatgtcagagcgtatcaagtccaatcagatccataagttgcttaaagaagagaaggaggagctggcagaccaggtgttgactctgaagactcaggtaattaggatgagtagagctttctattctgttgaaatagggtgctttctacatgatgatataagtaaaagaatgattattgtggcacatttttgtgattggaaaaaaatttgaaaactaaatgttcatcattagggtattggtaaataaattatacatctctactgttattcctacaaaagagtacagtgtacttgtcaaatatggatctgctaatatggaaacatgtctgaaataaaatcaagtgacgtgttttgttatcctttttgcgttaaagtatatgtttacttgtgttcctgtgctgtatattttaaaaatttctggaaggctgcatgagaaactgttagaattgttacttctggatattgggatgagttgtgggtgaggttaggaggtatgtgtgattttacttttttttttttttttttaaatttccataggttttggggaacatgtggtgtttggttacatgaataagttctttagtggtgataccaagatt

SEQ ID NO: 134231 - DNA, 1692 bp, Homo sapiens
taaccagagaatggtttattttggaggttggggggaaatgatgctctttttttagtgccttgtgggttttcttcttggttgtgtagtatatgagagccatttggatcataaactttcatggttgttcaaactctgacatcttttctttttaggcacgcttgacctgtccgtgctgtaacatgcgtaaaaaggatgctgttcttactaagtgttttcatgtcttctgctttgagtgtgtgaagacacgctatgacacccgccagcgcaaatgtcccaagtgtaatgctgcttttggtgccaatgattttcatcgcatctacattggttgatctaagtcaagagaagaagaggagctggctagtcaggaacttattcattaaccaccaaacctctacctcttctctccttgactgtcacctgtaggacagtttatcagtcaactacctttcctccagactttacttccaggctctcctcttcagtagctggatgactttagcagaaaggactggtaaatacaagccttgggtttcagaatgaattagaaacaaataactcttactgtcttccctcccagctttgtttattttgtgcttttagacttttcagtgttttctttttccagcccactgtataaacttggattgtccattcctcctgaagaaatcaagttggtatttttgatgtggaaaagggaacaaaagtggaaacatggctacttttggggagtgatattttaaaaaataagttgtctatgggcacaaagttttcttcatttgtgtagcaaacttcttgtgaatgtggattacaaaatggtataattgtgctactctcccctgggtggtttgcagccctaatgaaattatgtctaggatgattcagtctatttcccatttactagcagagtaacttgttaagatcagctggctttcttgttaaagttatttaagttttgaatgctctactacttcaagtctttaaatttcttgagactagaataattttaaataatatgaccctttgtcttctaatgaaataaagattgaagaggttgagtcaggactgagctggtgaagaaatcttgtgggtattctggaaatttgatacggagagaacttggtgagctatgaattactctcagtctcctttttacagggttgttgtgatccctcttttccagaaaattctgtggaatgtttctgtaggactttgttctccacaagcttgaattaaagcaggattcagtttgcatttgtgtttatggtttttctttgaaacttttgtctttattattacaagttgattttatatctgctgttatagaattaaattttcttgcatggaaataatcagcttaggttaagaggttggccttgtttagagtatttagatctttgcttaattgaagcacttttctcccaattcttttattgagtctattctatggagaaattatacctaaaagattaatttatttgactactcagttatctttcatagttcattaggtggggtaagagactataatttgttttttgggggagcatattgctgcctctagctttagggtgagagttcttgcattatgtggtgggttttttttttttttttttgagatggagttttgctcttgtcgcccaggctggagtgcagtggcacaatcttggcttactgccacctccgcctcctggg

SEQ ID NO: 134232 - DNA, 1006 bp, Homo sapiens
agattttgtagggatggtctctctctctcttttttctttctttcattgttaccttggaaatttcttagtgactttgaccaaagtcaggtgtgctctgaggcatgcataactacatggcttggatcttaccttcttacttactatagggatctttttcaaaggtattgagctgtttctgcaattgttttcttacatgaatttccattgcaattccttttcctttttctctgtccagatccgtaggcttccttgttcttcaagggccggaatttgatgcacatagtttaatgtacatgccactagagtgatgactgtgatttgattttgtgaagattctagacaataaataatcatcagtcttctaaacctactaggatggtgatgcttacacttgccggaagcatatgctactctcatctttattcccattgtcatttgctaggatgtggaatgccgttacatattgttctttgaagatttatctgaggactgccagataaacccatgtcccagtggatctgcagaaaagttttgattagtcattattgcagaagtctgcttttctgatgttaagacagatacactgagattagtagaaaaatggtggattatgtgtaggttggattgggtttgcacaataggaaacccatgacatagaaatacttacaaattttctagatcttaaagtttggaaatacttaaaagtggtcctatcagaaagaatgagctttaccttctgggattcctgcccatgtttggtctgttccaaatgttagctattaaggtcttacttatagcctacttcacaattactaaaggacatgaaaaggacaatgtcttaacagtctaatccctaatatctagcagaggcacatagtagtcagtaaagtttttcatgattaaattaattctgcttcatggttctgctgccagatcttccgaagtctgctttactgggccaatgtgtgattcaaaccttattactctttctttttttcacccccta

SEQ ID NO: 134233 - DNA, 1020 bp, Homo sapiens
ctattcggaaagaatgtgtgtgaagaaggcaacaggctagcagattcatgaaggcaaatttgcctgcagctaaaactgcttgggttatcagaaactgcccatatgtctgggactgcagggctgctgctgatttgtaactgtgtttgcatcagttcttggttgggctagaaagcagaaagaaaagatgctgaaatgctatttttatgagacataggtattacagtgttgagttaaatggaccaatgaaggtgcagttacaatatccgcttctctctctgttctgtggagctaggggccaggccgaggcatgggaaagaagcagtaaggcagaaagactaaaaggggattcaaggaagaatagaaaattgtgaggcagtgaccggaatcctgtatggttgtacaaatctctgttactattactagttctgcaaccttgggcaagttacatagtttctctgactcttgtttttttatctgtaaactggaggtctcatttacctacttaagactacatctatagtgcctatcttgtggggttgttaagattaaatgagatcatggtttataataagtacccaatatatgttagttgttacagtattacctgtttataggttgtaaaaaggtcagattgagggtgggcgtggtggctcatgcctgtaatccccacactttgggaggccgaggtgggtggatcacgaggtaaggagatcgataccatcctggccaacatgttgaaactccatctctactaaaatacaaaaaattagccagacatggtggcaggcgcctgtagtcccagttactcgggcgggaggctgaggcaggagaatcacttgaacctgggaggcagaggttgcagtgagccgagatcatgccactgcactccatcctggtgacagagcaagactccgtctcaaaaaaaaaaaaaaaaaaagaaaaaaggtcataagttagggaccatacctatcttcttcactattgtgtctccagcacttggcacgtacatggaagctgttt

SEQ ID NO: 134234 - DNA, 1047 bp, Homo sapiens
aattggttgggggtggaacaatgagtcctgagaagataaatcaagtaattgataaataaggaagtcttgtcctaaatggtgcccaggggtgggggtgaggatgttgaaggagagtcagcagatgtgtgctaaaattattaaaaagcaaaacaaaacaaaacaaaacttctcaaacaggttttctcttcatgcttctcctcctgcctgtgggcagccaaacttccagaatggtgtttctagaaaagtaatttttagaccacctgtgtcagtcacttgggggtgttggttaacagtaggtttctgagctcacctctagacctccacccccaaccccataatctctggagaagggtcttggcaatccgcactctgatgagttctctactagatgactcttatctacattgacatttgagaactgacccatattcctttcccttgctgcctaaacttgatatgctgagaaagtgacacctaagcagaggggaggttacttgtatcagtctttggggggcattagatgaggctggaggatcattagagggaccaaaaccagttcatagctcctcagagatgagtgggtgtgaggatgggggattgacttgattttctatacagatatgcaaagtgcagggcagattcctgaatggtcgaagcttatagtgttcccgggctggaggttttgggatttctatgctaagcgatgggtgactgctgatctgaaaatggcctagtgtgtggtgtgtagaacatttcacccacagtgtcacatattccattataggcaataagggatattccaggtccaacctaaggccacaaccttgctttgcctttttctctcttttcctttataaaaggcacacaccatagtggagatgcttagttacattagaagtagtcttattcattttttagccaaattgcctttctggcccagagcttttgttctgaaagcatggtatgcatttttaatgcctctgctgcctgtcttctgtttccgcttaccacatcccctccccttttcacagtagggtgtaagcatgc

SEQ ID NO: 134235 - DNA, 1114 bp, Homo sapiens
gtacaaaagaatcagtagggttgccttaggcagcaggcagcagagactagccaggaaccagacccaagtgcttctgacatctttagtcaccatgaaatagggaacagtcatccacagcctggtgtggtgagagtgaagagcttcgattttcagatgtcattaatgcatttaatgtttgttatttcctattaataagatgctctttgctagggagtttgtagaaaagtgccaggaaatgaattaggcatgacatgtctgtttcatatttccaatactctgttcctaggaatgctagaaaggagtagggagtggaaatatgccaaaaagacagtaaaacatggaattaattgcctgcggtattcattaattcttacatgtattttgtacataataatagctaatatttattaggcatttcctttcattcagagatgtacatgtatgatcttatttaatctttacaacaactctaggaaataggtactgtttttatctctactttacaaatgaggaacttgaggtgcagagagattaaataagtgacttacacaaagtaacacatatcataagtcttggagacaggatttggatccagagggttgatcctagagtccatgactacacttctaaccatgacagtatattgtgtacactgcattttagtgtccatatacattttttattttatgttttatttccctctatttatactgattcttttgataaattgccctgatttgatctgaataattatacagttagatctctaaagattattttacaaatataaagacagttgccattggccccttcttacctcttttccacacgtttggtcttgaaatgctgctgcttttcctctataaatgatgtatttattgctctgtgtaatctctgatggagaaaacagattcacaggtagaaattatgagaaacacataggtcagggaacaaagaaccacttgagatgtaacagtatatgtagtcgttacaaaccttggcctctttaaacaaattccagaaatgcctaaaaatagatcaacattcagcctcaaatctcaacagaacaaaaattctaattagaggttattattccacctggagaaacaaaaaa

SEQ ID NO: 134236 - DNA, 1050 bp, Homo sapiens
gacaattatgtacttagaataatggaactaacttgtaataattaaaacattgaagttattatctatgctttctggtgtttgatagatatgttgtccagaaaaagaagtaaatttgcattgttttcttgagaaaacactagtttctgaccctgtgtgatccactgttggctccaaatatagtaataggactcatctctttaagagtattctagatcagtttgaaatacagtagacactcaaaaaacaaatgttaaattactgaatgtttcaaattataatgtatattaattttatttagaatgtggcaaatatatacattaattacttacattttcttttacattttgttttctgtattcaaaaaggaaatagatatcttgtgcagtatcgcatatgcatcttttggtatgacccacactataaaaccactgggaaatagctttaaaggagttttagtagcagaacttggcatttggggatcatattttgtgtttaataagatgaacacaagccaagatttcaggcaaacaatgagtaagaaatttcccttcattttggaagtttattacaaatccattgagcagtctagagtgtgtggaatcggagggcaaggatcaagaaaaatggttgaacagcaaaacttacgaatctggctactgatccaagtttacccttaagggaaatgccacagtatcaagcaagagtaaaattacaaagttgactacaatgggttttgaaatatttaaggcaaaatgtaaattttaattcagaggtctaattttttggattgtgaatacattgactgcatgtatgtttattatgttgtaactgaagttttgtttatactgtcaaaaataaagaggttctaaaaaaacaaacaaaggaaatataaaatattatattactcagtttaaaagttctagaataggctccattttagaataaaccagaatcaacaggatttcagaaagattattaagtatatttttgtttctagagacttagagattgctgatcaatagaatttctgttgctatcctttccctagac

SEQ ID NO: 134237 - DNA, 1044 bp, Homo sapiens
aatcattccctcctcacttccttctctctctgactttaatacagtggacaaatacgggcacatgtaatgcttagggatggttgaacaaattcctatgcaaaagtcattcacagaagacaagttttcctatgaatttcaacacaaaagcatacaaaatatactaattttactaaatactttgtcatacactggcaacctctttaacatctagagactagactagatgctgcaaaattaggactcacctgtccattatatacactatatacagagcaaaacaaaatgcacaaaagatacagaaaaatggtgtctgaaaaagtccaactatgaacatactagcgtattaccttttgcaatttcttccctcctacctcttctaaaccattgaacaagtatagacagcactatacttctcacaaaggtggcttcacaattcaatttccaaaagacagtatttcctatgaatttcagcaaaaagatatttacaaaatggtattttactacctctacatttaacattcatcaggcacttctaaacatctagatagactagatgtttcaagtaaggagttaatttgtccactttgtacaaagcagtcttgaataaaccgcaaacatgtaacaacagttataatttgaaagaatcttccaaatatgaacgttctggcctagaacccttcctatctccaacaacccagtgggcaagaatgctcaaattttcagaggacaatctttcctaggacttgtaaaacaaaatgtacaaaatatattagtttactaactttacttttgtcagacactggcaacctccttagcatctagaaagactagatgttgtaaattagggctcatttgtcctttatgtacactacatacacagataagtaaaacaaaatgcacagaaatagatgattcatcttgccccgctgtaggcagggtggcatagagctctctgcactttcccctcttccctcctcccctgaaccagcgcacaaacacaatgagtattactcaacaggtgatttggccattccccaccaaagc

SEQ ID NO: 134238 - DNA, 1048 bp, Homo sapiens
gccaacctaacgaacaagtcctgacatatactgctcagaggtggttaaacaattccatgtccaagacgcatcttttctatcaattataacaaaggtatttacaaattggctaattcactagctctagtttttatcatatattgtcactccagacatccataaagtttagatattgcaaaataatgaatttgtccacaataaacacagggaatttactaaaaatgctcatatagacctgtggttaacatctaaaaccatcttctagatatggagatactagcaaagagcccttcccttcacccttcctcttctcccttttccaccatccccagtggctaagtataggacgtctagctcctagggacctaataaaggtcactcccagaagacggaccttcctaaaaactaacaaaaggacatttataaagggattgttttactacatctagttttaacatactttgagcattaggagttgtttatcctttaatatacaatattaattaaaatacacatatagaacaatggtcagaccatctgaactaatctaactcatgggctcagaacccttctccctgcatacttcctcctccctaacccatcgccacccaatgaatagtcagcatatgctcctaagcatcaagtttaaaaattccattcccaaatgcaaccactcctaggaagtaatgaaaacaaatactgagaggggtgttactttagccctttacttttaatctatgttgtgcactttcaaacacctaaaaagactagatgtttcaaattggactaaagttttcctttatatacacaatagcactgaataaatggtgcatatacataacacagactctaatttgagtgtcttctaaataggaacattctggcccagaacccttccctttccgacctctaccaaccccagagacagctttaagccatctgtaatgcttaagggggattttaacaatttcacttctgtgtttttaagacgtcttccctatgaattttaacacaaagtgtactcaatgtattagtttactaactctac

SEQ ID NO: 134239 - DNA, 2724 bp, Homo sapiens
gctaccattatcgagactctcattctattgccctgcggctttaatccttcgagtgtaggggaaaaattgaaccctaaagacaggcagctcctaggcaccagcacaggaaataagcaatggaggtggggtcctttgctcgcgccgaaattcaaaggaataaatagttccggcgcgggtgttgagagcggtgtggcaggtgttgtagccgctatggtgaagttcgctttgtagcggccccggctagagagttgttctgttccctgcctttgtgacccggaggagcttttggggtgcgtcaagcccctggcctgaggcagcggtgaggcgtgtgcgtgagcacggccggttgggccgggccagacttcctggcgggaggcgggaggcgggaggcggggcgcggggcgcgggggctgtagggagggggaccagtggcagagggaccttaggtgatccttagaaataaaggctagcttctgttcgaccttggagtagggcgaagaggtgtagacaggcctggagaagcgaggtaaaagcctgagtaaaagcaagaagttggagaatatgagatacatctcatctctagtaaatacttaaatgacttcccctcctcccggagtcaagcacaattcggggatgcaatgacggacgtaggtgaagacactgcgggaacttacagacaagtaatgaccgtctaatatcagctttaagtaccatgaaggaaaaagaaagccgagtgaaggattgtggagaggtgacatagggaggtcagggaggactccagtaaggtgacatttgagcaaagacgtgagtgcagtagagagtaagctatgtcagtatcagagaaaagcacattataggcaaagataatgggatatgtaataatccatagtctttgtttaggtagagtatgataaaagtagaaggcaagcctggaaaaacgggtagaagaaatagttaagacttcccagttgaatggtttaatttccagatagtggctaactctggtatatttttgagtagatgaacgatgtctttacatcagacaagatagtttgtcaagtggctgttttatttctatcaccctatcgttgctgtttttgcctcgtgttcattatgattccaggtttacattccacttaggtggtggtatttctgtttcgtacagaactggtttgtggcctgtttgattcctgtcagaggtttgctgacccaagacagtatcgaaaatgcatattaagtcaattattctagagggattcaagtcctatgctcagaggaccgaagtcaatggttttgaccccctcttcaatgctatcactggcttaaatggtagtgggaaatccaacatattggactccatctgctttttgctgggcatctccaacctgtctcaggtaaagtgtaaactttctgatttatttgaatttaagttggcaggagaatcctcactgaactttggagacgtcccgatattctcttcatttgtgtttttatactttttgtaaattacacctcactgcaaccttttaaggaaagtaatattactcctttagatgagaaaatagaaacttagagatgtttagaagtaacagtgcctcaaaactcaggcattctgactgtaaagcagtctcattccagagtattttcaaccctgtgtaatgatgccttttcaaatcctattaatggattgaatgactagtgaaaatctttgggacagtatttccttatatcttgcaaagtaactttttattaaaaaatgaataggaaacaattcaattcagggttgaaaaggttctgtagagaaaagtgtccattgcaggttgttgcctattttccttgtttttcttgccagaggatgcagctgcctaaccttgtctacttaatggacactacgttggtgggttttccaacagcaagggacccatttttagtgctgctttgtacggtagggagttttgtaattgttacacttttcatattttattttaggttcgggcttctaatttacaagatttagtttacaaaaatgggcaggctggtattaccaaagcctctgtgtcaatcacttttgataattctgacaaaaagcaaagtcctttaggatttgaggttcatgatgaaatcacagtaacaaggcaggtgagtggcaattaaacctttgggtatcttaagaccttttatgtctgatgtggtttttggccctatgcctttgcaaaacgtgctagagaaagttcatgagcaaaattggtgccttaaattctgactagattccttaatgtcttccttatattaaaatcttgatcatgcacattctatcactaagaggattgaaagacagctgaaaagttgttcatccagtataagcactcagctatgctgaaatcttaaaccatatttgaatcttctttggttgttcttgaacacctgtgtacttgagatctttcaatcttctgagataacccattctgtttttggacaggtcttattagaaagttaacagctataagttttgtcagagtctgctgtcttcaaattttattcattaatcctagtcctcttgagagcaccaagagcaaatctaacttattccctacttcagtgtttaagtgatgtgcaagtatatgtgttttagttctaagtgaaatcttgccaggtctttcacttgatgtttgttcctagttccttcacttgcctgattataccaagtatgctccagtttccctc

SEQ ID NO: 134240 - DNA, 1050 bp, Homo sapiens
tttattttcagggccgaattacaaaagtattgaatatgaaacctccagaggtaagagtactatttatggacattaaaaatagttggtatagatattactttaatctttcagacaatttttaaatattctattaaaatttttggagacattatttgggaatgattagtaaagacagttgtatatttgtgtaatatttggcactatgcccaaatattaaaattgattttgattgtataaaggagtcttgcttagctggtgtttcatgtcagaattcattcctacagaaaaagcctacaggaaaaggtttgtgtgaaattactatatttaacctatatggttcatttgggccaacttttggtaagatgtttagtgaggtcaaggcaaaaatgatatatttaatgtaaattccagttggacacattgtcttggatactaaacattaataaaattgtcattccagattttatccatgatagaagaagcagctggaaccaggatgtatgaatacaaaaaaatagctgcacagaaaactatagaaaaaaaggaggctaagctgaaagaaattaagacggtaatttaattcatataaaatattttcggagaagaatgtaattttgcatgtagagtttttgctgtaaagagggaaaaatttttttccttggttcagttttccatagtcatccctgctacttctctttcaaataaattttaatgatactttacatgcgaaaatactgatttttctttattttccagatacttgaagaagagattactccaaccattcaaaaattaaaagaggtatattctgtatatgtgaggataatctattagaatgtctttcaaagtcagcaatgtatccaaaatcatacacatagtgatactatttcttgggggtttttttcctgcgatgagataaggaattagagttggcactccataactcagcgttctgcttacagaggatatgcacttatctgctaagtcataggatattggagagtaatttttatagtttcagaaaatggtatgccgaattttaatacttta

SEQ ID NO: 134241 - DNA, 1021 bp, Homo sapiens
ctgtatttttgcctggattcaatattcatatagttaagtacctaatcaacatcactactcaagatgtctaacaggctcctcaagcctattatattcatactgtatttcttaagcttatcaaacccgttcttcctattctccacttacttcagtggctatccaacttaaaatcccaaattgtactctttttcccctacactcctaatccccttccctgctttttctccacatcagttatcactctataacatgttacatgttttatttattttctttattatcatttcccccaatggaatgaaggtccacaaggcaaggatttttgaccatttggtccagttgtaaccacagcccaaacaactgtacttagcttatagaagacactcactaaatattcatggaatagataaatgtacactaatgagactatatacttgtctacaagtggcactagtggcacattaagctcacttacctcaaccatatttttttccagctctttgcgtttgctttcctcacatgccagatttttcttcttgagatcaaatgcgctttgagatttagtattaactcgctgagcctctgcaagagcatcttctaaagatcgaagtatacctccagtttcctataacaaaatgcagtcaattcaatcacttatgtaaaatttgttcacgctgtcattttattgtatgagttctgtatcaaacacttttttataagttatttcattatcttactataagattaacaaatcaatacggaagacaatgcccaatgaatcctaaatagttactatatataatttagtacgtttttcacagagtatattatcgattcttatacatatgttcagaccttatcttttcttttttccaattcttctatttcatgattaagtgcttttatttttttatcattctcagacaattcttcctgaagctttataactttatcttgcatttcttttaattcctcagctgagcgtactttggtatcttcagccagcaaaaactgataagca

SEQ ID NO: 134242 - DNA, 1001 bp, Homo sapiens
tactttttctgaaactatttaatgctcaaattttatggctcttgacagtttataaaatattttcatatacatgctcttaattctaaaatctctacttttaagctagtgtaggatgtctgttatttcagttttacagctttagaaattcatttttagtcccttcaagtgatttgtttaaatctgcaattattatttagcccaatgtctcatggatttaatttataacatggaatgaaccagtagtataagagttatatttattctaaaaactgagagtgaatttcaaaatgataattcagtatttataaagttatgatggttaaattattttattatgctcactccaaattgctatggaattttattacataagggtatgcgtataagaaagtgggtgtttttcctgaaatataatatttttccatttgaaactcttcctaaaggactcaaaaactttagcagcaaaggaaaaagaggttaaaaagataacagatggactgcatgcccttcaagaagcaagtaataaagatgctgaagctctggcagctgcacagcagcacttcaatgctgtttccgctggcctgtccagtaatgaagatggagcagaagcaactcttgctggtcaaatgatggcctgtaaaaatgatataagtaaagctcagacagaagccaaacaggtaaatagagacattagcactatgtgattgcttttttttccaagaagtttcttttcatgttatgctttggcaattgttacataatgttgaaaataatcagtctcaaggaacttgtttgtttactttattctgcaactctaatgcctaatgcagcgaaattcaaatatgttgattgctaaatattggtgatgttaatttgtgaagatgctgtactacataaattatcttaattcggtatgtaagtgcaataaatgctttgttctgtttgcagcattgtgtggaattttcgagattaatgcatttattcttgtctctttttggcta

SEQ ID NO: 134243 - DNA, 2393 bp, Homo sapiens
taatcttacgtcttattgctcaattcagtttctttactgttattagatagcactcacaaatatatacacatacaaatatgaacaactaagcggaaaggaaaagaacgagagttgtgatttctagcgttctttttttaattaccagctactgacagttattcgatataatccttcaatttgaatatgtcatattttattaaaaatacggacttaaatttcaaattcttttacatattaatcatatattagtttatactttgagtagttttttgaggagaaaatactgggaaatgactaatttgttgaaatactaatccaagagaccaaacaattaaactttgaaggttaaggtctcttagtaaaaccaatctgaatcttcggccatttaattactagcactgtctgcctcatacatcctatggtctgttgcatttttctgccacaggctcagatgaagttgaagcatgctcaacaggaattaaagaataaacaagctgaagttaagaagatggatagtggctacaggaaggatcaagaagctctagaagctgtaaaaagacttaaagaaaaacttgaagctgaaatgaaaaagctaaattatgaaggtttgcctttaaaaacatgataatcagatcatgaggaggtagtgatttttgataaaaagctaatttaaataaagaacgcaagcaagtaggaaacatttcttagcctattaacaagcattagtataagaagtgttgtaaatatcgtcaaaaaatacctaattataaaacaactcttgaatttttgagaactcagtattgagaatttcctgcttcaatcatttgaaagctcaaaaatgtcatttgtgtatttctacattaggcattcagtttgtatgttattttttggaatgaaaattgtgttatttgccgttggaaataatgtctgtttgacagtggatagaaataggaaggttcagcatgcttttttaatacttacagaaatttgtattttttgcatgctttggaaatagtggttgctaatattttccttaaaacagtagagtgagcttttaaaacttggttttaatttattatgatttatccttcagaaaataaagaggaaagccttttggaaaagcgcaggcagctgtctcgtgatattggtagattgaaagaaacatatgaagctctattagccagatttcccaatcttcgatttgcatacaagtaagagacttaagccttgaattttaacatagtaataatcaagacatttttatttaagctggaagcagtgtgaaaattttgtcgaaaccaagatttttgtatgaaacttgttgtaagctgcttttctttcattggtatttttcctttaaacatttgttgaaatgttttaaatgttggcagggaaattcttgtgaaatttaatggctaatgatgccactaatcttaaaatgagggaaatttaatctcagttcaaaatgtcttcagagttactgtatcattaatgttaaatatccacatttacatcttataatttgttttgctatgtgggttttttatggaatatttacagtaatcatatgtattatagggattagaacatcagagttgttcttactacattgaaacatactgaaagatctattgtgatttaaaaacaacagctggctagtcatttgggacattttaaaatttttggtttgttaaaaccattttgctgattctactttcatttcactttaatgtgttgtccaaaagagctcctgatgagtaaagtataactttttctactttattatctaagattaatttttgtcaacttttgtatttcagggatccagagaagaactggaatagaaattgtgtgaaaggacttgtggcttctctgattagtgtgaaagacacttctgcaaccacagctttagaattagtggctggagaacgactctacaatgttgtagtagacacagaagtaagttgattttaattttaaaaaatttaaaatttggttagcttgaaaagtcatgtgctgctaaaagaattaaatactttgatgttttaaggctctcccctaaggtgacttatttatagggtaaaactatttggttcataactttttgataactattccaaaggaggtctcatgcttactcagaaactcagaatgcatattaccaatcttaaacttttgggatctctttgctgtataagttgaatttaatttgtaaaataatctgggaataaatgacctgtttttgatgtcagtcttcccatcaaggtaacattgaatttatttacatttcttcagttctcacttattatccttctgtagaatgctcatattctttcctgtaaatgctacgtagtcattgtcaaatttacttccttgttttttttttaatttat

SEQ ID NO: 134244 - DNA, 3042 bp, Homo sapiens
caaatatgtaccctttgacctatgacctacttctacccattttctttcactcctcatccctgataaccactatcctactctttttatttgttcagcttttttttttaaaagattccatgtacaagtgaggtcatacagttttttattttttcttcgtctgattatgtcacttagcatcatgtcctctgggtttattcatgttgtcccaaatggcagcatctcctttttcaagttcaaatgatgttccattgcatatgtaattataacttgattgggataaatggcactaaacattcatttattatagactactaaacttgcattctctcaattttctgtcatttttaacatgcgttttttaaattcaaatgtgtgttgtaggttactggtaaaaagctactagaaaggggggaactgaaacgtcgatacactataattccactcaataaaatttcagccagatgtattgcaccagaaactctgagagttgctcagaatcttgtaagtctcattttgtcttatttatatgtttaatcgtcatctgtggtttttttaagttagaagacattaattttgagggacataatcatatgcagaaccacaaaattaaaatacaaaaaaattgggttggcttgtgcaattagatgataagagaatagagatgttggaagacttgaactccttttgatgcttcactttgtggtattagaatgtcctttttaaccttaagtcacatgactatcaatcaggtgatggtgaaaattacactcttgattcctgaatggttagaactgagcttctagatacgtaccccaaattcttcaagtttttgtttttgtttctttttatgtcaggcatactaaaactgcccacagtcacagccattatggaaggccttcattagtattgcagtgatgcttctttattagagttcttctagattgctattcagcctgtgcaggtacatagcaggtgaccaggatcccattcaactgctgacgttgatctaaagtgacatgcttgctagtaagaaaatagattagtacaaggaaatacatttaaaagttattgtagttgtgtaatactgtaaaaacatgaagtcagtcataacattcagctgtaatatcagtttttttattgatcagacattccaagtacatcagttgaaaagacatttctatgaaacttaaaaatatacttgtaactaagtggatgttgttgtatccttagttacattcagaagatttcaatgcaaatgatttcaaaatacagttgtgttgatatgtatactatcaggagagggaggatgagtgctgagtaattgaaaggtgatgtttttggttggtactttctttacttgaaaactcaccattaagtcaagaaggctcaggaagttaattcagccatacatcgagtcccagcattagaaggaaattgggatttcaagtaacagcaaaaatactttgcctcaaatcctttagccaaacctatttgatggtagctgccacatcaaagaacaatactgaacatgtgttacatagagcttccttcattgtgactgccactgctgatactaagctctaaaagagatgcttagtttttcttaaatgatgggcagaggtagcctctataaacaaaggctgagaagaagcattgtgatcaaaatagaggactggggattttttaaattacttttactctcagttattgtgttttcatttctgtaactggcagacgactgctctagcatgtttcatttgtatgagaaaatatttgttgtgaaatcaaattcctgattattgaaacaacattttcatatagttgtgttgatctggaaattataggttaagcactccaagtccaacaactgaaattttccaaaattcaaaactatgacacccaaaaaatgctcattggagtattttggatttagaaagttcaaccactgtaatacaaatataccaaaatctgaaaacaaacacttctgttctaagcatttaggataaaggatactcaatctgtactataattaaagttgtgtccagtcaacgttggtgaaggacacttagaaacatggtaatggctccttattgatagaaactttcataatgctccatactagctattaataaatattttacttagcaataaatctttcagtatttaaacctgcagtttttttttcctgaaactttgagttttacatagctttttagaaaattcagaaagagttttaatgctaggtaagtattatttaagtttctattacagcagtttttactggtttataaaatcatatctgaaaggaaaagtagtagtatgtactgtggcatatctgttgttgtcccacaggttggccctgacaacgttcatgtggctctttccttggttgaatataaaccagaacttcagaaagcaatggagtttgtctttggaacaacatttgtttgtgacaatatggataatgccaaaaaagtggcctttgataagaggataatgactagaactgtaactctcggaggtgatgtgtttgatcctcatgggacattgagtggaggtaagttttatatccttttctcctcacaattctttgtggtaaataggaagatgccttttttaagtacatttttagcccaactacccacttcttcaggaaacatgttaacttctcatttgtgtgtttgccagtgccacctacctcctgtcaaaagtaaaacaaaaaattaaacctgcccttgaaatggtaccttaatgccttaaaggaattcttagacagtgatcatattcttcttggtctagtatttgccacactgagtttgcagatctttgtcaagacaatagaataacaaacactgaataatatttactgtataccagacagtgttctacactatgctgtccaatacagtagccactagccatatgtgactttttacatttaattaagttaaaagtaatttccttggttgcattagtcacatttcaagagcccataatcacaaatggttaatggataattcgacaatgcagatatagaacatg

SEQ ID NO: 134245 - DNA, 2908 bp, Homo sapiens
taaatacctttcaaaagaaatgactaagcagccagaacagggatagaattacaaagttttcaagaaagtgcattttaaacaactaagttcaaaactatttttcttacactaaaagtagggaacattattattatttttaacatttgaaaatgaggttaataaatagataactacatttttgaaattttatgtaattgttataattaatcatttttcgtggtgagtagttggtttgatttttttttctttttagttagcaagagggattatttttaaggaaacctagctgttaaatatttctaatgtaaatagttgttacagattttagtcatttagagttgttcaccttcaatgaccagatctaaatttgaattaattggtgcctcagaaacttgaaagccgtcaaaattattcctgtaaccagtagcatcttatattgtttataacgtatgtgagtttatttaaggtaagaatctgaagtttgaatgtatttctcaaataccagaaaaatgacagtcatttcttacatgtttctgtttttgtaaggtatcgccaactaaaacagcagtgggagatgaaaactgaagaggcagatttattacaaaccaagctccagcaaagctcatatcacaagcaacaagaagaattagatgcccttaaaaaaaccattggtaagatgaaaacagtccatgcttaatctctggttttattcatatccgttaccttactttaggtatcttctctacctgtgctatgtttaagatatatatgataaagtttatttagggaaaatccaagtatgggatttctaggtcttagggtatggtcattttcatctttattgtatatcgtcaaaggtctgttcgtttttaccaatactcatttccaccagcagcatatgaacatttctccaagttcttttttctccagacttttaaaattttccaaatctgttggttgtgaaaagatagcatgcattagcatttaatttgcatttccctaattgctgatgaaatttgggatctttttttgtatgttcattggacctttgggtttatacttgtgtgaattttctgtttatttcttttgcccatgggttgctcatggtttttttcccactgttctcatgcttaagagtcctaatttcctgtaggttatgtgcattgcaaatatccttttaccatcttttttggctatgtactggtcttttaattttgtgttcatagtatttttgttttacaaaagtttttaatatttagtgtaattcactttatagccatttccctaattttaagatagcttatatgttttccttagaatttaattgtatatggtagtttaaatttttgtcattcattaggacaatatccacacatgtgcttctccactaatattttaatagtattttctgcagtgaaaagtagtgtaagaaattgtgcggtaatgacttccaaggttatgtttgcacctgggtcctaacactcacaatatacatcagttgttacagcaacacgtgttcattcagtattgcccttttatttatttttttgagacggagtctctctctgtccccaggctggagtgcagtggcgcaatctcagctcactgcaacctccacctcctgggttcaggtgccttcctcagcctcccgagtagctgggactacaggcgtgcatcaccacacccagctaatttttgtatttttagtagagatgaggttttatcatgttggtcaggatggtcttgatctcttgacctcatgatctgcctgccttggcttcccaaagtgctgggattacacaggcatgaactaccacgcctgaccttatttttttctttcacagatttggggatgtttttcctttgctgtatcccaggcatactgtcatattatttgtcgactttaatgagaagttccctgaatatgtataaaataggcaaagaacataaagtaagcttgtttatgaaattacacactttctagcaactatagaaaaaataccatagttatactgttctggttttaggaagcatacaattgcattaaaaatatgatctgtgatttttttttttttaataggttgcttcaatacctttgtaaaaggatagttgtaggtaaagttcaatttcatagcaaaagaaattattttgttacagatctttagataattcaagtatggcttttgggtaggatctgtgtttcattataccatttctagaatatcattgggatagttaattttcttaaattgtaccctgtaattttccaaaccatttcttctattaaaagttgaatttgtcaacctttaccattgttaacttagccacatttgcttactttgtgatgcagaggaaagtgaggagactttgaaaaacactaaagaaatccaaagaaaagcagaagaaaaatatgaagtattggaaaataaaatgaaaaatgcagaagctgaaagagagcgagaactgaaagatgctcagaaaaaactggattgtgccaaaacaaaggcagatgcatctagcaagaagatgaaagaaaaacaacaggtaataacttctttttgaaattgaaccaaccttttaaagtcaacatagagctgaaggtggtagagcatcattggttgaccttattcatcagaattgatctcagaatctaaaagggagcagtgttctttggaaacaaattatgcttcttacaagtcaaaggagtatccaggatgagcatctcaaatccaaaatacaaattagaaactttttgagtgttgatctgaggctcaaaggaaatgttcattggagcagattggatttgggatactcagttactctgtataatgcaaatattccaaaatccaaaaaaaaaatctgaagtctggaagacttctggtcctacacactttggataagggatatt

SEQ ID NO: 134246 - DNA, 1009 bp, Homo sapiens
gaatattgagaaactttttacacattgaacaattttgtttttaaaaaagctttacttccagtaattcatctgttacgtagaatgttatattattttccctataggaataaaggataaagaaaataatttatgcagagttctttgaacctataaaaattacacatacttttttttttgatataggaaaataaacttccttttctggggaagcagcttaacctgtactttcggtagctgagtggtaacaaagctgtgggtcttacttgcatgagattattatttatttaattgttctgtacatatttgtttttcagtagttaataacctatatgaatacctgaatactgtattttttataggaagttgaagctatcactctggaactggaagagctcaagagagagcatacatcttacaaacaacagcttgaagctgtaaatgaagctatcaaatcctatgaaagtcagattgaagtaatggcagctgaggtggctaaaaataaggtaggatttatttatcaaattcgagaaattgaaaatgcgaatctttttatgaaacattagcttaagatgtttgactttagtgttctcagtcttttcactcgtcatcatgagagaatgaggcacaaatagcttttactcatccagaattgccagttttgggatcacataggtcagtcagcttctagcagtccctcttcttcctcacttagttgattccatctacattacatctaacaaaaaacgctctcatttgcagcatgagcgtgcagcatgagcattgtacctcccaccccttttaccagggatgatccaagttttcttctgtgtataaattgattagtccttttaatggtgatataaaatatagagggttaggtgatcatctctctgcctgtaatcacattgccctcttgcccagggatctgtcagataattgtttagtaaattaaaattatttacatgttacctcaccacatattttctttaatttttttgttttaggagtc

SEQ ID NO: 134247 - DNA, 1057 bp, Homo sapiens
gttggcagatcacctgaggtcgggagttccagatcagcctgaccaacatggagaaaccccgtctctactaaaaatacaaaattagctgggcgtggtggtacatacctgtgatcccagttactcaggaggctgaggcagcagaatcacttgaacctgggaggtgtaagttgcggtcagccaagatcgcgccattgcactccagcttgggcaacaagagtgaaactccatctcaaaaaaaaaaaaaaaattagtcattgaaggttttttcctcttcagtatttgattcaaaagtattaaatagttaagaaactggcttatacatattggtttgtaaacattcatagatctcccatctatttttatatgtggctaggtatccaaaatgttgaaagattatgactggattaatgcagagagacacctctttggccaacccaatagtgcctatgatttcaaaactaacaaccctaaagaagctggtcagagacttcagaagttgcaagaaatgaaggagaaactaggaagaaatgtcaatatgagagctatgaatgtattgacagaagctgaagagcgagtaagtcaatttcttatgaatatctggccgcattagaacatgactagcattgacagctctgtatgacctctgatgcaattattagagttaaccttttgcagatgtccttgatacttttctttctgctttcctttttctcttttcgtcatttttttcttattactcttatgcatcattagttgtttttacattctattacacctggaatgactttttcactggcttttgttctttgtcaaacataattcctcacatttctatcatttcatttctttcacttgcattgaaaagccttgaataggatatacttctgtcatcctcttgactctactgtatactgaaactatataagtaatgactaaagccattatacacataaatactgtttcactgatctgtaaattctgcagcctcttctcagttttaatgctctcaattactcaataatgttattcttccctaacctgacaaaactttgagtct

SEQ ID NO: 134248 - DNA, 1050 bp, Homo sapiens
tatcatggtgaaggatcaaaattttgttcatgtcactgctaaggctgaccttaagaggagagctttcagggctccttttacttaagtttatatgtaacactttttttttttttttttgccttggctgctaaggagataagggaatattagtggagtcaaaatattttaaggactttgtcttataaattcttagttctagtaatttagttatatacatatggatgattttattcctaattttgttaagagtgtgtatatgagtgtgtatatacacacacatcatacagtatatgtatagtatatgagtatatataattcttagtgcattatatctttttggtaaatagcaatgtatgtattgtatataaaaataatgaaaactgtttatttctgaccaaattccagaatatagaagagattttatattttcccagttaaccatgttttttatctcatagtacaatgacttgatgaagaagaagagaattgtagaaaatgacaaatccaaaattcttacaactatagaagaccttgaccagaagaaaaaccaagccctaaatattgcatggcaaaaggtactttttatgtttgttttatatgaggttgcaaggatgaaaaaatatcatcagtggagttatactctataagaaatttgaaatagctgatctatgtttgaatgaggcacatattcacaccttaattaaaacctctgacttttaaatgcatttttttctttttgaacttgactactaccagatcctggcattcttgtacttctgtaagaattggatagtaaacaagccaagtttagtattctcttttacaggatgcttattcaacaaaatcccaattccattttgttttatgacaactttggcagatcttaggcttctttactgttacttctacttccctgacttcatgtatctgtctcctataggataattccttagcctctcatgtggaagtttttccatttttactatagcggaagattcttacttcagagattccaaacatagagttactgtgctgtttggtagtttagca

SEQ ID NO: 134249 - DNA, 1168 bp, Homo sapiens
cctcacattgatctacttaggcctttggacaacaggaaaaagaaaagttttagaggataacattttattccaaaaatacttgtgtttttttgtttgcttctctattttgtgttttttttcctcatgtgatacaattgtgtgtatcttgaggattcctgcagtgtgttctacaaaagtgtcaaaactttggactagagttagaggtgtgccttctagttcccctggaaattagagcaggattcagtaattcatttttgtaaagggccatatagtaaatattttttgcttgggagcccatccagtctctgttgcaactacctgattttgtcttatcactagcaccgatagacgctttgtaaatgaatgagcatatccagatttttcacatgggccatagtttgtcagcccctgagttagagtaatagacaaagtagacctgctgtgttgcatatacatatatcaacaattgattcttcttggaaagcatcctgatgttttaacttttttattttttaaatccaggtgaacaaggactttgggtctattttttctactcttttgcctggtgctaatgctatgcttgcaccaccagagggtcaaactgttttggatggtctggagttcaaggttgccttgggaaatacctggaaagaaaacctaactgaacttagtggtggtcagaggtgaggaatcactttgctatattataattttcattcctctttattataattcatctccttaccttaaaactgtatttgtgttttaactacctttgcatgtagaatttaaggagtctaatatataagactaaacaatttggttaaaacatttgattaaaataggtgacaaaggaggaataagcaaatagaaaattagacaaaacatgtttttaaaaaatctattttcaaatattagaaaatgaatagtccaggacaagatgaaacagaaatgctgagccctatgttcaccctggctttctctctagaggcagtttttggacttcagttgcctaaacagaggtcagtagtatcactaagttaaaaagacagattagaattttgcaaagccctagagtgctgcaccttggcattaggtctctactgtccctgaagtgaagcctaatgtagacacatcctaagaaactgaacaaattttttgaaggaac

SEQ ID NO: 134250 - DNA, 1380 bp, Homo sapiens
ttaagtaattatacatattttatattaaaataaggctttttatgaattatatatttgtaaagaaaaaatataataataattatgattcttcataccagattagaatgagctgcagtaagctaaaagagaactgaaaatagtgctgtggaacctgagattaggtgtaactatgaattttacataagattgtttgaacttttgacagtgatgtacttagagtaatggccatagtctatacaacttattcacaaatggtaccaaaaaatatatagattgtgtgtgtgtctgtctgtgtgtatatgcatgtttatgtaagtgtttacattatgaaagtttgaaaaatgacatctaactcagttactgttaccaagatcatagttattgtcttaaataatgaccatagctcttaacctgctacctaggctctaatgagccaactggggaagggaaacaaaaagaaattttaaaactaacatgatcttaagaataggtgccaaacgtaatatggcaatattaaaattgtctatgaaaatagcatgcttccgaaaagaggagaaatggaaagctaaaataaaagaaataatattttaatacaacaaaagtgttaaagtttgaaactcaagattcttttttttatatgactacctttcagataaatctgctctattcacaataataggatcacatatttgcttcagtgttttgataagtgataaaatcaaatttttatggcttttcttctgaccttttcttaggtctttagtggccttgtcattaatactgtccatgcttctcttcaaacctgctccaatttatatccttgatgaggtagatgcagccttggatctttctcatacccaaaacattggacagatgctgcgtactcatttcacacattctcaggtaagaaccaggaaaaaaagtctcagtaatagtttaattagactatttttctaaaaccattctttagttagtagtcaatgttaataagatatttagggttgataaatactaaagcattgtatatctatttaaatagacttatgtttaaataggtatagaaggaaaaaagtttcactctcctttttaagaaagagctaggcattaaaaatgttggttgtagcatgagggagattccaatttagtcataatacagaattgatttagggttaatataattgttttctctagttaactaccataaagatgtacaatcaaaacaaaactgtctccgggatatttaactgaggtatcagaaaatcatgtgacacttgatggggaaatttaatttctcatggctaaaaagtagaacaaagaaagcctcttgaagctaagaacagtttgtttttaatgcactattgctgtaggagctggggctgc

SEQ ID NO: 134251 - DNA, 2128 bp, Homo sapiens
atgaagtacccaaagtaaaattaagagacttctaaaacaatatggacagctagcattcatttaggtgcctcatataactatttaaagaaataaaattatctccaaaccattcttatcaccagtataaaggagtaaacttcaagtatatcacaaaaagtttttttatacttttttcttttttccttaagttcattgtggtgtcactaaaagaaggtatgttcaacaatgcaaacgttcttttcaaaaccaagtttgtggatggtgtttctacagtagccagatttactcaatgtcaaaatggaaagatttcaaaggaagcaaaatccaaggcaaaaccacccaaaggagcacatgtggaagtttaaactacaaagttatttcttcatcttgacctgtttttttaaatgtaaacttttaaggacttgagataactaatttgtttatatacaaaaattaatgttactgtgttacttaacccatgttttctctttatataatcacttatcgcttacaaatgagcatatattcctcatctcttaactagtctaattatggtccaattattgtggttgtgattttatgcatatcatcaaatgtttttttcttatgcgggtcttttatatattagggatcctgagatacccgattctatatgtaaaagctaatatacaaaaaagcagattaaattacatgataaatgtagctgatcatcagtgtttaattgatttaattcctaaggcaatattaatgtgttttctaaagtcattcaggtaaggaagaattataaatcaggtaactggaccaacaaagggaacacatataaagctattatgcatgcatggagccgtttgaggctagttttttaaggccacaactccagacccctgatttagactgagataggaaacagatcttgaaagaatccttattttaatgatacatgaatatcatgttcctatacgcttaataattggtctctacgttttaatgatacatgaatatcatgttcctatacgcttaataattggtctctacgactttaatgtttttgtttttttaagctgtgtaagtatttttaaatcaaagcttaggaggtgtgttgcgtggtactatctgctgcaaatttatctgaagtttgttaatattttccaagatttttgtcagccttttcataatccagtcattaacaacctattggtaaacaagaatgtaggtgccagtagactaaaccaaatttatttttccctgagtctgatatatatatgtataaatataaataactcaatccatctgttccaccaaaataactcaaaagttggatgattatttgtcttccgctttccagttcaaagggatgaaattcctttagaacttgaaagatgacactagcgaacaccatgagaatactgtctacagtttttggtacgtcatcactagaacagtgaccccaaactgaatcatgaaaggtctgacatgatgtaatctgatcttccatgtgttattttggccccacatctcttcttgattttttagtcttatttccttagtgttattatcatacttcccctgatatatggccgtacttcctggccctgggcttgacatttcccacccttcattctccatacatatgagatgtcagaaaacatgcagtaattgatattatgggacacattggaaaggattgaatctggaattagttctgtccactgtggaggggagaggaaataatgctgtaaatgttgagttacagaaagtccaatgtcaaatatagtttttttgtttcctttcaaatgtattacagactgtgccaaaacagttaccaattcacactgtcaatattaaagtataccatagtatacaaattagtcagtacttgctgttaattttaatatttctgatttaacagttagttattaagtggtacttcattgctgttttagccaacgttttaaaaataatttgggagtttgactattttggcttacgtactcatttccttttctctgctaaaaatgttttgcttgtgtgcgttcctgatttttgtcttgtataatcttgatctttgaaaaccctcaaacatgtattaaattgttgtaactttttttcattagagggaagacattaa

SEQ ID NO: 134252 - DNA, 1035 bp, Homo sapiens
tttcacttgcacaatgggactatttagactagtggcagttctgaagactcttaataaaatatattagcagcctatgtcacagattgtctctacatagggttcatgtctagtccatggggctaaggaaagttggggagaatttagaaacagacactattctatggcctccagttttctctctcttctatatgagcgcaatacaaaaatcttgttctaaccaaaaatagactgataaaaattacctcttgtaaattaactacctctctaatcttccctgctaattcattcacctcttttattaccaatggtctgaattagctattattattcctaagttacatgtaaggaaactgaggctcagagatattggggaacttgcttaaggtcacacagcttgtaagtgattagatatgatttgaatccaggtctgtgtgactccaaagccattgctgtttttgttatacgacactgcctattaagttacaagcactagtacctcatgataaaaaatgggctacttgtaatatgaacatttttaatagagaagttccaagaaacaggacatcaccagggccatgatgtcattgtggtttacacttcccatgaactctttccaataaacatttcatttaaatttagtaaagcagttaataaagccataaaggttaattactagttaagggaaaaatatgacttcactttggtgaacatgtgaaaaatgaatcaacttctttctcagttaacccaggattatacaggcaataaagcatgattatggatttaacatgttaattcccagtagatttaatagcagtgctgtgaaatacatgaccaatcgctaacccatctgacaagccttcagacagcactaatcaagattaaatcacttggcccatatgtggatgcaatatatctttcgagacaaaatgaccataatttttcatcatagaggtagtatacatccctggtgataggatgagaagcagagaagaaaaaagtgaggaacgcaatttgtgatctcaatctgacacctca

SEQ ID NO: 134253 - DNA, 1310 bp, Homo sapiens
caatgtgtggaactaatacatatggtattgagtaagatggaatattggctaaacaggggaaaaccctttgtaaattaaagagactaagtcttaaatgtagttcttcggtaaaggagtatcattatgatcccacagccttcttgtgagcaaattctcgtgaaaaaatggctagaggtagacccctgctaggaaacagttgctatatattcatcagaattaagagtagttatctttattgacatctctatgtaaacaagtgtatatggagaattgacaacaaaagtaaacaatggataatgagtctatgtgtgttccttgtaccagactcagatttggttgtaaccaaatctgtaattgtaccttcccaagatatttacatttgtcttacctccttcaggtgtgttcatcttttgctacgggccctagacaatacgatggaacgttctatgaatttcgtacttattaccttaaaccttcaaatatgaatgcgttcatggaaaatcttaagaaaaacattcatcttcggacctcttactctgaattggttggattctggagtgtagaatttggaggcagaacgaataaagtgtttcatatttggaagtatggtaaagagtcatccagttttagtattcagtatagattttcattctgttaaatgtaacataagacttagttcttggatctatattaccatagatacatacaggttaagtaagactttttaaaagcaataccaaaaaaataaatttagcagatcttcttcccagtggtacacctctaaccaccccttgcttgaactcttatgttatcataaatgagaaaacatgcagtctcatatatcaaaccataaaattgtgaattagactttaatcctcagaaaaatgttagaatcgtttgctataaagatagctcatgaaaaatttaaagcagtaattgtaaatgttcaagtgggttaagatcaccgttgggcctgccaaaagacatgtatatttaataaaaatgttttaaatgtgtaactaatgtatatggtattgacgaagatggaatactggctaaataagggagaaagctttgtaaatttatgagactcctaattgcagttcttgggtaaaggagtgtcattaggataagataattttttttttcttattattgttacagctagggctggatatcagcatttttgcagaaataattcacccatttgggagctttataaaaatggaggtttttaaaggatgatagttaacttttaagcgtcacccaactctgagatttaataattctgttatgtttagagaccactt

SEQ ID NO: 134254 - DNA, 1031 bp, Homo sapiens
tataactaacatatttagttttaccttttgattttgatttaaagaataagacaacatttctgattcactttttcaatatttcttatttgctattgccatatatttcagaaactacttgtggtttatttctgcagttcatgttctttggtggaatgagagtgcagatagtcgtgcagctgggagacataagtcccatgaggatcccagagttgtggcggctggtaagctgtttcactaagcacgaattatttttagaacaaatgtgattcaaccaataactgtatgccttcttatgaaatgtttttccagttcgggaaagtgtcaactacctagtttctcagcagaatatgcttctgattcctgcatcattttcaccattgaaatagttttctactgaaatacaaaacatttcattaactgctctaagatgtgtctgctaatggtgcttaaattctcccaagaggttctcgcttttatttgaaggaggtggtaagttaattagttaatttgctgtgcttcttgcatttttgaaagttacatattctccactgctttaagaaataattcagttcactttcaccttggcatttcagtatctgttacacattagaagtagttgtcactatttcatcatcttggtttttcatttgttttagaatacctcttctgtattttgataactcattgctttatagcattttcttttactcaaataaggattttacatttccttgcctgacagtatttttgaattatttatataaaatatctatcttttcatcatgtctatagttcctgagattttaaaaaaatttgcttagtaaaggttattttgtgatataaaatgggatttataaaaatattagattgtttatttctttactgtggaaaagtacaatgtcatctgtattaattattgcttttacattcattgattattagtcattctaacttggaaaataatgcaattgggtcacagtgttaaaaatctagaaaagacttgttggtttatatgctgaaattgttcattt

SEQ ID NO: 134255 - DNA, 1822 bp, Homo sapiens
tctcattggggttgcaacaataattcatcaagtaatcatggccagcgattattgatcaaaatcaaaaggtaatgcacatcctcattcactaagccatgccatgcccaggagactggtttcccggtgacacatccattgctggcaatgagtgtgccagagttattagtgccaagtttttcagaaagtttgaagcaccatggtgtgtcatgctcacttttgtgaaagctgctctgctcagagtctatcaacattgaatatcagttgacagaatggtgccatgcgtggctaacatcctgctttgattccctctgataagctgttctggtggcagtaacatgcaacaaaaatgtgggtgtctccaggcacgggaaacttggttccattgttatattgtcctatgcttcgagccatgggtctacagggtcatccttatgagactcttaaatatacttagatcctggtaagaggcaaagaatcaacagccaaactgctggggctgcaagctgctgaagccagggcatgggattaaagagattgtgcgttcaaacctagggaagcctgtgcccatttgtcctgactgtctgctaacatggtacactgcatctcaagatgtttatctgacacaagtgtattatttctggctttttgaattaatctagaaaatgaaaagatggagttgtattttgacaaaaatgtttgtactttttaatgttatttggaattttaagttctatcagtgacttctgaatccttagaatggcctctttgtagaaccctgtggtatagaggagtatggccactgccccactatttttattttcttatgtaagtttgcatatcagtcatgactagtgcctagaaagcaatgtgatggtcaggatctcatgacattatatttgagtttctttcagatcatttaggatactcttaatctcacttcatcaatcaaatattttttgagtgtatgctgtagctgaaagagtatgtacgtacgtataagactagagagatattaagtctcagtacacttcctgtgccatgttattcagctcactggtttacaaatataggttgtcttgtggttgtaggagcccactgtaacaatactgggcagcctttttttttttttttttaattgcaacaatgcaaaagccaagaaagtataagggtcacaagtctaaacaatgaattcttcaacagggaaaacagctagcttgaaaacttgctgaaaaacacaacttgtgtttatggcatttagtaccttcaaataattggctttgcagatattggataccccattaaatctgacagtctcaaatttttcatctcttcaatcactagtcaagaaaaatataaaaacaacaaatacttccatatggagcatttttcagagttttctaacccagtcttatttttctagtcagtaaacatttgtaaaaatactgtttcactaatacttactgttaactgtcttgagagaaaagaaaaatatgagagaactattgtttggggaagttcaagtgatctttcaatatcattactaacttcttccactttttccagaatttgaatattaacgctaaaggtgtaagacttcagatttcaaattaatctttctatattttttaaatttacagaatattatataacccactgctgaaaaagaaaaaaatgattgttttagaagttaaagtcaatattgattttaaatataagtaatgaaggcatatttccaataactagtgatatggcatcgttgcattttacagtatcttcaaaaatacagaatttatagaataatttctcctcatttaatattttt

SEQ ID NO: 134256 - DNA, 1530 bp, Homo sapiens
gtactcacttcatttctctgtgtctcaggtttcccatttttaggtgagaattaaggggctctgataaaacagaccctaggattgtggacagcagtgatagtcctagagtccacaagtctgcttttgagtgatgggcccatgtatctggcacatctgcaggcagagcgtggttctggctcttcagatgatgccggtggagcactttgaggagtcctcaccccaccgtgataaccagacattaaaatcttggggctttgcatcccaggatttctctgtgattccttctagacttgtggcatcatggcagcatcactgctgtagatttctagtcacttggttctcaggagccgtttatttaatggcttcacatttaatttcagtgaacaaggtagtggcattgctcttcacagggccgtcctgttgtccacaggttccagattgactgttgccccttatctatgtgaacagtcacaactgaggcaggtttctgttgtttacaggacagttctgcagatcgatttctcaacagcttgggaagatttatgacaggactggacaccaaaaataatgtcaaggtaaaccgctgtctttgttctagtagctttttgatgaacaataatccttatgtttcctggagtactttcaactcatggtaaagttggcaggggcattcacaacagaaaagagcaaactattaactttaccagtgaggcagtacggtgtagtgtagtgattcagagaatttgctttgccaccagacataccaggtaaccttgactaagttacttaacctatctaaacctcagttccctcatctgtgaaatggagacagtaatcatagctatttccaaactgttgtgagaattcaatgagttaaaggtataaggtcctcaccacagcgcctgcccacatagtcagtgatcactatgtcctgaacactgtaattacttcgccatattctctgatcatagtgttttgccttggtatgtgactagaatttctttctgaggtttatgggcatggttggtgggtatgcacctgcctgcaggagcccggtttgggggcattaccttgtacctggtatgttttctttcaggtgtggttcaataacaagggctggcatgcaatcagctctttcctgaatgtcatcaacaatgccattctccgggccaacctgcaaaagggagagaaccctagccattatggaattactgctttcaatcatcccctgaatctcaccaagcagcagctctcagaggtggctctgtaagtgtggctgtgtctgtatagatggagtggggcaagggagagggttatggagaaggggagaaaaatgtgaatctcattgtaggggaacagctgcagagaccgttatattatgataaatctggattgatccaggctctgggcagaagtgataagtttacgaattggctggttgggcttcttgaactgcagaagagaaaatgacactgatatgtaaaaatcgtaacatttagtgaattcatataaagtgagttcaaaaattgt

SEQ ID NO: 134257 - DNA, 1023 bp, Homo sapiens
tcatgctagaaaggagccggagcctgtgtataaggccagcgcagcctactctggacagtgcagggttcccactctcccaactccccatctgcttgcctccagacccacattcacacacgagccactgggttggaggagcatctgtgagatgaaacaccattctttcctcaatgtctcagctatctaactgtgtgtgtaatcaggccaggtcctccctgctgggcagaaaccatgggagttaagagattgccaacatttattagaggaagctgacgtgtaacttctctgaggcaaaatttagccctcctttgaacaggaatttgactcagtgaaccttgtacacactcgcactgagtctgctgctgatgatactgtgcaccccactgtctgggttttaatgtcaggctgttcttttaggtatggcggcttttccctgggtgtcagtaatactcaagcacttcctccgagtcaagaagttaatgatgccatcaaacaaatgaagaaacacctaaagctggccaaggtaaaatatctatcgtaagatgtatcagaaaaatgggcatgtagctgctgggatataggagtagttggcaggttaaacggatcacctggcagctcattgttctgaatatgttggcatacagagccgtctttggcatttagcgatttgagccagacaaaactgaattacttagttgtacgtttaaaagtgtaggtcaaaaacaaatccagaggccaggagctgtggctcatgcctgtaatcctagcactttgggaggccgaagcgggtggatcacttgaggtcaggagttcgagaccagcctggcctacatgacaaaaccccgtatctactaaaaatacaaaaaaattagctgggcttggtggcacacacctgtaatcccagctacttgggaggctgaggcaggagaattgcttgaaccctgtaggaagaggttgtagtgagccaagatcgcaccgttgcactccagcctgggcaacaagagcaaaactccatctcaaaaa

SEQ ID NO: 134258 - DNA, 1051 bp, Homo sapiens
ggaaggagtcctgagccattttttttttcttgagaatttcaggaagaggagtgcttatgatagctctctgctgcttttatcagcaaccaaattgcaggatgaggacaagcaattctaaatgagtacaggaactaaaagaaggcttggttaccactcttgaaaataatagctagtccaggtgcggggtggctcacacctgtaatctcagtattttgggatgccgaggtggactgatcacctaaggtcaggagttcgaaaccagcttggccaatgtggcgaaaccctgtctctactaaaaattcaaaaattagccaggcatggtggcacatgcctgtaatcccagttacttgggaggctgaagcaggagaattgcttgaacctgggaggtggaggtcgcagggagccaaaattgcgccactgtactccagcctgagcaacacagcaaaactccatatcaaaaaataaaatgaataaaataacagctaatctagtcatcagtataactccagtgaacagaagatttattaggcatagtgaatgatggtgcttcctaaaaatctcttgactacaaagaatctcatttcaatgtttattgtttagatgttcagaataaattcttgggaaagaccttggcttggtgtaagtgaattaccagtgccgagggcagggtgaaccaagtctcagtgctggttgactgagggcagtgtctgggacctgtagtcaggtttccggtcacactgtggacatggtcactgttgtccttgatttgttttctgtttcaattcttgtctataaagacccgtatgcttggttttcatgtgatgacagagaaaacaaaacactgcagatatccttcaggacctgacaggaagaaacatttcggattatctggtgaagacgtatgtgcagatcatagccaaaaggtgactttttactaaacttggcccctgccgtattattactaattagaggaattaaagacctacaaataacagactgaaacagtgggggaaatgccagattatggcctgattctgtctattggaagttt

SEQ ID NO: 134259 - DNA, 1032 bp, Homo sapiens
tgctttattttgggccatctaaggttatcttattagtgtatttgttgttcgtctcctccatgggcatacacctccatgaaggcaggtattttcaccttaggccctcgaatatactggacagcatctggcacgtagtagatgctcaacgaatgtttgttgtgtgagcaaatggttggttgattggattgaactgagttcagtatgtaaatatttagggcctctttgcattctattttacttatgtataaaatgatacataatgatgatataaatgatgtcacagtgtacaaggctgttgtgggatcaagcaatcaaatgagatcatgcttgtcttttccaaatggtgagggaatagatgcatgtttgtggttgttacggaatgatcctgtgctcctgaggcaacagaaaggccaggccatctctggtaatcctactcttgctgtcttccctttgcagagacacgccctgccaggcaggggaggaagagtggaccactgccccagttccccagaccatcatggacctcttccagaatgggaactggacaatgcagaacccttcacctgcatgccagtgtagcagcgacaaaatcaagaagatgctgcctgtgtgtcccccaggggcaggggggctgcctcctccacaagtgagtcactttcagggggtgattgggcagaaggggtgcaggatgggctggtagcttccgcttggaagcaggaatgagtgagatatcatgttgggagggtctgtttcagtcttttttgttttttgtttttttttctgaggcggagtcttgctctgtcgcccaggctggagtgctgtggcatgatcttgcctcactgcaacctccacctcccaggttcaagcgattctcctgcctcagcctcctgagtagctgggattacaggcacgcaccaccatgtctggctaatttttgtgtttttagtagagatagggtttcgccgtgttggctaggctggtctggaattcctgacctcaggtgatccacccgcctcggcctcccaaagtgct

SEQ ID NO: 134260 - DNA, 1023 bp, Homo sapiens
gttgtggaacatagcatgtgtttgtgacctgtgcctgttatttttgtgctttctagttgtgcatgcaaagagtacaaagttttcttgccctttcttggaaaatcctgcttgtctgtgccaaagggataattgtgaaagcacttttgaaatacttaatgagttgattttcttcaaattaaaaaaaatatataaatgtatatgtgtatgtacatgtgtgtacacatacacacctttatacatacagcccatttaaaacaagctccactttggagtgctctacgtcaccctgatgccgaatacagggccagagtctgagatccttctgggtggtttctgtgttttgttcatttctgttttaagagcctgtcacagagaaatgcttcctaaaatgtttaatttataaaaacatttttatctctcgattactggttttaatgaattactaagctggctgcctctcatgtacccacagcaatgatgctcctgaggacacgggaaccctggaactcttaaacgccctcaccaaagaccctggcttcgggacccgctgtatggaaggaaacccaatcccgtgagtgccactttagccataagcaggcttcttgtgcttgttgcctggtttgatttctaatatgctgcatttatcaactgcatgccacattgtgaccgccagcatttgccctttgaattattattatgttttatttacaaaaagcgaaggtagtaaccgaactaaattatctaggaacaaacgtttggagagtcttctaacaccgtgcaaagcacgtcattacagacatttgtttactgatttagaaccttaatatttaatttaaatagcactttacacttactgatgaaatgcttttcctttctttctctcccagcccctgtacttaagtgcttcaataggctctcattatatatgatttttaggttttgcttatcagcttcttcgcttttataatctgaaaagatggcatatgaatttttataaaaagggacactttcttcttctcaaat

SEQ ID NO: 134261 - DNA, 1030 bp, Homo sapiens
agaagctgagatgctaattgccattgtgtattctcaaatatgtcaagctacgtacatggcctgtttcatagagtagtctataagaaattgatgacttgattcatccgaatggctggctgtaacacctggttacgcatgaacacctcttttcagttgtctcaagacacctttcttttctgtacttatcagacaaggactgaaaggcagagactgctactgttagacattttgagtcaagcttttccttggacatagctttgtcatgaaagccctttacttctgagaaacttctagcttcagacacatgccttcaagatagttgttgaagacaccagaagaaggagcatggcaatgccgaaaacacctaagataataggtgaccttcagtgttggcttcttgcagaatccagagagacagacttgctcagtgggatggatggcaaagggtcctaccaggtgaaaggctggaaacttacacagcaacagtttgtggcccttttgtggaagagactgctaattgccagacggagtcggaaaggattttttgctcaggtgagacgtgctgttttcgccagagactctggcttcatgggtgggctgcaggctctgtgaccagtgaaggcaggatagcatcctggtcaagatatggatgccggagccagatttatctgtatttcaatcccagttctattccttgccagttgtgtatccgctggcaagttacttctctatgcctcaatctcctcatctgtaaaatggggataataatattacctgcaatacagggttgttacgaaaataaaaatgaataggtgcttagaatggggcctgacattagtaagtgcttagttttgtgtgtgtatatgttatttttattttggaggagaacataaaaaggacaaagtgtagaaaaactggttgggtgtattcagctgtcataacatgagagttgttatgcccagatgcacttgacatgtgaatttattagaaacatgatttttctctgagttgatgtttaactcaaactgat

SEQ ID NO: 134262 - DNA, 1031 bp, Homo sapiens
gagacactctgggcatgaaagaaagtaatgataatagttaattttatatagcgttgttaccatttacaaccttttttttttttttaacctctatcatctcaattaaagtgcagagagaccctgggaagaaggtaactatatttattatcccagatgagggaagtgaggcttgtagggaattggtagctgattcaaggtcacccagcaggtaaataacagtggtgggaccagacccaattaccaggtatgttttcctctgtaccgcagtacatgcctgagatttatttgtgtgttgaagccagtggtacctaatgtatttacatcccaacctgaaactcctatccacttatttaccttttaatgagcctcttaactcaagtgcagtctgaggaccagcagcatcaggatcacttgggaacttgttagaaattcagcaacctgggcccagctcagacctaccgaatcagaatctgtgcattttaacaaggttcttgagtggttgaacacacattaaagcatgagaagcattgaactagacatgtagccaggtaaaggccttgcctgagatggttggcaaaggcctcattgcagcattcattggcaggccacagttcttttggcagctctgcttcctgacctttcaccctcaggaagcgaggctgttcacacggcacacacatgccagacagggtcctctgaagccacggctgccagtgcatgtgtcccagggaaagctttttcctttagttctcacacaacagagcttcttggaagccctccccggcgaaggtgctggtggctctgccttgctccgtccctgacccgttctcacctccttctttgccatcaggaggacagtgtttctcagagcagttctgatgctggcctgggcagcgaccatgagagtgacacgctgaccatcggtaaggactctggggtttcttattcaggtggtgcctgagcttcccccagctgggcagagtggaggcagaggaggagaggtgcagaggctggtggcgctgactcaaggt

SEQ ID NO: 134263 - DNA, 1029 bp, Homo sapiens
cctatctcagtgactaatggtagcaaagcattcccttaaaaaggcattatttgtgaaacttatctaaaatcgaattcgggtccaattaaatttttgaaattttatattaaaaattatattagtagggatgggtaagaggtgttttggtctggttggttggttagttgctatgactcagaattgctaagaaaacagaaaagtaagataagatcattgttttaacctcttttcctccacaaaatcaataaataacatatccctaaattactcttagaatttctcttaaattgcagtgaaaaaccaaaatccttcattcttggttgaaggttggaaaactacgttagagaggattagagagagaggatgagcaatcgtgtagtcagcccttgcctcctagtgtaggatttgtctcagccactgcttgttgtcctggctgccaacgttctcatgaaggctgttcttctatcagtgtgtcaacctgaacaagctagaacccatagcaacagaagtctggctcatcaacaagtccatggagctgctggatgagaggaagttctgggctggtattgtgttcactggaattactccaggcagcattgagctgccccatcatgtcaagtacaagatccgaatggacattgacaatgtggagaggacaaataaaatcaaggatgggtaagtggaatcccatcacaccagcctggtcttggggaggtccagagcacctattatattaggacaagaggtactttattttaactaaaaatttggtagaaatttcaacaacaacaaaaaaactcaacttggtgtcatgattttggtgaaattggtacatgacttgctggaaggtttttcataggtcataaaataacagtatcttttgatttagcatttctactcaagggaattaattccaggaattttggtggcaggcacctgtaatcccagctactcgggaggctgaggcaggagaattgcttgaacccaggaggcagaggttgcagtgagctaagatcgcatcattgcact

SEQ ID NO: 134264 - DNA, 1076 bp, Homo sapiens
aaatttgccagtcatggtgatgcatacctgtaatcccagctactcgggaggctgaggcaggagaatctcttgaacccgggaggcgggggttgcagtgagctgagattccaccattgcactccaacctaggtgacagggtgagactccgtctcaaaataaaaaaaaaaaaagaaaaggaaaggctgtgtgtgtgtgtatgtgtgtgtgtgtgtgtgtgtgtgtgtaacagcaccatcacactgtttgagttgaggagcacatgctgagtgtggctcaacatgttaccagaaagcaatattttcatgcctctcctgatatggcgatgctcccctatctcattcctgtgtgtgtttagccaggcaactgttgatcatcaatattatgataacgtttctccactgtcccattgtgcccactttttttttttttttgagttacttactaaataaaaataaaacactatttctcaatagacttgaagcttcaagatttcctggtggacaatgaaaccttctctgggttcctgtatcacaacctctctctcccaaagtctactgtggacaagatgctgagggctgatgtcattctccacaaggtaagctgatgcctccagcttcctcagtagggctgatggcaattacgttgtgcagctactggaaagaaatgaataaacccttgtccttgtaatggtggtgaaggggagggaggtagtttgaatacaacttcacttaattttacttccctattcaggcaggaattgccaaaccatccaggagtggaatatgcaacctggcgtcatgggccagctggttaaaataaaattgatttctggcttatcacttggcatttgtgatgatttcctcctacaagggatacattttaagttgagttaaacttaaaaaatattcacagttctgaggcaataaccgtggttaagggttattgatctggaggagctctgtctaaaaaattgaggacaggagactttagacaagggtgtatttggagacttttaagaattttataaaataagggctggacgcagtggcactgagttgagaactgttgcttgcttt

SEQ ID NO: 134265 - DNA, 1028 bp, Homo sapiens
tgctgagaatcatgactgggtgggagaaggaggtgaccctttgctgtcttatttttactgtgtatttccttttcagctacttaaaatgtattgcttagtgatacctaatgggttcattagcctgcttcctactgaacatttccgctcaggcatccacttggtcccaaggcctgctcctctcccatattctgaaatctggactacagactctcattcaactccaggttgcactgtggacacagtcccctcttgagcaggtacctccttgcagtggttgggacgtcctacttggctcatagttgggaagtgcatatgctggagctgaagcctcttgccttcccgggatagggcgtcctcacatcccctctgagaagttccccagcttccctctgttccccgtttccacacttagcgaggctcttgtccactgctacatcccccatagccagtccctcagccttgccattgcttatgctggtctggaaacaattcctagacttgtggggcatctggggaagttctccatctttttttagctggcatgacccaagtggtgtgggcagggctgtggattctatggtgtggctggaagccaggtagcctctctctactgtacatggaactcagcaacttctgagtcaagcaagatcttagctctgcaggtgtcttgccctgtccaaagttatggccacaccagtaccttttaactctagaagcccagtaagtgttttgtgggaccgcaaagatcattttctagacctgctgaatatgcctagaacgggtagggatggctttcacgctgttcctagggctgacaagtcacacgtttctgggggtacatacacaccgcggtccctgtgaatggcactctccatgagaactgtgatgatttgagttgaatagtgcacagcctacatggttctctgccatggcctggagttccttatcttgccttctccagtgaggactagggctgcaactggcctactttggctcctgacttgggggattctgaaataccttttttt

SEQ ID NO: 134266 - DNA, 1059 bp, Homo sapiens
tctaagtgccgagacacagaggtgtccaaaacaaatatggcccctctccatatggaatttctattctagagaagaatctgacccagaagggggaagtgactgtcccaagtctacacaaccacagaagggatattctgggaataaatcacggctaaacccccctgctgctccaggcagttctccttctacagtgctctattgtgctgttttaataatctttcaactgggaagaactcccatttcaggaattaagccgtggacaaatcttttaattatccttgaaatcatcctaataagaaatccaaggaggaagtcttacagggtgcctcacccacttttctcatcactggaactttttagacattttattattttcttcctaaaccagagtacaggcacacaagttgagtggtgtggtggctaaattaattaatgtttgcaaggcagtgtgagaagcattcattcatcttaaatacctatggtgactgcaactcagatgtaaaaattggataaatcctcagaaaccctagggaaagtgacatgtctgtattttgtctctgtgagatacagactggcagagataagtgtttctctgggtgagttttgtgtggtatctgggatgattttaggcagtacgtggatgagaacttttaattttaacccacatccaattgcaatttcatggaaattattgcttaggaggatgttcaacaggaaaaatataattaaagttaattcaaaagaaacattttctgtgaatatggtaaaacttgtgagagtagtttgtaaatgattgaagattggaaaacattggtataagagtgagtgtggggttttgtattaagattcattttgggaagaaatccatgctgcatccctcatgaagtgtgaactttgggcatgtgttgattctttctggcccagagtttacctgaagattagctgccctgagggtcactgagcattaaattagatgatgtctgtggatgactgatagtgaagctcatagcccacagttgacacataataaattcgagttgctttgcttccccttctgtt

SEQ ID NO: 134267 - DNA, 1083 bp, Homo sapiens
tcctctcaacatagtcaccacatacctggcactatgctaaggctgggaatgcagacagatgggtgcctgctttcagagtgctcaatgtgctgaggaagccagcaacagaaacagatgatttcaggagctccaggaaaatgctacaggaggagtgtgcctgggttactggagtagcacaggaggagggcttctagctcaggctgagattttagtaaaggaaattatgccacgatgaatcctgaagaatgaatagaagtgaaccagataaagcacgataggaagcatcttcccttacctaagggaagacacagaggtatatggaatggtatgttaaaaggttgggactccaaacagttctgttaaagcttagagagtggtgggagagactggagaagttgattaattagtaaatgaagttgtctgtggatttcccagatcccagtggcattggatatccatattatttttaaatttacagtgttctatcttatttcccactcagtgtcagctgctgctggaagtggcctggcctctatttatcttcctgatcctgatctctgttcggctgagctacccaccctatgaacaacatgaatgtaagtaactgtggatgttgcctgagactcaccaatggcagggaaaatccaggcaattaacgtgggctaaattggacttttccaaagatgctgtctttgggaaacatcacacatgctttggatcagaaaacctaggcttctaatttgttgataaggcatgaactcaggagactgttttcagtcctagtgaatggtgataattgtaattataacagtagacaacatctcttttacacattttaaatcatgaaaatagaataaccttactgataattttagaaagtggtgattaaaagcacatttaagataatgccttaacacctagtcttttccatatgcatgatgtcttaatcacacattgcaaatcatggaacacagaattttaagcagcatttgtgtagaacttctcagttttactaatattattttattttattctcataacaaccttgaatagaactcagatcatctgtcaatcatgtatttt

SEQ ID NO: 134268 - DNA, 1046 bp, Homo sapiens
tggctcaggcatgagggctgactgtcacccttcgataggagcccagcactaaagctcatgtgttggcagtgttcttgcgggaaggaaaaagaccagccagcccatttgttactgcacaagcaaacagcttctggtagctgtacagatacatgcactttctttcctcactgtgtttccatagacagatttagtgctgtagaagagtagagggcagtcacgggaaggagttcctgtttttcttttggctatgccaaatggggaaaaatcctcctatcttgtctttttagtgtcatcctctctccccttttcttcttctttataattctcatctctcatctctcctggaaatgtgcatgtcaagttcaaaagggcacaatgttttggtgaggaagaggtgggagaacacgtgccaggtgctaactagggtcatcatttcccccttcacagccagcttcctgtgaatgtgtgtgtgtgtgtgtgtgtgtgtgtgtgtgtgtgtgtgtgtgtgtatttcttttgccagcatcactgaatctgtctgctgtctggtattccaggttttggtttagggaaaagtaaaagtaattttataatcccagctgtcatttaagccacccctttgtgggtagcatatggtccactctctcagttcattgtcctaaagatgcttcatcagaaaggaataacttccaccccgttactctctgtccccttactctgctttatttttcttcgtcaatcctaccaccaccacccactgtttgaacaacccactattatttgtctgtttcccatccctggtagaataggagccccatgaatgaaggaactttgcttctgttgttcaccactgaatctctaaggtatggaacacacctggcatgtgataggcactcgataaatatttgttgtggctcatgggcaccttgcagagttaaggctgcagttgtttgtggaatttataagtggtaatgaatatttatctactattcctcttccaaggcgatcacacaataatcaggctttacactatccagttcttaggt

SEQ ID NO: 134269 - DNA, 1051 bp, Homo sapiens
aagcgattctcctgctttagcctcccgagtagctgggactacaggggtgcgccaccacgcccagctaatttttgtatttttagtagagacggggtttcaccatgttggccaggatggtctccatctcttgacctcgtgatccacccccctcagcctccaaaagtgctgggattacaggcgtgagctgccgcaccccgccgctttatgtgaaatctttaaaacacgtgtctgaagtaagtattctcccccatcattaaagtgtagatagagaatctaagactcagagaaggtaactgaattgcctagggtcacataaccattgagcagctctgagttcctcacggtgccttctgtgtcctcttctctctgctcaactgcatccatctctggctgcagtgccagctgcttcaatctgttctctctgtgggaggccgcaagccaccaggcatcagccaggagcagaagtgttcaaaaattgtccagctgcagctgggcagaactcaaggagttgtggtcccccactgcagctgacaaggatagcgagaagcaaataccctgaaggttaggagcccatcaggggaggactagagggaatcaattcatcagctgtgtccaaatgccccacctcccagcagaaggccacaccatctaccagtgaaacctgctgcaatcttgacccttgaatcctcaccatgatccggtatcctcttggctcaccaccgcaccccttccaatgaatcactaggtggtttccagtctacctctgatatagctccctaatttttcccctcctctacatctccagcctgcactctagagctgcaacccccttccccagtccaccgcactctgcctccgggatctctcccctcctgcaacctcaagggaattcttgcagtgatttttagaaagaaaaaagtgtaggctggacatgatggctcacacctgtaatctcagcactttgggaggctgaggcggatgggtcacttgaggtcaggagttcgagaccagtctggccaacgtggtgaaaccctctctataataaaaatac

SEQ ID NO: 134270 - DNA, 1042 bp, Homo sapiens
tcccagagggagaatggtgaagtcaccaacaccaccaggtcaccagcaaccttaagctctggatggaatgatgctagggaaaaatgtgagttagaaaaggagcctgacactatttcttttaaaggaaggccattagctcatcttgggaaagtcagctggctggcggggaagaggaggtaggaggaacgttagcagaaaatacctaactcttgctgtacacggtggctcacgcctgtaatcccagcactttgggaagctgaggcaggcagatcacctgaggtcaggagtttgagactggcctggccaacatggaccctgtgtctactaaaaataaaaaaaactagccagcatggtggcggcacctgtagtcccacctccttgggaggctgaggcaggagaatcacttgaatctgggaggtggaggttgcagtaagctgagatcatgccactacactccagcctgggtgacagagcaagattctctcgaaaaaaaaaagcctaactctggatggatcttccccagttctagaaggcaccagtgttaataagttcctgatgcacaaggctggcagagagtcagctgtgggagataaatcaagaataaagctgtgaggtagggaaggcggtgtagcataaagacccagacaaacatgtctgggtcactctgttccatttctgcttgcttggctctggcctctgctactgatctggccttcccagatgcccgccatgccattgctaacacctgcttggccttttatctggctttagacttagcatttactttgggatttatactgttgcttctctcttctgcatattgatgtttattgggctctccagtggtcccttgacttgtctatggagccctttctttttgtcacctattctgaagggaatttcatccaagtgatgctgatcaggccatgctccacatccctccctggcacctggcttcgagcttataggtgcagctcccttgggattggagctgctttctccacggagcccccatgggtgctgtgtgggtcttaatccagac

SEQ ID NO: 134271 - DNA, 1013 bp, Homo sapiens
tcaggcctactcccatactgtggagtgtactttcgttctcaataaatccctgcatttgctttcctgtctttgtgagttttgtccagttatttgtttgagaccccaagaacctggacaccttctatcagaacaccagcactttgacaggccgagggtgtggatcacctgaggccaggagttcgagaccagcctggccaacatggcgaaaccctgtttctactaaaaaaaaatttaaaaattagctgggcgtggtggcgtgtgcctgtaattgcagctactcaggaggctgaggcaggagaatagtttgaaccctggaggcagaggttgcagtgagctaagatcaagcctctgcattctagcctgggtgacagatgggggagtctcaccacattacccacgctggtcttgaactcctgggctcaagcaatcctcgtgccacagtctcccaaaatgttggaattacaggcatgagctactctgtctagctacaaatatcttaatgcttactttgtatgtaaaattttggggaaacttttattttttaattttgtttggctgcattttaaaaatttctatattgggccaggcacagtggctcatgcctgtaagctactcgggaggccaaggcaggagaatcacttgaacccaggaggtggaggttgcagtgagctgagatcgtgccactgcacttcagcctggcgacagtgcgagactccgtctcaaaaaaaaaaaaaataaattctaaattgaacacaactaagttttaaaaaagcagccccaacagcaaaaagactcgagacaagaaatgacagatcctataggaaactgaagaatgtgtttggtagagagaataagcattatttcttcttttatctcttgtttgtttgtttatttgttttttgagacagagtctcgctctgtcgcccaggctggagtgcagtggcccgatcttggctcactgcaagctccacctcccaggttcacaccattctcctgcctcagcctcccgagta

SEQ ID NO: 134272 - DNA, 1033 bp, Homo sapiens
aaaattctttttcttttttttgagacagagtttcactctgtcacccaggctggagtgcagtggtgcgatcttagctcactgcaatctccacctcccaggtttaagcgattttcctgccacagcctcccgagtagctggcattacaggcacacaccaccatgcccggctaatttttgtatttttagtagagacaagatttcactatgttggccaggctggtttcaaattccccacctcaggtgatccacccgcctaggtctcccaaagtgctgggattacaggcgtgagccaccagccctggccaggaagaaaattcgaatacatgccacagcatggatgaaccttgaagacattatgctaagtgaaataagccagttgcaaaaggacaaatattgtttgtttctacttatatgaggttcctagagtagacaaatttacagagacagaaagaatgatagttgccagaggctggagggagggagaaatgggagttattgtgtaatgggtatgaagtttcagtttgggaagatgaaaaagttctggagatggagtggtggtgactgttgaaagacaatgtgaatatacttaatacactcaacagtacacttagtggttaaagtggtaagtttaatgttatgtatattttaccacaataaagaatagtgaaagctaacgtttattgagtgcttacaatgtactaggaacagtatgctaagagatataaacacattgtgtcatttaatcctcacaacaacacttcttttgagagcaatgctactaagggcaccaaggttctttatagcttagcagagctcctaggagttgtcacacactaatggtgggggtcagcggggagaggaccattcccccggtcagaagtcctatctgtcactaatgttcctcagatgcatgttctctaaatccttcaagccttttggctttccagagcctcctatcatacatcctgggatctggacttgatgggctgggtcaggagaagagaaaagaaaatagagtgatgatgccttttggg

SEQ ID NO: 134273 - DNA, 1028 bp, Homo sapiens
catctccagctcctggcatggtgcctgtcatatatgagatcaaaccatgggaaactgcttctattttatcatctttaatccaaaaaaacgcaattgcataaattccagagtaataggaagttctgggcaaacatttgccaaataaatgaacacggaacaatcacatacccacaaatcctgattaagcatcaaagaacggaagcgctttaggttttcttgtggccttgggctccttaccacatgcctcaattatccttgcactcttaaacatggtggtgccatgagagattcccaacaggtcaacacacagctcttgtatcattttcttctttcgggaggctggcagtatctccccacagaagaagagtgatctctaacaggtcaaatgcatggttttctgcactgtgtttatgattctggaggccggcagtttttccattcagctgataagtggcagatcccgggatggatgagattagcatctgggatggcaagtgtccaggatggctcagaagtagctgccaaactccacttgactctcagtcccagcatcacagggtggcaagttgctgcagaggccatggatctcaaccatgtatcatttggaagtgaaaactaacagatgcgaaatagctttttaaaaatcaagacatggccagggatggtggctcacggccatattcccagcactttgggaagctgaggcaggagggtcgcttaagcccgggagtttaaggctgcagtgagccatgatggcactactgcactccagcctgggtgacagagcaagactctgtctccaaaaaataaataaataagaaaaagaaagcaagaacggatagaggtggctggttacagactcttcatccctaggcagttgtgccttccaaaacacagcctttggcttcactgtatctggcccactgtcagaggctaaaattcagtgtgaggtttgtcaggctccatcatccaaatggatcccagtggccaccattcacagttgcagagaggcctgaattagtgtttca

SEQ ID NO: 134274 - DNA, 1369 bp, Homo sapiens
tagcccgttcctggaaaagcaagaaatggagcacgatactaagaccccagaagagaaagacctccagcacaggagattcagctgaagactctttgctcctctgatgactgaaaatggaccagggagcatgtgaaagactggcattggaggagactctcagctggtatatgctatctatacttttggtctgttgctgtctgttcactgaaactctttgcatacactcatctgaaggctgaagggagataacacactgggtcagagatgtattttccccagcagagtaaatctccaactccacaggcaagagatctggcccactccagtcagatcacccacaccctctacaaagctgcatttctgtgggcaaccgtgtgagtccttagtagaattcacaggaatatattgcattatttaatgtgttaatcatcaaaactgcacagattctatagaacttattttagaaatacagataaaatatgtataagttaagagaaacaatgtctgggatttctttcaaaataatctagcccagggcccaggcacgatagctcacacctgtaaccccatcaccttgggaggtcaaggagaaaggattgcttgaggccagacctgggaaacattgtgagagcctgtctctaggaaaaatttaaaaatgagccaagtgtggtggcatctgcctgtagtcccactactcaggaggctgaggtgggaggatggcttgagcctggtgaggtcgaggctgcagcaagccatgatcgtaccactgcactccagcctgggagacagagtgagaccctatctcaaataataacagtaatcatcatcatcatcaacatcatctagactagagaggagaaaagtcagcatgcattgatgaaacaagattcgccatgtattgataatttttgaagctgggtgtggatacatcaggtttgttataaagttcttcctacttttttgtatatgctttacatttttcataataaaatgttaataaaaaatagttttcgcggggcccagtggctcacgcctataatcccagcactttgggaggccgaggtgggcagatcacctgaggtcaggagtttgagaccagcctggccaacgtggtgaaactctgtctctactaaaaatacaaaaattagctgggtgtggtggctcatgcctgtaatcccagctactcgggaggctgaggcaggagaatcgcttgaacccgggaggcagaggttgcagtgggccaagatcatgccactgcactccagcctgggcaacagagtgagactccatctggaaaaaaaaaaaaaaaaaaaaaaaaaaaaaagagttaagtgctgacccaggccttcaggtagcccaggattatatt

SEQ ID NO: 134275 - DNA, 1031 bp, Homo sapiens
cccccagcaagagctcttcacctctcccaccgaattccagtttctgcttcattagatattctgtcccttttctcttgcccgctgccccctggctgggttcagatggtttcagcgggtcccggagcccttccacggcccgctccgcagacctcgcttgctcgcttgcaccccatccccccttagtgccgtgacccgggccccgcggcctccccgcactcggaggcccctgcgggagcgccgactctgggctgggaaggagattgggcacctggtgggtgacgggagcgctacggaaactccctctttgttgccagtgtaacaggaggaagaggttccgaatttagtttttctgtgggcactggctgaatgttgtcgctgagggctgagatgcagagatttctctcagcttctaccctgcccccatccaaatttcgccaacctccttctctcggatccgagcccttaacctgggtggaaatgtttagacaactgtacgaggatcaaatgtaatagaactcgactactggccactaataactgagaggacctgtttgtaaattacctaatttagtggattagcgagtgtatttacaaatactataaaaagcaatcaggaatactgcatcaaactgtcttgtggtggtgtatgaaaaataggctctgacaacgcctgggatgtaatctcacagtttcattagcgtagtttcattaactgtggtctgtgatttgtttgttttagggggcagaaaagggctcttgtttttagaaataaaggatggttggttcttggtgaagaaaaacgctagtttggggggaaaaaattcctccagaaagctagcatctgtgataatgccagaagtgtttttgctgctgctaaatgactatatataactcagttttaaataacctgcatacttgttctgaaaatctgagatctgttagagagaaaatgactagaattgcagatgaatgggggacatttgtgttttattaggtatccatcctatcatcctattcctccagtctttttt

SEQ ID NO: 134276 - DNA, 1859 bp, Homo sapiens
ttcctttgctcctgatgacctgcttaatgtgtatgttttagttggagcagtggctacaacatcttaaaagagcttgtctgcaaactctaatgataacctacacaacacatgaaaacagtgtgctttgaggtaatctgcagttcagtttagcttttctcagcagtatcttcagcaactttaaagctctggcaggttttatcaatgtaaataaagtgcattttctttttgtagcagggcttcacttttgaaatataatttattttcccttacagtctcttgctatgttgtagattctcataaaagagtttgtggtcttccaaactttgatctcttgtaatctgtcctggtattattttcattttcttggcagtgtctgggtatcatgattttccatcaaaataattatactgttttaggatttagatcaaagaaaagtgtcacattctatactagcatttcattgctagaggagcagattattggcaaaataatttgtgctgtatcagctatgtacatctaggatcttaaaagtgtctagtgagtcagggctcttaaggaactttttaaattattttttaaaaattagtgaccattacaagttgtttactaatattggtaattgctcaatacaaaccaacacaggacagtctttgcctaaaagtcttttgaggggaacgtaaaagtaagatagtcttgagtttctttttacagtactaatcctccctaaggctcttaaaatttattcccatctccctataattcatttgttctggtataacctgacataatttctatccttgtaatgttaaacttcaaatttcacttgtaaatcttcagatttattaaatgctctttcccattgacaaaccagtttgaatgaatcttttgaaagattacttagcaaattgccgtaagtctttgtccttaatggctagatgattatttctcacagcagtgctttagaggccaggagattttgcaagttctgtgaagttctgtgtccttcagttctaaccttaaatgttgtaagagggatggaggagaatctttcaagttgaacaaactgccgcttgtctgtctagcgttaggagacatttgtccactgtctcatcccattgtcttcaaattgaaggctgtatatttaactgtctttttgtagcactcatattctgttttgggagtaataaaaaacaatcagaagtggtttacaaatgctggttaatatttgcatatgctaactgtgctttaacaattttaataataccatcatctgtatcagctttgtggagtttgaagtgagatggtaaaaattaaatttgaagagtgtagtgggaattacccacagagactaaagttgctcagttaaattaagacctgcaaagtaaacttcatctaacgggaacagaagtcatggcatgaagccttttttttccttcatcttctgaatactgtgttgttagcatagaggatctactcctcaaaatatgtaaatcaaagttaatttcgaaattggaaaataatgtagaaatggtaattttttttttttttttgagccagagtttggctctcatcgcccaggctggagtgtggtggcataatctcggttcactgcaacctctgcctcccgggttcaagtgattctactgcctcagcttctcaagtagctgggattacaggtgctcgccaccacacccagctaatttttttttttttttgtatttttagtagagacgagttttcaccatgttggccagggtggtctcgaactcctgacctcagatgatccacccgcctcagcctcccaaagtgctgggattacaggcatgagcctccatgcccggccaattcccaaatcttaa

SEQ ID NO: 134277 - DNA, 1364 bp, Homo sapiens
cttcagttacagtctgtatgttaacagttcccaaactaaattactgtcctggtcgctgatccttatatccaactgattaattagcatttacactagaatattgtacaggcaactcaaactcagcatgtttaaatctgtcctcaaaatcgtacccctcacccccggctttttcagtactttatctctggttcaccgaatgataccaatgccctggttgtggaaactggagactcgagtcctgtagggaacctgcctctcactcttctatatctagtcaccacatcttgcctctttgaccttctcaacgtcactgccagcactccggttcaagcctctgtcatctccagcccagtaccttggttacagatctctccgtaactgttcatgctcccttctaatttttcttcgtattgcagtcttggtgatctttgaaaaatcccaagctaattgtgttcctctcctacttaaaaccctttaatggtttcccattgctcttaggacaaagaccagaacccttgaccctggacaacaagaccctgtgtgtggctgttctccatctctctatagggtcaccttgtggtgtgcttttctttgctcattgcactgcagcctcacagattcttcagttggttgtattccttcctcttagagggcttttgcatatgtggttcacttgtctaggaggctctttgctttgctccctggcttttggctggttgctttaagtttcagtctgaaagtcacttccttggaaaagccttttctgatcccttcaaactaggccatgtctcctcattaaactctcatagccttatgtgttttccctgtgagcacttaaagcagtaaacacgtaattttacagttaatattaatgtctagactaggtggcggcaaactacagcccatgggccaaatctgacctgctacctgttttttatggcttacgagctaagaatggtctttacgtttttaagtggttgaaacaaatcaaaagaatatgatttcatgagaaatttatttaataaattatgaaattttaatttcattcacaaggttttattgggacacagtcatattaattcatttacttgtctatagctgctttcatatgacagtgtcagagttgagtagttgtgacagaggccttatggcctgcaagcataaatatttactctgtgtccctttacagaaaatgtttgctgacccttgctctaggctgagttgatgaagagaggggccgtgtttgctttgtttattgccatcttggtgcttagctggtaccaatacatggtaggtactcatgaaatatttgaatgaattaacagatattctgtttccctccatggatagaggtgattgaactc

SEQ ID NO: 134278 - DNA, 1094 bp, Homo sapiens
attgggcgtggtgactgggtaggcagccaatactatctgctatggttttgccattttcttttgtctttaaatcagacttctatagtgtttcctaacattttacttatagccccattatgaacttcacagttcgtagttcaaagtcacacagttagttatcttcttgtcctagtgatgctgctcaagccattgctgaaacccctgtctttcttttttgctcacccccactgcatctttcccattctgagctaaggacagcttcagatgaagaagagcatttgaggttggaataatggttaagtggtgagttagtattcttgcaggccatggtccttcaagagcaccttggctgttagtataacctcttctctctctagcttacaatctccttttctacctcttttgaagtctcacttctgtctgtgtttatctctgtttcaaaattgagtatcaaaaaactgatagtttttattttccttattttttttccacctccagctgatacacttaaggagctgtaataatgagtacaatccactaaagagggaaaaaaagagagcctctgttttcttttgttttaacctgcttactttcaggtttttttgtttttttttttttttaataattaaactgaaaagtcatgtcattatttagaatatctctgatataaagagttctcacagtatataaaatgcatccttgcaatacataatttacagaaggaaataaaccagtgtgtaaatatgttcaatcttgttaacaaccaaattaaagcatagaggcatcctttcacagctgtaactttggtaatagttaacaaaataatattaattgcccaagtggttttgactcaaatatactttattgatttgctgaataaattggaatgaccctcttgagatacattaagagccataaaaaagttaacatcctttatttggtaattctaaagttgagtaatgctatatgtaagaatctttttattgtagcattatttataatggcaaaaagtttaatttaaaacatcatatatttgctgtaaaactttcttcctgtttcttaataaaatccatttgaatttagtctgttatact

SEQ ID NO: 134279 - DNA, 1088 bp, Homo sapiens
gaaaatgagtgcaaagagagaaacaaacataaataattagaggctaaattgggtggcaaggagttcaggggacggggaaaccaagagaggaaagaatagttggggagttggcttcctgaaaatgattctccagcaaaagatctggtctggaagaatggggtttagaaaaagtgaagggcagacagattttagtagaaagcagggagaggaattccagtgtaaagaacagttggtcaaaggcaaggaagcagacaataacttgctgcttgtcagtatggaaaggagacctgaccagagtggagtgaagagatgttatgttgcatttggggaaggcattcatatttgaaggggaggaaaatgggcagccatggaggagttttcagagtggtttaaggaagattaatttgacagcataactgcacctgaatgggagaaatagaaggcagaggccgcccagggagctgttcagtaactcataccagtgtaaacaggaaacagagaagagttattgtggagtcaaaataaaatagaccttcctgacttaatctggatatgtgggatgaaagagaaggaaagaacagatgttttgaacgccacatcatggaagaagggtattataatggctagacatgttagttgagatggggactagtttgtggagaggggaagatgaattcaattttgtatggactgactggaggtggtactgatattaatacctccaggcggtattttccatagggaattgaagacccagaactggatttcagaaaatgctttaagtcatgagcatatagaatatagagaacaccagtcattgctggggatttactgtgtggtagcctctgggctaagcgctttacatgcagttctcattttattctcataactctgaggtgggtcccagttagcctcattttacagaggaggaaacagaaactcagaaaggctaggtaccttgactaggatcgcccaagtagtgtaaaactgggagtagttccaagcctgtgcacttcctgctgtatttccctctgctgttccaaggactgctatattaaatggtagattgaatgtaccttagataccac

SEQ ID NO: 134280 - DNA, 1003 bp, Homo sapiens
ttaaaataataaacttcattttaaaaactcagcatatttaagagagttttattccttgcttgctaagcctcaaagtttttccaaatctattttgcatgtggttttgtattttcatgacaattctgaaaccacaggtgttggaagacaattctaaagataccaagttttaagtatattttgacatattttgaaactagccatagttttaatcaagaaaaacatttttcagtgtacactgctgatagaagcagatttcagttatgaaagtttggaaataatactttaataaggcacttcattttaaaactgaaagcaattctagtttgctgctagtttaaaaagtttatagtttaatgtgatctgagaaagtaaaccaagaccaagtggaaacacttatttatcttgaggttgcaacaagcaaattgagctgggagacttctgggtgaggaaggatctgctacttaaatcaggctctaagatatgatagatggtgctctacatgccatcactttgaaagatttaaatgtttcttatgtaagaatatcttaatcaggatttctcccaagtatgtgcttccaaagcaccagggctacaaggtgttctgccaaaaaaagggttctgaggtcagaaaagtttgagaggttcttcttgctcacttcataccaccccctcactggcctcccaaccccatttgaaaagtaatcatgcatattaacatatttagggtcattgccctgcctcccaggaaaccagtttaactttgcttaactggcctttattggacttatctgtcctttaaaatttttttcactatatcttgaactgctctcctacacagcacactttgagtaacactgcttgaaatactgcttctcaatttcattctcccaaatgacaacaaaagtgattatggtgaaaccagaagcaacaataaggttgttggatcaggtgactcttaactaagaatcactcagctctgaaactgactttaagtgcatcacaa

SEQ ID NO: 134281 - DNA, 1092 bp, Homo sapiens
gaaaaattcacatgtaaactcaggatgctgggctcttatatcatttcatggtggatgatttgtgtaaaattgcaactgagtgaatttcattcaagcagtaggaatcttgaagatgtgagtccattactagcaaatgttatgttctgagtatattgtctgagtttttttttttacctgcagtcacagagcagtgacagttcataccattgtacatagccgtatcatacttcattaagcagttttgtattgctctaaaatcactgtttttgcttttttcctcaacaatatgtgtctgagttttttttctcttagtaggattaataataatctactttccctggctgtgatgctctttagagatcaaacagcatttctaagttgcaaggaatcttccaccctgttgtcttctgcttttacacacccacacagtcacatgttaatgaatgtgatagttctgtaggttattatttctttatgcatataaatatgtttcatggtacttaaagacagggtagggtagtaatactgacactgatgttagagggaaaagtagtgaataaagccaataaaaaaaccagtaaaggatatatccatctgtgaggttttgcttatgctcattatagcaaactcttcattcattcactagataaaccactaattcgcattttaccagatgttccccttaagcaatatgaagctactccttttccgctttgattctattttgcaatatatcttttctatcagcattagattcaaagttacccctggactgtgccctcagtttactcatctggcctttgtcactgaacaagaattgtactcgtggaggtgtattggcctttttgaatgagcgtcttcactcctgcctcactgcttttacttatgatgttcttgtttggaatttttcttcctcctatctgaatcctatcctgatgagccagttcatattccctcctttcaagaagccttcctcttcagtccacactgaccacctccttctctgaacacagcataaattaccttggctattgttaactaagtgtttcatgtcacctacctatagaaatattgaatcttttaaagcatagg

SEQ ID NO: 134282 - DNA, 1055 bp, Homo sapiens
aaggcaagcctgcagatctaagagctgcttatttgtaaattatactgaaatgctaggagaagttctctggaaacggtctaaattgtagttctttaatattttctgcttgtagaatttgaatgggaagtacttggtgtggtttaggttttaccaaggaaggccagctgatagctgtgaagaggcgctctgctaagtgtcattgaccttagaatccacaaagctctggggctttggagacttagaactttattttgctagatttaaagtgtactcttctcttaacgtagaattcatgtaaaactacatcataagacacacctatcaacccagcaggctaatttattcaagaatcaactgacaggcagaccagaaattttttgtcagtttggtaagtgtgaaagtaaagccaaattattattatttaagaactattacatttattcttaatagaaaagtagtatggttattttttaaaaatccaatcccaatatgtgcgagtcctttctcattccaccttatgagataacaaatgttagcagcttagtctgtatatattcttcccaagtgtctgtaattgcaataagctccattgctctattgctttatttttctgtagttctctagttatgttttgcactccacttgtcaacctgtggaaggcaagagcacagtcagaaggttgcctgatgacatggaatcagatgaagggaaggggagtaggctggatgacccatggtgcagcctcagttcagtagcctgaattgtctattcagcagtaaaagcacgtctgcatgagaagctaggtgccagagttcactcttctaggaccctttccccaacacagtttggaaggacagtatcaaggtttatctgtcacacttttatttttcactataactacccaggtacaaatcctggcacctaataggtgctaagtaaatagtagtatgtgtctacctgccctatccatttcctattttctgacaaatacagtctttttttttttttttttttaagagatagggtctcactttgttgcccaggctggtcttgaa

SEQ ID NO: 134283 - DNA, 1068 bp, Homo sapiens
tcatgtaggggaagcggtaaggccgtctgttctaacatcatgccactccagtggtaagagacctagcctggtttatttattcactaaataaatgtgctgagagcctatttatgtgctaactgcggtaactattggggacataggagttaacaaagtcaagtccctgtccccaagtagacgataaagtgggaagactgaacattatatatgcaaccatttaggggaagcttctgtacacattgttttgcatggaataggttttcatttgaagaatatttgagtgctttctataaacaatgttaatccctgggttaaacaaaaaatagacacattacacttaccatcaaaaaggtcatctactgggaaaacataaataattataatatggaatgataattactgtgatggtatttacatagtgtgctgtagaaacacaaaggaagggaacctagttcaccttacgggttcctctggtagggatttggttcacttaagagttttatgccactgtcgtagaactgaacacatatttgtttcagtgcgtgactgctgtgaactaaaaacatcttaattgacaaagacaatacctaattttgatttagaacataaatttaccaaattctgcccacctatttgctatattatgatcagtgcaatctttatgttacttctgtataagtcattataagtcagttctcagtgtttttttttgtttttttttttgtttttttgagatggaattttgctctgttgcccaggctggagtgcaatggtggaatatcaactcactgccacctctgcctcccaggttcaagtgattctcctgcctcagcctcttgagtatctgggattacaggtgcccaccaccatgcctggcgaatttgtttgtatctttagtagagacagggtttcaccatgttggccaggctggtctcgaactcctgacctcaggtgatccaccctccttggcctcctaaagtgctgggattacaggcgtgagccaccgcacctggcctgtaagtcaatttttatctgttccatcatggaaaagagagcaagattggagta

SEQ ID NO: 134284 - DNA, 2017 bp, Homo sapiens
aagaagggaggaggctggatggccctaacaagagtgcttaccatggaaaacagaagatacagagaccccctacaacttacttaccctagtagttattgctgcttactatgagctagacactgttcttagcacttgacatatagaaactcatttaattcccacacctgctcaaggacgtatacattgttgttatcacattcccattttacagagaaggaaacagaggcatagagataagctcaataactgtctaagattacatagtggcagcactgaacccagaagagaagaggtagaaggggaggcctcaagaggtagaccccactctgttgcctggaattgaggacaacagaaaaagttgttcagaacatggacctgtaggaccagtaaccttgcttgccagtgaaacgtggtctcatcagtatctcaggctctgaccaaatcgcttggcatcacctcttcctttagtatgttgttaggaagctagggtgaggagcagaagcatggagaaaggagactgcagtcttccacttcatatcttgtgtgtgccatctagtagataagtggtgccaccaatggagatagagtatatggaggaaagggaagtgtggaatgagaaaatgagttgtggacatgtagaatttgtgagtaaggagaagcagttagaaatgcaaagttggaatcttggagaatgatctggaatagagttggatttaggggacatcatctcatagtttgtcccttcagactgctttcaaggaaggaccttttctattttatatagcattgatttacttcccagggcatgatgtttctacctcattaactattgttgagcgtgcagaacagagtgagagattcactgcagtatttagacacctgtttgatgggctgttctttgctgggatcacagaaataagaacaacaacattccaaaaattaccataaggttacctgatccaaatgacttgctactttctattaagtctgtttcctttctttattttaatattgtgattattacttattaatgtacctaacatagtatttaccattttaaccatttttaagtatgtagttcagttaaattcatttgtttttaatctgcttttgctttatttattctcagtcactgtagtaaaccaaacaggtgtgaacttctccctgcaagtatactcttaaaaattgtactctgtgtctgctttcccttagaatcataatagttttgaagaggaagggctttagagattcatctaattctatccttgtgatgataaggaaactgaggctcagggaataaaaagttacttgctcatgatggtaaggagtgttcatggcaaagtgagggtcagttttcagtcttccttgtctgtgttcttttcattgttttagctgcccatgaaattgagcctatgatttcactccctcatgctgattattttcttccctcttgaggacacttcaattcttttagggtaaaccttgcatttgtatatgctcaataaatgcttattgagtagttattccctagactttctatcgttttttttttttttttttttttttttttttttttttttttttcagagtcaaggtctcactctattgcccaggctggagtgcagtagcatgatcatggctcactgcagtcttgaactcctgggttcaagcaatcctcctgcttcagcctcctgagtagctggtactacaggcatgtgccaccatgtctggctaatatttttatttttgtagagacagggtctcactatgttgcccaagctggtctcaaactcctggcctcaagtaattctcccacctcagcctcccaaagtgctggaattacagggatgaaccactgctcctggcctcattctttttttttccttcttctttcctcattcttagagagaggcatcctattacatttttttaaaagtctggaaatctgacagattgatacaagtttataattaattttgtttaatttgtttacataaatactcactctgcatcaggc

SEQ ID NO: 134285 - DNA, 1089 bp, Homo sapiens
cagttcattaatgagtaaattgtctttctccacttaggcagttggtacttatgagttgccaggtcatgcctctgacccaccatccctgtatgccttcatctgatttaagtcacctcctatttgtgaataaatttgtctgttcctcttctctctcttaaaatagcagtgctgaaagcacttccatagctcagtcatttgaacattttagccgtggttttcttccttgctaatagtcttactttctctctaagattgcttcctactccatgcttatgaaagccttccttatgcccttatcatttgcttcattaatgtgatttttccttctgttgaatgccttttccctctctctctgctgaaccattaaattatggagtgtattctgtaaagtttctctcaccccactttaatttcatgtgccacattttttcctttctgaaactatattgcttcccacattcggattttagaatttttctttttaaagagattgtatttttaattatatttggcctacttccccattgtcaatgcttgtaccgtgtgagaagtccctaggatgatagtcatggttttttcccatcttattagcttattattctccttgcccaccccccacccctggcagcttcccaccctctctaatgcttctggaagctactaagaagtttaagtggcctatgtgaaaatatgtcagtgtcccattttagcatatatatgtaacatttacaatttatacccctgcctacatccgagagggttgtgaggtggcttatgatgataaagaaaaaaacccacatgtccaacagtacagttaagaatagtcagaaaaggaaatcagaaaccacttaaaggtatctgtaacacaatgtacttatcaaacataagaagaaaattcctataaaaagtaaaagaagaacataaccttttaattatctaacaactttgctattttagattagtagtgaaagaagattgtaattgtggtctgaaaatatttttgtacggtaacgaaattactggcattctcactgttccccctagaaatttttgttctaaaatagagaaccaaaggggtttttgttagtg

SEQ ID NO: 134286 - DNA, 1048 bp, Homo sapiens
actaacatgtattgagacttgcactttacatgtaacatgtattatttcatgtaattctcataacagcctttgtggtaagtggttttaactttaacttatagatggcaaactgaggcacagaattaagtaagtttgtccaaggtcacccaagaagaaaatggactcatcagtattccattgatcaacacaggcttttctgaccccaaagcccaccatctttcccttatagcatattctcatttctaataatagtacctaacaactataatagctaagactttattgagctcttactatatgccaggcaggttttttaccactttactggattacatcatttaatcctcacaacagcctgatgagctacaattatctcaattttacagatgagtaaattgagacagaaagttgaagctagtgagtagcaaatcagggctagtctctactctcagtctacttttttacgaagtatagcttcacgaagtttctactgactgtagctatgttctctattctttccttgtagctcccttacctgcacaatgaaagtacagggcttatttagaacacagtttgtttgcctttttgggtaagtatatttaaaggggaaatacttttctctgaggaattgcatatgagtatagtattttccactgtaggccttggatctagcagggctatttacataagtactactcgtgatacttggctgtgattaattaaataatgatagtctctgccttcttagccagtttactaaagataataaaaatgtaaccttttaacgatcagattgcaagaatagttcttaacctcagtctttcccaccaatacaatcaatttatcagtagtgattcactttctgttcttctggctagtagcttgctgtcaagcgtaggcttttattgctttgttttggtcagtgcatgcttgacttagcaagcatgatgtgcttctgaagtatctaccatttgcctttagtactgtgatgaagcatattcccatgaaatgaagtgacctttgcagtatacaaagccagtgccttact

SEQ ID NO: 134287 - DNA, 1119 bp, Homo sapiens
gagaatgagggaagctgggtttgattctatgctctgatctttactagctttgatggccttggataacttgtttaacatctctacgcctcagtttcttcatcatgaggattagagataacgtactacaagcacctattaagagtacacaaactggcacagagcagatgttctgtaaaggggagctgctattattactattattattattataaaattcaaagttgaccttatgatgtaaaggttgggatttgttttgttatggtagtaaatagtgtttccctatggacttctttgtactgtttatgtgcaatccaaggaaaacagtggaatagtgtttgcagtaagaaaagatagctctttgttcccttcagcagacaaaaagaagctcattatcgtatcaactagtgactgttggctattgaaatggtttatttgtatgtttttttctgtttctttcctagggatttatttgtggcttttcaatagcaacaggtgcagcagcaagactagtgtcaggatacgacagctatggaaatatctgtgggcagaaaaatacaaagttggaagcaataccaaacagtggcatggaccacacccagcggaagtgagtagacttgctgaatgatgaacacatggaaactttgaaagaggcacagagaaaatcctgctgttcttgctgttttaaagataatatcttaccaaatattatttttatgtgacttctgttggtgtgtttgattttttttcactgaacccttgaatgattcttcttattggtctacaaataacattcttcaggaaacagaattagctaccatgttaaaatggtctacctttacccatgttaatgggtaaaggcttgatttgaaaaggttattcttttactctttttttttctttagcctttaagttatatactagttttaaccctgtaacatattttcctctaagattatgcttaatgggagacagagggatgataatggattttgaaatattaacataatagaaaatattttatgttgtatcatttataagtatacatcagtttccaactttataaaagatacattttgtcagactttaaaatttgctttgggttctcaatattcatctttt

SEQ ID NO: 134288 - DNA, 1013 bp, Homo sapiens
tgccaccacacccagctaatttttgtatttttagtagagatggagtttcaccatgttggccaggccagtcttgaactcctgacctcaatgttccccccacctcagcctcccaaagtgctgggattataggcgtgagccactacacccggcctatacagtttttttcctaaactttcattccctctcatggaaaatattagaagttgtaaagacgctaactaaattttcagaaggtaaatttatggagatttttttgtcatattttgtgaccatactactcttaagcctaaatttttaaactctttacaaaggtaacatctgtattgctagtgcatttctgcctttaggataatacttgctgtggaaaatactgcgagcaatttgaaagaggagatccagctacgtaccttagaaaatgcgggagttcaaagtcaaaatgttttgccaattctaaatagggaagtgaaaacctgtttaacagaattagatgacatgtatgcagctaggcggcaaggaagggatgattggtttttctccgtgttgtttgactaggtgtatatgtttgccatgtctaagttaaacagctggtacaaatgctcaatctgaagtctcactacttgagttggttctaggttacctgacacctgtgaagatttttacaagctttagtcattgttcatgagctgatagacaatgacctttgtaatatacttcaggtaattattaactgcttcaactatgagtttgatggcaatcaagtgggtttgccacccacttgtgtttacctgggtgtcagagttgagggcatctaagaagttagagggcacacagtccacacacaaccacccttatatctgaccccaattgcaagatcaggggtccataaaaccacctatttcctggcaaattatttgccaggaagacttgcagaactcactgaacgctactgtactcatggttatggtttatttttaggaaaggatatagagtaaaatcagccaacaaaaggagtg

SEQ ID NO: 134289 - DNA, 1082 bp, Homo sapiens
aaaaaaaaaaaaaaaagaaagaaattaaataataccaaggtaggcatgtttgattatcaaaaatttgattctctgatataaaagcaatacaatgggaacaacatttagagtttttctatgataggtaagatttttcatgcaactggggatgtatctgtacgagtagatccagtaggcagataatcaaaggacaggttacactgttgaaaataacaacagtaatgtttggcctaaagatcttcatttgtaaaatgaaaataatagcagtacttccttgggtgttttagaggagtaaagatcataaatcatgtatactccttagcacagtgcctggtatcgtgaacgttaactgttgtttattataatcatcttcattatcatcatctaaaacaagcttcaaagttacttaatcaaggcttcgtccctttttaacctagatggggaaaacacagctattttaaccaactgttaaatttatgtagtttacaaagcactctcacatattctgtctcattgattctcactatccctgggaactgcttaaattttttctcaggggaggctttcagggttccgtttttcatagacacagcttggtctttgtcatcacccttaattgttctacctataaaatcaattcagagtaattctaaactttccccactctcaccatggtcttctgtccttccatcttgcattgcatgtccttttttgcccactgcagccattcttcgacctctagtcctttgactcctgtactttctcccaagtgctttttgtttttgtttttgtttttgtttttgacggagtcttgctctgtcgcccaggctggagtgcagtggtgcgatctaggctcactgcaagctccacctcccggattcacgccattctcctgcctcagcctcccgagtagctgggactacaggcgcccgccaccacgcccggctaattttttgtatgtgttagccaggatggtctcgatctcctgacctcgtgatcaggattacaggcgtgattcaccgtgcccggaatttttttttttttttttaaagacagagtttcactctgtggtctaggtggga

SEQ ID NO: 134290 - DNA, 1084 bp, Homo sapiens
atacatatggatttgcacatcagattttgcttatgatttctggaggctcacagatttcacccaggttaagaatcttaaccctacacactgactttggtgatctcatgcactcccaggggaaagctaccatttatatatgccgattattccaaaatcactgtcgcctgtccagatttctctgctagaatcctacagccaactgtataggtccatttggacacttcataggtgtctccaacttaaattctctgcagttggaacgtcatccttgtccttcggtactctgctcctcctcctgagtcccctatcttacagaattgagcaggattccaaaccagaatgtcctaaccgtttagtctgagatgctaagcattatgtttaatttttttcctttccacctatgtataatcagtcataaagttttcttcattgtgtctaaacttttgaaatctcctttttattcacattcccaccctagttcaagtcatcatttcttggtagaaatttagtagcctcctggccagtctcttttctcttgcttgcctctgactcattctgcaccttgcagctggtgagctcccagtggcttcccagtgtctttaagatgaactccagactttctaacatctttttttttgagactgagtctcactctgtcacccaggctggagtacagtggtgcaatctcaactcactgcaacctccacttcccaggttcaagcaattctcctgcctcagcctcccaagtagctgggattacaggcgcacaccaccacacctggctaatttctgtatttttagtagagacagggtttcaccatgttggccaggctggtcttgaactcctgacctcaagtgatctgcccacctcggcctcccaaagtgctgggatttacaggcgtaccatttataaggccctgcatgatctagcatcagcttgcctgtccagccgtctatgaaccatcctgaccattttcttgttttcagctgtgccatgctccctttaacctttttgcctttgcctgctctgttcctgcgctgttcctaccccctttcatccacactggttaactcttactcattc

SEQ ID NO: 134291 - DNA, 1060 bp, Homo sapiens
gttatatttcctgttccagatttgaaaccacattttgcatagcaacagagtttaactgtgtgaaaggctattgacagatgcatgattttataaaacttcctatggactcagtggaattgaaccctggctggagattcattttaggtggaagcattccttcttgtactcccttccttgatccgtgttattgcacttagcttatctcaattgagaatgtttagcccttactttctctttgagcaaatgttagcatctacaatctttatcatctcatctactttataacattaaaaatacatgctttggcgtgctttctaattaatcttcccttttctaaaatacaagtatacaggatgtaaagggtataatttcagatttggggattattttatctatctgtaatggacagtatttaaactattaataaacaatatttactgccgttatatcagttcaaaagtaattggcattctttctaaagatgcggattctgaaaggtaaaataaattaaaaatcactttattttaacacccagcgatgactgtagttgaaatgttggtgtatttccctctggtccccatttaactttgtatattcagttgtatatattcattgatatctataatatatattcatttttggaattatataattctgttcatatgaattatatataatgaatgaattacatttattaactaaagtttacagtttatatataaactgttattcatgctgtattatatagcagtattatgatattccaataattttttttggtacaagtttgacaaaataagaaaaaattaatgatttgaagaaaactaaaatagatgatttctgattatgaaatatgcatgtgcacaatacaaacatttaaatattagaaaaatagatcatgaaaattataagtcctacaattcccctattcccactgttagtctgttaataagcaatttttttaaaatgtatttatgatgagatttttatcgtggaggaatgtggaatagatgttctttgctctaggcttagtcaaatatgcagggacccacaatgtgtt

SEQ ID NO: 134292 - DNA, 1002 bp, Homo sapiens
gctgggactacaggcatgtgtcaccatgcccagataatttttttacttatatggcagtgaggtattgctgtgttgtctaggctggtgtcaaactcctagccttaagcgatcctccctcctcggcctctcaaagtgctgggattgcaggtatgagccagatacctggccattcagttatcctctcaatcatttgaggtgcaagttgattcaagagtagcaaataatttttattagaatctatgtctgcatgttgttacagcatatttctgttagaaaatacacagaccctttagcctcaaatatatagacctcaatcattaatttcagagaggaatatctttaatatataattcaaacttaagtgggaaattttcaaatcagtaagaggggctagttaaaggtccatgaaagagcctaaatgtaagagctaaaactgcaaaaactcttagaagaaaatgtagcagaaagctgcgtggcattgcatttggcaataatttcttggatggtaccaaattgcaccaaaagcacaggcaacaaaagaaaaaatacataagttggattacatcaattaaaaactgtacatcaaaggacaaaaatcaacagagtgaaaagtcaacccatagaagatatttataaatcagatatctggtaagcagttaatatctagactatctgaagatctactataaaaaaaaaacactgaaaatcacacaagtgttggtgaggatgtagagaatcggaacctttgtgtaccgttgatgggaatgtaaaacagtgcagctgctatggaaaatagtatggaggttcctcaaaaaattaaagataaaattagcatatgatacagcagtcccacttctgagaatatatccaaaagaattcaaaataggatcttaaagagatatttgcacaatcatgttcattgtagcattattcacaatagccaagaggtggaagcaacctaatgtcggtagaccaataaatggataaagaaaatatggtgaa

SEQ ID NO: 134293 - DNA, 1040 bp, Homo sapiens
tttttgtaggtaaattttaaacaatatatgttattctgagaaaatagtcatttgatacctgttggccaggtccaatacttttattaaaaaaattttaaagtagcaatagaaatgacattatatatttaatatttaaaaacaacacataggcaaccaacttttcttgttctgacatattttaaatttcatttcttttaggggcttgctttttttgtttttattttcatgccataatttttaagtgcacaaaaccactgaactgctgtaaaatctgcaacaaacttagaaaccaagtctcacaatctccaaagagtttttttgatttatcctagtaatatttactgggattgttttaaatttattttgtaaatttagaaagtctgccagtgattattccccatagtttctttcaggttatattttttaggtaacattctctgtattaggttgtttgctatatcttatccaaggtcttcttcaacaaacatttattattaagtacctactgtgcatgatggatacaaagatgaaacaagaaatgttctttggaaggatctcaaagtagtgataagtaaagcaacatttaaaattataaatagattttttgaaaggaaatgaattatcaagcattgtaaaatatatgctcagaattaggtaggtatacgtatctgtatatgtgtgtatgtatatttgtgcacacacacacccccacatactttggagtgttggtcagatcacaaccttagtgtatattgccaactgtgtgtaacatgagtcaacttctccaggaaaatgtacttgaggccactttaattgtatctcaatatattataggaagctgttgtataaaaaattttgagactcatgtctactttcttttggattacttatgggtgtaacttgggttttattaacttgaatttgaatttttctgttgaaagtagaaaaaagatatatcagttaaatatattttcagctcattaatcttgtcaagttgctattgaaaaatcaaaatttaaagcctgtagacataaaactaa

SEQ ID NO: 134294 - DNA, 1094 bp, Homo sapiens
tgctgttttgttagaggaaacattctattaatggtggcatatttcaagtaaaagcatgtgctttttatttttaaatcgcttatggcaaaaattcattttcagttcaataaagtatgtgtttgtaagctttgtcatctgccccttgactggtagatgtgcaggctaaggagttttaagtgtttggttttgcttttggtagttgtgtgtgtgtatgtgtgtgtgtgtgtgtgcgtttcttttcagaaggggcgggtaatgtcttctgttggaacatgcactccaccctctttgataaggcttgtggtaagatttgcatcactacccatgacagtcatcctcatagcattaagcacacagctcttagctcccataatgatgtgtggagggtggagtgtattgcagccatattcacctttcatttgtgtgtttgatgtggcatttatattaagtaggagtaattttttttctgatttttttttcttgtgtcaccagtgcacctattccattcttccatcgctgtgctcctgtgaacatttcctgctatgccaagtttgcagaggccctgatcacctttgtcagtgacaatagtgtcttacacaggctgattagtggagtaatgaccagcaaagaaattatattgggactttgcttgttatcactaggtaattgtttttctcattattagctattgcatagtattgcagaagaagactgttttgtcttttagccaaaatatgaatacaactggggatacttgtaaaatgtttaacttcccatagccaaaatcattgtttcagattatatatagttaagaatatgtacatataagtatgtatatatatctgaaactcattcccttctttttttctttcattggagaaaactagtgttttcccaaacgttgtttactaagtctatagctactttaatatgagagcaagaggcttcttttaatgaatcaacaaccctctgtttttagttatgattcctaaaaggtgtatttacttatacaggaggcgacatattctcttatatattcccatttaagaacacagatttctgatagattacttttgaagtatgtaatttttttt

SEQ ID NO: 134295 - DNA, 1050 bp, Homo sapiens
atttgcatttattcattgtacaaatacttaatcaactgcattactgtgtcagtgcaagtcacagaggtatctgtgatgagtacaacagagaagatccttgccctctttaagcttcattgatgttttctgtgatgcttatttccttcctccagcctcctcagcttaaatgctgaggctctttctttgtggtcaattcctgtcaggggtgtatgtttctactggctcgctcttagcttcatagtcaataataaatacatttgaaggaagcttatttgatacactgaaggatttataaatgcttaatgtggaggatgataatagagcaatggacactttctttatgctggcaaaaagttatagctatgtacttcccagccaaatggattgtcactgcattagtcccatgatgatctgtaggaagggtcaagaaaattgagaatttatgttacacattttcttatcctaattattgcattaacagttgggtcttttgtctccaggaggcacaggtgtactatggtggctgtatgcaaagcaaagaaggtctcccaaagaaactgttactcctgagcagcttcagatagctgaagacaatcttcgggccctcctcatttatgccatttcagctacagtgttcacagtgagtttaggctttggcgtgtctttcggttttgtgtttttgtttgcaggagatcattaatggagcagaaactcaaatctagcttttgcattcctaaccctgatctccagtagataatatctctgtgccatagtgtatgaaacactaaaaagtctcttgaaggcttccctcatggatgagtgctatttgatgaaacattttttctaccctgtctgctttttgagagaggattttcacctagaatatttacattaccatttgcttacaagaacatatttcttattgtcataagataattactttttaaaaatggttccctttactgtagaaaagtatgttaaaaaatatatcattccatttacttgtttgctaattatcttcccatttgtctttcaaacttttcatttaac

SEQ ID NO: 134296 - DNA, 1091 bp, Homo sapiens
atatgaatgaaatctcattttaggtacaatttgctgtgccagctgctgaagatgggatgtgggggtgggaggaggcaaagggtgaatctgacacagatcccacttttaaggagctgttggtctaataaggaagatacaaataaaaacctcgtttttgtggtgtatctgtttaaataaataaagagtctcatcctgactgacagtatgttttggttcataatgagtggcaaagggaaaaggaaaaaaattctagaatgtattaataagttgagaaatccttttatgttttgctttaaaggtcacttggtaaccataatataaaattgacaataaatattgcaagagagatacttactgataaagtattattgaaattcaaagaatgctacctccaggtttggggctgaagggttatgttaaaaatttctactattttcggtttctgttttcactacttataataataactgaaaccattctctccatacaggtgatcttattcctgataatgttggttatgcgcaaacgtgttgctcttaccatcgccttgttccacgtagctggcaaggtcttcattcacttgccactgctagtcttccaacccttctggactttctttgctcttgtcttgttttgggtgtactggatcatgacacttctttttcttggcactaccggtaagaagataagcttctttctcttagtgacaaacgtgatttgcattccagtattttagaacatcagagagaggtaattcttcagacatttgttgatgaaggtccaatagccatcagaacttgtagtggttatggctcctcaacaacctacttcatattcgtcttttttttttgagacagagtcttgctctgtcacccaggctggagtgaagtggtgctctcttggctcactgcaacctccgcctcccgggttcaagtgattcttctgcctcagcctcctgagtagctgggactacaggcacatgccaccatgcctggctaatttttgtatttttagtagagacagggtttcaccatattggccaggctggtctcgaactcctgacctcatgatcaggtcaggacgcctgcctt

SEQ ID NO: 134297 - DNA, 1740 bp, Homo sapiens
ctgctgtggatcaatatccaaatatttctgagtttttatctgaaaagagcactggagttgacatcataagaccattatttgagtaggatctgttcttttttcctacttttatgaccttgaccttggatctactcttttttttctactcaggtcgggtggcatctgtaagtgtgtttccaaggctataaaatgggatgataatatttgccataaaccattcatagggttattgaaaagctggaataaaatgtattttaaaaaccacaaaaaatttaaaatgctgcatgtgaaataagcatcagagtgggtggttcttgacaataactaaattggctatttcttttattcttttagcatggatgtttttggcaacctctttcttcacagagagtccaaatatacacttcatggcaaattatatttaccacatattctatgtgaaataaaatacgaaacacagaaaaagttctaagactatacatgtttgttgcagcattatttatatctgaaaacaatataaatctctaacagtaagagaatggttacatgtattttaaatcactcataaaatgaaattatgtagctgagtaaatatgaagcatttataatgatacttctatgtatattaatgaaaagcttatagtgatttgtttatataatactatttcatatatgtgaaaatgcttagaaaaaatacataccattacactgaaatatcactttttttctgagtgctaagagtttgtaaattttttctaaaatatgcatacatttatcttaaaaattgccacagattctaaatagattaagttttagggtgcagcatagcatttggaaaacttaattatgtttaaaccagaatcatttaaagtatgattttaaaatttatattatatgataagcatgtataactctgggtgtatatgagaatatgtggattatatttcctcatttgagatggaatggcctcatgcaaccatcatttataaatagtagaattttaagtctgcaaatggtgaaaaaagagtggctttcttcagtaggatattaaatatgatctttgttctctctgcttcaggtgctgatagtctgcagcacaggtttagctgggattatgctgctcaactaccagcaggactacacagtatgggtgctgcctctgatcatcgtctgcctctttgctttcctagtcgctcattgcttcctgtctatttatgaaatggtagtggatgtattattcttgtgttttgccattgatacaaaatacaatgatgggagccctggcagagaattctatatggataaagtgctgatggtaagtacttcaaatgccgtttcctattttagggataaaaataccaataaaaatattttgtaaaacattctctatatttaattcacactatatgcaactgagtaatttagaattaaccccatagcactgactcataaatgaggttaatctagggtaagtcagggaggacggcttcttggcatggacaagatcatttcagatccacctagctagagcagtactggttaatagtcctaagttcaccctattcttgctgcccctctctctgtagttagatagatttgaattgactttttaaactagcttctagccttttcctgaaatggggctcaaagacaaaatatcctgtttcccaggtcctagtgcctacctgtctttctctatccaccactgccccaaacattactgctgtcaaccctggttaa

SEQ ID NO: 134298 - DNA, 1036 bp, Homo sapiens
tctatctcaaaatgggtaatattgaatactaagcattatacattgaaataacaagtcattttccaggagcatattttatccagttaaatctaaaataagtgtattaataaataagctagatttttttttttttctttttgagacggagtcttgctttgtcacccagactgcagtgcagtggcatggtcttggctctgcaacctctacctcccaggttcaagcagttctccctcagcctcccaaatagctgggattacatgcatgtgccaccactcctggctaatttttgtatttttagtagagatggggttttaccatgttggccaggccggtcttgaactcctgtcctcaggtgatctgcctgcctcggccttccaaaatgctgggattacaggtgtgagcctccatgcccagcctagattttttttttcttttcaatagcaagaattccaaatgatttagctgacctatttggcactgattttctctttttctggcaacatcagctaaattctggacattttcttaatgtctaaactaattctaactggttattttcttaatggaatttgatcatgattattgtatctcttttgtgactaaagcatttagaagagtgttactgttttttaagtcactgatcaaaagcagagtaaaaaataactgttttccacccttcagttttctctgtaggaatggtgaggatatttaatgaagaagttccccgtaaacgttgacagaatagaaatgttccctttgggcacattcccatttcgactactactaaccataggttctggttgatacaccctgtcttcctgcttcatgaagtaatgtcatggtcagattgacactttttttaaaaagagtagtttgtttatggtttggttaagaaaaaaagcattatgtgcttagcagtatcaatgtgttcttttaccttctatggttatttaaaagtggaggcttatggagtaacgtgttcttgttgtttcatttaaccttgatatagaaaaaaacaacaacaacaaataaaatg

SEQ ID NO: 134299 - DNA, 2535 bp, Homo sapiens
tctaggcttcgggagcaagttctgcttgaacctagccgacggttatggaaacccattgacattccaaaacaatatatacacataactatgtatttgtgtgtgtgggtgtgtgtatatatgtatatgtatgtgtgtatatatgtatatgtatatacacacacacacataaatcagccaaaatcagagaaaaggaacagggatttaataccttttttatgcttatttttgtcaaacatgtactcctttcatacgggtggcttttacaaggcaacttccgtcatttaatgttttcaactgtaattgtcttaatggaaatgttaaaattcatatctgattaacatttttaataacttagaggagattttaactttatttaaaaataggtaaaattattgtacctaattatgtctaaagtttattcaggggtaatttccctgatgtctgtataaaatcaagatcttattttactgatgcataagtcctagtgggtcaagactaggcatatgctttcagataaataaggaattactccaatcagttttccccaatcaaagaagccatgtcattttacttttagaaacatacaattgggcccaatatgggaattttcataatagttcatacatttgtcagccaacattaaaaggtaaccaactcctcaggtatttgtagtttaccctaacgcttctttaaaagaaagtaggtaaaaaaagaaaagggtagataatctttcgtatgcaaacttttcccttatattttgtctttctttcctttttgactttagtagcatcctccacacatttgtgtgcctgatttgaaaggaagctggggcacccagcgagtttagcctttaagtttctgtgtattgatttgcagattaagtaatgctgggaggaataaagaagggacagaaacatggaacataaagcattgaaaattccggtgcttgggcttcggcttcagagtaacgtcagtggcttagggttaaacggccattttattcaaatgcttgctatacaatctgaaaacacactggcaggtgctcctctccttggcaattcattgagtatccagagttctacgatgtttaactgaagaattggctaatgttttgatcctccagtgtgactgttgtttttgtttgggggtgggtttggggttttttgcttttttattcctgaagcttaccagatatgaatggctaatactccattgttctgcttgttgtaatggtgaatgctttaagaaaaaaaagtgtaatttgctaagaataattcatgatctgtttatgcgataactcctttttgttacaatttttttaaaaaaagctatttttgttaatgtaaagtaaatatttcagagcaaattttttaaacttattgcactaaatacaggctctgtacaaaaaaaaaaaaaaaaaaaaagcctcagcattttatcattccatggaaggagaatcttttgaaagaaagcattgcctcctaccagaactagacagtgaattagatcggtattatggaaatgcatacaagtaatgtcactagggcttaataagcagccgtttgctaatgtgcttcctttcaaagggttggacctttaaattgctgcaaaaggtaaattgtatttttttttaagtattggtgttctttactctagctaggctaaaatttgctaaatgccttggtttcttttaaaagttcatgtaatatttctgatttttcagaatatttgcaataagagtctggattttaaaaaacacatgcatacacacaattaagagctcatgtcttagcaagatctgggaaaccaacattgcgagagtagctattttgaaagaataattctccagaagttaacatctaatatctagtatcaccaaacagtatcgctgttctcttttattcatttgaaatgaatataattatataactaacaattgtccaaatagatgagagagcaaatcatgtgagaaaattcagaataccatctgtttcatagccgcacagattttggactttcacaaacattgggaactaaatttagaattggcaaaagtctagaagatgggtatcaaaacagaagacattccaggagctagcaattttaagaggtgtccctccaaagtgacctgatggaagtcctgaacttggaaattaggttctactcacttggacatccctgcatcatggactgttgctgctccctgttccatatgctcgcaatctcagctatttggaagctaccaggaatgctttctaattatcatttgcaactagaactgtaatcagaaagaaattttgtatttttgtataacttgattgtgtgccattttatataacaggtcctgttttacaaataaattttgttttactaacattgtgtttagaaattataatctatgtgtaaccatgtcatttgagttgcaaattaattgccaggctgttttccttaagtaaattcatgtgccgtgtagaaatatgcagatatgcattacacaggcacacacagagagatatttaatatgtggaatatcac

SEQ ID NO: 134300 - DNA, 3703 bp, Homo sapiens
tttctaagctcctgcctgaagaataaggtcttccataatatggaagagaaaagttatatttcagtgtaaatccaagagacccatcttctatgagaggcttaccagtgcattagtaataaaacattagcaatttagctagagcactgagattgtataatccttgcatggatgagcagagctcaaagccagttgttcctttaaagcatttaatgcaatggctaatgtttaggattaaagtttttattttatcctataagataattaagtcctaagtcactacaacttaagtagcttaactgtatgttggtacccaaactttttctataatggttaaggaggaggcacttactgagtttattttaaagttatgctagaaatgtttttcttttgtagagatgctctctctctctctctctttttttttttttttttttttttttttccgtgagggcattaggctgctgattgtaagttatttccaataccactgatcttggtatctgccaagggcttccttgccttccctgggcagttttaggatttcaccctagtagggggtatgaggcactgacccctttattctggacccaaactgctttagagcagagttaatacctctccctccctcttcaaaacagctacaggaactgcaggcaccacatatgtgtgaggccacatcactgcccctgaggcttcaactatttccaccatgcactattactagctactaacagccattttaagagatctcctagcctgcaaggtagaattctgggatcagttccaaaaccagaactgccagtaatggtgacttgaatattttatttgatttttggtcagtaaccttgtcatttaaattggactttccaatagccttaacatggcctctgagaagtttcctccagaaaggtctttaagctttcgcttttcaataagtaagttctttactgcttttctactgctactttaaaaaaaaaacaacaacaacaaataaaactctcagagtctggaggcttatcagtgcacctgccacagttaatttctgtattcttttcatacattccatctgacacatacgagtgcactataatggcttgcctagaactggtaagaagtggtctgtgaatgtatattgaaaaaatgtgggttcataagtaaaagcgtaacgcagatatttgtgtattctgtattcacagcgtaggctgccttttgctttaaatgcatattcatgtatctttgtgtgctaagaatgcatgttagcccttttgaaaagtaggcactattcatacacagtagcttcttggaattaactcatctttgttaacttagtggcacatagtccaaatttttaaaaagcaagacccttgaatatgccaagagaaaatctaaagctagcaaacttaaaaaacaaaacaaaaattacacgtcgtgtacagttatgaatttagaatagcacactttttccattcagatttcatacatttgagccaaattcttatactccatgttttaattttaaaaggataattttaatccaagatttaaatctttgaaaatatctttcttatagaaaactttaatgcagtttttaaacttactgatttctgtggaaaacctttcttttctatagaaatactgtagtgccctttcttcccatcttgattttgtacatgtaaagacaaatgatgattcagtttcaatattgcatgaacaattgccactttgtaaattatatggacagaatgtgttctaaggaaattcgttagtaaatttgtgaaaaacatgtgagattgttcgagacctattaggctattcttcagttttgatgctcagttttacaacttaaatgattttctccaggacacggagctcagaataataaagcttttattaatggtctagtgaagatctagttgaacatggaaacattgtaatttacaaatgtctcagaaatttctcacttttatttgctaagacctgaatttaatatttgatattcaaaaacaagttattttgaagagacaatgggtctctttgagcttaagaaagctatggactatctttccttcaaatgcacatcacatgtctgtgaacactcaaaatgctcatagaatttcagggccctcagacggccagcttccacccctgtaccccctcaggggctaatgaacccaagtcaaaaggctgctctaaagttgttctgataatgtgttttgaaatgaggaagtgattaggcctccactagagatacttttgagatgatgcttaccaccttctgacctggaatcatttttataacttaaagactttatgtaatttagtagcaggttagggaatagaaaccacactaatctgaaggaataacaagatgatcaacactgaatcttcatgacagtaagattttctttccttggaggtatgagggtgtgtatgtgtgtgtgtgtgtgtgtgtgtttgtgtgtgtgtgtgtgtgtcctggcggttatttgggggcaaggtaccagattatttgcagtgagccaaaaaaaaaaaaatatccaagaagaaataaatagggaatccttgtaattaatccatctaccaaaacacttgattctttttattgtagctcagctatgacattatgacattatgtggcttagtgttatcagtatactactgtcttaaaatatatttgtcaacatgtccagttccaacaacagttgaagatgatgataaattagcaaactcaagggtagtccatagttggcaaaaaataaatttggtagaaagttggaggagcagatgctgaaggtagaaatgcaaaagatgttttttcttcctgcataaatcacggaggtgtgttctgttttagtgttttccagtcacccactagagcagcttcagattcctctgccaatagaactccacccccagtcccttacctactctatcttctttagggaagcatgtggatttcttcacatctgcaccttactattaggtaagggtgctgcatctacatggaaggctccctgggcccttgaaaaagcaggcagaaactcatcaaggggtttgaagttcttgtgaaatttgatcccagtggctcatgacttatagtcaggcatcaaaccatttcctactttttcaggctgaagaaagtggaaatataactggctggtgaagaaaggagaaaagtcagccccctaccccaccccacactcctagaaaagtttgggggttttttttgtttgtttttggtgtttttttgagacggagtctcgctctatcgccagcttagagtgcagtggctcaatcttagctcactgcaacctccacctcccaggttcaagtgattctcctgcatcagcctcctgagtagctgggaccacaggcatgtgccaccacacccagctaatttttgtatttttagtagagacggggtttcaccacgttggccaggccaatctcgaactcctgacctcaggtgatccacccgcctcagcctcccaaagtgctgggattacaggcatgagccaccgcgcccggcctagaagagttttaatgaaccttccacagtagtaaatgcagagaccactggtggaaattcccatgttggatagaaaagggcgtaagtccagtctaagtatctaaatgtgatatgcccttttgtcacagaagtgtaagacttaaagggaatattctgaccttcgtgtatgaatct

SEQ ID NO: 134301 - DNA, 1199 bp, Homo sapiens
agctcctagaataataaggcggccaaatttaaagatcagtcaatacagtagggacctgctattgatctctcaggcactgagtcttcacatccagtgtcaagcccagcccagcatatggggtgatatgagcagaaaacacacatcggtgtgtcttgatttctcgcagctgtgtaatgtggcatgagaagtatgttttggtgccacatatttctcaatctgatgcctttttgtctttttttttttttgccatttgcatcctatttcatagtgccaaaatgaatttttgtatcttgtcttgtctttgtccattataaactggaggatcacagttaagccttccatgaattcatagtttggaatcatttaccttaccattattttggatttttttcttattacagtgtcactacactgtattcatgtgggggaacaaacatgtaggtgcttgaacatgccccacagacacagttgtagccctagtatttgtgacggtcattattgacacagtgcagactttgcagatggagcattatgctctcagaggactttaaaaatatgtatattaagcaattaactttctggagttggagttatcaaatcttgctgggaaattaacttccaagagctctgaattggatggaattccatctggcttcagagaacaatcagcctatatgaaacggagctttgaaatgtttttcttgtgcagaaatacgaactagaaagaaaagtgctgatctaatgctaagttttctctgtgtactgactcagttgccagaattataatgaaaactgtattttagtctaacaaatgtatagaattttttatgtaataaataaaattttataggaaagaatgttattgtctactgtgttgtaacacttccccatgcccagggtggtgactgataaaatcatgggcaacatcttcgtttcaaattaggtcagtatgctgcaagggtgccccagaatttcccagctgttcctttctgtctctcgcagcatgttctgggggcttcggaatagcaactataaatgtacctaaaccaatttctgaagtacaaagttcatccactgccaggccaggcttcatagctggagtctgagttgccgcgtgaatgctaagattgcaactgaactcaatcatcaggcagagtagaaaagcctccactgggccgggcgtggtggctcacgcctgt

SEQ ID NO: 134302 - DNA, 1045 bp, Homo sapiens
acccacatatggctcttaaattgggatttggggatgctaagctggggaagtcccagcatgtaatttcctgatgctttcactgaagttgttacctcataccttatttagatctgtttctactatgagttacacgacatggttcttgggtgtaaataaaacagaaagataagtcttcatttatttcggatacattcactgagttctacattagctaagaataccagaataagagacccagcctctgctctctgaaaactcacaccatatttaggaagcaaaggagtaagcagatgattgtaatctagtgtgccagccactctaacagagttaactcaggagtagcagggagacccacctgaaggtgggagggccagggaggtggggctgtaataagcaaataagcctttggggaaagggaagtagagagtgttccaaggaggaatagcgtgtgtgaagaaatgatgatgtgtctgtgaatctgtactgaagtgtaggtgtggggacatgaaattggagcggtcagtagggatcagatctcgagggtcttgcaggccaccctaacggtcttgattttatgctgcagaaaatgaggacttgctgaaagattttaaccaaaggaatgtttggagatatttgcctttcaggggaaaaattaccctgacaacagtggggagtatggcatggggtgagttgcttctgggccaggaaaacaaagtgaagagaccattgtaaatataccatgtgattcagaatgagaattccaactagggcactagcaataagaatggagagaaaaggcaggagaatcgcttgaacctgggaggcggaggttgcagtgagctaagattgtgccactgcactccagcctgggtgacagagcaggactcatctcaaaaaaaaaaaaaaaaaaaaaagaatggagagaaagggatatatttaaaagctaatggagggatagaatcatcaaaaacggatgattggttggtgtaaggggccaagtgaaagaaagacaggagtgaagcgtgaatctccaggtcctggtttg

SEQ ID NO: 134303 - DNA, 1973 bp, Homo sapiens
gaaaaaaacttttgttggatatattgtatgtaaatataaaagggacaacagtttttacttgttttttattattttgtgtgaccatgcagccccaagtaaatagctgagttccctttctaaacttgtgcttgcataaaaaaaaaagacaaaagagataccttatatataggtttaagttggtagcatgtatgaaatcatcatggagaaagaccccattgctagaagtatttctctggtctctttgtgtctgaatttctgccattacaactttctttggagtaaaggtttatagaattgcagcctagttgtatttgttagcaggcaaactctgagaattccttgccctatagaggcatatagagaaaacttggaacaacgattatgaagtagtgaaagagatctctgaagaaaaattagagagtaaatttgacatgtacaagaaaaccatgaaggaagttgtcccatgaaggagattggttgctctagttgatgagtatcagactgaatgaaagtggaggtgtgttttgataatcttaaggtaagaataaaacatttatagtcacctggaatttgttcgaagtgttaaattttcctcctaaaaggtgatttttgtggggtctggattttctactataattctaacatcacatgaaagcttatgtgaactatacacataaattttctatagtttgtgttttggtgaatatgaactaatctgttgcagggtttatatcctaacttttcttgcatgtcactgccattgaaacttgcatgaaaagcactaacttgccttctttctcttctccctgattggctccaaggctgccagacagatcaaggataggtatggtataaaacacatttttacttaagtataaatattgaagtcagaaatgaaattcagaaatagttttttaattaaaattgtgttagttaagataaaagtacccaatgaccaagtacaaaataaaatgtcctctgtgtattttcttggaataaccattgtatcaataaaattttttaaaagcatagttgtggataattatgtgcttcagaagaatttcatttctggtgtagaaatatagttagttttagttttagaacagttcttaattagttgtactaatgaaaagggaactattttgaataacttaaaaatatatatttctggaatgtgttttttgttgttaaatttaaatgtaagtgggtcttattttctttgaactcactcattttaagtagtcctcaagaactaaagcgctcctatttcactgccctcctgtttaacaccttgtattctcattccatcctgttcctggtgccatctctttctatttctaatgccaccactatctagttaatattctgtgggaagagaaaattaaagaaaattattaaaggttttggtttaaaagttctttcttattggtagagccaggcttaagaaaaggaatttagtacttgtaatgaacatagattgctaaaggagttgctggcaacatttggattgcattaacacagaaggaacagtttggatctgcctgtctagtcactgagtattgtctgtattgagattatagcaagttttttcatctgagggtcatgagattctctgaaaggcacagctcttcaaagtgccactccaaatcctagattaaattattcttcatcagataattcacaaaaattttcattatagattatgtgaaaaacagtgcctctattgttaatcttggctgacagttttacttctgggtttctcttttttttttttttttgaggcagagtcttgctctagcacccaggctggagtgcagtggtgcgatcttgtcacactgcaacctctgcctcatgggctcaagtgatcctccacctcatcctcctgaataggtgggactacaggcatgtgccaccacacccagctaatttttgtattttttgtagaaacagggtcttgctattttgcccaggct

SEQ ID NO: 134304 - DNA, 2391 bp, Homo sapiens
gtgagccactgcgcccgaccacatatcactctttttttttttttttttttttgagacagagtcctgctctgtcgcccagactggtgtgcagtggcgcgatctcagctaactgcaagctccgcctccccggttcactccattctcctgcctcagcctcccgagtagctgggactacaggcgcccgccaccacgcctggctaattttttgtatttttagtagagaccgggtttcaccgtgttagtcagggtggtctgtatctcctgaccttgtgatccgcccacctgggccttccaaagtgctgggattacaggtgtgagccactgcgcctggcccacataccactcttttaacaaattcatactcttcctgaatacagagacacggttcttaatgcctgaaggctcatactcttacttttgggaatagaatcctttactgtacatgtctgaaaaccatgttttcgtttcttcaggcttaaaatttgattcaaagtatatgaatttcagagtgcgagcttgtaacaaggctgtggctggagagtattctgatccagtgactctagagaccaaaggtgagatcagtagctctttatacagcataaaacaaagcttaacatctgaagttattcataactttgtaacaggaagcacttcatgtgatgttgaattacttctctacttctcctagcctagctttctcaacagtaagaattttaagggaaaataggactacagtagtggttttcattgggttttcttatatgattttatttatacagataaaatagactgagatgatggtattgtattctctgggagatgcttaatttataaatttcaatcttgttataaataggtaagtatcactgagatttgcccagagttttcccatagaatggattatgaatcaatattggggaagtatctgtttagttcaggtcctctctgttttcctgtatcttattgcaacagttaacgtttatatagtttattaatggttacaaaacactttcaattctttattagataattaaagtcatcttgagagatcaatatgctagatattattgatacccatattgcagatgaaaaaatagagttttcatatattaaatgactttcccatgatccctagacctagtttggaaaggtgtgaataagaatccacttctgagttttgtgccagcccttactatgagcctggaacctaggttcttctagtctctgaaagcaattggggtttaatgaaaactccctagagtagcagacttgaatacagaggattttttagatatttaccaatttgaaggttataatgctggagactttcctagttgtgagatggttattgactgggtttaattccagaaccagactctacacattcttgtaggcacttgggacttaaggcattccactgacctctagttcatatagcatttgaataggtttacctgccagaaatttgattggatttggaggatgacaaaaaaaatcatataataaaacaaaatataaggcctataagttattgatgagacaaactcagaaaaatgtttgcatcacaaaggtctgaaataaagtctatcttgaagtaatttgtttggattagcagatgtttctatttgagaactataggtaacttagccaaggaatgcagttaactctgtattacatgttatcaaactgagatgttattgtggtttctgtagaggtttttaccattttaaaataatagtcatatgtaggcagataatcttttctatataacttgaactgtttttagcccatcaagtaaaattcattactattattcttcctcaagagcatcatatttttaaaatttcttttgtttcttttcatttactgttcatatttaatgaccaaagttggacctaaatgtggtgaattataatttctatgcaaatttcatagatacaggaaaatgaatcactggcttgtggttttcttccagctgggctggctgctcctattagcagtgattggatgttactggtcaaactcttaatcatggggtttgtagagagaaactaagttgattctaggccttttcagcacttcttcactgttgagtaaaccctctgcggtaggaatagactgaaactcaactctgagacccacaaaacagtgattctgaccttcagggagttccagaataaagttagactcctacatggccatgagtcacagattttctagggttattccatagcattagtggggctactaatgagagtaagagctgcagaggaaaagtccacatttttaccaatgacacactgaacagttgtttaccaatttatttggcttgttgcagcctttttcaaccaaccagtagaaattagggtatggacaaaaaactggagagaa

SEQ ID NO: 134305 - DNA, 1030 bp, Homo sapiens
acacagtgctgggtaggacaaaacataattgtttttcattatctcagattaaaggcatcacaatcacactggtggactttccactcaaagtgactgcctgtatattgaataaatctttgcaagaaatttctcccaattgaagcctaattactttggggagttttcagattgtcttattattattgatacttttaaaactctacttcagcttacgtagtgttcccacatctttatatataagccgggaggggggatagtaaggaagaaaacctctgaagcgttttatattcaagaatagtactaaacgtaaaggtaaagttagagcaggtactcagcatttaatgtctgtgtgttaacatgattattcttataggaaaagtacttgaataaaaatttttgtgtctttttttgggacgagtggtaggtaaaactgtgtgactcataaggaagagatgagtcaaatctacctttctgatcttttgtaggagacactgctattgaaagtggacaacattattgggaggtcaaggcccagaaggattgtaaatcctacagtgtgggagtagcatacaaaacgttggggaaatttgaccaattgggaaagacaaacactagttggtgtatccatgtcaacaactggctacaaaacacatttgcagcaaagcataataataaagtcaaagctttggatgttactgttcctgaaaaaataggtgtattttgtgattttgatgggggtaagtttattttctcgtaggttatttcatcatagttgcttgcatttcagtacctttcactggtaatcatctatacaggatttccattagtattgtgggaaggacattttgatcaggtaggcttttgattgcaatcataatctcaattctagaattgactggaatggtatatgtgatgtctgcctggagccctataaaagcactcatttataatatactaagtctgaaagattttgctaattttagtcttcagcactaacatttcttctgtccattttaattccttccttacc

SEQ ID NO: 134306 - DNA, 1056 bp, Homo sapiens
acactgataataattatgctgatttttagcatctcttataggaatcaaagtttattaaagttacatagaggattgaaaaatgtatatcactcaatttttatctaagaaggataggttataaagggaggtacctaaatactcaaataatgtatatattctttttcataacatatggaatgctttaagcaattgttttgaaaaaaatctgcgtatctttgacttaattggcacatgactttttcaagcagccattcattcagaggtttgttttctctcagtccttttgctacattcactttcttttcaaagaaatgttaattattacaaaaattgacatagatatctttcccaaacttggggtaaaacccatggttatgtggaacataactgttcttaaaaagtcaattataatttgtaactcacatcctttgagctaaactaaattaaaattacagtatttaataattctttgggcatttttaagaggtctgaatttgtatttttcttcatttttgaaactttacatttgttgactttttttcattctcatttaaaatatattgtgctatgataaccaaccttcttccaaggagtgaccattactgcctacatttgcgttgctttctacatagagacttgtataatagtattaatagtagctcattctctctaaaaatttactgcccactgataggatgttttgtttccttgataaaacaaatgtaaatgaggaattttatttgaattggaatattgtttttctagaggacattcatatctgcactattatctgatgacatgttggtaattttaaagactgcaaggcagtttagagaatgaagtaaaccaatagatactcttttgattctccaaagaaatataattttggtttttgttcctcagagagagtttgaaagaaattttcagatgttctgttccctatagagggcctattccaggatctaaatgaatgggaatttataattcctttcatagactcaaacctgaaagcagaaatttttagtagttgagttgctttaagtgaattttaacaaa

SEQ ID NO: 134307 - DNA, 1585 bp, Homo sapiens
ctggagtattataagagatcatgaatgtttccttaattatcatggcaagattacctcacgttcagtatagtttagttttgtgtgtatcttacagtatgcatgttctgaaattatttgtgatcctgatatgtcacatataatagctttgttacctggagtatttgattaacctaaacagtttaagcattttgaattagttggagtttaaatggattacatttggtgtatattgtcttcattgaaaagatattgttggatatgccacatcagagttagcattgacttataaataaataccagaatttaccagagtacacttttctcttcagatgactcaattattaaataaaagaatatttcttatttctgggtcaatataaggtactgacttctgatgcataatcacttaagctatgtgagtttaaactggtatcttttcttagtggtacccattcaatgtaagctggtccatgggaatggacatgaagaggatttcacagtatgtagagcagaaggcacgtgaatgtgtttgctttggcttggagcttattaagttttgactacggttaaaataagtcaaatagtaagtggtaaaacacatttttgttagtattggaactttctggagaacataagggctatgagaatgcatatatatattttttaacatttcctatatatctaaggtaccaaagcactgagtctaatttacctattaagggagactctttaaaatcaactttataactaattcatactataagacagataatagctaaagttttggaataatttatattaaaagccgcaagtcttaaaaatccctggatatgacataaaaaggattttggcttcttttttgaagtatttaaaattaatcaccttagctctaccatatactagatctgtgaccgctacacaaattgtttatcatctttgggtctctattgccttctttataaaataagtgtaagttgttcagcctgcctcacagggctgttgtgaggaaataaaatgaaatggagtatgtgaaattgcttcagcaacagcaaagtgctacgtaaatgtaaagtgttgtttttagctaataatggatttaagtgtttggataattgtagatgcatttactttgataaagcgtgtgcttaaagtggtatcaccagtgatttctaacatgattttaaaaaaataaaaccccaattaaaatgttctttaatattcatttaatttgtgcatgacttgtggcctttttgtattttctcaagcctattactctagagctgtaaaagctcttgcacagcattgttgtgtcagtgtagaatagtggcataaataaatgaattaagctacatttccatgcaggcatttgcactttgaagttagggctgcccagtgccacatgcaaagagtgtatttggtctaaacagttctttccaaacaaccaaatggctgggcagcttgttgtcacggataaatgatataaaatgtaaccactgaacatttgacaactttgttgcattatcatttttaaaaaaagatgaagcatttcaaaatcttgttaacctggttatctcttggtatctct

SEQ ID NO: 134308 - DNA, 1009 bp, Homo sapiens
tcctggctcagacccccaagtagctgggactacaggtacatgccaccacaccttggcaaatttttgtttgtattttttgtagagacaggttgcccaggctggtctcaaactcctgagctcaagtgatccacctgcctcagcctcccaaagcgctgggattacaggggtgagctatggtgcccaacctataaagagagtctttggctatatctttcctgctacatactttgtatttttgctgctttcctttattctcccaccactaccttctgcccatcaccctcattaaaaaatgttcttacagagcagattagcacaaaaatatggctcaagttcaatataagaatcactttagttttgctactagtatttggctttaaatattcaatgtttaagtgttgtttcttgatgtttgatgcttctttggttctaggaaggctggtttcggatagctgagaatatgggatttcagtgcctaaagattgagagtaaagatccccggctagacgggatagactcactctctggaactgaaatccccctgcactatatctgcaaactggccactcatgcgatccacttggtagtctttcatgagaggagtggcaactacctctggcacggccacttgagacttaaagaacacattgacaggaaatttgttcccttccgaaagttacagtttggtcgttatccaggagcttttgacaggtaagttcagagtcaaaacgtgaaatgtgaaatgagtgttgttcagtcataattcttgcagtgtttttacatttgagtattgaaatctaatatataatttatataagtatttacagtaacattattcttaatgactccaaattagaagccacccaaatgtccttcaacaataaaaggattggctgggcactgtggctcatgcatgtaatcccagcactttgggaggccgaggtgggcagatcacctgaggtcaggagttcgagaccagcctggccaacatggtgaaacctcgtctcta

SEQ ID NO: 134309 - DNA, 1902 bp, Homo sapiens
ctatttatgtatgtggctatgaggaatgccactttacttaagtacttattgattgttatgagagacttatttcctgatagttttatttggattattaaaggaaataatatttctttggttcttttccttttttagtcagaaagctgctctggaataggatatttctattttttttctgcagtgataattaccataagtcatttactctgagttatcatcaattgtaagaaacattattttagatgcagttaagaaattaaatgatatgttactgatgcatcccaatttcagaggtgccttaacttgaaaaaatgtgcatcttagaatgaatactctatgtatgtaaaacttaagaatctgtttctttatttttattttttaaaaaaaggtttttaaaaatgtatttcctttgtttcagtgtgtgaaggttttcatcttccccataggtagaagacagcttggaactatccttccagggaaaagatgatgtaaaacttgatgtttttttcttctatgaagaaactgatcacatgtggaatggaggcactcaggccaaaacaggaaaaaaattcaagtatgaatcaaataagtacttatttataaaggtactacagaaataatttcaggaggtagaaataaagaagtaactgaaaagaaaaccaaaaatctctttcaagactccattattagctaacactttcttagcttacccatagagtccagttatgcctgtgaagtaagaatacctgtaaggacggtttgtgaggaggaagtgtccctgggtttgtcagtccaagttgatgatacagctggtctattctcagttctgagagagagaatgagaatgagaacctgaagagcatgggttttagagtcaggctgacctgggaaaccttagctccaccctaatttgtggcctttagattttctgaacgtaatcattttatccattacattgagtaatactactgtgtgtcaggcactattctgaacgttttacatatattaacccatctagtcctcaaaataaccttcagaggtagatattctgaagccagtgtgattgctgttgaatctcagctctttattttaccagctatattaccttgagcaagttatttaacctctctgcctaagtttcctcagctgtaaaatggaaattatagtagaaattgccacatagagtggttttaaggattaaaagaattaatacacaaaaagagctttgaggtgtgtcaggaggtcctgggtgctaagtaattattacctgctgttactaatactactatagtagtagtagtagtagtagtagtagtagtagtagtagtagtagtaaagaaaactatttctcttcttattctcatgagaaatttacagattagagacatgtataattatctcaatattaaactgttacatctattcttagagaacttctgtaagagtgtcaccttttttctaagaaagataatttctagagccagtattagagtcctgttattcttaaattactttctaaggcttgaattttttctctcactgacatgatccgaaacctgcaaacctcaaaagaactgttcatttccaactactacatttctggagagaaaaagcttctttcattctgctttaacagctctttatagtagcagtgtttgggaagtgtgaagtgttctgattatttaacaagagaaatgagcagtgatagaactgtctggacagatggtgtgagtcccagattttctatcatgttactgtgaccttaaaaggcagagaaaagaacaggagatggctgagtagagtagtttctttggaagattcccccagccatatgccatttttattcttttcggcactatttactttaagaaaatgtagtatttttaacactactattccttg

SEQ ID NO: 134310 - DNA, 1056 bp, Homo sapiens
ctgctatgtgctaaggatactgatgtgactgtaacttagtttctgctcttaaggatctcatgatctagaccatgagacatgttaaagtactctgatagcagtactgtaatcaaatatgtataatctatagttgaagtaccaaatcagccatatctagaaacaatggcaaagaagtgtggcttacaagtagagaaatttgttaggtagacttaggagaaatgtgggaaaagtcctaaaaatagatttatttaatgatttttaaattagtttatttctattttttaatttaaaaaattctgtgggcatctgtatacgtaaagtaaaaactttaaggggttgtttccttcaatagatacccaaaggtagaattattaagtcaaaagatatgagccttttaaagagttttgatacatattgccaggttgcattcctaaaaagttatgcaaaattttatacagtcaccaacataaatgagcatgcttagtttgctatatcatactgagtgttgcattgtactcacagtcattcatgactcccctgatagtttctttgagtaacttttcttttcactttcttcttattatcccaaggtatcttctatcataaaaccaggtcagtcattagtagcaagttaccaacaattattacctttctggccaggcacagtggctcatgcctttaatcccagcacttcgggaggccaaggtgagagaactgcttgagcacgggagtttgagaccagcttgggcaacagaataaaccctggctttatataaaaattttttaaaaattacccaggcatggtggcatgtgtctgtggtcccaactacatgggaggctgagacggtaggatcacctgagcccaggaaatctaggctgcagtgagccacatttgcaccactgtactccagcctaggtgacagagcaaaaccaaaaaaaaaaaaaaaaaagaaaaagaatcattacttttctcttaactattcctaacatcaactggcttttagtatacatctaaccccctccctgtcgtcccagtctccctttcaaaatccagct

SEQ ID NO: 134311 - DNA, 1094 bp, Homo sapiens
agtgatttttggtgaataaaaagttattttaatgtagttcagtttatctattatgggtagtattatcgtgtcctgtttaagaaatctttccctatcccaagataatgaagctattcctcttgtactaccttctagaaactttattgttctatatgtaatatgaagtaaagatcaaatttagactctatactttatttggattcactagcttttctaccaatgtgctttttctgttctaagatctaatccaggataccacattgcatttagacactctaccttttgaaactttattttggtccaagattttaagcttgtcactagtaatactagattatcatacatcactgcatgtcccacttctgctcattcaagggccttacgttgctgtctgtttgaactagcttcttggtaccttgatctggaaataatcttctcttcctctgcatttctatagattttctttttctttccctctctcatgctttattggagtacttttgctgatttgtctgtcctttctatgtgatagataaaatcaggcctggtacatgtttggctaagtgagacctgagccctacatgaaactaagtcagatcctcttaagtgtagtctacactgttttgttaagatgataaggtgacactgggttgatgacttgatccaacctaacgtggttggagaattaaaactatagaattaagttagcctagttgttttcaatcattctgcttcacaagaagttaaaagactagaggtatttgttgaatcctcactcattgtctctctcagcttcacagattgatactgtgctcctacagttgtaactccaagaaacacatttgtctttttagtacttacagctgtgaagctaaaggcaaatttgaataatttctttaaatgagtgtatttaaaacattgacttttctatgaatgatctcgtattttctgctctgtttatgcgtttatattttacaacatacagattatgtcttaggtctccttaattatacctccaaaccgctagtaagtagcaggtgcaaaattgaggaattgagggaagaactttgaatgcatgttatatgggaattgta

SEQ ID NO: 134312 - DNA, 1036 bp, Homo sapiens
aatgcaataacatggatgaatttctaaaacatgatgctaagtgaaagaagtcagataggaagagtatatactgtgtacttgctgttatttgaaattgcacaggaaaaaccaaccaacagtgtaataagattagtggttgcctaggaccagggtgggttgattgcttgactgacaaggggcacagggaactttggacgaggggttggtagaaatgttctatatcttgattattgtggttacacaggtatatacatttatcaaaactcatcacttaagatagatgcatttcattatacttaacttatacctcaaaagaagttaccttaaaagtttaagactgggcacagtaacccatcagcatttggggaagacccggtgagaggatcacttgagcccaggagttcaagataagcctgggcaacatagggagaccccatgtctacaaaaaaataaaaactaaacttaaaaaaggttaaaaagataaaaaacagtttgtgacttagaaaactgatgctaagagaaaaagggtctgagatcacaggttgaaacagagggatatatgggaccaaaagcaatgaatttggtcagggcagacctaattgcaatgataaactttgagactttcacatatgattaaacaaattgtgtaatctgatagtaaagccttttgtattgagtatgaaaattgaaactataatttaattcttttaaaaattatccattatatacaaggagaaatcctgtaaaagtctgaaggaaagcaagcacaactggagtctaactggttgttgaagtgctattagatctagttctgggaagttatgtggttatgtagagctatagagtttttggaagttatgtagttatgtcccaaggctttgtcctctggcattgaggaaaactttagtacttgttttaaattgatagtttttaatgtagtcattatgtgtatgtatatatacatgctgctctaaagacacatgcacacatatgtttattgtggcactattcacaatagcaaagacttggaaccaac

SEQ ID NO: 134313 - DNA, 2165 bp, Homo sapiens
gtagctgggacgacaggagtgtgccaccacacccagctaatttctttgtatttttagtagagatggggtttcgtcatgttggccgggctggtctcgaacttctggcctcaagtgatctacctgcctcagcctcccaaagagctgggattacaggcgggagccaccacgaccggcctggtttaatttctaaaacttacctactaatcgacttagttctgcaataaatatagttacaatcattataactagtattccttgggctggtttaaagatgttctttagcatttgagatgaaaggcagaaaccacaggtaggatcatgtaagctatggaaccaaaggaaaagcctggaaatgcaacttggagtcctgcttactctgtatccttggaaaatccagattgtgaaagaaaagaaaaagatcattttcatccatcttttgacagctttctactttgacacttctttcctctacagttccaacagaaagcccaaggctgactttgatttgcctgacttgggtatgttcccatccctgcctcaatcattaacttactggcctgagtcttagtgatggggtcagcctctcctcaatcctatgagcttggaacaggaaaggaaaattggagaagaggaaagggattctggacagtcaaaaataattaaatatccactctcttcccaaagctgtgtaatgggagagcactgtccttcagccaataatgcactagcagctagattccttagctagaccttcttccactgttgaagcctaatccctctgttttgctgcagatacctgtttccgaagtttacactgtgctggactgagtttgtagacatgaaggtccatgtaccctgtgaaaccctcgaatacattgaagccaactatggtaagacctggaagattcctgtaaagacgtgggactggaagcgctctcctcccaatgtgcaacccaatggaatctggcctatttctgagtgggatgaggttatccagttatattgagatagtaggttgaaatgggagaatttctcttttggaaaaaaaggtagataactgtttaaaaaatacatgtctatttgtcaaacataagtgggaaccaaagaaaaaatgtgacaagtttgaagacacagaaagagtcatctgatgtaattctctcacttagtactgaggaattttcatgtgccacatacaatgctaggttacagtggagaagcctagatgaatgagacaaatacctacttcttttattcctccttttggtaaacaactcaattttcctttgagggaaccctcccccaccctttgaagagttcaagttctgtacaggtttttaaaacgtgaagtaatgtttgaactggaagatgagctcaccaggcaaagctaaggaaggatatactagttgaaaagaataacccactcctcttctgggcatttaagctggtatgttagtgctacttttaagattgtggagtctgagttaatattcaagtgatcagactttgagtgacatcaagaaaagatgatatcaggttcatttttcaactaatcttatgtggaattgaattagagaacaaggcattattcttttagggaaggtgagagcttatttgtatcagagcttattacttgtcaggataagtaaatttctgtacatgtactgttttcatatgtgaagtgagaagaaactttatgcttgtttaatgcttaaatttccatccattgtgagaatattttcactgacctctgatggcacttgttgacaaatcattcaagtgagaccatgttactagacatgatcttgaaagaggccatgatttcacaaaactcatttttattttattctcagacagtctgttaggtaaaaatatgagaaattcatgtacattttatattttctgaatttataatctgtgcactcccaattttaatgacactaaaatattaatagaattttttaaatatactctaatttttaaaacatactctttattatcttcatttatcaattacagcttcgtatctctaatttatggtctatataccaatttaaatggcatgtaaacctgcctgtttcttctcctcttctaatatatcagatctccaaaatggaagctaaatggtggacttgacaactattcaccctacctcagatcatagagtt

SEQ ID NO: 134314 - DNA, 2030 bp, Homo sapiens
acattagtgaactggggaaatgatacatacttctaagggtttttagggggattaaatgaagtatacagttcttagcctcaggcctaggattaagtaagtactcaagaaatgtgcaattttctagttccatgtttcttttctaatcttcaaatggaattatagaaaccatgggtcagaacatattcctttactcaaaagattgcatgactgaatttgcttaagaaaaaaaaaattgtatcaagtcattaatacaattatacattaattatattacattaatacaatatatggtttgtgaattcagagacattaccagtttgcctccttctctcaatagaacttgtattttcattttcttggttaagcagttgtctcctaatattatcccatatgctacctagtttgctggtcccaagcagtttactgtacttcactagatttggtacctgctctcccctggacttctttttcaatattctagcctttcctagatgtaaatctttacctccttgttagtgaaattagatataagccatgatttggagagggaagaaatctggaatacttaatttcatttaattatctatgctgatgaatgcctgtatcattgttaataaaggagaattgaaaatactcatttctactttctgccctcaaatttctgtttctatctcaactaggcaagaatcagcagggtgcatgatgccattttaagctgcttcacatcagactgaaatcctaattacagttcataagtgaaacagactaattcaatggcaataccttttgtataggtcctgtgcttaaaggaggcaagtataaattttctaataagaaatccctgcttcttttgggtgcagtggctcacacctgtaataccagcagtttgagaagctaaggcaggtggatcacttgaggccaggagttcgagaccagcctggccaacatagtgaaaccccgtctcttctaaaaatacaaaaaaattagctgggcatggtggtgcacgcctatagtcccagctacacaggaggctgaggcaggagaatcacttgaacccgggaagcagagtctgcagtgagccaagatcgcggcattgcacttcagcctgggcgatagagcaagactctgtctcagaaaaaaaaaaaaaggaaagaaagaaatctctgcttccgtactatcaaaacttctaccctagaataccccctggcaccttctaacccaacctaatacagagattttgtagggacccattaacaagctcctatataattataagcagctctcacagtagggttgaaagagaatataaggaaaattagaagtactgtatttttgctattggaaatgaaatattgtttcatgcacctttgaaaaaaataacaggattttacagccttctgatgattcattcaaagcatggggaatagttcatatgtttgttaaatgaaaatcttatgtagctatttgtgtgtccctcccacttcataactacaaaaacatatatatgaatttctaaacaaagtgatattttaaagatgaattgattcaatgtgtacttaccagtttactgtgtggttttatcttcaggtacagatagtttgtggtactacttgaaaatacctttaatattattttcatcagaatttgtaatatataatccagtttgggatgatgaataaaatttttctaatctcttgagatatcttgtatttatttttgagacttgcagtagaaataacagacactaacattcacagacaatctgataaaatagtaatcttgccaccagtacagtatttctaaaattcaactatggggaccctagtagtctgcacacatatacctgggtatccaaaagttctcagagataaaacctgccagccaaagaccaccaggaacacacctgtaatcaaacaaagttaggtttattagcttgttgtagtaagaggaaacagccaccatggggaatcataacatatttcagggagaaggaactagaaaggtcttttataggctttgagctgatgtca

SEQ ID NO: 134315 - DNA, 1040 bp, Homo sapiens
ccccttttcacagtcacgacggacactgtacaagcaagagttacctggcgtagtttcactatctgcagaatggggatatagtcttgaaacagcattttgagttcttttagcaatgcgatcaagggacagtagttgtattttattggattttacaccagggtgcgtttgctctaatactgctttacttttgtagttattctactgtgcttttagttgtatggacctcttctttctttgaggtcagacatttctttgcctactttctttgtgttcttgctgtctttcatctgccttgccctacggatagttgatgagtgaggtctggaggatgatgctgtatctttcttatggactacttactggttttaaaaaatccttagacctcagaaatatttttcatttatgttgaagtttgtagctcagtttaaatcgttggtacaaattttgacctggatgaggatggtattactgcattaaagtagaacacattatctgcataagatattatttctttgatttgaaaaaagtaagttttgttgctactacatgttcagaatttgattaaaaaaatttttttttgtataggctgaatcagatgttcacattgtggtccagggacccatgggattctctgacactgccagtttaaaattactttcgtaataatatgcagatgttatctttttcactctcattttttcagaagtgtacagtggagttttccagaggctacctgagttgtgatactgtaacagaaggaagtagatatgagaatctaacagttttctatttgaagccagacatttgttagaatgtacacagtgtgattcttctcactaaatgttttttgttttggaaaagttatttttcataaagaatacattatcattattattattattatttttgagacggagtctctctgtcgcccaggctgaagtgcagtggcgcgatctcggctcagtgctgcaacctgtgcctcctgggtttaagcgattctcctgcctcagcctccggagtagctgggaggcgcctgccac

SEQ ID NO: 134316 - DNA, 1186 bp, Homo sapiens
taaaaaatctcataatatttttacttttccatgaaaaaatctattaatttttttctcctatgtcactattgggatttgtgcattttaagaaggggtttctcaggcctaaggttataaaaatactcgtccttgatctttttttaaaaaattctatagttctataaaagtataggttcgtaatctatctgcagtattttttgttgtatagatgttcctttgcaagtctggtcatggctggatagaacagttggaactcaatgatctcagcagagtatgctctatgctcattgaactggttctgctctagacctttactaagatcatcccacgtgcatagacctctggaatgtccttagttcttgtttgttttctttagcgtcccattttttttttttctgtgagctactgaagtccttccaatgaattctttatggcttaagtttgttggtttttgctgcttgtagccaagaacccgggttccatttctttttctagcctcttatatattaaagagtgttttgttgaatactaatgatagtgagtgactttgtcttactcctgatattcctgaatttaatgagaatgcttttaaagttttctcaagagtgatgtttgctataggtttttatgagggacactttaaggaagttttactttattcccaactttctaggatatccctatatctttacaccatcctggtggagaaggtgacatattttatcaagtgctatttttttttcaaaatctattgagatcatattgtgtttcccatttaaaaatgtaatgtagtgaattacattattacgttttttaaaaaatgatgaatcatccttatattcttggactaaactacttgatacattattttaattcattagggattttgatttggcagtacttcatgtaaaatttttgcatttatgtttataatagaaatgagcctattaggttattttattgtgtgaccctcagtttgggcccaaggttatgctgtttttgtaaaatagattgggaagctttccattttttaagcttggaatggtttatttaataggcattgcttgttctttgatatttggtagacttcaactatgtagttttatgtttcttggtatattttaatgggtaaatcttattttttttccaatccagacctaagtcattttggtaatttatgtctctc

SEQ ID NO: 134317 - DNA, 2562 bp, Homo sapiens
tgagttggatgctatttggctggcagcagccgttttcatcatgtgagaagaaaagtgaagcaaagtcaccttccaatggcgttgggtcattggcctcaaagccggtagatgttgcctcagataatgttaaaaagaaacatactaagaagaatgaataaatttacgtgatgagctctacaaggccaaaaattttttttcttatctacctgttatattgtgctaatttttctatgtatgtgatgtgaaatgaagactatatatatggaatggaggtgacagaaagaaagaaattctttgtttgagggagacttcccctttctggattgtatttgtagagtgttacgagtgtatcatgtgattatgctttaccggtataagagattctgttgtgattatttgaatagttttatattaataaaagaagacaaaattttttaaatgttagaaaaagcagatctgtcattgcaaagtaacaaaaattttaagcttttaaaaatgtagatttttcatatttttaaaatttgaatctatttgagctttagttcagcagaattaaatttttacttgacattatcattaaaattgctaggtatggagaacaattcctattttattttgaacactgagaagagtaaacttttcctaaaacactttatattataaatgaaaataaattgctagtttatattttagatataaacatcatattttttattaatacctacatcaaatggaaaatatctgaaattttttttccatagcaggtattttctactagaagtagttttactacttttcatttagaacagagtatgagtcttaatctgaagtctttttcatgcccttgttttaaaaaaactactttttttggcctcaaaaaaatcaagggtgtaatttttaataaattgttaatcctatgttttgtaattttcattttaggagcttgacttatttttttctctctcataaaaacacatttgttttaattgtaggagaaattttctcagcattttgcatgttctttctaatctttgttggtctgaatatattggtagtaattactgtaattattcaacaaaaagcatatccgttcaaaaatttttccactatgtcttttttctagtggctactgttttagttttctagttgaatatctctgacaagctttcgtatggttttgttatattttcatctacatgtaatgtgttattaattttattaaatgaaaactaatcaccttcatgtggaaatgctctgagaattgtccttaggcatttggtagtaaccagctaaccaagaagaaacagagaaaccagaacttcatatggcagtccatttagatgaagaatgatgatataaaatctggttccttcttagcaaaataaaaaacaaacaagaaaagatactaaatgatgttaattttcttactttatgatttagaagtccagttataatattaaaactctgtgacatagtttcttttaccaaaaccatgaacctactccccgtatcaggtattttcgatggtttagaagtactcaagtcacatcacattcaagttagaagttttttttttgttgttgttattttaaatttttaacaaatataaacaccagcagatactattacttgcttaaaaaattgggagggggcacttttcatagtcttggaatgctaagaagttttatttttaatattgtgacagaaagctttaagtatttaagagctctgtattatatttgatactcttacagttaaaaacttttcaaaattaatacattgttaattattgaccagttttgaagtttgggtttaactgtagttgaaatggaaggactcttgttttacacttgtattaaagataaatttattaaaataagttatttagcaccaatggagtattacattatttttatgttttatatttttcttgaggtagagtttcagaactcatctagtattttgactaatatagtatatattcagtgattactgttcaaatgggacattggtagaaactttattaatctatgcaagtatcctataaccctcaattcaaggctcttttgtaaaaaatgtactggagaacatggcttaggcctgaaacccatcctgaatctattcaggtcacctgtagagtcttgacttggatttgcaaagcagattgttagactccttacccaatgtgaagtgtgaataaggcctataggcctgcctcacacagctaatcagaggtggcactgagaaagtcaagtcctaataggtctccttaaaaaaaaaaaggagacaaaaagctggcaagaacatgagccagcttccctcagtgctgtcactctcaagtaaaacatggccaaatgaatatcaaactggtttatcagattagtcactcttccttactgagggagtatcaagtaagggctggagagagaccagatatgtggagttgttggctttcagtggaaatggtagcctccctgtgggtagagaccaaaaggtagagagatgacagaagggagactctgattagtgtattttttttttgtctattccttaaagcccaga

SEQ ID NO: 134318 - DNA, 1026 bp, Homo sapiens
agcttttgagctactttttcctctcctgaaaatgggagagaatatgaatacccacctgaaagggagggtgggaagaccaaatgacataattcataattgatgtagaagtgccttgtagcttgtaatggatgtaaaaaagccctctccaaatcttcattgccttgtgagttgtatttgcaacttcagcagataccagataaatttagaaattgcccctgcaatagacatatgttgccaccaggtggcaggagaaacctgtgatgcaatcaacgaggacaaacattctcagagagaattaataaaataaattctgattgttagaagcagccaactctttagtgtttattaaataaacaacaaagcttatttataaatcacagaaacccggaatacgccaaatatgaattctctaatagagggtgtttcaaacagtttttaggctctggtgctcattttccagccgaaaccttacatagaaccccaagtatagaaagtagataaaagtggcagaactttttctgaagtagggcagggacactgggagttaattcactcatcttccttctttgtccttgagccacctctgccaaacctcaggtcttcatgggacagagttctaaaccactgttctaataactgtataatgccctttaaaaatattcctttgtcattgtaaaaaatgcatgttgcttaaaaatatatagaattttagatagagtttatataaaatataagttataaatgtatataaatgtatgtaaatataaaattataaaatttgggccaggcttgatggctcatgcctataatcccagcactttgggaggccgaggtgagaggatcccctgaggttaggagttcgagaccagcgtggctaacatggtgaaaccctgtctctactgaaaaatacaaaatattagccgggcatagtagcgggtgcctgtaatcccagctactcgggagagtgaggcagaagaatcccgtgaacccgggaggtagaggttgctgtgagccaagactgcgcca

SEQ ID NO: 134319 - DNA, 1026 bp, Homo sapiens
aaataaaaacaagaaaaaaaaaaagcccattccccttatgtttaacctctttcaattattttcactggagagttaaagcgtttgtgacttctaaaaagtcgaaaagattacgtgtatggcatcattaattgaatttgtatcgcccccacattcaagaagcaagagagttttgcgatagttcgcttcacagcttcaggaagtcaatttgcttctaaaccagaagaccgagtgtgtcttctcaagaccatcgtgtggtgccgtatttttgatggaaagttaaccattgtacctttcccccatgcacccacaccagaagcctgaaagccaccatctccccgtcggtctctggatctcctcgctgcctttgtcccttctagacgtggaggcttggagaggaggtttggtttccaaggattggagcgctgtgaagggcggggccattccaagtccatctcccctttttgtcctcttctcccgggacgggagggtggagccaagtccccccgcggccggttcgggagctttctctatctcggtcgctcgaggtgagtgtgaaagggcggcagcccgtttaattgcagcgcaggttaatttcttgagttcaccgcagtcggtccgccagccgcttccccggtctttgccaagtgggtttacgaggtctgaggcgtgttggggcgcgctcacgttctcgcaaaaggctcctccccagggctcaattccccgactgcgggaagccctttggtgccccaggagccttggaaacccaaggtttcctctgacctcgtcgctcctttctccctccccaccgcctggttccctacgtccctgcccccagggaaggacggcccccatcttaggacttacgacccaagccaacccagaaggtaccttcacgtcgatgaagattttatcgcagcctccaaaacccagcagtaataggagctttcaacctgaaatacgattgttattttcccggtgcagagcttgacagaaaaagtcagctttttattaaagacaaagaggtaa

SEQ ID NO: 134320 - DNA, 6093 bp, Homo sapiens
aagggggagtcctcccaaagccgcacaaagccgggatcatttcaatccggaacagcctcagcgtcctcctcctctctcctttcttctttctcttctcggtgactcccgttcccctttcgcctctgtcctttctgcgccttgttctcgtctccttacttctcttccctctcctcgcctttcctctccctccccctcctttcttctccaccgcacgcgtagagtgtcatttatttatttatttatcacccccgccatcaacacccttttagggatcccgagcttttcaatgtgagtgggaggagaaaagggcaggaagtgttgactggaagtgggtgaaatcgtgcctcggggtgagagattctgctcaggaatatagggtcgggaaaatcttggaaaatgaggatttagatctgtttatgaagccccgctatcggatgggaaccaactccgcgcgcgtctcctcctcttcctttattgtatggatttataggtatatatcttctcggactgttgcttggggggagggaggagaaagggcgagtatttaaagaggacagacttgcccaggatccttaacaccgcgccttcaccggatgcgcgctcctcaatgcaaaggaatccagcaacatccccaattcagacgcggacaaaagaaactttaattaaggtctctttctgccccgcgcgctgcgcgtttctctctcctgaggctgttgatgtccaactccaagatccaagaaatagaaatggtacaatcagcccatgcccttgaacttcaattgctcctgacttgctgcattgatttttttgatactgtagaacccccatccccaacccccaccgctcccagtccaattaaaaccgtaggagactttcgacctggtggtggagggggggaaccactcctttgcaaaagagatagttcagaatgatacgggagagattacactaaataaaaattcaaggtgtgaaagcttcatcttggctcgcgtgtcttcaacaccatgacaccttatcattaagagcgctgattgttactttccgagcctttagatgatcagccagaaagtgcaaacaacgcggggctggagggtgtaaagttatttaagcaggcgttctttttttcttttggtgcgcagtcaaaacatttcacaagttaggaaaagaaagtggtggttccgaagctcggaatgatgggctcttttcctcctccacccccccaccttccatatcaggaaagaaataaaacgcacaatgagcctttatttcaggagagaagacttcaaaatacgtgccagtaatggacaatttgagcttttcactggaaatactcacaccgcaagctggaaagggattaaaaagccccacgtggttgatctgggtttatacttgcaacctccagttccccacgtatgttctttgcaaaggttggcctctagatggatgcaagtaagggaccctctggggctcgggctcggcgcctcgggcagggctgacgttgggagcgctatgagctgccgggcagggtcctcaccgggggcttcctctgcgggccagggctgccgggcgccaccgggacgcgagcgcgcacgcctcggcccggcggccgcgctcctcgcaccgccttctccgcaggtctttattcatcatctcatctccctcttccccttctccttctcctttgcctccttctcctttgcctccttctcctcctcttcctccccctcctccaccaccacctcctcctcctctgccgccgccacctcctcctcttgcatctcactggcctggctctgagtgacaaagacaatgtcccagccttaactttgcaaccaccttgcctccttctggggttcagcaggggggagggggaacagcagcagcagcctcagcatctcctccagcttctccttctgctcttctcgagctcttggataattcttcctcttttttcccctagcctttttcctcatttctttctttctttctttttttccttcctctctgctgcacgttgttgttgttattagaaaggcttcgcgcaccccctggtgctccggcgttttgtgtggcaggagaagattgtcttccttctctctttctgtcttgctttctctctccccctggttgctcattattcagagagagacacagagggagggagagagagagagcgcgcgagggagagggaggagaggagagagaagaggagagagaggggagagagagagtgagagggagagggagggagggagagagagagagagggagagagacggatatctcaggtcatctgcagctgcagcgagtctgaggagccgaggaaggcagggaagatggcgatcctccattgctgagacccggcagaagcacatgagactcccaaacaacttccacaacaataacccgagcaggaagaggagaaagagaaagaggataaggaggcggtggggctggagaacccgaagcacctcccggcgccgggacgcttcttctgtaagttactgcaattaacaaccacctcggggtggtccgagtgctccggggaagagagcgcggggtggtggaggcacaaacgcgctcattcattcggccaaggagggttggaggagcggggaggagaggaagtcccctgcatggactggctgttggaagaggagaagaagcgagagagaagaggaggagggggaggagggagagcaggagggggaggaggaagaggaggaggagaagcgagggaggaagaggaggaggaggaagaggaggagaaggtggtagtggtggcagtggaggtggctgtgcttttcctgctggctgctgctcctgctggggggagtgagcgcggtggcttaattaatttcgtgtagttctatgaagagaagagaaaatgaaagatgagtgagaagagagctggaggcttaggacggatgctccgagtgtggggacaggagtagggacagaggggggcggagggcgggaggccggagacctgagccgagagccagagggagcgagcgagggtcagaggagggagagctccgtgcgagcggccccgacctgagcgggttgacctctttctttctctgtccctctccttcctttcccccttctgtctgcctgtcccccgcccgatggcaaagccgtgcggattggcagcccccctcttcctcaggtatttggctctctctctctctctctctctctctctctctctctctctctctctctctctctctctctctctctctctccctctccccgaagttgggatgcggggtcgggatgtgtcggggggtggctgctgcagctgctggtgccggtgctgctggtgaacagagaggcgaggagcggggggcaccggccgggtggggggcgcaggttcaggagcggctgaggagctgtctccaggctggaggttcagaagcgtctggtggaggaggacaacggtttctggagaggagaagccattacacacgcttggctctcctctgaggaagggagaaaggaaggcaggggcctgggggggcgtctcactcctggtgcagttcccaggggtctgccctccttccaggcacgaggggaagccgcagccgccccccattggagcagcccctctttccctttctttatctccctgtcctccatttgcaagctgtctgctttggttccagtccagactccaaaacacaaagctccttctcacgttcattctccaggctgttcaccattcctgaaggaaccctcgttttcttttcattgtggcttctaacctacagagagggagggagggaggctgcctggagttccttttatattcctccccaaccaagaaaaaaaaaagtttcatttttaagcacgcgtctgggatggggaaagaccaaccagttggggctttctcccagggctcccgggggctgtgtctgagtgtctgtgttggctgtttggtttgctttggttttgtttctggaggttgcttgcaggtttttggaggaagtgactagtttggttaagagctgggaactgagtcaggtaagccgtgtcatgttgtaactccaccagaaaatggaggagagcgggtttccaggagacaaagctgagatgagaagtgtttataaaattatggatgtctccattttgaagctctgttggtgatggctggaggaggaggaggcttgcttgcctactccttctctctttccagagggaaaccttgtggtggttcctcactgtctattcattatgcaaggaaatgagggcttttaagggttcctcagatttttctccaccaaagagtgctttcacaagttattgaggcgtttgtttccattttaaagtaaacttttggaattttttttctccttttgagtggacctgaagggttttgacctccttcaggaaaggcaaggcaaaaaccttaaaacagttccactgaggtcttcacacaactttaagctgctccaggtctcctgaaagtcaccaggaaatgtgatttcctccttgtgaagatggtgatggccctaagctgagatttttttgagttctagggtttggttatcatcatgttttgatgcattgcaagactttattgtctgatttgagttgatttctgcaaatataaaaaataataagaataatcctgcaagatctcagaggaactctaagactggctaacaccagtttctccaggttctccatttctcttcaggtcgttccatttgtatgttaggccttctttcagtttctttgtttcccctttccctttccgtcggctaattttttctgtgttctgaagtactcttaagtcttcagaaatatcagtatgtcttcttaacaatgtcgctatggaaacaaattttaaaaacatgatgtcagttgagaaaaccttatgtccaggtatcttcacctttttaattgggaggaatttattaatcatgtaggaagacattttgtgaggataatttgaaaaaaggacccagtgctaccctagtccacacacattgatgggagctcttcacatattagttttagagaatgtacataattgacccaagcaaagaactaaatcccgaaatgcttcaggaatttttaaaagccaaccatgaagatgttgcttttccattaggtgaggtagccatcttgaggatgagggaagatgttggaagaattttagatgaactgttgaagataggtgaggagggctccacggtggaatgaaaacttggaggagattcagaaccagttaatatattctaaggaggctaattggaccttgctttcaactaagaagaaatatagaaaggtaccagcttcaacagaaataaggaacacattggtgagcaacttacaacagcatttttcttgctttgctttctcattatgtgtcagatttttttgtgtaaagttccttatgtctaaaatatttttgtacatattgaagtggttttagattccagatgtaattatattctgttgagtagctggtagcactgtcactcagtaaatgcacagtgctgtatatgacaacatcacatttttcaaaccaaactgttgtgtcattaattgagggttattgttcttctgaggggtgtgaaaggagaggggaaatacatggttctttagctgataattgtccatggtcaatgaagtaaaaccatgtttgtgcagacaaaaatgtatggtttcagttgacgtgtatgcttatttaaaaatacttctgttagatctctgctcctttatgaaaaacctaggcctctccaagagcacttaaaaaaaatcctacttggaatcataacttttattattcatttttgaacattatcttttgataccattacttttgctcttaagtgaaatttcgccaatattatatttaaatttgctaatgcataaatggatgcaccaaactgggtgtccaaactgggaagttcagttgcaatggataaagagttatttggaaaagtaattaccagataattttacatctaattaaccatgtatgtttatgtaaacataagtacattatatattgatcttgaaacaaactttcatgatatctttttttattgttattgatagcaggacaattggttcatt

SEQ ID NO: 134321 - DNA, 4055 bp, Homo sapiens
attccccgaggaattgttttttcccccttactctttggagttggagacaacttttagagaaaaaaaaaaaaacaaacttatctgctcttcctaatgaatcttccggaagacagcagaagaaaaaaaatccaactctactaatggactttagagtacttgtggtcggttttcctgaaagaaaggaatggtaaagttgcaatgggaaagagtccttttttctgtgtgatggagtttaatagggtctagtctgtcttaaattattccttgatgttgcaattacttggttaaggtaaccttacttatcttctttatggtatgtgcctttttcagacttacacttcactgcatcatgaaattgacaaaactgtatcagatattctaaattgataattggagaacagagatgctgtttcataatgccgcagtcacaaataggagatacataatggactcttactgctaaggatctaacatgaatgtatgactgggatgattggtatattcagcagaagtggagggagactatttccatgactgaaagctaaaatccagtgaactgaaaaaaaaaaaaaatcagtgtgtgtaaaagcaagtatcttgtgagtttcacatacttatggagtatgatggctttgagagaaacattagctaggtgttggtgacctattaattgattatgagaaaacagagaggagagtagataatgctagaagaaaattcctctccttgtgtgatatgccaagacatctggcagatgttatgttgggccctaaggaatggacagtttaattttagcccttgcaaggaaatgggaagttctaagctcttttaatagcacaagtcttagtttggggaaggttgcttacaaaaataagaaagaaaggaaaagaggcacttagtgttatgtggaagaactctagggagtagggagtgaaaactgaagtttcggggtgaggagcaaaaatattatttctcatgcagaaattaccaaaattattttaaaagtgacaaatatgtacactgtaagtaaggactattagttatttaatattcaccaggcagaacttccaacttagaagctagttgttttaggccctagatcatttagatgaagtctcctccttccacttgcattatactgaagaggaaactggcacaaagacatgaagtgacttgcacaaggtcagaaagttcagttgtaaccgagccaggcctagaactcaggtcggccgactccagcctagtgccctttccactaccccattgcatttgattgttgagggttgtgaaatagctgctctcttctccagggcccacagctttctgagaaactctgtactcatacactagtgggcaggagtatggatttttcttagttggatttaacacgttggggagcccagggttgagcgtggtttcattcatagatccagagcccaattttgttcatgtgacattcagtaaagtgttagctcccgggtttgtagctgtacttttcttttcatctttcctgctctcatctctcattccatcatccaagggcttgggagcccttctcaaatgcccttctttggaagtttgtgtgagtctattgcaacttacaatagtgcccacaattggactctgaggatctattttgcaacgtggtgcagatttaaattggctcctttcagagatgccattttgtaatactgatgaatggctgagagggtgaaatccagtctgaaacaattactggtggttttccaatgttcttactcattcaaaatgtgccctccgtgtatcttcttggagcccaactctcttgcagactaatggctaaccttttcccattttcccagtatacatgaaatcatccttaagatgacttttaacaacacagacatttaaccatgagcaatgggacagtcctgtaaggaagggtgcaatgggtttccacttctgtctcttcttggatgagcaaaagtgattttgtaaagaagaagagtgatgtttggaagtttccacattttctaagctccttccaaacgaatgcatcaatttttaatccaggaggcagtctggagaaggtagtgctggatgtggacttctggcagaaacacagttaacgctgtaaacagttgaacctcagtgtggcactcctccaaatgagttgactgtcgaaaataaaatgttccagaagaactgggagaacaggaaagaagttaaaacagcatggtttgcatgccagtactaaaggaagaaaaaaaagtttgggttgggagggcattggagagaagataattgtaagttgaactgtctcttggatttataagacccaggagaagtttccaaatgtgggaaaatgggtttttatgaatttagattgtatttgcagtatgctaggaagctcttttggattttttttttccccttgaactttgcatttggagaactgcacacactgataaaagggaaatccattggaagcaatttggatttacattttgtgcttggaaatgctatcataaaatttatcttttttctaagtcctcctattctcatcagctgaagcacgtacaggatttttaaagtgtttggatgtgtgattccaacacaaagttaattattttcacggcttagaaggacaaaggatagagtggtgtggtgtgaggaggtgctagtattgtcacctacaaatgcattgccttttacttctggtgagcacattacttggtgtcttcaaagcattcttgcctaattcctagctggagacattttttcttgagttattcttggagggaaggttttttttgtgtgccaggtcatgggtattttggtattgatttccttgctttcatgtgtttgcttgttcagttcactgcatgttgcttctggatattaataaaatacttgtgctgcgcctgtccacatcttacccccaaccttattcaaagagtagaccctgttctttagggtgaaaggaagtttgacaggtacttatttgttcaaaaaataaatacttgaagatgagaactgtgtaattcaggaagttatttgctagaccttcacatagacaaattttaacaaagaccacaccaggaaaaatggagaaaattctactaggaaccaatagatcctgattagaatgttttaggatcacttagtaggaaattaagcatttgcccaagatgaggaagcgaagtcttacctttgggttcagcttggttggagcacaaaaggagctgtaggcccaggtgagacaactgtgtcagaagtaataaagcccaggatttgtggagagagcttagccgccacagagcccagctggggaaggccaaactcactcttaagttctcgtctgagcagttgaaccagaacacacgctaaggcctccaaattttggaattcttctttttcctgttcagatttaagaaggtaatgccattattcttcagttttgctcatgtcagctgagtgtttctcttttgaactgggaaatgccagaggctggggggtgggagccgatgtcctctaagggaaaattctccccgttaacactgcaaatgtgccttaacattgtacttattcctccaaaaataattgttcagtggcacaatgtgggatacttgaaagatgtttgctgcacaaaggttccaatacttacctgcagattaagaaatgagtttctaaaccatctcatttctattgctaatgaaaagctttggaaggcacctgtgaattagagctccagctgctatcatggtagggaagttaggccttgaaaggatacgtggattagcctgtcagaaaagcaaacagtagcatcagcacaagtagaaaatagacaaggttgttaaagctaacaggaaagtaggctaaagcattgctgtaattttatagtggaaatttgctgggaaggagtgactggttggatgggagaaggaaaagaagagaagcaggaaaataattgactagccaaattgaagaagtctgtccactggggaagatcctacaggaagaagtaaggcattgcttttaagaaagcgattatagcaagtagaaaaagaccttgt

SEQ ID NO: 134322 - DNA, 1143 bp, Homo sapiens
ggccagttcctattgtaaaaaatagaattgggtttggaggacaatttatgtgactttggggttacaattacagcctttctgataaaggacagatggaaactcaagggaactggttaagtaggcctaggtggagattttcctggaaaacgaacgaagtagagaatagagcacagcagaaaacagctgcattattaatggacagaaaatgtgatagtcctctctgaagtgatccatagagcttctctacctacaccctgggtgttagaagaaatgaagaacaaagacatgccttttcagaggggaaaggaatggactatgactactacctggcgtcagtttgggtttcagccattgacttgagccaagcgtcacaggctggtctgtccttccagtcccagcattttaaaatccaaaataaggccactgtggtccagaatgtttagccattctaatccctaattacatcatccctctgtgttatgactaattagtcagcaattgagcaccaatcattcaacccagattgccatgggcctgatggagggtccttcgtttggggtacaatttgaatgctgggttatagctgaagatgaccaaagatagataccagctacaagtacttatcacccagaatcttttctcttcagtggtttctatcttaaatagtcttctctgaagactaattagtatttgataacaataagtgagaagggagtctttgtagaagagaccattttcttttttcttttctttttggagacagttttgctctgtctcccaggctggagtgcagtggcacgatctccacttaagcaactgctgcctcccaggttcaagcaattctcctgactcagcctcccaagtagctgggactacaggcacaagccaccatgcccagctaatttcttgtattttagtagagacggggtttcactgtgttgtccaggctggtctcgaactcctgagctcaggcaatctgcctgcctcggccttccaaagtgctacgactacaggcatgagccaccatgcccggcctcagaaaagaccattttaatttaaatatcggagttcagttgcaagaacttcccccctttctgctgtcaattgaatattgtctgttctaatactgggtaagaacaatag

SEQ ID NO: 134323 - DNA, 1117 bp, Homo sapiens
gctgtcttccctcgtggactgactcatagttaatactggacaacggtttttatttttttttaacatttaatatgaaccagggactgttcatacggtagaggaaactgaggtttagggaggtaaagtaatttagccaaagtcatgaggctgcaaagtgggggagccaggattcacatggagtggggactgcctccagaggcctggctctcagctgatgggacccggccttggttattacttagtctgctaatagcttatgttcttgatggtttatctcttccagttgcttatgccaggagtatatccttggagttctagaaggaaatctgagaataatggaaaattaattgtaatatattatttgatatgagagatataacttattgcaatagcttgaggaagtgtgtttaacttaagagcgcccttttctgaattgtagaggagatgatagggaaaaaaagcaagacaccatgtaggggacactttaggaaataaacattttaaaattatatcaaactcagaaaaaaaggagccacctacctgttatggcaggaagatatgctggtgactttttttttttgtagaaaaggtgttgtactttttttcttcatagggccccttttgaagcctcagtgccctgtattggctctggttactatcagcctgagaaatgttctcaaaagctacgcagatgtttgaaaattagttctattctttaatggtcatttttggaacatggtgcagattctcttaaaagtgtgggtgccgataccccctccacccctttttgtgatcaccatgtgctctatttagatcatggagatgtgatgagtgctttggttttatttgcctgtctctgaaacatcacaagatagtaaggaagttcatggatgagcacaaatgtccctaatagagtgacacactgtgctaagggagatggagcagatccagatatccctacggtatccgagagagtagcttttctgcaaatggtggttggacattagttgctgaatagactcttcagcccccaagaaactagtggtggttttataaaatcctaacattgctatggatctatccagttgatctctggtctccagacagacccataatc

SEQ ID NO: 134324 - DNA, 1050 bp, Homo sapiens
gtctcaaagaccagttctcaatgggtttcttcagttttccttttaattctttgaggaaacctacccaggctaccctcaggaactgctttgcaggaaacaaggtgaactgggtcaacatatctttgtggatacagtgagaactgggaatttgcgaacacattcaatttgaggggctccataggagaggaagcttgggatatgttctaaggaggtaaacgtagaaagtttatgtatgcaggcctggcaaaggaatcattcattctcttgaaaagaaaaccacattttcaaagacagattctatgataatttaaaaagtacactgtatagatcacataaaatagcacgtatttaaggaggtggaattgtatccttccacttgtgtggaagtttttgtcattcattccatcttctcccgtggctttgcctccaattagcaattttgcaggcctgagaactgaagtggtgttgaagaacagatgtcagctgtttgtgaaattcatccctgccccatggttgactcagtgtttcagaatacctcacccattcttttctgaccagtggctgtagcttgttaataatgaatgaacatcacccataggtcctgaaattaacaagtgttaaatgttaggtgattattaggggaaaacaagataatctagtcagtgggcttaattaggtggtgattgcccaattgctgcttcatgataattatattcataaccccatttctagacatcaactacaattatcaaaattgaccccagcataggtaagtgttaggaatcttatttgaagcagcttctcaacggtaaatatctgatgtttccaatgtgcttctgcctgttctttcttcccctcttgccccctttccatgatctttcccccatcttagtagaaaggtcgtggcaatattattttgtctgtgaccatgcacatattgtatagcttgtgttggtgtctacagaaaaagaaattcttaagtttttaggggtcaagtataactgcaaagctttcataaatcagcaataggaatcttgaaggataaaaatc

SEQ ID NO: 134325 - DNA, 2013 bp, Homo sapiens
aaagaacgtgtcattactagggacgttgtttactgtttatctcccaaatgaagtcaatgatttccaggaaatactaacaacaacctgtatcagaagtgatacagtgtgggtatgtcagtgtgacactgtgaatcactgggccagattgtcatttggcaggcttccctttctgacatgcagttatatgggaaaataatgcacttgaaacttgcacaccatggctgaacttcagagcaactaagaacaactaggaactcagctactgtatatattgctttatatgtgtatatatgtatatgtatgtatatgtacacacatgtatctctatacatagagaaagatagatagatagatactctctaggcacttatttttctctaaaacatcaagagtgcaaatagtcatctcttagaatttctggggtgaaaatgcagttctctgtgcaggggtctctgttaagaaagtgatgtgtagtaggtggaatatactctttggggccacacaagctgaggctgaaatttgtctctgtccattactagctgtgggaccttgagtaagtcatttatcctttctgtccccatgatttcctacccagtaaaatagaaattattataatttgaatctgtagaactaacataaggattaaaaaataatatgtgtctaagagtcctggctcataatggccaggaaggaagaaagtgatagtttcttccttcctcactgatagagaaactgaggcagagatcttctccagggctttgccccatttatctatggtcagtatattaggtattttgttcttggtcttaaagtcagcttttggaatcctgcttgtttaattttgtgctgtgtgtccctttactgatgagtagtctttgctgcagttgtccattcccagctagactttattacatcttcaactgatgttctgtggatgaagcagcactctgtattgctgtgtgtgcattcagtaggagcttgtaaactacccgagaatgatgccatttcctcttggaaaaagtacatttatatggtaacaacgccttcaacctgaccttgcagagctattccctggagtgttgtaggggaacaatttttaataaacatgaagttttctgagcttttcagaagaaagatgttattactgttcctattgtttggcatcattctggcaaaaatgatatgtcgaagaaaattgtccttattgcagagaaaatattggctgtgctgtttatataaatgttgtctgcctcactgttgctctactcacatacatatctcttagccagtttgaggactgccccatagcctggcttagaaatgctttggttttctctgtgcaaatgtttatttcaatagtccacatctacttggtcttactaatgtactataatatcagatgctttgagacctcacgggtaaggagactaattttagagtgttttaagggtagatgatattttaaaatgtagaaaacgtggaatggtgttggtagggcctaaccagacttaccttattgggtctggccaaaaggacattcattggtagctttattggtggtggtggtggtgtggtggtggtggtgtgaatgttagtgggaaagatgaagaacatgtaagtggttctttggtaaaaccatatagtgatttttcacctgtacaagcaaactactcatgattttttttttttttttttttttttttacatttgggaaatttccagagaaataaatatgtcattggaatgttgttgttattattattattatcattattattactatttttgagataagatcttgcgctgttgcccaggctggagtgcagtggcatgatctcaagcacactgtaagcccggcctcctgggttcaagtgattcctccacctcagcctcccgagtagctgggactacaggcatgcaccaccatgcctggctaatttttagtagagatggggtttcagcatgttggccacgctggtcttgaacaggagttcaagtgatctgcccacctcg

SEQ ID NO: 134326 - DNA, 1909 bp, Homo sapiens
gttaccaccgctgtgacgcaggagataattcagctgggcaagcagcagcatgggggtggatctacagtacaggatgtgtaatgtcaacatgaaggattggagctggcagaaggaagggaagcagtcatttcatgccagtgcaggaagcctagagagatgctttccacccccccccccaccccccaccttgtctcttgtcctcttctggagctttcacattatgtgttaaatgattaccttgtgcatggtccatggcaaaacttcagctgatttttctgcctcttttggaacctgtcagcataaacagagtaaaccacattccacacacatgtagggcgggcaaaggaaagagtttactgcacagactgggaggaggagaaagggcttcattaggcaggagcatctttgtgcttgagatggaatcccattgtatgtccctttgtgctcagatttgagaccggccatccattcaaagcctgcaatcatctcggaacattgtgctgcagctgtagttggtagaagcctgcagaatggttccagtgattctgcagaagcttagcaattatataattgctatgtaactggagagagccatcaggattgtctagttcccctggaaagaaagcttctacaatttgaggggtagattgttttcccttgttaaacctgaaagctgatgagcaagtacatcataccactaggctgaaaccaggtcctctcactggcatgagaggggaagaaattcacaagtacacttggctggatattcagtggacttcacagctgtgttaaagggagagagagcaactcactgactcttggaatcgtggatccttgtagcagttgaacatgatagttgaattgtttctaatatctgagactgtgttctatatgcattcaaggcatggagtattccagagctttcctaggaatgggacaaacagagttgctcgtaaccaccaagagccctctcaatttctgccgcccgctcaggaggattttcacagcctctcttgaatgaatacttgcctcagatgctgatcagtggaagcactgcaaagcctgactcttcagatattcccgaatgctgaaatcttctctgcatcagctcatgattctgtctgggcctgtgcagtccaggagctgggacagactgaacagtttgcctgtgagaacttaacagtgcagaaatgaattccttctttcagctaccttaccacttgttttccatagttgagaaaactttgaagtggtgttggctaaatgtaggtacgagggctgcattaaaccagtgagaagtccaaggctccatttcatcccgtgtaaaacactcatctaaaattagccacatctcctaacccaagtgtggactttgtgtttgtttatgttaagtagctctaaatttcagtgatcctgcctttctggtgtcagttttgtggagctgctagaatagaaagagtggttgttgggatatatttttattaatggtttaagttgggccttttataactgatactcacctatatttctctatttaaatgtgtttgtagtcagaacttcagtataagggaaaagtaaaacattttggttcctttgtgaattaaaaaggaatgtctagtaggcagtgtggggacctggactcccaagatggattgggtccacacattcctagacctttgacctttatacctgtacgttactctgtacctcgtgggtttaactctgaggttgatagatacaaatagtttctttaagaattctgattcctacaaaacaatattggcaggttttcaaggagccagcctgtctcagcactgagcttttattttgtaacaatttggaggggtataggatcacccatggtgaccctttcctgcgtcattccaggcaggccttggcatgcttcgcc

SEQ ID NO: 134327 - DNA, 2579 bp, Homo sapiens
gctgagttcatcttgcttcgtatcttaggaactggcttgaccctgctccatcatcagtgtttgggccctctgagaaactctagaccatcttttcaaacactaggcttggagattattatgttgggagcagcagcgtgccctcatatgagggaggagcacttgattctagcgcagaggacacatcgaagggggacccttttctgtcagtattggtaggcctgtgaggaccttggtggtgagggccatggtgtatagtggaaagatcgtagacctcagagtcagtgagtaactgggtgaccttgagggaatgatttaatctttggtccccaatttccctatctggaaaaaaaatccactttgtaaagttcttttgaggaataaaggaaatcatgaaaagaaatctctggtgcagagcttgacatatagtagacacacaaaaaatcctaattttctttcctcccatctttgagtttgtattaaacactttctataggtagagcactgttaaacagtgactatctgattagaagtcagaatatacctgagttttacatgaaatcccaattgagggctccttgaagcttgtactggtaaaattgacaaacatataccttcttggctaaagaggctgagcaatattttttattatatggtggcttttcaaagccagtgtgctcccctatgaaacatgactccaaaatctggtaaaagggaagcaaagtaccttaccctctgtttgtgctatcttgaacattctataatagattatatattaaattccttagatgaagttctggttttttgttttgactattgctacacgactaactcctctatagtaaacctgaaattttccaggaatagcacagatgtaagctatttgattatctagaatccaaatgtcttaacagttttaatgtcttacaagccttttttctatcacctctagtccagtgtgcaactcttcatgttggtgtgcaggcagccttattgactggtttcagggaaaaagatcttattcagttaaaatttagctgatcaactttgaaggccaaccactgatttgtttcataatgagttcctgaacaggactagactagaagctacagaaaggcaggctgagtctcccttgctcactagtgccttgagcaatgcctaaaacagatgtacacagtcaaaatgtatggagtctgtaaaccaaacctagcatttttaaaaatgtcatattgctcctaaatatctgttccttaaaagtgcctacatatctgaaacagaatagtctcttagttgcttctgagcagtcatttctgcctgaaacatcgctagatttatagcattcaattaaaaaatgaaagttaatgtaagttctcaatcaaagaaaactacccatctctacaatccatattatgtacattttgaagtaagaatgtctaacagtctaggttaaagaagccaaggaaaatttgtttgtcggtagcttttgaaagatactaatgtgaggatgacatttgactagtatgatcctgaatgatcttcagtgcattatagagttaaatttcatagaattgagtctgaaacattggataagaaaaattcaaactcgaatattcagtgattcaaggccattggttctggaggaaactcatttgcggttttatgtgaaagaggaagacaggtctttttccaagactttctttgacctattaagtctaaatggatggtggcatgtattttgtagggtaaattggtggtatggaagcctcaaggaatatagggaaaaacgttatggaaaaaaatgatgagtatgtagtgtttcctatcaatttaacaaaattggaaggatgaagcaacggaaccaggatgatagtcatgttctttgaagatggtcaagcagattcagaaaacatccttcttcacctttgactttagttcttgaacatttcaatggaatgatttagatcattgaaagtctactatgtgcagaagccttctaggtattaggtgaccttgcagtattaaagaaacccatgggtcctgttagtcccaacctcactgaaggacatattctgaagagccagctcattaagcaagcttttgaagggtgtgcgctgcagagcagtttcctgttatttggttaatggttgacctagttctaatgccatatgcttcctggaacgcattctaatataaagtatgtgttaaagcaagactaggataatagcgggaaagtcaaagcctttctaaagcagagaccatattaatgctggcccagtgaaggcagaatagtgtgcggatggaaaatgaaaagacttttctcctcatgatcctgtttggtaattctgattttaatcctcacattttatcccagttcattctaaggagttgcattttccccagaataccgtatacataaggcctgcgtcattagttcatttttcagtgaatgctaggccaaggttagtgttgaagtaccctaagtaaaattattactgcaaggaaagattagattagagttggctaatggcaggtgattttgtttttgtgttattatttttgtattgtaaacaggggattagtaa

SEQ ID NO: 134328 - DNA, 2619 bp, Homo sapiens
ttgggaaatgtcatctcggtgacaggctacatactgcaaccaccaccatccacctctgccctgtccccttcctcccaccatggaggcagtggaaacagaatatctgtcattcatcagttaaattggatgcaattttttcatattaatatatttggcagaaacaaaggaaacacattatgttgatttctgtatacaaagaaattgctgtgaattcacccaagtacatttttggtttttttgtttgtttgtttgttttttctattgacaataagagatgcacttgttgaccgaggacttgttccatatggcttcctgcctggcctggtttgaagctgttgcttctgatattgggccactgctaactgacctagttgtaaattagagtaacgttggctagaggatcaacacggtctagggtctaatagtatgcctgatgtgtagttgatcatcaatgcttattagtgaatgactgagccagctcagtagatgtttcttcaaaagataagaagtaacttggagaggttaagattctgcttcaaagcaatgtatgtgttcaacataacctttctagagagatttctgctttaatctcaataaaaaggaaaatggccctgttgcaaaatttggcaggtcagacacttcagcttcccaagaaaatgcaaggaatttatttattttctttacatgttgtctactcctaaaacaactatcactactaccattaaactctccatatacattaaaggaagtgcctctagaataaatgttgttaagagaatttaatcttcactttccttctaactttaagagcctcatgggaatgaaaagaatgttgttttagaagtagaagagaagaaacaattgagtagaaaaagaaaataatttgagaaaacttgtctggttgacagtaattttttagtaacagaaagcagcagtcatggcccaagaacctgtggttcttggttgtgtccttgccatgcttagaaggttcaagaaagggagtatagtctctttaaagttattttgaggagttggacactacctactaggttcctaatgcttacccaagttaagaggttgaagtgcctccaagactttaagtagcagctgaacatgtgatcttgttaaccctgagatgttgctgaaaagtgactcagatcaccgtggcaaacaatcctgtccagttccagctgccccagcagaactcagcattaggtcaccctttaggcgtatggtgcagagctcatgctaccatcaagactttagaacaaggacaacttgaagtggctatcttgcacatgggactgatgttgaggactgcttgatgttttggagcccacctgattcttaagagtttccagttcctctatccctattccctgtcatcacataaaccacttggagagaaggggaggatgccagagagagtcatgttctgataattatttgctctttggatatttcctcatctagatagacgggactttttgttttccccaggaaaaggtaacgtatgctcaaggtagccttaaaaaaatgtgtgatgcctattttaaataaaataacaaactagaacagtttgtattttattaaataataatcaagaggtaactcatacccaagaagtgggtttgttggccttagcctgataggtggtagccacataatgactcattgagcactactgacttagtaaaaaagaaaagtaggggtggggtggttaagaaggtggctgggattgttacctcactggaccgctctttaaactttctctgtcttttcatgacttgggtatgtttatgtagatccaaaattattttaaagtttgaagtgtctttctgttagctgtgtgaatgtgctgcctatttcgaaagttgataatgactcaagggtatccaactctcaggattcaagccactgcatgttggcaatgtagtagatcctggttttaaaaataaaatgccaggatgccaccctgaggatccagacataggctgtgagcacatttgaaatccacatcctcaaatatacaacaatgtcagctacaaaaaaaatagaagagatagggtctgaaaaggaaggagctcctgtcatccgcagtcaatgtgaagaaactggttatatggacctaggaaatcatcccacttaaccccttcattttacagctctggaaaggctgaaatgatgtgtccaaagtccacaatgtaggaagttagttaaggaagcctgaaatggaatatcagttttctgccctggtgatccatgcttattccactacaacagtgttggcagatagcttctatttctcgtgccaattttgattgattggtggagaatgcctggagcttcactttgaggattctgtgccttgtctaggcttgttggaaaagagtgtggagatcaagcagagaagtctgcaataggcgggagagggtaaatgacaggcggtggcacttccctatacttgctgtcccttacaattatgtgacttaaaattacagccttactctttaccaaaacactttctcccttggtgttcatgaagacatcctatttccaaatgttttcaaacaaaaaagagaatatttagtcaagggcagagaatctcattcagaatag

SEQ ID NO: 134329 - DNA, 1040 bp, Homo sapiens
tacttcctgacaggtttcctacttattacaataaaactagaaggaacctttgaggttatttttttaatgttatcttatagccagagaagtcgaatccaagaatatttaagggacttgctcaaggtaacgaagttgtttagtagcacaaacaccctctggatcttgaaagctaaacccacattgtatatacatctatttctttcctttctctcctttactttaatgagacaaatgaactgtttattgttgaattcacaggggtcatgattgcgttgcaacatactagaatctctagatttcaaatagaatgatgaaactgtgattaaaaaggactttttgggttatcgttacatagtttatgtagtacatttagaaagaaagactgataataaattttctcgtaacacgaccctcacaagtgtaattttggaaccctttctacttccaaagacaagctgttgtgaagatgaatgtgggagataaatgtgcctggcagtctaaagcatgccatgaattcgtggttgtctagcccagtgctaggtacatgatagctgttctgtaaatgtggattttttttttttttttttgagacggagtctccctctgtcgctcaggctggagtgcagtggcgcgatctcggctcactgcaagctccgcctcccgggttcacgccgttctcccgcctcagcctccccagtagctgggactacaggcgcccgccaccgcgcccggctaattttttgtatttttagtagagacagggtttcaccgtgttagccaggatggtctcgatctcctgacctcgtgatccgcccacctcggcctcccaaagtgctgggattacaggcgtgagccaccgcgcccggccaaatgtggatttagatctaccaccagagctctgtcatggttatctttttatgtacgaactgacaatactttgccctgaatagggttagtgtttggcagggaggaagctatgtttcactggtagagcagtctgttaacgtctaatttgagatgaatgctattgataacagcat

SEQ ID NO: 134330 - DNA, 2912 bp, Homo sapiens
gcagaatgatcccctttcactttaacagaaagattctctttctagcttaaaatattctggatatgctttaacttgccttggggtcatagcacacatctcccaggactgatgagtcttgtcagttgccccagggtgagaactttaataagcaaattgcacacacctggttttgcaaaatattggcctaatggggcacctaggtggaagtcagtaagtatgtccactccctatgtacacacccttcctccccaccccttttaaaagggaggcctcagaaatgctacctccccatttatcttgtaaaactttcctgtctctccttcgctgtgctcgggtagctcagagggttgtgatcgttaacgagctcagggtgttactgtcactgctgctgtcttgtggatttgaaagtaatgccgtgatgggatgtggtataggtacgggggagtctggttaaaagggaacagggctggagaactctctttgtcagactgtgattccccctgctctgctctttgatttgtggctgccattggtgtttacacagcctttccccgctcacactttccttggttagttgaaaagaaacagcctgttttcctgttactgaatgctggaccgtgggcttacttgttttttactctttttcattcatttgttcattcatttaaatacttactgagcatttgactgcttcccaggctttgtgctaaatgttggctctacagaaatgaaagacctagaccctgcctttcagaggctcataatctagtatttacatctccagttgtcaacaggtctaacacattaccaccaccactagaagtggtgcgttttaatgcattttatttggcttatgtactatctttatttgctgacgatcaactcccccaaataaagctatttggatatctttcttgttatccattctttcagacatattggcttacccaggtgattagagtgcagggtaactgccttaagaagctacagtggcattgatacttacacatatccaggccaactaataggtgtgaccatttctttgttttatgctctagtgtagagcttgactccaccttactttccggctgccatccagttaacatacccacaggattcttagactaggcatacatcattgtatatattctgcctaaaagtttgtaaaatctagtggtggcatttagctcttttggcaataaaaactatatgtgagaatttcgtggccttgactgagctgtgtatggcctcactcttcaattctgttgtcagcctatgttccacaatcatttgtgtgtgtggacctcaagaatttcagtcaacccggcaacacatgcagtgccccttccgggaacactggtgatcttctggtctcttggtttggagttaattaaacattgtcgggagaattccttcatttccttctggagtcctttttgggcatacaaaaatctagcacttgaagccacttaatcaaatatcatatccacacacctgcagttctttctctgtgtccacaaacatggttttacacttggatgatgtagttaggctcaactccatttgtagtgagaaacatttgaagcttgtccccactcaacaatgatgatgcacttaggcttaccttcgtaatatgggtaaatgtctcaggttagccaaatgtacctagggtcagagggcatatgctctgatatggaattttggaggtcattccctgcctttgtcctctgctctaaggctcatgtcactcgcatcatgctgtgacatgaaacaatattgcatcgtagggagtgcatagtagactatgttgttcaattatcatgagattaccacatactcttgcctggaatcttgccagcaatagtgaacaaagagatgacccaagcaactttctcacttttattcttgaagactaaatggcatccttaaaatctgatggttttctttgtacctttctggttgagtaaagaataagatagtctttttcttttttggaaaaatcgtatggctagtacaggaaatcaaggagatttttagctaatttagtaaaaaagtcagaggtggaacagaaaatacaccggctgaaaaaggagatgattgatttctaggaaatgggagattgtttggtatatttacagtaatgaagaagagttcttcctggaacaaaagtactgaataaataacaacaagagacaaaaaagaaaaatgcatttccctggtacacaaaccttgaagctcatgctttttgccattaggaattctgaacatgtcttgaattcttagactttcttgatttttaaaatctaatatttaattccaaaataatttttattcatgtctgcgttttctttgttttccccctgagttatctgtgtcctctgaaagtttaaaaacaagtgatttttttttctcatcttgttggcggagacatacaataggctgcctctccccttctctgtggaaagaatggaaacatagtaagtggccagaggagctccatacggattgacattccttgcttctgcttttgaagttaagatggtcacgagagagaaaaatatttttggttccaagcctaagaaaaggacattccttttagtcttggcattcttgttttcatggtgttgatttctctttgaattatcattagtaccattaataaatcacatctgaacgtgaaatcacttttgcaagttcttcccctctccacacccttgattatagaaaaggtgacgtttcttgatatttatctgaagtagcttagagtatgttttcctggctttttgttcccccctctggatgggttcccattgttgatcaagcatattcaagagagttttttcccaagagtcctgagagacccatccatgcattctattctgttaaacaaggaaaataataataataatgtt

SEQ ID NO: 134331 - DNA, 3949 bp, Homo sapiens
taaaattggtggtggcccaaggtcattggtagaactaatggaccatttgaaaattattagcagctggtttaatagagttttaataactacagctgtgagaaaatccaagtacaaggtatttggaatgttccctctgaggtcctttccttttgttctataataatcctggcatccatttaacgaaagtgcaactcagaagattaggtagctatatacgtaagcatatcatgcaggctttatttgctttaggtttttaccattaaaaatatttttaggcatcatcaaacttgtcacacaacctgcacatccccatgccccactcaataacaccacaatctcagggtctcacagtgttggagaatttccatggctcatctaagagttcttctcacttaacattttttattgaaaatttttaccgtatctaaggatttgtggggttcaatttgccaaactccaaggcagtggaaaagaagacaactgcatcaagtcagtttctggttttatatagtttaacagaagaataatttgcttagatcttcgccttcatatttggaggcatatactcacacacacacacatgcacacacacacgcacacacacacacacacacacatgttatgcatagatgaataatatttagtctgcaaagaaataggcctgtttcctccgtcatctgtaccttgctaacccagagacttgacatggaggaggaatgcagagagcctttcacccttaatggattccacagctgtgagtcaccctggccccaggcttctcgcctttgcctcatcccattcctgctctcacagtcagaggtctggatctccagttactgactttggaactagggggaagatgacacaggtgacataaaacaagagcccccttctatatctcagagcaaattcctgaaatatactaccaaaacataaaagtgtggacgtcaactttagacaaatccttgccttacattgatttgcagagctctttagaaatcagaccatggctttcagtatacattatataaatgtgttcttcacaacacgatgccaagaagcagatgtgctctctgagacccacagaggtcaagcaacttccccaaaatcatagctggttgattgccaggacagagacccaaaccttgtcttctgaccagccctttccagtacaccatggatgactcacccacaaatgacaaatgctttgtagtcttttaaaggaagttggggatattcaggggacatcctctaaccttgtgagaatgtatcatcatggaaggaaatcaccatccttttcatagagtagtccttggagtcagttgctgagatggcttgctatggcttttgcaggatggattttagtgatgataaaggacatggtaaatatttggtaatataacaaatgcccatggaacttgtaaacagtactatcataattgtttccatttgtcttaaccgcactcgaagcgatatctcctaactcatccccaaactaatatgtcgaaagcaacaggctctgatggagagggaaaggggtaatgctaacagtactcaggagacggcaggaactatattttctaagagtcagattccctgctatttctgttgtctcatttaatcctcactatattgttgtgcagtggatgtaattttattgttatttctatttagcatatgagaaaacagaggctttagacaggttaagtaacttgcacacttgtactacgtggtaggtgtcaaaaaactgggatgtgaacgcaggtcagttgcgctctatgcattgtgaagtgctgcctacaaacctctttgagattattgagaaatgtgatcctgacatttctggaggactagagaagtccatgaaaatatatggctaggaattactggcaacagactatgtgcaaactgacttttagtatttcctcatttaatccttgttataatcctatgaaatagtaccatctttacactttctacagtgaggaaatggaagcagagagaggttatacaacttgccaagcaagatctgaccattgttaattgataaagactggatttaaaccggtaggtgggctgcaagcccatgctcctcactgccatactgggtgctgctaggccgaggttcaaaacaacccttgttggctgaaggtttttttgagctggctcagctctggggttggtgcattctgtaaatgatcagtttgacagtgtaggtagtagagacatgctgctttaagaaagaactttgtatctctattacagagagaagatataaagatattagttcagtcttccataacacgatataacagacttttcatttttatgcgggagggatctctaactctttagtctttatcttaaggaaaatgtaaaggtattacagggttgtaagcatgacaacagatgtgattagattagctttttaaatctctcactccagatgttcagctgcattaggtaactacctcaaggtgagtaccaatgaaaactcttaaataagtactttgttcaaaggaatccttcaaggttttctaggtctgtgctgtccagtgtggtagccctgagccacaggtggctgttgagcacttgaaacagtgaaacagcccttgaaacagtgcctgatccaaatggatatggtgctgtaagtctaaaataaactgaattttgaagcttattagaaaaaaaggatgaaatatctcattagtaagttttatattgataaatattgtaagttttctattgataaatataaaaatattaagataatatttttggatatattaggctatgtggactgtgttattgaagttaactacacttgtttctagctgctagaaaatttaaaattacatacatggctggcatgattttttaatctgacgctgctggtctaggtaatttccttgctctctagttaaataggaaatttatgggaataccattagcataggttgatgcactgcttctgagtaccctttgtttaaactattccaacctaaggtctgttgcttcttggataatattccatacctttattggcactgttcttttaaaattcagttaaaagtatcattttccatttattaccaaagagtagactgttcttgacatatgttagaaaaaattgagcttagaccacagctcattagttaactctggatgggtcagaaagtggtgacctggttattagacagagtgcaccaagcattagcttctgcccgtgctcccttctaaatatcatgtaggcttgacccctcctcttcatccccagtgcgtcgtctggcccaggcttcctttatctcttccctggaccatctcagcagctgcttagcagcctgtttcccaccatcctcttcacctctaggagtccctcatgatgctagcaaaataatcttgatagggcacagctttcgttatatcacattgccctgattaaggatgataagagatccctgtttctgtccgaatgaagggagggagggaaggctctgacatttgaaactggatagatcttacgttatttaatccctatgaaatggatattttttagtcccattatacaggtcaggaagttggaggtcctgttgtctttctttgctaaaacctatgttagttctagtgacctgtgctgattgctagctttcaagaacattcatggaaacaaaaacttggaactcctgtaatgccatctttttgggggtgggaatatgtattgggttcttctttcttacatatgttcatggaattattcatagacaaaccattcagtctggttatgatgttcacctcccctctacatcctggttttatttacttatgagaagaaatgcaatgcaaaaaaaacaagaacattcattatctaacccgccctttctagccttaaatcatgtccttttctttcccaatggtctaatcataactgccctctccatctctttacttg

SEQ ID NO: 134332 - DNA, 1647 bp, Homo sapiens
ggagcacagtaatataatatgcacaaggatatgagaaaaggaagacaaaggtagaagtatccttaagtttgaaaatgccagatctgctagacagtcttaagacaaggatggcattgagattagggaaggagaatagagagggaaagaggccagcagcagggccctgctgatccatggattcgcctccagccacaagccagtccctagctcatggccatatgggactgaggctaaagccgtgctctaattctgatcctcagcttctccaccagccctctccctccccctacaaacatacagccttgcagttcctcagcattagcaaatgtgtaattccttatttcgtcagtgctaagttgcacttttccccacatttatacatttctcaaaagggatgcatgttatcatcagtttatatttaatgtgcatggagtcctctcttgaaactttgttattaaactaagtcttataataacatttggaggaagaactccaaatagaggaagaacaatgtatgggttctggactctgcctggagatgggtttgaacagaacagaacacagtccctgctttcaagaaactcacaatgcgctgtggggaaagagacaactaagtggatggtgctgtgtgaaaatgtttgggagattcaggggtccctaggaagggtctaccccagccttgaggtgccaggaaaggccttctagagaaagtggtactcaattgggtatgattttgtgctaacccttctggaggtggagggggggtcatttggtagtgtctccagagagacagttgaagcactgttggttgtcactactggggatgagggaagatgctaccagcatctagtggggatgtcagggatactgctaaatatcctacaatgcccaggacagcctctcacaataattatcaggcttcaaatgggaatagcaccccgagtttgagaaaccctcctgtaagttgagattgagggatgaatacaaattggtggtgctgggggaggaggtcagggtggagagagtcataggtgtccaggaaagggagttatttggaggaagagtttgccatgatggagaatggtacagaaacaatggttttgtatggtttagaagcaaaagtatcctattattgctcctaagaaggttgttgctgaccatgatgaatttggtttagcagaatcagagttacaaaagccagatgtagaagactgaaggagaagtaaggaacatgaaagcagtttgtgaaaaggaggaattaatgataacaatggcaattgtagttaagtttttgtatatgccagaaactatgccaaatgctttatgttccttatccagattattctacacaaccctgtgatatatggattacttggtatggatgaggaaacagaggtttggagaatttaaatagtttgtcaaggattcatgtagctaataaatcatagagtcgggattcaacctcaggcctctttgactcttacctataatttccctagagaagaagttaggccagagggacatggagagagagagagagagagagaatgtgtgtgtatgtgtgtgtgtgtgggggggggggggtgtgtgcatgcatgcatgtgtgttttctcccctagatgggtgagagtttaaggtggggatgac

SEQ ID NO: 134333 - DNA, 2735 bp, Homo sapiens
ggtgtgtgtttgggagaggagggtctccctttcccatttctgcagctggggcactcacagtatttgcagtgtctcctgggtcctgcaggagcagtctgctcttttcagagggcctgtggggtcctcttgggattgctggtttgttcttgcagtcaatctggagctaaaattcacaatgcaagcctccgcatgctgctctgcctggagctacaatctattcctgcctcccttctgccgtgataacagagatccctgcttttcctttaaaggtatgggtagagcaatgtgttgattgagaattgatgatataaagatataatcaccaaaaattatcttcataaccttaaggctggagtttctaaaatcactgaatatggattgtctgaggttattgatttagaagtagtcattcaagaatcccagacagggtggaaaaaaagaatgtcattgtcagcagaagagtcaacattcttagtaatctgaaataagaaagttgagtttattgataactagtactttatcagtcaccccagttgttttacatttgatgattatttttaaatgtttaacgtgttgaaatttgttgaaaatttttcacatcattaagtagaaaatgaaagtgttattcacttgggcccacgcctagataatttaccttatttgtaaattttgaaaactttatctcctcttttctagtagttgtttctcttactttgttttcttgtacaaatgcattggctagcatttccacaacaatgctaactaccagtgataatccttgtctggttttttactttaatttttctaatgtttcatcattaagtataacactgagtttatcttgaattgcatcaagtgctcttcagcctctttggtactgataaaattattattttcttttttgacattttaatatagtggagtgttgatagattttcctgtattgaaattgacttttctcagtcaaccctacttgatcttggagggatatttgtttaatgagctcctggattttattttgaatttctgcctcaatatttctaagtgacatttttctgctttttactagtatttattgtggactaagctctgtaatctgtgtcacactggatttggaaatacattggtaacaatcttgtgcttgagactttagaccagtttaaaaagcatctgatttactgattccttaatgtcacttaagatgttttggtgattaggttggctatttgactgtttgctagtctttcattgatattgtttcttcttggattaattttggtaatatatgtgtttctagacacattacattagttttacatatattgccatgagttttacatggtaattttaaaattataatacattttcctttacatttttggatagtgtctacttcttatacttattttctatatttatgttttgccctactccctttttgttgttaattaggctagctaattgttttaaattaattttatatagcatatttttaaaaaataaaagttactgaggaaattaccttatgatgtaatatattgattcctgagtttgtttttaatgtagtcaaatcttttcttcgacttttcttcttctgtctttccatttccccctgtacttgagttagatgtttgattcatttagtattattatttcttgctttataattttcatagatctgtgaaatttcctctaagtattgcttttaccagattccatatttaaatacatagcattttaaaagtcatactctactggtgagtttttatttctggttaccccagaaattacttaggagaatgttaaaaaattttctcaaatgtttgggatttttctttttttcttttttttaacatacctttatttcactgtaagtagaaattgtgtactattttttaaatttgtaatgtattatctcttaattgtggcattaaagacttctataaacctccacgggcacttgaaaacttttgtagatgtctcacagatacttgaaatgaaaatatgttttctatttccagatatagaatatgaaatgtacctcttaactcagttctatgaattacatgaattttatccttggtggtctttctccaattaatctgttaagtgcttatgcctatttcttgtatctgttgccatctttatttctttatttatttggtgctgctagagagcagaaatattcataataaatctccattgtggattgtacttttacattattaagtgttcatctctatcatgttaaaagcttttgtatcttgaatttaaccatgaataacattaatcatgatttcttccttcttttgcttggtatatgtttaatgatattagattttcaaactttttgtatcattttactatatatgtgtctcttacagacagaatccagttagagattgtttttcaatttactctggggatattttccagaggaagaattatccaattcacatttattgatatatcacatatacctaattctaattaattttatgcattctcttttatatttctgtgcaatttcctttgtcctcttcattttattatataatctgcattttctttgagttctttcctctagtaattcaaagctatagtctgtttttatttttattactgattaaattaatgttcttacacctttatttggaaatttgttaacttcagaaatgaaatagtatgagtatttctgtcctgctgtgaaagttgagaatatttgcccatatata

SEQ ID NO: 134334 - DNA, 1042 bp, Homo sapiens
tacttttatagttattgttacggaattatttattgttataaccactacatttaaggaattataattttattttgtaagtattatcaattattcaattttagttctaaatgtaagtggattcaatgctcacagcttctgcttacctctaaattacctattcttgagatcttgattttgaaccttccgttggttgtattttgaagaaaagttacttacatgctgcattctctgactatgctgattagaaaatcattttttattacttttatatatttaaaaaactggttgtgaacttagttgggaattgaatacttcggtattgttctctctttcttgagcctctacagacacagcttcactttttttctgtcatcaaatgttactgtgaaaaagtcagaggacacctgactttttctgttataattgactaattgttaaaggtcttgatgtatataggattcaatgtttagccttgaaattctgtaacctcaccaagatgtttccattttactgattcagtcttactttttcttggaataacagatactcttttatttcaactaagtattttctaccacagatttaagcatattttgttttgctttgttttgttttgctgtctacttctacgaaaccttttatctgtatgttcgatctgttttcaaaccttcttatctgtcatcttctccacttgctttcatctacttgtccttttcctctgcattttgtgcagttttttgaagactgttttccacatcatcaacattgtttttgatttgtggattttgcctcttataactttaatatatttattacttctgcaatgatattatttttgtcatcattttctttcttcaactgccagcctctctttcatcttgtgctgatgtcttgtcatcttgtctttgatctcttctttcatagaatctctgttaattgttgtatataattttcttctgtgtcctgttcctccaaaatagattttttcatgggtcgtttccatgctacatttttctgtcgtcctccaccccttgttttagtt

SEQ ID NO: 134335 - DNA, 1222 bp, Homo sapiens
taaaggatgggaattacttagaccttccaaaagcaggtaaaagtgttctacatggaggaaaaccgtgaacaaacatagagatctcaacatcttcctgattttctaagctattctcttcagaatgataacaggcttttctaagagacccttagggaagatagtttaaaagttaaagatgattcccagactttctgatacatttagatttttttatatccaacaaatggatatagataccctctaggaataaagttagataaataaagaatggataaagataaattaatatattagtaaagagagaaaaatattccaagttggtttcagaatgcagtatataatttgaagcgaaatccagtatgaacaatattctggtatcattagtctgagtcattcactagatgttccacaaagaggctggcttttttgacagacattcgtaaggctgactactcctttcctttccattttacatgaaccgaccctgctatgtccagatcctcctaaggctcgttcagctagcctcttcagtgactttgttggcagtgcacattttccataagaaacaagatgatgtttctcgtggggtagatttggcaggcataaagctactacataacattgttccgactccatgaggttggattctaaagataattcagtgttatagctcttgttcttctgtgtatacctttgtcagcaactttcagtcttccaaacatgtttccaaagtataaacacactgcttgcatgcctaagaagttctttgaatagtcaatctgcaaaaaaatggattttgtaccttttcagttactctcctgggtgtggattcagagtagaggagacacttgtggttattctgaaatctgccttcctgatgaagactcattactgagaatatacggggcatggaccttaagtgtgaatactgttgaacaactgacacgtatggaatgtctttacttgtgagttcctgtctcaaattatgaaattcaaaagattttttttctggcttcagaaaatgcatgtgccagaaggcttgggcaggttatttttcttgagacttcagtttcactctctggaaaatgaagatgttggaccaggttggactatatggtctttaagatctcctctccattggacatgatgaacctattgatggttaacttttagagtagagtcttctctttgacttaaggaaggcacaaataatatttcaata

SEQ ID NO: 134336 - DNA, 1239 bp, Homo sapiens
tttttttgagacaatctcattctgtgacccaggctggagtgcagtggcatgatctcgactcactgcaacctctgtctcccaggctcaaacagttttcctgcctcagcctcccgagtagctgggattacaggcacctgccaccaagcccggctaatttttgtgtgtgtttttaatagagaagaggttttaccatgttggctaggctggtctcgaactccttacctcaagtgatctgcccgcctcagcctcccaaagtgctaggattacaggcatgagacactgtgcccagctgacttgaccatttttaatgacatttgccccttactcacaaaactcacaggattatcaactgtgcaaaggtggatacaaaggccgtatcactaggaaagacagaccagtcacatgccttcgcctaggatttttttttttttctgaagagatttttggtaacatacccaaattagaaaaataaaactgaaaactcatcatgatatcatatagcatgagggctgctaagatcatttagaaccacacaattctaaaatcttggacctgggctctcccaggttgttgaccctctaaggatccagagactccccagccaggaccccataaagggcctctgaagacaggtgggttatatgcagagaacgaaaatacctggagatcattaagttttcagtctcagcactattgacatttggagctagataattctttgtcgtggggactgtcctgtgcgttgtagaatgcttagcagtatccatagcctttacccacagatgctgggtatgataactaaaactgcctgcagatactgccaaacagccccaagttggggcaagcggggaataaaattaccgctcgttgggactactgctttatgacaacacagggttagtagagtcatctaacactcatgaccaatctctgttggttggttggaatcctatcattcagaagctctagttcattcatttgttccttccttcattcagcgtatatttctgagtacctgttgagtacactgagtgttcccaaggctgaagagccagacagacctagactccttctaagggtacttgtgttctggtgggaagaaaagaccacaaacaaacaagggtcatgccaatagtgaaggaaataaagtagtggattgtggtagagagaaactgtgtgtgggttggtggtgtgagtaggggtttcaattttgtagattttgtaagggttgggagtggt

SEQ ID NO: 134337 - DNA, 1038 bp, Homo sapiens
cttggtctttcatgatgtggaagatgacttgtactgcagcttctgcttactctgcgtcttaatcagttctgtaatgaagacccagcagcatatctgcaacttccctttaattttacaatttttgtaatgagagttcttgtgtgaaaagtgtctgtagaaacccagccagcattctgaagagtcgataaagcaacaccgtgattttctgtctctgctgtttgggcgaggtttagctctggggggggagaaatcagttatctgttgttctaagtacaagggcaagaagagctgcagtttccaaggaacttcctggtgaacccatgacatttcagagaattcctcaatacttattatttctcacttactcattcttaggacaccaagaatgggttcccatcatttgaaaggacatgatgagctggaatctcatttatcatggttgcattttgagaatttcattgagggggagtcgtcttcattttgttttgttttgtttctaaaccacatctcaagaaaattgtcaagacgcttctcagaattagaattatccagtgaactgcaagttcccctttacagacaatgaagtctaaagctactgagatatcagcctgcttcctccctttcttttcttgtcccttctcttcttttatctccttattcaaatcacacgcttccttttctacggacaggagagctggcagactgcctattggcctgttggcctcaattagccttatatcattgcaaaggaatgcatgaattctccagaaggtatgtagtatctctttctgtatgagacacttactacctgctttcataacaggtcactcagccggaatgacttcttatttacatatccaacatttttagccacttggattacatccctagatgctcatttcattttaatgatgattccaaaggtatctattaagaaatagtactccagcatactctgtagtacttgaaaactttatgcaggagagcgatcctaaaataaaaagtaacctgaaggctagcatccttggccagtaggtg
